United States Patent Application Publication US 2007/0048756 A1 - sequence listing, part 8

SEQ ID NO: 253701 - DNA, 33 bp, Homo sapien
aagcatggctaatagacactaaattgctactgt

SEQ ID NO: 253702 - DNA, 33 bp, Homo sapien
aagcatggctaatagatactaaattgctactgt

SEQ ID NO: 253703 - DNA, 33 bp, Homo sapien
atgatattaggagaaagtctctgttcagtgctg

SEQ ID NO: 253704 - DNA, 33 bp, Homo sapien
atgatattaggagaaattctctgttcagtgctg

SEQ ID NO: 253705 - DNA, 33 bp, Homo sapien
tacaatccaccatgtaataaaaagtcaaataaa

SEQ ID NO: 253706 - DNA, 33 bp, Homo sapien
tacaatccaccatgtagtaaaaagtcaaataaa

SEQ ID NO: 253707 - DNA, 33 bp, Homo sapien
tcaatagtttcttagcggccaaacatacaaaat

SEQ ID NO: 253708 - DNA, 33 bp, Homo sapien
tcaatagtttcttagctgccaaacatacaaaat

SEQ ID NO: 253709 - DNA, 33 bp, Homo sapien
aaataagtgaaaaatgaaactaagtgagaggct

SEQ ID NO: 253710 - DNA, 33 bp, Homo sapien
aaataagtgaaaaatgtaactaagtgagaggct

SEQ ID NO: 253711 - DNA, 33 bp, Homo sapien
gctcctttggtaataacgaatgctatggcaacg

SEQ ID NO: 253712 - DNA, 33 bp, Homo sapien
gctcctttggtaataatgaatgctatggcaacg

SEQ ID NO: 253713 - DNA, 33 bp, Homo sapien
atttccttctcactaactgtctctatccttatg

SEQ ID NO: 253714 - DNA, 33 bp, Homo sapien
atttccttctcactaagtgtctctatccttatg

SEQ ID NO: 253715 - DNA, 33 bp, Homo sapien
cagcttggctgcagtacgatcaggttctgtccc

SEQ ID NO: 253716 - DNA, 33 bp, Homo sapien
cagcttggctgcagtaggatcaggttctgtccc

SEQ ID NO: 253717 - DNA, 33 bp, Homo sapien
tgatgggttaacctcacgatgtggatgaacttc

SEQ ID NO: 253718 - DNA, 33 bp, Homo sapien
tgatgggttaacctcatgatgtggatgaacttc

SEQ ID NO: 253719 - DNA, 33 bp, Homo sapien
tcttctcaacccatgtcacacacacagtcaaag

SEQ ID NO: 253720 - DNA, 33 bp, Homo sapien
tcttctcaacccatgttacacacacagtcaaag

SEQ ID NO: 253721 - DNA, 33 bp, Homo sapien
atcacttgaaatactcacgacaagtcattcagg

SEQ ID NO: 253722 - DNA, 33 bp, Homo sapien
atcacttgaaatactctcgacaagtcattcagg

SEQ ID NO: 253723 - DNA, 33 bp, Homo sapien
acctcatggtccaagagccaggaagagatggtt

SEQ ID NO: 253724 - DNA, 33 bp, Homo sapien
acctcatggtccaagatccaggaagagatggtt

SEQ ID NO: 253725 - DNA, 33 bp, Homo sapien
aatggacatcattccacgtgttatgattgggaa

SEQ ID NO: 253726 - DNA, 33 bp, Homo sapien
aatggacatcattccatgtgttatgattgggaa

SEQ ID NO: 253727 - DNA, 33 bp, Homo sapien
acatggaagatggccagaaaaggtgagcttgct

SEQ ID NO: 253728 - DNA, 33 bp, Homo sapien
acatggaagatggccataaaaggtgagcttgct

SEQ ID NO: 253729 - DNA, 33 bp, Homo sapien
atgtgcaagttcctgacgcagtataaagtgcaa

SEQ ID NO: 253730 - DNA, 33 bp, Homo sapien
atgtgcaagttcctgatgcagtataaagtgcaa

SEQ ID NO: 253731 - DNA, 33 bp, Homo sapien
agtattgaatacctagaaaggcccctgtcttcc

SEQ ID NO: 253732 - DNA, 33 bp, Homo sapien
agtattgaatacctagcaaggcccctgtcttcc

SEQ ID NO: 253733 - DNA, 33 bp, Homo sapien
ctgtgtgaccagggtaacatggagagcacacag

SEQ ID NO: 253734 - DNA, 33 bp, Homo sapien
ctgtgtgaccagggtagcatggagagcacacag

SEQ ID NO: 253735 - DNA, 33 bp, Homo sapien
cctccaaaatatatccagagttaaccctctact

SEQ ID NO: 253736 - DNA, 33 bp, Homo sapien
cctccaaaatatatccggagttaaccctctact

SEQ ID NO: 253737 - DNA, 33 bp, Homo sapien
tcagggtgatggaaaccgggtcattcacaatcc

SEQ ID NO: 253738 - DNA, 33 bp, Homo sapien
tcagggtgatggaaacggggtcattcacaatcc

SEQ ID NO: 253739 - DNA, 33 bp, Homo sapien
gcagagaaagcataaccgcccttgacaaaacgg

SEQ ID NO: 253740 - DNA, 33 bp, Homo sapien
gcagagaaagcataactgcccttgacaaaacgg

SEQ ID NO: 253741 - DNA, 33 bp, Homo sapien
gccaaaattcatcttccaagactattccagaga

SEQ ID NO: 253742 - DNA, 33 bp, Homo sapien
gccaaaattcatcttctaagactattccagaga

SEQ ID NO: 253743 - DNA, 33 bp, Homo sapien
gtcaatagttacaacaccaaataggcaggaaga

SEQ ID NO: 253744 - DNA, 33 bp, Homo sapien
gtcaatagttacaacatcaaataggcaggaaga

SEQ ID NO: 253745 - DNA, 33 bp, Homo sapien
attctctacatgtgaccgctaaactctgagtgg

SEQ ID NO: 253746 - DNA, 33 bp, Homo sapien
attctctacatgtgactgctaaactctgagtgg

SEQ ID NO: 253747 - DNA, 33 bp, Homo sapien
gacactgctccatagacgtgggtctcatttccg

SEQ ID NO: 253748 - DNA, 33 bp, Homo sapien
gacactgctccatagatgtgggtctcatttccg

SEQ ID NO: 253749 - DNA, 33 bp, Homo sapien
agaatagaatagaacgaaatgatgaatggatga

SEQ ID NO: 253750 - DNA, 33 bp, Homo sapien
agaatagaatagaacggaatgatgaatggatga

SEQ ID NO: 253751 - DNA, 33 bp, Homo sapien
ggaaggaagaacacaccgatatggacatgggaa

SEQ ID NO: 253752 - DNA, 33 bp, Homo sapien
ggaaggaagaacacactgatatggacatgggaa

SEQ ID NO: 253753 - DNA, 33 bp, Homo sapien
tccccagattcaataactggcttgaaggattaa

SEQ ID NO: 253754 - DNA, 33 bp, Homo sapien
tccccagattcaataattggcttgaaggattaa

SEQ ID NO: 253755 - DNA, 33 bp, Homo sapien
ctactcttaggaatcacccagtatttaagaatt

SEQ ID NO: 253756 - DNA, 33 bp, Homo sapien
ctactcttaggaatcatccagtatttaagaatt

SEQ ID NO: 253757 - DNA, 33 bp, Homo sapien
agggatgctacgcaaaagttactgccattttct

SEQ ID NO: 253758 - DNA, 33 bp, Homo sapien
agggatgctacgcaaaggttactgccattttct

SEQ ID NO: 253759 - DNA, 33 bp, Homo sapien
agtattactgaaatgcagaactcacaaatgtgc

SEQ ID NO: 253760 - DNA, 33 bp, Homo sapien
agtattactgaaatgccgaactcacaaatgtgc

SEQ ID NO: 253761 - DNA, 33 bp, Homo sapien
atgccatgtatttccacgtaaggtctattagga

SEQ ID NO: 253762 - DNA, 33 bp, Homo sapien
atgccatgtatttccatgtaaggtctattagga

SEQ ID NO: 253763 - DNA, 33 bp, Homo sapien
ggaagataatgagttacggaatggtgtcatttg

SEQ ID NO: 253764 - DNA, 33 bp, Homo sapien
ggaagataatgagttatggaatggtgtcatttg

SEQ ID NO: 253765 - DNA, 33 bp, Homo sapien
aggcgaaaagttaaacaatcagccagtgaaact

SEQ ID NO: 253766 - DNA, 33 bp, Homo sapien
aggcgaaaagttaaacgatcagccagtgaaact

SEQ ID NO: 253767 - DNA, 33 bp, Homo sapien
aggaattttgcctgtgaattaaaggacctgctc

SEQ ID NO: 253768 - DNA, 33 bp, Homo sapien
aggaattttgcctgtgtattaaaggacctgctc

SEQ ID NO: 253769 - DNA, 33 bp, Homo sapien
gatggataatgactcaaaaaggagctgaggtgg

SEQ ID NO: 253770 - DNA, 33 bp, Homo sapien
gatggataatgactcagaaaggagctgaggtgg

SEQ ID NO: 253771 - DNA, 33 bp, Homo sapien
gtcccttccagtaaagacaaggggcactcaggc

SEQ ID NO: 253772 - DNA, 33 bp, Homo sapien
gtcccttccagtaaaggcaaggggcactcaggc

SEQ ID NO: 253773 - DNA, 33 bp, Homo sapien
tggcaagaaaagtccaatcacaccaagaaacat

SEQ ID NO: 253774 - DNA, 33 bp, Homo sapien
tggcaagaaaagtccagtcacaccaagaaacat

SEQ ID NO: 253775 - DNA, 33 bp, Homo sapien
gatttaatctttacaacacaccttaacttctct

SEQ ID NO: 253776 - DNA, 33 bp, Homo sapien
gatttaatctttacaagacaccttaacttctct

SEQ ID NO: 253777 - DNA, 33 bp, Homo sapien
caccatattttaatacagattcaagtcaaagac

SEQ ID NO: 253778 - DNA, 33 bp, Homo sapien
caccatattttaatacggattcaagtcaaagac

SEQ ID NO: 253779 - DNA, 33 bp, Homo sapien
gacataaccaagactgaaaaatgtaggaaggga

SEQ ID NO: 253780 - DNA, 33 bp, Homo sapien
gacataaccaagactggaaaatgtaggaaggga

SEQ ID NO: 253781 - DNA, 33 bp, Homo sapien
aagatgacatactcccaggcttcgggtacaatg

SEQ ID NO: 253782 - DNA, 33 bp, Homo sapien
aagatgacatactcccgggcttcgggtacaatg

SEQ ID NO: 253783 - DNA, 33 bp, Homo sapien
atttcatcactcaccactcaatagtacaaaaat

SEQ ID NO: 253784 - DNA, 33 bp, Homo sapien
atttcatcactcaccattcaatagtacaaaaat

SEQ ID NO: 253785 - DNA, 33 bp, Homo sapien
gcaattgatgaaggtaagaaactagataaatcc

SEQ ID NO: 253786 - DNA, 33 bp, Homo sapien
gcaattgatgaaggtacgaaactagataaatcc

SEQ ID NO: 253787 - DNA, 33 bp, Homo sapien
gttgggcattgtcttacacgtttactagccatt

SEQ ID NO: 253788 - DNA, 33 bp, Homo sapien
gttgggcattgtcttagacgtttactagccatt

SEQ ID NO: 253789 - DNA, 33 bp, Homo sapien
gtattggacagaaacactggataaagatagaaa

SEQ ID NO: 253790 - DNA, 33 bp, Homo sapien
gtattggacagaaacattggataaagatagaaa

SEQ ID NO: 253791 - DNA, 33 bp, Homo sapien
gccaggagaagcctcagtagcagttactggttc

SEQ ID NO: 253792 - DNA, 33 bp, Homo sapien
gccaggagaagcctcattagcagttactggttc

SEQ ID NO: 253793 - DNA, 33 bp, Homo sapien
atcccttactctgtgccaggcataataagaagt

SEQ ID NO: 253794 - DNA, 33 bp, Homo sapien
atcccttactctgtgctaggcataataagaagt

SEQ ID NO: 253795 - DNA, 33 bp, Homo sapien
taaccataaataacagaagaagaagatgtaggg

SEQ ID NO: 253796 - DNA, 33 bp, Homo sapien
taaccataaataacaggagaagaagatgtaggg

SEQ ID NO: 253797 - DNA, 33 bp, Homo sapien
tattatatctgtatgccaggagacatattctca

SEQ ID NO: 253798 - DNA, 33 bp, Homo sapien
tattatatctgtatgcgaggagacatattctca

SEQ ID NO: 253799 - DNA, 33 bp, Homo sapien
gccagtgagcctgacaataggtgcttagtatgg

SEQ ID NO: 253800 - DNA, 33 bp, Homo sapien
gccagtgagcctgacagtaggtgcttagtatgg

SEQ ID NO: 253801 - DNA, 33 bp, Homo sapien
ggtgtattatttaagacggcaattgacaaaagc

SEQ ID NO: 253802 - DNA, 33 bp, Homo sapien
ggtgtattatttaagatggcaattgacaaaagc

SEQ ID NO: 253803 - DNA, 33 bp, Homo sapien
ctctcccatactctgcaaactttaatccttttc

SEQ ID NO: 253804 - DNA, 33 bp, Homo sapien
ctctcccatactctgcgaactttaatccttttc

SEQ ID NO: 253805 - DNA, 33 bp, Homo sapien
agagaaacaaagacaaagaaggcaactgatttc

SEQ ID NO: 253806 - DNA, 33 bp, Homo sapien
agagaaacaaagacaaggaaggcaactgatttc

SEQ ID NO: 253807 - DNA, 33 bp, Homo sapien
ctgacacaatgcactgaacagaatacaggatca

SEQ ID NO: 253808 - DNA, 33 bp, Homo sapien
ctgacacaatgcactgcacagaatacaggatca

SEQ ID NO: 253809 - DNA, 33 bp, Homo sapien
ggaaggcgaaggggaaacaaggcttgtcttaca

SEQ ID NO: 253810 - DNA, 33 bp, Homo sapien
ggaaggcgaaggggaagcaaggcttgtcttaca

SEQ ID NO: 253811 - DNA, 33 bp, Homo sapien
aattcagatccaagaaagcaagaccaggacaca

SEQ ID NO: 253812 - DNA, 33 bp, Homo sapien
aattcagatccaagaaggcaagaccaggacaca

SEQ ID NO: 253813 - DNA, 33 bp, Homo sapien
atatggaacatccaccaatatattttgctcaaa

SEQ ID NO: 253814 - DNA, 33 bp, Homo sapien
atatggaacatccacccatatattttgctcaaa

SEQ ID NO: 253815 - DNA, 33 bp, Homo sapien
gaggcaagaaagaaaccgagtcattctgccagg

SEQ ID NO: 253816 - DNA, 33 bp, Homo sapien
gaggcaagaaagaaactgagtcattctgccagg

SEQ ID NO: 253817 - DNA, 33 bp, Homo sapien
cctcagagctgaaaaacgattctgagaaaaagc

SEQ ID NO: 253818 - DNA, 33 bp, Homo sapien
cctcagagctgaaaaatgattctgagaaaaagc

SEQ ID NO: 253819 - DNA, 33 bp, Homo sapien
cacagtagtcaacctcaaatatgtccttgatgg

SEQ ID NO: 253820 - DNA, 33 bp, Homo sapien
cacagtagtcaacctcgaatatgtccttgatgg

SEQ ID NO: 253821 - DNA, 33 bp, Homo sapien
cttggactcttccttgacaacgcttattacaac

SEQ ID NO: 253822 - DNA, 33 bp, Homo sapien
cttggactcttccttggcaacgcttattacaac

SEQ ID NO: 253823 - DNA, 33 bp, Homo sapien
ctacgtgagaatgcaaaaaagagggaggctcaa

SEQ ID NO: 253824 - DNA, 33 bp, Homo sapien
ctacgtgagaatgcaacaaagagggaggctcaa

SEQ ID NO: 253825 - DNA, 33 bp, Homo sapien
ctggtgttgctcaaaccagtatcaggagatgag

SEQ ID NO: 253826 - DNA, 33 bp, Homo sapien
ctggtgttgctcaaacgagtatcaggagatgag

SEQ ID NO: 253827 - DNA, 33 bp, Homo sapien
atatcaaatagaagaaaaacaagtcactctcca

SEQ ID NO: 253828 - DNA, 33 bp, Homo sapien
atatcaaatagaagaagaacaagtcactctcca

SEQ ID NO: 253829 - DNA, 33 bp, Homo sapien
ttcctttcctgtatgtcaatctgttagcacttc

SEQ ID NO: 253830 - DNA, 33 bp, Homo sapien
ttcctttcctgtatgtgaatctgttagcacttc

SEQ ID NO: 253831 - DNA, 33 bp, Homo sapien
gtgagagttaagacatcagacattgagtacata

SEQ ID NO: 253832 - DNA, 33 bp, Homo sapien
gtgagagttaagacattagacattgagtacata

SEQ ID NO: 253833 - DNA, 33 bp, Homo sapien
caacaactgtataacactgtaactgcctaaagc

SEQ ID NO: 253834 - DNA, 33 bp, Homo sapien
caacaactgtataacattgtaactgcctaaagc

SEQ ID NO: 253835 - DNA, 33 bp, Homo sapien
cctgagattgtcacaaacctttagttagtttcc

SEQ ID NO: 253836 - DNA, 33 bp, Homo sapien
cctgagattgtcacaagcctttagttagtttcc

SEQ ID NO: 253837 - DNA, 33 bp, Homo sapien
cccagacaacagtgccacttcaaaaagaccaag

SEQ ID NO: 253838 - DNA, 33 bp, Homo sapien
cccagacaacagtgccgcttcaaaaagaccaag

SEQ ID NO: 253839 - DNA, 33 bp, Homo sapien
agatgaatgaatgagcgcaagggctatttgtcg

SEQ ID NO: 253840 - DNA, 33 bp, Homo sapien
agatgaatgaatgagctcaagggctatttgtcg

SEQ ID NO: 253841 - DNA, 33 bp, Homo sapien
gttgttgcatctaccactactttgttcttcttc

SEQ ID NO: 253842 - DNA, 33 bp, Homo sapien
gttgttgcatctaccagtactttgttcttcttc

SEQ ID NO: 253843 - DNA, 33 bp, Homo sapien
ctcaggaggaagagtaagtggcacagaaaagag

SEQ ID NO: 253844 - DNA, 33 bp, Homo sapien
ctcaggaggaagagtaggtggcacagaaaagag

SEQ ID NO: 253845 - DNA, 33 bp, Homo sapien
tctataacgagagacacggtataaataccctgg

SEQ ID NO: 253846 - DNA, 33 bp, Homo sapien
tctataacgagagacatggtataaataccctgg

SEQ ID NO: 253847 - DNA, 33 bp, Homo sapien
tgcagatgaatacaaacataagaaagaagttta

SEQ ID NO: 253848 - DNA, 33 bp, Homo sapien
tgcagatgaatacaaatataagaaagaagttta

SEQ ID NO: 253849 - DNA, 33 bp, Homo sapien
ctaatattctgacctaactgcctccaagtttct

SEQ ID NO: 253850 - DNA, 33 bp, Homo sapien
ctaatattctgacctagctgcctccaagtttct

SEQ ID NO: 253851 - DNA, 33 bp, Homo sapien
aaaaatggagccaccacagttgctacaggtgca

SEQ ID NO: 253852 - DNA, 33 bp, Homo sapien
aaaaatggagccaccatagttgctacaggtgca

SEQ ID NO: 253853 - DNA, 33 bp, Homo sapien
tttccagaatacacaacgttctttttctgcctt

SEQ ID NO: 253854 - DNA, 33 bp, Homo sapien
tttccagaatacacaatgttctttttctgcctt

SEQ ID NO: 253855 - DNA, 33 bp, Homo sapien
ggcctctttcataagaacactcatccattcata

SEQ ID NO: 253856 - DNA, 33 bp, Homo sapien
ggcctctttcataagatcactcatccattcata

SEQ ID NO: 253857 - DNA, 33 bp, Homo sapien
aaggagacagctgccacgtccaacttgttctgg

SEQ ID NO: 253858 - DNA, 33 bp, Homo sapien
aaggagacagctgccatgtccaacttgttctgg

SEQ ID NO: 253859 - DNA, 33 bp, Homo sapien
aagagttgtggaattacaaagcttaggcagctt

SEQ ID NO: 253860 - DNA, 33 bp, Homo sapien
aagagttgtggaattataaagcttaggcagctt

SEQ ID NO: 253861 - DNA, 33 bp, Homo sapien
aagaagtatgaaaagacgatcaacaggtttgga

SEQ ID NO: 253862 - DNA, 33 bp, Homo sapien
aagaagtatgaaaagatgatcaacaggtttgga

SEQ ID NO: 253863 - DNA, 33 bp, Homo sapien
tggaatacagttagccaagtagtttcctttcta

SEQ ID NO: 253864 - DNA, 33 bp, Homo sapien
tggaatacagttagcctagtagtttcctttcta

SEQ ID NO: 253865 - DNA, 33 bp, Homo sapien
gaatgggatctctgtcaaggttccagcttctgg

SEQ ID NO: 253866 - DNA, 33 bp, Homo sapien
gaatgggatctctgtcgaggttccagcttctgg

SEQ ID NO: 253867 - DNA, 33 bp, Homo sapien
ttgaacgcttatttggaaaaacttaacagtgtt

SEQ ID NO: 253868 - DNA, 33 bp, Homo sapien
ttgaacgcttatttgggaaaacttaacagtgtt

SEQ ID NO: 253869 - DNA, 33 bp, Homo sapien
catccttgcttttcacaaactccacttcgcaca

SEQ ID NO: 253870 - DNA, 33 bp, Homo sapien
catccttgcttttcacgaactccacttcgcaca

SEQ ID NO: 253871 - DNA, 33 bp, Homo sapien
tcttatgcaatgcttgcagggatttttgaagct

SEQ ID NO: 253872 - DNA, 33 bp, Homo sapien
tcttatgcaatgcttgtagggatttttgaagct

SEQ ID NO: 253873 - DNA, 33 bp, Homo sapien
tggcatttcaccctccacgctcattcctgcagt

SEQ ID NO: 253874 - DNA, 33 bp, Homo sapien
tggcatttcaccctccgcgctcattcctgcagt

SEQ ID NO: 253875 - DNA, 33 bp, Homo sapien
attataatgataacacagatttgagtagaataa

SEQ ID NO: 253876 - DNA, 33 bp, Homo sapien
attataatgataacacggatttgagtagaataa

SEQ ID NO: 253877 - DNA, 33 bp, Homo sapien
gccaaagaattcactgaactaatggattattga

SEQ ID NO: 253878 - DNA, 33 bp, Homo sapien
gccaaagaattcactgcactaatggattattga

SEQ ID NO: 253879 - DNA, 33 bp, Homo sapien
tgatggaccggccaacactttttcagagcacca

SEQ ID NO: 253880 - DNA, 33 bp, Homo sapien
tgatggaccggccaacgctttttcagagcacca

SEQ ID NO: 253881 - DNA, 33 bp, Homo sapien
tcaacacgaattagtcactgaaaggaggactat

SEQ ID NO: 253882 - DNA, 33 bp, Homo sapien
tcaacacgaattagtcgctgaaaggaggactat

SEQ ID NO: 253883 - DNA, 33 bp, Homo sapien
tccaacagataattgacgggcatgaacagtgtt

SEQ ID NO: 253884 - DNA, 33 bp, Homo sapien
tccaacagataattgatgggcatgaacagtgtt

SEQ ID NO: 253885 - DNA, 33 bp, Homo sapien
acaactgcaggttcctaagcaagactgcagcat

SEQ ID NO: 253886 - DNA, 33 bp, Homo sapien
acaactgcaggttcctgagcaagactgcagcat

SEQ ID NO: 253887 - DNA, 33 bp, Homo sapien
tttaaaggttttatcaatgaaactgggctataa

SEQ ID NO: 253888 - DNA, 33 bp, Homo sapien
tttaaaggttttatcagtgaaactgggctataa

SEQ ID NO: 253889 - DNA, 33 bp, Homo sapien
gactgtttaatatgtaacttcctcttgggaatt

SEQ ID NO: 253890 - DNA, 33 bp, Homo sapien
gactgtttaatatgtaccttcctcttgggaatt

SEQ ID NO: 253891 - DNA, 33 bp, Homo sapien
caacaccataattaaacgtcttagtatattgtc

SEQ ID NO: 253892 - DNA, 33 bp, Homo sapien
caacaccataattaaatgtcttagtatattgtc

SEQ ID NO: 253893 - DNA, 33 bp, Homo sapien
tgctccaaatggtcacacatctctttacagctg

SEQ ID NO: 253894 - DNA, 33 bp, Homo sapien
tgctccaaatggtcacgcatctctttacagctg

SEQ ID NO: 253895 - DNA, 33 bp, Homo sapien
attatgactccttactaacaggatgatttcact

SEQ ID NO: 253896 - DNA, 33 bp, Homo sapien
attatgactccttacttacaggatgatttcact

SEQ ID NO: 253897 - DNA, 33 bp, Homo sapien
agaaatgaaacacaaacggacagttcaccttgt

SEQ ID NO: 253898 - DNA, 33 bp, Homo sapien
agaaatgaaacacaaatggacagttcaccttgt

SEQ ID NO: 253899 - DNA, 33 bp, Homo sapien
ggttggggttgctacactgagacaggagtgttg

SEQ ID NO: 253900 - DNA, 33 bp, Homo sapien
ggttggggttgctacattgagacaggagtgttg

SEQ ID NO: 253901 - DNA, 33 bp, Homo sapien
tacgtaaaagggaacaacctgttagtgcctaga

SEQ ID NO: 253902 - DNA, 33 bp, Homo sapien
tacgtaaaagggaacagcctgttagtgcctaga

SEQ ID NO: 253903 - DNA, 33 bp, Homo sapien
ctacaaaatcagacaaaccagtttattaatttg

SEQ ID NO: 253904 - DNA, 33 bp, Homo sapien
ctacaaaatcagacaagccagtttattaatttg

SEQ ID NO: 253905 - DNA, 33 bp, Homo sapien
tcagccgacgtaacaaaccgggcagctggaggg

SEQ ID NO: 253906 - DNA, 33 bp, Homo sapien
tcagccgacgtaacaagccgggcagctggaggg

SEQ ID NO: 253907 - DNA, 33 bp, Homo sapien
agcaggcttgaaaagacacccatgcaaagacac

SEQ ID NO: 253908 - DNA, 33 bp, Homo sapien
agcaggcttgaaaagatacccatgcaaagacac

SEQ ID NO: 253909 - DNA, 33 bp, Homo sapien
tcttctgcataattagacagaatctttctatgc

SEQ ID NO: 253910 - DNA, 33 bp, Homo sapien
tcttctgcataattagccagaatctttctatgc

SEQ ID NO: 253911 - DNA, 33 bp, Homo sapien
cctacagccttcattaaatttggcttcattctt

SEQ ID NO: 253912 - DNA, 33 bp, Homo sapien
cctacagccttcattagatttggcttcattctt

SEQ ID NO: 253913 - DNA, 33 bp, Homo sapien
tccaaggacctgattgaagaaaatataattatt

SEQ ID NO: 253914 - DNA, 33 bp, Homo sapien
tccaaggacctgattgcagaaaatataattatt

SEQ ID NO: 253915 - DNA, 33 bp, Homo sapien
gctaagagaaatcaacgcagcctgttgaacttc

SEQ ID NO: 253916 - DNA, 33 bp, Homo sapien
gctaagagaaatcaactcagcctgttgaacttc

SEQ ID NO: 253917 - DNA, 33 bp, Homo sapien
tgtagatttactcttcactggccttaccacaag

SEQ ID NO: 253918 - DNA, 33 bp, Homo sapien
tgtagatttactcttcgctggccttaccacaag

SEQ ID NO: 253919 - DNA, 33 bp, Homo sapien
cacatttttacaggaacgacctcttttctcttt

SEQ ID NO: 253920 - DNA, 33 bp, Homo sapien
cacatttttacaggaatgacctcttttctcttt

SEQ ID NO: 253921 - DNA, 33 bp, Homo sapien
cgggcactttccatacaaagggcagagatcgcc

SEQ ID NO: 253922 - DNA, 33 bp, Homo sapien
cgggcactttccatacgaagggcagagatcgcc

SEQ ID NO: 253923 - DNA, 33 bp, Homo sapien
tgtggttgcattttccaacagggcacctgcacc

SEQ ID NO: 253924 - DNA, 33 bp, Homo sapien
tgtggttgcattttcccacagggcacctgcacc

SEQ ID NO: 253925 - DNA, 33 bp, Homo sapien
tctgtgatagcttagcaactgctgttccagttt

SEQ ID NO: 253926 - DNA, 33 bp, Homo sapien
tctgtgatagcttagcgactgctgttccagttt

SEQ ID NO: 253927 - DNA, 33 bp, Homo sapien
ttttgccagaaagaacaaggagaagcagcagct

SEQ ID NO: 253928 - DNA, 33 bp, Homo sapien
ttttgccagaaagaacgaggagaagcagcagct

SEQ ID NO: 253929 - DNA, 33 bp, Homo sapien
atcacatgtgtagattcaatatgatatgtttgt

SEQ ID NO: 253930 - DNA, 33 bp, Homo sapien
atcacatgtgtagatttaatatgatatgtttgt

SEQ ID NO: 253931 - DNA, 33 bp, Homo sapien
ctttcctgataatgtgaattcctcatgggctgg

SEQ ID NO: 253932 - DNA, 33 bp, Homo sapien
ctttcctgataatgtggattcctcatgggctgg

SEQ ID NO: 253933 - DNA, 33 bp, Homo sapien
tttgtgaactgtcatacggcttagttttacata

SEQ ID NO: 253934 - DNA, 33 bp, Homo sapien
tttgtgaactgtcatatggcttagttttacata

SEQ ID NO: 253935 - DNA, 33 bp, Homo sapien
tggcttttgaaaacagacaagctttattgcgag

SEQ ID NO: 253936 - DNA, 33 bp, Homo sapien
tggcttttgaaaacaggcaagctttattgcgag

SEQ ID NO: 253937 - DNA, 33 bp, Homo sapien
gcctaggaatgaagaaagatctgactgtatctt

SEQ ID NO: 253938 - DNA, 33 bp, Homo sapien
gcctaggaatgaagaacgatctgactgtatctt

SEQ ID NO: 253939 - DNA, 33 bp, Homo sapien
atttccaagcaaactgcaattccaaaatctgga

SEQ ID NO: 253940 - DNA, 33 bp, Homo sapien
atttccaagcaaactgtaattccaaaatctgga

SEQ ID NO: 253941 - DNA, 33 bp, Homo sapien
tctttttatctggagaatagccctttgttgtgg

SEQ ID NO: 253942 - DNA, 33 bp, Homo sapien
tctttttatctggagagtagccctttgttgtgg

SEQ ID NO: 253943 - DNA, 33 bp, Homo sapien
aaaatcattgagcttgaaaataagtcaagaaat

SEQ ID NO: 253944 - DNA, 33 bp, Homo sapien
aaaatcattgagcttgcaaataagtcaagaaat

SEQ ID NO: 253945 - DNA, 33 bp, Homo sapien
ccatgcataagccatgcagtttataatatttgg

SEQ ID NO: 253946 - DNA, 33 bp, Homo sapien
ccatgcataagccatgtagtttataatatttgg

SEQ ID NO: 253947 - DNA, 33 bp, Homo sapien
agacttgaaatttgcaagaatatatcttaagtc

SEQ ID NO: 253948 - DNA, 33 bp, Homo sapien
agacttgaaatttgcatgaatatatcttaagtc

SEQ ID NO: 253949 - DNA, 33 bp, Homo sapien
gtgtgcgtgtatgagaaagagatttaccagtaa

SEQ ID NO: 253950 - DNA, 33 bp, Homo sapien
gtgtgcgtgtatgagagagagatttaccagtaa

SEQ ID NO: 253951 - DNA, 33 bp, Homo sapien
agcttcttctcacctacgcaaacagtacaccta

SEQ ID NO: 253952 - DNA, 33 bp, Homo sapien
agcttcttctcacctatgcaaacagtacaccta

SEQ ID NO: 253953 - DNA, 33 bp, Homo sapien
gaaaggaatgcctaaagggtttaaagcacattg

SEQ ID NO: 253954 - DNA, 33 bp, Homo sapien
gaaaggaatgcctaaatggtttaaagcacattg

SEQ ID NO: 253955 - DNA, 33 bp, Homo sapien
catgcattctttgctacctttcctctttcattc

SEQ ID NO: 253956 - DNA, 33 bp, Homo sapien
catgcattctttgctatctttcctctttcattc

SEQ ID NO: 253957 - DNA, 33 bp, Homo sapien
gagaactcagggcctacacccaatgggcacaca

SEQ ID NO: 253958 - DNA, 33 bp, Homo sapien
gagaactcagggcctatacccaatgggcacaca

SEQ ID NO: 253959 - DNA, 33 bp, Homo sapien
tgtttctaagacctggcattgggattcttcaga

SEQ ID NO: 253960 - DNA, 33 bp, Homo sapien
tgtttctaagacctggtattgggattcttcaga

SEQ ID NO: 253961 - DNA, 33 bp, Homo sapien
atcagttcctgcttcaccagctgttgatttgct

SEQ ID NO: 253962 - DNA, 33 bp, Homo sapien
atcagttcctgcttcatcagctgttgatttgct

SEQ ID NO: 253963 - DNA, 33 bp, Homo sapien
atttttggaaaagacaatctgccatagtaataa

SEQ ID NO: 253964 - DNA, 33 bp, Homo sapien
atttttggaaaagacagtctgccatagtaataa

SEQ ID NO: 253965 - DNA, 33 bp, Homo sapien
gaaggtgcaaagcagacaggccaagaacaggag

SEQ ID NO: 253966 - DNA, 33 bp, Homo sapien
gaaggtgcaaagcagagaggccaagaacaggag

SEQ ID NO: 253967 - DNA, 33 bp, Homo sapien
tcaggcagcaaatacacataccatctacccatg

SEQ ID NO: 253968 - DNA, 33 bp, Homo sapien
tcaggcagcaaatacatataccatctacccatg

SEQ ID NO: 253969 - DNA, 33 bp, Homo sapien
ttcctagctgccaataaccttcattcagctcaa

SEQ ID NO: 253970 - DNA, 33 bp, Homo sapien
ttcctagctgccaatacccttcattcagctcaa

SEQ ID NO: 253971 - DNA, 33 bp, Homo sapien
ctaatgcaaccagggacgatgcaatgacttgag

SEQ ID NO: 253972 - DNA, 33 bp, Homo sapien
ctaatgcaaccagggatgatgcaatgacttgag

SEQ ID NO: 253973 - DNA, 33 bp, Homo sapien
aaactacgcaaaagcacagaacactcatttctg

SEQ ID NO: 253974 - DNA, 33 bp, Homo sapien
aaactacgcaaaagcatagaacactcatttctg

SEQ ID NO: 253975 - DNA, 33 bp, Homo sapien
ttttccctcgccctgaccttgaaacttctgcac

SEQ ID NO: 253976 - DNA, 33 bp, Homo sapien
ttttccctcgccctgatcttgaaacttctgcac

SEQ ID NO: 253977 - DNA, 33 bp, Homo sapien
caggggctgaacatcacattcatcaaactttgg

SEQ ID NO: 253978 - DNA, 33 bp, Homo sapien
caggggctgaacatcatattcatcaaactttgg

SEQ ID NO: 253979 - DNA, 33 bp, Homo sapien
tatcgacttctgtgtcaatattcagaactacag

SEQ ID NO: 253980 - DNA, 33 bp, Homo sapien
tatcgacttctgtgtccatattcagaactacag

SEQ ID NO: 253981 - DNA, 33 bp, Homo sapien
tatagtgtcatcttgaatatggagaagaaggga

SEQ ID NO: 253982 - DNA, 33 bp, Homo sapien
tatagtgtcatcttgagtatggagaagaaggga

SEQ ID NO: 253983 - DNA, 33 bp, Homo sapien
gcctctctcaccgtcaactagaatcttggcttg

SEQ ID NO: 253984 - DNA, 33 bp, Homo sapien
gcctctctcaccgtcagctagaatcttggcttg

SEQ ID NO: 253985 - DNA, 33 bp, Homo sapien
agaatgtcacttgggaaatgctcataaatgtct

SEQ ID NO: 253986 - DNA, 33 bp, Homo sapien
agaatgtcacttgggagatgctcataaatgtct

SEQ ID NO: 253987 - DNA, 33 bp, Homo sapien
ctgcaaatgacgcgaacttcccgaggccgtacc

SEQ ID NO: 253988 - DNA, 33 bp, Homo sapien
ctgcaaatgacgcgaatttcccgaggccgtacc

SEQ ID NO: 253989 - DNA, 33 bp, Homo sapien
attccagtggagattgcacctgattgtttatta

SEQ ID NO: 253990 - DNA, 33 bp, Homo sapien
attccagtggagattgtacctgattgtttatta

SEQ ID NO: 253991 - DNA, 33 bp, Homo sapien
acgaggaagtcaggaaactggcaccgcttcgtg

SEQ ID NO: 253992 - DNA, 33 bp, Homo sapien
acgaggaagtcaggaacctggcaccgcttcgtg

SEQ ID NO: 253993 - DNA, 33 bp, Homo sapien
acctaccaatgattaacagcgtaaatttttatg

SEQ ID NO: 253994 - DNA, 33 bp, Homo sapien
acctaccaatgattaagagcgtaaatttttatg

SEQ ID NO: 253995 - DNA, 33 bp, Homo sapien
ttcacgtgcagaacaaattgttagtttttcatg

SEQ ID NO: 253996 - DNA, 33 bp, Homo sapien
ttcacgtgcagaacaagttgttagtttttcatg

SEQ ID NO: 253997 - DNA, 33 bp, Homo sapien
tttacaaaaccacagcagatcagaaatagcaaa

SEQ ID NO: 253998 - DNA, 33 bp, Homo sapien
tttacaaaaccacagcggatcagaaatagcaaa

SEQ ID NO: 253999 - DNA, 33 bp, Homo sapien
gtagaaccagattttgaagtccagattttcctg

SEQ ID NO: 254000 - DNA, 33 bp, Homo sapien
gtagaaccagattttggagtccagattttcctg

SEQ ID NO: 254001 - DNA, 33 bp, Homo sapien
aaccttcctgctcttacaattgtttgtcaaatt

SEQ ID NO: 254002 - DNA, 33 bp, Homo sapien
aaccttcctgctcttataattgtttgtcaaatt

SEQ ID NO: 254003 - DNA, 33 bp, Homo sapien
gatgaaaatgagtaagaataagcactagttgag

SEQ ID NO: 254004 - DNA, 33 bp, Homo sapien
gatgaaaatgagtaagtataagcactagttgag

SEQ ID NO: 254005 - DNA, 33 bp, Homo sapien
gagggagtcaggcaaaacaacgaatggctgtta

SEQ ID NO: 254006 - DNA, 33 bp, Homo sapien
gagggagtcaggcaaagcaacgaatggctgtta

SEQ ID NO: 254007 - DNA, 33 bp, Homo sapien
agaaccaataaaaccaacacggaatctttgaag

SEQ ID NO: 254008 - DNA, 33 bp, Homo sapien
agaaccaataaaaccatcacggaatctttgaag

SEQ ID NO: 254009 - DNA, 33 bp, Homo sapien
caaatacaaatagtcacgtgagaaatttaatgc

SEQ ID NO: 254010 - DNA, 33 bp, Homo sapien
caaatacaaatagtcatgtgagaaatttaatgc

SEQ ID NO: 254011 - DNA, 33 bp, Homo sapien
aggagactgaatctaacaaaacaaatataagca

SEQ ID NO: 254012 - DNA, 33 bp, Homo sapien
aggagactgaatctaagaaaacaaatataagca

SEQ ID NO: 254013 - DNA, 33 bp, Homo sapien
gatatttttctggacacaaaatctttcttcggt

SEQ ID NO: 254014 - DNA, 33 bp, Homo sapien
gatatttttctggacataaaatctttcttcggt

SEQ ID NO: 254015 - DNA, 33 bp, Homo sapien
cacccggcatttataaaccatcctccctgagac

SEQ ID NO: 254016 - DNA, 33 bp, Homo sapien
cacccggcatttataagccatcctccctgagac

SEQ ID NO: 254017 - DNA, 33 bp, Homo sapien
taacttggaaccccacagatgggctgaagcatg

SEQ ID NO: 254018 - DNA, 33 bp, Homo sapien
taacttggaaccccacggatgggctgaagcatg

SEQ ID NO: 254019 - DNA, 33 bp, Homo sapien
caggaaacacatggtacactcaaaatgggactg

SEQ ID NO: 254020 - DNA, 33 bp, Homo sapien
caggaaacacatggtatactcaaaatgggactg

SEQ ID NO: 254021 - DNA, 33 bp, Homo sapien
actaactccgtaccaccactccaaccaaacgaa

SEQ ID NO: 254022 - DNA, 33 bp, Homo sapien
actaactccgtaccactactccaaccaaacgaa

SEQ ID NO: 254023 - DNA, 33 bp, Homo sapien
attttctgattggagacgctgggttttcagggt

SEQ ID NO: 254024 - DNA, 33 bp, Homo sapien
attttctgattggagatgctgggttttcagggt

SEQ ID NO: 254025 - DNA, 33 bp, Homo sapien
ctcagtcagtagaggaaaatatggcctgacttc

SEQ ID NO: 254026 - DNA, 33 bp, Homo sapien
ctcagtcagtagaggagaatatggcctgacttc

SEQ ID NO: 254027 - DNA, 33 bp, Homo sapien
caaaggaagaggatccaacagggcgggctattt

SEQ ID NO: 254028 - DNA, 33 bp, Homo sapien
caaaggaagaggatccgacagggcgggctattt

SEQ ID NO: 254029 - DNA, 33 bp, Homo sapien
aaaaaatgctattacaaaaaagatgatcctttc

SEQ ID NO: 254030 - DNA, 33 bp, Homo sapien
aaaaaatgctattacagaaaagatgatcctttc

SEQ ID NO: 254031 - DNA, 33 bp, Homo sapien
tgccatctgtaatcgccgacttttattctcatg

SEQ ID NO: 254032 - DNA, 33 bp, Homo sapien
tgccatctgtaatcgctgacttttattctcatg

SEQ ID NO: 254033 - DNA, 33 bp, Homo sapien
tgtaggtggatattgacggaactaagtttctat

SEQ ID NO: 254034 - DNA, 33 bp, Homo sapien
tgtaggtggatattgatggaactaagtttctat

SEQ ID NO: 254035 - DNA, 33 bp, Homo sapien
agttgggaggctgatcaagtgaatgaatgtgaa

SEQ ID NO: 254036 - DNA, 33 bp, Homo sapien
agttgggaggctgatcgagtgaatgaatgtgaa

SEQ ID NO: 254037 - DNA, 33 bp, Homo sapien
agtggaaaaggctgtcaattgtcttattcgtct

SEQ ID NO: 254038 - DNA, 33 bp, Homo sapien
agtggaaaaggctgtcgattgtcttattcgtct

SEQ ID NO: 254039 - DNA, 33 bp, Homo sapien
tgattcgcatatactaaaagcctacagtgataa

SEQ ID NO: 254040 - DNA, 33 bp, Homo sapien
tgattcgcatatactagaagcctacagtgataa

SEQ ID NO: 254041 - DNA, 33 bp, Homo sapien
tctatttccaaataaaagtcacatcctcagggg

SEQ ID NO: 254042 - DNA, 33 bp, Homo sapien
tctatttccaaataaacgtcacatcctcagggg

SEQ ID NO: 254043 - DNA, 33 bp, Homo sapien
acatggggacaaggccaagtgatgacagagtca

SEQ ID NO: 254044 - DNA, 33 bp, Homo sapien
acatggggacaaggccgagtgatgacagagtca

SEQ ID NO: 254045 - DNA, 33 bp, Homo sapien
ctataccaaattatccaaaatgtagcagttaaa

SEQ ID NO: 254046 - DNA, 33 bp, Homo sapien
ctataccaaattatcccaaatgtagcagttaaa

SEQ ID NO: 254047 - DNA, 33 bp, Homo sapien
atgaagtaacctacacaaggttgacagatgctc

SEQ ID NO: 254048 - DNA, 33 bp, Homo sapien
atgaagtaacctacacgaggttgacagatgctc

SEQ ID NO: 254049 - DNA, 33 bp, Homo sapien
actgatccaggagtcaactgcatttatcagact

SEQ ID NO: 254050 - DNA, 33 bp, Homo sapien
actgatccaggagtcacctgcatttatcagact

SEQ ID NO: 254051 - DNA, 33 bp, Homo sapien
tacatcagcgacataaatatgtggaggagttat

SEQ ID NO: 254052 - DNA, 33 bp, Homo sapien
tacatcagcgacataagtatgtggaggagttat

SEQ ID NO: 254053 - DNA, 33 bp, Homo sapien
cccactcacccattgacggatatttgtgctttt

SEQ ID NO: 254054 - DNA, 33 bp, Homo sapien
cccactcacccattgatggatatttgtgctttt

SEQ ID NO: 254055 - DNA, 33 bp, Homo sapien
gtgagtgggtacagaaaagtggcatatccataa

SEQ ID NO: 254056 - DNA, 33 bp, Homo sapien
gtgagtgggtacagaagagtggcatatccataa

SEQ ID NO: 254057 - DNA, 33 bp, Homo sapien
aagcaaccatgtttcacagaggggaatatacac

SEQ ID NO: 254058 - DNA, 33 bp, Homo sapien
aagcaaccatgtttcatagaggggaatatacac

SEQ ID NO: 254059 - DNA, 33 bp, Homo sapien
agatgcaggtcatttaaatcactcccaaagttt

SEQ ID NO: 254060 - DNA, 33 bp, Homo sapien
agatgcaggtcatttacatcactcccaaagttt

SEQ ID NO: 254061 - DNA, 33 bp, Homo sapien
tatgccctcaaaggaacgctcttccacctggag

SEQ ID NO: 254062 - DNA, 33 bp, Homo sapien
tatgccctcaaaggaatgctcttccacctggag

SEQ ID NO: 254063 - DNA, 33 bp, Homo sapien
ggattcaacttcgcatcaatcatcacttgaaaa

SEQ ID NO: 254064 - DNA, 33 bp, Homo sapien
ggattcaacttcgcattaatcatcacttgaaaa

SEQ ID NO: 254065 - DNA, 33 bp, Homo sapien
tactaatgagaaatgcaagcatgggtttgatat

SEQ ID NO: 254066 - DNA, 33 bp, Homo sapien
tactaatgagaaatgcgagcatgggtttgatat

SEQ ID NO: 254067 - DNA, 33 bp, Homo sapien
ttcgcaagcatacatacccccctttgtctaact

SEQ ID NO: 254068 - DNA, 33 bp, Homo sapien
ttcgcaagcatacatatccccctttgtctaact

SEQ ID NO: 254069 - DNA, 33 bp, Homo sapien
tttttattgcaagtaacggtcattgagatgggc

SEQ ID NO: 254070 - DNA, 33 bp, Homo sapien
tttttattgcaagtaatggtcattgagatgggc

SEQ ID NO: 254071 - DNA, 33 bp, Homo sapien
aacttcctagaggcaacatgaagtctgttgact

SEQ ID NO: 254072 - DNA, 33 bp, Homo sapien
aacttcctagaggcaatatgaagtctgttgact

SEQ ID NO: 254073 - DNA, 33 bp, Homo sapien
tggacaccagaggatacgctgatagatcagtgt

SEQ ID NO: 254074 - DNA, 33 bp, Homo sapien
tggacaccagaggataggctgatagatcagtgt

SEQ ID NO: 254075 - DNA, 33 bp, Homo sapien
ctcgtaggttatgccacagttgggttggaaagt

SEQ ID NO: 254076 - DNA, 33 bp, Homo sapien
ctcgtaggttatgccagagttgggttggaaagt

SEQ ID NO: 254077 - DNA, 33 bp, Homo sapien
agctgtattaagagaaagtcatactggattagg

SEQ ID NO: 254078 - DNA, 33 bp, Homo sapien
agctgtattaagagaaggtcatactggattagg

SEQ ID NO: 254079 - DNA, 33 bp, Homo sapien
tcacatgggtcctcacaactcatcttgggatga

SEQ ID NO: 254080 - DNA, 33 bp, Homo sapien
tcacatgggtcctcacgactcatcttgggatga

SEQ ID NO: 254081 - DNA, 33 bp, Homo sapien
tctgctttccttctgggatctggaattttggca

SEQ ID NO: 254082 - DNA, 33 bp, Homo sapien
tctgctttccttctggtatctggaattttggca

SEQ ID NO: 254083 - DNA, 33 bp, Homo sapien
tagtaaaatgtagtgaaataacttggaagtgat

SEQ ID NO: 254084 - DNA, 33 bp, Homo sapien
tagtaaaatgtagtgacataacttggaagtgat

SEQ ID NO: 254085 - DNA, 33 bp, Homo sapien
tccctgatagcactgaagaatgcgatacaattc

SEQ ID NO: 254086 - DNA, 33 bp, Homo sapien
tccctgatagcactgatgaatgcgatacaattc

SEQ ID NO: 254087 - DNA, 33 bp, Homo sapien
aacactgcaggcacagcctcaaatctcaaggaa

SEQ ID NO: 254088 - DNA, 33 bp, Homo sapien
aacactgcaggcacagtctcaaatctcaaggaa

SEQ ID NO: 254089 - DNA, 33 bp, Homo sapien
cagtttcaatcaggaacgagccatcaggtaaga

SEQ ID NO: 254090 - DNA, 33 bp, Homo sapien
cagtttcaatcaggaatgagccatcaggtaaga

SEQ ID NO: 254091 - DNA, 33 bp, Homo sapien
acaaatgattatttgaaggcttaagcaagtgta

SEQ ID NO: 254092 - DNA, 33 bp, Homo sapien
acaaatgattatttgagggcttaagcaagtgta

SEQ ID NO: 254093 - DNA, 33 bp, Homo sapien
aggctgctaaacaaaacacaacggactcggtgg

SEQ ID NO: 254094 - DNA, 33 bp, Homo sapien
aggctgctaaacaaaatacaacggactcggtgg

SEQ ID NO: 254095 - DNA, 33 bp, Homo sapien
ctctaaaggctgcaccactaaaattagaaatag

SEQ ID NO: 254096 - DNA, 33 bp, Homo sapien
ctctaaaggctgcaccgctaaaattagaaatag

SEQ ID NO: 254097 - DNA, 33 bp, Homo sapien
agagcgccctgtgaaactggagttctgctgccg

SEQ ID NO: 254098 - DNA, 33 bp, Homo sapien
agagcgccctgtgaaattggagttctgctgccg

SEQ ID NO: 254099 - DNA, 33 bp, Homo sapien
gtaatattatgaattgcaggaatgttatactgt

SEQ ID NO: 254100 - DNA, 33 bp, Homo sapien
gtaatattatgaattgtaggaatgttatactgt

SEQ ID NO: 254101 - DNA, 33 bp, Homo sapien
tccagtttatgaggaacatcaatagtgtgaata

SEQ ID NO: 254102 - DNA, 33 bp, Homo sapien
tccagtttatgaggaatatcaatagtgtgaata

SEQ ID NO: 254103 - DNA, 33 bp, Homo sapien
aagcttataatccttacgggccatttacattct

SEQ ID NO: 254104 - DNA, 33 bp, Homo sapien
aagcttataatccttatgggccatttacattct

SEQ ID NO: 254105 - DNA, 33 bp, Homo sapien
tctttaccttgtagcacagattcacctgagaat

SEQ ID NO: 254106 - DNA, 33 bp, Homo sapien
tctttaccttgtagcatagattcacctgagaat

SEQ ID NO: 254107 - DNA, 33 bp, Homo sapien
tctttatgagctcgcacaccttattaactctca

SEQ ID NO: 254108 - DNA, 33 bp, Homo sapien
tctttatgagctcgcagaccttattaactctca

SEQ ID NO: 254109 - DNA, 33 bp, Homo sapien
gtctcgtgtgctggccgggagcattacaaagtt

SEQ ID NO: 254110 - DNA, 33 bp, Homo sapien
gtctcgtgtgctggcctggagcattacaaagtt

SEQ ID NO: 254111 - DNA, 33 bp, Homo sapien
aagagaaggtatttccacctgctttgtatcacc

SEQ ID NO: 254112 - DNA, 33 bp, Homo sapien
aagagaaggtatttccgcctgctttgtatcacc

SEQ ID NO: 254113 - DNA, 33 bp, Homo sapien
attctccaacaacagaagtgacactacactttt

SEQ ID NO: 254114 - DNA, 33 bp, Homo sapien
attctccaacaacagacgtgacactacactttt

SEQ ID NO: 254115 - DNA, 33 bp, Homo sapien
attcatcaatgatctaccttgttctatttaatc

SEQ ID NO: 254116 - DNA, 33 bp, Homo sapien
attcatcaatgatctatcttgttctatttaatc

SEQ ID NO: 254117 - DNA, 33 bp, Homo sapien
ggccttcaattagaaaatcatagttcagtgctc

SEQ ID NO: 254118 - DNA, 33 bp, Homo sapien
ggccttcaattagaaagtcatagttcagtgctc

SEQ ID NO: 254119 - DNA, 33 bp, Homo sapien
gtgaatacagccagtccccgaaggtcacgccct

SEQ ID NO: 254120 - DNA, 33 bp, Homo sapien
gtgaatacagccagtctccgaaggtcacgccct

SEQ ID NO: 254121 - DNA, 33 bp, Homo sapien
agcaaatgaccctgacaccttctttggatctgc

SEQ ID NO: 254122 - DNA, 33 bp, Homo sapien
agcaaatgaccctgacgccttctttggatctgc

SEQ ID NO: 254123 - DNA, 33 bp, Homo sapien
agaaaacgttaggaagcaattggtgtgctggcc

SEQ ID NO: 254124 - DNA, 33 bp, Homo sapien
agaaaacgttaggaagtaattggtgtgctggcc

SEQ ID NO: 254125 - DNA, 33 bp, Homo sapien
tggatgaatgaattaaacctttctcatgtcatg

SEQ ID NO: 254126 - DNA, 33 bp, Homo sapien
tggatgaatgaattaagcctttctcatgtcatg

SEQ ID NO: 254127 - DNA, 33 bp, Homo sapien
acttcccactagtggcaagtgagttcttaagaa

SEQ ID NO: 254128 - DNA, 33 bp, Homo sapien
acttcccactagtggcgagtgagttcttaagaa

SEQ ID NO: 254129 - DNA, 33 bp, Homo sapien
aatagtgaaaatattaaacatggtatcatccat

SEQ ID NO: 254130 - DNA, 33 bp, Homo sapien
aatagtgaaaatattagacatggtatcatccat

SEQ ID NO: 254131 - DNA, 33 bp, Homo sapien
gctggttccgggaagcactgctatcacagaaaa

SEQ ID NO: 254132 - DNA, 33 bp, Homo sapien
gctggttccgggaagcgctgctatcacagaaaa

SEQ ID NO: 254133 - DNA, 33 bp, Homo sapien
gaactctgaacctacaatcttcgtgagcttggg

SEQ ID NO: 254134 - DNA, 33 bp, Homo sapien
gaactctgaacctacagtcttcgtgagcttggg

SEQ ID NO: 254135 - DNA, 33 bp, Homo sapien
ttaacaatgtcactcccagagcgcaaaactgaa

SEQ ID NO: 254136 - DNA, 33 bp, Homo sapien
ttaacaatgtcactcctagagcgcaaaactgaa

SEQ ID NO: 254137 - DNA, 33 bp, Homo sapien
gtcctcaggtgctggaaacaaatggggagaagc

SEQ ID NO: 254138 - DNA, 33 bp, Homo sapien
gtcctcaggtgctggagacaaatggggagaagc

SEQ ID NO: 254139 - DNA, 33 bp, Homo sapien
aaattgacatttgttgcacgtgaatgcatcttg

SEQ ID NO: 254140 - DNA, 33 bp, Homo sapien
aaattgacatttgttgtacgtgaatgcatcttg

SEQ ID NO: 254141 - DNA, 33 bp, Homo sapien
gtctgtgcttgacgttaaacacatttactattc

SEQ ID NO: 254142 - DNA, 33 bp, Homo sapien
gtctgtgcttgacgttgaacacatttactattc

SEQ ID NO: 254143 - DNA, 33 bp, Homo sapien
ttattttatatttactaagattcccaggcaaac

SEQ ID NO: 254144 - DNA, 33 bp, Homo sapien
ttattttatatttactgagattcccaggcaaac

SEQ ID NO: 254145 - DNA, 33 bp, Homo sapien
atccgtcaatggtaaacaatgtattgtgcaatt

SEQ ID NO: 254146 - DNA, 33 bp, Homo sapien
atccgtcaatggtaaataatgtattgtgcaatt

SEQ ID NO: 254147 - DNA, 33 bp, Homo sapien
gctgagatactacacaagcttcctgagattttg

SEQ ID NO: 254148 - DNA, 33 bp, Homo sapien
gctgagatactacacatgcttcctgagattttg

SEQ ID NO: 254149 - DNA, 33 bp, Homo sapien
gtttgcacattatagtaacattaatagttgggg

SEQ ID NO: 254150 - DNA, 33 bp, Homo sapien
gtttgcacattatagtgacattaatagttgggg

SEQ ID NO: 254151 - DNA, 33 bp, Homo sapien
tgcttcttgtccattgcaggtcaataggagcct

SEQ ID NO: 254152 - DNA, 33 bp, Homo sapien
tgcttcttgtccattgtaggtcaataggagcct

SEQ ID NO: 254153 - DNA, 33 bp, Homo sapien
tactggcaactaaatccaccagaaccttctcat

SEQ ID NO: 254154 - DNA, 33 bp, Homo sapien
tactggcaactaaatcgaccagaaccttctcat

SEQ ID NO: 254155 - DNA, 33 bp, Homo sapien
agacacacccaagaacaatacttgaaatcctcc

SEQ ID NO: 254156 - DNA, 33 bp, Homo sapien
agacacacccaagaacgatacttgaaatcctcc

SEQ ID NO: 254157 - DNA, 33 bp, Homo sapien
gataggttagattgaaccacttttttctgtatg

SEQ ID NO: 254158 - DNA, 33 bp, Homo sapien
gataggttagattgaagcacttttttctgtatg

SEQ ID NO: 254159 - DNA, 33 bp, Homo sapien
catgaatcacaagacacgttctatcttttggtt

SEQ ID NO: 254160 - DNA, 33 bp, Homo sapien
catgaatcacaagacaggttctatcttttggtt

SEQ ID NO: 254161 - DNA, 33 bp, Homo sapien
ggagcgtactgattcgaatgaccaagaacacac

SEQ ID NO: 254162 - DNA, 33 bp, Homo sapien
ggagcgtactgattcggatgaccaagaacacac

SEQ ID NO: 254163 - DNA, 33 bp, Homo sapien
accatctctgcgtgcaatccccgcggaatttac

SEQ ID NO: 254164 - DNA, 33 bp, Homo sapien
accatctctgcgtgcagtccccgcggaatttac

SEQ ID NO: 254165 - DNA, 33 bp, Homo sapien
tgtggacattttcacccatgacccctgatagtt

SEQ ID NO: 254166 - DNA, 33 bp, Homo sapien
tgtggacattttcaccgatgacccctgatagtt

SEQ ID NO: 254167 - DNA, 33 bp, Homo sapien
tgagctgcatgaaaagaaaaaagaatctgacac

SEQ ID NO: 254168 - DNA, 33 bp, Homo sapien
tgagctgcatgaaaaggaaaaagaatctgacac

SEQ ID NO: 254169 - DNA, 33 bp, Homo sapien
ttattacaccagtcaactggaaactagaggtga

SEQ ID NO: 254170 - DNA, 33 bp, Homo sapien
ttattacaccagtcaattggaaactagaggtga

SEQ ID NO: 254171 - DNA, 33 bp, Homo sapien
gtaggtagggacaagtcaaagtcctaaggtgac

SEQ ID NO: 254172 - DNA, 33 bp, Homo sapien
gtaggtagggacaagtgaaagtcctaaggtgac

SEQ ID NO: 254173 - DNA, 33 bp, Homo sapien
tgtgtgaccatacagggatagtatatgaacgtt

SEQ ID NO: 254174 - DNA, 33 bp, Homo sapien
tgtgtgaccatacaggtatagtatatgaacgtt

SEQ ID NO: 254175 - DNA, 33 bp, Homo sapien
aagcaaacaaacaaaaattcatgcaaaatgctg

SEQ ID NO: 254176 - DNA, 33 bp, Homo sapien
aagcaaacaaacaaaacttcatgcaaaatgctg

SEQ ID NO: 254177 - DNA, 33 bp, Homo sapien
ggtaaagtccaggggagaccaggcacaaactcc

SEQ ID NO: 254178 - DNA, 33 bp, Homo sapien
ggtaaagtccaggggataccaggcacaaactcc

SEQ ID NO: 254179 - DNA, 33 bp, Homo sapien
atcaacagcttttactaaccgtgctttaaaatc

SEQ ID NO: 254180 - DNA, 33 bp, Homo sapien
atcaacagcttttactgaccgtgctttaaaatc

SEQ ID NO: 254181 - DNA, 33 bp, Homo sapien
gagctgatctgcaatacgattaagcacttttca

SEQ ID NO: 254182 - DNA, 33 bp, Homo sapien
gagctgatctgcaatatgattaagcacttttca

SEQ ID NO: 254183 - DNA, 33 bp, Homo sapien
tcagaacagctttcatcacatgatcaagaggag

SEQ ID NO: 254184 - DNA, 33 bp, Homo sapien
tcagaacagctttcattacatgatcaagaggag

SEQ ID NO: 254185 - DNA, 33 bp, Homo sapien
tcagagtgatctttaggcaggaggccaggcaga

SEQ ID NO: 254186 - DNA, 33 bp, Homo sapien
tcagagtgatctttagtcaggaggccaggcaga

SEQ ID NO: 254187 - DNA, 33 bp, Homo sapien
ggtccagtgttacaaaacttccctagacttgga

SEQ ID NO: 254188 - DNA, 33 bp, Homo sapien
ggtccagtgttacaaaccttccctagacttgga

SEQ ID NO: 254189 - DNA, 33 bp, Homo sapien
ctcatctctcagaggacgggaatgtgccaggag

SEQ ID NO: 254190 - DNA, 33 bp, Homo sapien
ctcatctctcagaggatgggaatgtgccaggag

SEQ ID NO: 254191 - DNA, 33 bp, Homo sapien
cagtcagcatggtcaacgttgccaggtgatcaa

SEQ ID NO: 254192 - DNA, 33 bp, Homo sapien
cagtcagcatggtcaatgttgccaggtgatcaa

SEQ ID NO: 254193 - DNA, 33 bp, Homo sapien
actgcaacagaagcataagcaatatctgcatct

SEQ ID NO: 254194 - DNA, 33 bp, Homo sapien
actgcaacagaagcatgagcaatatctgcatct

SEQ ID NO: 254195 - DNA, 33 bp, Homo sapien
gagagctggttgtttaaaaaagcctggcattgc

SEQ ID NO: 254196 - DNA, 33 bp, Homo sapien
gagagctggttgtttagaaaagcctggcattgc

SEQ ID NO: 254197 - DNA, 33 bp, Homo sapien
taaagggaactaaggacggcctgagagggactc

SEQ ID NO: 254198 - DNA, 33 bp, Homo sapien
taaagggaactaaggatggcctgagagggactc

SEQ ID NO: 254199 - DNA, 33 bp, Homo sapien
atatagtaggtgctcacgtatttttttgttcaa

SEQ ID NO: 254200 - DNA, 33 bp, Homo sapien
atatagtaggtgctcaggtatttttttgttcaa

SEQ ID NO: 254201 - DNA, 33 bp, Homo sapien
ttcttaactggcttctcaacttctcaactttcc

SEQ ID NO: 254202 - DNA, 33 bp, Homo sapien
ttcttaactggcttcttaacttctcaactttcc

SEQ ID NO: 254203 - DNA, 33 bp, Homo sapien
tggccacacctaacaacaaagaagaatgtggaa

SEQ ID NO: 254204 - DNA, 33 bp, Homo sapien
tggccacacctaacaataaagaagaatgtggaa

SEQ ID NO: 254205 - DNA, 33 bp, Homo sapien
taagagagaatagacaatgatgctggaagattt

SEQ ID NO: 254206 - DNA, 33 bp, Homo sapien
taagagagaatagacagtgatgctggaagattt

SEQ ID NO: 254207 - DNA, 33 bp, Homo sapien
cctgactggctaaagaagagaagaaagggagca

SEQ ID NO: 254208 - DNA, 33 bp, Homo sapien
cctgactggctaaagaggagaagaaagggagca

SEQ ID NO: 254209 - DNA, 33 bp, Homo sapien
tgatctgttcccatacaaaagtttctccttgtc

SEQ ID NO: 254210 - DNA, 33 bp, Homo sapien
tgatctgttcccataccaaagtttctccttgtc

SEQ ID NO: 254211 - DNA, 33 bp, Homo sapien
tggtgcagaagacagaacctgcccttgtgtggc

SEQ ID NO: 254212 - DNA, 33 bp, Homo sapien
tggtgcagaagacagatcctgcccttgtgtggc

SEQ ID NO: 254213 - DNA, 33 bp, Homo sapien
accatttccataaagaaccagatagtattttta

SEQ ID NO: 254214 - DNA, 33 bp, Homo sapien
accatttccataaagagccagatagtattttta

SEQ ID NO: 254215 - DNA, 33 bp, Homo sapien
ttctgggggcacggacgacaccagctgcatgtg

SEQ ID NO: 254216 - DNA, 33 bp, Homo sapien
ttctgggggcacggactacaccagctgcatgtg

SEQ ID NO: 254217 - DNA, 33 bp, Homo sapien
tgccatgtgggcatgacctggcacatctttcag

SEQ ID NO: 254218 - DNA, 33 bp, Homo sapien
tgccatgtgggcatgagctggcacatctttcag

SEQ ID NO: 254219 - DNA, 33 bp, Homo sapien
aacactgattcacacaacaaattgcatcatctt

SEQ ID NO: 254220 - DNA, 33 bp, Homo sapien
aacactgattcacacagcaaattgcatcatctt

SEQ ID NO: 254221 - DNA, 33 bp, Homo sapien
cacctgtctgacctcaataagctctgtgtgggc

SEQ ID NO: 254222 - DNA, 33 bp, Homo sapien
cacctgtctgacctcattaagctctgtgtgggc

SEQ ID NO: 254223 - DNA, 33 bp, Homo sapien
aatgtcgaaagtccacactccagtgaaaaagga

SEQ ID NO: 254224 - DNA, 33 bp, Homo sapien
aatgtcgaaagtccacgctccagtgaaaaagga

SEQ ID NO: 254225 - DNA, 33 bp, Homo sapien
tcttattttatgacacaaacaaaaccaatgtcg

SEQ ID NO: 254226 - DNA, 33 bp, Homo sapien
tcttattttatgacacgaacaaaaccaatgtcg

SEQ ID NO: 254227 - DNA, 33 bp, Homo sapien
caccaactttgaaaacaaaaggcaatggaaccc

SEQ ID NO: 254228 - DNA, 33 bp, Homo sapien
caccaactttgaaaacgaaaggcaatggaaccc

SEQ ID NO: 254229 - DNA, 33 bp, Homo sapien
agaataagagcttgccacagctatcaggagccc

SEQ ID NO: 254230 - DNA, 33 bp, Homo sapien
agaataagagcttgccgcagctatcaggagccc

SEQ ID NO: 254231 - DNA, 33 bp, Homo sapien
gaaggaagttttacacacagcagacattttcag

SEQ ID NO: 254232 - DNA, 33 bp, Homo sapien
gaaggaagttttacacgcagcagacattttcag

SEQ ID NO: 254233 - DNA, 33 bp, Homo sapien
tggtgcagctgtgaaactgacatttgcttttct

SEQ ID NO: 254234 - DNA, 33 bp, Homo sapien
tggtgcagctgtgaaattgacatttgcttttct

SEQ ID NO: 254235 - DNA, 33 bp, Homo sapien
tttaatgatccagtcacgggttcagcttttcct

SEQ ID NO: 254236 - DNA, 33 bp, Homo sapien
tttaatgatccagtcatgggttcagcttttcct

SEQ ID NO: 254237 - DNA, 33 bp, Homo sapien
ggagcgggcaaacattaaaacatggtttctggg

SEQ ID NO: 254238 - DNA, 33 bp, Homo sapien
ggagcgggcaaacatttaaacatggtttctggg

SEQ ID NO: 254239 - DNA, 33 bp, Homo sapien
tggattctgacactgcacttggagttgggaagt

SEQ ID NO: 254240 - DNA, 33 bp, Homo sapien
tggattctgacactgcgcttggagttgggaagt

SEQ ID NO: 254241 - DNA, 33 bp, Homo sapien
tatggccaagtagtcccaaccctgcttttacca

SEQ ID NO: 254242 - DNA, 33 bp, Homo sapien
tatggccaagtagtcctaaccctgcttttacca

SEQ ID NO: 254243 - DNA, 33 bp, Homo sapien
gagtagcgaacaccacaagtatccactatggcc

SEQ ID NO: 254244 - DNA, 33 bp, Homo sapien
gagtagcgaacaccacgagtatccactatggcc

SEQ ID NO: 254245 - DNA, 33 bp, Homo sapien
aagccttaaccattaactgagtcatggcatttt

SEQ ID NO: 254246 - DNA, 33 bp, Homo sapien
aagccttaaccattaattgagtcatggcatttt

SEQ ID NO: 254247 - DNA, 33 bp, Homo sapien
gaaaagcagtccatagaagggctaggaacacag

SEQ ID NO: 254248 - DNA, 33 bp, Homo sapien
gaaaagcagtccataggagggctaggaacacag

SEQ ID NO: 254249 - DNA, 33 bp, Homo sapien
tggttttaagaacatcagaagtacccatttaga

SEQ ID NO: 254250 - DNA, 33 bp, Homo sapien
tggttttaagaacatcggaagtacccatttaga

SEQ ID NO: 254251 - DNA, 33 bp, Homo sapien
tggctggaatcctaaaataacccaaagacttaa

SEQ ID NO: 254252 - DNA, 33 bp, Homo sapien
tggctggaatcctaaagtaacccaaagacttaa

SEQ ID NO: 254253 - DNA, 33 bp, Homo sapien
agctcttgactccagagaaagctaaaggacgag

SEQ ID NO: 254254 - DNA, 33 bp, Homo sapien
agctcttgactccagataaagctaaaggacgag

SEQ ID NO: 254255 - DNA, 33 bp, Homo sapien
cagaattgtgagaggaccaatttttgttacatt

SEQ ID NO: 254256 - DNA, 33 bp, Homo sapien
cagaattgtgagaggatcaatttttgttacatt

SEQ ID NO: 254257 - DNA, 33 bp, Homo sapien
atggcctcccattctaaatgatccttacctgtc

SEQ ID NO: 254258 - DNA, 33 bp, Homo sapien
atggcctcccattctagatgatccttacctgtc

SEQ ID NO: 254259 - DNA, 33 bp, Homo sapien
agaaatgtggatcaaacgctggccactttggca

SEQ ID NO: 254260 - DNA, 33 bp, Homo sapien
agaaatgtggatcaaatgctggccactttggca

SEQ ID NO: 254261 - DNA, 33 bp, Homo sapien
tgtaatctctgaccccatagcatccttctgacc

SEQ ID NO: 254262 - DNA, 33 bp, Homo sapien
tgtaatctctgaccccgtagcatccttctgacc

SEQ ID NO: 254263 - DNA, 33 bp, Homo sapien
atacaagaggtggcccaagtgccagttggaaga

SEQ ID NO: 254264 - DNA, 33 bp, Homo sapien
atacaagaggtggcccgagtgccagttggaaga

SEQ ID NO: 254265 - DNA, 33 bp, Homo sapien
ttttctccaagaacacagcgtacctggtttata

SEQ ID NO: 254266 - DNA, 33 bp, Homo sapien
ttttctccaagaacacggcgtacctggtttata

SEQ ID NO: 254267 - DNA, 33 bp, Homo sapien
agctttgccctaagcaatcatttccatgaaagt

SEQ ID NO: 254268 - DNA, 33 bp, Homo sapien
agctttgccctaagcagtcatttccatgaaagt

SEQ ID NO: 254269 - DNA, 33 bp, Homo sapien
gtctagacacagtcggccagtgttcaatactag

SEQ ID NO: 254270 - DNA, 33 bp, Homo sapien
gtctagacacagtcgggcagtgttcaatactag

SEQ ID NO: 254271 - DNA, 33 bp, Homo sapien
aagcactgtttcctaactgttgcagataaagtc

SEQ ID NO: 254272 - DNA, 33 bp, Homo sapien
aagcactgtttcctaattgttgcagataaagtc

SEQ ID NO: 254273 - DNA, 33 bp, Homo sapien
agcctatacacacatccatgctatgacagacat

SEQ ID NO: 254274 - DNA, 33 bp, Homo sapien
agcctatacacacatctatgctatgacagacat

SEQ ID NO: 254275 - DNA, 33 bp, Homo sapien
ggtggcagtgatgctaccttctactcactggct

SEQ ID NO: 254276 - DNA, 33 bp, Homo sapien
ggtggcagtgatgctatcttctactcactggct

SEQ ID NO: 254277 - DNA, 33 bp, Homo sapien
caagtgcacaagtatacaggcacaatgccaaca

SEQ ID NO: 254278 - DNA, 33 bp, Homo sapien
caagtgcacaagtatagaggcacaatgccaaca

SEQ ID NO: 254279 - DNA, 33 bp, Homo sapien
aaggcacacactctcacacataaacacgagcca

SEQ ID NO: 254280 - DNA, 33 bp, Homo sapien
aaggcacacactctcatacataaacacgagcca

SEQ ID NO: 254281 - DNA, 33 bp, Homo sapien
agtgcaaggacttcaaggcagagacaaggagtg

SEQ ID NO: 254282 - DNA, 33 bp, Homo sapien
agtgcaaggacttcaatgcagagacaaggagtg

SEQ ID NO: 254283 - DNA, 33 bp, Homo sapien
ctgttgctgaatagacaggtaaagagctggaaa

SEQ ID NO: 254284 - DNA, 33 bp, Homo sapien
ctgttgctgaatagacgggtaaagagctggaaa

SEQ ID NO: 254285 - DNA, 33 bp, Homo sapien
caaacttggtcatcaacgcaactgtttgtacag

SEQ ID NO: 254286 - DNA, 33 bp, Homo sapien
caaacttggtcatcaatgcaactgtttgtacag

SEQ ID NO: 254287 - DNA, 33 bp, Homo sapien
agacagtgaacttgaaaggaatgaaggtaggct

SEQ ID NO: 254288 - DNA, 33 bp, Homo sapien
agacagtgaacttgaagggaatgaaggtaggct

SEQ ID NO: 254289 - DNA, 33 bp, Homo sapien
caaaccctcgcacttacggtcaatttatttttg

SEQ ID NO: 254290 - DNA, 33 bp, Homo sapien
caaaccctcgcacttatggtcaatttatttttg

SEQ ID NO: 254291 - DNA, 33 bp, Homo sapien
agagatctgaagaggaagtgtcactgagagaat

SEQ ID NO: 254292 - DNA, 33 bp, Homo sapien
agagatctgaagaggatgtgtcactgagagaat

SEQ ID NO: 254293 - DNA, 33 bp, Homo sapien
ctgcttaagaaaaaaaatagacgtttcatcaac

SEQ ID NO: 254294 - DNA, 33 bp, Homo sapien
ctgcttaagaaaaaaagtagacgtttcatcaac

SEQ ID NO: 254295 - DNA, 33 bp, Homo sapien
ccagttggaatcaccactatctgcaaactgcgc

SEQ ID NO: 254296 - DNA, 33 bp, Homo sapien
ccagttggaatcaccattatctgcaaactgcgc

SEQ ID NO: 254297 - DNA, 33 bp, Homo sapien
cccataactgacaagcacaagactcactgcaag

SEQ ID NO: 254298 - DNA, 33 bp, Homo sapien
cccataactgacaagcgcaagactcactgcaag

SEQ ID NO: 254299 - DNA, 33 bp, Homo sapien
gtagaatgacaatcaccgtggtgggtttggagg

SEQ ID NO: 254300 - DNA, 33 bp, Homo sapien
gtagaatgacaatcactgtggtgggtttggagg

SEQ ID NO: 254301 - DNA, 33 bp, Homo sapien
ggagctcactatgccccagacattgttctaagg

SEQ ID NO: 254302 - DNA, 33 bp, Homo sapien
ggagctcactatgccctagacattgttctaagg

SEQ ID NO: 254303 - DNA, 33 bp, Homo sapien
attaaatgagttagtacatgagtccttagaaca

SEQ ID NO: 254304 - DNA, 33 bp, Homo sapien
attaaatgagttagtatatgagtccttagaaca

SEQ ID NO: 254305 - DNA, 33 bp, Homo sapien
ttactgcccttgtgccaatagaagtggtgaagc

SEQ ID NO: 254306 - DNA, 33 bp, Homo sapien
ttactgcccttgtgccgatagaagtggtgaagc

SEQ ID NO: 254307 - DNA, 33 bp, Homo sapien
tatgtccatgcccaagccccagaacatgcaaat

SEQ ID NO: 254308 - DNA, 33 bp, Homo sapien
tatgtccatgcccaagtcccagaacatgcaaat

SEQ ID NO: 254309 - DNA, 33 bp, Homo sapien
tgtcacagttctgccactgaagagccaaagaac

SEQ ID NO: 254310 - DNA, 33 bp, Homo sapien
tgtcacagttctgccattgaagagccaaagaac

SEQ ID NO: 254311 - DNA, 33 bp, Homo sapien
cagtcagcgctatctcaatctttgatgtctggg

SEQ ID NO: 254312 - DNA, 33 bp, Homo sapien
cagtcagcgctatctcgatctttgatgtctggg

SEQ ID NO: 254313 - DNA, 33 bp, Homo sapien
cctcctgtgaattcagaatctggtatgtgttta

SEQ ID NO: 254314 - DNA, 33 bp, Homo sapien
cctcctgtgaattcagtatctggtatgtgttta

SEQ ID NO: 254315 - DNA, 33 bp, Homo sapien
catcattgctttaaaacagtgctttattgaccc

SEQ ID NO: 254316 - DNA, 33 bp, Homo sapien
catcattgctttaaaatagtgctttattgaccc

SEQ ID NO: 254317 - DNA, 33 bp, Homo sapien
gtgctttattgacccccacttgttctaggaaat

SEQ ID NO: 254318 - DNA, 33 bp, Homo sapien
gtgctttattgacccctacttgttctaggaaat

SEQ ID NO: 254319 - DNA, 33 bp, Homo sapien
tgggtcccccttggcacctcgaagcatcatgcc

SEQ ID NO: 254320 - DNA, 33 bp, Homo sapien
tgggtcccccttggcatctcgaagcatcatgcc

SEQ ID NO: 254321 - DNA, 33 bp, Homo sapien
gtaaactgcctgaacacagcaaaccccaggaga

SEQ ID NO: 254322 - DNA, 33 bp, Homo sapien
gtaaactgcctgaacatagcaaaccccaggaga

SEQ ID NO: 254323 - DNA, 33 bp, Homo sapien
aaggcctgggtcccaaagcttttctcttcttct

SEQ ID NO: 254324 - DNA, 33 bp, Homo sapien
aaggcctgggtcccaatgcttttctcttcttct

SEQ ID NO: 254325 - DNA, 33 bp, Homo sapien
acaggatagcgcagaaatgggcacagggatcct

SEQ ID NO: 254326 - DNA, 33 bp, Homo sapien
acaggatagcgcagaagtgggcacagggatcct

SEQ ID NO: 254327 - DNA, 33 bp, Homo sapien
aatcagaatttgaactcaggatccctgtgccca

SEQ ID NO: 254328 - DNA, 33 bp, Homo sapien
aatcagaatttgaacttaggatccctgtgccca

SEQ ID NO: 254329 - DNA, 33 bp, Homo sapien
gcaaggggctttcaagaacagcatctaagtcag

SEQ ID NO: 254330 - DNA, 33 bp, Homo sapien
gcaaggggctttcaaggacagcatctaagtcag

SEQ ID NO: 254331 - DNA, 33 bp, Homo sapien
ctttctcatatggttgaacaggcgattttgcgc

SEQ ID NO: 254332 - DNA, 33 bp, Homo sapien
ctttctcatatggttgtacaggcgattttgcgc

SEQ ID NO: 254333 - DNA, 33 bp, Homo sapien
aggtcatgaattaagaagaaagttgaaagaact

SEQ ID NO: 254334 - DNA, 33 bp, Homo sapien
aggtcatgaattaagaggaaagttgaaagaact

SEQ ID NO: 254335 - DNA, 33 bp, Homo sapien
agtctctagcgtctaccagggtgagcatgagcc

SEQ ID NO: 254336 - DNA, 33 bp, Homo sapien
agtctctagcgtctacgagggtgagcatgagcc

SEQ ID NO: 254337 - DNA, 33 bp, Homo sapien
caacttcaatcagatacgtgggttgaaggtagc

SEQ ID NO: 254338 - DNA, 33 bp, Homo sapien
caacttcaatcagatatgtgggttgaaggtagc

SEQ ID NO: 254339 - DNA, 33 bp, Homo sapien
gccaggccctcaggccacccagatcaacacata

SEQ ID NO: 254340 - DNA, 33 bp, Homo sapien
gccaggccctcaggccgcccagatcaacacata

SEQ ID NO: 254341 - DNA, 33 bp, Homo sapien
tgagtgccattcactaaggcccctcccagatga

SEQ ID NO: 254342 - DNA, 33 bp, Homo sapien
tgagtgccattcactacggcccctcccagatga

SEQ ID NO: 254343 - DNA, 33 bp, Homo sapien
gaaacatttaaacataaaattgactccagctct

SEQ ID NO: 254344 - DNA, 33 bp, Homo sapien
gaaacatttaaacatagaattgactccagctct

SEQ ID NO: 254345 - DNA, 33 bp, Homo sapien
atgtcttgaaactccaaaagtcattaactgaat

SEQ ID NO: 254346 - DNA, 33 bp, Homo sapien
atgtcttgaaactccagaagtcattaactgaat

SEQ ID NO: 254347 - DNA, 33 bp, Homo sapien
agtctttcctggaaccaccttgctgtatcagct

SEQ ID NO: 254348 - DNA, 33 bp, Homo sapien
agtctttcctggaaccgccttgctgtatcagct

SEQ ID NO: 254349 - DNA, 33 bp, Homo sapien
catttttgtcattccaaaagaaaatctcatacc

SEQ ID NO: 254350 - DNA, 33 bp, Homo sapien
catttttgtcattccagaagaaaatctcatacc

SEQ ID NO: 254351 - DNA, 33 bp, Homo sapien
aaatactatagtagacactgtaaacaaaaacgc

SEQ ID NO: 254352 - DNA, 33 bp, Homo sapien
aaatactatagtagacgctgtaaacaaaaacgc

SEQ ID NO: 254353 - DNA, 33 bp, Homo sapien
cttcacgccttgcacactggaaaactgtcatga

SEQ ID NO: 254354 - DNA, 33 bp, Homo sapien
cttcacgccttgcacattggaaaactgtcatga

SEQ ID NO: 254355 - DNA, 33 bp, Homo sapien
acaatgggattctttacagcatgattagtttgt

SEQ ID NO: 254356 - DNA, 33 bp, Homo sapien
acaatgggattctttatagcatgattagtttgt

SEQ ID NO: 254357 - DNA, 33 bp, Homo sapien
tgtttgactggctagcactgctccagaaagcac

SEQ ID NO: 254358 - DNA, 33 bp, Homo sapien
tgtttgactggctagctctgctccagaaagcac

SEQ ID NO: 254359 - DNA, 33 bp, Homo sapien
aatcagaagaccaatcacatcaacttctggagc

SEQ ID NO: 254360 - DNA, 33 bp, Homo sapien
aatcagaagaccaatcgcatcaacttctggagc

SEQ ID NO: 254361 - DNA, 33 bp, Homo sapien
gatgtgagttgaatggccatgtgcaggagacca

SEQ ID NO: 254362 - DNA, 33 bp, Homo sapien
gatgtgagttgaatggtcatgtgcaggagacca

SEQ ID NO: 254363 - DNA, 33 bp, Homo sapien
cactggttggaaatcgcccatcataagcaagac

SEQ ID NO: 254364 - DNA, 33 bp, Homo sapien
cactggttggaaatcgtccatcataagcaagac

SEQ ID NO: 254365 - DNA, 33 bp, Homo sapien
gtaccccagctccctcaattgttgctcaaagac

SEQ ID NO: 254366 - DNA, 33 bp, Homo sapien
gtaccccagctccctcgattgttgctcaaagac

SEQ ID NO: 254367 - DNA, 33 bp, Homo sapien
cagcttgccactgtgaagttttcaacagaccac

SEQ ID NO: 254368 - DNA, 33 bp, Homo sapien
cagcttgccactgtgaggttttcaacagaccac

SEQ ID NO: 254369 - DNA, 33 bp, Homo sapien
tttatcccaatgagtacagtggagagtatttaa

SEQ ID NO: 254370 - DNA, 33 bp, Homo sapien
tttatcccaatgagtagagtggagagtatttaa

SEQ ID NO: 254371 - DNA, 33 bp, Homo sapien
aggtgtcatcttaaaagaacaaaatgcttaagt

SEQ ID NO: 254372 - DNA, 33 bp, Homo sapien
aggtgtcatcttaaaataacaaaatgcttaagt

SEQ ID NO: 254373 - DNA, 33 bp, Homo sapien
agggagtgagtgtcaaagcgcaggtcccaccct

SEQ ID NO: 254374 - DNA, 33 bp, Homo sapien
agggagtgagtgtcaaggcgcaggtcccaccct

SEQ ID NO: 254375 - DNA, 33 bp, Homo sapien
gcaaatattgagctgacggagggcgcggaggtt

SEQ ID NO: 254376 - DNA, 33 bp, Homo sapien
gcaaatattgagctgatggagggcgcggaggtt

SEQ ID NO: 254377 - DNA, 33 bp, Homo sapien
tggtattgctcattcaatagctccctgctatgc

SEQ ID NO: 254378 - DNA, 33 bp, Homo sapien
tggtattgctcattcagtagctccctgctatgc

SEQ ID NO: 254379 - DNA, 33 bp, Homo sapien
aaattgccaacagcccaatggattccctgagag

SEQ ID NO: 254380 - DNA, 33 bp, Homo sapien
aaattgccaacagcccgatggattccctgagag

SEQ ID NO: 254381 - DNA, 33 bp, Homo sapien
gagagctgcaagcacacgagaaactttttaaaa

SEQ ID NO: 254382 - DNA, 33 bp, Homo sapien
gagagctgcaagcacaggagaaactttttaaaa

SEQ ID NO: 254383 - DNA, 33 bp, Homo sapien
gaggtcagtgtcagcaaatcagggacagagtag

SEQ ID NO: 254384 - DNA, 33 bp, Homo sapien
gaggtcagtgtcagcacatcagggacagagtag

SEQ ID NO: 254385 - DNA, 33 bp, Homo sapien
tattatcccagcctccaattgacacagccttct

SEQ ID NO: 254386 - DNA, 33 bp, Homo sapien
tattatcccagcctccgattgacacagccttct

SEQ ID NO: 254387 - DNA, 33 bp, Homo sapien
tcggagttcatctgacaaaagcttgatgtacag

SEQ ID NO: 254388 - DNA, 33 bp, Homo sapien
tcggagttcatctgacgaaagcttgatgtacag

SEQ ID NO: 254389 - DNA, 33 bp, Homo sapien
ttacatgcagcagaacacagcccattctgatga

SEQ ID NO: 254390 - DNA, 33 bp, Homo sapien
ttacatgcagcagaacgcagcccattctgatga

SEQ ID NO: 254391 - DNA, 33 bp, Homo sapien
gctccatatttatgccaccatggtctggttttc

SEQ ID NO: 254392 - DNA, 33 bp, Homo sapien
gctccatatttatgccgccatggtctggttttc

SEQ ID NO: 254393 - DNA, 33 bp, Homo sapien
agatttgccatgactgcacggctgcctcaagat

SEQ ID NO: 254394 - DNA, 33 bp, Homo sapien
agatttgccatgactgtacggctgcctcaagat

SEQ ID NO: 254395 - DNA, 33 bp, Homo sapien
acagctgcattcatcaaatctttacaaggcatg

SEQ ID NO: 254396 - DNA, 33 bp, Homo sapien
acagctgcattcatcacatctttacaaggcatg

SEQ ID NO: 254397 - DNA, 33 bp, Homo sapien
aactgccaacccctcactcttccttgtcaatag

SEQ ID NO: 254398 - DNA, 33 bp, Homo sapien
aactgccaacccctcattcttccttgtcaatag

SEQ ID NO: 254399 - DNA, 33 bp, Homo sapien
ggagataaggcccagacacattcctgcagagag

SEQ ID NO: 254400 - DNA, 33 bp, Homo sapien
ggagataaggcccagagacattcctgcagagag

SEQ ID NO: 254401 - DNA, 33 bp, Homo sapien
cttgctggggaaagcaacactagtgagagacca

SEQ ID NO: 254402 - DNA, 33 bp, Homo sapien
cttgctggggaaagcagcactagtgagagacca

SEQ ID NO: 254403 - DNA, 33 bp, Homo sapien
ggtattctataagacaagtgacttagtatttca

SEQ ID NO: 254404 - DNA, 33 bp, Homo sapien
ggtattctataagacaggtgacttagtatttca

SEQ ID NO: 254405 - DNA, 33 bp, Homo sapien
aagaccttgatttatacggactgccagattctg

SEQ ID NO: 254406 - DNA, 33 bp, Homo sapien
aagaccttgatttatatggactgccagattctg

SEQ ID NO: 254407 - DNA, 33 bp, Homo sapien
caaggggctactcctacagcaaaaactttagca

SEQ ID NO: 254408 - DNA, 33 bp, Homo sapien
caaggggctactcctatagcaaaaactttagca

SEQ ID NO: 254409 - DNA, 33 bp, Homo sapien
agatggaaaccagctcacattattaaaaacaaa

SEQ ID NO: 254410 - DNA, 33 bp, Homo sapien
agatggaaaccagctcgcattattaaaaacaaa

SEQ ID NO: 254411 - DNA, 33 bp, Homo sapien
aaaacattgaaaattaccgttcttgtgttttgt

SEQ ID NO: 254412 - DNA, 33 bp, Homo sapien
aaaacattgaaaattatcgttcttgtgttttgt

SEQ ID NO: 254413 - DNA, 33 bp, Homo sapien
gtggccatgctccctgaatgagacgatgaaagc

SEQ ID NO: 254414 - DNA, 33 bp, Homo sapien
gtggccatgctccctggatgagacgatgaaagc

SEQ ID NO: 254415 - DNA, 33 bp, Homo sapien
ctgagtaggagcatcaatgatcaacgtgccttg

SEQ ID NO: 254416 - DNA, 33 bp, Homo sapien
ctgagtaggagcatcagtgatcaacgtgccttg

SEQ ID NO: 254417 - DNA, 33 bp, Homo sapien
ctgcttcatcttttgacgtcagagggctgaaaa

SEQ ID NO: 254418 - DNA, 33 bp, Homo sapien
ctgcttcatcttttgatgtcagagggctgaaaa

SEQ ID NO: 254419 - DNA, 33 bp, Homo sapien
cctggctttgacaatgaaccacaattatggtca

SEQ ID NO: 254420 - DNA, 33 bp, Homo sapien
cctggctttgacaatggaccacaattatggtca

SEQ ID NO: 254421 - DNA, 33 bp, Homo sapien
tacaagtgacgtggaaagaatcccaggttgatg

SEQ ID NO: 254422 - DNA, 33 bp, Homo sapien
tacaagtgacgtggaaggaatcccaggttgatg

SEQ ID NO: 254423 - DNA, 33 bp, Homo sapien
attgtcttctaggttacggagtggctgttatga

SEQ ID NO: 254424 - DNA, 33 bp, Homo sapien
attgtcttctaggttatggagtggctgttatga

SEQ ID NO: 254425 - DNA, 33 bp, Homo sapien
agggcagcaacctaccagaaatacagcctatgc

SEQ ID NO: 254426 - DNA, 33 bp, Homo sapien
agggcagcaacctaccggaaatacagcctatgc

SEQ ID NO: 254427 - DNA, 33 bp, Homo sapien
atttgtccacgcagaaagactgaaacaggcaaa

SEQ ID NO: 254428 - DNA, 33 bp, Homo sapien
atttgtccacgcagaacgactgaaacaggcaaa

SEQ ID NO: 254429 - DNA, 33 bp, Homo sapien
ccaatacaagtgaaaactgtagtgtccttaaaa

SEQ ID NO: 254430 - DNA, 33 bp, Homo sapien
ccaatacaagtgaaaattgtagtgtccttaaaa

SEQ ID NO: 254431 - DNA, 33 bp, Homo sapien
gaaagtcattctagtcaataagtttcaaacagg

SEQ ID NO: 254432 - DNA, 33 bp, Homo sapien
gaaagtcattctagtccataagtttcaaacagg

SEQ ID NO: 254433 - DNA, 33 bp, Homo sapien
tccttttctggcttcacattgactgtggttttc

SEQ ID NO: 254434 - DNA, 33 bp, Homo sapien
tccttttctggcttcatattgactgtggttttc

SEQ ID NO: 254435 - DNA, 33 bp, Homo sapien
tctgtttttccaataacagcatccagttttcct

SEQ ID NO: 254436 - DNA, 33 bp, Homo sapien
tctgtttttccaataagagcatccagttttcct

SEQ ID NO: 254437 - DNA, 33 bp, Homo sapien
caatacttattagttacggctcattccaatgct

SEQ ID NO: 254438 - DNA, 33 bp, Homo sapien
caatacttattagttatggctcattccaatgct

SEQ ID NO: 254439 - DNA, 33 bp, Homo sapien
gtatgataatagctaacgtctctcaagcaccag

SEQ ID NO: 254440 - DNA, 33 bp, Homo sapien
gtatgataatagctaatgtctctcaagcaccag

SEQ ID NO: 254441 - DNA, 33 bp, Homo sapien
tatttaacctgatacaatcatacctattaatga

SEQ ID NO: 254442 - DNA, 33 bp, Homo sapien
tatttaacctgatacagtcatacctattaatga

SEQ ID NO: 254443 - DNA, 33 bp, Homo sapien
tgtacgatgttggcacacaagtgcatctattta

SEQ ID NO: 254444 - DNA, 33 bp, Homo sapien
tgtacgatgttggcacccaagtgcatctattta

SEQ ID NO: 254445 - DNA, 33 bp, Homo sapien
tcttaaatagcactcaatccgggtcagactctg

SEQ ID NO: 254446 - DNA, 33 bp, Homo sapien
tcttaaatagcactcactccgggtcagactctg

SEQ ID NO: 254447 - DNA, 33 bp, Homo sapien
gagctacttagcatccccagttttggaaaagcc

SEQ ID NO: 254448 - DNA, 33 bp, Homo sapien
gagctacttagcatccgcagttttggaaaagcc

SEQ ID NO: 254449 - DNA, 33 bp, Homo sapien
agaacaaaggaacataaattcattatcttatta

SEQ ID NO: 254450 - DNA, 33 bp, Homo sapien
agaacaaaggaacatagattcattatcttatta

SEQ ID NO: 254451 - DNA, 33 bp, Homo sapien
ccatcagaagcagaggccaaaaaacacccaggc

SEQ ID NO: 254452 - DNA, 33 bp, Homo sapien
ccatcagaagcagagggcaaaaaacacccaggc

SEQ ID NO: 254453 - DNA, 33 bp, Homo sapien
tgtgggagctgcagccacagaggaacgggagcc

SEQ ID NO: 254454 - DNA, 33 bp, Homo sapien
tgtgggagctgcagccgcagaggaacgggagcc

SEQ ID NO: 254455 - DNA, 33 bp, Homo sapien
atctctcctttaaacaaccctactgattgccac

SEQ ID NO: 254456 - DNA, 33 bp, Homo sapien
atctctcctttaaacagccctactgattgccac

SEQ ID NO: 254457 - DNA, 33 bp, Homo sapien
tttgccttttttgctcacagtccctcacaagtg

SEQ ID NO: 254458 - DNA, 33 bp, Homo sapien
tttgccttttttgctcgcagtccctcacaagtg

SEQ ID NO: 254459 - DNA, 33 bp, Homo sapien
atgcttacagaattcccgctgtgctcaagtgca

SEQ ID NO: 254460 - DNA, 33 bp, Homo sapien
atgcttacagaattcctgctgtgctcaagtgca

SEQ ID NO: 254461 - DNA, 33 bp, Homo sapien
ttctctgaggtggagcagacctttggtgtcgac

SEQ ID NO: 254462 - DNA, 33 bp, Homo sapien
ttctctgaggtggagccgacctttggtgtcgac

SEQ ID NO: 254463 - DNA, 33 bp, Homo sapien
aagttataagtcatccaatttttgagcaccaga

SEQ ID NO: 254464 - DNA, 33 bp, Homo sapien
aagttataagtcatcccatttttgagcaccaga

SEQ ID NO: 254465 - DNA, 33 bp, Homo sapien
ggcttgtctgaggccacgcgggagcccagaatc

SEQ ID NO: 254466 - DNA, 33 bp, Homo sapien
ggcttgtctgaggccatgcgggagcccagaatc

SEQ ID NO: 254467 - DNA, 33 bp, Homo sapien
tttcagcaaaacagaacagttctctgatttatg

SEQ ID NO: 254468 - DNA, 33 bp, Homo sapien
tttcagcaaaacagaagagttctctgatttatg

SEQ ID NO: 254469 - DNA, 33 bp, Homo sapien
agaccgcttatcaacactgtctcaaggcctcag

SEQ ID NO: 254470 - DNA, 33 bp, Homo sapien
agaccgcttatcaacattgtctcaaggcctcag

SEQ ID NO: 254471 - DNA, 33 bp, Homo sapien
cttttctagaggtaaagaacctttcagcctaca

SEQ ID NO: 254472 - DNA, 33 bp, Homo sapien
cttttctagaggtaaataacctttcagcctaca

SEQ ID NO: 254473 - DNA, 33 bp, Homo sapien
cagtgctagttgggtacagctcagaatgccatg

SEQ ID NO: 254474 - DNA, 33 bp, Homo sapien
cagtgctagttgggtatagctcagaatgccatg

SEQ ID NO: 254475 - DNA, 33 bp, Homo sapien
ctatttgttcttgtcacggctgaggggctttgg

SEQ ID NO: 254476 - DNA, 33 bp, Homo sapien
ctatttgttcttgtcatggctgaggggctttgg

SEQ ID NO: 254477 - DNA, 33 bp, Homo sapien
tctgatttaagctacaaataatatcctgttcta

SEQ ID NO: 254478 - DNA, 33 bp, Homo sapien
tctgatttaagctacagataatatcctgttcta

SEQ ID NO: 254479 - DNA, 33 bp, Homo sapien
tctagcagaaaagcaaataccttttgtgtggcc

SEQ ID NO: 254480 - DNA, 33 bp, Homo sapien
tctagcagaaaagcaagtaccttttgtgtggcc

SEQ ID NO: 254481 - DNA, 33 bp, Homo sapien
tgaggcctctcacagacaatgcaggaccaacgc

SEQ ID NO: 254482 - DNA, 33 bp, Homo sapien
tgaggcctctcacagataatgcaggaccaacgc

SEQ ID NO: 254483 - DNA, 33 bp, Homo sapien
cctaggcactgtaagacgttgagtaccatcatc

SEQ ID NO: 254484 - DNA, 33 bp, Homo sapien
cctaggcactgtaagatgttgagtaccatcatc

SEQ ID NO: 254485 - DNA, 33 bp, Homo sapien
aatctggtggatctcaatctgggcaattttgtc

SEQ ID NO: 254486 - DNA, 33 bp, Homo sapien
aatctggtggatctcagtctgggcaattttgtc

SEQ ID NO: 254487 - DNA, 33 bp, Homo sapien
tcctggatgttctagacgctttgtaaaaataaa

SEQ ID NO: 254488 - DNA, 33 bp, Homo sapien
tcctggatgttctagatgctttgtaaaaataaa

SEQ ID NO: 254489 - DNA, 33 bp, Homo sapien
aagagagaaaaagacaaatcaagcaaataataa

SEQ ID NO: 254490 - DNA, 33 bp, Homo sapien
aagagagaaaaagacagatcaagcaaataataa

SEQ ID NO: 254491 - DNA, 33 bp, Homo sapien
gggaacacaaaagccaaatacttgcaaccttta

SEQ ID NO: 254492 - DNA, 33 bp, Homo sapien
gggaacacaaaagccacatacttgcaaccttta

SEQ ID NO: 254493 - DNA, 33 bp, Homo sapien
ctgccattcacataacaaacacgtattatataa

SEQ ID NO: 254494 - DNA, 33 bp, Homo sapien
ctgccattcacataacgaacacgtattatataa

SEQ ID NO: 254495 - DNA, 33 bp, Homo sapien
agagaatgagaatgtccaacgcttgtttggtag

SEQ ID NO: 254496 - DNA, 33 bp, Homo sapien
agagaatgagaatgtctaacgcttgtttggtag

SEQ ID NO: 254497 - DNA, 33 bp, Homo sapien
cgatcgccgaggcctgccagaaatctaaacgca

SEQ ID NO: 254498 - DNA, 33 bp, Homo sapien
cgatcgccgaggcctgtcagaaatctaaacgca

SEQ ID NO: 254499 - DNA, 33 bp, Homo sapien
gaatgctttcggaatacctagagagttgccatg

SEQ ID NO: 254500 - DNA, 33 bp, Homo sapien
gaatgctttcggaatagctagagagttgccatg

SEQ ID NO: 254501 - DNA, 33 bp, Homo sapien
ggagggatatttacaaaatcaaaattggaaaac

SEQ ID NO: 254502 - DNA, 33 bp, Homo sapien
ggagggatatttacaacatcaaaattggaaaac

SEQ ID NO: 254503 - DNA, 33 bp, Homo sapien
cccacacggttatcccactggtggctaaaggga

SEQ ID NO: 254504 - DNA, 33 bp, Homo sapien
cccacacggttatcccgctggtggctaaaggga

SEQ ID NO: 254505 - DNA, 33 bp, Homo sapien
gataaccgtgtgggcactcaacagtctagagca

SEQ ID NO: 254506 - DNA, 33 bp, Homo sapien
gataaccgtgtgggcattcaacagtctagagca

SEQ ID NO: 254507 - DNA, 33 bp, Homo sapien
acagtctagagcaagcactggtctcttgggaat

SEQ ID NO: 254508 - DNA, 33 bp, Homo sapien
acagtctagagcaagcgctggtctcttgggaat

SEQ ID NO: 254509 - DNA, 33 bp, Homo sapien
cacactacttccagaaaggtcagataatctaag

SEQ ID NO: 254510 - DNA, 33 bp, Homo sapien
cacactacttccagaatggtcagataatctaag

SEQ ID NO: 254511 - DNA, 33 bp, Homo sapien
gctactagtaataccaatatctgcactgagtag

SEQ ID NO: 254512 - DNA, 33 bp, Homo sapien
gctactagtaataccagtatctgcactgagtag

SEQ ID NO: 254513 - DNA, 33 bp, Homo sapien
acagatgcatttttaaagagacataattcagct

SEQ ID NO: 254514 - DNA, 33 bp, Homo sapien
acagatgcatttttaaggagacataattcagct

SEQ ID NO: 254515 - DNA, 33 bp, Homo sapien
ctgcacaatggccccaagactatttccagagca

SEQ ID NO: 254516 - DNA, 33 bp, Homo sapien
ctgcacaatggccccaggactatttccagagca

SEQ ID NO: 254517 - DNA, 33 bp, Homo sapien
ataacaacccagaaagccaggctccagtggaaa

SEQ ID NO: 254518 - DNA, 33 bp, Homo sapien
ataacaacccagaaagtcaggctccagtggaaa

SEQ ID NO: 254519 - DNA, 33 bp, Homo sapien
ttctcccacttgaataaaaaagcccagtgcatc

SEQ ID NO: 254520 - DNA, 33 bp, Homo sapien
ttctcccacttgaatagaaaagcccagtgcatc

SEQ ID NO: 254521 - DNA, 33 bp, Homo sapien
aatttttatgaaatacaaattcggacttcatga

SEQ ID NO: 254522 - DNA, 33 bp, Homo sapien
aatttttatgaaataccaattcggacttcatga

SEQ ID NO: 254523 - DNA, 33 bp, Homo sapien
gtatgtttcagaggccaaatgctgctcacccct

SEQ ID NO: 254524 - DNA, 33 bp, Homo sapien
gtatgtttcagaggccgaatgctgctcacccct

SEQ ID NO: 254525 - DNA, 33 bp, Homo sapien
tcagagaggagcatagcattaacattgtctgtc

SEQ ID NO: 254526 - DNA, 33 bp, Homo sapien
tcagagaggagcatagtattaacattgtctgtc

SEQ ID NO: 254527 - DNA, 33 bp, Homo sapien
gtgatgattttttaccaagaacacacattcccc

SEQ ID NO: 254528 - DNA, 33 bp, Homo sapien
gtgatgattttttaccgagaacacacattcccc

SEQ ID NO: 254529 - DNA, 33 bp, Homo sapien
gagtccagtgggtgtaagtttccatcaagctcc

SEQ ID NO: 254530 - DNA, 33 bp, Homo sapien
gagtccagtgggtgtatgtttccatcaagctcc

SEQ ID NO: 254531 - DNA, 33 bp, Homo sapien
caagattttcaattgcactaaggatgggaggga

SEQ ID NO: 254532 - DNA, 33 bp, Homo sapien
caagattttcaattgcgctaaggatgggaggga

SEQ ID NO: 254533 - DNA, 33 bp, Homo sapien
gcacagcttaatggaaacgtaacatgcagtttg

SEQ ID NO: 254534 - DNA, 33 bp, Homo sapien
gcacagcttaatggaagcgtaacatgcagtttg

SEQ ID NO: 254535 - DNA, 33 bp, Homo sapien
cttgtcagtgttctgccgagctacttttatctg

SEQ ID NO: 254536 - DNA, 33 bp, Homo sapien
cttgtcagtgttctgctgagctacttttatctg

SEQ ID NO: 254537 - DNA, 33 bp, Homo sapien
aaaaaaaaaacccacacattgaatgacaccatt

SEQ ID NO: 254538 - DNA, 33 bp, Homo sapien
aaaaaaaaaacccacatattgaatgacaccatt

SEQ ID NO: 254539 - DNA, 33 bp, Homo sapien
agaaaccttacacaccactgacatttctcagac

SEQ ID NO: 254540 - DNA, 33 bp, Homo sapien
agaaaccttacacaccgctgacatttctcagac

SEQ ID NO: 254541 - DNA, 33 bp, Homo sapien
aggctcaaatcagatgaaatccctagatcctaa

SEQ ID NO: 254542 - DNA, 33 bp, Homo sapien
aggctcaaatcagatggaatccctagatcctaa

SEQ ID NO: 254543 - DNA, 33 bp, Homo sapien
attaattgccctacgaagctgaaggaatctatc

SEQ ID NO: 254544 - DNA, 33 bp, Homo sapien
attaattgccctacgaggctgaaggaatctatc

SEQ ID NO: 254545 - DNA, 33 bp, Homo sapien
aaactgaacaaaactacactttgacctagaatt

SEQ ID NO: 254546 - DNA, 33 bp, Homo sapien
aaactgaacaaaactatactttgacctagaatt

SEQ ID NO: 254547 - DNA, 33 bp, Homo sapien
acaaattatcacaaaccgagcggcttaaatgac

SEQ ID NO: 254548 - DNA, 33 bp, Homo sapien
acaaattatcacaaactgagcggcttaaatgac

SEQ ID NO: 254549 - DNA, 33 bp, Homo sapien
tgtctgtcttgcaaaacccgaactgtttgtatt

SEQ ID NO: 254550 - DNA, 33 bp, Homo sapien
tgtctgtcttgcaaaagccgaactgtttgtatt

SEQ ID NO: 254551 - DNA, 33 bp, Homo sapien
atcagaaaattggtcaagattggattctaggcc

SEQ ID NO: 254552 - DNA, 33 bp, Homo sapien
atcagaaaattggtcaggattggattctaggcc

SEQ ID NO: 254553 - DNA, 33 bp, Homo sapien
aaaactccatgatgaaaaaaaggctgcaacagt

SEQ ID NO: 254554 - DNA, 33 bp, Homo sapien
aaaactccatgatgaacaaaaggctgcaacagt

SEQ ID NO: 254555 - DNA, 33 bp, Homo sapien
cccccaggactctgaagaatctattcctgttgt

SEQ ID NO: 254556 - DNA, 33 bp, Homo sapien
cccccaggactctgaataatctattcctgttgt

SEQ ID NO: 254557 - DNA, 33 bp, Homo sapien
actttctattacacaacgaacaacaacgtgagg

SEQ ID NO: 254558 - DNA, 33 bp, Homo sapien
actttctattacacaatgaacaacaacgtgagg

SEQ ID NO: 254559 - DNA, 33 bp, Homo sapien
gaatagcagccagaagaaaaaagtaatagttca

SEQ ID NO: 254560 - DNA, 33 bp, Homo sapien
gaatagcagccagaaggaaaaagtaatagttca

SEQ ID NO: 254561 - DNA, 33 bp, Homo sapien
tgtgtctgcaggccacacagggattttcctgag

SEQ ID NO: 254562 - DNA, 33 bp, Homo sapien
tgtgtctgcaggccacgcagggattttcctgag

SEQ ID NO: 254563 - DNA, 33 bp, Homo sapien
gataaatgcctcgtgacggctcgtacgaaggag

SEQ ID NO: 254564 - DNA, 33 bp, Homo sapien
gataaatgcctcgtgatggctcgtacgaaggag

SEQ ID NO: 254565 - DNA, 33 bp, Homo sapien
acgactgcgtgtgagcactatattctgaatcca

SEQ ID NO: 254566 - DNA, 33 bp, Homo sapien
acgactgcgtgtgagcgctatattctgaatcca

SEQ ID NO: 254567 - DNA, 33 bp, Homo sapien
tgtttcggatcctagaagtctttttcaggaaca

SEQ ID NO: 254568 - DNA, 33 bp, Homo sapien
tgtttcggatcctagaggtctttttcaggaaca

SEQ ID NO: 254569 - DNA, 33 bp, Homo sapien
gcagtgccttcaccgacatgttcaagatactga

SEQ ID NO: 254570 - DNA, 33 bp, Homo sapien
gcagtgccttcaccgatatgttcaagatactga

SEQ ID NO: 254571 - DNA, 33 bp, Homo sapien
cttcaaggatgaaaaccatatacggtcaagtgg

SEQ ID NO: 254572 - DNA, 33 bp, Homo sapien
cttcaaggatgaaaacgatatacggtcaagtgg

SEQ ID NO: 254573 - DNA, 33 bp, Homo sapien
agcactgaggtaataacgcaacatctaggctta

SEQ ID NO: 254574 - DNA, 33 bp, Homo sapien
agcactgaggtaataatgcaacatctaggctta

SEQ ID NO: 254575 - DNA, 33 bp, Homo sapien
agagccaaggaaacaccgtagcatttccactgc

SEQ ID NO: 254576 - DNA, 33 bp, Homo sapien
agagccaaggaaacactgtagcatttccactgc

SEQ ID NO: 254577 - DNA, 33 bp, Homo sapien
gttatctcagggaaacaaaattgtgtgagtttt

SEQ ID NO: 254578 - DNA, 33 bp, Homo sapien
gttatctcagggaaacgaaattgtgtgagtttt

SEQ ID NO: 254579 - DNA, 33 bp, Homo sapien
agttgtgaaatattgacgacattccttaatcat

SEQ ID NO: 254580 - DNA, 33 bp, Homo sapien
agttgtgaaatattgatgacattccttaatcat

SEQ ID NO: 254581 - DNA, 33 bp, Homo sapien
attaaaagaggaaatgacagaggcatttgaatc

SEQ ID NO: 254582 - DNA, 33 bp, Homo sapien
attaaaagaggaaatggcagaggcatttgaatc

SEQ ID NO: 254583 - DNA, 33 bp, Homo sapien
tttagattgctatggcagaggtgacttactgca

SEQ ID NO: 254584 - DNA, 33 bp, Homo sapien
tttagattgctatggcggaggtgacttactgca

SEQ ID NO: 254585 - DNA, 33 bp, Homo sapien
aacccacgggcactccaagaggcttccgggctg

SEQ ID NO: 254586 - DNA, 33 bp, Homo sapien
aacccacgggcactccgagaggcttccgggctg

SEQ ID NO: 254587 - DNA, 33 bp, Homo sapien
aaagctgaagctaagggaagtttgaatactata

SEQ ID NO: 254588 - DNA, 33 bp, Homo sapien
aaagctgaagctaaggtaagtttgaatactata

SEQ ID NO: 254589 - DNA, 33 bp, Homo sapien
atgatccttcaccaaacaatttccataggtttc

SEQ ID NO: 254590 - DNA, 33 bp, Homo sapien
atgatccttcaccaaataatttccataggtttc

SEQ ID NO: 254591 - DNA, 33 bp, Homo sapien
gatgggaaaaatgggacgttcacgtgagagcaa

SEQ ID NO: 254592 - DNA, 33 bp, Homo sapien
gatgggaaaaatgggatgttcacgtgagagcaa

SEQ ID NO: 254593 - DNA, 33 bp, Homo sapien
ctcttccttccacgcaagttcagagaggcaggg

SEQ ID NO: 254594 - DNA, 33 bp, Homo sapien
ctcttccttccacgcatgttcagagaggcaggg

SEQ ID NO: 254595 - DNA, 33 bp, Homo sapien
atgccctgatcatttgcaggctctgcccattct

SEQ ID NO: 254596 - DNA, 33 bp, Homo sapien
atgccctgatcatttgtaggctctgcccattct

SEQ ID NO: 254597 - DNA, 33 bp, Homo sapien
ttgacaagtcattaaactgcactaggaaataca

SEQ ID NO: 254598 - DNA, 33 bp, Homo sapien
ttgacaagtcattaaattgcactaggaaataca

SEQ ID NO: 254599 - DNA, 33 bp, Homo sapien
gaagatcagcagataaatccagaaatcttcact

SEQ ID NO: 254600 - DNA, 33 bp, Homo sapien
gaagatcagcagataagtccagaaatcttcact

SEQ ID NO: 254601 - DNA, 33 bp, Homo sapien
aaattataattcagcacaaggagtagtttaggg

SEQ ID NO: 254602 - DNA, 33 bp, Homo sapien
aaattataattcagcataaggagtagtttaggg

SEQ ID NO: 254603 - DNA, 33 bp, Homo sapien
gaataacgattatgcacgtggattttggaggtg

SEQ ID NO: 254604 - DNA, 33 bp, Homo sapien
gaataacgattatgcaggtggattttggaggtg

SEQ ID NO: 254605 - DNA, 33 bp, Homo sapien
gaattaaataatggacaaatgcctgtgctggga

SEQ ID NO: 254606 - DNA, 33 bp, Homo sapien
gaattaaataatggacgaatgcctgtgctggga

SEQ ID NO: 254607 - DNA, 33 bp, Homo sapien
tagataggaagaataacgtcttgatgaaactag

SEQ ID NO: 254608 - DNA, 33 bp, Homo sapien
tagataggaagaataatgtcttgatgaaactag

SEQ ID NO: 254609 - DNA, 33 bp, Homo sapien
ctaatttggtgcataaagcaaatattatgtgtg

SEQ ID NO: 254610 - DNA, 33 bp, Homo sapien
ctaatttggtgcataaggcaaatattatgtgtg

SEQ ID NO: 254611 - DNA, 33 bp, Homo sapien
gctgttctattctacgccattttgagaaatgct

SEQ ID NO: 254612 - DNA, 33 bp, Homo sapien
gctgttctattctacgtcattttgagaaatgct

SEQ ID NO: 254613 - DNA, 33 bp, Homo sapien
cacgctcaaaccatcccgcagctaaaacagaat

SEQ ID NO: 254614 - DNA, 33 bp, Homo sapien
cacgctcaaaccatcctgcagctaaaacagaat

SEQ ID NO: 254615 - DNA, 33 bp, Homo sapien
ttgctcacatcaacaagtctgagggtggtcatt

SEQ ID NO: 254616 - DNA, 33 bp, Homo sapien
ttgctcacatcaacaattctgagggtggtcatt

SEQ ID NO: 254617 - DNA, 33 bp, Homo sapien
gttctcctggctgaacacttggtcaacaatgct

SEQ ID NO: 254618 - DNA, 33 bp, Homo sapien
gttctcctggctgaacgcttggtcaacaatgct

SEQ ID NO: 254619 - DNA, 33 bp, Homo sapien
gtggtcccattgcaaacggaatgcgaggattgc

SEQ ID NO: 254620 - DNA, 33 bp, Homo sapien
gtggtcccattgcaaagggaatgcgaggattgc

SEQ ID NO: 254621 - DNA, 33 bp, Homo sapien
acctaatatcaagcaccgaagataatggttaaa

SEQ ID NO: 254622 - DNA, 33 bp, Homo sapien
acctaatatcaagcactgaagataatggttaaa

SEQ ID NO: 254623 - DNA, 33 bp, Homo sapien
agaaactagtcaaggtcaaagtgacacagagtc

SEQ ID NO: 254624 - DNA, 33 bp, Homo sapien
agaaactagtcaaggttaaagtgacacagagtc

SEQ ID NO: 254625 - DNA, 33 bp, Homo sapien
gggatccactaggatcaactgttcatccccgat

SEQ ID NO: 254626 - DNA, 33 bp, Homo sapien
gggatccactaggatcgactgttcatccccgat

SEQ ID NO: 254627 - DNA, 33 bp, Homo sapien
gtgccccagaagttaccggataaccagctggac

SEQ ID NO: 254628 - DNA, 33 bp, Homo sapien
gtgccccagaagttactggataaccagctggac

SEQ ID NO: 254629 - DNA, 33 bp, Homo sapien
agcatgtttcatgtgcacctctaagctctgcca

SEQ ID NO: 254630 - DNA, 33 bp, Homo sapien
agcatgtttcatgtgcgcctctaagctctgcca

SEQ ID NO: 254631 - DNA, 33 bp, Homo sapien
gaacttccaagaattacagatgttacgttaaaa

SEQ ID NO: 254632 - DNA, 33 bp, Homo sapien
gaacttccaagaattatagatgttacgttaaaa

SEQ ID NO: 254633 - DNA, 33 bp, Homo sapien
atgcggggcaaagccacgagacgaccagggtgc

SEQ ID NO: 254634 - DNA, 33 bp, Homo sapien
atgcggggcaaagccatgagacgaccagggtgc

SEQ ID NO: 254635 - DNA, 33 bp, Homo sapien
ccagaacctggtaaaaagtgcagctgaggttca

SEQ ID NO: 254636 - DNA, 33 bp, Homo sapien
ccagaacctggtaaaaggtgcagctgaggttca

SEQ ID NO: 254637 - DNA, 33 bp, Homo sapien
ttccccttctgttctaaggctttgaggtgacat

SEQ ID NO: 254638 - DNA, 33 bp, Homo sapien
ttccccttctgttctatggctttgaggtgacat

SEQ ID NO: 254639 - DNA, 33 bp, Homo sapien
taccctgcatttccaaaattcccttgcagctag

SEQ ID NO: 254640 - DNA, 33 bp, Homo sapien
taccctgcatttccaagattcccttgcagctag

SEQ ID NO: 254641 - DNA, 33 bp, Homo sapien
ttcatctgaatctcctcagatgtccctccgtgt

SEQ ID NO: 254642 - DNA, 33 bp, Homo sapien
ttcatctgaatctccttagatgtccctccgtgt

SEQ ID NO: 254643 - DNA, 33 bp, Homo sapien
agagatttctatttcccaagaccctccaacagg

SEQ ID NO: 254644 - DNA, 33 bp, Homo sapien
agagatttctatttcctaagaccctccaacagg

SEQ ID NO: 254645 - DNA, 33 bp, Homo sapien
tacctctagaacctacactctgcacaagatgga

SEQ ID NO: 254646 - DNA, 33 bp, Homo sapien
tacctctagaacctacgctctgcacaagatgga

SEQ ID NO: 254647 - DNA, 33 bp, Homo sapien
cttgagtgcatttagacgtcgggagagacacga

SEQ ID NO: 254648 - DNA, 33 bp, Homo sapien
cttgagtgcatttagatgtcgggagagacacga

SEQ ID NO: 254649 - DNA, 33 bp, Homo sapien
attttttccacagaaacgttagagacgaaaaag

SEQ ID NO: 254650 - DNA, 33 bp, Homo sapien
attttttccacagaaatgttagagacgaaaaag

SEQ ID NO: 254651 - DNA, 33 bp, Homo sapien
agataaaggccatctgaagtttaagcttaattc

SEQ ID NO: 254652 - DNA, 33 bp, Homo sapien
agataaaggccatctggagtttaagcttaattc

SEQ ID NO: 254653 - DNA, 33 bp, Homo sapien
agaacagtgcttagaaaaaagggaggacaatgt

SEQ ID NO: 254654 - DNA, 33 bp, Homo sapien
agaacagtgcttagaacaaagggaggacaatgt

SEQ ID NO: 254655 - DNA, 33 bp, Homo sapien
aaaggtaataggaaaaaagtgaataaatagcct

SEQ ID NO: 254656 - DNA, 33 bp, Homo sapien
aaaggtaataggaaaacagtgaataaatagcct

SEQ ID NO: 254657 - DNA, 33 bp, Homo sapien
attcattgacatctgaaaaattcaaactattca

SEQ ID NO: 254658 - DNA, 33 bp, Homo sapien
attcattgacatctgataaattcaaactattca

SEQ ID NO: 254659 - DNA, 33 bp, Homo sapien
ctttcaccagtgctatcaagtgaaattattcat

SEQ ID NO: 254660 - DNA, 33 bp, Homo sapien
ctttcaccagtgctattaagtgaaattattcat

SEQ ID NO: 254661 - DNA, 33 bp, Homo sapien
tccagtcacaaccagccgagcatgacttaggtc

SEQ ID NO: 254662 - DNA, 33 bp, Homo sapien
tccagtcacaaccagctgagcatgacttaggtc

SEQ ID NO: 254663 - DNA, 33 bp, Homo sapien
ataaagccaagctttccagagcatttagcacta

SEQ ID NO: 254664 - DNA, 33 bp, Homo sapien
ataaagccaagctttcgagagcatttagcacta

SEQ ID NO: 254665 - DNA, 33 bp, Homo sapien
gctggttatctgctaacgtagtaggcagcctct

SEQ ID NO: 254666 - DNA, 33 bp, Homo sapien
gctggttatctgctaatgtagtaggcagcctct

SEQ ID NO: 254667 - DNA, 33 bp, Homo sapien
cccaaagaggccattaaatctcttcattatttg

SEQ ID NO: 254668 - DNA, 33 bp, Homo sapien
cccaaagaggccattacatctcttcattatttg

SEQ ID NO: 254669 - DNA, 33 bp, Homo sapien
aacaacagtttattacagcgaaagcatgcagat

SEQ ID NO: 254670 - DNA, 33 bp, Homo sapien
aacaacagtttattacggcgaaagcatgcagat

SEQ ID NO: 254671 - DNA, 33 bp, Homo sapien
ccgcggtaatcatcgaagtcttgtctataccct

SEQ ID NO: 254672 - DNA, 33 bp, Homo sapien
ccgcggtaatcatcgacgtcttgtctataccct

SEQ ID NO: 254673 - DNA, 33 bp, Homo sapien
cttactacttctattgcactcggtgaacaggaa

SEQ ID NO: 254674 - DNA, 33 bp, Homo sapien
cttactacttctattgtactcggtgaacaggaa

SEQ ID NO: 254675 - DNA, 33 bp, Homo sapien
tattgcactgattttccacctgttctcccttga

SEQ ID NO: 254676 - DNA, 33 bp, Homo sapien
tattgcactgattttctacctgttctcccttga

SEQ ID NO: 254677 - DNA, 33 bp, Homo sapien
agagagagtcaaagacagaagaggagagaccag

SEQ ID NO: 254678 - DNA, 33 bp, Homo sapien
agagagagtcaaagacggaagaggagagaccag

SEQ ID NO: 254679 - DNA, 33 bp, Homo sapien
ttaaaatctttaatacagacagggcttcaccat

SEQ ID NO: 254680 - DNA, 33 bp, Homo sapien
ttaaaatctttaatacggacagggcttcaccat

SEQ ID NO: 254681 - DNA, 33 bp, Homo sapien; identical to SEQ ID NO: 254679

SEQ ID NO: 254682 - DNA, 33 bp, Homo sapien; identical to SEQ ID NO: 254680

SEQ ID NO: 254683 - DNA, 33 bp, Homo sapien
aatttccatggccacaagcactccttttggtta

SEQ ID NO: 254684 - DNA, 33 bp, Homo sapien
aatttccatggccacaggcactccttttggtta

SEQ ID NO: 254685 - DNA, 33 bp, Homo sapien
agatagatgcctccaaatatgatcacgcaagcc

SEQ ID NO: 254686 - DNA, 33 bp, Homo sapien
agatagatgcctccaagtatgatcacgcaagcc

SEQ ID NO: 254687 - DNA, 33 bp, Homo sapien
gaagacaatgttcaacaacttcatttaactctt

SEQ ID NO: 254688 - DNA, 33 bp, Homo sapien
gaagacaatgttcaacgacttcatttaactctt

SEQ ID NO: 254689 - DNA, 33 bp, Homo sapien
ctgccccagggggacaatatggagacaacgttg

SEQ ID NO: 254690 - DNA, 33 bp, Homo sapien
ctgccccagggggacagtatggagacaacgttg

SEQ ID NO: 254691 - DNA, 33 bp, Homo sapien
tatacatagaaaactcacatgtacataatgcat

SEQ ID NO: 254692 - DNA, 33 bp, Homo sapien
tatacatagaaaactcgcatgtacataatgcat

SEQ ID NO: 254693 - DNA, 33 bp, Homo sapien
ttggctcctagccagacgatgccacataacaca

SEQ ID NO: 254694 - DNA, 33 bp, Homo sapien
ttggctcctagccagatgatgccacataacaca

SEQ ID NO: 254695 - DNA, 33 bp, Homo sapien
atgaaggctcattagagaaatggatggtagatg

SEQ ID NO: 254696 - DNA, 33 bp, Homo sapien
atgaaggctcattagataaatggatggtagatg

SEQ ID NO: 254697 - DNA, 33 bp, Homo sapien
agaacaattttagggcgctttaaacgctatgaa

SEQ ID NO: 254698 - DNA, 33 bp, Homo sapien
agaacaattttagggctctttaaacgctatgaa

SEQ ID NO: 254699 - DNA, 33 bp, Homo sapien
aacaaatcactgcaaacagggctgctcacagca

SEQ ID NO: 254700 - DNA, 33 bp, Homo sapien
aacaaatcactgcaaagagggctgctcacagca

SEQ ID NO: 254701 - DNA, 33 bp, Homo sapien
aagcaaaggattctcactgaaaaggggtgacag

SEQ ID NO: 254702 - DNA, 33 bp, Homo sapien
aagcaaaggattctcattgaaaaggggtgacag

SEQ ID NO: 254703 - DNA, 33 bp, Homo sapien
tcagcattgcttaagaccagccatgactctgga

SEQ ID NO: 254704 - DNA, 33 bp, Homo sapien
tcagcattgcttaagatcagccatgactctgga

SEQ ID NO: 254705 - DNA, 33 bp, Homo sapien
ggactgttataggggacctttgaatgtagtaag

SEQ ID NO: 254706 - DNA, 33 bp, Homo sapien
ggactgttataggggatctttgaatgtagtaag

SEQ ID NO: 254707 - DNA, 33 bp, Homo sapien
atgatctctaaaggctaagaagctaccatcagt

SEQ ID NO: 254708 - DNA, 33 bp, Homo sapien
atgatctctaaaggctgagaagctaccatcagt

SEQ ID NO: 254709 - DNA, 33 bp, Homo sapien
gttttaaatcttccacgatccaatctagtctca

SEQ ID NO: 254710 - DNA, 33 bp, Homo sapien
gttttaaatcttccactatccaatctagtctca

SEQ ID NO: 254711 - DNA, 33 bp, Homo sapien
tttttccctccgcagcaccaacggtcattctct

SEQ ID NO: 254712 - DNA, 33 bp, Homo sapien
tttttccctccgcagcgccaacggtcattctct

SEQ ID NO: 254713 - DNA, 33 bp, Homo sapien
tcatgtggttgcctgacggtagatggtggagac

SEQ ID NO: 254714 - DNA, 33 bp, Homo sapien
tcatgtggttgcctgatggtagatggtggagac

SEQ ID NO: 254715 - DNA, 33 bp, Homo sapien
ctcatcactcttctaacagagaaatgtttctct

SEQ ID NO: 254716 - DNA, 33 bp, Homo sapien
ctcatcactcttctaatagagaaatgtttctct

SEQ ID NO: 254717 - DNA, 33 bp, Homo sapien
ttcccaggtatgcacacgcagtgagttgtttga

SEQ ID NO: 254718 - DNA, 33 bp, Homo sapien
ttcccaggtatgcacatgcagtgagttgtttga

SEQ ID NO: 254719 - DNA, 33 bp, Homo sapien
acactagcccttcagaggccccctcacagaagc

SEQ ID NO: 254720 - DNA, 33 bp, Homo sapien
acactagcccttcagatgccccctcacagaagc

SEQ ID NO: 254721 - DNA, 33 bp, Homo sapien
tctttccgaggacaaaattactgtaaaaaatca

SEQ ID NO: 254722 - DNA, 33 bp, Homo sapien
tctttccgaggacaaagttactgtaaaaaatca

SEQ ID NO: 254723 - DNA, 33 bp, Homo sapien
ctcctgatgtaaaaagcctcattagttaagaaa

SEQ ID NO: 254724 - DNA, 33 bp, Homo sapien
ctcctgatgtaaaaagtctcattagttaagaaa

SEQ ID NO: 254725 - DNA, 33 bp, Homo sapien
gtttttatttatagtccgaaatacgtcaaagga

SEQ ID NO: 254726 - DNA, 33 bp, Homo sapien
gtttttatttatagtctgaaatacgtcaaagga

SEQ ID NO: 254727 - DNA, 33 bp, Homo sapien
cttctcccaagcccacaaacgtctttcaggtat

SEQ ID NO: 254728 - DNA, 33 bp, Homo sapien
cttctcccaagcccacgaacgtctttcaggtat

SEQ ID NO: 254729 - DNA, 33 bp, Homo sapien
ggctgagggcagcgacaacctacaaagcaatag

SEQ ID NO: 254730 - DNA, 33 bp, Homo sapien
ggctgagggcagcgacgacctacaaagcaatag

SEQ ID NO: 254731 - DNA, 33 bp, Homo sapien
tggacatcgagaaaacagaaccctcatctggcc

SEQ ID NO: 254732 - DNA, 33 bp, Homo sapien
tggacatcgagaaaacggaaccctcatctggcc

SEQ ID NO: 254733 - DNA, 33 bp, Homo sapien
tttgagtcatgggtacactagaagccctaccac

SEQ ID NO: 254734 - DNA, 33 bp, Homo sapien
tttgagtcatgggtacgctagaagccctaccac

SEQ ID NO: 254735 - DNA, 33 bp, Homo sapien
tgactcaaacggtgaacgctgtacccaataggt

SEQ ID NO: 254736 - DNA, 33 bp, Homo sapien
tgactcaaacggtgaatgctgtacccaataggt

SEQ ID NO: 254737 - DNA, 33 bp, Homo sapien
tgacctagagaagaatcagcacgtctagatcag

SEQ ID NO: 254738 - DNA, 33 bp, Homo sapien
tgacctagagaagaattagcacgtctagatcag

SEQ ID NO: 254739 - DNA, 33 bp, Homo sapien
tagatcaggagtacaaaggtgcatattacagaa

SEQ ID NO: 254740 - DNA, 33 bp, Homo sapien
tagatcaggagtacaacggtgcatattacagaa

SEQ ID NO: 254741 - DNA, 33 bp, Homo sapien
tgctgtttgtctgtaaccatgtccttaaagaaa

SEQ ID NO: 254742 - DNA, 33 bp, Homo sapien
tgctgtttgtctgtaatcatgtccttaaagaaa

SEQ ID NO: 254743 - DNA, 33 bp, Homo sapien
atggtaaaattcaacaatcttatgcatatactt

SEQ ID NO: 254744 - DNA, 33 bp, Homo sapien
atggtaaaattcaacagtcttatgcatatactt

SEQ ID NO: 254745 - DNA, 33 bp, Homo sapien
ttgttttgaaagtctacaatgcaggccaatatc

SEQ ID NO: 254746 - DNA, 33 bp, Homo sapien
ttgttttgaaagtctagaatgcaggccaatatc

SEQ ID NO: 254747 - DNA, 33 bp, Homo sapien
atacaatgtctaacacaaatacgttgtctaaca

SEQ ID NO: 254748 - DNA, 33 bp, Homo sapien
atacaatgtctaacacgaatacgttgtctaaca

SEQ ID NO: 254749 - DNA, 33 bp, Homo sapien
ttcagttaacctgtgtgaagccattgatctatt

SEQ ID NO: 254750 - DNA, 33 bp, Homo sapien
ttcagttaacctgtgttaagccattgatctatt

SEQ ID NO: 254751 - DNA, 33 bp, Homo sapien
ctcagctcttacttcacggagagatgagaaact

SEQ ID NO: 254752 - DNA, 33 bp, Homo sapien
ctcagctcttacttcatggagagatgagaaact

SEQ ID NO: 254753 - DNA, 33 bp, Homo sapien
attctccaagacatcacactgtgcaaaaggagg

SEQ ID NO: 254754 - DNA, 33 bp, Homo sapien
attctccaagacatcatactgtgcaaaaggagg

SEQ ID NO: 254755 - DNA, 33 bp, Homo sapien
aatcccctcttattgaggaagttctgctcagcc

SEQ ID NO: 254756 - DNA, 33 bp, Homo sapien
aatcccctcttattgatgaagttctgctcagcc

SEQ ID NO: 254757 - DNA, 33 bp, Homo sapien
aattcattcattcattgaagtgcttcttgaatc

SEQ ID NO: 254758 - DNA, 33 bp, Homo sapien
aattcattcattcatttaagtgcttcttgaatc

SEQ ID NO: 254759 - DNA, 33 bp, Homo sapien
ggctgtggcaaggactgaaaataagacaacaat

SEQ ID NO: 254760 - DNA, 33 bp, Homo sapien
ggctgtggcaaggacttaaaataagacaacaat

SEQ ID NO: 254761 - DNA, 33 bp, Homo sapien; identical to SEQ ID NO: 254759

SEQ ID NO: 254762 - DNA, 33 bp, Homo sapien; identical to SEQ ID NO: 254760

SEQ ID NO: 254763 - DNA, 33 bp, Homo sapien
gatggacaaagtaccactgcatttgcatcagta

SEQ ID NO: 254764 - DNA, 33 bp, Homo sapien
gatggacaaagtaccattgcatttgcatcagta

SEQ ID NO: 254765 - DNA, 33 bp, Homo sapien
aagggtgaggagtaagaagtatgcaagggtaat

SEQ ID NO: 254766 - DNA, 33 bp, Homo sapien
aagggtgaggagtaagcagtatgcaagggtaat

SEQ ID NO: 254767 - DNA, 33 bp, Homo sapien
aatgtcttcctgttggcaattaacttcgctgaa

SEQ ID NO: 254768 - DNA, 33 bp, Homo sapien
aatgtcttcctgttggtaattaacttcgctgaa

SEQ ID NO: 254769 - DNA, 33 bp, Homo sapien
tgatttctcaggatcacgtgagttgactgaggc

SEQ ID NO: 254770 - DNA, 33 bp, Homo sapien
tgatttctcaggatcatgtgagttgactgaggc

SEQ ID NO: 254771 - DNA, 33 bp, Homo sapien
ttatccaacagtgccacgatcagaacaatcact

SEQ ID NO: 254772 - DNA, 33 bp, Homo sapien
ttatccaacagtgccaggatcagaacaatcact

SEQ ID NO: 254773 - DNA, 33 bp, Homo sapien
gctaggatatgggctcagaatctgtattagttt

SEQ ID NO: 254774 - DNA, 33 bp, Homo sapien
gctaggatatgggctcggaatctgtattagttt

SEQ ID NO: 254775 - DNA, 33 bp, Homo sapien
caaatcagcacgttaacccttacaggcaggtta

SEQ ID NO: 254776 - DNA, 33 bp, Homo sapien
caaatcagcacgttaatccttacaggcaggtta

SEQ ID NO: 254777 - DNA, 33 bp, Homo sapien
catagcagaagaagaacttacaagatgagccta

SEQ ID NO: 254778 - DNA, 33 bp, Homo sapien
catagcagaagaagaatttacaagatgagccta

SEQ ID NO: 254779 - DNA, 33 bp, Homo sapien
gaggacagtcagaagacgaatacagcaccgccc

SEQ ID NO: 254780 - DNA, 33 bp, Homo sapien
gaggacagtcagaagatgaatacagcaccgccc

SEQ ID NO: 254781 - DNA, 33 bp, Homo sapien
gtcagaagatgaatacaacaaacaaaaatatat

SEQ ID NO: 254782 - DNA, 33 bp, Homo sapien
gtcagaagatgaatacgacaaacaaaaatatat

SEQ ID NO: 254783 - DNA, 33 bp, Homo sapien
tagatcagttgggtgacgacagtttacaataat

SEQ ID NO: 254784 - DNA, 33 bp, Homo sapien
tagatcagttgggtgatgacagtttacaataat

SEQ ID NO: 254785 - DNA, 33 bp, Homo sapien
cgggagactccctccacatgagtcctagccatg

SEQ ID NO: 254786 - DNA, 33 bp, Homo sapien
cgggagactccctccatatgagtcctagccatg

SEQ ID NO: 254787 - DNA, 33 bp, Homo sapien
ccacatccctagctcacgtggaattttgtgggc

SEQ ID NO: 254788 - DNA, 33 bp, Homo sapien
ccacatccctagctcatgtggaattttgtgggc

SEQ ID NO: 254789 - DNA, 33 bp, Homo sapien
ttctcagcattgttaaaagcctggcacttcccc

SEQ ID NO: 254790 - DNA, 33 bp, Homo sapien
ttctcagcattgttaagagcctggcacttcccc

SEQ ID NO: 254791 - DNA, 33 bp, Homo sapien
atgctcatgttatagccgaagagaattaggcac

SEQ ID NO: 254792 - DNA, 33 bp, Homo sapien
atgctcatgttatagctgaagagaattaggcac

SEQ ID NO: 254793 - DNA, 33 bp, Homo sapien
caacgtgatggctaaaaacaagagacactcact

SEQ ID NO: 254794 - DNA, 33 bp, Homo sapien
caacgtgatggctaaatacaagagacactcact

SEQ ID NO: 254795 - DNA, 33 bp, Homo sapien
caagaaaacaaggttgaagctgtcttggctttt

SEQ ID NO: 254796 - DNA, 33 bp, Homo sapien
caagaaaacaaggttggagctgtcttggctttt

SEQ ID NO: 254797 - DNA, 33 bp, Homo sapien
aggttaggacttaagaagcatctcaagggacag

SEQ ID NO: 254798 - DNA, 33 bp, Homo sapien
aggttaggacttaagaggcatctcaagggacag

SEQ ID NO: 254799 - DNA, 33 bp, Homo sapien
gttcaaacttcacagaacatttcacaaaaagtg

SEQ ID NO: 254800 - DNA, 33 bp, Homo sapien
gttcaaacttcacagagcatttcacaaaaagtg

SEQ ID NO: 254801 - DNA, 33 bp, Homo sapien
ctcagaatgaaggagaccttattcccagacagc

SEQ ID NO: 254802 - DNA, 33 bp, Homo sapien
ctcagaatgaaggagatcttattcccagacagc

SEQ ID NO: 254803 - DNA, 33 bp, Homo sapien
tgctatggagtaaataaacaagataagtggttt

SEQ ID NO: 254804 - DNA, 33 bp, Homo sapien
tgctatggagtaaatagacaagataagtggttt

SEQ ID NO: 254805 - DNA, 33 bp, Homo sapien
ggcatgccagactcaaacgtgtccttgaacata

SEQ ID NO: 254806 - DNA, 33 bp, Homo sapien
ggcatgccagactcaagcgtgtccttgaacata

SEQ ID NO: 254807 - DNA, 33 bp, Homo sapien
aagagaacatggccataatgcacattctctgtt

SEQ ID NO: 254808 - DNA, 33 bp, Homo sapien
aagagaacatggccatcatgcacattctctgtt

SEQ ID NO: 254809 - DNA, 33 bp, Homo sapien
tttggctctatgttcacgttttctcatgtaatt

SEQ ID NO: 254810 - DNA, 33 bp, Homo sapien
tttggctctatgttcatgttttctcatgtaatt

SEQ ID NO: 254811 - DNA, 33 bp, Homo sapien
atcatcatctgcacgcaacagttcttgagtgaa

SEQ ID NO: 254812 - DNA, 33 bp, Homo sapien
atcatcatctgcacgcgacagttcttgagtgaa

SEQ ID NO: 254813 - DNA, 33 bp, Homo sapien
tgtctttaaaaggacaatgataacgcaagtgaa

SEQ ID NO: 254814 - DNA, 33 bp, Homo sapien
tgtctttaaaaggacagtgataacgcaagtgaa

SEQ ID NO: 254815 - DNA, 33 bp, Homo sapien
gcatgccctctcctacagcagattctttgtgta

SEQ ID NO: 254816 - DNA, 33 bp, Homo sapien
gcatgccctctcctacggcagattctttgtgta

SEQ ID NO: 254817 - DNA, 33 bp, Homo sapien
gctctgcttttacacaaaagaggccaaagctgg

SEQ ID NO: 254818 - DNA, 33 bp, Homo sapien
gctctgcttttacacataagaggccaaagctgg

SEQ ID NO: 254819 - DNA, 33 bp, Homo sapien
aagctgaacctgacggaaaggaatgggttaata

SEQ ID NO: 254820 - DNA, 33 bp, Homo sapien
aagctgaacctgacgggaaggaatgggttaata

SEQ ID NO: 254821 - DNA, 33 bp, Homo sapien
tttcatacctttgataacagcttaatgaacaga

SEQ ID NO: 254822 - DNA, 33 bp, Homo sapien
tttcatacctttgataccagcttaatgaacaga

SEQ ID NO: 254823 - DNA, 33 bp, Homo sapien
cattgttctctacctcaatatcattaactaagt

SEQ ID NO: 254824 - DNA, 33 bp, Homo sapien
cattgttctctacctcgatatcattaactaagt

SEQ ID NO: 254825 - DNA, 33 bp, Homo sapien
gtgagcaaactaacaaatgggcatgataattgc

SEQ ID NO: 254826 - DNA, 33 bp, Homo sapien
gtgagcaaactaacaagtgggcatgataattgc

SEQ ID NO: 254827 - DNA, 33 bp, Homo sapien
ggggtcactgcatccaaggtccaactagcagaa

SEQ ID NO: 254828 - DNA, 33 bp, Homo sapien
ggggtcactgcatccacggtccaactagcagaa

SEQ ID NO: 254829 - DNA, 33 bp, Homo sapien
agctcagctctcacaaatctggtctggttacca

SEQ ID NO: 254830 - DNA, 33 bp, Homo sapien
agctcagctctcacaagtctggtctggttacca

SEQ ID NO: 254831 - DNA, 33 bp, Homo sapien
agtttgaagatttctcaaagaacttaaggaact

SEQ ID NO: 254832 - DNA, 33 bp, Homo sapien
agtttgaagatttctcgaagaacttaaggaact

SEQ ID NO: 254833 - DNA, 33 bp, Homo sapien
ttgttctggcctatccactgaaaagctggcagg

SEQ ID NO: 254834 - DNA, 33 bp, Homo sapien
ttgttctggcctatccgctgaaaagctggcagg

SEQ ID NO: 254835 - DNA, 33 bp, Homo sapien
aaatgtggtccatctacactctttactcctttc

SEQ ID NO: 254836 - DNA, 33 bp, Homo sapien
aaatgtggtccatctatactctttactcctttc

SEQ ID NO: 254837 - DNA, 33 bp, Homo sapien
tgggggtttcatattcaccagagaaaggagtaa

SEQ ID NO: 254838 - DNA, 33 bp, Homo sapien
tgggggtttcatattcgccagagaaaggagtaa

SEQ ID NO: 254839 - DNA, 33 bp, Homo sapien
cttgcatgattctgtaagttgactgagacaaac

SEQ ID NO: 254840 - DNA, 33 bp, Homo sapien
cttgcatgattctgtaggttgactgagacaaac

SEQ ID NO: 254841 - DNA, 33 bp, Homo sapien
ttccagatatttcctacaaattgaatcacacaa

SEQ ID NO: 254842 - DNA, 33 bp, Homo sapien
ttccagatatttcctataaattgaatcacacaa

SEQ ID NO: 254843 - DNA, 33 bp, Homo sapien
agttaataaagttacgacaacacactgtgacta

SEQ ID NO: 254844 - DNA, 33 bp, Homo sapien
agttaataaagttacgtcaacacactgtgacta

SEQ ID NO: 254845 - DNA, 33 bp, Homo sapien
tcctgggtgcccaggaagagggaaacagtgatg

SEQ ID NO: 254846 - DNA, 33 bp, Homo sapien
tcctgggtgcccaggaggagggaaacagtgatg

SEQ ID NO: 254847 - DNA, 33 bp, Homo sapien
gcatggtggcaggagacgacttgaagtgctatg

SEQ ID NO: 254848 - DNA, 33 bp, Homo sapien
gcatggtggcaggagatgacttgaagtgctatg

SEQ ID NO: 254849 - DNA, 33 bp, Homo sapien
attgtttctctgctgaccacattaggactacat

SEQ ID NO: 254850 - DNA, 33 bp, Homo sapien
attgtttctctgctgagcacattaggactacat

SEQ ID NO: 254851 - DNA, 33 bp, Homo sapien
tgcccaggagtattgcagaagtagccccaagag

SEQ ID NO: 254852 - DNA, 33 bp, Homo sapien
tgcccaggagtattgcggaagtagccccaagag

SEQ ID NO: 254853 - DNA, 33 bp, Homo sapien
atacgttaaaggcactaaagagagatgaagtgc

SEQ ID NO: 254854 - DNA, 33 bp, Homo sapien
atacgttaaaggcactcaagagagatgaagtgc

SEQ ID NO: 254855 - DNA, 33 bp, Homo sapien
acctgggcagtcaagcaccagagctcagattca

SEQ ID NO: 254856 - DNA, 33 bp, Homo sapien
acctgggcagtcaagctccagagctcagattca

SEQ ID NO: 254857 - DNA, 33 bp, Homo sapien
atccgctagtgagcgacgggtaggtctggagat

SEQ ID NO: 254858 - DNA, 33 bp, Homo sapien
atccgctagtgagcgatgggtaggtctggagat

SEQ ID NO: 254859 - DNA, 33 bp, Homo sapien
tacatatccaaaacaaaatgcttgatttccccc

SEQ ID NO: 254860 - DNA, 33 bp, Homo sapien
tacatatccaaaacaacatgcttgatttccccc

SEQ ID NO: 254861 - DNA, 33 bp, Homo sapien
tcgagagaaatgtctcaagataagtttggagat

SEQ ID NO: 254862 - DNA, 33 bp, Homo sapien
tcgagagaaatgtctccagataagtttggagat

SEQ ID NO: 254863 - DNA, 33 bp, Homo sapien
aaacacactgtgaataacttctttaaataggta

SEQ ID NO: 254864 - DNA, 33 bp, Homo sapien
aaacacactgtgaatatcttctttaaataggta

SEQ ID NO: 254865 - DNA, 33 bp, Homo sapien
gcatgcatcgttgtcccgaacagacagatggaa

SEQ ID NO: 254866 - DNA, 33 bp, Homo sapien
gcatgcatcgttgtcctgaacagacagatggaa

SEQ ID NO: 254867 - DNA, 33 bp, Homo sapien
ccctgtgtttaaaaaaattagaatcgagtgcag

SEQ ID NO: 254868 - DNA, 33 bp, Homo sapien
ccctgtgtttaaaaaatttagaatcgagtgcag

SEQ ID NO: 254869 - DNA, 33 bp, Homo sapien
aattcaaagtgcttaccgaggcccaaggacccc

SEQ ID NO: 254870 - DNA, 33 bp, Homo sapien
aattcaaagtgcttactgaggcccaaggacccc

SEQ ID NO: 254871 - DNA, 33 bp, Homo sapien
atcaccaggatttaagcatggaactatattagt

SEQ ID NO: 254872 - DNA, 33 bp, Homo sapien
atcaccaggatttaagtatggaactatattagt

SEQ ID NO: 254873 - DNA, 33 bp, Homo sapien
atgcagcctcttcacaaaacattgtatcaatgc

SEQ ID NO: 254874 - DNA, 33 bp, Homo sapien
atgcagcctcttcacagaacattgtatcaatgc

SEQ ID NO: 254875 - DNA, 33 bp, Homo sapien
ttcattcagggtcacaatgctagccatgtcatc

SEQ ID NO: 254876 - DNA, 33 bp, Homo sapien
ttcattcagggtcacagtgctagccatgtcatc

SEQ ID NO: 254877 - DNA, 33 bp, Homo sapien
ttcctcattaatgaaacacacgtggctagacag

SEQ ID NO: 254878 - DNA, 33 bp, Homo sapien
ttcctcattaatgaaatacacgtggctagacag

SEQ ID NO: 254879 - DNA, 33 bp, Homo sapien
ggcagctggcataaaacctgaaatatgaacccc

SEQ ID NO: 254880 - DNA, 33 bp, Homo sapien
ggcagctggcataaaatctgaaatatgaacccc

SEQ ID NO: 254881 - DNA, 33 bp, Homo sapien
tcccggggggcctccaacactcatgatgcctag

SEQ ID NO: 254882 - DNA, 33 bp, Homo sapien
tcccggggggcctccagcactcatgatgcctag

SEQ ID NO: 254883 - DNA, 33 bp, Homo sapien
acaggctcggggctgacctatcaaacctgagat

SEQ ID NO: 254884 - DNA, 33 bp, Homo sapien
acaggctcggggctgagctatcaaacctgagat

SEQ ID NO: 254885 - DNA, 33 bp, Homo sapien
gaaaagtgtattttccacggagaacagagatga

SEQ ID NO: 254886 - DNA, 33 bp, Homo sapien
gaaaagtgtattttccgcggagaacagagatga

SEQ ID NO: 254887 - DNA, 33 bp, Homo sapien
aaatacacttttctcacgataacactacttttt

SEQ ID NO: 254888 - DNA, 33 bp, Homo sapien
aaatacacttttctcatgataacactacttttt

SEQ ID NO: 254889 - DNA, 33 bp, Homo sapien
aatcaaaagaagtacactgctttgtgacacatg

SEQ ID NO: 254890 - DNA, 33 bp, Homo sapien
aatcaaaagaagtacattgctttgtgacacatg

SEQ ID NO: 254891 - DNA, 33 bp, Homo sapien
actggacctttttccaatcgaaagcactcaggg

SEQ ID NO: 254892 - DNA, 33 bp, Homo sapien
actggacctttttccactcgaaagcactcaggg

SEQ ID NO: 254893 - DNA, 33 bp, Homo sapien
gaaggttgtaccttgaacttgtggggaaaacgt

SEQ ID NO: 254894 - DNA, 33 bp, Homo sapien
gaaggttgtaccttgagcttgtggggaaaacgt

SEQ ID NO: 254895 - DNA, 33 bp, Homo sapien
tattgacatttataccaagaaattaattgacat

SEQ ID NO: 254896 - DNA, 33 bp, Homo sapien
tattgacatttataccgagaaattaattgacat

SEQ ID NO: 254897 - DNA, 33 bp, Homo sapien
atcttatctgacctgtcaacactaaaaactctc

SEQ ID NO: 254898 - DNA, 33 bp, Homo sapien
atcttatctgacctgtgaacactaaaaactctc

SEQ ID NO: 254899 - DNA, 33 bp, Homo sapien
ttcttgaaagcagtcaacggggtagcattttgg

SEQ ID NO: 254900 - DNA, 33 bp, Homo sapien
ttcttgaaagcagtcaccggggtagcattttgg

SEQ ID NO: 254901 - DNA, 33 bp, Homo sapien
aggtccaagtcgaataacctttaaactttggga

SEQ ID NO: 254902 - DNA, 33 bp, Homo sapien
aggtccaagtcgaatagcctttaaactttggga

SEQ ID NO: 254903 - DNA, 33 bp, Homo sapien
aaagctgggaaaataacgtgtgtcttccacgac

SEQ ID NO: 254904 - DNA, 33 bp, Homo sapien
aaagctgggaaaataatgtgtgtcttccacgac

SEQ ID NO: 254905 - DNA, 33 bp, Homo sapien
ctcagagcctctacaaagaagtagctctgccaa

SEQ ID NO: 254906 - DNA, 33 bp, Homo sapien
ctcagagcctctacaaggaagtagctctgccaa

SEQ ID NO: 254907 - DNA, 33 bp, Homo sapien
tcaggaattccactgaacaaacgcaaggtggag

SEQ ID NO: 254908 - DNA, 33 bp, Homo sapien
tcaggaattccactgagcaaacgcaaggtggag

SEQ ID NO: 254909 - DNA, 33 bp, Homo sapien
acacttttacatttcaagtcaatcctctagata

SEQ ID NO: 254910 - DNA, 33 bp, Homo sapien
acacttttacatttcatgtcaatcctctagata

SEQ ID NO: 254911 - DNA, 33 bp, Homo sapien
agaagtacagaagacccggtcccaaatcccaga

SEQ ID NO: 254912 - DNA, 33 bp, Homo sapien
agaagtacagaagaccgggtcccaaatcccaga

SEQ ID NO: 254913 - DNA, 33 bp, Homo sapien
caatagaacttcaggcacaaaaaaagacggagg

SEQ ID NO: 254914 - DNA, 33 bp, Homo sapien
caatagaacttcaggcgcaaaaaaagacggagg

SEQ ID NO: 254915 - DNA, 33 bp, Homo sapien
aaaggcccatcaactcaacttaaactggcttca

SEQ ID NO: 254916 - DNA, 33 bp, Homo sapien
aaaggcccatcaactcgacttaaactggcttca

SEQ ID NO: 254917 - DNA, 33 bp, Homo sapien
tctaggactatctttgcacctgtaacgtagatt

SEQ ID NO: 254918 - DNA, 33 bp, Homo sapien
tctaggactatctttggacctgtaacgtagatt

SEQ ID NO: 254919 - DNA, 33 bp, Homo sapien
ttgtggcaataggtacactcctctgtaaacaca

SEQ ID NO: 254920 - DNA, 33 bp, Homo sapien
ttgtggcaataggtacgctcctctgtaaacaca

SEQ ID NO: 254921 - DNA, 33 bp, Homo sapien
ctcataacctgaagtccagtaactaagtatata

SEQ ID NO: 254922 - DNA, 33 bp, Homo sapien
ctcataacctgaagtctagtaactaagtatata

SEQ ID NO: 254923 - DNA, 33 bp, Homo sapien
ttgtgcaaatctccataagaacattacaaaaat

SEQ ID NO: 254924 - DNA, 33 bp, Homo sapien
ttgtgcaaatctccatgagaacattacaaaaat

SEQ ID NO: 254925 - DNA, 33 bp, Homo sapien
aacacacttacgtaaaagacacacattaaacat

SEQ ID NO: 254926 - DNA, 33 bp, Homo sapien
aacacacttacgtaaaggacacacattaaacat

SEQ ID NO: 254927 - DNA, 33 bp, Homo sapien
ttaattgtggtcttgacgaacaagagtctttaa

SEQ ID NO: 254928 - DNA, 33 bp, Homo sapien
ttaattgtggtcttgatgaacaagagtctttaa

SEQ ID NO: 254929 - DNA, 33 bp, Homo sapien
tatgatagaatgaacaagtttcctggtactgcc

SEQ ID NO: 254930 - DNA, 33 bp, Homo sapien
tatgatagaatgaacacgtttcctggtactgcc

SEQ ID NO: 254931 - DNA, 33 bp, Homo sapien
gtatctgggttggcccaaataatgtggacaggc

SEQ ID NO: 254932 - DNA, 33 bp, Homo sapien
gtatctgggttggcccgaataatgtggacaggc

SEQ ID NO: 254933 - DNA, 33 bp, Homo sapien
ccagtgggtttacagcaccaagcttgtcaaacc

SEQ ID NO: 254934 - DNA, 33 bp, Homo sapien
ccagtgggtttacagcgccaagcttgtcaaacc

SEQ ID NO: 254935 - DNA, 33 bp, Homo sapien
ccatgcagctttgtgacggccaggcccagtgtg

SEQ ID NO: 254936 - DNA, 33 bp, Homo sapien
ccatgcagctttgtgatggccaggcccagtgtg

SEQ ID NO: 254937 - DNA, 33 bp, Homo sapien
attcagcccataactactagggattgaacaaat

SEQ ID NO: 254938 - DNA, 33 bp, Homo sapien
attcagcccataactattagggattgaacaaat

SEQ ID NO: 254939 - DNA, 33 bp, Homo sapien
agtatgtgtatgcctaagaacgtcacttaaagg

SEQ ID NO: 254940 - DNA, 33 bp, Homo sapien
agtatgtgtatgcctaggaacgtcacttaaagg

SEQ ID NO: 254941 - DNA, 33 bp, Homo sapien
ttttttttctggagtcagacaagtacattagaa

SEQ ID NO: 254942 - DNA, 33 bp, Homo sapien
ttttttttctggagtccgacaagtacattagaa

SEQ ID NO: 254943 - DNA, 33 bp, Homo sapien
tgtgtgattttagttggagacagatttcagagt

SEQ ID NO: 254944 - DNA, 33 bp, Homo sapien
tgtgtgattttagttgtagacagatttcagagt

SEQ ID NO: 254945 - DNA, 33 bp, Homo sapien
caaatacattcccacgaagtgttcaatgtcaaa

SEQ ID NO: 254946 - DNA, 33 bp, Homo sapien
caaatacattcccacggagtgttcaatgtcaaa

SEQ ID NO: 254947 - DNA, 33 bp, Homo sapien
cttgtgatacatactacgatctcctcactttaa

SEQ ID NO: 254948 - DNA, 33 bp, Homo sapien
cttgtgatacatactatgatctcctcactttaa

SEQ ID NO: 254949 - DNA, 33 bp, Homo sapien
actggattagtgtagccgatttgtgaagtaaat

SEQ ID NO: 254950 - DNA, 33 bp, Homo sapien
actggattagtgtagctgatttgtgaagtaaat

SEQ ID NO: 254951 - DNA, 33 bp, Homo sapien
gtttgttaatgttttacgtatggcttttgtacc

SEQ ID NO: 254952 - DNA, 33 bp, Homo sapien
gtttgttaatgttttatgtatggcttttgtacc

SEQ ID NO: 254953 - DNA, 33 bp, Homo sapien
atttaccgttcatgcaacatccatatatgaatt

SEQ ID NO: 254954 - DNA, 33 bp, Homo sapien
atttaccgttcatgcagcatccatatatgaatt

SEQ ID NO: 254955 - DNA, 33 bp, Homo sapien
tccattcctaagtacacaccttcaggagctgaa

SEQ ID NO: 254956 - DNA, 33 bp, Homo sapien
tccattcctaagtacataccttcaggagctgaa

SEQ ID NO: 254957 - DNA, 33 bp, Homo sapien
aaccagaaactagagacgcctgcgaggagctga

SEQ ID NO: 254958 - DNA, 33 bp, Homo sapien
aaccagaaactagagatgcctgcgaggagctga

SEQ ID NO: 254959 - DNA, 33 bp, Homo sapien
caggtacccagcaacaatggagtaaataaagaa

SEQ ID NO: 254960 - DNA, 33 bp, Homo sapien
caggtacccagcaacagtggagtaaataaagaa

SEQ ID NO: 254961 - DNA, 33 bp, Homo sapien
ccttacacacataacccatgtttattaattgat

SEQ ID NO: 254962 - DNA, 33 bp, Homo sapien
ccttacacacataacctatgtttattaattgat

SEQ ID NO: 254963 - DNA, 33 bp, Homo sapien
cagttcttgccaatcaagtgcaggtggaatttt

SEQ ID NO: 254964 - DNA, 33 bp, Homo sapien
cagttcttgccaatcaggtgcaggtggaatttt

SEQ ID NO: 254965 - DNA, 33 bp, Homo sapien
actttacaggcaagtgaacaatatttttaacaa

SEQ ID NO: 254966 - DNA, 33 bp, Homo sapien
actttacaggcaagtggacaatatttttaacaa

SEQ ID NO: 254967 - DNA, 33 bp, Homo sapien
ccattacaatccaagacggcaggcagtcagtct

SEQ ID NO: 254968 - DNA, 33 bp, Homo sapien
ccattacaatccaagatggcaggcagtcagtct

SEQ ID NO: 254969 - DNA, 33 bp, Homo sapien
atgcttattggatagacgcagtttcccttccag

SEQ ID NO: 254970 - DNA, 33 bp, Homo sapien
atgcttattggatagatgcagtttcccttccag

SEQ ID NO: 254971 - DNA, 33 bp, Homo sapien
cagacatgctcttttacgctttctaagctccag

SEQ ID NO: 254972 - DNA, 33 bp, Homo sapien
cagacatgctcttttatgctttctaagctccag

SEQ ID NO: 254973 - DNA, 33 bp, Homo sapien
tgtctctcctcttgagcctattcttcacataga

SEQ ID NO: 254974 - DNA, 33 bp, Homo sapien
tgtctctcctcttgagtctattcttcacataga

SEQ ID NO: 254975 - DNA, 33 bp, Homo sapien
aaccgtgtcagaaatcaagagctgatttacgtg

SEQ ID NO: 254976 - DNA, 33 bp, Homo sapien
aaccgtgtcagaaatcgagagctgatttacgtg

SEQ ID NO: 254977 - DNA, 33 bp, Homo sapien
catttttggttttcacgcatggtagacatttct

SEQ ID NO: 254978 - DNA, 33 bp, Homo sapien
catttttggttttcactcatggtagacatttct

SEQ ID NO: 254979 - DNA, 33 bp, Homo sapien
ttcatccctctggaaaattacatagtcaatacc

SEQ ID NO: 254980 - DNA, 33 bp, Homo sapien
ttcatccctctggaaagttacatagtcaatacc

SEQ ID NO: 254981 - DNA, 33 bp, Homo sapien
tctagctaagaccaccaatgaagatggctaaac

SEQ ID NO: 254982 - DNA, 33 bp, Homo sapien
tctagctaagaccaccgatgaagatggctaaac

SEQ ID NO: 254983 - DNA, 33 bp, Homo sapien
tagtcccagcagaagaacactgggctggaagtc

SEQ ID NO: 254984 - DNA, 33 bp, Homo sapien
tagtcccagcagaagatcactgggctggaagtc

SEQ ID NO: 254985 - DNA, 33 bp, Homo sapien
cctgcttacataattcaaaagaggtataactgc

SEQ ID NO: 254986 - DNA, 33 bp, Homo sapien
cctgcttacataattccaaagaggtataactgc

SEQ ID NO: 254987 - DNA, 33 bp, Homo sapien
agtctctttccaaatgaaatacttggctggata

SEQ ID NO: 254988 - DNA, 33 bp, Homo sapien
agtctctttccaaatggaatacttggctggata

SEQ ID NO: 254989 - DNA, 33 bp, Homo sapien
tctcacgcagccatgaaatgccccctaattggg

SEQ ID NO: 254990 - DNA, 33 bp, Homo sapien
tctcacgcagccatgacatgccccctaattggg

SEQ ID NO: 254991 - DNA, 33 bp, Homo sapien
tcctctacattttccaccttctgttctggcagt

SEQ ID NO: 254992 - DNA, 33 bp, Homo sapien
tcctctacattttccatcttctgttctggcagt

SEQ ID NO: 254993 - DNA, 33 bp, Homo sapien
accaatttgccttatcccttacttaaggagaaa

SEQ ID NO: 254994 - DNA, 33 bp, Homo sapien
accaatttgccttatctcttacttaaggagaaa

SEQ ID NO: 254995 - DNA, 33 bp, Homo sapien
caggatgtgccttaggcataatgtcaaatgggc

SEQ ID NO: 254996 - DNA, 33 bp, Homo sapien
caggatgtgccttaggtataatgtcaaatgggc

SEQ ID NO: 254997 - DNA, 33 bp, Homo sapien
tcagaggccaggatgaggacttccgattttatt

SEQ ID NO: 254998 - DNA, 33 bp, Homo sapien
tcagaggccaggatgatgacttccgattttatt

SEQ ID NO: 254999 - DNA, 33 bp, Homo sapien
ctacaatgacattgacaatcagacaagaaccac

SEQ ID NO: 255000 - DNA, 33 bp, Homo sapien
ctacaatgacattgacgatcagacaagaaccac

SEQ ID NO: 255001 - DNA, 33 bp, Homo sapien
cacacactgacatatcgcttttctacataggaa

SEQ ID NO: 255002 - DNA, 33 bp, Homo sapien
cacacactgacatatctcttttctacataggaa

SEQ ID NO: 255003 - DNA, 33 bp, Homo sapien
gttctttgaagctttccattggttacaattcca

SEQ ID NO: 255004 - DNA, 33 bp, Homo sapien
gttctttgaagctttctattggttacaattcca

SEQ ID NO: 255005 - DNA, 33 bp, Homo sapien
ttcgccaacagaagccacagtgatcttcatagt

SEQ ID NO: 255006 - DNA, 33 bp, Homo sapien
ttcgccaacagaagccgcagtgatcttcatagt

SEQ ID NO: 255007 - DNA, 33 bp, Homo sapien
tagataggcaagagtacgtagataaatttaatc

SEQ ID NO: 255008 - DNA, 33 bp, Homo sapien
tagataggcaagagtatgtagataaatttaatc

SEQ ID NO: 255009 - DNA, 33 bp, Homo sapien
gtatacttgaatgagaaaaacttacatttattt

SEQ ID NO: 255010 - DNA, 33 bp, Homo sapien
gtatacttgaatgagagaaacttacatttattt

SEQ ID NO: 255011 - DNA, 33 bp, Homo sapien
atcagatctgttttgactaagcgttgcctgcag

SEQ ID NO: 255012 - DNA, 33 bp, Homo sapien
atcagatctgttttgattaagcgttgcctgcag

SEQ ID NO: 255013 - DNA, 33 bp, Homo sapien
agaaaaacacatctcaacgcagtccattcacta

SEQ ID NO: 255014 - DNA, 33 bp, Homo sapien
agaaaaacacatctcatcgcagtccattcacta

SEQ ID NO: 255015 - DNA, 33 bp, Homo sapien
agcataactggaaaaacacctgctcccaaaact

SEQ ID NO: 255016 - DNA, 33 bp, Homo sapien
agcataactggaaaaagacctgctcccaaaact

SEQ ID NO: 255017 - DNA, 33 bp, Homo sapien
ggtgcccccatgagcaatccccagtgaaaaccc

SEQ ID NO: 255018 - DNA, 33 bp, Homo sapien
ggtgcccccatgagcagtccccagtgaaaaccc

SEQ ID NO: 255019 - DNA, 33 bp, Homo sapien
accaagatgtggtagcaaacaaaagtacaatcc

SEQ ID NO: 255020 - DNA, 33 bp, Homo sapien
accaagatgtggtagcgaacaaaagtacaatcc

SEQ ID NO: 255021 - DNA, 33 bp, Homo sapien
cagaaataatgctaccaactatagcttcatttg

SEQ ID NO: 255022 - DNA, 33 bp, Homo sapien
cagaaataatgctaccgactatagcttcatttg

SEQ ID NO: 255023 - DNA, 33 bp, Homo sapien
taaaattccaggaaaaaacatttttgcagaaat

SEQ ID NO: 255024 - DNA, 33 bp, Homo sapien
taaaattccaggaaaagacatttttgcagaaat

SEQ ID NO: 255025 - DNA, 33 bp, Homo sapien
tacacagtgctttggagaatgaactcaaattta

SEQ ID NO: 255026 - DNA, 33 bp, Homo sapien
tacacagtgctttggataatgaactcaaattta

SEQ ID NO: 255027 - DNA, 33 bp, Homo sapien
gccaagagtgattgcaaaatatgttaatagagc

SEQ ID NO: 255028 - DNA, 33 bp, Homo sapien
gccaagagtgattgcacaatatgttaatagagc

SEQ ID NO: 255029 - DNA, 33 bp, Homo sapien
tcacttcagtcctttacagccacggattattat

SEQ ID NO: 255030 - DNA, 33 bp, Homo sapien
tcacttcagtcctttatagccacggattattat

SEQ ID NO: 255031 - DNA, 33 bp, Homo sapien
gaccagaaagaagaaaactgatcattgtcggag

SEQ ID NO: 255032 - DNA, 33 bp, Homo sapien
gaccagaaagaagaaagctgatcattgtcggag

SEQ ID NO: 255033 - DNA, 33 bp, Homo sapien
tgcacctgtgatgatcaaaccccacgctagctc

SEQ ID NO: 255034 - DNA, 33 bp, Homo sapien
tgcacctgtgatgatcgaaccccacgctagctc

SEQ ID NO: 255035 - DNA, 33 bp, Homo sapien
aaataaaataagcacactcttggttatgattgc

SEQ ID NO: 255036 - DNA, 33 bp, Homo sapien
aaataaaataagcacattcttggttatgattgc

SEQ ID NO: 255037 - DNA, 33 bp, Homo sapien
tcagctttcctctcaccacttcagtccacttgg

SEQ ID NO: 255038 - DNA, 33 bp, Homo sapien
tcagctttcctctcactacttcagtccacttgg

SEQ ID NO: 255039 - DNA, 33 bp, Homo sapien
ccagtaatttgaaccaaaaggcactaagtaacg

SEQ ID NO: 255040 - DNA, 33 bp, Homo sapien
ccagtaatttgaaccacaaggcactaagtaacg

SEQ ID NO: 255041 - DNA, 33 bp, Homo sapien
tatgtgttccgacttacggtttttccatgaaaa

SEQ ID NO: 255042 - DNA, 33 bp, Homo sapien
tatgtgttccgacttatggtttttccatgaaaa

SEQ ID NO: 255043 - DNA, 33 bp, Homo sapien
gtctccctgtaagccacgcgtcactttcacatt

SEQ ID NO: 255044 - DNA, 33 bp, Homo sapien
gtctccctgtaagccatgcgtcactttcacatt

SEQ ID NO: 255045 - DNA, 33 bp, Homo sapien
agagtctatgaccttaccatcctgagtctaacc

SEQ ID NO: 255046 - DNA, 33 bp, Homo sapien
agagtctatgaccttatcatcctgagtctaacc

SEQ ID NO: 255047 - DNA, 33 bp, Homo sapien
gtttgacccaataaaaaccacaggaaagaactc

SEQ ID NO: 255048 - DNA, 33 bp, Homo sapien
gtttgacccaataaaagccacaggaaagaactc

SEQ ID NO: 255049 - DNA, 33 bp, Homo sapien
cagaccagtaaaaagacgtgcatttgaggacaa

SEQ ID NO: 255050 - DNA, 33 bp, Homo sapien
cagaccagtaaaaagatgtgcatttgaggacaa

SEQ ID NO: 255051 - DNA, 33 bp, Homo sapien
cattcagttggttagacggcttagaattttact

SEQ ID NO: 255052 - DNA, 33 bp, Homo sapien
cattcagttggttagatggcttagaattttact

SEQ ID NO: 255053 - DNA, 33 bp, Homo sapien
aagaaagtacacactaacttagagaaagaaaat

SEQ ID NO: 255054 - DNA, 33 bp, Homo sapien
aagaaagtacacactaccttagagaaagaaaat

SEQ ID NO: 255055 - DNA, 33 bp, Homo sapien
ttatcctcatttcccaatagcaagcatttaccc

SEQ ID NO: 255056 - DNA, 33 bp, Homo sapien
ttatcctcatttcccactagcaagcatttaccc

SEQ ID NO: 255057 - DNA, 33 bp, Homo sapien
cgtgctgccttgacgccgcctgttgaattgtgt

SEQ ID NO: 255058 - DNA, 33 bp, Homo sapien
cgtgctgccttgacgctgcctgttgaattgtgt

SEQ ID NO: 255059 - DNA, 33 bp, Homo sapien
caggggtgagatgttaggaatgcccttctgagt

SEQ ID NO: 255060 - DNA, 33 bp, Homo sapien
caggggtgagatgttatgaatgcccttctgagt

SEQ ID NO: 255061 - DNA, 33 bp, Homo sapien
aaatccgtaaatgccaaaaagctcagaccaatt

SEQ ID NO: 255062 - DNA, 33 bp, Homo sapien
aaatccgtaaatgccagaaagctcagaccaatt

SEQ ID NO: 255063 - DNA, 33 bp, Homo sapien
gtggtttatttggaaacgtgatctcagggtgca

SEQ ID NO: 255064 - DNA, 33 bp, Homo sapien
gtggtttatttggaaatgtgatctcagggtgca

SEQ ID NO: 255065 - DNA, 33 bp, Homo sapien
cagcatttgccagtaacgttgtccgtgcattgc

SEQ ID NO: 255066 - DNA, 33 bp, Homo sapien
cagcatttgccagtaatgttgtccgtgcattgc

SEQ ID NO: 255067 - DNA, 33 bp, Homo sapien
gcgggtctgtctgagcaaagaatcccttggaga

SEQ ID NO: 255068 - DNA, 33 bp, Homo sapien
gcgggtctgtctgagcgaagaatcccttggaga

SEQ ID NO: 255069 - DNA, 33 bp, Homo sapien
gaatatggaattaagcaaatgatcttgatatat

SEQ ID NO: 255070 - DNA, 33 bp, Homo sapien
gaatatggaattaagcgaatgatcttgatatat

SEQ ID NO: 255071 - DNA, 33 bp, Homo sapien
catccacacagtccagaacagctcattttctaa

SEQ ID NO: 255072 - DNA, 33 bp, Homo sapien
catccacacagtccaggacagctcattttctaa

SEQ ID NO: 255073 - DNA, 33 bp, Homo sapien
taaaaggcactcccaaattattgccatttgaaa

SEQ ID NO: 255074 - DNA, 33 bp, Homo sapien
taaaaggcactcccaagttattgccatttgaaa

SEQ ID NO: 255075 - DNA, 33 bp, Homo sapien
actttttgtggcatgacataaaataaagattgg

SEQ ID NO: 255076 - DNA, 33 bp, Homo sapien
actttttgtggcatgatataaaataaagattgg

SEQ ID NO: 255077 - DNA, 33 bp, Homo sapien
ttgggaacaagctaagcatatcctagtaggaga

SEQ ID NO: 255078 - DNA, 33 bp, Homo sapien
ttgggaacaagctaagtatatcctagtaggaga

SEQ ID NO: 255079 - DNA, 33 bp, Homo sapien
tcacctgaaatgtacaaatcacgtggaagcgaa

SEQ ID NO: 255080 - DNA, 33 bp, Homo sapien
tcacctgaaatgtacagatcacgtggaagcgaa

SEQ ID NO: 255081 - DNA, 33 bp, Homo sapien
gaatcaataagttcaaaggcttgaaacaaagtc

SEQ ID NO: 255082 - DNA, 33 bp, Homo sapien
gaatcaataagttcaacggcttgaaacaaagtc

SEQ ID NO: 255083 - DNA, 33 bp, Homo sapien
tatggggtgttcattacaggaaagttgttttta

SEQ ID NO: 255084 - DNA, 33 bp, Homo sapien
tatggggtgttcattataggaaagttgttttta

SEQ ID NO: 255085 - DNA, 33 bp, Homo sapien
atcctccttgtctacaactgaaatgggggttgt

SEQ ID NO: 255086 - DNA, 33 bp, Homo sapien
atcctccttgtctacatctgaaatgggggttgt

SEQ ID NO: 255087 - DNA, 33 bp, Homo sapien
ctttccctggattttacgtgtgtctctgagaag

SEQ ID NO: 255088 - DNA, 33 bp, Homo sapien
ctttccctggattttatgtgtgtctctgagaag

SEQ ID NO: 255089 - DNA, 33 bp, Homo sapien
ttccatgtggtcccaaaggggctgtcaatcata

SEQ ID NO: 255090 - DNA, 33 bp, Homo sapien
ttccatgtggtcccaatggggctgtcaatcata

SEQ ID NO: 255091 - DNA, 33 bp, Homo sapien
catagtgcccttcccaccagccacaggagtgat

SEQ ID NO: 255092 - DNA, 33 bp, Homo sapien
catagtgcccttcccatcagccacaggagtgat

SEQ ID NO: 255093 - DNA, 33 bp, Homo sapien
ctaattatcacttgacaaatacataagctgttt

SEQ ID NO: 255094 - DNA, 33 bp, Homo sapien
ctaattatcacttgacgaatacataagctgttt

SEQ ID NO: 255095 - DNA, 33 bp, Homo sapien
tcttacaccatctttacacatgacgagaactag

SEQ ID NO: 255096 - DNA, 33 bp, Homo sapien
tcttacaccatctttagacatgacgagaactag

SEQ ID NO: 255097 - DNA, 33 bp, Homo sapien
tcttacatgattcgtacgtgagcaccatcatat

SEQ ID NO: 255098 - DNA, 33 bp, Homo sapien
tcttacatgattcgtatgtgagcaccatcatat

SEQ ID NO: 255099 - DNA, 33 bp, Homo sapien
ttttctgaaattgctgaaagtacacattctaaa

SEQ ID NO: 255100 - DNA, 33 bp, Homo sapien
ttttctgaaattgctggaagtacacattctaaa

SEQ ID NO: 255101 - DNA, 33 bp, Homo sapien
gatagaagtagcaaccaccaatttcttttcttt

SEQ ID NO: 255102 - DNA, 33 bp, Homo sapien
gatagaagtagcaaccgccaatttcttttcttt

SEQ ID NO: 255103 - DNA, 33 bp, Homo sapien
cacacctattccgtgacgattccagctccctgg

SEQ ID NO: 255104 - DNA, 33 bp, Homo sapien
cacacctattccgtgatgattccagctccctgg

SEQ ID NO: 255105 - DNA, 33 bp, Homo sapien
ccaaccacagctaacaatgaaaccagcgctcag

SEQ ID NO: 255106 - DNA, 33 bp, Homo sapien
ccaaccacagctaacactgaaaccagcgctcag

SEQ ID NO: 255107 - DNA, 33 bp, Homo sapien
tagttaattaagttacacagagatgacaatgaa

SEQ ID NO: 255108 - DNA, 33 bp, Homo sapien
tagttaattaagttacgcagagatgacaatgaa

SEQ ID NO: 255109 - DNA, 33 bp, Homo sapien
tttccaaatacaaaccaaacatgtctcatagaa

SEQ ID NO: 255110 - DNA, 33 bp, Homo sapien
tttccaaatacaaaccgaacatgtctcatagaa

SEQ ID NO: 255111 - DNA, 33 bp, Homo sapien
ctctccaatgcgggaagggagtgcactgaacta

SEQ ID NO: 255112 - DNA, 33 bp, Homo sapien
ctctccaatgcgggaatggagtgcactgaacta

SEQ ID NO: 255113 - DNA, 33 bp, Homo sapien
cccgtgaacaatgacacatcaggaaagatattt

SEQ ID NO: 255114 - DNA, 33 bp, Homo sapien
cccgtgaacaatgacatatcaggaaagatattt

SEQ ID NO: 255115 - DNA, 33 bp, Homo sapien
aaaggagctctgtagggagtgataatgacaaca

SEQ ID NO: 255116 - DNA, 33 bp, Homo sapien
aaaggagctctgtaggtagtgataatgacaaca

SEQ ID NO: 255117 - DNA, 33 bp, Homo sapien
aagtagccttgagaggaaccgaaagagaagttt

SEQ ID NO: 255118 - DNA, 33 bp, Homo sapien
aagtagccttgagaggcaccgaaagagaagttt

SEQ ID NO: 255119 - DNA, 33 bp, Homo sapien
ctcctgtagatatggaactttcaaacccttgag

SEQ ID NO: 255120 - DNA, 33 bp, Homo sapien
ctcctgtagatatggagctttcaaacccttgag

SEQ ID NO: 255121 - DNA, 33 bp, Homo sapien
atactctgcatccaaacggtcttttcccctcta

SEQ ID NO: 255122 - DNA, 33 bp, Homo sapien
atactctgcatccaaatggtcttttcccctcta

SEQ ID NO: 255123 - DNA, 33 bp, Homo sapien
atccaggatctggtataaaatggcacccttaat

SEQ ID NO: 255124 - DNA, 33 bp, Homo sapien
atccaggatctggtatgaaatggcacccttaat

SEQ ID NO: 255125 - DNA, 33 bp, Homo sapien
tgtagccacgtgaccaagttccagccaagggca

SEQ ID NO: 255126 - DNA, 33 bp, Homo sapien
tgtagccacgtgaccacgttccagccaagggca

SEQ ID NO: 255127 - DNA, 33 bp, Homo sapien
ttgtaccacaccaacccggaaatctcagatgct

SEQ ID NO: 255128 - DNA, 33 bp, Homo sapien
ttgtaccacaccaacctggaaatctcagatgct

SEQ ID NO: 255129 - DNA, 33 bp, Homo sapien
ccaagattatccaagcacgtggaagaaatataa

SEQ ID NO: 255130 - DNA, 33 bp, Homo sapien
ccaagattatccaagcgcgtggaagaaatataa

SEQ ID NO: 255131 - DNA, 33 bp, Homo sapien
ccagaatgtagtaatgcacctgaggtgggggcg

SEQ ID NO: 255132 - DNA, 33 bp, Homo sapien
ccagaatgtagtaatgtacctgaggtgggggcg

SEQ ID NO: 255133 - DNA, 33 bp, Homo sapien
agtgatgtgtgtagcactgaatttcacaaaaag

SEQ ID NO: 255134 - DNA, 33 bp, Homo sapien
agtgatgtgtgtagcattgaatttcacaaaaag

SEQ ID NO: 255135 - DNA, 33 bp, Homo sapien
agactgtgaatacagcagagaaaaaagccttgc

SEQ ID NO: 255136 - DNA, 33 bp, Homo sapien
agactgtgaatacagcggagaaaaaagccttgc

SEQ ID NO: 255137 - DNA, 33 bp, Homo sapien
tattattcagggaaaaatgatcctttcaaaaat

SEQ ID NO: 255138 - DNA, 33 bp, Homo sapien
tattattcagggaaaagtgatcctttcaaaaat

SEQ ID NO: 255139 - DNA, 33 bp, Homo sapien
catccatgctgaaaataaggtacaatctgcatg

SEQ ID NO: 255140 - DNA, 33 bp, Homo sapien
catccatgctgaaaattaggtacaatctgcatg

SEQ ID NO: 255141 - DNA, 33 bp, Homo sapien
gctgtctggtaactgcactctcaatttttctat

SEQ ID NO: 255142 - DNA, 33 bp, Homo sapien
gctgtctggtaactgcgctctcaatttttctat

SEQ ID NO: 255143 - DNA, 33 bp, Homo sapien
cagcactgcgtccagcacaaatatctgtgttgg

SEQ ID NO: 255144 - DNA, 33 bp, Homo sapien
cagcactgcgtccagcgcaaatatctgtgttgg

SEQ ID NO: 255145 - DNA, 33 bp, Homo sapien
tcagggagaccgatagacattcagcaaggcaca

SEQ ID NO: 255146 - DNA, 33 bp, Homo sapien
tcagggagaccgataggcattcagcaaggcaca

SEQ ID NO: 255147 - DNA, 33 bp, Homo sapien
cagggttgtgctaaaactgagagaagtcgaggg

SEQ ID NO: 255148 - DNA, 33 bp, Homo sapien
cagggttgtgctaaaagtgagagaagtcgaggg

SEQ ID NO: 255149 - DNA, 33 bp, Homo sapien
tcaggatcaggaaaaaagtcagaggtgccttat

SEQ ID NO: 255150 - DNA, 33 bp, Homo sapien
tcaggatcaggaaaaaggtcagaggtgccttat

SEQ ID NO: 255151 - DNA, 33 bp, Homo sapien
gtggtaggtagaataaaggtccctcaaagacat

SEQ ID NO: 255152 - DNA, 33 bp, Homo sapien
gtggtaggtagaataagggtccctcaaagacat

SEQ ID NO: 255153 - DNA, 33 bp, Homo sapien
gcttcaccaatgctagaaggtccttgaaactag

SEQ ID NO: 255154 - DNA, 33 bp, Homo sapien
gcttcaccaatgctagcaggtccttgaaactag

SEQ ID NO: 255155 - DNA, 33 bp, Homo sapien
cttattgatatgggagaagggaaaattgataag

SEQ ID NO: 255156 - DNA, 33 bp, Homo sapien
cttattgatatgggaggagggaaaattgataag

SEQ ID NO: 255157 - DNA, 33 bp, Homo sapien
gcaggctgctgcagacacacaatctgttgtcag

SEQ ID NO: 255158 - DNA, 33 bp, Homo sapien
gcaggctgctgcagacgcacaatctgttgtcag

SEQ ID NO: 255159 - DNA, 33 bp, Homo sapien
agaaggcgaagaacaccgaacatcttcttggag

SEQ ID NO: 255160 - DNA, 33 bp, Homo sapien
agaaggcgaagaacactgaacatcttcttggag

SEQ ID NO: 255161 - DNA, 33 bp, Homo sapien
gtgtccagaatcccaacccagagacagaggact

SEQ ID NO: 255162 - DNA, 33 bp, Homo sapien
gtgtccagaatcccaatccagagacagaggact

SEQ ID NO: 255163 - DNA, 33 bp, Homo sapien
tgagctattgatgaaactgatagaaactacttc

SEQ ID NO: 255164 - DNA, 33 bp, Homo sapien
tgagctattgatgaaagtgatagaaactacttc

SEQ ID NO: 255165 - DNA, 33 bp, Homo sapien
tagctttatctgggtcccttttcaaatgttacc

SEQ ID NO: 255166 - DNA, 33 bp, Homo sapien
tagctttatctgggtctcttttcaaatgttacc

SEQ ID NO: 255167 - DNA, 33 bp, Homo sapien
tggtaaatgcatcccaatgaatgagatggatat

SEQ ID NO: 255168 - DNA, 33 bp, Homo sapien
tggtaaatgcatcccactgaatgagatggatat

SEQ ID NO: 255169 - DNA, 33 bp, Homo sapien
cacactattcaggtgacctcaggcctttgaatt

SEQ ID NO: 255170 - DNA, 33 bp, Homo sapien
cacactattcaggtgatctcaggcctttgaatt

SEQ ID NO: 255171 - DNA, 33 bp, Homo sapien
ctaaagtggaagtatacgcagagctgtgtgtct

SEQ ID NO: 255172 - DNA, 33 bp, Homo sapien
ctaaagtggaagtataggcagagctgtgtgtct

SEQ ID NO: 255173 - DNA, 33 bp, Homo sapien
ggtacctgcttgataaatatgagcattgctcag

SEQ ID NO: 255174 - DNA, 33 bp, Homo sapien
ggtacctgcttgataagtatgagcattgctcag

SEQ ID NO: 255175 - DNA, 33 bp, Homo sapien
tagcaatttggacggaaaatgagactgaggagg

SEQ ID NO: 255176 - DNA, 33 bp, Homo sapien
tagcaatttggacggagaatgagactgaggagg

SEQ ID NO: 255177 - DNA, 33 bp, Homo sapien
atatggtgaaagactaggatggaccaacattgc

SEQ ID NO: 255178 - DNA, 33 bp, Homo sapien
atatggtgaaagactatgatggaccaacattgc

SEQ ID NO: 255179 - DNA, 33 bp, Homo sapien
agtcataagacctttacgtccacatgagctctg

SEQ ID NO: 255180 - DNA, 33 bp, Homo sapien
agtcataagacctttatgtccacatgagctctg

SEQ ID NO: 255181 - DNA, 33 bp, Homo sapien
ggtttggaaaaggccaccacgtttgtcaccact

SEQ ID NO: 255182 - DNA, 33 bp, Homo sapien
ggtttggaaaaggccatcacgtttgtcaccact

SEQ ID NO: 255183 - DNA, 33 bp, Homo sapien
tgtatctaacacatatcataggtagtgccaatt

SEQ ID NO: 255184 - DNA, 33 bp, Homo sapien
tgtatctaacacatattataggtagtgccaatt

SEQ ID NO: 255185 - DNA, 33 bp, Homo sapien
tgaggctaggacattaaacagtatttctctgag

SEQ ID NO: 255186 - DNA, 33 bp, Homo sapien
tgaggctaggacattatacagtatttctctgag

SEQ ID NO: 255187 - DNA, 33 bp, Homo sapien
gacatgaagaagaagactaggacaattagaaaa

SEQ ID NO: 255188 - DNA, 33 bp, Homo sapien
gacatgaagaagaagattaggacaattagaaaa

SEQ ID NO: 255189 - DNA, 33 bp, Homo sapien
acaagacactattaccacagcgagcccatccgt

SEQ ID NO: 255190 - DNA, 33 bp, Homo sapien
acaagacactattaccgcagcgagcccatccgt

SEQ ID NO: 255191 - DNA, 33 bp, Homo sapien
ttgggctttctgtcacacataacttctcctgac

SEQ ID NO: 255192 - DNA, 33 bp, Homo sapien
ttgggctttctgtcacgcataacttctcctgac

SEQ ID NO: 255193 - DNA, 33 bp, Homo sapien
gatttaatcagatcacacctcgttgcattttcc

SEQ ID NO: 255194 - DNA, 33 bp, Homo sapien
gatttaatcagatcacgcctcgttgcattttcc

SEQ ID NO: 255195 - DNA, 33 bp, Homo sapien
ttgtagaattgcctccacagaatcagataactg

SEQ ID NO: 255196 - DNA, 33 bp, Homo sapien
ttgtagaattgcctccgcagaatcagataactg

SEQ ID NO: 255197 - DNA, 33 bp, Homo sapien
tgtataaatatactgaataacccttatccttta

SEQ ID NO: 255198 - DNA, 33 bp, Homo sapien
tgtataaatatactgagtaacccttatccttta

SEQ ID NO: 255199 - DNA, 33 bp, Homo sapien
gaatctcaaagagaaacttgtgcacctttattt

SEQ ID NO: 255200 - DNA, 33 bp, Homo sapien
gaatctcaaagagaaatttgtgcacctttattt

SEQ ID NO: 255201 - DNA, 33 bp, Homo sapien
attgggaggtcttgaactgatgatgtataactc

SEQ ID NO: 255202 - DNA, 33 bp, Homo sapien
attgggaggtcttgaagtgatgatgtataactc

SEQ ID NO: 255203 - DNA, 33 bp, Homo sapien
atcgtggattttcaacaaacttttaggatactg

SEQ ID NO: 255204 - DNA, 33 bp, Homo sapien
atcgtggattttcaacgaacttttaggatactg

SEQ ID NO: 255205 - DNA, 33 bp, Homo sapien
aaagtttaagcaccacagtattaggattatagc

SEQ ID NO: 255206 - DNA, 33 bp, Homo sapien
aaagtttaagcaccacggtattaggattatagc

SEQ ID NO: 255207 - DNA, 33 bp, Homo sapien
cacaaataatatctccaatacatgctgagacaa

SEQ ID NO: 255208 - DNA, 33 bp, Homo sapien
cacaaataatatctccgatacatgctgagacaa

SEQ ID NO: 255209 - DNA, 33 bp, Homo sapien
gtcggtgttctaaaaacgccacaggcctgaaac

SEQ ID NO: 255210 - DNA, 33 bp, Homo sapien
gtcggtgttctaaaaatgccacaggcctgaaac

SEQ ID NO: 255211 - DNA, 33 bp, Homo sapien
tcgaaattgtagttgacatacatctagaggtct

SEQ ID NO: 255212 - DNA, 33 bp, Homo sapien
tcgaaattgtagttgatatacatctagaggtct

SEQ ID NO: 255213 - DNA, 33 bp, Homo sapien
cccttatgagtgagaacgcacgatgtttggttt

SEQ ID NO: 255214 - DNA, 33 bp, Homo sapien
cccttatgagtgagaatgcacgatgtttggttt

SEQ ID NO: 255215 - DNA, 33 bp, Homo sapien; identical to SEQ ID NO: 255213

SEQ ID NO: 255216 - DNA, 33 bp, Homo sapien; identical to SEQ ID NO: 255214

SEQ ID NO: 255217 - DNA, 33 bp, Homo sapien
gggagacaggcaagtgaaagaccctgaaagtaa

SEQ ID NO: 255218 - DNA, 33 bp, Homo sapien
gggagacaggcaagtggaagaccctgaaagtaa

SEQ ID NO: 255219 - DNA, 33 bp, Homo sapien
acacaggatgggacaacgtgaccacagtggatg

SEQ ID NO: 255220 - DNA, 33 bp, Homo sapien
acacaggatgggacaatgtgaccacagtggatg

SEQ ID NO: 255221 - DNA, 33 bp, Homo sapien
aaagagtggatgtcacagagctagagagtaggt

SEQ ID NO: 255222 - DNA, 33 bp, Homo sapien
aaagagtggatgtcacggagctagagagtaggt

SEQ ID NO: 255223 - DNA, 33 bp, Homo sapien
ctggtatacctctgatcaggaacactccactca

SEQ ID NO: 255224 - DNA, 33 bp, Homo sapien
ctggtatacctctgattaggaacactccactca

SEQ ID NO: 255225 - DNA, 33 bp, Homo sapien
acagctgaattctaaacacactgacctgcctct

SEQ ID NO: 255226 - DNA, 33 bp, Homo sapien
acagctgaattctaaatacactgacctgcctct

SEQ ID NO: 255227 - DNA, 33 bp, Homo sapien
tcattgcgccttgtgacggaagcagacacacgc

SEQ ID NO: 255228 - DNA, 33 bp, Homo sapien
tcattgcgccttgtgatggaagcagacacacgc

SEQ ID NO: 255229 - DNA, 33 bp, Homo sapien
accctggaacggctaagttaatacatctgtcat

SEQ ID NO: 255230 - DNA, 33 bp, Homo sapien
accctggaacggctaatttaatacatctgtcat

SEQ ID NO: 255231 - DNA, 33 bp, Homo sapien
gggtgagccagtggtaacttttactgaagcagc

SEQ ID NO: 255232 - DNA, 33 bp, Homo sapien
gggtgagccagtggtagcttttactgaagcagc

SEQ ID NO: 255233 - DNA, 33 bp, Homo sapien
cctgtattccagttcactcattctaatattctc

SEQ ID NO: 255234 - DNA, 33 bp, Homo sapien
cctgtattccagttcattcattctaatattctc

SEQ ID NO: 255235 - DNA, 33 bp, Homo sapien
ccaccacctgcccgcaatagtgttagggactcc

SEQ ID NO: 255236 - DNA, 33 bp, Homo sapien
ccaccacctgcccgcagtagtgttagggactcc

SEQ ID NO: 255237 - DNA, 33 bp, Homo sapien
tttagggaccatatgcactggaaatctttacag

SEQ ID NO: 255238 - DNA, 33 bp, Homo sapien
tttagggaccatatgccctggaaatctttacag

SEQ ID NO: 255239 - DNA, 33 bp, Homo sapien
cctgtggaaaagccgcaccatcagagcatgtct

SEQ ID NO: 255240 - DNA, 33 bp, Homo sapien
cctgtggaaaagccgccccatcagagcatgtct

SEQ ID NO: 255241 - DNA, 33 bp, Homo sapien
cacagttcttcgggaacagcactgaaatggatt

SEQ ID NO: 255242 - DNA, 33 bp, Homo sapien
cacagttcttcgggaagagcactgaaatggatt

SEQ ID NO: 255243 - DNA, 33 bp, Homo sapien
agctcatctgagtcataataaagctgctgtctc

SEQ ID NO: 255244 - DNA, 33 bp, Homo sapien
agctcatctgagtcatgataaagctgctgtctc

SEQ ID NO: 255245 - DNA, 33 bp, Homo sapien
gtccaggtggagagaagtaaaaccaaagcatca

SEQ ID NO: 255246 - DNA, 33 bp, Homo sapien
gtccaggtggagagaattaaaaccaaagcatca

SEQ ID NO: 255247 - DNA, 33 bp, Homo sapien
acatatgcagcacggactatcttcaggcctctt

SEQ ID NO: 255248 - DNA, 33 bp, Homo sapien
acatatgcagcacggattatcttcaggcctctt

SEQ ID NO: 255249 - DNA, 33 bp, Homo sapien
tctgttgtgtgtacaaaggttgaggcagtgatt

SEQ ID NO: 255250 - DNA, 33 bp, Homo sapien
tctgttgtgtgtacaagggttgaggcagtgatt

SEQ ID NO: 255251 - DNA, 33 bp, Homo sapien
gaccattgtttttacaagagtggttctcagcct

SEQ ID NO: 255252 - DNA, 33 bp, Homo sapien
gaccattgtttttacacgagtggttctcagcct

SEQ ID NO: 255253 - DNA, 33 bp, Homo sapien
agctgcagaagaattcactgattgcgtgatgtg

SEQ ID NO: 255254 - DNA, 33 bp, Homo sapien
agctgcagaagaattcgctgattgcgtgatgtg

SEQ ID NO: 255255 - DNA, 33 bp, Homo sapien
tgggtctggaaataaacgcagcagcaggagggt

SEQ ID NO: 255256 - DNA, 33 bp, Homo sapien
tgggtctggaaataaatgcagcagcaggagggt

SEQ ID NO: 255257 - DNA, 33 bp, Homo sapien
gtaatcgtgaatttcacagggactccccttcca

SEQ ID NO: 255258 - DNA, 33 bp, Homo sapien
gtaatcgtgaatttcatagggactccccttcca

SEQ ID NO: 255259 - DNA, 33 bp, Homo sapien
tattgctcaactaagcaacttcggtaatcatgc

SEQ ID NO: 255260 - DNA, 33 bp, Homo sapien
tattgctcaactaagctacttcggtaatcatgc

SEQ ID NO: 255261 - DNA, 33 bp, Homo sapien
aaaaacctgttattccagagaggctttaacgaa

SEQ ID NO: 255262 - DNA, 33 bp, Homo sapien
aaaaacctgttattccggagaggctttaacgaa

SEQ ID NO: 255263 - DNA, 33 bp, Homo sapien
cagacagaatccaaaaattgcgttttagttgca

SEQ ID NO: 255264 - DNA, 33 bp, Homo sapien
cagacagaatccaaaagttgcgttttagttgca

SEQ ID NO: 255265 - DNA, 33 bp, Homo sapien
attgcagcgctattcacgacagccaagatataa

SEQ ID NO: 255266 - DNA, 33 bp, Homo sapien
attgcagcgctattcatgacagccaagatataa

SEQ ID NO: 255267 - DNA, 33 bp, Homo sapien
gatagtaatggctccccattgttaagacccaca

SEQ ID NO: 255268 - DNA, 33 bp, Homo sapien
gatagtaatggctcccgattgttaagacccaca

SEQ ID NO: 255269 - DNA, 33 bp, Homo sapien
aggtgtcccaaaagaacgactaatggaagttat

SEQ ID NO: 255270 - DNA, 33 bp, Homo sapien
aggtgtcccaaaagaatgactaatggaagttat

SEQ ID NO: 255271 - DNA, 33 bp, Homo sapien
atggaagttatcttaacagaaagtgataacaga

SEQ ID NO: 255272 - DNA, 33 bp, Homo sapien
atggaagttatcttaatagaaagtgataacaga

SEQ ID NO: 255273 - DNA, 33 bp, Homo sapien
atgtatgaatgtgggagggtaaaggacatgaag

SEQ ID NO: 255274 - DNA, 33 bp, Homo sapien
atgtatgaatgtgggatggtaaaggacatgaag

SEQ ID NO: 255275 - DNA, 33 bp, Homo sapien
agtcacaagtagagaactgcttaaagtttagga

SEQ ID NO: 255276 - DNA, 33 bp, Homo sapien
agtcacaagtagagaattgcttaaagtttagga

SEQ ID NO: 255277 - DNA, 33 bp, Homo sapien
accaaagactgaaagacgcaatagtcctctggg

SEQ ID NO: 255278 - DNA, 33 bp, Homo sapien
accaaagactgaaagatgcaatagtcctctggg

SEQ ID NO: 255279 - DNA, 33 bp, Homo sapien
atctgcagcttccagaaagaagagatgttataa

SEQ ID NO: 255280 - DNA, 33 bp, Homo sapien
atctgcagcttccagagagaagagatgttataa

SEQ ID NO: 255281 - DNA, 33 bp, Homo sapien
tgctaccttttacatacgacagcttctctaccc

SEQ ID NO: 255282 - DNA, 33 bp, Homo sapien
tgctaccttttacatatgacagcttctctaccc

SEQ ID NO: 255283 - DNA, 33 bp, Homo sapien
gctattccgctcaagaatatttatttccacctc

SEQ ID NO: 255284 - DNA, 33 bp, Homo sapien
gctattccgctcaagagtatttatttccacctc

SEQ ID NO: 255285 - DNA, 33 bp, Homo sapien
ataccgttcgccttaactcagcatatggccact

SEQ ID NO: 255286 - DNA, 33 bp, Homo sapien
ataccgttcgccttaattcagcatatggccact

SEQ ID NO: 255287 - DNA, 33 bp, Homo sapien
ttgcctaagtgaaaggcaattcccagggcagga

SEQ ID NO: 255288 - DNA, 33 bp, Homo sapien
ttgcctaagtgaaaggtaattcccagggcagga

SEQ ID NO: 255289 - DNA, 33 bp, Homo sapien
ataaaaacaaaaggaacgatgagagtcaggaag

SEQ ID NO: 255290 - DNA, 33 bp, Homo sapien
ataaaaacaaaaggaaggatgagagtcaggaag

SEQ ID NO: 255291 - DNA, 33 bp, Homo sapien
tcacagcccagtagcaccatcaaggactcgtgt

SEQ ID NO: 255292 - DNA, 33 bp, Homo sapien
tcacagcccagtagcatcatcaaggactcgtgt

SEQ ID NO: 255293 - DNA, 33 bp, Homo sapien
ttgtttctggacatacactggaactgcagccac

SEQ ID NO: 255294 - DNA, 33 bp, Homo sapien
ttgtttctggacatacgctggaactgcagccac

SEQ ID NO: 255295 - DNA, 33 bp, Homo sapien
taaagctccttgcaagaagcagtatgtcagaaa

SEQ ID NO: 255296 - DNA, 33 bp, Homo sapien
taaagctccttgcaagcagcagtatgtcagaaa

SEQ ID NO: 255297 - DNA, 33 bp, Homo sapien
aagagtactttcaaacaggacgtatcactttaa

SEQ ID NO: 255298 - DNA, 33 bp, Homo sapien
aagagtactttcaaacgggacgtatcactttaa

SEQ ID NO: 255299 - DNA, 33 bp, Homo sapien
cccacctacctatatacctctatccgtctatta

SEQ ID NO: 255300 - DNA, 33 bp, Homo sapien
cccacctacctatatatctctatccgtctatta

SEQ ID NO: 255301 - DNA, 33 bp, Homo sapien
atcatctattcatcaactacctatccacctgtc

SEQ ID NO: 255302 - DNA, 33 bp, Homo sapien
atcatctattcatcaattacctatccacctgtc

SEQ ID NO: 255303 - DNA, 33 bp, Homo sapien
aaaggattcacaataaaaggaaaaatcatacat

SEQ ID NO: 255304 - DNA, 33 bp, Homo sapien
aaaggattcacaataagaggaaaaatcatacat

SEQ ID NO: 255305 - DNA, 33 bp, Homo sapien
ttctctgtaatttgaaaaaacctgaaagtgcac

SEQ ID NO: 255306 - DNA, 33 bp, Homo sapien
ttctctgtaatttgaataaacctgaaagtgcac

SEQ ID NO: 255307 - DNA, 33 bp, Homo sapien
atccaatgccacaacacggcccccgcagtttca

SEQ ID NO: 255308 - DNA, 33 bp, Homo sapien
atccaatgccacaacatggcccccgcagtttca

SEQ ID NO: 255309 - DNA, 33 bp, Homo sapien
ccagaaccattcatcaacccttggcgttgacat

SEQ ID NO: 255310 - DNA, 33 bp, Homo sapien
ccagaaccattcatcagcccttggcgttgacat

SEQ ID NO: 255311 - DNA, 33 bp, Homo sapien
ttttatgttaattttccctgcagacatgctaca

SEQ ID NO: 255312 - DNA, 33 bp, Homo sapien
ttttatgttaattttctctgcagacatgctaca

SEQ ID NO: 255313 - DNA, 33 bp, Homo sapien
taagtgacatcttcaaatgacttcatcaatggg

SEQ ID NO: 255314 - DNA, 33 bp, Homo sapien
taagtgacatcttcaagtgacttcatcaatggg

SEQ ID NO: 255315 - DNA, 33 bp, Homo sapien
ctatttactcatggtaggtttgtgggcgtccct

SEQ ID NO: 255316 - DNA, 33 bp, Homo sapien
ctatttactcatggtatgtttgtgggcgtccct

SEQ ID NO: 255317 - DNA, 33 bp, Homo sapien
ctggtgttcgacaagacgcccaatcaattcatc

SEQ ID NO: 255318 - DNA, 33 bp, Homo sapien
ctggtgttcgacaagatgcccaatcaattcatc

SEQ ID NO: 255319 - DNA, 33 bp, Homo sapien
gttttgctttcagttacccacgatcaaccaccg

SEQ ID NO: 255320 - DNA, 33 bp, Homo sapien
gttttgctttcagttatccacgatcaaccaccg

SEQ ID NO: 255321 - DNA, 33 bp, Homo sapien
atagaggtaagcactacccgagctttcaggcat

SEQ ID NO: 255322 - DNA, 33 bp, Homo sapien
atagaggtaagcactatccgagctttcaggcat

SEQ ID NO: 255323 - DNA, 33 bp, Homo sapien
aacacagagctgtaaccaatctcttatcatgcc

SEQ ID NO: 255324 - DNA, 33 bp, Homo sapien
aacacagagctgtaactaatctcttatcatgcc

SEQ ID NO: 255325 - DNA, 33 bp, Homo sapien
aaacaggaggtggataagtggagagttctatga

SEQ ID NO: 255326 - DNA, 33 bp, Homo sapien
aaacaggaggtggataggtggagagttctatga

SEQ ID NO: 255327 - DNA, 33 bp, Homo sapien
ttacccagggaataaacgcagaagtggattttg

SEQ ID NO: 255328 - DNA, 33 bp, Homo sapien
ttacccagggaataaatgcagaagtggattttg

SEQ ID NO: 255329 - DNA, 33 bp, Homo sapien
tggtaccagcctgttacggggttgaattttgtc

SEQ ID NO: 255330 - DNA, 33 bp, Homo sapien
tggtaccagcctgttatggggttgaattttgtc

SEQ ID NO: 255331 - DNA, 33 bp, Homo sapien
tatgtgctgaccgttgcactgatggctttaaat

SEQ ID NO: 255332 - DNA, 33 bp, Homo sapien
tatgtgctgaccgttgtactgatggctttaaat

SEQ ID NO: 255333 - DNA, 33 bp, Homo sapien
aggctcccagacttcaggaatatttatgctgct

SEQ ID NO: 255334 - DNA, 33 bp, Homo sapien
aggctcccagacttcatgaatatttatgctgct

SEQ ID NO: 255335 - DNA, 33 bp, Homo sapien
ccccacggctctacacacagacaatatccgttt

SEQ ID NO: 255336 - DNA, 33 bp, Homo sapien
ccccacggctctacacgcagacaatatccgttt

SEQ ID NO: 255337 - DNA, 33 bp, Homo sapien
catctgcttgtatctcactggtcagatttgagt

SEQ ID NO: 255338 - DNA, 33 bp, Homo sapien
catctgcttgtatctcgctggtcagatttgagt

SEQ ID NO: 255339 - DNA, 33 bp, Homo sapien
cccaacagaagctcaactggtttgggagcacaa

SEQ ID NO: 255340 - DNA, 33 bp, Homo sapien
cccaacagaagctcaattggtttgggagcacaa

SEQ ID NO: 255341 - DNA, 33 bp, Homo sapien
gcctgaccttcgagtcccgactgccacgagcct

SEQ ID NO: 255342 - DNA, 33 bp, Homo sapien
gcctgaccttcgagtctcgactgccacgagcct

SEQ ID NO: 255343 - DNA, 33 bp, Homo sapien
ctgcatttcgtatgagaacttagttaactaact

SEQ ID NO: 255344 - DNA, 33 bp, Homo sapien
ctgcatttcgtatgaggacttagttaactaact

SEQ ID NO: 255345 - DNA, 33 bp, Homo sapien
ctttgcttgtagagaaatgtctatggttggcct

SEQ ID NO: 255346 - DNA, 33 bp, Homo sapien
ctttgcttgtagagaagtgtctatggttggcct

SEQ ID NO: 255347 - DNA, 33 bp, Homo sapien
ggtggttgtttttcaacagaaccataagtaaga

SEQ ID NO: 255348 - DNA, 33 bp, Homo sapien
ggtggttgtttttcaagagaaccataagtaaga

SEQ ID NO: 255349 - DNA, 33 bp, Homo sapien
ctgttggggtcatacaaaggagtgcccatgaaa

SEQ ID NO: 255350 - DNA, 33 bp, Homo sapien
ctgttggggtcatacagaggagtgcccatgaaa

SEQ ID NO: 255351 - DNA, 33 bp, Homo sapien
ttagctgcattccttaaaagtggttgtgagtag

SEQ ID NO: 255352 - DNA, 33 bp, Homo sapien
ttagctgcattccttagaagtggttgtgagtag

SEQ ID NO: 255353 - DNA, 33 bp, Homo sapien
agtcaatattcccagtgactcatttgaccatgg

SEQ ID NO: 255354 - DNA, 33 bp, Homo sapien
agtcaatattcccagttactcatttgaccatgg

SEQ ID NO: 255355 - DNA, 33 bp, Homo sapien
tggactgggaaggttcaaaaagagtatcaaaaa

SEQ ID NO: 255356 - DNA, 33 bp, Homo sapien
tggactgggaaggttcgaaaagagtatcaaaaa

SEQ ID NO: 255357 - DNA, 33 bp, Homo sapien
tcgtcagtagcctggaatcaatgagaagtttac

SEQ ID NO: 255358 - DNA, 33 bp, Homo sapien
tcgtcagtagcctggagtcaatgagaagtttac

SEQ ID NO: 255359 - DNA, 33 bp, Homo sapien
gtagttcattagggaaaccatagagtctcgtcc

SEQ ID NO: 255360 - DNA, 33 bp, Homo sapien
gtagttcattagggaagccatagagtctcgtcc

SEQ ID NO: 255361 - DNA, 33 bp, Homo sapien
atggatgagacccagacgggacactaagccaaa

SEQ ID NO: 255362 - DNA, 33 bp, Homo sapien
atggatgagacccagatgggacactaagccaaa

SEQ ID NO: 255363 - DNA, 33 bp, Homo sapien
tacttaaggccacatacgaaaactttcaggggc

SEQ ID NO: 255364 - DNA, 33 bp, Homo sapien
tacttaaggccacatatgaaaactttcaggggc

SEQ ID NO: 255365 - DNA, 33 bp, Homo sapien
caaacacaggataggcaaaaacgcaaaggcagg

SEQ ID NO: 255366 - DNA, 33 bp, Homo sapien
caaacacaggataggcgaaaacgcaaaggcagg

SEQ ID NO: 255367 - DNA, 33 bp, Homo sapien
atgcaatggcaccatccgatgagctggcaaggg

SEQ ID NO: 255368 - DNA, 33 bp, Homo sapien
atgcaatggcaccatcggatgagctggcaaggg

SEQ ID NO: 255369 - DNA, 33 bp, Homo sapien
ccagatgccaatgtaacgttcagacgctgagca

SEQ ID NO: 255370 - DNA, 33 bp, Homo sapien
ccagatgccaatgtaatgttcagacgctgagca

SEQ ID NO: 255371 - DNA, 33 bp, Homo sapien
tgctggtcttgcccccagatcctgttccatttg

SEQ ID NO: 255372 - DNA, 33 bp, Homo sapien
tgctggtcttgcccccggatcctgttccatttg

SEQ ID NO: 255373 - DNA, 33 bp, Homo sapien
cctctaatgcaaatgccccatatagatgtagca

SEQ ID NO: 255374 - DNA, 33 bp, Homo sapien
cctctaatgcaaatgctccatatagatgtagca

SEQ ID NO: 255375 - DNA, 33 bp, Homo sapien
gctggctctggaaaacaaggacgcacatttgtg

SEQ ID NO: 255376 - DNA, 33 bp, Homo sapien
gctggctctggaaaacgaggacgcacatttgtg

SEQ ID NO: 255377 - DNA, 33 bp, Homo sapien
ctcccagatgcaggaaacttgtttagtgtaagc

SEQ ID NO: 255378 - DNA, 33 bp, Homo sapien
ctcccagatgcaggaaccttgtttagtgtaagc

SEQ ID NO: 255379 - DNA, 33 bp, Homo sapien
tgacctatttacacaccgaggagggatgtggaa

SEQ ID NO: 255380 - DNA, 33 bp, Homo sapien
tgacctatttacacactgaggagggatgtggaa

SEQ ID NO: 255381 - DNA, 33 bp, Homo sapien
gacgcatggatcccagccccagtgaaacttagg

SEQ ID NO: 255382 - DNA, 33 bp, Homo sapien
gacgcatggatcccagtcccagtgaaacttagg

SEQ ID NO: 255383 - DNA, 33 bp, Homo sapien
acttttcatatctacacgtttgtacagctttat

SEQ ID NO: 255384 - DNA, 33 bp, Homo sapien
acttttcatatctacatgtttgtacagctttat

SEQ ID NO: 255385 - DNA, 33 bp, Homo sapien
ttcaagcagcagctaccgaaaggcgttgcgaca

SEQ ID NO: 255386 - DNA, 33 bp, Homo sapien
ttcaagcagcagctactgaaaggcgttgcgaca

SEQ ID NO: 255387 - DNA, 33 bp, Homo sapien
tttattccaagcaaaacgggaacaaggttgcat

SEQ ID NO: 255388 - DNA, 33 bp, Homo sapien
tttattccaagcaaaaggggaacaaggttgcat

SEQ ID NO: 255389 - DNA, 33 bp, Homo sapien
tgttgtgaggagtagacgaattaataaacacag

SEQ ID NO: 255390 - DNA, 33 bp, Homo sapien
tgttgtgaggagtagatgaattaataaacacag

SEQ ID NO: 255391 - DNA, 33 bp, Homo sapien
agagaatatttttcacggctgtagaggctctgt

SEQ ID NO: 255392 - DNA, 33 bp, Homo sapien
agagaatatttttcactgctgtagaggctctgt

SEQ ID NO: 255393 - DNA, 33 bp, Homo sapien
acagagtggaaccataaagtagctcaccctttc

SEQ ID NO: 255394 - DNA, 33 bp, Homo sapien
acagagtggaaccatagagtagctcaccctttc

SEQ ID NO: 255395 - DNA, 33 bp, Homo sapien
agcagtcacgtagcccacctaacttcaaggaga

SEQ ID NO: 255396 - DNA, 33 bp, Homo sapien
agcagtcacgtagcccgcctaacttcaaggaga

SEQ ID NO: 255397 - DNA, 33 bp, Homo sapien
cacggtcaatccccacaatgaaatattatgcag

SEQ ID NO: 255398 - DNA, 33 bp, Homo sapien
cacggtcaatccccacgatgaaatattatgcag

SEQ ID NO: 255399 - DNA, 33 bp, Homo sapien
acacctcttaaaccagcagaaatgtggtcccac

SEQ ID NO: 255400 - DNA, 33 bp, Homo sapien
acacctcttaaaccagtagaaatgtggtcccac

SEQ ID NO: 255401 - DNA, 33 bp, Homo sapien
ctctcctcattgaggcaaaagttttaaaattat

SEQ ID NO: 255402 - DNA, 33 bp, Homo sapien
ctctcctcattgaggcgaaagttttaaaattat

SEQ ID NO: 255403 - DNA, 33 bp, Homo sapien
ggtttcctcagatatacggcctggaaaccacgt

SEQ ID NO: 255404 - DNA, 33 bp, Homo sapien
ggtttcctcagatatatggcctggaaaccacgt

SEQ ID NO: 255405 - DNA, 33 bp, Homo sapien
acttttgaatactaaaaggtgttctctctattc

SEQ ID NO: 255406 - DNA, 33 bp, Homo sapien
acttttgaatactaaagggtgttctctctattc

SEQ ID NO: 255407 - DNA, 33 bp, Homo sapien
gttggctgctcctacaacgacaccagtattatg

SEQ ID NO: 255408 - DNA, 33 bp, Homo sapien
gttggctgctcctacagcgacaccagtattatg

SEQ ID NO: 255409 - DNA, 33 bp, Homo sapien
ttgtttcaattttcataatcagtggtaacaagg

SEQ ID NO: 255410 - DNA, 33 bp, Homo sapien
ttgtttcaattttcatgatcagtggtaacaagg

SEQ ID NO: 255411 - DNA, 33 bp, Homo sapien
aggagttttagactggacagggcaatatggcaa

SEQ ID NO: 255412 - DNA, 33 bp, Homo sapien
aggagttttagactggtcagggcaatatggcaa

SEQ ID NO: 255413 - DNA, 33 bp, Homo sapien
tggaaactcttgaaaacgtgaccttggcagatg

SEQ ID NO: 255414 - DNA, 33 bp, Homo sapien
tggaaactcttgaaaatgtgaccttggcagatg

SEQ ID NO: 255415 - DNA, 33 bp, Homo sapien
aacgataaggtgaggaataaaagccataatgcg

SEQ ID NO: 255416 - DNA, 33 bp, Homo sapien
aacgataaggtgaggagtaaaagccataatgcg

SEQ ID NO: 255417 - DNA, 33 bp, Homo sapien
aactattcctgacctccaataagctcggcaacc

SEQ ID NO: 255418 - DNA, 33 bp, Homo sapien
aactattcctgacctcgaataagctcggcaacc

SEQ ID NO: 255419 - DNA, 33 bp, Homo sapien
acctttcattctacagacaaggaaatccgctcc

SEQ ID NO: 255420 - DNA, 33 bp, Homo sapien
acctttcattctacaggcaaggaaatccgctcc

SEQ ID NO: 255421 - DNA, 33 bp, Homo sapien
acacaggtcagccctacacgatgagggagggga

SEQ ID NO: 255422 - DNA, 33 bp, Homo sapien
acacaggtcagccctatacgatgagggagggga

SEQ ID NO: 255423 - DNA, 33 bp, Homo sapien
tgtgactgtacttgaacatagggctttaaaaca

SEQ ID NO: 255424 - DNA, 33 bp, Homo sapien
tgtgactgtacttgaatatagggctttaaaaca

SEQ ID NO: 255425 - DNA, 33 bp, Homo sapien
cccaagtcagttcctacgaatgtccggaggcag

SEQ ID NO: 255426 - DNA, 33 bp, Homo sapien
cccaagtcagttcctatgaatgtccggaggcag

SEQ ID NO: 255427 - DNA, 33 bp, Homo sapien
acatgctaaagtggacagaaccaaactacagtg

SEQ ID NO: 255428 - DNA, 33 bp, Homo sapien
acatgctaaagtggacggaaccaaactacagtg

SEQ ID NO: 255429 - DNA, 33 bp, Homo sapien
ctccactttggaagtcaccgccactcttatttc

SEQ ID NO: 255430 - DNA, 33 bp, Homo sapien
ctccactttggaagtcgccgccactcttatttc

SEQ ID NO: 255431 - DNA, 33 bp, Homo sapien
ccaggcaccaccctgcactccactttggaagtc

SEQ ID NO: 255432 - DNA, 33 bp, Homo sapien
ccaggcaccaccctgcgctccactttggaagtc

SEQ ID NO: 255433 - DNA, 33 bp, Homo sapien
ccccattacatcttcccgacaacacgaggtaga

SEQ ID NO: 255434 - DNA, 33 bp, Homo sapien
ccccattacatcttcctgacaacacgaggtaga

SEQ ID NO: 255435 - DNA, 33 bp, Homo sapien
caggaatctcaggctcagaagaacccgggagct

SEQ ID NO: 255436 - DNA, 33 bp, Homo sapien
caggaatctcaggctcggaagaacccgggagct

SEQ ID NO: 255437 - DNA, 33 bp, Homo sapien
agttaattttcaggcaacccctatgagtcaatt

SEQ ID NO: 255438 - DNA, 33 bp, Homo sapien
agttaattttcaggcagcccctatgagtcaatt

SEQ ID NO: 255439 - DNA, 33 bp, Homo sapien
tgtagaaaacaataacaatgccatcagtagaag

SEQ ID NO: 255440 - DNA, 33 bp, Homo sapien
tgtagaaaacaataacgatgccatcagtagaag

SEQ ID NO: 255441 - DNA, 33 bp, Homo sapien
tcctgggaagaggcagaatatgagaggcccagg

SEQ ID NO: 255442 - DNA, 33 bp, Homo sapien
tcctgggaagaggcaggatatgagaggcccagg

SEQ ID NO: 255443 - DNA, 33 bp, Homo sapien
caagacctggattaccaccaatatgcgagctac

SEQ ID NO: 255444 - DNA, 33 bp, Homo sapien
caagacctggattaccgccaatatgcgagctac

SEQ ID NO: 255445 - DNA, 33 bp, Homo sapien
ggtagctcagaaatcacagactcaaaggaaaat

SEQ ID NO: 255446 - DNA, 33 bp, Homo sapien
ggtagctcagaaatcatagactcaaaggaaaat

SEQ ID NO: 255447 - DNA, 33 bp, Homo sapien
gcagcgagccgcgttcacaccattgtactccag

SEQ ID NO: 255448 - DNA, 33 bp, Homo sapien
gcagcgagccgcgttctcaccattgtactccag

SEQ ID NO: 255449 - DNA, 33 bp, Homo sapien
gcaggctggtgttcacactaggcagcttttaag

SEQ ID NO: 255450 - DNA, 33 bp, Homo sapien
gcaggctggtgttcactctaggcagcttttaag

SEQ ID NO: 255451 - DNA, 33 bp, Homo sapien
ctgttacagataaacactctcaaaacattttca

SEQ ID NO: 255452 - DNA, 33 bp, Homo sapien
ctgttacagataaacagtctcaaaacattttca

SEQ ID NO: 255453 - DNA, 33 bp, Homo sapien
ctatcactttgataaccgtggttacttatttat

SEQ ID NO: 255454 - DNA, 33 bp, Homo sapien
ctatcactttgataactgtggttacttatttat

SEQ ID NO: 255455 - DNA, 33 bp, Homo sapien
gacccagaacgatcaaaccaatcaatactgaag

SEQ ID NO: 255456 - DNA, 33 bp, Homo sapien
gacccagaacgatcaacccaatcaatactgaag

SEQ ID NO: 255457 - DNA, 33 bp, Homo sapien
tgtagcagagatacagaacgatttgtctccact

SEQ ID NO: 255458 - DNA, 33 bp, Homo sapien
tgtagcagagatacagcacgatttgtctccact

SEQ ID NO: 255459 - DNA, 33 bp, Homo sapien
cgtcaaattgcagttaagtccaagtatgccaca

SEQ ID NO: 255460 - DNA, 33 bp, Homo sapien
cgtcaaattgcagttaggtccaagtatgccaca

SEQ ID NO: 255461 - DNA, 33 bp, Homo sapien
ccagctgggtcaacacaggatagctacttaatc

SEQ ID NO: 255462 - DNA, 33 bp, Homo sapien
ccagctgggtcaacacgggatagctacttaatc

SEQ ID NO: 255463 - DNA, 33 bp, Homo sapien
cagttcatctacaatgaagtagcaaaagagagc

SEQ ID NO: 255464 - DNA, 33 bp, Homo sapien
cagttcatctacaatgcagtagcaaaagagagc

SEQ ID NO: 255465 - DNA, 33 bp, Homo sapien
cattgtagatgaactgaataaccattttggtta

SEQ ID NO: 255466 - DNA, 33 bp, Homo sapien
cattgtagatgaactggataaccattttggtta

SEQ ID NO: 255467 - DNA, 33 bp, Homo sapien
acccagtgggtggggcaaaaataaatcaagccc

SEQ ID NO: 255468 - DNA, 33 bp, Homo sapien
acccagtgggtggggcgaaaataaatcaagccc

SEQ ID NO: 255469 - DNA, 33 bp, Homo sapien
ctctaatatgaggccaaaggttcctgacctatc

SEQ ID NO: 255470 - DNA, 33 bp, Homo sapien
ctctaatatgaggccacaggttcctgacctatc

SEQ ID NO: 255471 - DNA, 33 bp, Homo sapien
gaacgctgaaactggacgaaggccaatttaagc

SEQ ID NO: 255472 - DNA, 33 bp, Homo sapien
gaacgctgaaactggatgaaggccaatttaagc

SEQ ID NO: 255473 - DNA, 33 bp, Homo sapien
tccattttacttgggacatagtgttttcagcca

SEQ ID NO: 255474 - DNA, 33 bp, Homo sapien
tccattttacttgggagatagtgttttcagcca

SEQ ID NO: 255475 - DNA, 33 bp, Homo sapien
aatattagtagcctgtcaatgactcttctttct

SEQ ID NO: 255476 - DNA, 33 bp, Homo sapien
aatattagtagcctgtgaatgactcttctttct

SEQ ID NO: 255477 - DNA, 33 bp, Homo sapien
tgactgatacaagagcccaaaggaatcacagtg

SEQ ID NO: 255478 - DNA, 33 bp, Homo sapien
tgactgatacaagagctcaaaggaatcacagtg

SEQ ID NO: 255479 - DNA, 33 bp, Homo sapien
tggcatgtgaatcataaatcagtatgttttaaa

SEQ ID NO: 255480 - DNA, 33 bp, Homo sapien
tggcatgtgaatcatagatcagtatgttttaaa

SEQ ID NO: 255481 - DNA, 33 bp, Homo sapien
atgggtttctccaaagcctgctttagcttcctt

SEQ ID NO: 255482 - DNA, 33 bp, Homo sapien
atgggtttctccaaaggctgctttagcttcctt

SEQ ID NO: 255483 - DNA, 33 bp, Homo sapien
catcgatggacacagccgacaaatctctgcatg

SEQ ID NO: 255484 - DNA, 33 bp, Homo sapien
catcgatggacacagctgacaaatctctgcatg

SEQ ID NO: 255485 - DNA, 33 bp, Homo sapien
tgtcaccttttcactcccatcccgatagccaag

SEQ ID NO: 255486 - DNA, 33 bp, Homo sapien
tgtcaccttttcactctcatcccgatagccaag

SEQ ID NO: 255487 - DNA, 33 bp, Homo sapien
atgaaccttgaaaacacgctgaatgaaataagc

SEQ ID NO: 255488 - DNA, 33 bp, Homo sapien
atgaaccttgaaaacatgctgaatgaaataagc

SEQ ID NO: 255489 - DNA, 33 bp, Homo sapien
gggagcagtgctagagcaggaacttgtaggtca

SEQ ID NO: 255490 - DNA, 33 bp, Homo sapien
gggagcagtgctagagtaggaacttgtaggtca

SEQ ID NO: 255491 - DNA, 33 bp, Homo sapien
ggatcttgagctgaaagcatcctgaattcaggg

SEQ ID NO: 255492 - DNA, 33 bp, Homo sapien
ggatcttgagctgaaatcatcctgaattcaggg

SEQ ID NO: 255493 - DNA, 33 bp, Homo sapien
tgaggtctggctgccaaagataggagcacaccc

SEQ ID NO: 255494 - DNA, 33 bp, Homo sapien
tgaggtctggctgccagagataggagcacaccc

SEQ ID NO: 255495 - DNA, 33 bp, Homo sapien
gaatacaattcaataaataagatcagggcgcta

SEQ ID NO: 255496 - DNA, 33 bp, Homo sapien
gaatacaattcaataagtaagatcagggcgcta

SEQ ID NO: 255497 - DNA, 33 bp, Homo sapien
acccccccgtgcttcacacttcaatgtgctgct

SEQ ID NO: 255498 - DNA, 33 bp, Homo sapien
acccccccgtgcttcatacttcaatgtgctgct

SEQ ID NO: 255499 - DNA, 33 bp, Homo sapien
agatgctgtggtctcccgataaaaatcgagtga

SEQ ID NO: 255500 - DNA, 33 bp, Homo sapien
agatgctgtggtctcctgataaaaatcgagtga

SEQ ID NO: 255501 - DNA, 33 bp, Homo sapien
tgtcaggagttatggagaaacaaccacaatcct

SEQ ID NO: 255502 - DNA, 33 bp, Homo sapien
tgtcaggagttatggataaacaaccacaatcct

SEQ ID NO: 255503 - DNA, 33 bp, Homo sapien
ttgctaaacggtaatacctagagctagacagga

SEQ ID NO: 255504 - DNA, 33 bp, Homo sapien
ttgctaaacggtaatatctagagctagacagga

SEQ ID NO: 255505 - DNA, 33 bp, Homo sapien
tgagaaacactgccaaattatgttttcagagta

SEQ ID NO: 255506 - DNA, 33 bp, Homo sapien
tgagaaacactgccaagttatgttttcagagta

SEQ ID NO: 255507 - DNA, 33 bp, Homo sapien
gagacagccatctgaaggtttaagaggctctcc

SEQ ID NO: 255508 - DNA, 33 bp, Homo sapien
gagacagccatctgaatgtttaagaggctctcc

SEQ ID NO: 255509 - DNA, 33 bp, Homo sapien
cctggccaaagacatacaagaggattttgtctg

SEQ ID NO: 255510 - DNA, 33 bp, Homo sapien
cctggccaaagacatataagaggattttgtctg

SEQ ID NO: 255511 - DNA, 33 bp, Homo sapien
ttagaataatttcaaaccaaccctgagttactc

SEQ ID NO: 255512 - DNA, 33 bp, Homo sapien
ttagaataatttcaaagcaaccctgagttactc

SEQ ID NO: 255513 - DNA, 33 bp, Homo sapien
ttttgggggtacttacaatatttcataggttcg

SEQ ID NO: 255514 - DNA, 33 bp, Homo sapien
ttttgggggtacttacgatatttcataggttcg

SEQ ID NO: 255515 - DNA, 33 bp, Homo sapien
aggaggcaaagggagaacttcttagaacaaagt

SEQ ID NO: 255516 - DNA, 33 bp, Homo sapien
aggaggcaaagggagagcttcttagaacaaagt

SEQ ID NO: 255517 - DNA, 33 bp, Homo sapien
tacacacagctttaaacgcaacttgttccaaat

SEQ ID NO: 255518 - DNA, 33 bp, Homo sapien
tacacacagctttaaatgcaacttgttccaaat

SEQ ID NO: 255519 - DNA, 33 bp, Homo sapien
tactggaaaaagggaaccaggagagggcatttc

SEQ ID NO: 255520 - DNA, 33 bp, Homo sapien
tactggaaaaagggaagcaggagagggcatttc

SEQ ID NO: 255521 - DNA, 33 bp, Homo sapien
atgggcatgcaaatgaaaaaagcaataatgtaa

SEQ ID NO: 255522 - DNA, 33 bp, Homo sapien
atgggcatgcaaatgagaaaagcaataatgtaa

SEQ ID NO: 255523 - DNA, 33 bp, Homo sapien
taattgaaaggtttgacgtggctccctgtaatg

SEQ ID NO: 255524 - DNA, 33 bp, Homo sapien
taattgaaaggtttgatgtggctccctgtaatg

SEQ ID NO: 255525 - DNA, 33 bp, Homo sapien
ggctgccatcatctaacgtccctgtctccaatt

SEQ ID NO: 255526 - DNA, 33 bp, Homo sapien
ggctgccatcatctaatgtccctgtctccaatt

SEQ ID NO: 255527 - DNA, 33 bp, Homo sapien
ggtccatagtggaagaaagtagggcttagacat

SEQ ID NO: 255528 - DNA, 33 bp, Homo sapien
ggtccatagtggaagagagtagggcttagacat

SEQ ID NO: 255529 - DNA, 33 bp, Homo sapien
agactccggtgaaacacgagtatgaaaatgaag

SEQ ID NO: 255530 - DNA, 33 bp, Homo sapien
agactccggtgaaacatgagtatgaaaatgaag

SEQ ID NO: 255531 - DNA, 33 bp, Homo sapien
agataaaacttcttgaactttagacaactaagt

SEQ ID NO: 255532 - DNA, 33 bp, Homo sapien
agataaaacttcttgacctttagacaactaagt

SEQ ID NO: 255533 - DNA, 33 bp, Homo sapien
acacttctcgtctgccaaggtctggagggtgag

SEQ ID NO: 255534 - DNA, 33 bp, Homo sapien
acacttctcgtctgccgaggtctggagggtgag

SEQ ID NO: 255535 - DNA, 33 bp, Homo sapien
tagccaagaattagaaagaaagcaccacaggac

SEQ ID NO: 255536 - DNA, 33 bp, Homo sapien
tagccaagaattagaaggaaagcaccacaggac

SEQ ID NO: 255537 - DNA, 33 bp, Homo sapien
acgcaaccctgtgtaactgttgtatttcaattc

SEQ ID NO: 255538 - DNA, 33 bp, Homo sapien
acgcaaccctgtgtaattgttgtatttcaattc

SEQ ID NO: 255539 - DNA, 33 bp, Homo sapien
tgcgcacgcagttcacagaacaatctcagctgg

SEQ ID NO: 255540 - DNA, 33 bp, Homo sapien
tgcgcacgcagttcacggaacaatctcagctgg

SEQ ID NO: 255541 - DNA, 33 bp, Homo sapien
ctccgatggaaggtgaaagcgagcaaatcatga

SEQ ID NO: 255542 - DNA, 33 bp, Homo sapien
ctccgatggaaggtgagagcgagcaaatcatga

SEQ ID NO: 255543 - DNA, 33 bp, Homo sapien
attaagaatttttcacactggacaacggtaaag

SEQ ID NO: 255544 - DNA, 33 bp, Homo sapien
attaagaatttttcactctggacaacggtaaag

SEQ ID NO: 255545 - DNA, 33 bp, Homo sapien
gccgcgctatcactagcaaatctggagaagatc

SEQ ID NO: 255546 - DNA, 33 bp, Homo sapien
gccgcgctatcactaggaaatctggagaagatc

SEQ ID NO: 255547 - DNA, 33 bp, Homo sapien
taccagaagaagaagacacatgtaagtaaccat

SEQ ID NO: 255548 - DNA, 33 bp, Homo sapien
taccagaagaagaagatacatgtaagtaaccat

SEQ ID NO: 255549 - DNA, 33 bp, Homo sapien
ccgggtcatcacattgaatattcaccaggtcac

SEQ ID NO: 255550 - DNA, 33 bp, Homo sapien
ccgggtcatcacattgcatattcaccaggtcac

SEQ ID NO: 255551 - DNA, 33 bp, Homo sapien
cgggacagagattaaaaaggctaaataggtttg

SEQ ID NO: 255552 - DNA, 33 bp, Homo sapien
cgggacagagattaaagaggctaaataggtttg

SEQ ID NO: 255553 - DNA, 33 bp, Homo sapien
tttagggggagctgaacgggcagaaaggccttg

SEQ ID NO: 255554 - DNA, 33 bp, Homo sapien
tttagggggagctgaatgggcagaaaggccttg

SEQ ID NO: 255555 - DNA, 33 bp, Homo sapien
ggcaggaaacatggcccgaaatacgtcagtacc

SEQ ID NO: 255556 - DNA, 33 bp, Homo sapien
ggcaggaaacatggcctgaaatacgtcagtacc

SEQ ID NO: 255557 - DNA, 33 bp, Homo sapien
gtttttatttgcttaaatggttatcttatcagt

SEQ ID NO: 255558 - DNA, 33 bp, Homo sapien
gtttttatttgcttaagtggttatcttatcagt

SEQ ID NO: 255559 - DNA, 33 bp, Homo sapien
tctcaacaacgtaggccctaatagaatccagag

SEQ ID NO: 255560 - DNA, 33 bp, Homo sapien
tctcaacaacgtaggctctaatagaatccagag

SEQ ID NO: 255561 - DNA, 33 bp, Homo sapien
aagtagccatattgcccaatgcaacctacagat

SEQ ID NO: 255562 - DNA, 33 bp, Homo sapien
aagtagccatattgcctaatgcaacctacagat

SEQ ID NO: 255563 - DNA, 33 bp, Homo sapien
tccttttgcttaagaccacttcggctatttggg

SEQ ID NO: 255564 - DNA, 33 bp, Homo sapien
tccttttgcttaagactacttcggctatttggg

SEQ ID NO: 255565 - DNA, 33 bp, Homo sapien
agtcaggaagagaatgaaaacggaatgccagat

SEQ ID NO: 255566 - DNA, 33 bp, Homo sapien
agtcaggaagagaatggaaacggaatgccagat

SEQ ID NO: 255567 - DNA, 33 bp, Homo sapien
acaggagcaaatgttccgaaaagaggacacaat

SEQ ID NO: 255568 - DNA, 33 bp, Homo sapien
acaggagcaaatgttctgaaaagaggacacaat

SEQ ID NO: 255569 - DNA, 33 bp, Homo sapien
ccacagcaagagggggaacagacaagtggccct

SEQ ID NO: 255570 - DNA, 33 bp, Homo sapien
ccacagcaagaggggggacagacaagtggccct

SEQ ID NO: 255571 - DNA, 33 bp, Homo sapien
aacataggacttggaagtatttgctttctctcc

SEQ ID NO: 255572 - DNA, 33 bp, Homo sapien
aacataggacttggaattatttgctttctctcc

SEQ ID NO: 255573 - DNA, 33 bp, Homo sapien
ggagatgtatagttacagcagaagagataagtg

SEQ ID NO: 255574 - DNA, 33 bp, Homo sapien
ggagatgtatagttacggcagaagagataagtg

SEQ ID NO: 255575 - DNA, 33 bp, Homo sapien
aaaatgttgactcaaaaaacccagctcccatac

SEQ ID NO: 255576 - DNA, 33 bp, Homo sapien
aaaatgttgactcaaagaacccagctcccatac

SEQ ID NO: 255577 - DNA, 33 bp, Homo sapien
ccaccgaagctccagaatcctggaaggaaagca

SEQ ID NO: 255578 - DNA, 33 bp, Homo sapien
ccaccgaagctccagactcctggaaggaaagca

SEQ ID NO: 255579 - DNA, 33 bp, Homo sapien
tggcgggcagacgatacgtggggagcctctgat

SEQ ID NO: 255580 - DNA, 33 bp, Homo sapien
tggcgggcagacgatatgtggggagcctctgat

SEQ ID NO: 255581 - DNA, 33 bp, Homo sapien
taagctgcgggtaaacgaatctacgcacaggaa

SEQ ID NO: 255582 - DNA, 33 bp, Homo sapien
taagctgcgggtaaactaatctacgcacaggaa

SEQ ID NO: 255583 - DNA, 33 bp, Homo sapien
acatcttagcactgccccacctttgaacgagca

SEQ ID NO: 255584 - DNA, 33 bp, Homo sapien
acatcttagcactgcctcacctttgaacgagca

SEQ ID NO: 255585 - DNA, 33 bp, Homo sapien
cagagtcatcaggcaaatcaactgtaattggaa

SEQ ID NO: 255586 - DNA, 33 bp, Homo sapien
cagagtcatcaggcaagtcaactgtaattggaa

SEQ ID NO: 255587 - DNA, 33 bp, Homo sapien
ccccctggatgtgcaagttatctgtacagcaaa

SEQ ID NO: 255588 - DNA, 33 bp, Homo sapien
ccccctggatgtgcaatttatctgtacagcaaa

SEQ ID NO: 255589 - DNA, 33 bp, Homo sapien
atgttgtttttcttgacgtgcaatgtgaggcag

SEQ ID NO: 255590 - DNA, 33 bp, Homo sapien
atgttgtttttcttgatgtgcaatgtgaggcag

SEQ ID NO: 255591 - DNA, 33 bp, Homo sapien
ggctaaaaaaggaagacgaacaagtcagtgaaa

SEQ ID NO: 255592 - DNA, 33 bp, Homo sapien
ggctaaaaaaggaagatgaacaagtcagtgaaa

SEQ ID NO: 255593 - DNA, 33 bp, Homo sapien
gatgccatttctctaagcatttagcatgagatc

SEQ ID NO: 255594 - DNA, 33 bp, Homo sapien
gatgccatttctctaatcatttagcatgagatc

SEQ ID NO: 255595 - DNA, 33 bp, Homo sapien
ttccgcttctggaaaaagcagtgtgcagcatcc

SEQ ID NO: 255596 - DNA, 33 bp, Homo sapien
ttccgcttctggaaaaggcagtgtgcagcatcc

SEQ ID NO: 255597 - DNA, 33 bp, Homo sapien
agtagacctgtgttcacgttttataacgcgaaa

SEQ ID NO: 255598 - DNA, 33 bp, Homo sapien
agtagacctgtgttcatgttttataacgcgaaa

SEQ ID NO: 255599 - DNA, 33 bp, Homo sapien
gaaacattgattaatacctcagccttgcaacac

SEQ ID NO: 255600 - DNA, 33 bp, Homo sapien
gaaacattgattaatatctcagccttgcaacac

SEQ ID NO: 255601 - DNA, 33 bp, Homo sapien
tgtacattttcctggacagatttattttctgct

SEQ ID NO: 255602 - DNA, 33 bp, Homo sapien
tgtacattttcctggatagatttattttctgct

SEQ ID NO: 255603 - DNA, 33 bp, Homo sapien
gcttttagttagaccagtctgagttcaaatttg

SEQ ID NO: 255604 - DNA, 33 bp, Homo sapien
gcttttagttagaccattctgagttcaaatttg

SEQ ID NO: 255605 - DNA, 33 bp, Homo sapien
ttctactgcctgatacacaagacattctgggtc

SEQ ID NO: 255606 - DNA, 33 bp, Homo sapien
ttctactgcctgatacgcaagacattctgggtc

SEQ ID NO: 255607 - DNA, 33 bp, Homo sapien
aactgaaaattagcccactggtcacattcatat

SEQ ID NO: 255608 - DNA, 33 bp, Homo sapien
aactgaaaattagcccgctggtcacattcatat

SEQ ID NO: 255609 - DNA, 33 bp, Homo sapien
tctcctcttcgaaacaagtaaggggatgctgtc

SEQ ID NO: 255610 - DNA, 33 bp, Homo sapien
tctcctcttcgaaacaggtaaggggatgctgtc

SEQ ID NO: 255611 - DNA, 33 bp, Homo sapien
tgggcactctctgtccagcacatactgaaattc

SEQ ID NO: 255612 - DNA, 33 bp, Homo sapien
tgggcactctctgtccggcacatactgaaattc

SEQ ID NO: 255613 - DNA, 33 bp, Homo sapien
atctttttgtttaccacaatgatgaaggccatg

SEQ ID NO: 255614 - DNA, 33 bp, Homo sapien
atctttttgtttaccagaatgatgaaggccatg

SEQ ID NO: 255615 - DNA, 33 bp, Homo sapien
tcatcttctctttcccagatgccaaagccattt

SEQ ID NO: 255616 - DNA, 33 bp, Homo sapien
tcatcttctctttcccggatgccaaagccattt

SEQ ID NO: 255617 - DNA, 33 bp, Homo sapien
tgctctttcttcatccaaatctaactccctgct

SEQ ID NO: 255618 - DNA, 33 bp, Homo sapien
tgctctttcttcatccgaatctaactccctgct

SEQ ID NO: 255619 - DNA, 33 bp, Homo sapien
tgttatttcaggtcacaaagctaagacgggggt

SEQ ID NO: 255620 - DNA, 33 bp, Homo sapien
tgttatttcaggtcacgaagctaagacgggggt

SEQ ID NO: 255621 - DNA, 33 bp, Homo sapien
cctttttgtggctgcaaacaattaaattccaca

SEQ ID NO: 255622 - DNA, 33 bp, Homo sapien
cctttttgtggctgcagacaattaaattccaca

SEQ ID NO: 255623 - DNA, 33 bp, Homo sapien
aaaccatgaacatccaatctcctggccacactg

SEQ ID NO: 255624 - DNA, 33 bp, Homo sapien
aaaccatgaacatccagtctcctggccacactg

SEQ ID NO: 255625 - DNA, 33 bp, Homo sapien
catggtaattaacccaccacgtctttctgatca

SEQ ID NO: 255626 - DNA, 33 bp, Homo sapien
catggtaattaacccatcacgtctttctgatca

SEQ ID NO: 255627 - DNA, 33 bp, Homo sapien
cttccactttatggacagaccacatttggctta

SEQ ID NO: 255628 - DNA, 33 bp, Homo sapien
cttccactttatggacggaccacatttggctta

SEQ ID NO: 255629 - DNA, 33 bp, Homo sapien
gtttagttctaaagtcaacacattataccaaaa

SEQ ID NO: 255630 - DNA, 33 bp, Homo sapien
gtttagttctaaagtcgacacattataccaaaa

SEQ ID NO: 255631 - DNA, 33 bp, Homo sapien
attcaatcggtcatcaatcaaagtgatcagtcc

SEQ ID NO: 255632 - DNA, 33 bp, Homo sapien
attcaatcggtcatcagtcaaagtgatcagtcc

SEQ ID NO: 255633 - DNA, 33 bp, Homo sapien
caaaaatatctgaaaaaatccatctggaaagga

SEQ ID NO: 255634 - DNA, 33 bp, Homo sapien
caaaaatatctgaaaacatccatctggaaagga

SEQ ID NO: 255635 - DNA, 33 bp, Homo sapien
gtttacaaagtacacacacctgtataaccatga

SEQ ID NO: 255636 - DNA, 33 bp, Homo sapien
gtttacaaagtacacatacctgtataaccatga

SEQ ID NO: 255637 - DNA, 33 bp, Homo sapien
aaagggaactcttacacactgatttggaatata

SEQ ID NO: 255638 - DNA, 33 bp, Homo sapien
aaagggaactcttacagactgatttggaatata

SEQ ID NO: 255639 - DNA, 33 bp, Homo sapien
gagagttttcttactaagatttgtgagagtttc

SEQ ID NO: 255640 - DNA, 33 bp, Homo sapien
gagagttttcttactaggatttgtgagagtttc

SEQ ID NO: 255641 - DNA, 33 bp, Homo sapien
tgcctctgtagctgacactcataagactgaaat

SEQ ID NO: 255642 - DNA, 33 bp, Homo sapien
tgcctctgtagctgacgctcataagactgaaat

SEQ ID NO: 255643 - DNA, 33 bp, Homo sapien
tgcacccggatctttcacataggctggttattt

SEQ ID NO: 255644 - DNA, 33 bp, Homo sapien
tgcacccggatctttcgcataggctggttattt

SEQ ID NO: 255645 - DNA, 33 bp, Homo sapien
tctccatctgtcttagcatgcaacctgaagtat

SEQ ID NO: 255646 - DNA, 33 bp, Homo sapien
tctccatctgtcttagtatgcaacctgaagtat

SEQ ID NO: 255647 - DNA, 33 bp, Homo sapien
aacctcagcccggtggccatcttggtctggaag

SEQ ID NO: 255648 - DNA, 33 bp, Homo sapien
aacctcagcccggtggtcatcttggtctggaag

SEQ ID NO: 255649 - DNA, 33 bp, Homo sapien
gagcatggctgtccacacagaaatcccatcccc

SEQ ID NO: 255650 - DNA, 33 bp, Homo sapien
gagcatggctgtccacgcagaaatcccatcccc

SEQ ID NO: 255651 - DNA, 33 bp, Homo sapien
aaatccttcaacgcagcccatggtgaccttgca

SEQ ID NO: 255652 - DNA, 33 bp, Homo sapien
aaatccttcaacgcagtccatggtgaccttgca

SEQ ID NO: 255653 - DNA, 33 bp, Homo sapien
tatacaggtaactataggccgattagcttgata

SEQ ID NO: 255654 - DNA, 33 bp, Homo sapien
tatacaggtaactatatgccgattagcttgata

SEQ ID NO: 255655 - DNA, 33 bp, Homo sapien
ccttgaaatctgaaccaatggatgtgagacaac

SEQ ID NO: 255656 - DNA, 33 bp, Homo sapien
ccttgaaatctgaaccgatggatgtgagacaac

SEQ ID NO: 255657 - DNA, 33 bp, Homo sapien
gccccttgaacattctcaagtatagaagaggac

SEQ ID NO: 255658 - DNA, 33 bp, Homo sapien
gccccttgaacattcttaagtatagaagaggac

SEQ ID NO: 255659 - DNA, 33 bp, Homo sapien
tgccacctagtgcagacgtaaaccctcttattt

SEQ ID NO: 255660 - DNA, 33 bp, Homo sapien
tgccacctagtgcagatgtaaaccctcttattt

SEQ ID NO: 255661 - DNA, 33 bp, Homo sapien
caaaccggctggtgaacgtgattatcttttact

SEQ ID NO: 255662 - DNA, 33 bp, Homo sapien
caaaccggctggtgaatgtgattatcttttact

SEQ ID NO: 255663 - DNA, 33 bp, Homo sapien
cctctgggttgtggtacatccatcatgttgaaa

SEQ ID NO: 255664 - DNA, 33 bp, Homo sapien
cctctgggttgtggtatatccatcatgttgaaa

SEQ ID NO: 255665 - DNA, 33 bp, Homo sapien
agtgagatatctaagccagtgacatagttgctt

SEQ ID NO: 255666 - DNA, 33 bp, Homo sapien
agtgagatatctaagcgagtgacatagttgctt

SEQ ID NO: 255667 - DNA, 33 bp, Homo sapien
gcaggccttccagaaagtatccagaagaaggcc

SEQ ID NO: 255668 - DNA, 33 bp, Homo sapien
gcaggccttccagaaattatccagaagaaggcc

SEQ ID NO: 255669 - DNA, 33 bp, Homo sapien
gatgctggttaaaggacgtgtaattacagttag

SEQ ID NO: 255670 - DNA, 33 bp, Homo sapien
gatgctggttaaaggatgtgtaattacagttag

SEQ ID NO: 255671 - DNA, 33 bp, Homo sapien
ctgtggtggttggcacaggtttcaaacgtctgc

SEQ ID NO: 255672 - DNA, 33 bp, Homo sapien
ctgtggtggttggcaccggtttcaaacgtctgc

SEQ ID NO: 255673 - DNA, 33 bp, Homo sapien
aatgggagactgtgcacgaacgggatggagaag

SEQ ID NO: 255674 - DNA, 33 bp, Homo sapien
aatgggagactgtgcatgaacgggatggagaag

SEQ ID NO: 255675 - DNA, 33 bp, Homo sapien
ccagactttcatcacaaatgggtctttatctaa

SEQ ID NO: 255676 - DNA, 33 bp, Homo sapien
ccagactttcatcacacatgggtctttatctaa

SEQ ID NO: 255677 - DNA, 33 bp, Homo sapien
ctttacaaaaccaacccctggagctcagtcaga

SEQ ID NO: 255678 - DNA, 33 bp, Homo sapien
ctttacaaaaccaacctctggagctcagtcaga

SEQ ID NO: 255679 - DNA, 33 bp, Homo sapien
gtcagagctttcattccctcacctcttccagga

SEQ ID NO: 255680 - DNA, 33 bp, Homo sapien
gtcagagctttcattctctcacctcttccagga

SEQ ID NO: 255681 - DNA, 33 bp, Homo sapien
ccaagtggcgattttgaaaagtcccagttctgt

SEQ ID NO: 255682 - DNA, 33 bp, Homo sapien
ccaagtggcgattttggaaagtcccagttctgt

SEQ ID NO: 255683 - DNA, 33 bp, Homo sapien
acacaataacaacgtaacaactaagtattcact

SEQ ID NO: 255684 - DNA, 33 bp, Homo sapien
acacaataacaacgtaccaactaagtattcact

SEQ ID NO: 255685 - DNA, 33 bp, Homo sapien
agagcttgctaatgatgatagggcataaaaaac

SEQ ID NO: 255686 - DNA, 33 bp, Homo sapien
agagcttgctaatgattatagggcataaaaaac

SEQ ID NO: 255687 - DNA, 33 bp, Homo sapien
tgttcactcatttccccatccattcatttcttc

SEQ ID NO: 255688 - DNA, 33 bp, Homo sapien
tgttcactcatttccctatccattcatttcttc

SEQ ID NO: 255689 - DNA, 33 bp, Homo sapien
tttacaccaggacatcacagctctacctcattc

SEQ ID NO: 255690 - DNA, 33 bp, Homo sapien
tttacaccaggacatcgcagctctacctcattc

SEQ ID NO: 255691 - DNA, 33 bp, Homo sapien
acaaataggaaagaggacattgttagcagaagg

SEQ ID NO: 255692 - DNA, 33 bp, Homo sapien
acaaataggaaagagggcattgttagcagaagg

SEQ ID NO: 255693 - DNA, 33 bp, Homo sapien
ggaaaatgaaattctgaacataactttatttta

SEQ ID NO: 255694 - DNA, 33 bp, Homo sapien
ggaaaatgaaattctggacataactttatttta

SEQ ID NO: 255695 - DNA, 33 bp, Homo sapien
aatgagtgactttaagcaaaacatcgtggacag

SEQ ID NO: 255696 - DNA, 33 bp, Homo sapien
aatgagtgactttaaggaaaacatcgtggacag

SEQ ID NO: 255697 - DNA, 33 bp, Homo sapien
cacactgccgctcactcagagaggggctagaag

SEQ ID NO: 255698 - DNA, 33 bp, Homo sapien
cacactgccgctcactgagagaggggctagaag

SEQ ID NO: 255699 - DNA, 33 bp, Homo sapien
gctcatgagagtgaaacagaacaaggaaactgg

SEQ ID NO: 255700 - DNA, 33 bp, Homo sapien
gctcatgagagtgaaagagaacaaggaaactgg

SEQ ID NO: 255701 - DNA, 33 bp, Homo sapien
ccttggttaagagcaccgtaagatccagccctg

SEQ ID NO: 255702 - DNA, 33 bp, Homo sapien
ccttggttaagagcacggtaagatccagccctg

SEQ ID NO: 255703 - DNA, 33 bp, Homo sapien
gggagcaggaacctcccctcttcattctctacc

SEQ ID NO: 255704 - DNA, 33 bp, Homo sapien
gggagcaggaacctcctctcttcattctctacc

SEQ ID NO: 255705 - DNA, 33 bp, Homo sapien
ggattctggtgggaaccgtatgaggggaaactg

SEQ ID NO: 255706 - DNA, 33 bp, Homo sapien
ggattctggtgggaactgtatgaggggaaactg

SEQ ID NO: 255707 - DNA, 33 bp, Homo sapien
ttaaaaccagaataacggccgcggtggacagct

SEQ ID NO: 255708 - DNA, 33 bp, Homo sapien
ttaaaaccagaataactgccgcggtggacagct

SEQ ID NO: 255709 - DNA, 33 bp, Homo sapien
cctcttggtggcaaggacacctagctttccttg

SEQ ID NO: 255710 - DNA, 33 bp, Homo sapien
cctcttggtggcaaggtcacctagctttccttg

SEQ ID NO: 255711 - DNA, 33 bp, Homo sapien
gtcagcggtcagcacccctttttagtttgtgca

SEQ ID NO: 255712 - DNA, 33 bp, Homo sapien
gtcagcggtcagcacctctttttagtttgtgca

SEQ ID NO: 255713 - DNA, 33 bp, Homo sapien
aaccttcatttccacaatcgtgaccgggaacag

SEQ ID NO: 255714 - DNA, 33 bp, Homo sapien
aaccttcatttccacagtcgtgaccgggaacag

SEQ ID NO: 255715 - DNA, 33 bp, Homo sapien
ctgtgtctatttccaacttatctctatttgatg

SEQ ID NO: 255716 - DNA, 33 bp, Homo sapien
ctgtgtctatttccaagttatctctatttgatg

SEQ ID NO: 255717 - DNA, 33 bp, Homo sapien
ggctcagagccatgtacgaacttaaacaaacag

SEQ ID NO: 255718 - DNA, 33 bp, Homo sapien
ggctcagagccatgtatgaacttaaacaaacag

SEQ ID NO: 255719 - DNA, 33 bp, Homo sapien
aatatgagaaagacaaaccaaacttctctcaaa

SEQ ID NO: 255720 - DNA, 33 bp, Homo sapien
aatatgagaaagacaagccaaacttctctcaaa

SEQ ID NO: 255721 - DNA, 33 bp, Homo sapien
caccgtgggaaggaccagcaagtgagaccatgc

SEQ ID NO: 255722 - DNA, 33 bp, Homo sapien
caccgtgggaaggaccggcaagtgagaccatgc

SEQ ID NO: 255723 - DNA, 33 bp, Homo sapien
gaccatgcaggcaatacgctttgtatggaaaca

SEQ ID NO: 255724 - DNA, 33 bp, Homo sapien
gaccatgcaggcaatatgctttgtatggaaaca

SEQ ID NO: 255725 - DNA, 33 bp, Homo sapien
aaattctggaactaaaaacaggtgatggataca

SEQ ID NO: 255726 - DNA, 33 bp, Homo sapien
aaattctggaactaaagacaggtgatggataca

SEQ ID NO: 255727 - DNA, 33 bp, Homo sapien
ctgaaacgtttcgaaccaagtctaaactctgca

SEQ ID NO: 255728 - DNA, 33 bp, Homo sapien
ctgaaacgtttcgaactaagtctaaactctgca

SEQ ID NO: 255729 - DNA, 33 bp, Homo sapien
ggggccctcaatccaacgagaatgtccttctgg

SEQ ID NO: 255730 - DNA, 33 bp, Homo sapien
ggggccctcaatccaatgagaatgtccttctgg

SEQ ID NO: 255731 - DNA, 33 bp, Homo sapien
actgtcaagcaggagcaatttgtgtcccatggc

SEQ ID NO: 255732 - DNA, 33 bp, Homo sapien
actgtcaagcaggagcgatttgtgtcccatggc

SEQ ID NO: 255733 - DNA, 33 bp, Homo sapien
cacggtaggagggagacacttttgcacgaagta

SEQ ID NO: 255734 - DNA, 33 bp, Homo sapien
cacggtaggagggagagacttttgcacgaagta

SEQ ID NO: 255735 - DNA, 33 bp, Homo sapien
ctaccacatggatggaacttgagagcaccatgc

SEQ ID NO: 255736 - DNA, 33 bp, Homo sapien
ctaccacatggatggaccttgagagcaccatgc

SEQ ID NO: 255737 - DNA, 33 bp, Homo sapien
agacacgatcgttttacagatgtgggaaaagac

SEQ ID NO: 255738 - DNA, 33 bp, Homo sapien
agacacgatcgttttagagatgtgggaaaagac

SEQ ID NO: 255739 - DNA, 33 bp, Homo sapien
gacattatgtgataagcagacacgatcgtttta

SEQ ID NO: 255740 - DNA, 33 bp, Homo sapien
gacattatgtgataagtagacacgatcgtttta

SEQ ID NO: 255741 - DNA, 33 bp, Homo sapien
agccccacacacatggaatactgcagacgacag

SEQ ID NO: 255742 - DNA, 33 bp, Homo sapien
agccccacacacatgggatactgcagacgacag

SEQ ID NO: 255743 - DNA, 33 bp, Homo sapien
gtaattgggctacctaccaccttataatatttg

SEQ ID NO: 255744 - DNA, 33 bp, Homo sapien
gtaattgggctacctatcaccttataatatttg

SEQ ID NO: 255745 - DNA, 33 bp, Homo sapien
ctggagtgtgccttacaatgatgaaaattctct

SEQ ID NO: 255746 - DNA, 33 bp, Homo sapien
ctggagtgtgccttaccatgatgaaaattctct

SEQ ID NO: 255747 - DNA, 33 bp, Homo sapien
tgcactcttatggcaaagttaactagtagtgac

SEQ ID NO: 255748 - DNA, 33 bp, Homo sapien
tgcactcttatggcaaggttaactagtagtgac

SEQ ID NO: 255749 - DNA, 33 bp, Homo sapien
cgtcaaattctccggcaaatacccctggatagg

SEQ ID NO: 255750 - DNA, 33 bp, Homo sapien
cgtcaaattctccggcgaatacccctggatagg

SEQ ID NO: 255751 - DNA, 33 bp, Homo sapien
aaccctccaagttagccgcgatctgtaaaaaag

SEQ ID NO: 255752 - DNA, 33 bp, Homo sapien
aaccctccaagttagctgcgatctgtaaaaaag

SEQ ID NO: 255753 - DNA, 33 bp, Homo sapien
ctgctatgtatcagttaaaaaaaaaaaacagtg

SEQ ID NO: 255754 - DNA, 33 bp, Homo sapien
ctgctatgtatcagtttaaaaaaaaaaacagtg

SEQ ID NO: 255755 - DNA, 33 bp, Homo sapien
tttatgccatatactgcacttccttaaactcaa

SEQ ID NO: 255756 - DNA, 33 bp, Homo sapien
tttatgccatatactggacttccttaaactcaa

SEQ ID NO: 255757 - DNA, 33 bp, Homo sapien
aaaagggatgaagccccgacccgtgttccaaca

SEQ ID NO: 255758 - DNA, 33 bp, Homo sapien
aaaagggatgaagccctgacccgtgttccaaca

SEQ ID NO: 255759 - DNA, 33 bp, Homo sapien
gtatttcttaaagaggccaccaatttgcataag

SEQ ID NO: 255760 - DNA, 33 bp, Homo sapien
gtatttcttaaagaggtcaccaatttgcataag

SEQ ID NO: 255761 - DNA, 33 bp, Homo sapien
agggtggaggaagcgcacagtgtgaaaacctcc

SEQ ID NO: 255762 - DNA, 33 bp, Homo sapien
agggtggaggaagcgcgcagtgtgaaaacctcc

SEQ ID NO: 255763 - DNA, 33 bp, Homo sapien
ccagtgcaggtgcacccacaccctgaacagccc

SEQ ID NO: 255764 - DNA, 33 bp, Homo sapien
ccagtgcaggtgcaccgacaccctgaacagccc

SEQ ID NO: 255765 - DNA, 33 bp, Homo sapien
gaatagaaactctctccccgtgtctccaggttt

SEQ ID NO: 255766 - DNA, 33 bp, Homo sapien
gaatagaaactctctctccgtgtctccaggttt

SEQ ID NO: 255767 - DNA, 33 bp, Homo sapien
cctgaccctactttcacgaaacgtccaaaagac

SEQ ID NO: 255768 - DNA, 33 bp, Homo sapien
cctgaccctactttcatgaaacgtccaaaagac

SEQ ID NO: 255769 - DNA, 33 bp, Homo sapien
cagatgtatcactagacggcattatctgtactg

SEQ ID NO: 255770 - DNA, 33 bp, Homo sapien
cagatgtatcactagatggcattatctgtactg

SEQ ID NO: 255771 - DNA, 33 bp, Homo sapien
gtcttttaatgtggcaatatgaaattaaccatg

SEQ ID NO: 255772 - DNA, 33 bp, Homo sapien
gtcttttaatgtggcagtatgaaattaaccatg

SEQ ID NO: 255773 - DNA, 33 bp, Homo sapien
tacatagcagcttatcaccaagtagtctgacct

SEQ ID NO: 255774 - DNA, 33 bp, Homo sapien
tacatagcagcttatcgccaagtagtctgacct

SEQ ID NO: 255775 - DNA, 33 bp, Homo sapien
cttcccaccggctaaccgctaagtctaagaaac

SEQ ID NO: 255776 - DNA, 33 bp, Homo sapien
cttcccaccggctaactgctaagtctaagaaac

SEQ ID NO: 255777 - DNA, 33 bp, Homo sapien
gcggcaaaatctgacccaaactgagtcatggct

SEQ ID NO: 255778 - DNA, 33 bp, Homo sapien
gcggcaaaatctgacctaaactgagtcatggct

SEQ ID NO: 255779 - DNA, 33 bp, Homo sapien
ttgaaacgatgcagatgaaaacagggcttattt

SEQ ID NO: 255780 - DNA, 33 bp, Homo sapien
ttgaaacgatgcagattaaaacagggcttattt

SEQ ID NO: 255781 - DNA, 33 bp, Homo sapien
agactaaaaaaggtgcaaggctacatgtggtgg

SEQ ID NO: 255782 - DNA, 33 bp, Homo sapien
agactaaaaaaggtgcgaggctacatgtggtgg

SEQ ID NO: 255783 - DNA, 33 bp, Homo sapien
atgcagcctgggaaggaagagtgaccgaggtgt

SEQ ID NO: 255784 - DNA, 33 bp, Homo sapien
atgcagcctgggaagggagagtgaccgaggtgt

SEQ ID NO: 255785 - DNA, 33 bp, Homo sapien
gtgcgccatgacatcccgctattttagtagaaa

SEQ ID NO: 255786 - DNA, 33 bp, Homo sapien
gtgcgccatgacatccggctattttagtagaaa

SEQ ID NO: 255787 - DNA, 33 bp, Homo sapien
gaacacctcgactatacagaataaggtttccag

SEQ ID NO: 255788 - DNA, 33 bp, Homo sapien
gaacacctcgactatatagaataaggtttccag

SEQ ID NO: 255789 - DNA, 33 bp, Homo sapien
aataggcagagaagccagcagaaagggagatgg

SEQ ID NO: 255790 - DNA, 33 bp, Homo sapien
aataggcagagaagccggcagaaagggagatgg

SEQ ID NO: 255791 - DNA, 33 bp, Homo sapien
aaaacacgatgctaagcccccctgttcccccat

SEQ ID NO: 255792 - DNA, 33 bp, Homo sapien
aaaacacgatgctaagtccccctgttcccccat

SEQ ID NO: 255793 - DNA, 33 bp, Homo sapien
tgagtcatgaatgaaactgtctttccttttgtt

SEQ ID NO: 255794 - DNA, 33 bp, Homo sapien
tgagtcatgaatgaaattgtctttccttttgtt

SEQ ID NO: 255795 - DNA, 33 bp, Homo sapien
catgcatctttttctccgaccaccatcagaaat

SEQ ID NO: 255796 - DNA, 33 bp, Homo sapien
catgcatctttttctctgaccaccatcagaaat

SEQ ID NO: 255797 - DNA, 33 bp, Homo sapien
taccaacacccagtgcaacataactgtgctatt

SEQ ID NO: 255798 - DNA, 33 bp, Homo sapien
taccaacacccagtgccacataactgtgctatt

SEQ ID NO: 255799 - DNA, 33 bp, Homo sapien
tgtcttagaagagtcaataaaagcaagaattca

SEQ ID NO: 255800 - DNA, 33 bp, Homo sapien
tgtcttagaagagtcagtaaaagcaagaattca

SEQ ID NO: 255801 - DNA, 33 bp, Homo sapien
tggttaggaaactgcacgatagtataatcccct

SEQ ID NO: 255802 - DNA, 33 bp, Homo sapien
tggttaggaaactgcatgatagtataatcccct

SEQ ID NO: 255803 - DNA, 33 bp, Homo sapien
taaacatgaactgaaacaagtatcaataagttg

SEQ ID NO: 255804 - DNA, 33 bp, Homo sapien
taaacatgaactgaaagaagtatcaataagttg

SEQ ID NO: 255805 - DNA, 33 bp, Homo sapien
gcttatatttgataaaccaagtcctatctctct

SEQ ID NO: 255806 - DNA, 33 bp, Homo sapien
gcttatatttgataaatcaagtcctatctctct

SEQ ID NO: 255807 - DNA, 33 bp, Homo sapien
cagaagtacacagcgtaaaagaagccaaacaga

SEQ ID NO: 255808 - DNA, 33 bp, Homo sapien
cagaagtacacagcgtgaaagaagccaaacaga

SEQ ID NO: 255809 - DNA, 33 bp, Homo sapien
cttctgtgggaacactcagtacagacctttctt

SEQ ID NO: 255810 - DNA, 33 bp, Homo sapien
cttctgtgggaacactgagtacagacctttctt

SEQ ID NO: 255811 - DNA, 33 bp, Homo sapien
aaggtcaatcattgaaagtataacgtaaacact

SEQ ID NO: 255812 - DNA, 33 bp, Homo sapien
aaggtcaatcattgaaggtataacgtaaacact

SEQ ID NO: 255813 - DNA, 33 bp, Homo sapien
cagagtgcttgcaatcaagagccctgactaata

SEQ ID NO: 255814 - DNA, 33 bp, Homo sapien
cagagtgcttgcaatcgagagccctgactaata

SEQ ID NO: 255815 - DNA, 33 bp, Homo sapien
ggaggagatggtgctaaactattcaagataagc

SEQ ID NO: 255816 - DNA, 33 bp, Homo sapien
ggaggagatggtgctacactattcaagataagc

SEQ ID NO: 255817 - DNA, 33 bp, Homo sapien
tcaggaaggagtgaaacttctccatatgccact

SEQ ID NO: 255818 - DNA, 33 bp, Homo sapien
tcaggaaggagtgaaatttctccatatgccact

SEQ ID NO: 255819 - DNA, 33 bp, Homo sapien
caatcacgtgcaccacaaagaggattattttta

SEQ ID NO: 255820 - DNA, 33 bp, Homo sapien
caatcacgtgcaccacgaagaggattattttta

SEQ ID NO: 255821 - DNA, 33 bp, Homo sapien
aatatcaaggtaatgagaaactctactgtgcac

SEQ ID NO: 255822 - DNA, 33 bp, Homo sapien
aatatcaaggtaatgataaactctactgtgcac

SEQ ID NO: 255823 - DNA, 33 bp, Homo sapien
aatgataaatgtagaaagtaacagtttgtaatc

SEQ ID NO: 255824 - DNA, 33 bp, Homo sapien
aatgataaatgtagaaggtaacagtttgtaatc

SEQ ID NO: 255825 - DNA, 33 bp, Homo sapien
ttgtggtacaattcaactgattttcaaaccaga

SEQ ID NO: 255826 - DNA, 33 bp, Homo sapien
ttgtggtacaattcaattgattttcaaaccaga

SEQ ID NO: 255827 - DNA, 33 bp, Homo sapien
gggacggagcgttctacaaatgtcattaagcca

SEQ ID NO: 255828 - DNA, 33 bp, Homo sapien
gggacggagcgttctataaatgtcattaagcca

SEQ ID NO: 255829 - DNA, 33 bp, Homo sapien
attaattgtggtttctcaaatctgtgtcactga

SEQ ID NO: 255830 - DNA, 33 bp, Homo sapien
attaattgtggtttctgaaatctgtgtcactga

SEQ ID NO: 255831 - DNA, 33 bp, Homo sapien
gagggtcaagagaaaaactgatgctgtcagctg

SEQ ID NO: 255832 - DNA, 33 bp, Homo sapien
gagggtcaagagaaaacctgatgctgtcagctg

SEQ ID NO: 255833 - DNA, 33 bp, Homo sapien
atatgccggcgtatggaagggtctgagctggag

SEQ ID NO: 255834 - DNA, 33 bp, Homo sapien
atatgccggcgtatgggagggtctgagctggag

SEQ ID NO: 255835 - DNA, 33 bp, Homo sapien
tcataaaattgtcatcagataatgggagacacc

SEQ ID NO: 255836 - DNA, 33 bp, Homo sapien
tcataaaattgtcatcggataatgggagacacc

SEQ ID NO: 255837 - DNA, 33 bp, Homo sapien
tgggtcatatgaaacactgtgattaaggaaata

SEQ ID NO: 255838 - DNA, 33 bp, Homo sapien
tgggtcatatgaaacattgtgattaaggaaata

SEQ ID NO: 255839 - DNA, 33 bp, Homo sapien
acggtccctcaactacaacattctataatgcct

SEQ ID NO: 255840 - DNA, 33 bp, Homo sapien
acggtccctcaactacgacattctataatgcct

SEQ ID NO: 255841 - DNA, 33 bp, Homo sapien
gataaaggtttccctgaacgcacacaaggagta

SEQ ID NO: 255842 - DNA, 33 bp, Homo sapien
gataaaggtttccctggacgcacacaaggagta

SEQ ID NO: 255843 - DNA, 33 bp, Homo sapien
cagggcacagttttccacgtcgcctccgcctct

SEQ ID NO: 255844 - DNA, 33 bp, Homo sapien
cagggcacagttttccgcgtcgcctccgcctct

SEQ ID NO: 255845 - DNA, 33 bp, Homo sapien
tcagaactggcttctacgctgatctaataaatg

SEQ ID NO: 255846 - DNA, 33 bp, Homo sapien
tcagaactggcttctatgctgatctaataaatg

SEQ ID NO: 255847 - DNA, 33 bp, Homo sapien
gcaaaagaaaaactggcaatcgacttgctttcg

SEQ ID NO: 255848 - DNA, 33 bp, Homo sapien
gcaaaagaaaaactgggaatcgacttgctttcg

SEQ ID NO: 255849 - DNA, 33 bp, Homo sapien
taatgcagtcctcgtaggaagctctaaggcatt

SEQ ID NO: 255850 - DNA, 33 bp, Homo sapien
taatgcagtcctcgtatgaagctctaaggcatt

SEQ ID NO: 255851 - DNA, 33 bp, Homo sapien
aaagataccctagtgacgaaggggaagtttgga

SEQ ID NO: 255852 - DNA, 33 bp, Homo sapien
aaagataccctagtgatgaaggggaagtttgga

SEQ ID NO: 255853 - DNA, 33 bp, Homo sapien
ttcacacaactaccaacgtccagaggcgggatt

SEQ ID NO: 255854 - DNA, 33 bp, Homo sapien
ttcacacaactaccaatgtccagaggcgggatt

SEQ ID NO: 255855 - DNA, 33 bp, Homo sapien
ctgtgccatcattccacgctttatgcctagcag

SEQ ID NO: 255856 - DNA, 33 bp, Homo sapien
ctgtgccatcattccatgctttatgcctagcag

SEQ ID NO: 255857 - DNA, 33 bp, Homo sapien
gagatagaggagttaacaatttactagagatgc

SEQ ID NO: 255858 - DNA, 33 bp, Homo sapien
gagatagaggagttaataatttactagagatgc

SEQ ID NO: 255859 - DNA, 33 bp, Homo sapien
aggtatatgtgatggacgattatagaaggcttt

SEQ ID NO: 255860 - DNA, 33 bp, Homo sapien
aggtatatgtgatggaggattatagaaggcttt

SEQ ID NO: 255861 - DNA, 33 bp, Homo sapien
ccaggggacaatcagggatgctggtctcagaag

SEQ ID NO: 255862 - DNA, 33 bp, Homo sapien
ccaggggacaatcaggtatgctggtctcagaag

SEQ ID NO: 255863 - DNA, 33 bp, Homo sapien
tcagatacgtgtaatcagaaagcatgtaccttt

SEQ ID NO: 255864 - DNA, 33 bp, Homo sapien
tcagatacgtgtaatcggaaagcatgtaccttt

SEQ ID NO: 255865 - DNA, 33 bp, Homo sapien
gctcctgcaagtcaacagggggcagtgccagcc

SEQ ID NO: 255866 - DNA, 33 bp, Homo sapien
gctcctgcaagtcaacggggggcagtgccagcc

SEQ ID NO: 255867 - DNA, 33 bp, Homo sapien
aaatgcacgtctcatacatttcacagcaaggcc

SEQ ID NO: 255868 - DNA, 33 bp, Homo sapien
aaatgcacgtctcatatatttcacagcaaggcc

SEQ ID NO: 255869 - DNA, 33 bp, Homo sapien
taaactctttgaggtcaagggctctgtctcacc

SEQ ID NO: 255870 - DNA, 33 bp, Homo sapien
taaactctttgaggtcgagggctctgtctcacc

SEQ ID NO: 255871 - DNA, 33 bp, Homo sapien
agccagcgttccacccaaaactattgagacgga

SEQ ID NO: 255872 - DNA, 33 bp, Homo sapien
agccagcgttccacccgaaactattgagacgga

SEQ ID NO: 255873 - DNA, 33 bp, Homo sapien
ctgtgggctaccaagcaagagacatttattttc

SEQ ID NO: 255874 - DNA, 33 bp, Homo sapien
ctgtgggctaccaagcgagagacatttattttc

SEQ ID NO: 255875 - DNA, 33 bp, Homo sapien
aaaaaatctactcaagacttctgctcatttttc

SEQ ID NO: 255876 - DNA, 33 bp, Homo sapien
aaaaaatctactcaagtcttctgctcatttttc

SEQ ID NO: 255877 - DNA, 33 bp, Homo sapien
tgataaaccggactgcactgacgttgaaaactg

SEQ ID NO: 255878 - DNA, 33 bp, Homo sapien
tgataaaccggactgcgctgacgttgaaaactg

SEQ ID NO: 255879 - DNA, 33 bp, Homo sapien
ctgaagggcagtttcacgacgcgcatcaaattt

SEQ ID NO: 255880 - DNA, 33 bp, Homo sapien
ctgaagggcagtttcatgacgcgcatcaaattt

SEQ ID NO: 255881 - DNA, 33 bp, Homo sapien
ttgcagactctgatgcacaggaagtcacacctg

SEQ ID NO: 255882 - DNA, 33 bp, Homo sapien
ttgcagactctgatgcgcaggaagtcacacctg

SEQ ID NO: 255883 - DNA, 33 bp, Homo sapien
tttctttatgttgtaaccaccttctttcctgat

SEQ ID NO: 255884 - DNA, 33 bp, Homo sapien
tttctttatgttgtaagcaccttctttcctgat

SEQ ID NO: 255885 - DNA, 33 bp, Homo sapien
tcattgcctgctgctgcaatctaccaggcttat

SEQ ID NO: 255886 - DNA, 33 bp, Homo sapien
tcattgcctgctgctgtaatctaccaggcttat

SEQ ID NO: 255887 - DNA, 33 bp, Homo sapien
caaaacacctcaaatccctgtcctgttaatgac

SEQ ID NO: 255888 - DNA, 33 bp, Homo sapien
caaaacacctcaaatctctgtcctgttaatgac

SEQ ID NO: 255889 - DNA, 33 bp, Homo sapien
gttgcacgtctggttgacaaaacacctcaaatc

SEQ ID NO: 255890 - DNA, 33 bp, Homo sapien
gttgcacgtctggttggcaaaacacctcaaatc

SEQ ID NO: 255891 - DNA, 33 bp, Homo sapien
aaacaaaatactcacacgcttctcatacttgca

SEQ ID NO: 255892 - DNA, 33 bp, Homo sapien
aaacaaaatactcacatgcttctcatacttgca

SEQ ID NO: 255893 - DNA, 33 bp, Homo sapien
cgtctgcaacacaaaggctgttcctcctgagcg

SEQ ID NO: 255894 - DNA, 33 bp, Homo sapien
cgtctgcaacacaaagtctgttcctcctgagcg

SEQ ID NO: 255895 - DNA, 33 bp, Homo sapien
gtcttttcgatctccacgcctacttttccctca

SEQ ID NO: 255896 - DNA, 33 bp, Homo sapien
gtcttttcgatctccatgcctacttttccctca

SEQ ID NO: 255897 - DNA, 33 bp, Homo sapien
ttccatgcaccagaaacaggatagaaacataaa

SEQ ID NO: 255898 - DNA, 33 bp, Homo sapien
ttccatgcaccagaaagaggatagaaacataaa

SEQ ID NO: 255899 - DNA, 33 bp, Homo sapien
aatttttccctccacaaattaagcgtatttctt

SEQ ID NO: 255900 - DNA, 33 bp, Homo sapien
aatttttccctccacagattaagcgtatttctt

SEQ ID NO: 255901 - DNA, 33 bp, Homo sapien
cgcactgattttgacaagattccacatacaggc

SEQ ID NO: 255902 - DNA, 33 bp, Homo sapien
cgcactgattttgacatgattccacatacaggc

SEQ ID NO: 255903 - DNA, 33 bp, Homo sapien
cttcaagctgccttaacgccaaagagatctctg

SEQ ID NO: 255904 - DNA, 33 bp, Homo sapien
cttcaagctgccttaatgccaaagagatctctg

SEQ ID NO: 255905 - DNA, 33 bp, Homo sapien
cttgctttttgtatcaacctaatttcatgagaa

SEQ ID NO: 255906 - DNA, 33 bp, Homo sapien
cttgctttttgtatcagcctaatttcatgagaa

SEQ ID NO: 255907 - DNA, 33 bp, Homo sapien
tagcaatacttacataaaagccagcacatttct

SEQ ID NO: 255908 - DNA, 33 bp, Homo sapien
tagcaatacttacatagaagccagcacatttct

SEQ ID NO: 255909 - DNA, 33 bp, Homo sapien
cgtcatgcctctgcaacgtggattgatgctctg

SEQ ID NO: 255910 - DNA, 33 bp, Homo sapien
cgtcatgcctctgcaatgtggattgatgctctg

SEQ ID NO: 255911 - DNA, 33 bp, Homo sapien
tgttcttttccctcaactcctagaggcagccac

SEQ ID NO: 255912 - DNA, 33 bp, Homo sapien
tgttcttttccctcaattcctagaggcagccac

SEQ ID NO: 255913 - DNA, 33 bp, Homo sapien
ttcatcggtcatgccaccggacagccacagttc

SEQ ID NO: 255914 - DNA, 33 bp, Homo sapien
ttcatcggtcatgccatcggacagccacagttc

SEQ ID NO: 255915 - DNA, 33 bp, Homo sapien
gataatcacataccaagatacaaatgttgcata

SEQ ID NO: 255916 - DNA, 33 bp, Homo sapien
gataatcacataccaatatacaaatgttgcata

SEQ ID NO: 255917 - DNA, 33 bp, Homo sapien
cggacatcaggaaggcacagtgaacatgaaaca

SEQ ID NO: 255918 - DNA, 33 bp, Homo sapien
cggacatcaggaaggcgcagtgaacatgaaaca

SEQ ID NO: 255919 - DNA, 33 bp, Homo sapien
cctctgactcagaaaccacaacctcaaatgcct

SEQ ID NO: 255920 - DNA, 33 bp, Homo sapien
cctctgactcagaaactacaacctcaaatgcct

SEQ ID NO: 255921 - DNA, 33 bp, Homo sapien
tcccgccccgccttacagatgagttttcctgag

SEQ ID NO: 255922 - DNA, 33 bp, Homo sapien
tcccgccccgccttacggatgagttttcctgag

SEQ ID NO: 255923 - DNA, 33 bp, Homo sapien
accatctgttaggttccactcattgccagccta

SEQ ID NO: 255924 - DNA, 33 bp, Homo sapien
accatctgttaggttcgactcattgccagccta

SEQ ID NO: 255925 - DNA, 33 bp, Homo sapien
ctgagctggttgatgacacagattattgcaaga

SEQ ID NO: 255926 - DNA, 33 bp, Homo sapien
ctgagctggttgatgatacagattattgcaaga

SEQ ID NO: 255927 - DNA, 33 bp, Homo sapien
ctggtctccttctggacaactttattgcccaga

SEQ ID NO: 255928 - DNA, 33 bp, Homo sapien
ctggtctccttctggataactttattgcccaga

SEQ ID NO: 255929 - DNA, 33 bp, Homo sapien
ttcttggcacacagccacgtccattgatttgca

SEQ ID NO: 255930 - DNA, 33 bp, Homo sapien
ttcttggcacacagccgcgtccattgatttgca

SEQ ID NO: 255931 - DNA, 33 bp, Homo sapien
actcaactaggagcagaaagcgggagcagcgtg

SEQ ID NO: 255932 - DNA, 33 bp, Homo sapien
actcaactaggagcagcaagcgggagcagcgtg

SEQ ID NO: 255933 - DNA, 33 bp, Homo sapien
gcaatggaagaggaaaggacgtgatctctgacc

SEQ ID NO: 255934 - DNA, 33 bp, Homo sapien
gcaatggaagaggaaatgacgtgatctctgacc

SEQ ID NO: 255935 - DNA, 33 bp, Homo sapien
atcatcttacaataaacctcagccttttagtgg

SEQ ID NO: 255936 - DNA, 33 bp, Homo sapien
atcatcttacaataaatctcagccttttagtgg

SEQ ID NO: 255937 - DNA, 33 bp, Homo sapien
tcccgccaggaagcatgaagtactcagacaact

SEQ ID NO: 255938 - DNA, 33 bp, Homo sapien
tcccgccaggaagcattaagtactcagacaact

SEQ ID NO: 255939 - DNA, 33 bp, Homo sapien
ctaaatgaagtgactcactctctcctccccggt

SEQ ID NO: 255940 - DNA, 33 bp, Homo sapien
ctaaatgaagtgactctctctctcctccccggt

SEQ ID NO: 255941 - DNA, 33 bp, Homo sapien
gagctcaagcagccataatggaacgtgaggagg

SEQ ID NO: 255942 - DNA, 33 bp, Homo sapien
gagctcaagcagccatcatggaacgtgaggagg

SEQ ID NO: 255943 - DNA, 33 bp, Homo sapien
tacctttgatgaactgcagccactgtagacagt

SEQ ID NO: 255944 - DNA, 33 bp, Homo sapien
tacctttgatgaactgtagccactgtagacagt

SEQ ID NO: 255945 - DNA, 33 bp, Homo sapien
tctaagtctcgtgatacgtaaaactcaccccat

SEQ ID NO: 255946 - DNA, 33 bp, Homo sapien
tctaagtctcgtgatatgtaaaactcaccccat

SEQ ID NO: 255947 - DNA, 33 bp, Homo sapien
aggatcttgcccagcacgtggtcctccagcgtg

SEQ ID NO: 255948 - DNA, 33 bp, Homo sapien
aggatcttgcccagcatgtggtcctccagcgtg

SEQ ID NO: 255949 - DNA, 33 bp, Homo sapien
ggtctccaaaaaggaacacagcctgtggatacc

SEQ ID NO: 255950 - DNA, 33 bp, Homo sapien
ggtctccaaaaaggaatacagcctgtggatacc

SEQ ID NO: 255951 - DNA, 33 bp, Homo sapien
ttattctacctgcagaagttacaatagactgtt

SEQ ID NO: 255952 - DNA, 33 bp, Homo sapien
ttattctacctgcagatgttacaatagactgtt

SEQ ID NO: 255953 - DNA, 33 bp, Homo sapien
atccacagaatggcagaacacatttgtgaatca

SEQ ID NO: 255954 - DNA, 33 bp, Homo sapien
atccacagaatggcaggacacatttgtgaatca

SEQ ID NO: 255955 - DNA, 33 bp, Homo sapien
cgtgggtcttctctccactgacagctggacact

SEQ ID NO: 255956 - DNA, 33 bp, Homo sapien
cgtgggtcttctctccgctgacagctggacact

SEQ ID NO: 255957 - DNA, 33 bp, Homo sapien
aagcagaaatccctgacaaacccatcatatctc

SEQ ID NO: 255958 - DNA, 33 bp, Homo sapien
aagcagaaatccctgataaacccatcatatctc

SEQ ID NO: 255959 - DNA, 33 bp, Homo sapien
caggcagtgtgaaaaaagcaatattgcataaaa

SEQ ID NO: 255960 - DNA, 33 bp, Homo sapien
caggcagtgtgaaaaaggcaatattgcataaaa

SEQ ID NO: 255961 - DNA, 33 bp, Homo sapien
atttcttattgcctcaatcttaatgcttaaacc

SEQ ID NO: 255962 - DNA, 33 bp, Homo sapien
atttcttattgcctcagtcttaatgcttaaacc

SEQ ID NO: 255963 - DNA, 33 bp, Homo sapien
gttcacatacaggagagattgatgaggggacag

SEQ ID NO: 255964 - DNA, 33 bp, Homo sapien
gttcacatacaggagatattgatgaggggacag

SEQ ID NO: 255965 - DNA, 33 bp, Homo sapien
tatccacatggtgaacaccccacattgacttgc

SEQ ID NO: 255966 - DNA, 33 bp, Homo sapien
tatccacatggtgaaccccccacattgacttgc

SEQ ID NO: 255967 - DNA, 33 bp, Homo sapien
ccaagatggtggactcagaatgtgttcatgcat

SEQ ID NO: 255968 - DNA, 33 bp, Homo sapien
ccaagatggtggactcggaatgtgttcatgcat

SEQ ID NO: 255969 - DNA, 33 bp, Homo sapien
aaacgctacttccatcaaagcctttggtaacat

SEQ ID NO: 255970 - DNA, 33 bp, Homo sapien
aaacgctacttccatctaagcctttggtaacat

SEQ ID NO: 255971 - DNA, 33 bp, Homo sapien
gtcccagccatgcccaatctgtaccacctgtcc

SEQ ID NO: 255972 - DNA, 33 bp, Homo sapien
gtcccagccatgcccagtctgtaccacctgtcc

SEQ ID NO: 255973 - DNA, 33 bp, Homo sapien
ttttcatctctgtcaccgtcagtttcctactct

SEQ ID NO: 255974 - DNA, 33 bp, Homo sapien
ttttcatctctgtcactgtcagtttcctactct

SEQ ID NO: 255975 - DNA, 33 bp, Homo sapien
actgtctgtctgacaccaggtaaggagagttga

SEQ ID NO: 255976 - DNA, 33 bp, Homo sapien
actgtctgtctgacacgaggtaaggagagttga

SEQ ID NO: 255977 - DNA, 33 bp, Homo sapien
acagacagtctggggaaagcattctgtagctcc

SEQ ID NO: 255978 - DNA, 33 bp, Homo sapien
acagacagtctggggatagcattctgtagctcc

SEQ ID NO: 255979 - DNA, 33 bp, Homo sapien
ggaaaagagacccccaaataagagtggcttaaa

SEQ ID NO: 255980 - DNA, 33 bp, Homo sapien
ggaaaagagacccccatataagagtggcttaaa

SEQ ID NO: 255981 - DNA, 33 bp, Homo sapien
cccagatgaaaatcaactgaaaatacagatggt

SEQ ID NO: 255982 - DNA, 33 bp, Homo sapien
cccagatgaaaatcaattgaaaatacagatggt

SEQ ID NO: 255983 - DNA, 33 bp, Homo sapien
ctgtattgattttacccggaataccttacatct

SEQ ID NO: 255984 - DNA, 33 bp, Homo sapien
ctgtattgattttacctggaataccttacatct

SEQ ID NO: 255985 - DNA, 33 bp, Homo sapien
gcctatgtcacccggacgtcatagaaaggtccc

SEQ ID NO: 255986 - DNA, 33 bp, Homo sapien
gcctatgtcacccggatgtcatagaaaggtccc

SEQ ID NO: 255987 - DNA, 33 bp, Homo sapien
gaacgatgtgcagataaacgtccatttctgcta

SEQ ID NO: 255988 - DNA, 33 bp, Homo sapien
gaacgatgtgcagatagacgtccatttctgcta

SEQ ID NO: 255989 - DNA, 33 bp, Homo sapien
tccacgctgtcttaaacggcagggcttccttgc

SEQ ID NO: 255990 - DNA, 33 bp, Homo sapien
tccacgctgtcttaaatggcagggcttccttgc

SEQ ID NO: 255991 - DNA, 33 bp, Homo sapien
gcactggggagtttcactaaagtaccaggaaga

SEQ ID NO: 255992 - DNA, 33 bp, Homo sapien
gcactggggagtttcattaaagtaccaggaaga

SEQ ID NO: 255993 - DNA, 33 bp, Homo sapien
cccgctggtttaatcacacactaaaagcctagt

SEQ ID NO: 255994 - DNA, 33 bp, Homo sapien
cccgctggtttaatcatacactaaaagcctagt

SEQ ID NO: 255995 - DNA, 33 bp, Homo sapien
gacagacatcagcaacgaatgcagaaactaacc

SEQ ID NO: 255996 - DNA, 33 bp, Homo sapien
gacagacatcagcaactaatgcagaaactaacc

SEQ ID NO: 255997 - DNA, 33 bp, Homo sapien
gtgcctgggaggtgacaatgatcacagacgggg

SEQ ID NO: 255998 - DNA, 33 bp, Homo sapien
gtgcctgggaggtgactatgatcacagacgggg

SEQ ID NO: 255999 - DNA, 33 bp, Homo sapien
tttgattacagccaatcaaaatagcagtcatcc

SEQ ID NO: 256000 - DNA, 33 bp, Homo sapien
tttgattacagccaattaaaatagcagtcatcc

SEQ ID NO: 256001 - DNA, 33 bp, Homo sapien
gtttaagcttcaaaaaatcacttcaaaaagttt

SEQ ID NO: 256002 - DNA, 33 bp, Homo sapien
gtttaagcttcaaaaagtcacttcaaaaagttt

SEQ ID NO: 256003 - DNA, 33 bp, Homo sapien
atggtgcttttcatgcaatgcgtgtggttctgt

SEQ ID NO: 256004 - DNA, 33 bp, Homo sapien
atggtgcttttcatgcgatgcgtgtggttctgt

SEQ ID NO: 256005 - DNA, 33 bp, Homo sapien
gtaacaaagcaaaggacacaatattttttaaat

SEQ ID NO: 256006 - DNA, 33 bp, Homo sapien
gtaacaaagcaaaggatacaatattttttaaat

SEQ ID NO: 256007 - DNA, 33 bp, Homo sapien
gtgacctcatgatgaccctaatttgcattttct

SEQ ID NO: 256008 - DNA, 33 bp, Homo sapien
gtgacctcatgatgactctaatttgcattttct

SEQ ID NO: 256009 - DNA, 33 bp, Homo sapien
gttcaaaggacactcactgacaagcaggtctcc

SEQ ID NO: 256010 - DNA, 33 bp, Homo sapien
gttcaaaggacactcattgacaagcaggtctcc

SEQ ID NO: 256011 - DNA, 33 bp, Homo sapien
caatgagaagtgaaaacgtcaactacagtccag

SEQ ID NO: 256012 - DNA, 33 bp, Homo sapien
caatgagaagtgaaaatgtcaactacagtccag

SEQ ID NO: 256013 - DNA, 33 bp, Homo sapien
accactcctctgttacacagcttgcgatgtctt

SEQ ID NO: 256014 - DNA, 33 bp, Homo sapien
accactcctctgttacgcagcttgcgatgtctt

SEQ ID NO: 256015 - DNA, 33 bp, Homo sapien
ggctgagcagctttcacagcgtgtgtccattgt

SEQ ID NO: 256016 - DNA, 33 bp, Homo sapien
ggctgagcagctttcatagcgtgtgtccattgt

SEQ ID NO: 256017 - DNA, 33 bp, Homo sapien
gagactcagtgaaaccagcaatagctctggtgt

SEQ ID NO: 256018 - DNA, 33 bp, Homo sapien
gagactcagtgaaacctgcaatagctctggtgt

SEQ ID NO: 256019 - DNA, 33 bp, Homo sapien
ttcagacagcttgtccacttctcaggtcccccc

SEQ ID NO: 256020 - DNA, 33 bp, Homo sapien
ttcagacagcttgtccgcttctcaggtcccccc

SEQ ID NO: 256021 - DNA, 33 bp, Homo sapien
cggcttctcctatattcaactactgaatccaca

SEQ ID NO: 256022 - DNA, 33 bp, Homo sapien
cggcttctcctatatttaactactgaatccaca

SEQ ID NO: 256023 - DNA, 33 bp, Homo sapien
tgcatcgctgcacttccataagcccatctgtaa

SEQ ID NO: 256024 - DNA, 33 bp, Homo sapien
tgcatcgctgcacttctataagcccatctgtaa

SEQ ID NO: 256025 - DNA, 33 bp, Homo sapien
ttgaggtcagaaataactgagattctgaacttg

SEQ ID NO: 256026 - DNA, 33 bp, Homo sapien
ttgaggtcagaaataattgagattctgaacttg

SEQ ID NO: 256027 - DNA, 33 bp, Homo sapien
gctgtagtctgagcaaaacttatttcctgcttg

SEQ ID NO: 256028 - DNA, 33 bp, Homo sapien
gctgtagtctgagcaacacttatttcctgcttg

SEQ ID NO: 256029 - DNA, 33 bp, Homo sapien
agcctgcctggcctcactcttgtatgtcagcat

SEQ ID NO: 256030 - DNA, 33 bp, Homo sapien
agcctgcctggcctcagtcttgtatgtcagcat

SEQ ID NO: 256031 - DNA, 33 bp, Homo sapien
tcagtcttttctcacccgatgaacttgaagtat

SEQ ID NO: 256032 - DNA, 33 bp, Homo sapien
tcagtcttttctcacctgatgaacttgaagtat

SEQ ID NO: 256033 - DNA, 33 bp, Homo sapien
ggcatccgtgacaaggacctgggttgttggcca

SEQ ID NO: 256034 - DNA, 33 bp, Homo sapien
ggcatccgtgacaaggccctgggttgttggcca

SEQ ID NO: 256035 - DNA, 33 bp, Homo sapien
gctatttgtgacttcaccttatgtactaacgtt

SEQ ID NO: 256036 - DNA, 33 bp, Homo sapien
gctatttgtgacttcatcttatgtactaacgtt

SEQ ID NO: 256037 - DNA, 33 bp, Homo sapien
gcttttcatgcaacacagccggtaaatgcagac

SEQ ID NO: 256038 - DNA, 33 bp, Homo sapien
gcttttcatgcaacacggccggtaaatgcagac

SEQ ID NO: 256039 - DNA, 33 bp, Homo sapien
cacgcctgcaacactaactgttccgttcggaca

SEQ ID NO: 256040 - DNA, 33 bp, Homo sapien
cacgcctgcaacactatctgttccgttcggaca

SEQ ID NO: 256041 - DNA, 33 bp, Homo sapien
gttggactatggtctacctggaagtgatttggg

SEQ ID NO: 256042 - DNA, 33 bp, Homo sapien
gttggactatggtctagctggaagtgatttggg

SEQ ID NO: 256043 - DNA, 33 bp, Homo sapien
agggaaaatcagtgtccaccctcaagcaggacc

SEQ ID NO: 256044 - DNA, 33 bp, Homo sapien
agggaaaatcagtgtctaccctcaagcaggacc

SEQ ID NO: 256045 - DNA, 33 bp, Homo sapien
ctgtgctgtggggtcaactccggctcagcccag

SEQ ID NO: 256046 - DNA, 33 bp, Homo sapien
ctgtgctgtggggtcatctccggctcagcccag

SEQ ID NO: 256047 - DNA, 33 bp, Homo sapien
gggccacacctcaataactccttcctgggacag

SEQ ID NO: 256048 - DNA, 33 bp, Homo sapien
gggccacacctcaatacctccttcctgggacag

SEQ ID NO: 256049 - DNA, 33 bp, Homo sapien
tgatacattcagaccaaagtgagaggaactgag

SEQ ID NO: 256050 - DNA, 33 bp, Homo sapien
tgatacattcagaccacagtgagaggaactgag

SEQ ID NO: 256051 - DNA, 33 bp, Homo sapien
tcattgtacaatccaacagagtgctgtgtttcc

SEQ ID NO: 256052 - DNA, 33 bp, Homo sapien
tcattgtacaatccaatagagtgctgtgtttcc

SEQ ID NO: 256053 - DNA, 33 bp, Homo sapien
tcagattctcactcaccgtaggggcttttagag

SEQ ID NO: 256054 - DNA, 33 bp, Homo sapien
tcagattctcactcactgtaggggcttttagag

SEQ ID NO: 256055 - DNA, 33 bp, Homo sapien
gctgggtggacgtccaagcagcctcacctcaag

SEQ ID NO: 256056 - DNA, 33 bp, Homo sapien
gctgggtggacgtccaggcagcctcacctcaag

SEQ ID NO: 256057 - DNA, 33 bp, Homo sapien
ggcaggagacttaagcaccctgtgcctctgttt

SEQ ID NO: 256058 - DNA, 33 bp, Homo sapien
ggcaggagacttaagcgccctgtgcctctgttt

SEQ ID NO: 256059 - DNA, 33 bp, Homo sapien
cagctccacgtgggaacgatgtggaaactgctt

SEQ ID NO: 256060 - DNA, 33 bp, Homo sapien
cagctccacgtgggaaggatgtggaaactgctt

SEQ ID NO: 256061 - DNA, 33 bp, Homo sapien
aagagcacctggataccggggtcatgttagcgc

SEQ ID NO: 256062 - DNA, 33 bp, Homo sapien
aagagcacctggatactggggtcatgttagcgc

SEQ ID NO: 256063 - DNA, 33 bp, Homo sapien
tttccattgcttgtcaccccaaaagtcctgact

SEQ ID NO: 256064 - DNA, 33 bp, Homo sapien
tttccattgcttgtcatcccaaaagtcctgact

SEQ ID NO: 256065 - DNA, 33 bp, Homo sapien
gggaataaaagagacaacccaaggcaaacatac

SEQ ID NO: 256066 - DNA, 33 bp, Homo sapien
gggaataaaagagacatcccaaggcaaacatac

SEQ ID NO: 256067 - DNA, 33 bp, Homo sapien
tgttctctattttggccgaagggcttcctcttg

SEQ ID NO: 256068 - DNA, 33 bp, Homo sapien
tgttctctattttggctgaagggcttcctcttg

SEQ ID NO: 256069 - DNA, 33 bp, Homo sapien
atccctttgttgaatcacagaagatgaattaag

SEQ ID NO: 256070 - DNA, 33 bp, Homo sapien
atccctttgttgaatcccagaagatgaattaag

SEQ ID NO: 256071 - DNA, 33 bp, Homo sapien
tggtaagggatgctgacggcctaattgattgat

SEQ ID NO: 256072 - DNA, 33 bp, Homo sapien
tggtaagggatgctgatggcctaattgattgat

SEQ ID NO: 256073 - DNA, 33 bp, Homo sapien
accaaccccgcttccccgcggagatgccctgga

SEQ ID NO: 256074 - DNA, 33 bp, Homo sapien
accaaccccgcttccctgcggagatgccctgga

SEQ ID NO: 256075 - DNA, 33 bp, Homo sapien
atccgggtgatccccaaccagcatccgggtgat

SEQ ID NO: 256076 - DNA, 33 bp, Homo sapien
atccgggtgatccccagccagcatccgggtgat

SEQ ID NO: 256077 - DNA, 33 bp, Homo sapien
gccgtgtgtatttcaaatctactttccgtttat

SEQ ID NO: 256078 - DNA, 33 bp, Homo sapien
gccgtgtgtatttcaagtctactttccgtttat

SEQ ID NO: 256079 - DNA, 33 bp, Homo sapien
cttctgataagagacccattttccctactgcag

SEQ ID NO: 256080 - DNA, 33 bp, Homo sapien
cttctgataagagacctattttccctactgcag

SEQ ID NO: 256081 - DNA, 33 bp, Homo sapien
tgctggtttatgtcatcaataaaatgctgcaat

SEQ ID NO: 256082 - DNA, 33 bp, Homo sapien
tgctggtttatgtcattaataaaatgctgcaat

SEQ ID NO: 256083 - DNA, 33 bp, Homo sapien
tgcattgttttctgtccagtatcagatgaagta

SEQ ID NO: 256084 - DNA, 33 bp, Homo sapien
tgcattgttttctgtctagtatcagatgaagta

SEQ ID NO: 256085 - DNA, 33 bp, Homo sapien
atcctcatggttcccacagtgtcctccttttcc

SEQ ID NO: 256086 - DNA, 33 bp, Homo sapien
atcctcatggttcccagagtgtcctccttttcc

SEQ ID NO: 256087 - DNA, 33 bp, Homo sapien
cccgctccttgactgccgatatggatcccccct

SEQ ID NO: 256088 - DNA, 33 bp, Homo sapien
cccgctccttgactgctgatatggatcccccct

SEQ ID NO: 256089 - DNA, 33 bp, Homo sapien
aaatgttccccaactacgactcaaacactgttg

SEQ ID NO: 256090 - DNA, 33 bp, Homo sapien
aaatgttccccaactatgactcaaacactgttg

SEQ ID NO: 256091 - DNA, 33 bp, Homo sapien
agtggccataccattgcatttgttcattcattc

SEQ ID NO: 256092 - DNA, 33 bp, Homo sapien
agtggccataccattgtatttgttcattcattc

SEQ ID NO: 256093 - DNA, 33 bp, Homo sapien
ggtttgctgttgctcacgacagaaaggatcctg

SEQ ID NO: 256094 - DNA, 33 bp, Homo sapien
ggtttgctgttgctcatgacagaaaggatcctg

SEQ ID NO: 256095 - DNA, 33 bp, Homo sapien
ccaccacctttcctcaaccattcaagcagaaga

SEQ ID NO: 256096 - DNA, 33 bp, Homo sapien
ccaccacctttcctcagccattcaagcagaaga

SEQ ID NO: 256097 - DNA, 33 bp, Homo sapien
ctggcatgggcagggcacatccagtcatccgac

SEQ ID NO: 256098 - DNA, 33 bp, Homo sapien
ctggcatgggcagggcgcatccagtcatccgac

SEQ ID NO: 256099 - DNA, 33 bp, Homo sapien
tccagcgtgcacagacacggactcttgactgat

SEQ ID NO: 256100 - DNA, 33 bp, Homo sapien
tccagcgtgcacagacgcggactcttgactgat

SEQ ID NO: 256101 - DNA, 33 bp, Homo sapien
gtgccatcaatgacacccaatttgtcaatgacc

SEQ ID NO: 256102 - DNA, 33 bp, Homo sapien
gtgccatcaatgacactcaatttgtcaatgacc

SEQ ID NO: 256103 - DNA, 33 bp, Homo sapien
tagaattctttaagtcacaacttcctgaaaagc

SEQ ID NO: 256104 - DNA, 33 bp, Homo sapien
tagaattctttaagtcgcaacttcctgaaaagc

SEQ ID NO: 256105 - DNA, 33 bp, Homo sapien
aacagtgctcaatggaaggagacagccctgctt

SEQ ID NO: 256106 - DNA, 33 bp, Homo sapien
aacagtgctcaatggagggagacagccctgctt

SEQ ID NO: 256107 - DNA, 33 bp, Homo sapien
tttccttagaccttaaagattatttctcattct

SEQ ID NO: 256108 - DNA, 33 bp, Homo sapien
tttccttagaccttaatgattatttctcattct

SEQ ID NO: 256109 - DNA, 33 bp, Homo sapien
ttgctaagttggtgaacgactcctcggtagcag

SEQ ID NO: 256110 - DNA, 33 bp, Homo sapien
ttgctaagttggtgaaggactcctcggtagcag

SEQ ID NO: 256111 - DNA, 33 bp, Homo sapien
agaggattaactgagacgacggtagatcaaagg

SEQ ID NO: 256112 - DNA, 33 bp, Homo sapien
agaggattaactgagatgacggtagatcaaagg

SEQ ID NO: 256113 - DNA, 33 bp, Homo sapien
gtacctcaggagttccaagtgaccttgtacaaa

SEQ ID NO: 256114 - DNA, 33 bp, Homo sapien
gtacctcaggagttccgagtgaccttgtacaaa

SEQ ID NO: 256115 - DNA, 33 bp, Homo sapien
gccacagagaagtgacaaaactctgagcagatg

SEQ ID NO: 256116 - DNA, 33 bp, Homo sapien
gccacagagaagtgacgaaactctgagcagatg

SEQ ID NO: 256117 - DNA, 33 bp, Homo sapien
aaattcaacaggtaaactgcaaacatacccaat

SEQ ID NO: 256118 - DNA, 33 bp, Homo sapien
aaattcaacaggtaaattgcaaacatacccaat

SEQ ID NO: 256119 - DNA, 33 bp, Homo sapien
tgttctctgatcttcccgaatctggatatgtgt

SEQ ID NO: 256120 - DNA, 33 bp, Homo sapien
tgttctctgatcttcctgaatctggatatgtgt

SEQ ID NO: 256121 - DNA, 33 bp, Homo sapien
taacaacggagaccacagaactacaaataatta

SEQ ID NO: 256122 - DNA, 33 bp, Homo sapien
taacaacggagaccacggaactacaaataatta

SEQ ID NO: 256123 - DNA, 33 bp, Homo sapien
ccaggataagaagccacgaataagatgatctgt

SEQ ID NO: 256124 - DNA, 33 bp, Homo sapien
ccaggataagaagccatgaataagatgatctgt

SEQ ID NO: 256125 - DNA, 33 bp, Homo sapien
tactgagggcataacacggaaaatagaaatgcg

SEQ ID NO: 256126 - DNA, 33 bp, Homo sapien
tactgagggcataacatggaaaatagaaatgcg

SEQ ID NO: 256127 - DNA, 33 bp, Homo sapien
aatgggatcaggaacaaaagacccacaacaagc

SEQ ID NO: 256128 - DNA, 33 bp, Homo sapien
aatgggatcaggaacacaagacccacaacaagc

SEQ ID NO: 256129 - DNA, 33 bp, Homo sapien
actccccgcttcctaacagcatctaattcagag

SEQ ID NO: 256130 - DNA, 33 bp, Homo sapien
actccccgcttcctaatagcatctaattcagag

SEQ ID NO: 256131 - DNA, 33 bp, Homo sapien
aattatcactattcggaatcccttgaaatcctg

SEQ ID NO: 256132 - DNA, 33 bp, Homo sapien
aattatcactattcggcatcccttgaaatcctg

SEQ ID NO: 256133 - DNA, 33 bp, Homo sapien
gaggcagtctgttctaccctgatgtcagaggtg

SEQ ID NO: 256134 - DNA, 33 bp, Homo sapien
gaggcagtctgttctatcctgatgtcagaggtg

SEQ ID NO: 256135 - DNA, 33 bp, Homo sapien
cactatttcaaagggacgccaactcggcgggct

SEQ ID NO: 256136 - DNA, 33 bp, Homo sapien
cactatttcaaagggatgccaactcggcgggct

SEQ ID NO: 256137 - DNA, 33 bp, Homo sapien
agatggggcctgtgccgcagggatttaaaactc

SEQ ID NO: 256138 - DNA, 33 bp, Homo sapien
agatggggcctgtgcctcagggatttaaaactc

SEQ ID NO: 256139 - DNA, 33 bp, Homo sapien
acagagatgaagccacaagcaaaggcctgtccg

SEQ ID NO: 256140 - DNA, 33 bp, Homo sapien
acagagatgaagccacgagcaaaggcctgtccg

SEQ ID NO: 256141 - DNA, 33 bp, Homo sapien
tgcttttatggagggaaagaattttggaagcct

SEQ ID NO: 256142 - DNA, 33 bp, Homo sapien
tgcttttatggagggagagaattttggaagcct

SEQ ID NO: 256143 - DNA, 33 bp, Homo sapien
atccgtttctcaaaataatagcaatggctgaat

SEQ ID NO: 256144 - DNA, 33 bp, Homo sapien
atccgtttctcaaaatgatagcaatggctgaat

SEQ ID NO: 256145 - DNA, 33 bp, Homo sapien
agttggttttcaacaaaagtaccaatacaatta

SEQ ID NO: 256146 - DNA, 33 bp, Homo sapien
agttggttttcaacaagagtaccaatacaatta

SEQ ID NO: 256147 - DNA, 33 bp, Homo sapien
gcccaacattagacagaccataatctcagatat

SEQ ID NO: 256148 - DNA, 33 bp, Homo sapien
gcccaacattagacaggccataatctcagatat

SEQ ID NO: 256149 - DNA, 33 bp, Homo sapien
aactccatttgccaacgctcccatatgacaaag

SEQ ID NO: 256150 - DNA, 33 bp, Homo sapien
aactccatttgccaactctcccatatgacaaag

SEQ ID NO: 256151 - DNA, 33 bp, Homo sapien
aggtcccaatagcaaacgttccgttagaggatg

SEQ ID NO: 256152 - DNA, 33 bp, Homo sapien
aggtcccaatagcaaatgttccgttagaggatg

SEQ ID NO: 256153 - DNA, 33 bp, Homo sapien
catgctgtccaactgacgtatgggatgaaatga

SEQ ID NO: 256154 - DNA, 33 bp, Homo sapien
catgctgtccaactgatgtatgggatgaaatga

SEQ ID NO: 256155 - DNA, 33 bp, Homo sapien
atagacactcatataccgcagaagcgtaagcac

SEQ ID NO: 256156 - DNA, 33 bp, Homo sapien
atagacactcatatacggcagaagcgtaagcac

SEQ ID NO: 256157 - DNA, 33 bp, Homo sapien
ggcttcaactctgcccaaataccgcatctcatc

SEQ ID NO: 256158 - DNA, 33 bp, Homo sapien
ggcttcaactctgcccgaataccgcatctcatc

SEQ ID NO: 256159 - DNA, 33 bp, Homo sapien
gtaaatgtttactgggaaaggtagttggtacga

SEQ ID NO: 256160 - DNA, 33 bp, Homo sapien
gtaaatgtttactggggaaggtagttggtacga

SEQ ID NO: 256161 - DNA, 33 bp, Homo sapien
ttcctgcacagactcacagcatcagcagccaat

SEQ ID NO: 256162 - DNA, 33 bp, Homo sapien
ttcctgcacagactcagagcatcagcagccaat

SEQ ID NO: 256163 - DNA, 33 bp, Homo sapien
ttgtaggcaaagaagaaaggaatagctgcagcc

SEQ ID NO: 256164 - DNA, 33 bp, Homo sapien
ttgtaggcaaagaagagaggaatagctgcagcc

SEQ ID NO: 256165 - DNA, 33 bp, Homo sapien
ctggggcctattgaacacacgtcatcatgtgtt

SEQ ID NO: 256166 - DNA, 33 bp, Homo sapien
ctggggcctattgaacccacgtcatcatgtgtt

SEQ ID NO: 256167 - DNA, 33 bp, Homo sapien
acccatttgatcatcacaataggcagatgacat

SEQ ID NO: 256168 - DNA, 33 bp, Homo sapien
acccatttgatcatcataataggcagatgacat

SEQ ID NO: 256169 - DNA, 33 bp, Homo sapien
ccattggcatagactcgcagacccttcttggat

SEQ ID NO: 256170 - DNA, 33 bp, Homo sapien
ccattggcatagactctcagacccttcttggat

SEQ ID NO: 256171 - DNA, 33 bp, Homo sapien
tgtgggcaaagggcaacgtctctcctgtgcaca

SEQ ID NO: 256172 - DNA, 33 bp, Homo sapien
tgtgggcaaagggcaatgtctctcctgtgcaca

SEQ ID NO: 256173 - DNA, 33 bp, Homo sapien
caagctggaaccaacacatctatgctcccacgc

SEQ ID NO: 256174 - DNA, 33 bp, Homo sapien
caagctggaaccaacatatctatgctcccacgc

SEQ ID NO: 256175 - DNA, 33 bp, Homo sapien
cactaattcaaatgtacgacacaaaaagccaat

SEQ ID NO: 256176 - DNA, 33 bp, Homo sapien
cactaattcaaatgtatgacacaaaaagccaat

SEQ ID NO: 256177 - DNA, 33 bp, Homo sapien
aatcgcccaggaattacattgggaatcttgctc

SEQ ID NO: 256178 - DNA, 33 bp, Homo sapien
aatcgcccaggaattatattgggaatcttgctc

SEQ ID NO: 256179 - DNA, 33 bp, Homo sapien
cacggatgttgcaaaaacacagggtggaggctg

SEQ ID NO: 256180 - DNA, 33 bp, Homo sapien
cacggatgttgcaaaagcacagggtggaggctg

SEQ ID NO: 256181 - DNA, 33 bp, Homo sapien
ataattgtaacccaaacgggagcaaacacgcaa

SEQ ID NO: 256182 - DNA, 33 bp, Homo sapien
ataattgtaacccaaatgggagcaaacacgcaa

SEQ ID NO: 256183 - DNA, 33 bp, Homo sapien
gggcatcagggggctacacatcacccaacggtg

SEQ ID NO: 256184 - DNA, 33 bp, Homo sapien
gggcatcagggggctatacatcacccaacggtg

SEQ ID NO: 256185 - DNA, 33 bp, Homo sapien
gtcagggccctgtcaacggcagcacccccattc

SEQ ID NO: 256186 - DNA, 33 bp, Homo sapien
gtcagggccctgtcaatggcagcacccccattc

SEQ ID NO: 256187 - DNA, 33 bp, Homo sapien
agtacctgacctgggccccaagaccgtgtggaa

SEQ ID NO: 256188 - DNA, 33 bp, Homo sapien
agtacctgacctgggctccaagaccgtgtggaa

SEQ ID NO: 256189 - DNA, 33 bp, Homo sapien
gcctgtgattgtccaacgggttgttcctgccca

SEQ ID NO: 256190 - DNA, 33 bp, Homo sapien
gcctgtgattgtccaatgggttgttcctgccca

SEQ ID NO: 256191 - DNA, 33 bp, Homo sapien
agaactgaggaaattacggcggtgaaacagatc

SEQ ID NO: 256192 - DNA, 33 bp, Homo sapien
agaactgaggaaattatggcggtgaaacagatc

SEQ ID NO: 256193 - DNA, 33 bp, Homo sapien
ataacaactattggcacggtatttgtgttatct

SEQ ID NO: 256194 - DNA, 33 bp, Homo sapien
ataacaactattggcatggtatttgtgttatct

SEQ ID NO: 256195 - DNA, 33 bp, Homo sapien
catcttaaatgttaaaatgtgccacggggagct

SEQ ID NO: 256196 - DNA, 33 bp, Homo sapien
catcttaaatgttaaactgtgccacggggagct

SEQ ID NO: 256197 - DNA, 33 bp, Homo sapien
gggaagtcatgaccaacgtccaccaccaccggg

SEQ ID NO: 256198 - DNA, 33 bp, Homo sapien
gggaagtcatgaccaatgtccaccaccaccggg

SEQ ID NO: 256199 - DNA, 33 bp, Homo sapien
ttttcagctttgtgtacgctgttttccgaggat

SEQ ID NO: 256200 - DNA, 33 bp, Homo sapien
ttttcagctttgtgtatgctgttttccgaggat

SEQ ID NO: 256201 - DNA, 33 bp, Homo sapien
atcatcagtgtagagaagatgtcttaggagttt

SEQ ID NO: 256202 - DNA, 33 bp, Homo sapien
atcatcagtgtagagaggatgtcttaggagttt

SEQ ID NO: 256203 - DNA, 33 bp, Homo sapien
gggggctgtttgccctcaatgtggggagtcggc

SEQ ID NO: 256204 - DNA, 33 bp, Homo sapien
gggggctgtttgcccttaatgtggggagtcggc

SEQ ID NO: 256205 - DNA, 33 bp, Homo sapien
cagatgagaaaacaacaaccacgggctgcaggt

SEQ ID NO: 256206 - DNA, 33 bp, Homo sapien
cagatgagaaaacaaccaccacgggctgcaggt

SEQ ID NO: 256207 - DNA, 33 bp, Homo sapien
gctgagcagctttcacagcgtgtgtccattgtt

SEQ ID NO: 256208 - DNA, 33 bp, Homo sapien
gctgagcagctttcacggcgtgtgtccattgtt

SEQ ID NO: 256209 - DNA, 33 bp, Homo sapien
gaggacgcctcctaaactgaaaatgtcctaagt

SEQ ID NO: 256210 - DNA, 33 bp, Homo sapien
gaggacgcctcctaaattgaaaatgtcctaagt

SEQ ID NO: 256211 - DNA, 33 bp, Homo sapien
atatctgctcagactacgggaattttttaaatt

SEQ ID NO: 256212 - DNA, 33 bp, Homo sapien
atatctgctcagactatgggaattttttaaatt

SEQ ID NO: 256213 - DNA, 33 bp, Homo sapien
ttataaacattttagaagcaacattggagaaag

SEQ ID NO: 256214 - DNA, 33 bp, Homo sapien
ttataaacattttagaggcaacattggagaaag

SEQ ID NO: 256215 - DNA, 33 bp, Homo sapien
cctatttaaaatgcaaattgaagtcaatagaaa

SEQ ID NO: 256216 - DNA, 33 bp, Homo sapien
cctatttaaaatgcaagttgaagtcaatagaaa

SEQ ID NO: 256217 - DNA, 33 bp, Homo sapien
acgcatcacatgaaaagcaccatcagtggacag

SEQ ID NO: 256218 - DNA, 33 bp, Homo sapien
acgcatcacatgaaaatcaccatcagtggacag

SEQ ID NO: 256219 - DNA, 33 bp, Homo sapien
cactgatgaaggtcacacactttattggaggaa

SEQ ID NO: 256220 - DNA, 33 bp, Homo sapien
cactgatgaaggtcacgcactttattggaggaa

SEQ ID NO: 256221 - DNA, 33 bp, Homo sapien
cactatttgggttacaacttacttgcccttccc

SEQ ID NO: 256222 - DNA, 33 bp, Homo sapien
cactatttgggttacagcttacttgcccttccc

SEQ ID NO: 256223 - DNA, 33 bp, Homo sapien
tagcagctgatgcaaaatggtagcactatacat

SEQ ID NO: 256224 - DNA, 33 bp, Homo sapien
tagcagctgatgcaaagtggtagcactatacat

SEQ ID NO: 256225 - DNA, 33 bp, Homo sapien
acccaccaggctcccacgtcgatcctctgctca

SEQ ID NO: 256226 - DNA, 33 bp, Homo sapien
acccaccaggctcccaggtcgatcctctgctca

SEQ ID NO: 256227 - DNA, 33 bp, Homo sapien
ctgctctgcagaatggaaatcacacgtgtctgt

SEQ ID NO: 256228 - DNA, 33 bp, Homo sapien
ctgctctgcagaatgggaatcacacgtgtctgt

SEQ ID NO: 256229 - DNA, 33 bp, Homo sapien
aggaaagcctgggaaacggtcacagccaagagc

SEQ ID NO: 256230 - DNA, 33 bp, Homo sapien
aggaaagcctgggaaatggtcacagccaagagc

SEQ ID NO: 256231 - DNA, 33 bp, Homo sapien
agagcccccaccccaacggacgatggaggctcg

SEQ ID NO: 256232 - DNA, 33 bp, Homo sapien
agagcccccaccccaatggacgatggaggctcg

SEQ ID NO: 256233 - DNA, 33 bp, Homo sapien
tctcacagaagctgcacacagaggctgcataca

SEQ ID NO: 256234 - DNA, 33 bp, Homo sapien
tctcacagaagctgcatacagaggctgcataca

SEQ ID NO: 256235 - DNA, 33 bp, Homo sapien
acccatttaagagttacggactttcggctggga

SEQ ID NO: 256236 - DNA, 33 bp, Homo sapien
acccatttaagagttatggactttcggctggga

SEQ ID NO: 256237 - DNA, 33 bp, Homo sapien
aggagtgaaatagacacagctgcatttttaaat

SEQ ID NO: 256238 - DNA, 33 bp, Homo sapien
aggagtgaaatagacatagctgcatttttaaat

SEQ ID NO: 256239 - DNA, 33 bp, Homo sapien
agaccaggtacacaaacaagaaagacgaaataa

SEQ ID NO: 256240 - DNA, 33 bp, Homo sapien
agaccaggtacacaaagaagaaagacgaaataa

SEQ ID NO: 256241 - DNA, 33 bp, Homo sapien
cactcgtggcactggacaagtcatttagacaga

SEQ ID NO: 256242 - DNA, 33 bp, Homo sapien
cactcgtggcactggagaagtcatttagacaga

SEQ ID NO: 256243 - DNA, 33 bp, Homo sapien
aacacctcagaaacaaaaggatgtattttgatt

SEQ ID NO: 256244 - DNA, 33 bp, Homo sapien
aacacctcagaaacaacaggatgtattttgatt

SEQ ID NO: 256245 - DNA, 33 bp, Homo sapien
gagagctccactaccacagcgctgcatcatggt

SEQ ID NO: 256246 - DNA, 33 bp, Homo sapien
gagagctccactaccatagcgctgcatcatggt

SEQ ID NO: 256247 - DNA, 33 bp, Homo sapien
ccagcctttatgaagcacttactgtgtaccaga

SEQ ID NO: 256248 - DNA, 33 bp, Homo sapien
ccagcctttatgaagcccttactgtgtaccaga

SEQ ID NO: 256249 - DNA, 33 bp, Homo sapien
gagagatatgcctagagaagcacttagtacact

SEQ ID NO: 256250 - DNA, 33 bp, Homo sapien
gagagatatgcctagataagcacttagtacact

SEQ ID NO: 256251 - DNA, 33 bp, Homo sapien
ctctatgaagcaaatacagttgttgccagatgt

SEQ ID NO: 256252 - DNA, 33 bp, Homo sapien
ctctatgaagcaaatatagttgttgccagatgt

SEQ ID NO: 256253 - DNA, 33 bp, Homo sapien
attcagtgaaatttgacatgacttgatttaatc

SEQ ID NO: 256254 - DNA, 33 bp, Homo sapien
attcagtgaaatttgatatgacttgatttaatc

SEQ ID NO: 256255 - DNA, 33 bp, Homo sapien
agctcctgacgatacgcacctgcccagtaagta

SEQ ID NO: 256256 - DNA, 33 bp, Homo sapien
agctcctgacgatacgtacctgcccagtaagta

SEQ ID NO: 256257 - DNA, 33 bp, Homo sapien
catcatccctacacgcccgcgcctgaagattta

SEQ ID NO: 256258 - DNA, 33 bp, Homo sapien
catcatccctacacgctcgcgcctgaagattta

SEQ ID NO: 256259 - DNA, 33 bp, Homo sapien
ctcaccttctcttagcacctttttcttcccttc

SEQ ID NO: 256260 - DNA, 33 bp, Homo sapien
ctcaccttctcttagctcctttttcttcccttc

SEQ ID NO: 256261 - DNA, 33 bp, Homo sapien
gttaaatgcccaaaacagattcattttggtagt

SEQ ID NO: 256262 - DNA, 33 bp, Homo sapien
gttaaatgcccaaaacggattcattttggtagt

SEQ ID NO: 256263 - DNA, 33 bp, Homo sapien
acacaggagagaatgggaacgagcatggcatga

SEQ ID NO: 256264 - DNA, 33 bp, Homo sapien
acacaggagagaatggtaacgagcatggcatga

SEQ ID NO: 256265 - DNA, 33 bp, Homo sapien
atgcaaatcgctcaacacctgtacaagttacac

SEQ ID NO: 256266 - DNA, 33 bp, Homo sapien
atgcaaatcgctcaacgcctgtacaagttacac

SEQ ID NO: 256267 - DNA, 33 bp, Homo sapien
aattcacacgagattaagatcatgcagagatac

SEQ ID NO: 256268 - DNA, 33 bp, Homo sapien
aattcacacgagattacgatcatgcagagatac

SEQ ID NO: 256269 - DNA, 33 bp, Homo sapien
gtagaacatcagtaaaatgcttgagatactaaa

SEQ ID NO: 256270 - DNA, 33 bp, Homo sapien
gtagaacatcagtaaactgcttgagatactaaa

SEQ ID NO: 256271 - DNA, 33 bp, Homo sapien
cccctcccggaatcgacgtgactacttactaca

SEQ ID NO: 256272 - DNA, 33 bp, Homo sapien
cccctcccggaatcgatgtgactacttactaca

SEQ ID NO: 256273 - DNA, 33 bp, Homo sapien
cagaagcaaggtacccagctgtcatgaaaggta

SEQ ID NO: 256274 - DNA, 33 bp, Homo sapien
cagaagcaaggtacccggctgtcatgaaaggta

SEQ ID NO: 256275 - DNA, 33 bp, Homo sapien
tagaatgcctacatcactaaagccactccagag

SEQ ID NO: 256276 - DNA, 33 bp, Homo sapien
tagaatgcctacatcattaaagccactccagag

SEQ ID NO: 256277 - DNA, 33 bp, Homo sapien
ttggccgtcttagctccaatgcgccacagtgga

SEQ ID NO: 256278 - DNA, 33 bp, Homo sapien
ttggccgtcttagctctaatgcgccacagtgga

SEQ ID NO: 256279 - DNA, 33 bp, Homo sapien
gtaacaatatttttcacgtcaaacttttaaata

SEQ ID NO: 256280 - DNA, 33 bp, Homo sapien
gtaacaatatttttcaggtcaaacttttaaata

SEQ ID NO: 256281 - DNA, 33 bp, Homo sapien
gtgtgaacaggagaaacttccaggtaggcctct

SEQ ID NO: 256282 - DNA, 33 bp, Homo sapien
gtgtgaacaggagaaatttccaggtaggcctct

SEQ ID NO: 256283 - DNA, 33 bp, Homo sapien
acttctctcaaaaggcacagttaagaagatgaa

SEQ ID NO: 256284 - DNA, 33 bp, Homo sapien
acttctctcaaaaggcgcagttaagaagatgaa

SEQ ID NO: 256285 - DNA, 33 bp, Homo sapien
cagggacgtgctgatgaaaccaacgagacagga

SEQ ID NO: 256286 - DNA, 33 bp, Homo sapien
cagggacgtgctgatgcaaccaacgagacagga

SEQ ID NO: 256287 - DNA, 33 bp, Homo sapien
gtaggtgtgtacttaacgtcacaagaaactgca

SEQ ID NO: 256288 - DNA, 33 bp, Homo sapien
gtaggtgtgtacttaatgtcacaagaaactgca

SEQ ID NO: 256289 - DNA, 33 bp, Homo sapien
agattggacttgatcaaaacatacaacttttgt

SEQ ID NO: 256290 - DNA, 33 bp, Homo sapien
agattggacttgatcacaacatacaacttttgt

SEQ ID NO: 256291 - DNA, 33 bp, Homo sapien
taaagtgtacaactaaatgtttttcaggggcct

SEQ ID NO: 256292 - DNA, 33 bp, Homo sapien
taaagtgtacaactaagtgtttttcaggggcct

SEQ ID NO: 256293 - DNA, 33 bp, Homo sapien
tttgaatttaggaagcagaaattacagtgagcc

SEQ ID NO: 256294 - DNA, 33 bp, Homo sapien
tttgaatttaggaagcggaaattacagtgagcc

SEQ ID NO: 256295 - DNA, 33 bp, Homo sapien
taactgttggctgttacgatcgaatagagcagt

SEQ ID NO: 256296 - DNA, 33 bp, Homo sapien
taactgttggctgttaggatcgaatagagcagt

SEQ ID NO: 256297 - DNA, 33 bp, Homo sapien
ccagttgctcagacagacggattcaggggatct

SEQ ID NO: 256298 - DNA, 33 bp, Homo sapien
ccagttgctcagacaggcggattcaggggatct

SEQ ID NO: 256299 - DNA, 33 bp, Homo sapien
ggcttcaagcttccatcacaggacaactggccc

SEQ ID NO: 256300 - DNA, 33 bp, Homo sapien
ggcttcaagcttccattacaggacaactggccc

SEQ ID NO: 256301 - DNA, 33 bp, Homo sapien
ttcacctgccgacataccggttgtttctgcgtt

SEQ ID NO: 256302 - DNA, 33 bp, Homo sapien
ttcacctgccgacatatcggttgtttctgcgtt

SEQ ID NO: 256303 - DNA, 33 bp, Homo sapien
gttctcccctctgtacaacggctccagaatgca

SEQ ID NO: 256304 - DNA, 33 bp, Homo sapien
gttctcccctctgtacgacggctccagaatgca

SEQ ID NO: 256305 - DNA, 33 bp, Homo sapien
tcattaaaatgttgccaatataagaaaaagcat

SEQ ID NO: 256306 - DNA, 33 bp, Homo sapien
tcattaaaatgttgccgatataagaaaaagcat

SEQ ID NO: 256307 - DNA, 33 bp, Homo sapien
aagacaccacctcagaaacttaattacacagca

SEQ ID NO: 256308 - DNA, 33 bp, Homo sapien
aagacaccacctcagagacttaattacacagca

SEQ ID NO: 256309 - DNA, 33 bp, Homo sapien
acttgatcatgttgtgaaggatgtaaaaatatt

SEQ ID NO: 256310 - DNA, 33 bp, Homo sapien
acttgatcatgttgtggaggatgtaaaaatatt

SEQ ID NO: 256311 - DNA, 33 bp, Homo sapien
aatattaaagagaaacaatcatagggaacagca

SEQ ID NO: 256312 - DNA, 33 bp, Homo sapien
aatattaaagagaaaccatcatagggaacagca

SEQ ID NO: 256313 - DNA, 33 bp, Homo sapien
ttctgtgtatcgtgtcaaagtagtgttatatca

SEQ ID NO: 256314 - DNA, 33 bp, Homo sapien
ttctgtgtatcgtgtcgaagtagtgttatatca

SEQ ID NO: 256315 - DNA, 33 bp, Homo sapien
atctgtaagcaggaaactatgtttagaaagtat

SEQ ID NO: 256316 - DNA, 33 bp, Homo sapien
atctgtaagcaggaaattatgtttagaaagtat

SEQ ID NO: 256317 - DNA, 33 bp, Homo sapien
agtgagaatcccctagccccggtaccttctgct

SEQ ID NO: 256318 - DNA, 33 bp, Homo sapien
agtgagaatcccctagtcccggtaccttctgct

SEQ ID NO: 256319 - DNA, 33 bp, Homo sapien
ggtgaaaggggagataaacacgccagggcccga

SEQ ID NO: 256320 - DNA, 33 bp, Homo sapien
ggtgaaaggggagatatacacgccagggcccga

SEQ ID NO: 256321 - DNA, 33 bp, Homo sapien
atggaaggatgcataacaaaacagtgtatatag

SEQ ID NO: 256322 - DNA, 33 bp, Homo sapien
atggaaggatgcataagaaaacagtgtatatag

SEQ ID NO: 256323 - DNA, 33 bp, Homo sapien
agaagaaatagtggaaatcttaaagtctttgat

SEQ ID NO: 256324 - DNA, 33 bp, Homo sapien
agaagaaatagtggaagtcttaaagtctttgat

SEQ ID NO: 256325 - DNA, 33 bp, Homo sapien
gcctgacctgggagaacggaggtcatgctgagt

SEQ ID NO: 256326 - DNA, 33 bp, Homo sapien
gcctgacctgggagaatggaggtcatgctgagt

SEQ ID NO: 256327 - DNA, 33 bp, Homo sapien
aaagacataaacttccagatttgcgtaagtgag

SEQ ID NO: 256328 - DNA, 33 bp, Homo sapien
aaagacataaacttccggatttgcgtaagtgag

SEQ ID NO: 256329 - DNA, 33 bp, Homo sapien
agcaatgatgaccgaacgcttacaagccgggct

SEQ ID NO: 256330 - DNA, 33 bp, Homo sapien
agcaatgatgaccgaatgcttacaagccgggct

SEQ ID NO: 256331 - DNA, 33 bp, Homo sapien
tgagctaatgttaaaaatcaagctcttggccag

SEQ ID NO: 256332 - DNA, 33 bp, Homo sapien
tgagctaatgttaaaagtcaagctcttggccag

SEQ ID NO: 256333 - DNA, 33 bp, Homo sapien
ttgcctagaatgtgaaagtaagggctggggctg

SEQ ID NO: 256334 - DNA, 33 bp, Homo sapien
ttgcctagaatgtgaaggtaagggctggggctg

SEQ ID NO: 256335 - DNA, 33 bp, Homo sapien
aaatgaaaatagaaacaaagccagcgcagctgc

SEQ ID NO: 256336 - DNA, 33 bp, Homo sapien
aaatgaaaatagaaacgaagccagcgcagctgc

SEQ ID NO: 256337 - DNA, 33 bp, Homo sapien
tttgcatggatttacgcacctgcctgtgaatgt

SEQ ID NO: 256338 - DNA, 33 bp, Homo sapien
tttgcatggatttacgtacctgcctgtgaatgt

SEQ ID NO: 256339 - DNA, 33 bp, Homo sapien
caagacaggggtatcaactcggattgtcttggg

SEQ ID NO: 256340 - DNA, 33 bp, Homo sapien
caagacaggggtatcagctcggattgtcttggg

SEQ ID NO: 256341 - DNA, 33 bp, Homo sapien
ggcagcaggatttccccgaactgagggctccac

SEQ ID NO: 256342 - DNA, 33 bp, Homo sapien
ggcagcaggatttcccggaactgagggctccac

SEQ ID NO: 256343 - DNA, 33 bp, Homo sapien
gcgaaaagcccagaaacgccgcctcacaggctg

SEQ ID NO: 256344 - DNA, 33 bp, Homo sapien
gcgaaaagcccagaaatgccgcctcacaggctg

SEQ ID NO: 256345 - DNA, 33 bp, Homo sapien
gcaaatctgaacagcacggtgtttctaaatgtg

SEQ ID NO: 256346 - DNA, 33 bp, Homo sapien
gcaaatctgaacagcatggtgtttctaaatgtg

SEQ ID NO: 256347 - DNA, 33 bp, Homo sapien
caccagcatgatcaacacagcgctggaggaggg

SEQ ID NO: 256348 - DNA, 33 bp, Homo sapien
caccagcatgatcaacgcagcgctggaggaggg

SEQ ID NO: 256349 - DNA, 33 bp, Homo sapien
agagtgcaacaaaccaaaaagcttccgcaaagg

SEQ ID NO: 256350 - DNA, 33 bp, Homo sapien
agagtgcaacaaaccagaaagcttccgcaaagg

SEQ ID NO: 256351 - DNA, 33 bp, Homo sapien
catgggtgacacaatacgaagaggcgatcaggg

SEQ ID NO: 256352 - DNA, 33 bp, Homo sapien
catgggtgacacaatatgaagaggcgatcaggg

SEQ ID NO: 256353 - DNA, 33 bp, Homo sapien
ttgctgagtaagcaaacatagcatttttcttca

SEQ ID NO: 256354 - DNA, 33 bp, Homo sapien
ttgctgagtaagcaaatatagcatttttcttca

SEQ ID NO: 256355 - DNA, 33 bp, Homo sapien
tcatgtacacgtacccaagtgtgcccatgttca

SEQ ID NO: 256356 - DNA, 33 bp, Homo sapien
tcatgtacacgtacccgagtgtgcccatgttca

SEQ ID NO: 256357 - DNA, 33 bp, Homo sapien
gagaagccaatcacagcaggtccgtgccgcctg

SEQ ID NO: 256358 - DNA, 33 bp, Homo sapien
gagaagccaatcacagtaggtccgtgccgcctg

SEQ ID NO: 256359 - DNA, 33 bp, Homo sapien
ccacattaagaagtgacgaccatctatcagctc

SEQ ID NO: 256360 - DNA, 33 bp, Homo sapien
ccacattaagaagtgaggaccatctatcagctc

SEQ ID NO: 256361 - DNA, 33 bp, Homo sapien
ctaactaatcataaacaatttccatctctgtga

SEQ ID NO: 256362 - DNA, 33 bp, Homo sapien
ctaactaatcataaacgatttccatctctgtga

SEQ ID NO: 256363 - DNA, 33 bp, Homo sapien
caggacacacacaacactgatgaagctcattgt

SEQ ID NO: 256364 - DNA, 33 bp, Homo sapien
caggacacacacaacattgatgaagctcattgt

SEQ ID NO: 256365 - DNA, 33 bp, Homo sapien
tgcatggtaaggatgtcaatgaatgcaggatga

SEQ ID NO: 256366 - DNA, 33 bp, Homo sapien
tgcatggtaaggatgttaatgaatgcaggatga

SEQ ID NO: 256367 - DNA, 33 bp, Homo sapien
tggtgcaaacacagccacgttgtctcatgtgtt

SEQ ID NO: 256368 - DNA, 33 bp, Homo sapien
tggtgcaaacacagccgcgttgtctcatgtgtt

SEQ ID NO: 256369 - DNA, 33 bp, Homo sapien
cctagacatcagaacaccacactaggccggatg

SEQ ID NO: 256370 - DNA, 33 bp, Homo sapien
cctagacatcagaacatcacactaggccggatg

SEQ ID NO: 256371 - DNA, 33 bp, Homo sapien
gccccagctggtcagaaacaagaacttagaggc

SEQ ID NO: 256372 - DNA, 33 bp, Homo sapien
gccccagctggtcagagacaagaacttagaggc

SEQ ID NO: 256373 - DNA, 33 bp, Homo sapien
gaatgtggggtttgccaaattattgaagagttt

SEQ ID NO: 256374 - DNA, 33 bp, Homo sapien
gaatgtggggtttgccgaattattgaagagttt

SEQ ID NO: 256375 - DNA, 33 bp, Homo sapien
atttacctcatcaacactaaggctgaacatctt

SEQ ID NO: 256376 - DNA, 33 bp, Homo sapien
atttacctcatcaacagtaaggctgaacatctt

SEQ ID NO: 256377 - DNA, 33 bp, Homo sapien
ctctaatcgtctcacaaaggaagtcagagtggc

SEQ ID NO: 256378 - DNA, 33 bp, Homo sapien
ctctaatcgtctcacacaggaagtcagagtggc

SEQ ID NO: 256379 - DNA, 33 bp, Homo sapien
gttccatgtctcggaaactggaagattacgggg

SEQ ID NO: 256380 - DNA, 33 bp, Homo sapien
gttccatgtctcggaagctggaagattacgggg

SEQ ID NO: 256381 - DNA, 33 bp, Homo sapien
tatagagtgaaacacacgagcaagggagcacca

SEQ ID NO: 256382 - DNA, 33 bp, Homo sapien
tatagagtgaaacacatgagcaagggagcacca

SEQ ID NO: 256383 - DNA, 33 bp, Homo sapien
aatctatctcaatccacgtcctttctaaagcac

SEQ ID NO: 256384 - DNA, 33 bp, Homo sapien
aatctatctcaatccatgtcctttctaaagcac

SEQ ID NO: 256385 - DNA, 33 bp, Homo sapien
acccacagggctgtacactacagagtgaacgtc

SEQ ID NO: 256386 - DNA, 33 bp, Homo sapien
acccacagggctgtacgctacagagtgaacgtc

SEQ ID NO: 256387 - DNA, 33 bp, Homo sapien
agcaggtgcttcgagaaagtgtatccacagctg

SEQ ID NO: 256388 - DNA, 33 bp, Homo sapien
agcaggtgcttcgagacagtgtatccacagctg

SEQ ID NO: 256389 - DNA, 33 bp, Homo sapien
acaccggcttcccaccaagtggagaaaggcggc

SEQ ID NO: 256390 - DNA, 33 bp, Homo sapien
acaccggcttcccaccgagtggagaaaggcggc

SEQ ID NO: 256391 - DNA, 33 bp, Homo sapien
ctgggacatccacctccattcagctccagtgca

SEQ ID NO: 256392 - DNA, 33 bp, Homo sapien
ctgggacatccacctctattcagctccagtgca

SEQ ID NO: 256393 - DNA, 33 bp, Homo sapien
gcagaaaagacggtcacaccctgagaacaaagc

SEQ ID NO: 256394 - DNA, 33 bp, Homo sapien
gcagaaaagacggtcataccctgagaacaaagc

SEQ ID NO: 256395 - DNA, 33 bp, Homo sapien
tgggtgaatccacagaagaatagactttcctgg

SEQ ID NO: 256396 - DNA, 33 bp, Homo sapien
tgggtgaatccacagaggaatagactttcctgg

SEQ ID NO: 256397 - DNA, 33 bp, Homo sapien
tgatgtggtttcaacgaccaaggcagtccttcc

SEQ ID NO: 256398 - DNA, 33 bp, Homo sapien
tgatgtggtttcaacgcccaaggcagtccttcc

SEQ ID NO: 256399 - DNA, 33 bp, Homo sapien
taagataacattcacaagtttgggggattagga

SEQ ID NO: 256400 - DNA, 33 bp, Homo sapien
taagataacattcacaggtttgggggattagga

SEQ ID NO: 256401 - DNA, 33 bp, Homo sapien
agggagcagcccgagcagcaacgtgactcagct

SEQ ID NO: 256402 - DNA, 33 bp, Homo sapien
agggagcagcccgagcggcaacgtgactcagct

SEQ ID NO: 256403 - DNA, 33 bp, Homo sapien
aaaacagaacaatgtacagactgtattactgct

SEQ ID NO: 256404 - DNA, 33 bp, Homo sapien
aaaacagaacaatgtatagactgtattactgct

SEQ ID NO: 256405 - DNA, 33 bp, Homo sapien
ctgtcattaatcaaaacgcaaccaactgtgtgc

SEQ ID NO: 256406 - DNA, 33 bp, Homo sapien
ctgtcattaatcaaaatgcaaccaactgtgtgc

SEQ ID NO: 256407 - DNA, 33 bp, Homo sapien
gtttgctgaggagaagccagctctgtgagatcc

SEQ ID NO: 256408 - DNA, 33 bp, Homo sapien
gtttgctgaggagaaggcagctctgtgagatcc

SEQ ID NO: 256409 - DNA, 33 bp, Homo sapien
ttatagaagtttaccaagcgtgatctaaggtgt

SEQ ID NO: 256410 - DNA, 33 bp, Homo sapien
ttatagaagtttaccacgcgtgatctaaggtgt

SEQ ID NO: 256411 - DNA, 33 bp, Homo sapien
tgtaagtggaactcaaacaaccaagaaggttag

SEQ ID NO: 256412 - DNA, 33 bp, Homo sapien
tgtaagtggaactcaaccaaccaagaaggttag

SEQ ID NO: 256413 - DNA, 33 bp, Homo sapien
aaactatgaatgcaacgacatttttgagtctgt

SEQ ID NO: 256414 - DNA, 33 bp, Homo sapien
aaactatgaatgcaactacatttttgagtctgt

SEQ ID NO: 256415 - DNA, 33 bp, Homo sapien
cagaataaagcaaagcccacgaatttggtctgt

SEQ ID NO: 256416 - DNA, 33 bp, Homo sapien
cagaataaagcaaagcgcacgaatttggtctgt

SEQ ID NO: 256417 - DNA, 33 bp, Homo sapien
gaacggccgggaccgcacacctgcccgagggaa

SEQ ID NO: 256418 - DNA, 33 bp, Homo sapien
gaacggccgggaccgcgcacctgcccgagggaa

SEQ ID NO: 256419 - DNA, 33 bp, Homo sapien
taaacacaattttgaacagggaacgccttttta

SEQ ID NO: 256420 - DNA, 33 bp, Homo sapien
taaacacaattttgaatagggaacgccttttta

SEQ ID NO: 256421 - DNA, 33 bp, Homo sapien
cctccttatgtgtaaactataaaccaatgcaac

SEQ ID NO: 256422 - DNA, 33 bp, Homo sapien
cctccttatgtgtaaattataaaccaatgcaac

SEQ ID NO: 256423 - DNA, 33 bp, Homo sapien
tgtggaggagtgtgaaagaaaatgaggatggct

SEQ ID NO: 256424 - DNA, 33 bp, Homo sapien
tgtggaggagtgtgaaggaaaatgaggatggct

SEQ ID NO: 256425 - DNA, 33 bp, Homo sapien
aaaggtagaattttagccagggaacatgataaa

SEQ ID NO: 256426 - DNA, 33 bp, Homo sapien
aaaggtagaattttaggcagggaacatgataaa

SEQ ID NO: 256427 - DNA, 33 bp, Homo sapien
agcaagactgggaatcaaccgagactgccagct

SEQ ID NO: 256428 - DNA, 33 bp, Homo sapien
agcaagactgggaatcgaccgagactgccagct

SEQ ID NO: 256429 - DNA, 33 bp, Homo sapien
cgtgcaggcatgacacccaaattcatgacgtgt

SEQ ID NO: 256430 - DNA, 33 bp, Homo sapien
cgtgcaggcatgacacgcaaattcatgacgtgt

SEQ ID NO: 256431 - DNA, 33 bp, Homo sapien
aggaagagattagggcacaaacacgcatgaaga

SEQ ID NO: 256432 - DNA, 33 bp, Homo sapien
aggaagagattagggcgcaaacacgcatgaaga

SEQ ID NO: 256433 - DNA, 33 bp, Homo sapien
gcggcccaagtggacccacattcaaggccagca

SEQ ID NO: 256434 - DNA, 33 bp, Homo sapien
gcggcccaagtggacctacattcaaggccagca

SEQ ID NO: 256435 - DNA, 33 bp, Homo sapien
gcggtaaactaactagaaagtagtgcgtcctga

SEQ ID NO: 256436 - DNA, 33 bp, Homo sapien
gcggtaaactaactaggaagtagtgcgtcctga

SEQ ID NO: 256437 - DNA, 33 bp, Homo sapien
ttctttgtagttgatcaagcgactataaagtcc

SEQ ID NO: 256438 - DNA, 33 bp, Homo sapien
ttctttgtagttgatctagcgactataaagtcc

SEQ ID NO: 256439 - DNA, 33 bp, Homo sapien
gatgccacacccatgacgagtcgaagcaaaggg

SEQ ID NO: 256440 - DNA, 33 bp, Homo sapien
gatgccacacccatgatgagtcgaagcaaaggg

SEQ ID NO: 256441 - DNA, 33 bp, Homo sapien
aaagtatggatgccagaaataaaatcactcaag

SEQ ID NO: 256442 - DNA, 33 bp, Homo sapien
aaagtatggatgccaggaataaaatcactcaag

SEQ ID NO: 256443 - DNA, 33 bp, Homo sapien
ttttaaatgctccttagctgggaaggtgtattt

SEQ ID NO: 256444 - DNA, 33 bp, Homo sapien
ttttaaatgctccttatctgggaaggtgtattt

SEQ ID NO: 256445 - DNA, 33 bp, Homo sapien
tcgtgtgtgaccccgtaaactctgcaaacagat

SEQ ID NO: 256446 - DNA, 33 bp, Homo sapien
tcgtgtgtgaccccgtgaactctgcaaacagat

SEQ ID NO: 256447 - DNA, 33 bp, Homo sapien
catctccacccgttggaagctatgcatccctcc

SEQ ID NO: 256448 - DNA, 33 bp, Homo sapien
catctccacccgttgggagctatgcatccctcc

SEQ ID NO: 256449 - DNA, 33 bp, Homo sapien
gaagagcttaacaaacaaggagaaacaccattt

SEQ ID NO: 256450 - DNA, 33 bp, Homo sapien
gaagagcttaacaaactaggagaaacaccattt

SEQ ID NO: 256451 - DNA, 33 bp, Homo sapien
gtggtaactgtgaacactactgcactttgttta

SEQ ID NO: 256452 - DNA, 33 bp, Homo sapien
gtggtaactgtgaacattactgcactttgttta

SEQ ID NO: 256453 - DNA, 33 bp, Homo sapien
cgtgacaactaagatgaaccgtcttctactcct

SEQ ID NO: 256454 - DNA, 33 bp, Homo sapien
cgtgacaactaagatggaccgtcttctactcct

SEQ ID NO: 256455 - DNA, 33 bp, Homo sapien
tttgcaccaaaatcctaaaagtctacattgtga

SEQ ID NO: 256456 - DNA, 33 bp, Homo sapien
tttgcaccaaaatcctgaaagtctacattgtga

SEQ ID NO: 256457 - DNA, 33 bp, Homo sapien
gtcttctgggaatgaaagtctgctaaactcgcc

SEQ ID NO: 256458 - DNA, 33 bp, Homo sapien
gtcttctgggaatgaaggtctgctaaactcgcc

SEQ ID NO: 256459 - DNA, 33 bp, Homo sapien
cttacatccaaaataaacaaacacctcacaggc

SEQ ID NO: 256460 - DNA, 33 bp, Homo sapien
cttacatccaaaataagcaaacacctcacaggc

SEQ ID NO: 256461 - DNA, 33 bp, Homo sapien
gcctcataacacccacaaaacagaggataaacc

SEQ ID NO: 256462 - DNA, 33 bp, Homo sapien
gcctcataacacccacgaaacagaggataaacc

SEQ ID NO: 256463 - DNA, 33 bp, Homo sapien
atacttagttacctgagtatttggcctgattat

SEQ ID NO: 256464 - DNA, 33 bp, Homo sapien
atacttagttacctgattatttggcctgattat

SEQ ID NO: 256465 - DNA, 33 bp, Homo sapien
ttttgcagatgttgacaaactgattataaagtt

SEQ ID NO: 256466 - DNA, 33 bp, Homo sapien
ttttgcagatgttgacgaactgattataaagtt

SEQ ID NO: 256467 - DNA, 33 bp, Homo sapien
ggagagagaactaagacggtttgctaagggact

SEQ ID NO: 256468 - DNA, 33 bp, Homo sapien
ggagagagaactaagatggtttgctaagggact

SEQ ID NO: 256469 - DNA, 33 bp, Homo sapien
tagtgcctgatactgaaattttggaaacactga

SEQ ID NO: 256470 - DNA, 33 bp, Homo sapien
tagtgcctgatactgagattttggaaacactga

SEQ ID NO: 256471 - DNA, 33 bp, Homo sapien
ggtgacagtgttgataaacctgtcactacataa

SEQ ID NO: 256472 - DNA, 33 bp, Homo sapien
ggtgacagtgttgatacacctgtcactacataa

SEQ ID NO: 256473 - DNA, 33 bp, Homo sapien
tcattgcttataataaaatgagaggaaagagaa

SEQ ID NO: 256474 - DNA, 33 bp, Homo sapien
tcattgcttataataagatgagaggaaagagaa

SEQ ID NO: 256475 - DNA, 33 bp, Homo sapien
acaacatagtgtaataaaagttaccacacactg

SEQ ID NO: 256476 - DNA, 33 bp, Homo sapien
acaacatagtgtaatacaagttaccacacactg

SEQ ID NO: 256477 - DNA, 33 bp, Homo sapien
aagttcagtttatgaaataggtacagtaaaaaa

SEQ ID NO: 256478 - DNA, 33 bp, Homo sapien
aagttcagtttatgaattaggtacagtaaaaaa

SEQ ID NO: 256479 - DNA, 33 bp, Homo sapien
tgtaaggacttttgtacaaaccaatgcctatct

SEQ ID NO: 256480 - DNA, 33 bp, Homo sapien
tgtaaggacttttgtataaaccaatgcctatct

SEQ ID NO: 256481 - DNA, 33 bp, Homo sapien
cagctgttgatcctcaatagacatcttgcaccc

SEQ ID NO: 256482 - DNA, 33 bp, Homo sapien
cagctgttgatcctcagtagacatcttgcaccc

SEQ ID NO: 256483 - DNA, 33 bp, Homo sapien
ttctttcttcttcttcaatcatttcacagctgt

SEQ ID NO: 256484 - DNA, 33 bp, Homo sapien
ttctttcttcttcttcgatcatttcacagctgt

SEQ ID NO: 256485 - DNA, 33 bp, Homo sapien
gcacttacttggttcactatacactgggtaaag

SEQ ID NO: 256486 - DNA, 33 bp, Homo sapien
gcacttacttggttcattatacactgggtaaag

SEQ ID NO: 256487 - DNA, 33 bp, Homo sapien
tgaacacaaatgcaaacagctgatggaacaata

SEQ ID NO: 256488 - DNA, 33 bp, Homo sapien
tgaacacaaatgcaaagagctgatggaacaata

SEQ ID NO: 256489 - DNA, 33 bp, Homo sapien
attattctataaacaacaatggtatttgcagga

SEQ ID NO: 256490 - DNA, 33 bp, Homo sapien
attattctataaacaataatggtatttgcagga

SEQ ID NO: 256491 - DNA, 33 bp, Homo sapien
tggagagaaacataaacctggattacgtgcaca

SEQ ID NO: 256492 - DNA, 33 bp, Homo sapien
tggagagaaacataaatctggattacgtgcaca

SEQ ID NO: 256493 - DNA, 33 bp, Homo sapien
cgttcttttgtaagcaggtatttaaaactgttc

SEQ ID NO: 256494 - DNA, 33 bp, Homo sapien
cgttcttttgtaagcatgtatttaaaactgttc

SEQ ID NO: 256495 - DNA, 33 bp, Homo sapien
agacatatcactgggaacagaactatctatctt

SEQ ID NO: 256496 - DNA, 33 bp, Homo sapien
agacatatcactgggatcagaactatctatctt

SEQ ID NO: 256497 - DNA, 33 bp, Homo sapien
cctgcacagtagagtacagagatcaggatgttt

SEQ ID NO: 256498 - DNA, 33 bp, Homo sapien
cctgcacagtagagtagagagatcaggatgttt

SEQ ID NO: 256499 - DNA, 33 bp, Homo sapien
aaaataacacacttaaatccaattgtattaatt

SEQ ID NO: 256500 - DNA, 33 bp, Homo sapien
aaaataacacacttaagtccaattgtattaatt

SEQ ID NO: 256501 - DNA, 33 bp, Homo sapien
aaaaacaacacatctccactaccagtgctaacc

SEQ ID NO: 256502 - DNA, 33 bp, Homo sapien
aaaaacaacacatctctactaccagtgctaacc

SEQ ID NO: 256503 - DNA, 33 bp, Homo sapien
agttgtaggagttgttcaaatgttcctgatatt

SEQ ID NO: 256504 - DNA, 33 bp, Homo sapien
agttgtaggagttgtttaaatgttcctgatatt

SEQ ID NO: 256505 - DNA, 33 bp, Homo sapien
catttctgtaccctaacaacatctagctaagaa

SEQ ID NO: 256506 - DNA, 33 bp, Homo sapien
catttctgtaccctaataacatctagctaagaa

SEQ ID NO: 256507 - DNA, 33 bp, Homo sapien
ctcattttttaatataactctactatcaccatt

SEQ ID NO: 256508 - DNA, 33 bp, Homo sapien
ctcattttttaatatacctctactatcaccatt

SEQ ID NO: 256509 - DNA, 33 bp, Homo sapien
gaacaaactattgatacgtgctatgacaagcat

SEQ ID NO: 256510 - DNA, 33 bp, Homo sapien
gaacaaactattgatatgtgctatgacaagcat

SEQ ID NO: 256511 - DNA, 33 bp, Homo sapien
actgaattcacagacaagaaaagactaactgct

SEQ ID NO: 256512 - DNA, 33 bp, Homo sapien
actgaattcacagacatgaaaagactaactgct

SEQ ID NO: 256513 - DNA, 33 bp, Homo sapien
tagttctgtaacatcacatccatacacaaattc

SEQ ID NO: 256514 - DNA, 33 bp, Homo sapien
tagttctgtaacatcatatccatacacaaattc

SEQ ID NO: 256515 - DNA, 33 bp, Homo sapien
acatatacttatgcaacgcttattaagcaggta

SEQ ID NO: 256516 - DNA, 33 bp, Homo sapien
acatatacttatgcaatgcttattaagcaggta

SEQ ID NO: 256517 - DNA, 33 bp, Homo sapien
atggggtctgttatgaagcattataccacctgg

SEQ ID NO: 256518 - DNA, 33 bp, Homo sapien
atggggtctgttatgaggcattataccacctgg

SEQ ID NO: 256519 - DNA, 33 bp, Homo sapien; identical to SEQ ID NO: 256517

SEQ ID NO: 256520 - DNA, 33 bp, Homo sapien; identical to SEQ ID NO: 256518

SEQ ID NO: 256521 - DNA, 33 bp, Homo sapien
gaattgtatacttttcaaccacggtgcactctt

SEQ ID NO: 256522 - DNA, 33 bp, Homo sapien
gaattgtatacttttccaccacggtgcactctt

SEQ ID NO: 256523 - DNA, 33 bp, Homo sapien
ttacttttcttctcaaggcacatattaccattt

SEQ ID NO: 256524 - DNA, 33 bp, Homo sapien
ttacttttcttctcaatgcacatattaccattt

SEQ ID NO: 256525 - DNA, 33 bp, Homo sapien; identical to SEQ ID NO: 256523

SEQ ID NO: 256526 - DNA, 33 bp, Homo sapien; identical to SEQ ID NO: 256524

SEQ ID NO: 256527 - DNA, 33 bp, Homo sapien
agacctataacaagtacggagaatagaccggca

SEQ ID NO: 256528 - DNA, 33 bp, Homo sapien
agacctataacaagtatggagaatagaccggca

SEQ ID NO: 256529 - DNA, 33 bp, Homo sapien
gatactttttttggcacggagaagaaatgcatt

SEQ ID NO: 256530 - DNA, 33 bp, Homo sapien
gatactttttttggcatggagaagaaatgcatt

SEQ ID NO: 256531 - DNA, 33 bp, Homo sapien
gtttcaatgaaccctaagttctgtggctgccac

SEQ ID NO: 256532 - DNA, 33 bp, Homo sapien
gtttcaatgaaccctaggttctgtggctgccac

SEQ ID NO: 256533 - DNA, 33 bp, Homo sapien
ttgatttagtgagacgaaagcagaaaaaatagc

SEQ ID NO: 256534 - DNA, 33 bp, Homo sapien
ttgatttagtgagacggaagcagaaaaaatagc

SEQ ID NO: 256535 - DNA, 33 bp, Homo sapien; identical to SEQ ID NO: 256533

SEQ ID NO: 256536 - DNA, 33 bp, Homo sapien; identical to SEQ ID NO: 256534

SEQ ID NO: 256537 - DNA, 33 bp, Homo sapien
atttaaaaatcagcccagattccctatgtttta

SEQ ID NO: 256538 - DNA, 33 bp, Homo sapien
atttaaaaatcagcccggattccctatgtttta

SEQ ID NO: 256539 - DNA, 33 bp, Homo sapien
atgggttggatgcttacgcactaggcaacactt

SEQ ID NO: 256540 - DNA, 33 bp, Homo sapien
atgggttggatgcttaggcactaggcaacactt

SEQ ID NO: 256541 - DNA, 33 bp, Homo sapien
aaggagaaaatagacacagaacagcttgccttt

SEQ ID NO: 256542 - DNA, 33 bp, Homo sapien
aaggagaaaatagacatagaacagcttgccttt

SEQ ID NO: 256543 - DNA, 33 bp, Homo sapien
ctaactacatgtcttacgcttcctaaaatttta

SEQ ID NO: 256544 - DNA, 33 bp, Homo sapien
ctaactacatgtcttatgcttcctaaaatttta

SEQ ID NO: 256545 - DNA, 33 bp, Homo sapien
gcataggtggacctaaaggcaaaactgaaggtt

SEQ ID NO: 256546 - DNA, 33 bp, Homo sapien
gcataggtggacctaagggcaaaactgaaggtt

SEQ ID NO: 256547 - DNA, 33 bp, Homo sapien
aaagactaaaggcagaccaagctatcatgctga

SEQ ID NO: 256548 - DNA, 33 bp, Homo sapien
aaagactaaaggcagatcaagctatcatgctga

SEQ ID NO: 256549 - DNA, 33 bp, Homo sapien; identical to SEQ ID NO: 256547

SEQ ID NO: 256550 - DNA, 33 bp, Homo sapien; identical to SEQ ID NO: 256548

SEQ ID NO: 256551 - DNA, 33 bp, Homo sapien
tcgatgaatgccttcaaatcttccgggatgaag

SEQ ID NO: 256552 - DNA, 33 bp, Homo sapien
tcgatgaatgccttcagatcttccgggatgaag

SEQ ID NO: 256553 - DNA, 33 bp, Homo sapien
tttagaagttatcacaagactaaatgaactcat

SEQ ID NO: 256554 - DNA, 33 bp, Homo sapien
tttagaagttatcacaggactaaatgaactcat

SEQ ID NO: 256555 - DNA, 33 bp, Homo sapien; identical to SEQ ID NO: 256553

SEQ ID NO: 256556 - DNA, 33 bp, Homo sapien; identical to SEQ ID NO: 256554

SEQ ID NO: 256557 - DNA, 33 bp, Homo sapien
cagaaacagagagaaacgatgaggagcagttcg

SEQ ID NO: 256558 - DNA, 33 bp, Homo sapien
cagaaacagagagaaatgatgaggagcagttcg

SEQ ID NO: 256559 - DNA, 33 bp, Homo sapien; identical to SEQ ID NO: 256557

SEQ ID NO: 256560 - DNA, 33 bp, Homo sapien; identical to SEQ ID NO: 256558

SEQ ID NO: 256561 - DNA, 33 bp, Homo sapien
cagaggctactattcacggactatccagtctaa

SEQ ID NO: 256562 - DNA, 33 bp, Homo sapien
cagaggctactattcatggactatccagtctaa

SEQ ID NO: 256563 - DNA, 33 bp, Homo sapien; identical to SEQ ID NO: 256561

SEQ ID NO: 256564 - DNA, 33 bp, Homo sapien; identical to SEQ ID NO: 256562

SEQ ID NO: 256565 - DNA, 33 bp, Homo sapien
ttgatttttgtggatgcattaggagcaatgttt

SEQ ID NO: 256566 - DNA, 33 bp, Homo sapien
ttgatttttgtggatgtattaggagcaatgttt

SEQ ID NO: 256567 - DNA, 33 bp, Homo sapien
agccacagttagaaacaaattttggcctactat

SEQ ID NO: 256568 - DNA, 33 bp, Homo sapien
agccacagttagaaaccaattttggcctactat

SEQ ID NO: 256569 - DNA, 33 bp, Homo sapien
ttaagattgattagaaataaacatcttttgtgg

SEQ ID NO: 256570 - DNA, 33 bp, Homo sapien
ttaagattgattagaagtaaacatcttttgtgg

SEQ ID NO: 256571 - DNA, 33 bp, Homo sapien
catattctatcactggacaaagtaaaatgtaaa

SEQ ID NO: 256572 - DNA, 33 bp, Homo sapien
catattctatcactgggcaaagtaaaatgtaaa

SEQ ID NO: 256573 - DNA, 33 bp, Homo sapien
ttctggaagcagaaaaatagcaggaaatatact

SEQ ID NO: 256574 - DNA, 33 bp, Homo sapien
ttctggaagcagaaaactagcaggaaatatact

SEQ ID NO: 256575 - DNA, 33 bp, Homo sapien; identical to SEQ ID NO: 256573

SEQ ID NO: 256576 - DNA, 33 bp, Homo sapien; identical to SEQ ID NO: 256574

SEQ ID NO: 256577 - DNA, 33 bp, Homo sapien
tctgcatcatagaaaaggtaaagaattaagtgc

SEQ ID NO: 256578 - DNA, 33 bp, Homo sapien
tctgcatcatagaaaatgtaaagaattaagtgc

SEQ ID NO: 256579 - DNA, 33 bp, Homo sapien
caggtcgttagtctcaaataggtccacggggtt

SEQ ID NO: 256580 - DNA, 33 bp, Homo sapien
caggtcgttagtctcagataggtccacggggtt

SEQ ID NO: 256581 - DNA, 33 bp, Homo sapien; identical to SEQ ID NO: 256579

SEQ ID NO: 256582 - DNA, 33 bp, Homo sapien; identical to SEQ ID NO: 256580

SEQ ID NO: 256583 - DNA, 33 bp, Homo sapien
aagcttcagaaacctacggcacatgaatataag

SEQ ID NO: 256584 - DNA, 33 bp, Homo sapien
aagcttcagaaacctatggcacatgaatataag

SEQ ID NO: 256585 - DNA, 33 bp, Homo sapien
gaaggactagcctacaatgtagaaacacctgga

SEQ ID NO: 256586 - DNA, 33 bp, Homo sapien
gaaggactagcctacagtgtagaaacacctgga

SEQ ID NO: 256587 - DNA, 33 bp, Homo sapien
acctgaatggccttgacaaactcagctttctgt

SEQ ID NO: 256588 - DNA, 33 bp, Homo sapien
acctgaatggccttgagaaactcagctttctgt

SEQ ID NO: 256589 - DNA, 33 bp, Homo sapien
gctcctctgtgagtaaaaaatttggtttatctg

SEQ ID NO: 256590 - DNA, 33 bp, Homo sapien
gctcctctgtgagtaataaatttggtttatctg

SEQ ID NO: 256591 - DNA, 33 bp, Homo sapien
cccaggagtgggccaacacaaatttaaatagag

SEQ ID NO: 256592 - DNA, 33 bp, Homo sapien
cccaggagtgggccaatacaaatttaaatagag

SEQ ID NO: 256593 - DNA, 33 bp, Homo sapien
agagaaattgctattacgcaggaatctcttaac

SEQ ID NO: 256594 - DNA, 33 bp, Homo sapien
agagaaattgctattatgcaggaatctcttaac

SEQ ID NO: 256595 - DNA, 33 bp, Homo sapien
attttcccagtgactacatcaatgagtgtacaa

SEQ ID NO: 256596 - DNA, 33 bp, Homo sapien
attttcccagtgactatatcaatgagtgtacaa

SEQ ID NO: 256597 - DNA, 33 bp, Homo sapien; identical to SEQ ID NO: 256595

SEQ ID NO: 256598 - DNA, 33 bp, Homo sapien; identical to SEQ ID NO: 256596

SEQ ID NO: 256599 - DNA, 33 bp, Homo sapien
aggctcatggctggaacctgtgttctcactctt

SEQ ID NO: 256600 - DNA, 33 bp, Homo sapien
aggctcatggctggaatctgtgttctcactctt

SEQ ID NO: 256601 - DNA, 33 bp, Homo sapien
tgaagccattccagaaacctttgtagcagccct

SEQ ID NO: 256602 - DNA, 33 bp, Homo sapien
tgaagccattccagaagcctttgtagcagccct

SEQ ID NO: 256603 - DNA, 33 bp, Homo sapien
ggtgggtctatgaaaccggggcctgcaaaatgg

SEQ ID NO: 256604 - DNA, 33 bp, Homo sapien
ggtgggtctatgaaactggggcctgcaaaatgg

SEQ ID NO: 256605 - DNA, 33 bp, Homo sapien
ttcagatatttgcataaaaaggagccgagtgct

SEQ ID NO: 256606 - DNA, 33 bp, Homo sapien
ttcagatatttgcatagaaaggagccgagtgct

SEQ ID NO: 256607 - DNA, 33 bp, Homo sapien
aatgagaagcagagttaaaacatatgcaaaatt

SEQ ID NO: 256608 - DNA, 33 bp, Homo sapien
aatgagaagcagagtttaaacatatgcaaaatt

SEQ ID NO: 256609 - DNA, 33 bp, Homo sapien
atgaaaagaaggtgaactgatgtgtgtgagata

SEQ ID NO: 256610 - DNA, 33 bp, Homo sapien
atgaaaagaaggtgaattgatgtgtgtgagata

SEQ ID NO: 256611 - DNA, 33 bp, Homo sapien
ttctgcacaacgcttacagccccaatttaattt

SEQ ID NO: 256612 - DNA, 33 bp, Homo sapien
ttctgcacaacgcttatagccccaatttaattt

SEQ ID NO: 256613 - DNA, 33 bp, Homo sapien
acataaattaataaacaccgtagctttgaactc

SEQ ID NO: 256614 - DNA, 33 bp, Homo sapien
acataaattaataaaccccgtagctttgaactc

SEQ ID NO: 256615 - DNA, 33 bp, Homo sapien
aaacagaaccaaaactcaacgtcctccttatgt

SEQ ID NO: 256616 - DNA, 33 bp, Homo sapien
aaacagaaccaaaactgaacgtcctccttatgt

SEQ ID NO: 256617 - DNA, 33 bp, Homo sapien
ctttaaaaattcatgcacatcctattgtgcaaa

SEQ ID NO: 256618 - DNA, 33 bp, Homo sapien
ctttaaaaattcatgcgcatcctattgtgcaaa

SEQ ID NO: 256619 - DNA, 33 bp, Homo sapien
cgataagtggtactgacagatcacaggaaatac

SEQ ID NO: 256620 - DNA, 33 bp, Homo sapien
cgataagtggtactgagagatcacaggaaatac

SEQ ID NO: 256621 - DNA, 33 bp, Homo sapien
ctggttaatgagattgaatatcttttcaaatat

SEQ ID NO: 256622 - DNA, 33 bp, Homo sapien
ctggttaatgagattgtatatcttttcaaatat

SEQ ID NO: 256623 - DNA, 33 bp, Homo sapien
gccaaataaccaagtccgaataaccactatatg

SEQ ID NO: 256624 - DNA, 33 bp, Homo sapien
gccaaataaccaagtcggaataaccactatatg

SEQ ID NO: 256625 - DNA, 33 bp, Homo sapien; identical to SEQ ID NO: 256623

SEQ ID NO: 256626 - DNA, 33 bp, Homo sapien; identical to SEQ ID NO: 256624

SEQ ID NO: 256627 - DNA, 33 bp, Homo sapien
ttactttctcttaagacactttcatggtgacaa

SEQ ID NO: 256628 - DNA, 33 bp, Homo sapien
ttactttctcttaagatactttcatggtgacaa

SEQ ID NO: 256629 - DNA, 33 bp, Homo sapien
gtttttgagaatggcccggaatgaatttttagt

SEQ ID NO: 256630 - DNA, 33 bp, Homo sapien
gtttttgagaatggcctggaatgaatttttagt

SEQ ID NO: 256631 - DNA, 33 bp, Homo sapien
gaggctccaggccctcgaagtcctacaggcact

SEQ ID NO: 256632 - DNA, 33 bp, Homo sapien
gaggctccaggccctctaagtcctacaggcact

SEQ ID NO: 256633 - DNA, 33 bp, Homo sapien
atttaacctgctaacagaatgtacctacagtaa

SEQ ID NO: 256634 - DNA, 33 bp, Homo sapien
atttaacctgctaacataatgtacctacagtaa

SEQ ID NO: 256635 - DNA, 33 bp, Homo sapien
gaggcaatgtattgagaaacacacctaagaaac

SEQ ID NO: 256636 - DNA, 33 bp, Homo sapien
gaggcaatgtattgaggaacacacctaagaaac

SEQ ID NO: 256637 - DNA, 33 bp, Homo sapien
gcatgatttcccagacagcagagactttgtctt

SEQ ID NO: 256638 - DNA, 33 bp, Homo sapien
gcatgatttcccagacggcagagactttgtctt

SEQ ID NO: 256639 - DNA, 33 bp, Homo sapien
gtagtggcccaggtccacgctgttcttggcagc

SEQ ID NO: 256640 - DNA, 33 bp, Homo sapien
gtagtggcccaggtccgcgctgttcttggcagc

SEQ ID NO: 256641 - DNA, 33 bp, Homo sapien
ggagcctgccagaagggagtgagcttgtgctga

SEQ ID NO: 256642 - DNA, 33 bp, Homo sapien
ggagcctgccagaaggtagtgagcttgtgctga

SEQ ID NO: 256643 - DNA, 33 bp, Homo sapien
gttgccgagatgttacagcatgaaccctcgcag

SEQ ID NO: 256644 - DNA, 33 bp, Homo sapien
gttgccgagatgttacggcatgaaccctcgcag

SEQ ID NO: 256645 - DNA, 33 bp, Homo sapien
aacctgtcctcaaaccactgggaaggcaaaggc

SEQ ID NO: 256646 - DNA, 33 bp, Homo sapien
aacctgtcctcaaacccctgggaaggcaaaggc

SEQ ID NO: 256647 - DNA, 33 bp, Homo sapien
cacacaagtgtccacaagctagagtcatgccag

SEQ ID NO: 256648 - DNA, 33 bp, Homo sapien
cacacaagtgtccacaggctagagtcatgccag

SEQ ID NO: 256649 - DNA, 33 bp, Homo sapien
agcctctgcaaaatgaaagccccagcaggaaac

SEQ ID NO: 256650 - DNA, 33 bp, Homo sapien
agcctctgcaaaatgagagccccagcaggaaac

SEQ ID NO: 256651 - DNA, 33 bp, Homo sapien
tgctttattaggcacactggtgacctgcagaca

SEQ ID NO: 256652 - DNA, 33 bp, Homo sapien
tgctttattaggcacattggtgacctgcagaca

SEQ ID NO: 256653 - DNA, 33 bp, Homo sapien
ctaaaggagtaagagagcacagaaaagttgtaa

SEQ ID NO: 256654 - DNA, 33 bp, Homo sapien
ctaaaggagtaagagatcacagaaaagttgtaa

SEQ ID NO: 256655 - DNA, 33 bp, Homo sapien; identical to SEQ ID NO: 256653

SEQ ID NO: 256656 - DNA, 33 bp, Homo sapien; identical to SEQ ID NO: 256654

SEQ ID NO: 256657 - DNA, 33 bp, Homo sapien
tgctggttctctttgccagttttggtggggcag

SEQ ID NO: 256658 - DNA, 33 bp, Homo sapien
tgctggttctctttgctagttttggtggggcag

SEQ ID NO: 256659 - DNA, 33 bp, Homo sapien
ggtaactgtgagtcagaaatcccactgtgaccc

SEQ ID NO: 256660 - DNA, 33 bp, Homo sapien
ggtaactgtgagtcaggaatcccactgtgaccc

SEQ ID NO: 256661 - DNA, 33 bp, Homo sapien
gaagtaaccttgtaaaaagcaacaatttataac

SEQ ID NO: 256662 - DNA, 33 bp, Homo sapien
gaagtaaccttgtaaacagcaacaatttataac

SEQ ID NO: 256663 - DNA, 33 bp, Homo sapien
gccaaatatagtcaatcaccccgagattttcag

SEQ ID NO: 256664 - DNA, 33 bp, Homo sapien
gccaaatatagtcaatgaccccgagattttcag

SEQ ID NO: 256665 - DNA, 33 bp, Homo sapien
aaacacttaactctaccaggctgtggggctgta

SEQ ID NO: 256666 - DNA, 33 bp, Homo sapien
aaacacttaactctactaggctgtggggctgta

SEQ ID NO: 256667 - DNA, 33 bp, Homo sapien
attccatgagcagataacttaaagtaagccttt

SEQ ID NO: 256668 - DNA, 33 bp, Homo sapien
attccatgagcagataccttaaagtaagccttt

SEQ ID NO: 256669 - DNA, 33 bp, Homo sapien
aatggaggctgcttaaacatacctcacatacat

SEQ ID NO: 256670 - DNA, 33 bp, Homo sapien
aatggaggctgcttaatcatacctcacatacat

SEQ ID NO: 256671 - DNA, 33 bp, Homo sapien
gacttaacaactgaagcatggatgaatgggaat

SEQ ID NO: 256672 - DNA, 33 bp, Homo sapien
gacttaacaactgaagtatggatgaatgggaat

SEQ ID NO: 256673 - DNA, 33 bp, Homo sapien
aaagatgtccaataggcaaaagctcaatcagaa

SEQ ID NO: 256674 - DNA, 33 bp, Homo sapien
aaagatgtccaataggtaaaagctcaatcagaa

SEQ ID NO: 256675 - DNA, 33 bp, Homo sapien
aaatcactgatgcagacatgctcttctctgacc

SEQ ID NO: 256676 - DNA, 33 bp, Homo sapien
aaatcactgatgcagatatgctcttctctgacc

SEQ ID NO: 256677 - DNA, 33 bp, Homo sapien
tacagttatatttcaaaagcaaaattagaaaat

SEQ ID NO: 256678 - DNA, 33 bp, Homo sapien
tacagttatatttcaagagcaaaattagaaaat

SEQ ID NO: 256679 - DNA, 33 bp, Homo sapien
ctctacctttccactcacatctctgtttattta

SEQ ID NO: 256680 - DNA, 33 bp, Homo sapien
ctctacctttccactcgcatctctgtttattta

SEQ ID NO: 256681 - DNA, 33 bp, Homo sapien
atgtgagaggagggtaaaagaatcttcacttat

SEQ ID NO: 256682 - DNA, 33 bp, Homo sapien
atgtgagaggagggtagaagaatcttcacttat

SEQ ID NO: 256683 - DNA, 33 bp, Homo sapien; identical to SEQ ID NO: 256681

SEQ ID NO: 256684 - DNA, 33 bp, Homo sapien; identical to SEQ ID NO: 256682

SEQ ID NO: 256685 - DNA, 33 bp, Homo sapien
cttctttggtgatccccggcattctcatcagac

SEQ ID NO: 256686 - DNA, 33 bp, Homo sapien
cttctttggtgatccctggcattctcatcagac

SEQ ID NO: 256687 - DNA, 33 bp, Homo sapien
taatacagctataaataagggtgtacaaataat

SEQ ID NO: 256688 - DNA, 33 bp, Homo sapien
taatacagctataaatgagggtgtacaaataat

SEQ ID NO: 256689 - DNA, 33 bp, Homo sapien
agatagatggtggtgacggctttgcaacattat

SEQ ID NO: 256690 - DNA, 33 bp, Homo sapien
agatagatggtggtgatggctttgcaacattat

SEQ ID NO: 256691 - DNA, 33 bp, Homo sapien
ttgactaaatagtgccccagttgcttgcaagag

SEQ ID NO: 256692 - DNA, 33 bp, Homo sapien
ttgactaaatagtgcctcagttgcttgcaagag

SEQ ID NO: 256693 - DNA, 33 bp, Homo sapien
tctgatgaattttggaaactattatgagctaac

SEQ ID NO: 256694 - DNA, 33 bp, Homo sapien
tctgatgaattttggagactattatgagctaac

SEQ ID NO: 256695 - DNA, 33 bp, Homo sapien
atctactaaattctgaacacttaatcataacct

SEQ ID NO: 256696 - DNA, 33 bp, Homo sapien
atctactaaattctgagcacttaatcataacct

SEQ ID NO: 256697 - DNA, 33 bp, Homo sapien
atcatcaagtgatgatcaaacaggtgatatgtt

SEQ ID NO: 256698 - DNA, 33 bp, Homo sapien
atcatcaagtgatgattaaacaggtgatatgtt

SEQ ID NO: 256699 - DNA, 33 bp, Homo sapien
taaagcctggatcacaacacatctctttatagc

SEQ ID NO: 256700 - DNA, 33 bp, Homo sapien
taaagcctggatcacagcacatctctttatagc

SEQ ID NO: 256701 - DNA, 33 bp, Homo sapien
ttgatctgcatgatcgcaccgaatctacctcct

SEQ ID NO: 256702 - DNA, 33 bp, Homo sapien
ttgatctgcatgatcgtaccgaatctacctcct

SEQ ID NO: 256703 - DNA, 33 bp, Homo sapien
aacaaaaggcatgatactactgatgtcaaataa

SEQ ID NO: 256704 - DNA, 33 bp, Homo sapien
aacaaaaggcatgatattactgatgtcaaataa

SEQ ID NO: 256705 - DNA, 33 bp, Homo sapien
gatagtagaaatgccaaaattatcttattttct

SEQ ID NO: 256706 - DNA, 33 bp, Homo sapien
gatagtagaaatgccacaattatcttattttct

SEQ ID NO: 256707 - DNA, 33 bp, Homo sapien
gatggagcctgatgaacaggaaaggcagacagc

SEQ ID NO: 256708 - DNA, 33 bp, Homo sapien
gatggagcctgatgaataggaaaggcagacagc

SEQ ID NO: 256709 - DNA, 33 bp, Homo sapien; identical to SEQ ID NO: 256707

SEQ ID NO: 256710 - DNA, 33 bp, Homo sapien; identical to SEQ ID NO: 256708

SEQ ID NO: 256711 - DNA, 33 bp, Homo sapien
gggtcatggccacggcaaaactgaagtccccca

SEQ ID NO: 256712 - DNA, 33 bp, Homo sapien
gggtcatggccacggcgaaactgaagtccccca

SEQ ID NO: 256713 - DNA, 33 bp, Homo sapien
atgtgtgtccacaagcaaatgtaagtgtcatga

SEQ ID NO: 256714 - DNA, 33 bp, Homo sapien
atgtgtgtccacaagcgaatgtaagtgtcatga

SEQ ID NO: 256715 - DNA, 33 bp, Homo sapien
ttccttctccctctatcagtcatgagtctttat

SEQ ID NO: 256716 - DNA, 33 bp, Homo sapien
ttccttctccctctatgagtcatgagtctttat

SEQ ID NO: 256717 - DNA, 33 bp, Homo sapien
gaaatttggcaaaatccgagagtcaaggccaga

SEQ ID NO: 256718 - DNA, 33 bp, Homo sapien
gaaatttggcaaaatctgagagtcaaggccaga

SEQ ID NO: 256719 - DNA, 33 bp, Homo sapien; identical to SEQ ID NO: 256717

SEQ ID NO: 256720 - DNA, 33 bp, Homo sapien; identical to SEQ ID NO: 256718

SEQ ID NO: 256721 - DNA, 33 bp, Homo sapien
tatgccatcacagggacgctgtcatcatgctcc

SEQ ID NO: 256722 - DNA, 33 bp, Homo sapien
tatgccatcacagggatgctgtcatcatgctcc

SEQ ID NO: 256723 - DNA, 33 bp, Homo sapien
gtggctttcaaaaagacgggtgaagcttgagaa

SEQ ID NO: 256724 - DNA, 33 bp, Homo sapien
gtggctttcaaaaagaggggtgaagcttgagaa

SEQ ID NO: 256725 - DNA, 33 bp, Homo sapien; identical to SEQ ID NO: 256723

SEQ ID NO: 256726 - DNA, 33 bp, Homo sapien; identical to SEQ ID NO: 256724

SEQ ID NO: 256727 - DNA, 33 bp, Homo sapien
ctgttgaaatcatgacacctaaggtgacggttt

SEQ ID NO: 256728 - DNA, 33 bp, Homo sapien
ctgttgaaatcatgacccctaaggtgacggttt

SEQ ID NO: 256729 - DNA, 33 bp, Homo sapien
agacgccaagcaaggaacccttgaaacctatgc

SEQ ID NO: 256730 - DNA, 33 bp, Homo sapien
agacgccaagcaaggagcccttgaaacctatgc

SEQ ID NO: 256731 - DNA, 33 bp, Homo sapien
aaacctatgctgcctacgagaagaggcccctgg

SEQ ID NO: 256732 - DNA, 33 bp, Homo sapien
aaacctatgctgcctatgagaagaggcccctgg

SEQ ID NO: 256733 - DNA, 33 bp, Homo sapien
tgcagcatctggagcagatgaagccacaggatg

SEQ ID NO: 256734 - DNA, 33 bp, Homo sapien
tgcagcatctggagcatatgaagccacaggatg

SEQ ID NO: 256735 - DNA, 33 bp, Homo sapien
cagctgtcctggtcaaagtgaggcctgtcacct

SEQ ID NO: 256736 - DNA, 33 bp, Homo sapien
cagctgtcctggtcaaggtgaggcctgtcacct

SEQ ID NO: 256737 - DNA, 33 bp, Homo sapien
ctgggacttgagccacacatttgggctgctcct

SEQ ID NO: 256738 - DNA, 33 bp, Homo sapien
ctgggacttgagccacgcatttgggctgctcct

SEQ ID NO: 256739 - DNA, 33 bp, Homo sapien; identical to SEQ ID NO: 256737

SEQ ID NO: 256740 - DNA, 33 bp, Homo sapien; identical to SEQ ID NO: 256738

SEQ ID NO: 256741 - DNA, 33 bp, Homo sapien
tgagcgatgggaatcacgtatggatcagagcca

SEQ ID NO: 256742 - DNA, 33 bp, Homo sapien
tgagcgatgggaatcatgtatggatcagagcca

SEQ ID NO: 256743 - DNA, 33 bp, Homo sapien; identical to SEQ ID NO: 256741

SEQ ID NO: 256744 - DNA, 33 bp, Homo sapien; identical to SEQ ID NO: 256742

SEQ ID NO: 256745 - DNA, 33 bp, Homo sapien
actaagatttcaaaaacagtgagctatagtgag

SEQ ID NO: 256746 - DNA, 33 bp, Homo sapien
actaagatttcaaaaatagtgagctatagtgag

SEQ ID NO: 256747 - DNA, 33 bp, Homo sapien; identical to SEQ ID NO: 256745

SEQ ID NO: 256748 - DNA, 33 bp, Homo sapien; identical to SEQ ID NO: 256746

SEQ ID NO: 256749 - DNA, 33 bp, Homo sapien
tttcgtctccttcaagaatccgccctgaagagg

SEQ ID NO: 256750 - DNA, 33 bp, Homo sapien
tttcgtctccttcaagtatccgccctgaagagg

SEQ ID NO: 256751 - DNA, 33 bp, Homo sapien
tatgtctttcatttgcacatacatgtatttctt

SEQ ID NO: 256752 - DNA, 33 bp, Homo sapien
tatgtctttcatttgcgcatacatgtatttctt

SEQ ID NO: 256753 - DNA, 33 bp, Homo sapien
gccggagactgcgtaacccctaaactgtaattt

SEQ ID NO: 256754 - DNA, 33 bp, Homo sapien
gccggagactgcgtaatccctaaactgtaattt

SEQ ID NO: 256755 - DNA, 33 bp, Homo sapien
tataaaattaatggtaagatagcaagacaaaaa

SEQ ID NO: 256756 - DNA, 33 bp, Homo sapien
tataaaattaatggtacgatagcaagacaaaaa

SEQ ID NO: 256757 - DNA, 33 bp, Homo sapien
taacatgagcgtgtaacatactgttgatatatg

SEQ ID NO: 256758 - DNA, 33 bp, Homo sapien
taacatgagcgtgtaagatactgttgatatatg

SEQ ID NO: 256759 - DNA, 33 bp, Homo sapien
cgtgttaaattacaaaagacattcttcatagaa

SEQ ID NO: 256760 - DNA, 33 bp, Homo sapien
cgtgttaaattacaaaggacattcttcatagaa

SEQ ID NO: 256761 - DNA, 33 bp, Homo sapien
acaccataaatataaaagcagctattaagatgt

SEQ ID NO: 256762 - DNA, 33 bp, Homo sapien
acaccataaatataaatgcagctattaagatgt

SEQ ID NO: 256763 - DNA, 33 bp, Homo sapien; identical to SEQ ID NO: 256761

SEQ ID NO: 256764 - DNA, 33 bp, Homo sapien; identical to SEQ ID NO: 256762

SEQ ID NO: 256765 - DNA, 33 bp, Homo sapien
tttagtgtagctactgcaatcaagcactagtat

SEQ ID NO: 256766 - DNA, 33 bp, Homo sapien
tttagtgtagctactggaatcaagcactagtat

SEQ ID NO: 256767 - DNA, 33 bp, Homo sapien
acatgatgaaatcacacctctacccaaaaatac

SEQ ID NO: 256768 - DNA, 33 bp, Homo sapien
acatgatgaaatcacatctctacccaaaaatac

SEQ ID NO: 256769 - DNA, 33 bp, Homo sapien
aatatgcaatggaatacatggccacacgaagga

SEQ ID NO: 256770 - DNA, 33 bp, Homo sapien
aatatgcaatggaatatatggccacacgaagga

SEQ ID NO: 256771 - DNA, 33 bp, Homo sapien
aaaaaagtccaaagaacaggtagatctgtagag

SEQ ID NO: 256772 - DNA, 33 bp, Homo sapien
aaaaaagtccaaagaataggtagatctgtagag

SEQ ID NO: 256773 - DNA, 33 bp, Homo sapien
aacatccacatttctactaacagcctgttgaag

SEQ ID NO: 256774 - DNA, 33 bp, Homo sapien
aacatccacatttctagtaacagcctgttgaag

SEQ ID NO: 256775 - DNA, 33 bp, Homo sapien
aagggtgctgtgggggaaaatggagttttcatt

SEQ ID NO: 256776 - DNA, 33 bp, Homo sapien
aagggtgctgtggggggaaatggagttttcatt

SEQ ID NO: 256777 - DNA, 33 bp, Homo sapien
ccaccatgctcagttcaattttagaacattttc

SEQ ID NO: 256778 - DNA, 33 bp, Homo sapien
ccaccatgctcagttcgattttagaacattttc

SEQ ID NO: 256779 - DNA, 33 bp, Homo sapien
aaattgattttgataacgctgcacaactcaatg

SEQ ID NO: 256780 - DNA, 33 bp, Homo sapien
aaattgattttgataatgctgcacaactcaatg

SEQ ID NO: 256781 - DNA, 33 bp, Homo sapien
gcctcccaagtgtgtgcagaaagcacatggaac

SEQ ID NO: 256782 - DNA, 33 bp, Homo sapien
gcctcccaagtgtgtgtagaaagcacatggaac

SEQ ID NO: 256783 - DNA, 33 bp, Homo sapien
gggctgtcacctgtgaagattgtgtcctcacgg

SEQ ID NO: 256784 - DNA, 33 bp, Homo sapien
gggctgtcacctgtgacgattgtgtcctcacgg

SEQ ID NO: 256785 - DNA, 33 bp, Homo sapien
gggagaatggagaaaaactgaggaccccatctt

SEQ ID NO: 256786 - DNA, 33 bp, Homo sapien
gggagaatggagaaaagctgaggaccccatctt

SEQ ID NO: 256787 - DNA, 33 bp, Homo sapien
ggaggaagctgtgaaacggcatggaggcttcaa

SEQ ID NO: 256788 - DNA, 33 bp, Homo sapien
ggaggaagctgtgaaagggcatggaggcttcaa

SEQ ID NO: 256789 - DNA, 33 bp, Homo sapien
gggaagacagaaaggcagagggaccattctgac

SEQ ID NO: 256790 - DNA, 33 bp, Homo sapien
gggaagacagaaaggccgagggaccattctgac

SEQ ID NO: 256791 - DNA, 33 bp, Homo sapien
ggtcttattctgttaacgcaggctagagtgcag

SEQ ID NO: 256792 - DNA, 33 bp, Homo sapien
ggtcttattctgttaatgcaggctagagtgcag

SEQ ID NO: 256793 - DNA, 33 bp, Homo sapien
ttgtctctccacccccagagcaaataactcctc

SEQ ID NO: 256794 - DNA, 33 bp, Homo sapien
ttgtctctccacccccggagcaaataactcctc

SEQ ID NO: 256795 - DNA, 33 bp, Homo sapien
aagaaacaatcaaagcaagataatttgcagttt

SEQ ID NO: 256796 - DNA, 33 bp, Homo sapien
aagaaacaatcaaagccagataatttgcagttt

SEQ ID NO: 256797 - DNA, 33 bp, Homo sapien; identical to SEQ ID NO: 256795

SEQ ID NO: 256798 - DNA, 33 bp, Homo sapien; identical to SEQ ID NO: 256796

SEQ ID NO: 256799 - DNA, 33 bp, Homo sapien
ggctatcttcacaaaaaagagtaaagtaagcaa

SEQ ID NO: 256800 - DNA, 33 bp, Homo sapien
ggctatcttcacaaaagagagtaaagtaagcaa

SEQ ID NO: 256801 - DNA, 33 bp, Homo sapien; identical to SEQ ID NO: 256799

SEQ ID NO: 256802 - DNA, 33 bp, Homo sapien; identical to SEQ ID NO: 256800

SEQ ID NO: 256803 - DNA, 33 bp, Homo sapien
gaatcaacagctaaacccaagagcgagaggctt

SEQ ID NO: 256804 - DNA, 33 bp, Homo sapien
gaatcaacagctaaactcaagagcgagaggctt

SEQ ID NO: 256805 - DNA, 33 bp, Homo sapien
gcagcaggggctcgccacctcatcctccaggtg

SEQ ID NO: 256806 - DNA, 33 bp, Homo sapien
gcagcaggggctcgccgcctcatcctccaggtg

SEQ ID NO: 256807 - DNA, 33 bp, Homo sapien
gccgtggctacctttccctaaatggacctgtgg

SEQ ID NO: 256808 - DNA, 33 bp, Homo sapien
gccgtggctacctttctctaaatggacctgtgg

SEQ ID NO: 256809 - DNA, 33 bp, Homo sapien
cctgcaggcaaagctaagcagtacgatacacag

SEQ ID NO: 256810 - DNA, 33 bp, Homo sapien
cctgcaggcaaagctaggcagtacgatacacag

SEQ ID NO: 256811 - DNA, 33 bp, Homo sapien
tgtactttgaacagcacgtactttgtagaagtg

SEQ ID NO: 256812 - DNA, 33 bp, Homo sapien
tgtactttgaacagcatgtactttgtagaagtg

SEQ ID NO: 256813 - DNA, 33 bp, Homo sapien
cctagagtcataaatcacagtttggttatcaca

SEQ ID NO: 256814 - DNA, 33 bp, Homo sapien
cctagagtcataaatcgcagtttggttatcaca

SEQ ID NO: 256815 - DNA, 33 bp, Homo sapien
aaatctctggccagaaaaatcaggaagagagaa

SEQ ID NO: 256816 - DNA, 33 bp, Homo sapien
aaatctctggccagaataatcaggaagagagaa

SEQ ID NO: 256817 - DNA, 33 bp, Homo sapien
ggcccttaattgaatacggttggtagcctttta

SEQ ID NO: 256818 - DNA, 33 bp, Homo sapien
ggcccttaattgaatatggttggtagcctttta

SEQ ID NO: 256819 - DNA, 33 bp, Homo sapien
attcacaagaaaaaaacattgactgaaccagcc

SEQ ID NO: 256820 - DNA, 33 bp, Homo sapien
attcacaagaaaaaaatattgactgaaccagcc

SEQ ID NO: 256821 - DNA, 33 bp, Homo sapien
tgactgaaccagccacaaagtttaactatacaa

SEQ ID NO: 256822 - DNA, 33 bp, Homo sapien
tgactgaaccagccaccaagtttaactatacaa

SEQ ID NO: 256823 - DNA, 33 bp, Homo sapien
ttgttccggctttaccaagtttacgctgggagc

SEQ ID NO: 256824 - DNA, 33 bp, Homo sapien
ttgttccggctttaccgagtttacgctgggagc

SEQ ID NO: 256825 - DNA, 33 bp, Homo sapien
aggtgactagaagccaatctgaagaggctgtat

SEQ ID NO: 256826 - DNA, 33 bp, Homo sapien
aggtgactagaagccagtctgaagaggctgtat

SEQ ID NO: 256827 - DNA, 33 bp, Homo sapien
agggtggctttctaacggaagatcatttaaatg

SEQ ID NO: 256828 - DNA, 33 bp, Homo sapien
agggtggctttctaactgaagatcatttaaatg

SEQ ID NO: 256829 - DNA, 33 bp, Homo sapien
ccttgcttccaggacacagtctgatggttcttc

SEQ ID NO: 256830 - DNA, 33 bp, Homo sapien
ccttgcttccaggacatagtctgatggttcttc

SEQ ID NO: 256831 - DNA, 33 bp, Homo sapien
ataaaactttagtcataaacacatttcaatttt

SEQ ID NO: 256832 - DNA, 33 bp, Homo sapien
ataaaactttagtcatgaacacatttcaatttt

SEQ ID NO: 256833 - DNA, 33 bp, Homo sapien
tgccattgcatcctcacggcttatctcccactt

SEQ ID NO: 256834 - DNA, 33 bp, Homo sapien
tgccattgcatcctcatggcttatctcccactt

SEQ ID NO: 256835 - DNA, 33 bp, Homo sapien
tataaaggtctagttacgcctcaaaatttcacc

SEQ ID NO: 256836 - DNA, 33 bp, Homo sapien
tataaaggtctagttatgcctcaaaatttcacc

SEQ ID NO: 256837 - DNA, 33 bp, Homo sapien
ttgtatttcactgataacttgtgtggcaatact

SEQ ID NO: 256838 - DNA, 33 bp, Homo sapien
ttgtatttcactgataccttgtgtggcaatact

SEQ ID NO: 256839 - DNA, 33 bp, Homo sapien
actaacaggtttaggaatagagagacagttttc

SEQ ID NO: 256840 - DNA, 33 bp, Homo sapien
actaacaggtttaggactagagagacagttttc

SEQ ID NO: 256841 - DNA, 33 bp, Homo sapien
tataaaatgggtgacacgacaaaatcattacta

SEQ ID NO: 256842 - DNA, 33 bp, Homo sapien
tataaaatgggtgacatgacaaaatcattacta

SEQ ID NO: 256843 - DNA, 33 bp, Homo sapien
tgttaatgaatgataacgtaagatttcttcaat

SEQ ID NO: 256844 - DNA, 33 bp, Homo sapien
tgttaatgaatgataatgtaagatttcttcaat

SEQ ID NO: 256845 - DNA, 33 bp, Homo sapien
ttattaaatcagtctcaaaaaatgcagcagtat

SEQ ID NO: 256846 - DNA, 33 bp, Homo sapien
ttattaaatcagtctcgaaaaatgcagcagtat

SEQ ID NO: 256847 - DNA, 33 bp, Homo sapien
actacttgacttcaaaatatattaagaggctat

SEQ ID NO: 256848 - DNA, 33 bp, Homo sapien
actacttgacttcaaagtatattaagaggctat

SEQ ID NO: 256849 - DNA, 33 bp, Homo sapien
tgcattttgtatataacgagaggaagggaccca

SEQ ID NO: 256850 - DNA, 33 bp, Homo sapien
tgcattttgtatataatgagaggaagggaccca

SEQ ID NO: 256851 - DNA, 33 bp, Homo sapien
ttaacggatgtcaggaaaacttatacagaaaag

SEQ ID NO: 256852 - DNA, 33 bp, Homo sapien
ttaacggatgtcaggataacttatacagaaaag

SEQ ID NO: 256853 - DNA, 33 bp, Homo sapien
gaagcactgaatctgacgccctaccttgtgggg

SEQ ID NO: 256854 - DNA, 33 bp, Homo sapien
gaagcactgaatctgatgccctaccttgtgggg

SEQ ID NO: 256855 - DNA, 33 bp, Homo sapien; identical to SEQ ID NO: 256853

SEQ ID NO: 256856 - DNA, 33 bp, Homo sapien; identical to SEQ ID NO: 256854

SEQ ID NO: 256857 - DNA, 33 bp, Homo sapien
aatgccaaaaagcaacaattatgcacctactat

SEQ ID NO: 256858 - DNA, 33 bp, Homo sapien
aatgccaaaaagcaactattatgcacctactat

SEQ ID NO: 256859 - DNA, 33 bp, Homo sapien; identical to SEQ ID NO: 256857

SEQ ID NO: 256860 - DNA, 33 bp, Homo sapien; identical to SEQ ID NO: 256858

SEQ ID NO: 256861 - DNA, 33 bp, Homo sapien
actgaactgctgaaccaagagagtgaagacagg

SEQ ID NO: 256862 - DNA, 33 bp, Homo sapien
actgaactgctgaaccgagagagtgaagacagg

SEQ ID NO: 256863 - DNA, 33 bp, Homo sapien
aaacaccaatttcagcaaatccaatctacttaa

SEQ ID NO: 256864 - DNA, 33 bp, Homo sapien
aaacaccaatttcagcgaatccaatctacttaa

SEQ ID NO: 256865 - DNA, 33 bp, Homo sapien
ccagcacctgggcgccaacctgcatcagcagcc

SEQ ID NO: 256866 - DNA, 33 bp, Homo sapien
ccagcacctgggcgccgacctgcatcagcagcc

SEQ ID NO: 256867 - DNA, 33 bp, Homo sapien
acaaccatgatcacataataggggtgagtaaac

SEQ ID NO: 256868 - DNA, 33 bp, Homo sapien
acaaccatgatcacattataggggtgagtaaac

SEQ ID NO: 256869 - DNA, 33 bp, Homo sapien
cctgtttgttcaataacggcttttgctttttgt

SEQ ID NO: 256870 - DNA, 33 bp, Homo sapien
cctgtttgttcaataatggcttttgctttttgt

SEQ ID NO: 256871 - DNA, 33 bp, Homo sapien
tcatgtaaacaaataccacctgtactccaataa

SEQ ID NO: 256872 - DNA, 33 bp, Homo sapien
tcatgtaaacaaatacgacctgtactccaataa

SEQ ID NO: 256873 - DNA, 33 bp, Homo sapien
ggtaagttttgacatacgtacacacttgtgaaa

SEQ ID NO: 256874 - DNA, 33 bp, Homo sapien
ggtaagttttgacatatgtacacacttgtgaaa

SEQ ID NO: 256875 - DNA, 33 bp, Homo sapien
atcatgttgtataggaatagtaagtgtgagcat

SEQ ID NO: 256876 - DNA, 33 bp, Homo sapien
atcatgttgtataggagtagtaagtgtgagcat

SEQ ID NO: 256877 - DNA, 33 bp, Homo sapien
atactaagaacttatacctaggcaattttagaa

SEQ ID NO: 256878 - DNA, 33 bp, Homo sapien
atactaagaacttatagctaggcaattttagaa

SEQ ID NO: 256879 - DNA, 33 bp, Homo sapien
gagaaagagagagggaaatgaatcaagggtgac

SEQ ID NO: 256880 - DNA, 33 bp, Homo sapien
gagaaagagagagggagatgaatcaagggtgac

SEQ ID NO: 256881 - DNA, 33 bp, Homo sapien
aaactgcttcctttacacctctctttggtcacc

SEQ ID NO: 256882 - DNA, 33 bp, Homo sapien
aaactgcttcctttacgcctctctttggtcacc

SEQ ID NO: 256883 - DNA, 33 bp, Homo sapien
attttcactttaataaatccagccttaatttct

SEQ ID NO: 256884 - DNA, 33 bp, Homo sapien
attttcactttaataattccagccttaatttct

SEQ ID NO: 256885 - DNA, 33 bp, Homo sapien
tgataaccagtgttgaaaaatgtgaggaaaaag

SEQ ID NO: 256886 - DNA, 33 bp, Homo sapien
tgataaccagtgttgacaaatgtgaggaaaaag

SEQ ID NO: 256887 - DNA, 33 bp, Homo sapien
cagccttgcctgttgaccataaaaatgcagaaa

SEQ ID NO: 256888 - DNA, 33 bp, Homo sapien
cagccttgcctgttgatcataaaaatgcagaaa

SEQ ID NO: 256889 - DNA, 33 bp, Homo sapien
tcataatacactttgactaacgtggagaaattc

SEQ ID NO: 256890 - DNA, 33 bp, Homo sapien
tcataatacactttgattaacgtggagaaattc

SEQ ID NO: 256891 - DNA, 33 bp, Homo sapien
ttaataaaacctatgcaagtgaatggcaagtac

SEQ ID NO: 256892 - DNA, 33 bp, Homo sapien
ttaataaaacctatgcgagtgaatggcaagtac

SEQ ID NO: 256893 - DNA, 33 bp, Homo sapien
accgccatgcattccaatagtcattataactct

SEQ ID NO: 256894 - DNA, 33 bp, Homo sapien
accgccatgcattccagtagtcattataactct

SEQ ID NO: 256895 - DNA, 33 bp, Homo sapien
gaccaaagagatcatcactattttcagaaggag

SEQ ID NO: 256896 - DNA, 33 bp, Homo sapien
gaccaaagagatcatcgctattttcagaaggag

SEQ ID NO: 256897 - DNA, 33 bp, Homo sapien
gtctgatagtcacagacagaagaaattagctcc

SEQ ID NO: 256898 - DNA, 33 bp, Homo sapien
gtctgatagtcacagagagaagaaattagctcc

SEQ ID NO: 256899 - DNA, 33 bp, Homo sapien
agtgggatcttccagcaatgatttctatttctt

SEQ ID NO: 256900 - DNA, 33 bp, Homo sapien
agtgggatcttccagcgatgatttctatttctt

SEQ ID NO: 256901 - DNA, 33 bp, Homo sapien
accacactctgactagcaagggtatagctgtgc

SEQ ID NO: 256902 - DNA, 33 bp, Homo sapien
accacactctgactagtaagggtatagctgtgc

SEQ ID NO: 256903 - DNA, 33 bp, Homo sapien
gcattcccaaaagtaacgaaaatggcaagagtg

SEQ ID NO: 256904 - DNA, 33 bp, Homo sapien
gcattcccaaaagtaaggaaaatggcaagagtg

SEQ ID NO: 256905 - DNA, 33 bp, Homo sapien
cagaaatatgatagtcacttaactggagctgat

SEQ ID NO: 256906 - DNA, 33 bp, Homo sapien
cagaaatatgatagtcgcttaactggagctgat

SEQ ID NO: 256907 - DNA, 33 bp, Homo sapien
cgcaaaaagtgtttgaaattaaagtcttaccac

SEQ ID NO: 256908 - DNA, 33 bp, Homo sapien
cgcaaaaagtgtttgagattaaagtcttaccac

SEQ ID NO: 256909 - DNA, 33 bp, Homo sapien
ggaaaatacatagtgacaggaaaactgcatgga

SEQ ID NO: 256910 - DNA, 33 bp, Homo sapien
ggaaaatacatagtgataggaaaactgcatgga

SEQ ID NO: 256911 - DNA, 33 bp, Homo sapien
ttttttattctgttccacacatttatctgtctt

SEQ ID NO: 256912 - DNA, 33 bp, Homo sapien
ttttttattctgttccgcacatttatctgtctt

SEQ ID NO: 256913 - DNA, 33 bp, Homo sapien
tttttgctgtggttccaatgatatcggtgaagg

SEQ ID NO: 256914 - DNA, 33 bp, Homo sapien
tttttgctgtggttccgatgatatcggtgaagg

SEQ ID NO: 256915 - DNA, 33 bp, Homo sapien
taaatgagattgggtgcaattattagattaatt

SEQ ID NO: 256916 - DNA, 33 bp, Homo sapien
taaatgagattgggtgtaattattagattaatt

SEQ ID NO: 256917 - DNA, 33 bp, Homo sapien
tgactgtttcctggcccgagatagatctgtagg

SEQ ID NO: 256918 - DNA, 33 bp, Homo sapien
tgactgtttcctggcctgagatagatctgtagg

SEQ ID NO: 256919 - DNA, 33 bp, Homo sapien
ggaggatgtccacatcaaggagaatcatagaca

SEQ ID NO: 256920 - DNA, 33 bp, Homo sapien
ggaggatgtccacatcgaggagaatcatagaca

SEQ ID NO: 256921 - DNA, 33 bp, Homo sapien; identical to SEQ ID NO: 256919

SEQ ID NO: 256922 - DNA, 33 bp, Homo sapien; identical to SEQ ID NO: 256920

SEQ ID NO: 256923 - DNA, 33 bp, Homo sapien
atacattttagaaatccatctattcccttcagt

SEQ ID NO: 256924 - DNA, 33 bp, Homo sapien
atacattttagaaatctatctattcccttcagt

SEQ ID NO: 256925 - DNA, 33 bp, Homo sapien
tattcaagagatattcactgagcactccatgcc

SEQ ID NO: 256926 - DNA, 33 bp, Homo sapien
tattcaagagatattcgctgagcactccatgcc

SEQ ID NO: 256927 - DNA, 33 bp, Homo sapien
tccagagtctgctttccagggaacttgacctaa

SEQ ID NO: 256928 - DNA, 33 bp, Homo sapien
tccagagtctgctttctagggaacttgacctaa

SEQ ID NO: 256929 - DNA, 33 bp, Homo sapien
ttttggtctcttccccagattattgattacaga

SEQ ID NO: 256930 - DNA, 33 bp, Homo sapien
ttttggtctcttccccggattattgattacaga

SEQ ID NO: 256931 - DNA, 33 bp, Homo sapien
taagagaggcacattgaaaaattggtgaagccc

SEQ ID NO: 256932 - DNA, 33 bp, Homo sapien
taagagaggcacattggaaaattggtgaagccc

SEQ ID NO: 256933 - DNA, 33 bp, Homo sapien
caagagcaataatttaacccttcgatctatatt

SEQ ID NO: 256934 - DNA, 33 bp, Homo sapien
caagagcaataatttaccccttcgatctatatt

SEQ ID NO: 256935 - DNA, 33 bp, Homo sapien
gttctgcttttctgtcaagtttttgggatcttt

SEQ ID NO: 256936 - DNA, 33 bp, Homo sapien
gttctgcttttctgtcgagtttttgggatcttt

SEQ ID NO: 256937 - DNA, 33 bp, Homo sapien
tggagaaatatttttgaagtacctgttaacagt

SEQ ID NO: 256938 - DNA, 33 bp, Homo sapien
tggagaaatatttttgcagtacctgttaacagt

SEQ ID NO: 256939 - DNA, 33 bp, Homo sapien
aaaactaaacatagaacgagcatatgatccagc

SEQ ID NO: 256940 - DNA, 33 bp, Homo sapien
aaaactaaacatagaatgagcatatgatccagc

SEQ ID NO: 256941 - DNA, 33 bp, Homo sapien
gttattcctaacaggacgcttcaaccacacctg

SEQ ID NO: 256942 - DNA, 33 bp, Homo sapien
gttattcctaacaggatgcttcaaccacacctg

SEQ ID NO: 256943 - DNA, 33 bp, Homo sapien
tatacaattaagaatcaactatttgtccttgaa

SEQ ID NO: 256944 - DNA, 33 bp, Homo sapien
tatacaattaagaatcgactatttgtccttgaa

SEQ ID NO: 256945 - DNA, 33 bp, Homo sapien
tattcttacagccctacgtatcacttcctgtgt

SEQ ID NO: 256946 - DNA, 33 bp, Homo sapien
tattcttacagccctatgtatcacttcctgtgt

SEQ ID NO: 256947 - DNA, 33 bp, Homo sapien
aagtacttctagacagctgctttttacaaataa

SEQ ID NO: 256948 - DNA, 33 bp, Homo sapien
aagtacttctagacagttgctttttacaaataa

SEQ ID NO: 256949 - DNA, 33 bp, Homo sapien
caacagtatcccgtgccttctggaggtaataga

SEQ ID NO: 256950 - DNA, 33 bp, Homo sapien
caacagtatcccgtgctttctggaggtaataga

SEQ ID NO: 256951 - DNA, 33 bp, Homo sapien; identical to SEQ ID NO: 256949

SEQ ID NO: 256952 - DNA, 33 bp, Homo sapien; identical to SEQ ID NO: 256950

SEQ ID NO: 256953 - DNA, 33 bp, Homo sapien
ccaggagcatactgcaaatggtcaggagtgtgg

SEQ ID NO: 256954 - DNA, 33 bp, Homo sapien
ccaggagcatactgcagatggtcaggagtgtgg

SEQ ID NO: 256955 - DNA, 33 bp, Homo sapien; identical to SEQ ID NO: 256953

SEQ ID NO: 256956 - DNA, 33 bp, Homo sapien; identical to SEQ ID NO: 256954

SEQ ID NO: 256957 - DNA, 33 bp, Homo sapien
gcaatgagcattgaaccggtatttctcaaactt

SEQ ID NO: 256958 - DNA, 33 bp, Homo sapien
gcaatgagcattgaactggtatttctcaaactt

SEQ ID NO: 256959 - DNA, 33 bp, Homo sapien
gctcacaagttcgagaccacactggacaacatg

SEQ ID NO: 256960 - DNA, 33 bp, Homo sapien
gctcacaagttcgagagcacactggacaacatg

SEQ ID NO: 256961 - DNA, 33 bp, Homo sapien
tgtgaagagtaccacaaccagagccagaagcgc

SEQ ID NO: 256962 - DNA, 33 bp, Homo sapien
tgtgaagagtaccacatccagagccagaagcgc

SEQ ID NO: 256963 - DNA, 33 bp, Homo sapien; identical to SEQ ID NO: 256961

SEQ ID NO: 256964 - DNA, 33 bp, Homo sapien; identical to SEQ ID NO: 256962

SEQ ID NO: 256965 - DNA, 33 bp, Homo sapien
ttggtagagaggacaaagatggaagctaggttt

SEQ ID NO: 256966 - DNA, 33 bp, Homo sapien
ttggtagagaggacaaggatggaagctaggttt

SEQ ID NO: 256967 - DNA, 33 bp, Homo sapien
aaaatatccaactcaacgaccaatcctgtataa

SEQ ID NO: 256968 - DNA, 33 bp, Homo sapien
aaaatatccaactcaatgaccaatcctgtataa

SEQ ID NO: 256969 - DNA, 33 bp, Homo sapien
tattcataatacccaacctatggagtcaatcta

SEQ ID NO: 256970 - DNA, 33 bp, Homo sapien
tattcataatacccaagctatggagtcaatcta

SEQ ID NO: 256971 - DNA, 33 bp, Homo sapien
agggattaggaaaactaaacagtgtatgaggcc

SEQ ID NO: 256972 - DNA, 33 bp, Homo sapien
agggattaggaaaacttaacagtgtatgaggcc

SEQ ID NO: 256973 - DNA, 33 bp, Homo sapien
acaaacttccttagccgaggccactgagtaact

SEQ ID NO: 256974 - DNA, 33 bp, Homo sapien
acaaacttccttagcctaggccactgagtaact

SEQ ID NO: 256975 - DNA, 33 bp, Homo sapien; identical to SEQ ID NO: 256973

SEQ ID NO: 256976 - DNA, 33 bp, Homo sapien; identical to SEQ ID NO: 256974

SEQ ID NO: 256977 - DNA, 33 bp, Homo sapien; identical to SEQ ID NO: 256973

SEQ ID NO: 256978 - DNA, 33 bp, Homo sapien; identical to SEQ ID NO: 256974

SEQ ID NO: 256979 - DNA, 33 bp, Homo sapien
ctaatcaaatcttagacgtgtatttgttgcctc

SEQ ID NO: 256980 - DNA, 33 bp, Homo sapien
ctaatcaaatcttagatgtgtatttgttgcctc

SEQ ID NO: 256981 - DNA, 33 bp, Homo sapien
agtagagtgtcatacaatacacacattctcata

SEQ ID NO: 256982 - DNA, 33 bp, Homo sapien
agtagagtgtcatacactacacacattctcata

SEQ ID NO: 256983 - DNA, 33 bp, Homo sapien
agtattcagtcaaattcaaaatgtgcagtctca

SEQ ID NO: 256984 - DNA, 33 bp, Homo sapien
agtattcagtcaaatttaaaatgtgcagtctca

SEQ ID NO: 256985 - DNA, 33 bp, Homo sapien
aagactgccgccaaatgattatccttatgccag

SEQ ID NO: 256986 - DNA, 33 bp, Homo sapien
aagactgccgccaaattattatccttatgccag

SEQ ID NO: 256987 - DNA, 33 bp, Homo sapien
gagcataccaaatgcaaaatattggtttctaaa

SEQ ID NO: 256988 - DNA, 33 bp, Homo sapien
gagcataccaaatgcagaatattggtttctaaa

SEQ ID NO: 256989 - DNA, 33 bp, Homo sapien
ctgcttacctacagatcagactgcttccagcgc

SEQ ID NO: 256990 - DNA, 33 bp, Homo sapien
ctgcttacctacagatgagactgcttccagcgc

SEQ ID NO: 256991 - DNA, 33 bp, Homo sapien
ctttgcagcaatccagcctaaaagcctaaaagc

SEQ ID NO: 256992 - DNA, 33 bp, Homo sapien
ctttgcagcaatccagtctaaaagcctaaaagc

SEQ ID NO: 256993 - DNA, 33 bp, Homo sapien
tgggggtttgatgcacagattgttttgtcactc

SEQ ID NO: 256994 - DNA, 33 bp, Homo sapien
tgggggtttgatgcacggattgttttgtcactc

SEQ ID NO: 256995 - DNA, 33 bp, Homo sapien
taggacctgctcccagaagagttgatcccagcc

SEQ ID NO: 256996 - DNA, 33 bp, Homo sapien
taggacctgctcccagtagagttgatcccagcc

SEQ ID NO: 256997 - DNA, 33 bp, Homo sapien
cctgactcccttcccccactttcttctcctgat

SEQ ID NO: 256998 - DNA, 33 bp, Homo sapien
cctgactcccttcccctactttcttctcctgat

SEQ ID NO: 256999 - DNA, 33 bp, Homo sapien
tggagcaattttaagaatagtaacgaggcaaga

SEQ ID NO: 257000 - DNA, 33 bp, Homo sapien
tggagcaattttaagagtagtaacgaggcaaga

SEQ ID NO: 257001 - DNA, 33 bp, Homo sapien
attacttagaacctcaatcacttattaatcaat

SEQ ID NO: 257002 - DNA, 33 bp, Homo sapien
attacttagaacctcagtcacttattaatcaat

SEQ ID NO: 257003 - DNA, 33 bp, Homo sapien
gttggcattcgttatacgcttggaagtgatttg

SEQ ID NO: 257004 - DNA, 33 bp, Homo sapien
gttggcattcgttatatgcttggaagtgatttg

SEQ ID NO: 257005 - DNA, 33 bp, Homo sapien; identical to SEQ ID NO: 257003

SEQ ID NO: 257006 - DNA, 33 bp, Homo sapien; identical to SEQ ID NO: 257004

SEQ ID NO: 257007 - DNA, 33 bp, Homo sapien
ttgtaacacctaccaaatggccagaaaagagga

SEQ ID NO: 257008 - DNA, 33 bp, Homo sapien
ttgtaacacctaccaactggccagaaaagagga

SEQ ID NO: 257009 - DNA, 33 bp, Homo sapien
gtatcttctcctctgcgaagtcagttactactc

SEQ ID NO: 257010 - DNA, 33 bp, Homo sapien
gtatcttctcctctgctaagtcagttactactc

SEQ ID NO: 257011 - DNA, 33 bp, Homo sapien
tttataagagaagaataaagtgaaagtctgtat

SEQ ID NO: 257012 - DNA, 33 bp, Homo sapien
tttataagagaagaattaagtgaaagtctgtat

SEQ ID NO: 257013 - DNA, 33 bp, Homo sapien
tcacaaccaaccctataagtaacatattatcat

SEQ ID NO: 257014 - DNA, 33 bp, Homo sapien
tcacaaccaaccctatgagtaacatattatcat

SEQ ID NO: 257015 - DNA, 33 bp, Homo sapien; identical to SEQ ID NO: 257013

SEQ ID NO: 257016 - DNA, 33 bp, Homo sapien; identical to SEQ ID NO: 257014

SEQ ID NO: 257017 - DNA, 33 bp, Homo sapien
attctaaaagatgcaaactaatctattgtagat

SEQ ID NO: 257018 - DNA, 33 bp, Homo sapien
attctaaaagatgcaagctaatctattgtagat

SEQ ID NO: 257019 - DNA, 33 bp, Homo sapien
cgggcactaatgcccaatgcaaatgatgagagg

SEQ ID NO: 257020 - DNA, 33 bp, Homo sapien
cgggcactaatgcccagtgcaaatgatgagagg

SEQ ID NO: 257021 - DNA, 33 bp, Homo sapien
ttgccacatatccatcaagagagactctatctt

SEQ ID NO: 257022 - DNA, 33 bp, Homo sapien
ttgccacatatccatcgagagagactctatctt

SEQ ID NO: 257023 - DNA, 33 bp, Homo sapien
tccacacagccacgttcaaatcacgatgtctgc

SEQ ID NO: 257024 - DNA, 33 bp, Homo sapien
tccacacagccacgttgaaatcacgatgtctgc

SEQ ID NO: 257025 - DNA, 33 bp, Homo sapien
actcactttgttaaaacatgccccatgtggtat

SEQ ID NO: 257026 - DNA, 33 bp, Homo sapien
actcactttgttaaaatatgccccatgtggtat

SEQ ID NO: 257027 - DNA, 33 bp, Homo sapien; identical to SEQ ID NO: 257025

SEQ ID NO: 257028 - DNA, 33 bp, Homo sapien; identical to SEQ ID NO: 257026

SEQ ID NO: 257029 - DNA, 33 bp, Homo sapien
gcccagccaggattcccaagaaattacactgag

SEQ ID NO: 257030 - DNA, 33 bp, Homo sapien
gcccagccaggattcctaagaaattacactgag

SEQ ID NO: 257031 - DNA, 33 bp, Homo sapien
ggctattttggctagtaacccatctggaggtct

SEQ ID NO: 257032 - DNA, 33 bp, Homo sapien
ggctattttggctagtcacccatctggaggtct

SEQ ID NO: 257033 - DNA, 33 bp, Homo sapien
atgagactgatccaaaaaagactgaatagtcac

SEQ ID NO: 257034 - DNA, 33 bp, Homo sapien
atgagactgatccaaagaagactgaatagtcac

SEQ ID NO: 257035 - DNA, 33 bp, Homo sapien
tttgtcactgatcttacatccagtcaccttgct

SEQ ID NO: 257036 - DNA, 33 bp, Homo sapien
tttgtcactgatcttatatccagtcaccttgct

SEQ ID NO: 257037 - DNA, 33 bp, Homo sapien
ggttgaagctgaagaaaggtagaatcggattag

SEQ ID NO: 257038 - DNA, 33 bp, Homo sapien
ggttgaagctgaagaagggtagaatcggattag

SEQ ID NO: 257039 - DNA, 33 bp, Homo sapien
cttttcgcaaatggaaacgtgccactcagaaga

SEQ ID NO: 257040 - DNA, 33 bp, Homo sapien
cttttcgcaaatggaagcgtgccactcagaaga

SEQ ID NO: 257041 - DNA, 33 bp, Homo sapien
aaccatgatggactacagtaacaataaattgca

SEQ ID NO: 257042 - DNA, 33 bp, Homo sapien
aaccatgatggactacggtaacaataaattgca

SEQ ID NO: 257043 - DNA, 33 bp, Homo sapien
tgcatggcactgcgccacatcagagcccagccc

SEQ ID NO: 257044 - DNA, 33 bp, Homo sapien
tgcatggcactgcgccgcatcagagcccagccc

SEQ ID NO: 257045 - DNA, 33 bp, Homo sapien
ctgattatgactgaaaatgggaaatagtatgtg

SEQ ID NO: 257046 - DNA, 33 bp, Homo sapien
ctgattatgactgaaagtgggaaatagtatgtg

SEQ ID NO: 257047 - DNA, 33 bp, Homo sapien
taaacaagttattagcagaatcaaaataggatt

SEQ ID NO: 257048 - DNA, 33 bp, Homo sapien
taaacaagttattagccgaatcaaaataggatt

SEQ ID NO: 257049 - DNA, 33 bp, Homo sapien
tggccgcttacttcagcacaactcaattcaatg

SEQ ID NO: 257050 - DNA, 33 bp, Homo sapien
tggccgcttacttcagtacaactcaattcaatg

SEQ ID NO: 257051 - DNA, 33 bp, Homo sapien
tagaaatgtataaaacactctccacctaaaaac

SEQ ID NO: 257052 - DNA, 33 bp, Homo sapien
tagaaatgtataaaacgctctccacctaaaaac

SEQ ID NO: 257053 - DNA, 33 bp, Homo sapien
ctacatttaatggtgcaaaagtaatggctagga

SEQ ID NO: 257054 - DNA, 33 bp, Homo sapien
ctacatttaatggtgcgaaagtaatggctagga

SEQ ID NO: 257055 - DNA, 33 bp, Homo sapien
ttctcctgctatcaaaatgttttaccagaatga

SEQ ID NO: 257056 - DNA, 33 bp, Homo sapien
ttctcctgctatcaaagtgttttaccagaatga

SEQ ID NO: 257057 - DNA, 33 bp, Homo sapien
aatagaagtagggaaacttactgtgttcattaa

SEQ ID NO: 257058 - DNA, 33 bp, Homo sapien
aatagaagtagggaaatttactgtgttcattaa

SEQ ID NO: 257059 - DNA, 33 bp, Homo sapien
ttctcaatatttggcacggtacataattgtaac

SEQ ID NO: 257060 - DNA, 33 bp, Homo sapien
ttctcaatatttggcatggtacataattgtaac

SEQ ID NO: 257061 - DNA, 33 bp, Homo sapien
tctgagtccactaattaaaagatatggtgattt

SEQ ID NO: 257062 - DNA, 33 bp, Homo sapien
tctgagtccactaattcaaagatatggtgattt

SEQ ID NO: 257063 - DNA, 33 bp, Homo sapien
gtggtgtatgtacaataaaaccatagatagaaa

SEQ ID NO: 257064 - DNA, 33 bp, Homo sapien
gtggtgtatgtacaatgaaaccatagatagaaa

SEQ ID NO: 257065 - DNA, 33 bp, Homo sapien
aaaagaaacaaatcaaagtgttcaaccataatg

SEQ ID NO: 257066 - DNA, 33 bp, Homo sapien
aaaagaaacaaatcaaggtgttcaaccataatg

SEQ ID NO: 257067 - DNA, 33 bp, Homo sapien
tacaggcctagatttaaagacagtgtgtctata

SEQ ID NO: 257068 - DNA, 33 bp, Homo sapien
tacaggcctagatttatagacagtgtgtctata

SEQ ID NO: 257069 - DNA, 33 bp, Homo sapien
gtctcttgattgtcgacattttgttggcatagg

SEQ ID NO: 257070 - DNA, 33 bp, Homo sapien
gtctcttgattgtcgatattttgttggcatagg

SEQ ID NO: 257071 - DNA, 33 bp, Homo sapien
tttgtcaaagaaaggaagggaaatggacttgaa

SEQ ID NO: 257072 - DNA, 33 bp, Homo sapien
tttgtcaaagaaaggaggggaaatggacttgaa

SEQ ID NO: 257073 - DNA, 33 bp, Homo sapien
agcctggaatgacacacggagatattgtctaaa

SEQ ID NO: 257074 - DNA, 33 bp, Homo sapien
agcctggaatgacacagggagatattgtctaaa

SEQ ID NO: 257075 - DNA, 33 bp, Homo sapien
ttttggtgtcatagccaaatcattgccaaatcc

SEQ ID NO: 257076 - DNA, 33 bp, Homo sapien
ttttggtgtcatagccgaatcattgccaaatcc

SEQ ID NO: 257077 - DNA, 33 bp, Homo sapien
atttcaaagacaaaacagcattttacatatttg

SEQ ID NO: 257078 - DNA, 33 bp, Homo sapien
atttcaaagacaaaactgcattttacatatttg

SEQ ID NO: 257079 - DNA, 33 bp, Homo sapien
actggatttttggaaacgtcccaaagccacatt

SEQ ID NO: 257080 - DNA, 33 bp, Homo sapien
actggatttttggaaatgtcccaaagccacatt

SEQ ID NO: 257081 - DNA, 33 bp, Homo sapien
ttgtcaaaaaccaaaacggtggctgggcatagt

SEQ ID NO: 257082 - DNA, 33 bp, Homo sapien
ttgtcaaaaaccaaaatggtggctgggcatagt

SEQ ID NO: 257083 - DNA, 33 bp, Homo sapien
ttcctctgagatatgactagggattctttgctt

SEQ ID NO: 257084 - DNA, 33 bp, Homo sapien
ttcctctgagatatgattagggattctttgctt

SEQ ID NO: 257085 - DNA, 33 bp, Homo sapien
atgtggctattagcacaaggcttcagctcttct

SEQ ID NO: 257086 - DNA, 33 bp, Homo sapien
atgtggctattagcacgaggcttcagctcttct

SEQ ID NO: 257087 - DNA, 33 bp, Homo sapien
ttgccatgtaagaaaacatatacagattttagg

SEQ ID NO: 257088 - DNA, 33 bp, Homo sapien
ttgccatgtaagaaaagatatacagattttagg

SEQ ID NO: 257089 - DNA, 33 bp, Homo sapien
gcaccatgccccttcaacttctcagcttgcaga

SEQ ID NO: 257090 - DNA, 33 bp, Homo sapien
gcaccatgccccttcagcttctcagcttgcaga

SEQ ID NO: 257091 - DNA, 33 bp, Homo sapien
tcccaggagtgttgagaatttaagtagtttttg

SEQ ID NO: 257092 - DNA, 33 bp, Homo sapien
tcccaggagtgttgaggatttaagtagtttttg

SEQ ID NO: 257093 - DNA, 33 bp, Homo sapien
ggtgtcctactaagaacaggaagagatataaga

SEQ ID NO: 257094 - DNA, 33 bp, Homo sapien
ggtgtcctactaagaagaggaagagatataaga

SEQ ID NO: 257095 - DNA, 33 bp, Homo sapien
ccttatatgaagtaaacttaacagaattgaggt

SEQ ID NO: 257096 - DNA, 33 bp, Homo sapien
ccttatatgaagtaaagttaacagaattgaggt

SEQ ID NO: 257097 - DNA, 33 bp, Homo sapien
agctatagttttcttgcattgcctttgtctgat

SEQ ID NO: 257098 - DNA, 33 bp, Homo sapien
agctatagttttcttgtattgcctttgtctgat

SEQ ID NO: 257099 - DNA, 33 bp, Homo sapien
tctgcaaaccaagaccaatttatctgttttgtt

SEQ ID NO: 257100 - DNA, 33 bp, Homo sapien
tctgcaaaccaagacccatttatctgttttgtt

SEQ ID NO: 257101 - DNA, 33 bp, Homo sapien
cagccaaaattagctgaacaacagagtgagact

SEQ ID NO: 257102 - DNA, 33 bp, Homo sapien
cagccaaaattagctggacaacagagtgagact

SEQ ID NO: 257103 - DNA, 33 bp, Homo sapien
gaattaccagtaggcaaaacttgggacaaggaa

SEQ ID NO: 257104 - DNA, 33 bp, Homo sapien
gaattaccagtaggcagaacttgggacaaggaa

SEQ ID NO: 257105 - DNA, 33 bp, Homo sapien
atgcttatcaattcaccattttttgaaccatgt

SEQ ID NO: 257106 - DNA, 33 bp, Homo sapien
atgcttatcaattcactattttttgaaccatgt

SEQ ID NO: 257107 - DNA, 33 bp, Homo sapien
agaacttcttaaaaatcaatcggctgggcatgg

SEQ ID NO: 257108 - DNA, 33 bp, Homo sapien
agaacttcttaaaaatgaatcggctgggcatgg

SEQ ID NO: 257109 - DNA, 33 bp, Homo sapien
tggtgcccggccctaaagtgaatcttttgtaga

SEQ ID NO: 257110 - DNA, 33 bp, Homo sapien
tggtgcccggccctaaggtgaatcttttgtaga

SEQ ID NO: 257111 - DNA, 33 bp, Homo sapien
taaatgtatcttttgccattttccagtctcagc

SEQ ID NO: 257112 - DNA, 33 bp, Homo sapien
taaatgtatcttttgcgattttccagtctcagc

SEQ ID NO: 257113 - DNA, 33 bp, Homo sapien
aaaaaactcttgagagaatcacatcatactgac

SEQ ID NO: 257114 - DNA, 33 bp, Homo sapien
aaaaaactcttgagaggatcacatcatactgac

SEQ ID NO: 257115 - DNA, 33 bp, Homo sapien
tgcctggcaaaaaaaacaatttatgctttctgg

SEQ ID NO: 257116 - DNA, 33 bp, Homo sapien
tgcctggcaaaaaaaagaatttatgctttctgg

SEQ ID NO: 257117 - DNA, 33 bp, Homo sapien
cacagaacaaggctgcacacagaaaacaatttc

SEQ ID NO: 257118 - DNA, 33 bp, Homo sapien
cacagaacaaggctgctcacagaaaacaatttc

SEQ ID NO: 257119 - DNA, 33 bp, Homo sapien
ttctaagcagtcttcaataatcagacattactc

SEQ ID NO: 257120 - DNA, 33 bp, Homo sapien
ttctaagcagtcttcagtaatcagacattactc

SEQ ID NO: 257121 - DNA, 33 bp, Homo sapien
tgtttccttatctctcccagttctcataaaact

SEQ ID NO: 257122 - DNA, 33 bp, Homo sapien
tgtttccttatctctctcagttctcataaaact

SEQ ID NO: 257123 - DNA, 33 bp, Homo sapien
aaatccacactcatccaaaagaatggaaaacca

SEQ ID NO: 257124 - DNA, 33 bp, Homo sapien
aaatccacactcatccgaaagaatggaaaacca

SEQ ID NO: 257125 - DNA, 33 bp, Homo sapien
atgttatgaacaacaccgtatatgcaacttgcc

SEQ ID NO: 257126 - DNA, 33 bp, Homo sapien
atgttatgaacaacactgtatatgcaacttgcc

SEQ ID NO: 257127 - DNA, 33 bp, Homo sapien
cccagttcattgctgtaaagaacttggaagtgc

SEQ ID NO: 257128 - DNA, 33 bp, Homo sapien
cccagttcattgctgtgaagaacttggaagtgc

SEQ ID NO: 257129 - DNA, 33 bp, Homo sapien
gttgactccataactaaattccatagtcataaa

SEQ ID NO: 257130 - DNA, 33 bp, Homo sapien
gttgactccataactacattccatagtcataaa

SEQ ID NO: 257131 - DNA, 33 bp, Homo sapien
aatttctgtttaagtaaatatctgtcaacgtgc

SEQ ID NO: 257132 - DNA, 33 bp, Homo sapien
aatttctgtttaagtagatatctgtcaacgtgc

SEQ ID NO: 257133 - DNA, 33 bp, Homo sapien
agatattgtcggattcaatttttttaaaggcaa

SEQ ID NO: 257134 - DNA, 33 bp, Homo sapien
agatattgtcggattcgatttttttaaaggcaa

SEQ ID NO: 257135 - DNA, 33 bp, Homo sapien
gttacaatagtgattccataggcccaaaagcct

SEQ ID NO: 257136 - DNA, 33 bp, Homo sapien
gttacaatagtgattctataggcccaaaagcct

SEQ ID NO: 257137 - DNA, 33 bp, Homo sapien
atttgatccagtgaataagtatgaatgaatgaa

SEQ ID NO: 257138 - DNA, 33 bp, Homo sapien
atttgatccagtgaatgagtatgaatgaatgaa

SEQ ID NO: 257139 - DNA, 33 bp, Homo sapien
aatcgagttcagccacagtgacctgggaaaata

SEQ ID NO: 257140 - DNA, 33 bp, Homo sapien
aatcgagttcagccacggtgacctgggaaaata

SEQ ID NO: 257141 - DNA, 33 bp, Homo sapien
tcttttgtcaattctcacaaattctcagctata

SEQ ID NO: 257142 - DNA, 33 bp, Homo sapien
tcttttgtcaattctcgcaaattctcagctata

SEQ ID NO: 257143 - DNA, 33 bp, Homo sapien
acagattggagcatcaaagaaaagtttagtcct

SEQ ID NO: 257144 - DNA, 33 bp, Homo sapien
acagattggagcatcagagaaaagtttagtcct

SEQ ID NO: 257145 - DNA, 33 bp, Homo sapien
ctttgggaattatctaagttgcaggtatattcg

SEQ ID NO: 257146 - DNA, 33 bp, Homo sapien
ctttgggaattatctaggttgcaggtatattcg

SEQ ID NO: 257147 - DNA, 33 bp, Homo sapien
tttctcaacaggtgcacgataggcatttggggt

SEQ ID NO: 257148 - DNA, 33 bp, Homo sapien
tttctcaacaggtgcatgataggcatttggggt

SEQ ID NO: 257149 - DNA, 33 bp, Homo sapien
tttgttattcagacgactaagaatcaaggtttt

SEQ ID NO: 257150 - DNA, 33 bp, Homo sapien
tttgttattcagacgattaagaatcaaggtttt

SEQ ID NO: 257151 - DNA, 33 bp, Homo sapien
agtcagccatatagagaacaagaaaaggtcttt

SEQ ID NO: 257152 - DNA, 33 bp, Homo sapien
agtcagccatatagagtacaagaaaaggtcttt

SEQ ID NO: 257153 - DNA, 33 bp, Homo sapien
tgaatatggcatacaaaataggacaagggagaa

SEQ ID NO: 257154 - DNA, 33 bp, Homo sapien
tgaatatggcatacaagataggacaagggagaa

SEQ ID NO: 257155 - DNA, 33 bp, Homo sapien
gcaatttctggttacacagcaatagaagtagat

SEQ ID NO: 257156 - DNA, 33 bp, Homo sapien
gcaatttctggttacatagcaatagaagtagat

SEQ ID NO: 257157 - DNA, 33 bp, Homo sapien
attaatgccacgaccaaatttctcgacctgtat

SEQ ID NO: 257158 - DNA, 33 bp, Homo sapien
attaatgccacgaccagatttctcgacctgtat

SEQ ID NO: 257159 - DNA, 33 bp, Homo sapien
tgatcaccgaaatgcactccaccgatatttgtt

SEQ ID NO: 257160 - DNA, 33 bp, Homo sapien
tgatcaccgaaatgcagtccaccgatatttgtt

SEQ ID NO: 257161 - DNA, 33 bp, Homo sapien
tgaaaatgcgagggcggcgcacgagtgttgatg

SEQ ID NO: 257162 - DNA, 33 bp, Homo sapien
tgaaaatgcgagggcgtcgcacgagtgttgatg

SEQ ID NO: 257163 - DNA, 33 bp, Homo sapien
gcattttcattaatgacggcctccctgccacac

SEQ ID NO: 257164 - DNA, 33 bp, Homo sapien
gcattttcattaatgatggcctccctgccacac

SEQ ID NO: 257165 - DNA, 33 bp, Homo sapien
tagaagatcccaagaacagaaaacatttggtgg

SEQ ID NO: 257166 - DNA, 33 bp, Homo sapien
tagaagatcccaagaagagaaaacatttggtgg

SEQ ID NO: 257167 - DNA, 33 bp, Homo sapien
gtgattttggctctgaaccctttttcaaattga

SEQ ID NO: 257168 - DNA, 33 bp, Homo sapien
gtgattttggctctgagccctttttcaaattga

SEQ ID NO: 257169 - DNA, 33 bp, Homo sapien
atgaagatgtcgtcaaacgatctgaactctgat

SEQ ID NO: 257170 - DNA, 33 bp, Homo sapien
atgaagatgtcgtcaagcgatctgaactctgat

SEQ ID NO: 257171 - DNA, 33 bp, Homo sapien
tcccgcctcctactcaacaagttttaaatcaga

SEQ ID NO: 257172 - DNA, 33 bp, Homo sapien
tcccgcctcctactcagcaagttttaaatcaga

SEQ ID NO: 257173 - DNA, 33 bp, Homo sapien
accactgttctggacaccacgttattgctcaag

SEQ ID NO: 257174 - DNA, 33 bp, Homo sapien
accactgttctggacatcacgttattgctcaag

SEQ ID NO: 257175 - DNA, 33 bp, Homo sapien
tctgacagtcaagcagcagtaactgtgctggga

SEQ ID NO: 257176 - DNA, 33 bp, Homo sapien
tctgacagtcaagcagtagtaactgtgctggga

SEQ ID NO: 257177 - DNA, 33 bp, Homo sapien
tcctgaatctttccccagcttagtggcaatgaa

SEQ ID NO: 257178 - DNA, 33 bp, Homo sapien
tcctgaatctttccccggcttagtggcaatgaa

SEQ ID NO: 257179 - DNA, 33 bp, Homo sapien
ttctggataccgtgaaactttgtctcagattat

SEQ ID NO: 257180 - DNA, 33 bp, Homo sapien
ttctggataccgtgaagctttgtctcagattat

SEQ ID NO: 257181 - DNA, 33 bp, Homo sapien
gttttccatcaaaaaaacttctctatctggtca

SEQ ID NO: 257182 - DNA, 33 bp, Homo sapien
gttttccatcaaaaaaccttctctatctggtca

SEQ ID NO: 257183 - DNA, 33 bp, Homo sapien
tgcgggtataaaaggcagcatgaggggtcctta

SEQ ID NO: 257184 - DNA, 33 bp, Homo sapien
tgcgggtataaaaggccgcatgaggggtcctta

SEQ ID NO: 257185 - DNA, 33 bp, Homo sapien
ttttgcaaaaattaccaccagggaaactgcaaa

SEQ ID NO: 257186 - DNA, 33 bp, Homo sapien
ttttgcaaaaattaccgccagggaaactgcaaa

SEQ ID NO: 257187 - DNA, 33 bp, Homo sapien
aggaacacaggtaaacaaattcatttccaagct

SEQ ID NO: 257188 - DNA, 33 bp, Homo sapien
aggaacacaggtaaacgaattcatttccaagct

SEQ ID NO: 257189 - DNA, 33 bp, Homo sapien
gtcaaatgccaatagacctaaattatttgaatt

SEQ ID NO: 257190 - DNA, 33 bp, Homo sapien
gtcaaatgccaatagatctaaattatttgaatt

SEQ ID NO: 257191 - DNA, 33 bp, Homo sapien
gtacgccctcttcatgcatctttaattcaattt

SEQ ID NO: 257192 - DNA, 33 bp, Homo sapien
gtacgccctcttcatggatctttaattcaattt

SEQ ID NO: 257193 - DNA, 33 bp, Homo sapien
gtttccttctatccataatctctttagcagtgt

SEQ ID NO: 257194 - DNA, 33 bp, Homo sapien
gtttccttctatccatcatctctttagcagtgt

SEQ ID NO: 257195 - DNA, 33 bp, Homo sapien
tgctatcctcatgacccgcttgtgtcaatggac

SEQ ID NO: 257196 - DNA, 33 bp, Homo sapien
tgctatcctcatgacctgcttgtgtcaatggac

SEQ ID NO: 257197 - DNA, 33 bp, Homo sapien
gtttctaaattatcaaatcaggataagaacttc

SEQ ID NO: 257198 - DNA, 33 bp, Homo sapien
gtttctaaattatcaagtcaggataagaacttc

SEQ ID NO: 257199 - DNA, 33 bp, Homo sapien
aatcatgtctttcataacaacacggatggagct

SEQ ID NO: 257200 - DNA, 33 bp, Homo sapien
aatcatgtctttcatagcaacacggatggagct

SEQ ID NO: 257201 - DNA, 33 bp, Homo sapien
accccaatgataaaatcagatgatggaagaagt

SEQ ID NO: 257202 - DNA, 33 bp, Homo sapien
accccaatgataaaatgagatgatggaagaagt

SEQ ID NO: 257203 - DNA, 33 bp, Homo sapien
gcaatactgtttggccccaatattgtatggaat

SEQ ID NO: 257204 - DNA, 33 bp, Homo sapien
gcaatactgtttggccgcaatattgtatggaat

SEQ ID NO: 257205 - DNA, 33 bp, Homo sapien
atgccactccacttacccattcaacaataaact

SEQ ID NO: 257206 - DNA, 33 bp, Homo sapien
atgccactccacttacgcattcaacaataaact

SEQ ID NO: 257207 - DNA, 33 bp, Homo sapien
tggttctgaggtgagactaactaacctataaag

SEQ ID NO: 257208 - DNA, 33 bp, Homo sapien
tggttctgaggtgagattaactaacctataaag

SEQ ID NO: 257209 - DNA, 33 bp, Homo sapien
tattaaggtgagattacattgtgcttttattta

SEQ ID NO: 257210 - DNA, 33 bp, Homo sapien
tattaaggtgagattatattgtgcttttattta

SEQ ID NO: 257211 - DNA, 33 bp, Homo sapien
caagaatgtactgcaaagaatataatgtctcag

SEQ ID NO: 257212 - DNA, 33 bp, Homo sapien
caagaatgtactgcaaggaatataatgtctcag

SEQ ID NO: 257213 - DNA, 33 bp, Homo sapien
gagataaaacacacaactgaggtaaaagtagtg

SEQ ID NO: 257214 - DNA, 33 bp, Homo sapien
gagataaaacacacaattgaggtaaaagtagtg

SEQ ID NO: 257215 - DNA, 33 bp, Homo sapien
cctgcccatctgtccaagtgagatctcagtctg

SEQ ID NO: 257216 - DNA, 33 bp, Homo sapien
cctgcccatctgtccaggtgagatctcagtctg

SEQ ID NO: 257217 - DNA, 33 bp, Homo sapien
atttggttcagttctcccacatgtcctgccctg

SEQ ID NO: 257218 - DNA, 33 bp, Homo sapien
atttggttcagttctctcacatgtcctgccctg

SEQ ID NO: 257219 - DNA, 33 bp, Homo sapien
gggtaccctctgagccgccaacatggctcctct

SEQ ID NO: 257220 - DNA, 33 bp, Homo sapien
gggtaccctctgagcctccaacatggctcctct

SEQ ID NO: 257221 - DNA, 33 bp, Homo sapien
ggttaagagtgaaacaaggacatgggttggagt

SEQ ID NO: 257222 - DNA, 33 bp, Homo sapien
ggttaagagtgaaacagggacatgggttggagt

SEQ ID NO: 257223 - DNA, 33 bp, Homo sapien
gaaacatccagaagaacgtctgaccaaatatct

SEQ ID NO: 257224 - DNA, 33 bp, Homo sapien
gaaacatccagaagaatgtctgaccaaatatct

SEQ ID NO: 257225 - DNA, 33 bp, Homo sapien
ttcttgtttgctgtgaaaggcgcagtcacttcg

SEQ ID NO: 257226 - DNA, 33 bp, Homo sapien
ttcttgtttgctgtgagaggcgcagtcacttcg

SEQ ID NO: 257227 - DNA, 33 bp, Homo sapien
taaacgttgtttcagaaatttgtgagtgcacat

SEQ ID NO: 257228 - DNA, 33 bp, Homo sapien
taaacgttgtttcagatatttgtgagtgcacat

SEQ ID NO: 257229 - DNA, 33 bp, Homo sapien
ataagagaggatacacagaaatggaaaaacatc

SEQ ID NO: 257230 - DNA, 33 bp, Homo sapien
ataagagaggatacacggaaatggaaaaacatc

SEQ ID NO: 257231 - DNA, 33 bp, Homo sapien
agtgtgtgtaccgggcaccagttattgtgtcca

SEQ ID NO: 257232 - DNA, 33 bp, Homo sapien
agtgtgtgtaccgggcgccagttattgtgtcca

SEQ ID NO: 257233 - DNA, 33 bp, Homo sapien
gatcaggatgtcaacacaggaaggcagaatgtg

SEQ ID NO: 257234 - DNA, 33 bp, Homo sapien
gatcaggatgtcaacataggaaggcagaatgtg

SEQ ID NO: 257235 - DNA, 33 bp, Homo sapien
gatggccttgcctttacaatgctcagggtttgg

SEQ ID NO: 257236 - DNA, 33 bp, Homo sapien
gatggccttgcctttataatgctcagggtttgg

SEQ ID NO: 257237 - DNA, 33 bp, Homo sapien
atgagtacccatgatcacctccaaagcaaaact

SEQ ID NO: 257238 - DNA, 33 bp, Homo sapien
atgagtacccatgatcgcctccaaagcaaaact

SEQ ID NO: 257239 - DNA, 33 bp, Homo sapien
ttgataagtccctgacacatagatggtgatcgg

SEQ ID NO: 257240 - DNA, 33 bp, Homo sapien
ttgataagtccctgacccatagatggtgatcgg

SEQ ID NO: 257241 - DNA, 33 bp, Homo sapien
ctcctattgtctctcacgattggtctctcatga

SEQ ID NO: 257242 - DNA, 33 bp, Homo sapien
ctcctattgtctctcatgattggtctctcatga

SEQ ID NO: 257243 - DNA, 33 bp, Homo sapien
ctaggtaagtcacagcagagagaggtttgttac

SEQ ID NO: 257244 - DNA, 33 bp, Homo sapien
ctaggtaagtcacagcggagagaggtttgttac

SEQ ID NO: 257245 - DNA, 33 bp, Homo sapien
gttgaagaagccctcactgaagcctcaagctgt

SEQ ID NO: 257246 - DNA, 33 bp, Homo sapien
gttgaagaagccctcattgaagcctcaagctgt

SEQ ID NO: 257247 - DNA, 33 bp, Homo sapien
gctcaaggagacagagaattcgccaggacagaa

SEQ ID NO: 257248 - DNA, 33 bp, Homo sapien
gctcaaggagacagaggattcgccaggacagaa

SEQ ID NO: 257249 - DNA, 33 bp, Homo sapien
aaggggtttgtagagacggtaagtgctcaagga

SEQ ID NO: 257250 - DNA, 33 bp, Homo sapien
aaggggtttgtagagatggtaagtgctcaagga

SEQ ID NO: 257251 - DNA, 33 bp, Homo sapien
cttcatggtgattacacagaaagtcatcagagg

SEQ ID NO: 257252 - DNA, 33 bp, Homo sapien
cttcatggtgattacatagaaagtcatcagagg

SEQ ID NO: 257253 - DNA, 33 bp, Homo sapien
caagtgaggttctaaaattcacacaccctctgt

SEQ ID NO: 257254 - DNA, 33 bp, Homo sapien
caagtgaggttctaaacttcacacaccctctgt

SEQ ID NO: 257255 - DNA, 33 bp, Homo sapien
gccactcttttccagaacccaggtgtaattaac

SEQ ID NO: 257256 - DNA, 33 bp, Homo sapien
gccactcttttccagaccccaggtgtaattaac

SEQ ID NO: 257257 - DNA, 33 bp, Homo sapien
ccaagtctagattggcaagttgaaataaaaaca

SEQ ID NO: 257258 - DNA, 33 bp, Homo sapien
ccaagtctagattggcgagttgaaataaaaaca

SEQ ID NO: 257259 - DNA, 33 bp, Homo sapien
ctccattgcagacaaaacactttgcattttctt

SEQ ID NO: 257260 - DNA, 33 bp, Homo sapien
ctccattgcagacaaagcactttgcattttctt

SEQ ID NO: 257261 - DNA, 33 bp, Homo sapien
actattatcctcctgaagtcgacagcgtttcct

SEQ ID NO: 257262 - DNA, 33 bp, Homo sapien
actattatcctcctgatgtcgacagcgtttcct

SEQ ID NO: 257263 - DNA, 33 bp, Homo sapien
acaattgaaaacctaccgagatgctatagaaga

SEQ ID NO: 257264 - DNA, 33 bp, Homo sapien
acaattgaaaacctactgagatgctatagaaga

SEQ ID NO: 257265 - DNA, 33 bp, Homo sapien
taaatctagaaaatgacaaaaggctgctagcat

SEQ ID NO: 257266 - DNA, 33 bp, Homo sapien
taaatctagaaaatgagaaaaggctgctagcat

SEQ ID NO: 257267 - DNA, 33 bp, Homo sapien
gcagcatgaaaacagactaattcagtgaatgat

SEQ ID NO: 257268 - DNA, 33 bp, Homo sapien
gcagcatgaaaacagagtaattcagtgaatgat

SEQ ID NO: 257269 - DNA, 33 bp, Homo sapien
caggagtgaaggtggaagcaacagaacttattg

SEQ ID NO: 257270 - DNA, 33 bp, Homo sapien
caggagtgaaggtggacgcaacagaacttattg

SEQ ID NO: 257271 - DNA, 33 bp, Homo sapien
actagaaaatgtttgacggctgtatggcttggg

SEQ ID NO: 257272 - DNA, 33 bp, Homo sapien
actagaaaatgtttgatggctgtatggcttggg

SEQ ID NO: 257273 - DNA, 33 bp, Homo sapien
gcaccttctatggacccgatgctattctaggtt

SEQ ID NO: 257274 - DNA, 33 bp, Homo sapien
gcaccttctatggacctgatgctattctaggtt

SEQ ID NO: 257275 - DNA, 33 bp, Homo sapien
agcaacttcctggtcacggttgggtcctactct

SEQ ID NO: 257276 - DNA, 33 bp, Homo sapien
agcaacttcctggtcatggttgggtcctactct

SEQ ID NO: 257277 - DNA, 33 bp, Homo sapien
cccagcaagttcatgcaaggaaggccaacatcc

SEQ ID NO: 257278 - DNA, 33 bp, Homo sapien
cccagcaagttcatgcgaggaaggccaacatcc

SEQ ID NO: 257279 - DNA, 33 bp, Homo sapien
tcaagtctaatcacagcaaaaacatcagataaa

SEQ ID NO: 257280 - DNA, 33 bp, Homo sapien
tcaagtctaatcacagtaaaaacatcagataaa

SEQ ID NO: 257281 - DNA, 33 bp, Homo sapien
acctgtttgatccaacactcaattattgtcttt

SEQ ID NO: 257282 - DNA, 33 bp, Homo sapien
acctgtttgatccaacgctcaattattgtcttt

SEQ ID NO: 257283 - DNA, 33 bp, Homo sapien
ctgaaaagaaaaggtgaaaatctccaggttatc

SEQ ID NO: 257284 - DNA, 33 bp, Homo sapien
ctgaaaagaaaaggtggaaatctccaggttatc

SEQ ID NO: 257285 - DNA, 33 bp, Homo sapien
agctgctgttcattgaaggtttattgcttttgt

SEQ ID NO: 257286 - DNA, 33 bp, Homo sapien
agctgctgttcattgagggtttattgcttttgt

SEQ ID NO: 257287 - DNA, 33 bp, Homo sapien
ggtgtcctggtgacacaatggaagtatgaacaa

SEQ ID NO: 257288 - DNA, 33 bp, Homo sapien
ggtgtcctggtgacacgatggaagtatgaacaa

SEQ ID NO: 257289 - DNA, 33 bp, Homo sapien
ccaccaagatcaagggcaaagattccagctgca

SEQ ID NO: 257290 - DNA, 33 bp, Homo sapien
ccaccaagatcaagggtaaagattccagctgca

SEQ ID NO: 257291 - DNA, 33 bp, Homo sapien
tggcagagaaatggcacctaagcatatttgtaa

SEQ ID NO: 257292 - DNA, 33 bp, Homo sapien
tggcagagaaatggcatctaagcatatttgtaa

SEQ ID NO: 257293 - DNA, 33 bp, Homo sapien
agggatgacatcattccgaaggacaggcagaac

SEQ ID NO: 257294 - DNA, 33 bp, Homo sapien
agggatgacatcattctgaaggacaggcagaac

SEQ ID NO: 257295 - DNA, 33 bp, Homo sapien
cttttgctgacttgcactatctggcatggaaac

SEQ ID NO: 257296 - DNA, 33 bp, Homo sapien
cttttgctgacttgcagtatctggcatggaaac

SEQ ID NO: 257297 - DNA, 33 bp, Homo sapien
tagccataaacatacaagatagcaagctgttcc

SEQ ID NO: 257298 - DNA, 33 bp, Homo sapien
tagccataaacatacaggatagcaagctgttcc

SEQ ID NO: 257299 - DNA, 33 bp, Homo sapien
actacacagtgcaagtaacgtatctatacaatc

SEQ ID NO: 257300 - DNA, 33 bp, Homo sapien
actacacagtgcaagtgacgtatctatacaatc

SEQ ID NO: 257301 - DNA, 33 bp, Homo sapien
cctgtaatgttgaaaacagatgtgctctttccc

SEQ ID NO: 257302 - DNA, 33 bp, Homo sapien
cctgtaatgttgaaaatagatgtgctctttccc

SEQ ID NO: 257303 - DNA, 33 bp, Homo sapien
gaaatgatttcacaaacggtacaaaaacatcat

SEQ ID NO: 257304 - DNA, 33 bp, Homo sapien
gaaatgatttcacaaatggtacaaaaacatcat

SEQ ID NO: 257305 - DNA, 33 bp, Homo sapien
agcctgaacaaaaatccagcctaagcaaaaaga

SEQ ID NO: 257306 - DNA, 33 bp, Homo sapien
agcctgaacaaaaatcgagcctaagcaaaaaga

SEQ ID NO: 257307 - DNA, 33 bp, Homo sapien
tagttagtgtttgcaaagaatatttttccattc

SEQ ID NO: 257308 - DNA, 33 bp, Homo sapien
tagttagtgtttgcaaggaatatttttccattc

SEQ ID NO: 257309 - DNA, 33 bp, Homo sapien
taagacactgggaaaaaactcaagcatcaatac

SEQ ID NO: 257310 - DNA, 33 bp, Homo sapien
taagacactgggaaaatactcaagcatcaatac

SEQ ID NO: 257311 - DNA, 33 bp, Homo sapien
aagccaaccagcataacagtcccaatgacttct

SEQ ID NO: 257312 - DNA, 33 bp, Homo sapien
aagccaaccagcataagagtcccaatgacttct

SEQ ID NO: 257313 - DNA, 33 bp, Homo sapien
ctgtgtcaattgtgcccattcctgttaaccgac

SEQ ID NO: 257314 - DNA, 33 bp, Homo sapien
ctgtgtcaattgtgcctattcctgttaaccgac

SEQ ID NO: 257315 - DNA, 33 bp, Homo sapien
gacagaaggagacccaccaaatttgtggtaacg

SEQ ID NO: 257316 - DNA, 33 bp, Homo sapien
gacagaaggagacccatcaaatttgtggtaacg

SEQ ID NO: 257317 - DNA, 33 bp, Homo sapien
atctatttctgtgtgagaatcagacattcataa

SEQ ID NO: 257318 - DNA, 33 bp, Homo sapien
atctatttctgtgtgataatcagacattcataa

SEQ ID NO: 257319 - DNA, 33 bp, Homo sapien
cgcaggtagatttgtcacttttgctttagattc

SEQ ID NO: 257320 - DNA, 33 bp, Homo sapien
cgcaggtagatttgtctcttttgctttagattc

SEQ ID NO: 257321 - DNA, 33 bp, Homo sapien
ctttaagcaatgaaccaaaacacaagatgtcaa

SEQ ID NO: 257322 - DNA, 33 bp, Homo sapien
ctttaagcaatgaaccgaaacacaagatgtcaa

SEQ ID NO: 257323 - DNA, 33 bp, Homo sapien
aggtttcactttctccactatggaaggaaagag

SEQ ID NO: 257324 - DNA, 33 bp, Homo sapien
aggtttcactttctccgctatggaaggaaagag

SEQ ID NO: 257325 - DNA, 33 bp, Homo sapien
ttaaaagtgaacctcaaagcattttcaatgaaa

SEQ ID NO: 257326 - DNA, 33 bp, Homo sapien
ttaaaagtgaacctcatagcattttcaatgaaa

SEQ ID NO: 257327 - DNA, 33 bp, Homo sapien
gaaactgttccactgccgatcataaggcgcttg

SEQ ID NO: 257328 - DNA, 33 bp, Homo sapien
gaaactgttccactgctgatcataaggcgcttg

SEQ ID NO: 257329 - DNA, 33 bp, Homo sapien
taaggtgatcgctctccgactcatagcactaga

SEQ ID NO: 257330 - DNA, 33 bp, Homo sapien
taaggtgatcgctctctgactcatagcactaga

SEQ ID NO: 257331 - DNA, 33 bp, Homo sapien
actggtaaatatgataaagtatatgctgaccca

SEQ ID NO: 257332 - DNA, 33 bp, Homo sapien
actggtaaatatgatagagtatatgctgaccca

SEQ ID NO: 257333 - DNA, 33 bp, Homo sapien
atcagaggtcatacagccatcttgcttccagcc

SEQ ID NO: 257334 - DNA, 33 bp, Homo sapien
atcagaggtcatacaggcatcttgcttccagcc

SEQ ID NO: 257335 - DNA, 33 bp, Homo sapien
tacagtgtaaatgctacgtatatagttgttata

SEQ ID NO: 257336 - DNA, 33 bp, Homo sapien
tacagtgtaaatgctatgtatatagttgttata

SEQ ID NO: 257337 - DNA, 33 bp, Homo sapien
gtaaaaattgccagtacaccttcaggagtcatg

SEQ ID NO: 257338 - DNA, 33 bp, Homo sapien
gtaaaaattgccagtataccttcaggagtcatg

SEQ ID NO: 257339 - DNA, 33 bp, Homo sapien
gatacagccccgagcaaatcgtacagcaggaaa

SEQ ID NO: 257340 - DNA, 33 bp, Homo sapien
gatacagccccgagcacatcgtacagcaggaaa

SEQ ID NO: 257341 - DNA, 33 bp, Homo sapien
ttttcttcaggtctcacaatattttgtttgttt

SEQ ID NO: 257342 - DNA, 33 bp, Homo sapien
ttttcttcaggtctcataatattttgtttgttt

SEQ ID NO: 257343 - DNA, 33 bp, Homo sapien
ctgtaacgtggccttacaaacatcctcaaaggg

SEQ ID NO: 257344 - DNA, 33 bp, Homo sapien
ctgtaacgtggccttagaaacatcctcaaaggg

SEQ ID NO: 257345 - DNA, 33 bp, Homo sapien
ctgttcagagagactcaaaaagtgattgtaatg

SEQ ID NO: 257346 - DNA, 33 bp, Homo sapien
ctgttcagagagactcgaaaagtgattgtaatg

SEQ ID NO: 257347 - DNA, 33 bp, Homo sapien
aaaagcaaaaaaaactaaactcatgcagtttac

SEQ ID NO: 257348 - DNA, 33 bp, Homo sapien
aaaagcaaaaaaaacttaactcatgcagtttac

SEQ ID NO: 257349 - DNA, 33 bp, Homo sapien
caagttctctttttcgccaatgatgtagctgtt

SEQ ID NO: 257350 - DNA, 33 bp, Homo sapien
caagttctctttttcgtcaatgatgtagctgtt

SEQ ID NO: 257351 - DNA, 33 bp, Homo sapien
caagatgggaatctaactggagatctctgacag

SEQ ID NO: 257352 - DNA, 33 bp, Homo sapien
caagatgggaatctaattggagatctctgacag

SEQ ID NO: 257353 - DNA, 33 bp, Homo sapien
caatcgaagctctagactagcaagactgagcag

SEQ ID NO: 257354 - DNA, 33 bp, Homo sapien
caatcgaagctctagattagcaagactgagcag

SEQ ID NO: 257355 - DNA, 33 bp, Homo sapien
cggctgcatctttgtcgcagaaacagacattgt

SEQ ID NO: 257356 - DNA, 33 bp, Homo sapien
cggctgcatctttgtctcagaaacagacattgt

SEQ ID NO: 257357 - DNA, 33 bp, Homo sapien
aaggtcagagaatttacaacttgatattttgct

SEQ ID NO: 257358 - DNA, 33 bp, Homo sapien
aaggtcagagaatttagaacttgatattttgct

SEQ ID NO: 257359 - DNA, 33 bp, Homo sapien
gctttaaggcaaaaaggatcaatttctatgttt

SEQ ID NO: 257360 - DNA, 33 bp, Homo sapien
gctttaaggcaaaaagtatcaatttctatgttt

SEQ ID NO: 257361 - DNA, 33 bp, Homo sapien
tacttcaggcatctcaaaaaaaaaagtgttgaa

SEQ ID NO: 257362 - DNA, 33 bp, Homo sapien
tacttcaggcatctcagaaaaaaaagtgttgaa

SEQ ID NO: 257363 - DNA, 33 bp, Homo sapien
agccggcgctctccagaaggaatggaagtgggt

SEQ ID NO: 257364 - DNA, 33 bp, Homo sapien
agccggcgctctccaggaggaatggaagtgggt

SEQ ID NO: 257365 - DNA, 33 bp, Homo sapien
aacagcagataaggaacgccctggaaaacatca

SEQ ID NO: 257366 - DNA, 33 bp, Homo sapien
aacagcagataaggaatgccctggaaaacatca

SEQ ID NO: 257367 - DNA, 33 bp, Homo sapien
tataacacaaagtataacacaaataaatgcttg

SEQ ID NO: 257368 - DNA, 33 bp, Homo sapien
tataacacaaagtataccacaaataaatgcttg

SEQ ID NO: 257369 - DNA, 33 bp, Homo sapien
ttacatttttacggcacgagttggttgtcaaag

SEQ ID NO: 257370 - DNA, 33 bp, Homo sapien
ttacatttttacggcatgagttggttgtcaaag

SEQ ID NO: 257371 - DNA, 33 bp, Homo sapien
agtctctgttacaaaccctcaactatctgtcta

SEQ ID NO: 257372 - DNA, 33 bp, Homo sapien
agtctctgttacaaacgctcaactatctgtcta

SEQ ID NO: 257373 - DNA, 33 bp, Homo sapien
taagaaaatggaaggaaaagccacaatttggga

SEQ ID NO: 257374 - DNA, 33 bp, Homo sapien
taagaaaatggaaggacaagccacaatttggga

SEQ ID NO: 257375 - DNA, 33 bp, Homo sapien
gagtatgatgactcacacctgctgttagcgtca

SEQ ID NO: 257376 - DNA, 33 bp, Homo sapien
gagtatgatgactcacgcctgctgttagcgtca

SEQ ID NO: 257377 - DNA, 33 bp, Homo sapien
ttttaaaatatcgtctaaagcagtttattttaa

SEQ ID NO: 257378 - DNA, 33 bp, Homo sapien
ttttaaaatatcgtctgaagcagtttattttaa

SEQ ID NO: 257379 - DNA, 33 bp, Homo sapien
tagctctacagacctagagcaatgccaaatcct

SEQ ID NO: 257380 - DNA, 33 bp, Homo sapien
tagctctacagacctatagcaatgccaaatcct

SEQ ID NO: 257381 - DNA, 33 bp, Homo sapien
caaaagaaaagccaaactgatggaaatttactt

SEQ ID NO: 257382 - DNA, 33 bp, Homo sapien
caaaagaaaagccaaagtgatggaaatttactt

SEQ ID NO: 257383 - DNA, 33 bp, Homo sapien
tacagtcttcagaaggaaaattaaatggacaca

SEQ ID NO: 257384 - DNA, 33 bp, Homo sapien
tacagtcttcagaaggcaaattaaatggacaca

SEQ ID NO: 257385 - DNA, 33 bp, Homo sapien
tcatcttgtacccttacctgcaatgcccttttc

SEQ ID NO: 257386 - DNA, 33 bp, Homo sapien
tcatcttgtacccttatctgcaatgcccttttc

SEQ ID NO: 257387 - DNA, 33 bp, Homo sapien
tgaaacaccaccaaaaatcaaatttatgagtaa

SEQ ID NO: 257388 - DNA, 33 bp, Homo sapien
tgaaacaccaccaaaactcaaatttatgagtaa

SEQ ID NO: 257389 - DNA, 33 bp, Homo sapien
atatctgcttcaggtacagggctgctagaaaga

SEQ ID NO: 257390 - DNA, 33 bp, Homo sapien
atatctgcttcaggtagagggctgctagaaaga

SEQ ID NO: 257391 - DNA, 33 bp, Homo sapien
gagggtggaattaaaaatacaactggggtggtg

SEQ ID NO: 257392 - DNA, 33 bp, Homo sapien
gagggtggaattaaaagtacaactggggtggtg

SEQ ID NO: 257393 - DNA, 33 bp, Homo sapien
ataagtgccatagaaacagagcttgaaatactg

SEQ ID NO: 257394 - DNA, 33 bp, Homo sapien
ataagtgccatagaaatagagcttgaaatactg

SEQ ID NO: 257395 - DNA, 33 bp, Homo sapien
aaatcagattctttggacaagagtcagtttagg

SEQ ID NO: 257396 - DNA, 33 bp, Homo sapien
aaatcagattctttggtcaagagtcagtttagg

SEQ ID NO: 257397 - DNA, 33 bp, Homo sapien
gttgcagcttggtacgcaatccaaatggacttg

SEQ ID NO: 257398 - DNA, 33 bp, Homo sapien
gttgcagcttggtacgtaatccaaatggacttg

SEQ ID NO: 257399 - DNA, 33 bp, Homo sapien
atttatttcgtgaacactggggttgcttttttc

SEQ ID NO: 257400 - DNA, 33 bp, Homo sapien
atttatttcgtgaacattggggttgcttttttc

SEQ ID NO: 257401 - DNA, 33 bp, Homo sapien
gctatatggacaagaaaaattttgtgtgtgaca

SEQ ID NO: 257402 - DNA, 33 bp, Homo sapien
gctatatggacaagaataattttgtgtgtgaca

SEQ ID NO: 257403 - DNA, 33 bp, Homo sapien
agggcactgtgcacaacacaaagctgaagctga

SEQ ID NO: 257404 - DNA, 33 bp, Homo sapien
agggcactgtgcacaatacaaagctgaagctga

SEQ ID NO: 257405 - DNA, 33 bp, Homo sapien
ctggttgaagaatgacgccagtgcttcaatcta

SEQ ID NO: 257406 - DNA, 33 bp, Homo sapien
ctggttgaagaatgactccagtgcttcaatcta

SEQ ID NO: 257407 - DNA, 33 bp, Homo sapien
acattttttgtaatgacggaagcaagtagacag

SEQ ID NO: 257408 - DNA, 33 bp, Homo sapien
acattttttgtaatgatggaagcaagtagacag

SEQ ID NO: 257409 - DNA, 33 bp, Homo sapien
tggagatataaagacaagataactgtaagacac

SEQ ID NO: 257410 - DNA, 33 bp, Homo sapien
tggagatataaagacaggataactgtaagacac

SEQ ID NO: 257411 - DNA, 33 bp, Homo sapien
ggccctaatcaaggaacattcgtttttctcaga

SEQ ID NO: 257412 - DNA, 33 bp, Homo sapien
ggccctaatcaaggaatattcgtttttctcaga

SEQ ID NO: 257413 - DNA, 33 bp, Homo sapien
tgtcattatcttttaccacccagttcatgatca

SEQ ID NO: 257414 - DNA, 33 bp, Homo sapien
tgtcattatcttttactacccagttcatgatca

SEQ ID NO: 257415 - DNA, 33 bp, Homo sapien
gattcaaaaaaatgagacgagcataaattgttc

SEQ ID NO: 257416 - DNA, 33 bp, Homo sapien
gattcaaaaaaatgaggcgagcataaattgttc

SEQ ID NO: 257417 - DNA, 33 bp, Homo sapien
tcctcaatgagatgaacagagggcaagtgctta

SEQ ID NO: 257418 - DNA, 33 bp, Homo sapien
tcctcaatgagatgaagagagggcaagtgctta

SEQ ID NO: 257419 - DNA, 33 bp, Homo sapien
tcccacccacttcgcaaaataacatggaccact

SEQ ID NO: 257420 - DNA, 33 bp, Homo sapien
tcccacccacttcgcagaataacatggaccact

SEQ ID NO: 257421 - DNA, 33 bp, Homo sapien
taggaagcaggaagtacgtgatatcagctctct

SEQ ID NO: 257422 - DNA, 33 bp, Homo sapien
taggaagcaggaagtatgtgatatcagctctct

SEQ ID NO: 257423 - DNA, 33 bp, Homo sapien
ataactcgagatgtcacaaaataaggaacgaaa

SEQ ID NO: 257424 - DNA, 33 bp, Homo sapien
ataactcgagatgtcagaaaataaggaacgaaa

SEQ ID NO: 257425 - DNA, 33 bp, Homo sapien
cctgtcattaccaaaaatattcatggagacttt

SEQ ID NO: 257426 - DNA, 33 bp, Homo sapien
cctgtcattaccaaaagtattcatggagacttt

SEQ ID NO: 257427 - DNA, 33 bp, Homo sapien
cagtgagacaggggtacacttggttacactgca

SEQ ID NO: 257428 - DNA, 33 bp, Homo sapien
cagtgagacaggggtatacttggttacactgca

SEQ ID NO: 257429 - DNA, 33 bp, Homo sapien
gacattaattggatacaacctgctctaggcatt

SEQ ID NO: 257430 - DNA, 33 bp, Homo sapien
gacattaattggatactacctgctctaggcatt

SEQ ID NO: 257431 - DNA, 33 bp, Homo sapien
gtaggttatgctctaactgatgagacagccaac

SEQ ID NO: 257432 - DNA, 33 bp, Homo sapien
gtaggttatgctctaattgatgagacagccaac

SEQ ID NO: 257433 - DNA, 33 bp, Homo sapien
aataatgaatttagtaacaagcctgttgagttt

SEQ ID NO: 257434 - DNA, 33 bp, Homo sapien
aataatgaatttagtatcaagcctgttgagttt

SEQ ID NO: 257435 - DNA, 33 bp, Homo sapien
tgttaaaaaatattcaaagtactgtactggtag

SEQ ID NO: 257436 - DNA, 33 bp, Homo sapien
tgttaaaaaatattcagagtactgtactggtag

SEQ ID NO: 257437 - DNA, 33 bp, Homo sapien
cgactacagctatccacagagttgtttactgta

SEQ ID NO: 257438 - DNA, 33 bp, Homo sapien
cgactacagctatccatagagttgtttactgta

SEQ ID NO: 257439 - DNA, 33 bp, Homo sapien
caagtgatctgtttcactcatttaagctgggga

SEQ ID NO: 257440 - DNA, 33 bp, Homo sapien
caagtgatctgtttcattcatttaagctgggga

SEQ ID NO: 257441 - DNA, 33 bp, Homo sapien
ggctttaggatcaggccgaatatgaggacaaag

SEQ ID NO: 257442 - DNA, 33 bp, Homo sapien
ggctttaggatcaggctgaatatgaggacaaag

SEQ ID NO: 257443 - DNA, 33 bp, Homo sapien
gagacaagagaaagacaaggagaaaatatttgt

SEQ ID NO: 257444 - DNA, 33 bp, Homo sapien
gagacaagagaaagacgaggagaaaatatttgt

SEQ ID NO: 257445 - DNA, 33 bp, Homo sapien
gaaagagccaagaattaaaaatggttgcttctg

SEQ ID NO: 257446 - DNA, 33 bp, Homo sapien
gaaagagccaagaattgaaaatggttgcttctg

SEQ ID NO: 257447 - DNA, 33 bp, Homo sapien
tggtaaatgagtacaaacatatagctaaataga

SEQ ID NO: 257448 - DNA, 33 bp, Homo sapien
tggtaaatgagtacaaccatatagctaaataga

SEQ ID NO: 257449 - DNA, 33 bp, Homo sapien
ctacaaaactctgaggaaagaaattgaagacac

SEQ ID NO: 257450 - DNA, 33 bp, Homo sapien
ctacaaaactctgagggaagaaattgaagacac

SEQ ID NO: 257451 - DNA, 33 bp, Homo sapien
atagtgtgattcagagcaaagagcattaaccta

SEQ ID NO: 257452 - DNA, 33 bp, Homo sapien
atagtgtgattcagaggaaagagcattaaccta

SEQ ID NO: 257453 - DNA, 33 bp, Homo sapien
cagatacacataattcacaacagctgagaaagc

SEQ ID NO: 257454 - DNA, 33 bp, Homo sapien
cagatacacataattcgcaacagctgagaaagc

SEQ ID NO: 257455 - DNA, 33 bp, Homo sapien
aataattcttatccagacatgggagccagtgaa

SEQ ID NO: 257456 - DNA, 33 bp, Homo sapien
aataattcttatccagtcatgggagccagtgaa

SEQ ID NO: 257457 - DNA, 33 bp, Homo sapien
acctgttgcccctttccatcgtgtatttatgta

SEQ ID NO: 257458 - DNA, 33 bp, Homo sapien
acctgttgcccctttcgatcgtgtatttatgta

SEQ ID NO: 257459 - DNA, 33 bp, Homo sapien
tggtcgtgtggtgtcaatcacatagcgtgacat

SEQ ID NO: 257460 - DNA, 33 bp, Homo sapien
tggtcgtgtggtgtcagtcacatagcgtgacat

SEQ ID NO: 257461 - DNA, 33 bp, Homo sapien
ggtattatgaaaaagcactaggttaggtttcag

SEQ ID NO: 257462 - DNA, 33 bp, Homo sapien
ggtattatgaaaaagcgctaggttaggtttcag

SEQ ID NO: 257463 - DNA, 33 bp, Homo sapien
acatgggtttcaaaaacacacactggtatcaag

SEQ ID NO: 257464 - DNA, 33 bp, Homo sapien
acatgggtttcaaaaagacacactggtatcaag

SEQ ID NO: 257465 - DNA, 33 bp, Homo sapien
gttaaactgagattcaaacaaattgtaagcaaa

SEQ ID NO: 257466 - DNA, 33 bp, Homo sapien
gttaaactgagattcatacaaattgtaagcaaa

SEQ ID NO: 257467 - DNA, 33 bp, Homo sapien
aagtaaggaagatgacaaattctactggaacat

SEQ ID NO: 257468 - DNA, 33 bp, Homo sapien
aagtaaggaagatgacgaattctactggaacat

SEQ ID NO: 257469 - DNA, 33 bp, Homo sapien
aacgtttatatggaacagcatcataatgtttat

SEQ ID NO: 257470 - DNA, 33 bp, Homo sapien
aacgtttatatggaacggcatcataatgtttat

SEQ ID NO: 257471 - DNA, 33 bp, Homo sapien
atacaatgcatagtaaacctttctcccatataa

SEQ ID NO: 257472 - DNA, 33 bp, Homo sapien
atacaatgcatagtaagcctttctcccatataa

SEQ ID NO: 257473 - DNA, 33 bp, Homo sapien
tccatcactctccttgaaattctatcagtttaa

SEQ ID NO: 257474 - DNA, 33 bp, Homo sapien
tccatcactctccttgcaattctatcagtttaa

SEQ ID NO: 257475 - DNA, 33 bp, Homo sapien
tgtcattggcctaacaccacaatatcacatttt

SEQ ID NO: 257476 - DNA, 33 bp, Homo sapien
tgtcattggcctaacatcacaatatcacatttt

SEQ ID NO: 257477 - DNA, 33 bp, Homo sapien
tttgtctatcctaagagacaaatcaccttttat

SEQ ID NO: 257478 - DNA, 33 bp, Homo sapien
tttgtctatcctaagatacaaatcaccttttat

SEQ ID NO: 257479 - DNA, 33 bp, Homo sapien
agactactagggagacagcacaaatacttgctg

SEQ ID NO: 257480 - DNA, 33 bp, Homo sapien
agactactagggagacggcacaaatacttgctg

SEQ ID NO: 257481 - DNA, 33 bp, Homo sapien
gagctatttcaatgtgaaaccctacaatcaact

SEQ ID NO: 257482 - DNA, 33 bp, Homo sapien
gagctatttcaatgtggaaccctacaatcaact

SEQ ID NO: 257483 - DNA, 33 bp, Homo sapien
gtcctgtcaggtctagcaaatatggtcaaataa

SEQ ID NO: 257484 - DNA, 33 bp, Homo sapien
gtcctgtcaggtctagtaaatatggtcaaataa

SEQ ID NO: 257485 - DNA, 33 bp, Homo sapien
tgaattacctttatgaaacagtaccatatttct

SEQ ID NO: 257486 - DNA, 33 bp, Homo sapien
tgaattacctttatgagacagtaccatatttct

SEQ ID NO: 257487 - DNA, 33 bp, Homo sapien
cccaacgtcacactatcagtaagaagcagagct

SEQ ID NO: 257488 - DNA, 33 bp, Homo sapien
cccaacgtcacactattagtaagaagcagagct

SEQ ID NO: 257489 - DNA, 33 bp, Homo sapien
cttcacaggctatgcaaaacactttaatgtctg

SEQ ID NO: 257490 - DNA, 33 bp, Homo sapien
cttcacaggctatgcagaacactttaatgtctg

SEQ ID NO: 257491 - DNA, 33 bp, Homo sapien
agtaaaaattgaactacagctatatttaccaac

SEQ ID NO: 257492 - DNA, 33 bp, Homo sapien
agtaaaaattgaactagagctatatttaccaac

SEQ ID NO: 257493 - DNA, 33 bp, Homo sapien
ggcatgagccattgcacgaggactttttccatc

SEQ ID NO: 257494 - DNA, 33 bp, Homo sapien
ggcatgagccattgcatgaggactttttccatc

SEQ ID NO: 257495 - DNA, 33 bp, Homo sapien
gaaatttttcatttcccaatcataatgacaaag

SEQ ID NO: 257496 - DNA, 33 bp, Homo sapien
gaaatttttcatttcctaatcataatgacaaag

SEQ ID NO: 257497 - DNA, 33 bp, Homo sapien
gaaaaactgttttgatcactctaattgccattt

SEQ ID NO: 257498 - DNA, 33 bp, Homo sapien
gaaaaactgttttgatgactctaattgccattt

SEQ ID NO: 257499 - DNA, 33 bp, Homo sapien
cattgcattgacaaaacgagtagctgggtttag

SEQ ID NO: 257500 - DNA, 33 bp, Homo sapien
cattgcattgacaaaatgagtagctgggtttag

SEQ ID NO: 257501 - DNA, 33 bp, Homo sapien
gaataactcacactgccaagttgttatgcctgc

SEQ ID NO: 257502 - DNA, 33 bp, Homo sapien
gaataactcacactgcgaagttgttatgcctgc

SEQ ID NO: 257503 - DNA, 33 bp, Homo sapien
tttctcttctaggtcacgggagtttatactata

SEQ ID NO: 257504 - DNA, 33 bp, Homo sapien
tttctcttctaggtcatgggagtttatactata

SEQ ID NO: 257505 - DNA, 33 bp, Homo sapien
atgtttgttacatggacataacgtggaatggtg

SEQ ID NO: 257506 - DNA, 33 bp, Homo sapien
atgtttgttacatggatataacgtggaatggtg

SEQ ID NO: 257507 - DNA, 33 bp, Homo sapien
taccatgaattaaccaacacaaatcatatgttc

SEQ ID NO: 257508 - DNA, 33 bp, Homo sapien
taccatgaattaaccatcacaaatcatatgttc

SEQ ID NO: 257509 - DNA, 33 bp, Homo sapien
aggtcccagcccttatgaaatatagtgttggct

SEQ ID NO: 257510 - DNA, 33 bp, Homo sapien
aggtcccagcccttattaaatatagtgttggct

SEQ ID NO: 257511 - DNA, 33 bp, Homo sapien
tcatgtgatgcagccgccagcttcctgctgaga

SEQ ID NO: 257512 - DNA, 33 bp, Homo sapien
tcatgtgatgcagccgtcagcttcctgctgaga

SEQ ID NO: 257513 - DNA, 33 bp, Homo sapien
gtgtgtccttcccaaaacaaggtggtgtttact

SEQ ID NO: 257514 - DNA, 33 bp, Homo sapien
gtgtgtccttcccaaagcaaggtggtgtttact

SEQ ID NO: 257515 - DNA, 33 bp, Homo sapien
cattaccagcatgcaaattgaatacaggttctt

SEQ ID NO: 257516 - DNA, 33 bp, Homo sapien
cattaccagcatgcaagttgaatacaggttctt

SEQ ID NO: 257517 - DNA, 33 bp, Homo sapien
actgctgacaagtccaactacagggattttttt

SEQ ID NO: 257518 - DNA, 33 bp, Homo sapien
actgctgacaagtccatctacagggattttttt

SEQ ID NO: 257519 - DNA, 33 bp, Homo sapien
cccatttcctgtgaaaacctcaacttcttttca

SEQ ID NO: 257520 - DNA, 33 bp, Homo sapien
cccatttcctgtgaaagcctcaacttcttttca

SEQ ID NO: 257521 - DNA, 33 bp, Homo sapien
agatcaaaaatatacaagtttccatcaagaatc

SEQ ID NO: 257522 - DNA, 33 bp, Homo sapien
agatcaaaaatatacaggtttccatcaagaatc

SEQ ID NO: 257523 - DNA, 33 bp, Homo sapien
tggccgttttttgaccacaataagtatttgaat

SEQ ID NO: 257524 - DNA, 33 bp, Homo sapien
tggccgttttttgaccgcaataagtatttgaat

SEQ ID NO: 257525 - DNA, 33 bp, Homo sapien
aacataaaattctggcaagtaactatttgctaa

SEQ ID NO: 257526 - DNA, 33 bp, Homo sapien
aacataaaattctggctagtaactatttgctaa

SEQ ID NO: 257527 - DNA, 33 bp, Homo sapien
cagatgttgcatttgacagaatgaagcatccat

SEQ ID NO: 257528 - DNA, 33 bp, Homo sapien
cagatgttgcatttgatagaatgaagcatccat

SEQ ID NO: 257529 - DNA, 33 bp, Homo sapien
agttctttctctaggagacttttggctctaaaa

SEQ ID NO: 257530 - DNA, 33 bp, Homo sapien
agttctttctctaggatacttttggctctaaaa

SEQ ID NO: 257531 - DNA, 33 bp, Homo sapien
ctaatgtctcatagaaaaaggatgctaatccat

SEQ ID NO: 257532 - DNA, 33 bp, Homo sapien
ctaatgtctcatagaagaaggatgctaatccat

SEQ ID NO: 257533 - DNA, 33 bp, Homo sapien
ttctcttctagacagagctcaatgctggagttg

SEQ ID NO: 257534 - DNA, 33 bp, Homo sapien
ttctcttctagacagatctcaatgctggagttg

SEQ ID NO: 257535 - DNA, 33 bp, Homo sapien
actgttctagatggtacgtagcaaaaataagca

SEQ ID NO: 257536 - DNA, 33 bp, Homo sapien
actgttctagatggtatgtagcaaaaataagca

SEQ ID NO: 257537 - DNA, 33 bp, Homo sapien
aatgttatgtctcttagtaactatgtacacaaa

SEQ ID NO: 257538 - DNA, 33 bp, Homo sapien
aatgttatgtctcttattaactatgtacacaaa

SEQ ID NO: 257539 - DNA, 33 bp, Homo sapien
attcctcaaaatcctgaaattttacagataaaa

SEQ ID NO: 257540 - DNA, 33 bp, Homo sapien
attcctcaaaatcctggaattttacagataaaa

SEQ ID NO: 257541 - DNA, 33 bp, Homo sapien
gcaagggagaatcaaactttaacagtatacatc

SEQ ID NO: 257542 - DNA, 33 bp, Homo sapien
gcaagggagaatcaaattttaacagtatacatc

SEQ ID NO: 257543 - DNA, 33 bp, Homo sapien
gatctggcaaattatacgttcacccaagaagga

SEQ ID NO: 257544 - DNA, 33 bp, Homo sapien
gatctggcaaattataggttcacccaagaagga

SEQ ID NO: 257545 - DNA, 33 bp, Homo sapien
aaagaagaaattccaactggtagggtaacagcc

SEQ ID NO: 257546 - DNA, 33 bp, Homo sapien
aaagaagaaattccaattggtagggtaacagcc

SEQ ID NO: 257547 - DNA, 33 bp, Homo sapien
atcattggtcccaaacaattcccatactctttg

SEQ ID NO: 257548 - DNA, 33 bp, Homo sapien
atcattggtcccaaacgattcccatactctttg

SEQ ID NO: 257549 - DNA, 33 bp, Homo sapien
caaaccagtacagtccgcacttaacatcatcat

SEQ ID NO: 257550 - DNA, 33 bp, Homo sapien
caaaccagtacagtcctcacttaacatcatcat

SEQ ID NO: 257551 - DNA, 33 bp, Homo sapien
gtacttatcctggctcaatgcctaataataatc

SEQ ID NO: 257552 - DNA, 33 bp, Homo sapien
gtacttatcctggctcgatgcctaataataatc

SEQ ID NO: 257553 - DNA, 33 bp, Homo sapien
aaggactctgccgtgagaaagagagttagttca

SEQ ID NO: 257554 - DNA, 33 bp, Homo sapien
aaggactctgccgtgataaagagagttagttca

SEQ ID NO: 257555 - DNA, 33 bp, Homo sapien
cagaaaaatccaccagccatttgtaccaaaagc

SEQ ID NO: 257556 - DNA, 33 bp, Homo sapien
cagaaaaatccaccagtcatttgtaccaaaagc

SEQ ID NO: 257557 - DNA, 33 bp, Homo sapien
actcagctatgaaaggacaagagccacaagaga

SEQ ID NO: 257558 - DNA, 33 bp, Homo sapien
actcagctatgaaagggcaagagccacaagaga

SEQ ID NO: 257559 - DNA, 33 bp, Homo sapien
agaacaaaagtcgcagaactatggcatattatt

SEQ ID NO: 257560 - DNA, 33 bp, Homo sapien
agaacaaaagtcgcaggactatggcatattatt

SEQ ID NO: 257561 - DNA, 33 bp, Homo sapien
gagttacctccagcagacaaattcatagagaca

SEQ ID NO: 257562 - DNA, 33 bp, Homo sapien
gagttacctccagcaggcaaattcatagagaca

SEQ ID NO: 257563 - DNA, 33 bp, Homo sapien
gttcatagcaggtaccaataacaaaacagaaaa

SEQ ID NO: 257564 - DNA, 33 bp, Homo sapien
gttcatagcaggtaccgataacaaaacagaaaa

SEQ ID NO: 257565 - DNA, 33 bp, Homo sapien
gttttgtttggcgagaatagagcaatatattat

SEQ ID NO: 257566 - DNA, 33 bp, Homo sapien
gttttgtttggcgagagtagagcaatatattat

SEQ ID NO: 257567 - DNA, 33 bp, Homo sapien
tgacccaggacaaatgacagttcgaggggctca

SEQ ID NO: 257568 - DNA, 33 bp, Homo sapien
tgacccaggacaaatgccagttcgaggggctca

SEQ ID NO: 257569 - DNA, 33 bp, Homo sapien
aataaatgtctgtctaataactatctgtgtgtg

SEQ ID NO: 257570 - DNA, 33 bp, Homo sapien
aataaatgtctgtctagtaactatctgtgtgtg

SEQ ID NO: 257571 - DNA, 33 bp, Homo sapien
tagtagttaaggactacggcaaggaatctcagg

SEQ ID NO: 257572 - DNA, 33 bp, Homo sapien
tagtagttaaggactatggcaaggaatctcagg

SEQ ID NO: 257573 - DNA, 33 bp, Homo sapien
tgtcatcgggtgaaaaacgctatgctagggaag

SEQ ID NO: 257574 - DNA, 33 bp, Homo sapien
tgtcatcgggtgaaaagcgctatgctagggaag

SEQ ID NO: 257575 - DNA, 33 bp, Homo sapien
gaaagaagcctatatacggaaactggcctggag

SEQ ID NO: 257576 - DNA, 33 bp, Homo sapien
gaaagaagcctatatatggaaactggcctggag

SEQ ID NO: 257577 - DNA, 33 bp, Homo sapien
cttaccacatgctaccagacacggtcatagtca

SEQ ID NO: 257578 - DNA, 33 bp, Homo sapien
cttaccacatgctaccggacacggtcatagtca

SEQ ID NO: 257579 - DNA, 33 bp, Homo sapien
actgatattaaagccaataactaatcaaagcca

SEQ ID NO: 257580 - DNA, 33 bp, Homo sapien
actgatattaaagccagtaactaatcaaagcca

SEQ ID NO: 257581 - DNA, 33 bp, Homo sapien
tcaaagccagattcctaaaaacatatctcacaa

SEQ ID NO: 257582 - DNA, 33 bp, Homo sapien
tcaaagccagattcctgaaaacatatctcacaa

SEQ ID NO: 257583 - DNA, 33 bp, Homo sapien
ttgctcatggttctccacttgctaactctgggt

SEQ ID NO: 257584 - DNA, 33 bp, Homo sapien
ttgctcatggttctccgcttgctaactctgggt

SEQ ID NO: 257585 - DNA, 33 bp, Homo sapien
tttgaagtttatgaacagtacgacagtgtattg

SEQ ID NO: 257586 - DNA, 33 bp, Homo sapien
tttgaagtttatgaacggtacgacagtgtattg

SEQ ID NO: 257587 - DNA, 33 bp, Homo sapien; identical to SEQ ID NO: 257585

SEQ ID NO: 257588 - DNA, 33 bp, Homo sapien; identical to SEQ ID NO: 257586

SEQ ID NO: 257589 - DNA, 33 bp, Homo sapien
acattcaaagtggaaactatgaccatgtcatat

SEQ ID NO: 257590 - DNA, 33 bp, Homo sapien
acattcaaagtggaaattatgaccatgtcatat

SEQ ID NO: 257591 - DNA, 33 bp, Homo sapien
aacggaatttgatgaaattagagcaatttaaga

SEQ ID NO: 257592 - DNA, 33 bp, Homo sapien
aacggaatttgatgaagttagagcaatttaaga

SEQ ID NO: 257593 - DNA, 33 bp, Homo sapien
tgtttcttgaacttgaaacttcttggacctcag

SEQ ID NO: 257594 - DNA, 33 bp, Homo sapien
tgtttcttgaacttgagacttcttggacctcag

SEQ ID NO: 257595 - DNA, 33 bp, Homo sapien
ctcagaatttagattccctcatcaccaaaatta

SEQ ID NO: 257596 - DNA, 33 bp, Homo sapien
ctcagaatttagattctctcatcaccaaaatta

SEQ ID NO: 257597 - DNA, 33 bp, Homo sapien
gaacacctacacctccagaagtaactaaaattc

SEQ ID NO: 257598 - DNA, 33 bp, Homo sapien
gaacacctacacctccggaagtaactaaaattc

SEQ ID NO: 257599 - DNA, 33 bp, Homo sapien
cctattagagaccccaatagaagtaacaaatga

SEQ ID NO: 257600 - DNA, 33 bp, Homo sapien
cctattagagaccccagtagaagtaacaaatga

SEQ ID NO: 257601 - DNA, 33 bp, Homo sapien
attttaatgaagggcagtctatcatagtggttt

SEQ ID NO: 257602 - DNA, 33 bp, Homo sapien
attttaatgaagggcattctatcatagtggttt

SEQ ID NO: 257603 - DNA, 33 bp, Homo sapien
tcaatactaaaacaaacgctataaaatgaagtt

SEQ ID NO: 257604 - DNA, 33 bp, Homo sapien
tcaatactaaaacaaatgctataaaatgaagtt

SEQ ID NO: 257605 - DNA, 33 bp, Homo sapien
atgtctttggtaccaacgtattcatatttctgt

SEQ ID NO: 257606 - DNA, 33 bp, Homo sapien
atgtctttggtaccaatgtattcatatttctgt

SEQ ID NO: 257607 - DNA, 33 bp, Homo sapien
agtgttgggattgcaaacgttagccagtgtgcc

SEQ ID NO: 257608 - DNA, 33 bp, Homo sapien
agtgttgggattgcaagcgttagccagtgtgcc

SEQ ID NO: 257609 - DNA, 33 bp, Homo sapien
cccctatgggaaatgcgctgaggcctaatacga

SEQ ID NO: 257610 - DNA, 33 bp, Homo sapien
cccctatgggaaatgctctgaggcctaatacga

SEQ ID NO: 257611 - DNA, 33 bp, Homo sapien
ttgacataaccattatgaatttttggatgcata

SEQ ID NO: 257612 - DNA, 33 bp, Homo sapien
ttgacataaccattattaatttttggatgcata

SEQ ID NO: 257613 - DNA, 33 bp, Homo sapien; identical to SEQ ID NO: 257611

SEQ ID NO: 257614 - DNA, 33 bp, Homo sapien; identical to SEQ ID NO: 257612

SEQ ID NO: 257615 - DNA, 33 bp, Homo sapien
actttagttctcagaaacaggcctcagaaaaca

SEQ ID NO: 257616 - DNA, 33 bp, Homo sapien
actttagttctcagaagcaggcctcagaaaaca

SEQ ID NO: 257617 - DNA, 33 bp, Homo sapien
tactaggtgtccctaaagactgtggttctgagg

SEQ ID NO: 257618 - DNA, 33 bp, Homo sapien
tactaggtgtccctaacgactgtggttctgagg

SEQ ID NO: 257619 - DNA, 33 bp, Homo sapien
tcataaacattaaaaaagtcagagccaacaaag

SEQ ID NO: 257620 - DNA, 33 bp, Homo sapien
tcataaacattaaaaaggtcagagccaacaaag

SEQ ID NO: 257621 - DNA, 33 bp, Homo sapien; identical to SEQ ID NO: 257619

SEQ ID NO: 257622 - DNA, 33 bp, Homo sapien; identical to SEQ ID NO: 257620

SEQ ID NO: 257623 - DNA, 33 bp, Homo sapien
tacaaaagagtgagccagaaatgaacttcattt

SEQ ID NO: 257624 - DNA, 33 bp, Homo sapien
tacaaaagagtgagccggaaatgaacttcattt

SEQ ID NO: 257625 - DNA, 33 bp, Homo sapien
aaaccagagggatacaaagagcctatgtaagtc

SEQ ID NO: 257626 - DNA, 33 bp, Homo sapien
aaaccagagggatacacagagcctatgtaagtc

SEQ ID NO: 257627 - DNA, 33 bp, Homo sapien
atataaatgaatcccaaatgaatgaatgcatga

SEQ ID NO: 257628 - DNA, 33 bp, Homo sapien
atataaatgaatcccagatgaatgaatgcatga

SEQ ID NO: 257629 - DNA, 33 bp, Homo sapien
tagtgaattgactttccaccaaattctagaaac

SEQ ID NO: 257630 - DNA, 33 bp, Homo sapien
tagtgaattgactttctaccaaattctagaaac

SEQ ID NO: 257631 - DNA, 33 bp, Homo sapien
tcatccttaaacgaacggtagagatgcagagaa

SEQ ID NO: 257632 - DNA, 33 bp, Homo sapien
tcatccttaaacgaactgtagagatgcagagaa

SEQ ID NO: 257633 - DNA, 33 bp, Homo sapien
cgtagcagctcctggacagttagggccctgtat

SEQ ID NO: 257634 - DNA, 33 bp, Homo sapien
cgtagcagctcctggagagttagggccctgtat

SEQ ID NO: 257635 - DNA, 33 bp, Homo sapien
aaaatcttagctaggtaacacttaatgagacaa

SEQ ID NO: 257636 - DNA, 33 bp, Homo sapien
aaaatcttagctaggtgacacttaatgagacaa

SEQ ID NO: 257637 - DNA, 33 bp, Homo sapien
gggaggatcacagaaaaacaagacgtgactttt

SEQ ID NO: 257638 - DNA, 33 bp, Homo sapien
gggaggatcacagaaacacaagacgtgactttt

SEQ ID NO: 257639 - DNA, 33 bp, Homo sapien; identical to SEQ ID NO: 257637

SEQ ID NO: 257640 - DNA, 33 bp, Homo sapien; identical to SEQ ID NO: 257638

SEQ ID NO: 257641 - DNA, 33 bp, Homo sapien
agtatctacttggaaaagatttaccaaaagttt

SEQ ID NO: 257642 - DNA, 33 bp, Homo sapien
agtatctacttggaaatgatttaccaaaagttt

SEQ ID NO: 257643 - DNA, 33 bp, Homo sapien
tcaagaaagactatcaagaaaagttccctttca

SEQ ID NO: 257644 - DNA, 33 bp, Homo sapien
tcaagaaagactatcaggaaaagttccctttca

SEQ ID NO: 257645 - DNA, 33 bp, Homo sapien
gcctttctctatattcacatcatcgccataggc

SEQ ID NO: 257646 - DNA, 33 bp, Homo sapien
gcctttctctatattctcatcatcgccataggc

SEQ ID NO: 257647 - DNA, 33 bp, Homo sapien; identical to SEQ ID NO: 257645

SEQ ID NO: 257648 - DNA, 33 bp, Homo sapien; identical to SEQ ID NO: 257646

SEQ ID NO: 257649 - DNA, 33 bp, Homo sapien
atatagacaggttgaccgagctggtttctgtta

SEQ ID NO: 257650 - DNA, 33 bp, Homo sapien
atatagacaggttgactgagctggtttctgtta

SEQ ID NO: 257651 - DNA, 33 bp, Homo sapien
tcattaataactcaacaagatacaaggtgctgg

SEQ ID NO: 257652 - DNA, 33 bp, Homo sapien
tcattaataactcaacgagatacaaggtgctgg

SEQ ID NO: 257653 - DNA, 33 bp, Homo sapien; identical to SEQ ID NO: 257651

SEQ ID NO: 257654 - DNA, 33 bp, Homo sapien; identical to SEQ ID NO: 257652

SEQ ID NO: 257655 - DNA, 33 bp, Homo sapien
ttgattttactggtaaaccaaatttaatgtcaa

SEQ ID NO: 257656 - DNA, 33 bp, Homo sapien
ttgattttactggtaagccaaatttaatgtcaa

SEQ ID NO: 257657 - DNA, 33 bp, Homo sapien
ctcttcaaaagattcaaagtcatgaaagtcaag

SEQ ID NO: 257658 - DNA, 33 bp, Homo sapien
ctcttcaaaagattcagagtcatgaaagtcaag

SEQ ID NO: 257659 - DNA, 33 bp, Homo sapien
attttctaagatgagcagcagagcttaaagata

SEQ ID NO: 257660 - DNA, 33 bp, Homo sapien
attttctaagatgagcggcagagcttaaagata

SEQ ID NO: 257661 - DNA, 33 bp, Homo sapien
tccatgagctcaaggacgcaggggttttcagtc

SEQ ID NO: 257662 - DNA, 33 bp, Homo sapien
tccatgagctcaaggatgcaggggttttcagtc

SEQ ID NO: 257663 - DNA, 33 bp, Homo sapien
aggacgtgtctcccgacggatcatgccaactct

SEQ ID NO: 257664 - DNA, 33 bp, Homo sapien
aggacgtgtctcccgatggatcatgccaactct

SEQ ID NO: 257665 - DNA, 33 bp, Homo sapien
aaagataaatgtgaatcagaaaacttgaccacc

SEQ ID NO: 257666 - DNA, 33 bp, Homo sapien
aaagataaatgtgaatgagaaaacttgaccacc

SEQ ID NO: 257667 - DNA, 33 bp, Homo sapien
agacaagcaatgaaaacgagtgaagcaaggaca

SEQ ID NO: 257668 - DNA, 33 bp, Homo sapien
agacaagcaatgaaaatgagtgaagcaaggaca

SEQ ID NO: 257669 - DNA, 33 bp, Homo sapien
tttgatttgacctgtacgatgtgatattgaaaa

SEQ ID NO: 257670 - DNA, 33 bp, Homo sapien
tttgatttgacctgtatgatgtgatattgaaaa

SEQ ID NO: 257671 - DNA, 33 bp, Homo sapien
atggaaaatagtgaaaacagtctaatgggattt

SEQ ID NO: 257672 - DNA, 33 bp, Homo sapien
atggaaaatagtgaaagcagtctaatgggattt

SEQ ID NO: 257673 - DNA, 33 bp, Homo sapien
aaccctgtcctgggcgcagcagcctttacctgg

SEQ ID NO: 257674 - DNA, 33 bp, Homo sapien
aaccctgtcctgggcgtagcagcctttacctgg

SEQ ID NO: 257675 - DNA, 33 bp, Homo sapien
atgcagatatctcttcgatttgctcatttccag

SEQ ID NO: 257676 - DNA, 33 bp, Homo sapien
atgcagatatctcttctatttgctcatttccag

SEQ ID NO: 257677 - DNA, 33 bp, Homo sapien
aaaacctatgtagttcaatactatgtagacaag

SEQ ID NO: 257678 - DNA, 33 bp, Homo sapien
aaaacctatgtagttcgatactatgtagacaag

SEQ ID NO: 257679 - DNA, 33 bp, Homo sapien
ctgaacaaaagacaagaaagtccagtctcatcc

SEQ ID NO: 257680 - DNA, 33 bp, Homo sapien
ctgaacaaaagacaaggaagtccagtctcatcc

SEQ ID NO: 257681 - DNA, 33 bp, Homo sapien; identical to SEQ ID NO: 257679

SEQ ID NO: 257682 - DNA, 33 bp, Homo sapien; identical to SEQ ID NO: 257680

SEQ ID NO: 257683 - DNA, 33 bp, Homo sapien
catagtataccagcataatatgtcaaggtgaca

SEQ ID NO: 257684 - DNA, 33 bp, Homo sapien
catagtataccagcatgatatgtcaaggtgaca

SEQ ID NO: 257685 - DNA, 33 bp, Homo sapien
aattactcactactcaaaaaaacagcttctgat

SEQ ID NO: 257686 - DNA, 33 bp, Homo sapien
aattactcactactcagaaaaacagcttctgat

SEQ ID NO: 257687 - DNA, 33 bp, Homo sapien
ccttcaagaagctagaaaaaaagcggatcaaga

SEQ ID NO: 257688 - DNA, 33 bp, Homo sapien
ccttcaagaagctagagaaaaagcggatcaaga

SEQ ID NO: 257689 - DNA, 33 bp, Homo sapien
cagtttgtgtcaacaaatcgaatttcagtcaat

SEQ ID NO: 257690 - DNA, 33 bp, Homo sapien
cagtttgtgtcaacaagtcgaatttcagtcaat

SEQ ID NO: 257691 - DNA, 33 bp, Homo sapien
ttctcttttccttcccaattatacaaaacagca

SEQ ID NO: 257692 - DNA, 33 bp, Homo sapien
ttctcttttccttccctattatacaaaacagca

SEQ ID NO: 257693 - DNA, 33 bp, Homo sapien
atttcgatgtttctaccctgccatccccagtgt

SEQ ID NO: 257694 - DNA, 33 bp, Homo sapien
atttcgatgtttctactctgccatccccagtgt

SEQ ID NO: 257695 - DNA, 33 bp, Homo sapien
ttgggaatcaagcccaatcgcggaactgtaggt

SEQ ID NO: 257696 - DNA, 33 bp, Homo sapien
ttgggaatcaagcccagtcgcggaactgtaggt

SEQ ID NO: 257697 - DNA, 33 bp, Homo sapien
tccttagtcctctaacacagtcatggaaaaatc

SEQ ID NO: 257698 - DNA, 33 bp, Homo sapien
tccttagtcctctaactcagtcatggaaaaatc

SEQ ID NO: 257699 - DNA, 33 bp, Homo sapien
aactacatgggctgccagctccagaaggacatg

SEQ ID NO: 257700 - DNA, 33 bp, Homo sapien
aactacatgggctgccggctccagaaggacatg

SEQ ID NO: 257701 - DNA, 33 bp, Homo sapien; identical to SEQ ID NO: 257699

SEQ ID NO: 257702 - DNA, 33 bp, Homo sapien; identical to SEQ ID NO: 257700

SEQ ID NO: 257703 - DNA, 33 bp, Homo sapien
gagtgaagatgaccaccgaggggagcaggtaca

SEQ ID NO: 257704 - DNA, 33 bp, Homo sapien
gagtgaagatgaccactgaggggagcaggtaca

SEQ ID NO: 257705 - DNA, 33 bp, Homo sapien; identical to SEQ ID NO: 257703

SEQ ID NO: 257706 - DNA, 33 bp, Homo sapien; identical to SEQ ID NO: 257704

SEQ ID NO: 257707 - DNA, 33 bp, Homo sapien
tgtgctcccaaaaagacaccccttctgtcccag

SEQ ID NO: 257708 - DNA, 33 bp, Homo sapien
tgtgctcccaaaaagataccccttctgtcccag

SEQ ID NO: 257709 - DNA, 33 bp, Homo sapien
gacaataaatataaaacgctcagtacaaaactt

SEQ ID NO: 257710 - DNA, 33 bp, Homo sapien
gacaataaatataaaatgctcagtacaaaactt

SEQ ID NO: 257711 - DNA, 33 bp, Homo sapien
ccccttgccaaattcaagtcctgtcagagagca

SEQ ID NO: 257712 - DNA, 33 bp, Homo sapien
ccccttgccaaattcatgtcctgtcagagagca

SEQ ID NO: 257713 - DNA, 33 bp, Homo sapien; identical to SEQ ID NO: 257711

SEQ ID NO: 257714 - DNA, 33 bp, Homo sapien; identical to SEQ ID NO: 257712

SEQ ID NO: 257715 - DNA, 33 bp, Homo sapien; identical to SEQ ID NO: 257711

SEQ ID NO: 257716 - DNA, 33 bp, Homo sapien; identical to SEQ ID NO: 257712

SEQ ID NO: 257717 - DNA, 33 bp, Homo sapien
cacatactttttttgcaatgagaacacttaaaa

SEQ ID NO: 257718 - DNA, 33 bp, Homo sapien
cacatactttttttgcgatgagaacacttaaaa

SEQ ID NO: 257719 - DNA, 33 bp, Homo sapien
ttacatggggaatctaaactcacagaaacaaac

SEQ ID NO: 257720 - DNA, 33 bp, Homo sapien
ttacatggggaatctacactcacagaaacaaac

SEQ ID NO: 257721 - DNA, 33 bp, Homo sapien
tcaggaccctgtatgacgcgtttccagccttct

SEQ ID NO: 257722 - DNA, 33 bp, Homo sapien
tcaggaccctgtatgatgcgtttccagccttct

SEQ ID NO: 257723 - DNA, 33 bp, Homo sapien
ttcttattgctctcaacgtctaaatatctcttg

SEQ ID NO: 257724 - DNA, 33 bp, Homo sapien
ttcttattgctctcaatgtctaaatatctcttg

SEQ ID NO: 257725 - DNA, 33 bp, Homo sapien
tgcagccggtgttgagaatcaccaattcagagg

SEQ ID NO: 257726 - DNA, 33 bp, Homo sapien
tgcagccggtgttgaggatcaccaattcagagg

SEQ ID NO: 257727 - DNA, 33 bp, Homo sapien
gaaggtacctgggatacctctgtactctgctca

SEQ ID NO: 257728 - DNA, 33 bp, Homo sapien
gaaggtacctgggatatctctgtactctgctca

SEQ ID NO: 257729 - DNA, 33 bp, Homo sapien
ggagctgtttgtcgaacgaggaagagaagagag

SEQ ID NO: 257730 - DNA, 33 bp, Homo sapien
ggagctgtttgtcgaatgaggaagagaagagag

SEQ ID NO: 257731 - DNA, 33 bp, Homo sapien
gtgcctcctgcactataaacgtttggcaccctt

SEQ ID NO: 257732 - DNA, 33 bp, Homo sapien
gtgcctcctgcactatcaacgtttggcaccctt

SEQ ID NO: 257733 - DNA, 33 bp, Homo sapien; identical to SEQ ID NO: 257731

SEQ ID NO: 257734 - DNA, 33 bp, Homo sapien; identical to SEQ ID NO: 257732

SEQ ID NO: 257735 - DNA, 33 bp, Homo sapien
ggcaacagcttccagcaactcaaaggcctgcag

SEQ ID NO: 257736 - DNA, 33 bp, Homo sapien
ggcaacagcttccagcgactcaaaggcctgcag

SEQ ID NO: 257737 - DNA, 33 bp, Homo sapien
agccagaggtactgcccaaggacttgttctcca

SEQ ID NO: 257738 - DNA, 33 bp, Homo sapien
agccagaggtactgccgaaggacttgttctcca

SEQ ID NO: 257739 - DNA, 33 bp, Homo sapien
tgccattgccattacaaacaaattaggagactt

SEQ ID NO: 257740 - DNA, 33 bp, Homo sapien
tgccattgccattacagacaaattaggagactt

SEQ ID NO: 257741 - DNA, 33 bp, Homo sapien
gttagcacttataacactgtaatttttgctaga

SEQ ID NO: 257742 - DNA, 33 bp, Homo sapien
gttagcacttataacattgtaatttttgctaga

SEQ ID NO: 257743 - DNA, 33 bp, Homo sapien
tgagtcttctattctccaacaattttctcctaa

SEQ ID NO: 257744 - DNA, 33 bp, Homo sapien
tgagtcttctattctctaacaattttctcctaa

SEQ ID NO: 257745 - DNA, 33 bp, Homo sapien
atgtcctagctaaaatcatagtttcctccacgt

SEQ ID NO: 257746 - DNA, 33 bp, Homo sapien
atgtcctagctaaaattatagtttcctccacgt

SEQ ID NO: 257747 - DNA, 33 bp, Homo sapien
tcagatgctggtgaaaaagtcatgtcctctacc

SEQ ID NO: 257748 - DNA, 33 bp, Homo sapien
tcagatgctggtgaaacagtcatgtcctctacc

SEQ ID NO: 257749 - DNA, 33 bp, Homo sapien
taagaaaagatactgaccctcacttataagata

SEQ ID NO: 257750 - DNA, 33 bp, Homo sapien
taagaaaagatactgatcctcacttataagata

SEQ ID NO: 257751 - DNA, 33 bp, Homo sapien
ttttctagacagagagccaaaccagccacaaac

SEQ ID NO: 257752 - DNA, 33 bp, Homo sapien
ttttctagacagagagtcaaaccagccacaaac

SEQ ID NO: 257753 - DNA, 33 bp, Homo sapien
ctgtttcatctgcagcaagcatctgttatttag

SEQ ID NO: 257754 - DNA, 33 bp, Homo sapien
ctgtttcatctgcagcgagcatctgttatttag

SEQ ID NO: 257755 - DNA, 33 bp, Homo sapien
gtcatttctttagcacaccaatttatctctcca

SEQ ID NO: 257756 - DNA, 33 bp, Homo sapien
gtcatttctttagcacgccaatttatctctcca

SEQ ID NO: 257757 - DNA, 33 bp, Homo sapien
actgcaataatttaaaagcactgaagtcttcat

SEQ ID NO: 257758 - DNA, 33 bp, Homo sapien
actgcaataatttaaaggcactgaagtcttcat

SEQ ID NO: 257759 - DNA, 33 bp, Homo sapien
gaaagggcaaaacttacagagttacacagatgt

SEQ ID NO: 257760 - DNA, 33 bp, Homo sapien
gaaagggcaaaacttatagagttacacagatgt

SEQ ID NO: 257761 - DNA, 33 bp, Homo sapien
gtctacggccatacgaactgaatgtgcctgatc

SEQ ID NO: 257762 - DNA, 33 bp, Homo sapien
gtctacggccatacgacctgaatgtgcctgatc

SEQ ID NO: 257763 - DNA, 33 bp, Homo sapien
ctcttagattactttgaactgagaactgatgag

SEQ ID NO: 257764 - DNA, 33 bp, Homo sapien
ctcttagattactttggactgagaactgatgag

SEQ ID NO: 257765 - DNA, 33 bp, Homo sapien
ctgatggtctttttcacaaggataactgagtag

SEQ ID NO: 257766 - DNA, 33 bp, Homo sapien
ctgatggtctttttcataaggataactgagtag

SEQ ID NO: 257767 - DNA, 33 bp, Homo sapien
aaatgttgccagaagggaattggcattaaactg

SEQ ID NO: 257768 - DNA, 33 bp, Homo sapien
aaatgttgccagaaggtaattggcattaaactg

SEQ ID NO: 257769 - DNA, 33 bp, Homo sapien
agtcttttcagttcacaattgagtgtacctggg

SEQ ID NO: 257770 - DNA, 33 bp, Homo sapien
agtcttttcagttcacgattgagtgtacctggg

SEQ ID NO: 257771 - DNA, 33 bp, Homo sapien
gaataagacaagtatcactactgttatttaata

SEQ ID NO: 257772 - DNA, 33 bp, Homo sapien
gaataagacaagtatcgctactgttatttaata

SEQ ID NO: 257773 - DNA, 33 bp, Homo sapien
tgaaggaggagtttgaccttagacttctgtcta

SEQ ID NO: 257774 - DNA, 33 bp, Homo sapien
tgaaggaggagtttgatcttagacttctgtcta

SEQ ID NO: 257775 - DNA, 33 bp, Homo sapien
ttatctaagaaagcacggactacaatgtattta

SEQ ID NO: 257776 - DNA, 33 bp, Homo sapien
ttatctaagaaagcactgactacaatgtattta

SEQ ID NO: 257777 - DNA, 33 bp, Homo sapien
atacagtcatgcaccacataacttttcagtcaa

SEQ ID NO: 257778 - DNA, 33 bp, Homo sapien
atacagtcatgcaccatataacttttcagtcaa

SEQ ID NO: 257779 - DNA, 33 bp, Homo sapien
actatcagatcacaatcaacattacagacaaga

SEQ ID NO: 257780 - DNA, 33 bp, Homo sapien
actatcagatcacaatgaacattacagacaaga

SEQ ID NO: 257781 - DNA, 33 bp, Homo sapien
atcattgctttctagaatactttaagttggatg

SEQ ID NO: 257782 - DNA, 33 bp, Homo sapien
atcattgctttctagactactttaagttggatg

SEQ ID NO: 257783 - DNA, 33 bp, Homo sapien
aatttaaaaccttacaagaccagtcagaaaaag

SEQ ID NO: 257784 - DNA, 33 bp, Homo sapien
aatttaaaaccttacaggaccagtcagaaaaag

SEQ ID NO: 257785 - DNA, 33 bp, Homo sapien
ttatttagactatagaatagcaggaaggaaaag

SEQ ID NO: 257786 - DNA, 33 bp, Homo sapien
ttatttagactatagagtagcaggaaggaaaag

SEQ ID NO: 257787 - DNA, 33 bp, Homo sapien
tctctgaagaaaacacggaattgagcatttact

SEQ ID NO: 257788 - DNA, 33 bp, Homo sapien
tctctgaagaaaacactgaattgagcatttact

SEQ ID NO: 257789 - DNA, 33 bp, Homo sapien
gatttctatgcttagcaaaaaataaggcagtat

SEQ ID NO: 257790 - DNA, 33 bp, Homo sapien
gatttctatgcttagcgaaaaataaggcagtat

SEQ ID NO: 257791 - DNA, 33 bp, Homo sapien
acttagtcatgttggggaagctcttttcactta

SEQ ID NO: 257792 - DNA, 33 bp, Homo sapien
acttagtcatgttgggtaagctcttttcactta

SEQ ID NO: 257793 - DNA, 33 bp, Homo sapien
ccctgctctatataagaaagtggccatcacatt

SEQ ID NO: 257794 - DNA, 33 bp, Homo sapien
ccctgctctatataagtaagtggccatcacatt

SEQ ID NO: 257795 - DNA, 33 bp, Homo sapien
ccgctccagtagcagactaagatccctctgatg

SEQ ID NO: 257796 - DNA, 33 bp, Homo sapien
ccgctccagtagcagattaagatccctctgatg

SEQ ID NO: 257797 - DNA, 33 bp, Homo sapien
ctaggctagaatgtaacggtgtgatcatggttc

SEQ ID NO: 257798 - DNA, 33 bp, Homo sapien
ctaggctagaatgtaatggtgtgatcatggttc

SEQ ID NO: 257799 - DNA, 33 bp, Homo sapien
agagagtaagccctataagaacctgaatgtgag

SEQ ID NO: 257800 - DNA, 33 bp, Homo sapien
agagagtaagccctatgagaacctgaatgtgag

SEQ ID NO: 257801 - DNA, 33 bp, Homo sapien
cctgtcacacgaaatcgaatttgatcattcagt

SEQ ID NO: 257802 - DNA, 33 bp, Homo sapien
cctgtcacacgaaatctaatttgatcattcagt

SEQ ID NO: 257803 - DNA, 33 bp, Homo sapien
aagtcaggctagatacaaaaaagcaggaaaatc

SEQ ID NO: 257804 - DNA, 33 bp, Homo sapien
aagtcaggctagatacgaaaaagcaggaaaatc

SEQ ID NO: 257805 - DNA, 33 bp, Homo sapien
ttgtaatacattctgagatcctttgaactgaaa

SEQ ID NO: 257806 - DNA, 33 bp, Homo sapien
ttgtaatacattctgatatcctttgaactgaaa

SEQ ID NO: 257807 - DNA, 33 bp, Homo sapien
tgagaagtagcacaacactgagttgaaaaggaa

SEQ ID NO: 257808 - DNA, 33 bp, Homo sapien
tgagaagtagcacaacgctgagttgaaaaggaa

SEQ ID NO: 257809 - DNA, 33 bp, Homo sapien
tatgccagacattgtgaataaaagtggagccac

SEQ ID NO: 257810 - DNA, 33 bp, Homo sapien
tatgccagacattgtgcataaaagtggagccac

SEQ ID NO: 257811 - DNA, 33 bp, Homo sapien
gcccagtcgtgtgaaacgagtcggagatagaca

SEQ ID NO: 257812 - DNA, 33 bp, Homo sapien
gcccagtcgtgtgaaatgagtcggagatagaca

SEQ ID NO: 257813 - DNA, 33 bp, Homo sapien
gtctgccaaattctgccgagaggtcaattgagt

SEQ ID NO: 257814 - DNA, 33 bp, Homo sapien
gtctgccaaattctgctgagaggtcaattgagt

SEQ ID NO: 257815 - DNA, 33 bp, Homo sapien
ggtaaaatctattaaaattccaagtacatggac

SEQ ID NO: 257816 - DNA, 33 bp, Homo sapien
ggtaaaatctattaaagttccaagtacatggac

SEQ ID NO: 257817 - DNA, 33 bp, Homo sapien
ggattaatgcggttctcaagagactggattagt

SEQ ID NO: 257818 - DNA, 33 bp, Homo sapien
ggattaatgcggttcttaagagactggattagt

SEQ ID NO: 257819 - DNA, 33 bp, Homo sapien
cctgccctcaaggaaaactatttgagcagagcc

SEQ ID NO: 257820 - DNA, 33 bp, Homo sapien
cctgccctcaaggaaatctatttgagcagagcc

SEQ ID NO: 257821 - DNA, 33 bp, Homo sapien
cactggagaagtctgaccagcttgtaagttagg

SEQ ID NO: 257822 - DNA, 33 bp, Homo sapien
cactggagaagtctgatcagcttgtaagttagg

SEQ ID NO: 257823 - DNA, 33 bp, Homo sapien
cacagaggagatggagaaaaacaggcaggtgtt

SEQ ID NO: 257824 - DNA, 33 bp, Homo sapien
cacagaggagatggagtaaaacaggcaggtgtt

SEQ ID NO: 257825 - DNA, 33 bp, Homo sapien
gcttatataggtttgacgagtacgtattatacc

SEQ ID NO: 257826 - DNA, 33 bp, Homo sapien
gcttatataggtttgatgagtacgtattatacc

SEQ ID NO: 257827 - DNA, 33 bp, Homo sapien
ctctgtttattaggtacgcaaacattttggatt

SEQ ID NO: 257828 - DNA, 33 bp, Homo sapien
ctctgtttattaggtatgcaaacattttggatt

SEQ ID NO: 257829 - DNA, 33 bp, Homo sapien
atctacgctctcagcaaatttcaagaaaacgat

SEQ ID NO: 257830 - DNA, 33 bp, Homo sapien
atctacgctctcagcagatttcaagaaaacgat

SEQ ID NO: 257831 - DNA, 33 bp, Homo sapien
tctgcttagaaaagaacggtgaagttgcccaga

SEQ ID NO: 257832 - DNA, 33 bp, Homo sapien
tctgcttagaaaagaatggtgaagttgcccaga

SEQ ID NO: 257833 - DNA, 33 bp, Homo sapien
ttgaagcctttgttccaagccatcgatcccacc

SEQ ID NO: 257834 - DNA, 33 bp, Homo sapien
ttgaagcctttgttccgagccatcgatcccacc

SEQ ID NO: 257835 - DNA, 33 bp, Homo sapien
tgcacccgctgacagaaccatgtctacatccct

SEQ ID NO: 257836 - DNA, 33 bp, Homo sapien
tgcacccgctgacagagccatgtctacatccct

SEQ ID NO: 257837 - DNA, 33 bp, Homo sapien
tctattcagttctacagattgtatcatggaccc

SEQ ID NO: 257838 - DNA, 33 bp, Homo sapien
tctattcagttctacatattgtatcatggaccc

SEQ ID NO: 257839 - DNA, 33 bp, Homo sapien
aaggaaagaatctagaaggagaagaagaggtct

SEQ ID NO: 257840 - DNA, 33 bp, Homo sapien
aaggaaagaatctagagggagaagaagaggtct

SEQ ID NO: 257841 - DNA, 33 bp, Homo sapien
tcaaaccctgctttgaagttcctagcaatctaa

SEQ ID NO: 257842 - DNA, 33 bp, Homo sapien
tcaaaccctgctttgatgttcctagcaatctaa

SEQ ID NO: 257843 - DNA, 33 bp, Homo sapien
ttgcttacatactgcccagtaatctttcaacca

SEQ ID NO: 257844 - DNA, 33 bp, Homo sapien
ttgcttacatactgcctagtaatctttcaacca

SEQ ID NO: 257845 - DNA, 33 bp, Homo sapien
acctggctttcatctcacccccaacagaaagtg

SEQ ID NO: 257846 - DNA, 33 bp, Homo sapien
acctggctttcatctcgcccccaacagaaagtg

SEQ ID NO: 257847 - DNA, 33 bp, Homo sapien
gcaatgttaaaaggaccgagatgcaggccttct

SEQ ID NO: 257848 - DNA, 33 bp, Homo sapien
gcaatgttaaaaggactgagatgcaggccttct

SEQ ID NO: 257849 - DNA, 33 bp, Homo sapien
gatttcagaccttcgaactctagaacggagaca

SEQ ID NO: 257850 - DNA, 33 bp, Homo sapien
gatttcagaccttcgagctctagaacggagaca

SEQ ID NO: 257851 - DNA, 33 bp, Homo sapien
gacgttttatgacctacccatctaagatcactt

SEQ ID NO: 257852 - DNA, 33 bp, Homo sapien
gacgttttatgacctatccatctaagatcactt

SEQ ID NO: 257853 - DNA, 33 bp, Homo sapien
ccttgactccctcacagagaccgaatccctgac

SEQ ID NO: 257854 - DNA, 33 bp, Homo sapien
ccttgactccctcacatagaccgaatccctgac

SEQ ID NO: 257855 - DNA, 33 bp, Homo sapien
gtctggcattttatgacctattcatctaagatc

SEQ ID NO: 257856 - DNA, 33 bp, Homo sapien
gtctggcattttatgagctattcatctaagatc

SEQ ID NO: 257857 - DNA, 33 bp, Homo sapien
agtaatgagtaaacaaatgttctaggacacaca

SEQ ID NO: 257858 - DNA, 33 bp, Homo sapien
agtaatgagtaaacaagtgttctaggacacaca

SEQ ID NO: 257859 - DNA, 33 bp, Homo sapien
tcttcttttctctaaagattttgctccactgtc

SEQ ID NO: 257860 - DNA, 33 bp, Homo sapien
tcttcttttctctaaatattttgctccactgtc

SEQ ID NO: 257861 - DNA, 33 bp, Homo sapien
caaacaccattaaccacgagagctctgtgatta

SEQ ID NO: 257862 - DNA, 33 bp, Homo sapien
caaacaccattaaccatgagagctctgtgatta

SEQ ID NO: 257863 - DNA, 33 bp, Homo sapien
tcctcctcatgaccccacggtatctgtcctttc

SEQ ID NO: 257864 - DNA, 33 bp, Homo sapien
tcctcctcatgaccccgcggtatctgtcctttc

SEQ ID NO: 257865 - DNA, 33 bp, Homo sapien
cctctgtggcttcctcaatataaatgggtacat

SEQ ID NO: 257866 - DNA, 33 bp, Homo sapien
cctctgtggcttcctcgatataaatgggtacat

SEQ ID NO: 257867 - DNA, 33 bp, Homo sapien
cagggaacacattttgcacaattggccattggc

SEQ ID NO: 257868 - DNA, 33 bp, Homo sapien
cagggaacacattttggacaattggccattggc

SEQ ID NO: 257869 - DNA, 33 bp, Homo sapien
tgcctcggtttattgtaaatttctctgtagacc

SEQ ID NO: 257870 - DNA, 33 bp, Homo sapien
tgcctcggtttattgtgaatttctctgtagacc

SEQ ID NO: 257871 - DNA, 33 bp, Homo sapien
tgccggtaggacgctcaagtgtacataagtgct

SEQ ID NO: 257872 - DNA, 33 bp, Homo sapien
tgccggtaggacgctcgagtgtacataagtgct

SEQ ID NO: 257873 - DNA, 33 bp, Homo sapien
gagctcaggttatcccaagtatctcaggttaaa

SEQ ID NO: 257874 - DNA, 33 bp, Homo sapien
gagctcaggttatcccgagtatctcaggttaaa

SEQ ID NO: 257875 - DNA, 33 bp, Homo sapien
tcttttatcaactgtgacaatattaataacttc

SEQ ID NO: 257876 - DNA, 33 bp, Homo sapien
tcttttatcaactgtgtcaatattaataacttc

SEQ ID NO: 257877 - DNA, 33 bp, Homo sapien
atgcccacagcactggaaggaagaaaacaagcc

SEQ ID NO: 257878 - DNA, 33 bp, Homo sapien
atgcccacagcactgggaggaagaaaacaagcc

SEQ ID NO: 257879 - DNA, 33 bp, Homo sapien
cctaagggactttaaccagaattcttctttttt

SEQ ID NO: 257880 - DNA, 33 bp, Homo sapien
cctaagggactttaactagaattcttctttttt

SEQ ID NO: 257881 - DNA, 33 bp, Homo sapien
ctgtttcactttaagtaaaaaagaagatgacct

SEQ ID NO: 257882 - DNA, 33 bp, Homo sapien
ctgtttcactttaagtcaaaaagaagatgacct

SEQ ID NO: 257883 - DNA, 33 bp, Homo sapien
aaagtgaaacaggcaagggggtatggcagatga

SEQ ID NO: 257884 - DNA, 33 bp, Homo sapien
aaagtgaaacaggcaatggggtatggcagatga

SEQ ID NO: 257885 - DNA, 33 bp, Homo sapien
ggggtatggcagatgaatcaatgcttcaggctg

SEQ ID NO: 257886 - DNA, 33 bp, Homo sapien
ggggtatggcagatgagtcaatgcttcaggctg

SEQ ID NO: 257887 - DNA, 33 bp, Homo sapien
tcacagtgtggattaaagaggaagtgcccacgt

SEQ ID NO: 257888 - DNA, 33 bp, Homo sapien
tcacagtgtggattaaggaggaagtgcccacgt

SEQ ID NO: 257889 - DNA, 33 bp, Homo sapien
tctaccaaccaaagaaatacaaccacgagcaag

SEQ ID NO: 257890 - DNA, 33 bp, Homo sapien
tctaccaaccaaagaactacaaccacgagcaag

SEQ ID NO: 257891 - DNA, 33 bp, Homo sapien
ttatggcactggcaaagagctgagatgctaaaa

SEQ ID NO: 257892 - DNA, 33 bp, Homo sapien
ttatggcactggcaaatagctgagatgctaaaa

SEQ ID NO: 257893 - DNA, 33 bp, Homo sapien
gaagagtgagttaatacgcaagagaaccatgga

SEQ ID NO: 257894 - DNA, 33 bp, Homo sapien
gaagagtgagttaatatgcaagagaaccatgga

SEQ ID NO: 257895 - DNA, 33 bp, Homo sapien
tgactatttgggtctacgatatttcccaacttg

SEQ ID NO: 257896 - DNA, 33 bp, Homo sapien
tgactatttgggtctatgatatttcccaacttg

SEQ ID NO: 257897 - DNA, 33 bp, Homo sapien
ggaggctgtcataggcacaattttaatatccta

SEQ ID NO: 257898 - DNA, 33 bp, Homo sapien
ggaggctgtcataggcgcaattttaatatccta

SEQ ID NO: 257899 - DNA, 33 bp, Homo sapien
acattttataagccatcagccgaactctgttga

SEQ ID NO: 257900 - DNA, 33 bp, Homo sapien
acattttataagccattagccgaactctgttga

SEQ ID NO: 257901 - DNA, 33 bp, Homo sapien
ctgggagaagaagagccgccatcccaggacaca

SEQ ID NO: 257902 - DNA, 33 bp, Homo sapien
ctgggagaagaagagctgccatcccaggacaca

SEQ ID NO: 257903 - DNA, 33 bp, Homo sapien
gtgggatctcgagcaccggagcaaggtagatta

SEQ ID NO: 257904 - DNA, 33 bp, Homo sapien
gtgggatctcgagcactggagcaaggtagatta

SEQ ID NO: 257905 - DNA, 33 bp, Homo sapien
cattcattaagtacaaatatcttagaacagtgt

SEQ ID NO: 257906 - DNA, 33 bp, Homo sapien
cattcattaagtacaagtatcttagaacagtgt

SEQ ID NO: 257907 - DNA, 33 bp, Homo sapien
gaccacctctatgttaagcttagagcaaccaca

SEQ ID NO: 257908 - DNA, 33 bp, Homo sapien
gaccacctctatgttatgcttagagcaaccaca

SEQ ID NO: 257909 - DNA, 33 bp, Homo sapien
tgaaagacttttgaagacccaacaaaattgttg

SEQ ID NO: 257910 - DNA, 33 bp, Homo sapien
tgaaagacttttgaaggcccaacaaaattgttg

SEQ ID NO: 257911 - DNA, 33 bp, Homo sapien
tgttcttgggataaggaaggggctaattgagct

SEQ ID NO: 257912 - DNA, 33 bp, Homo sapien
tgttcttgggataaggcaggggctaattgagct

SEQ ID NO: 257913 - DNA, 33 bp, Homo sapien
ctctcagatggaagagaaaaacacaggctccca

SEQ ID NO: 257914 - DNA, 33 bp, Homo sapien
ctctcagatggaagaggaaaacacaggctccca

SEQ ID NO: 257915 - DNA, 33 bp, Homo sapien
tgaggctaatggaaaaatatcttccaaaataac

SEQ ID NO: 257916 - DNA, 33 bp, Homo sapien
tgaggctaatggaaaagtatcttccaaaataac

SEQ ID NO: 257917 - DNA, 33 bp, Homo sapien
aaccaggcacttcgtacgtgtttatgaatgcag

SEQ ID NO: 257918 - DNA, 33 bp, Homo sapien
aaccaggcacttcgtatgtgtttatgaatgcag

SEQ ID NO: 257919 - DNA, 33 bp, Homo sapien
gcaatatttttacaaaaccagaatgcgaccttc

SEQ ID NO: 257920 - DNA, 33 bp, Homo sapien
gcaatatttttacaaagccagaatgcgaccttc

SEQ ID NO: 257921 - DNA, 33 bp, Homo sapien
tccatcctgaacctccagaatacctgggactac

SEQ ID NO: 257922 - DNA, 33 bp, Homo sapien
tccatcctgaacctccggaatacctgggactac

SEQ ID NO: 257923 - DNA, 33 bp, Homo sapien
cttatgttaagagctacaagttactatgtaaaa

SEQ ID NO: 257924 - DNA, 33 bp, Homo sapien
cttatgttaagagctagaagttactatgtaaaa

SEQ ID NO: 257925 - DNA, 33 bp, Homo sapien
gattatttcaatactgcagtgattttggctgtg

SEQ ID NO: 257926 - DNA, 33 bp, Homo sapien
gattatttcaatactggagtgattttggctgtg

SEQ ID NO: 257927 - DNA, 33 bp, Homo sapien
ttattgtggcctaaacaacttgagggtaatgaa

SEQ ID NO: 257928 - DNA, 33 bp, Homo sapien
ttattgtggcctaaaccacttgagggtaatgaa

SEQ ID NO: 257929 - DNA, 33 bp, Homo sapien
aaatagaacagaaccaagcgaaacagcccacca

SEQ ID NO: 257930 - DNA, 33 bp, Homo sapien
aaatagaacagaaccaggcgaaacagcccacca

SEQ ID NO: 257931 - DNA, 33 bp, Homo sapien
aaacttacttgaattaacttgacatgaaagcaa

SEQ ID NO: 257932 - DNA, 33 bp, Homo sapien
aaacttacttgaattatcttgacatgaaagcaa

SEQ ID NO: 257933 - DNA, 33 bp, Homo sapien
atttttatattgaagactctataggtgttaagg

SEQ ID NO: 257934 - DNA, 33 bp, Homo sapien
atttttatattgaagattctataggtgttaagg

SEQ ID NO: 257935 - DNA, 33 bp, Homo sapien
tgtaggtacttatagcaaaataattttcaggtt

SEQ ID NO: 257936 - DNA, 33 bp, Homo sapien
tgtaggtacttatagcgaaataattttcaggtt

SEQ ID NO: 257937 - DNA, 33 bp, Homo sapien
ggggcaaatatcacaaatgttcaggaccaacac

SEQ ID NO: 257938 - DNA, 33 bp, Homo sapien
ggggcaaatatcacaagtgttcaggaccaacac

SEQ ID NO: 257939 - DNA, 33 bp, Homo sapien
tgatacgtcttaacaaaaggatgctgatgatac

SEQ ID NO: 257940 - DNA, 33 bp, Homo sapien
tgatacgtcttaacaagaggatgctgatgatac

SEQ ID NO: 257941 - DNA, 33 bp, Homo sapien
acactacatctcaaggaaaaacgaacacatcat

SEQ ID NO: 257942 - DNA, 33 bp, Homo sapien
acactacatctcaaggtaaaacgaacacatcat

SEQ ID NO: 257943 - DNA, 33 bp, Homo sapien
ctgctctgtcttctccgggactttaaatactgg

SEQ ID NO: 257944 - DNA, 33 bp, Homo sapien
ctgctctgtcttctcctggactttaaatactgg

SEQ ID NO: 257945 - DNA, 33 bp, Homo sapien
atctaccgacatctagaatcaatcatcaggatg

SEQ ID NO: 257946 - DNA, 33 bp, Homo sapien
atctaccgacatctaggatcaatcatcaggatg

SEQ ID NO: 257947 - DNA, 33 bp, Homo sapien
tcctgctttgatggaaatatggtattgcattta

SEQ ID NO: 257948 - DNA, 33 bp, Homo sapien
tcctgctttgatggaagtatggtattgcattta

SEQ ID NO: 257949 - DNA, 33 bp, Homo sapien
ggaaggactctaaagccgctgacttcctcttgt

SEQ ID NO: 257950 - DNA, 33 bp, Homo sapien
ggaaggactctaaagctgctgacttcctcttgt

SEQ ID NO: 257951 - DNA, 33 bp, Homo sapien
aagtctatgacaattacggaatgttggcaaaat

SEQ ID NO: 257952 - DNA, 33 bp, Homo sapien
aagtctatgacaattagggaatgttggcaaaat

SEQ ID NO: 257953 - DNA, 33 bp, Homo sapien
ttgggttaagactggaaatgccatcttgaaaac

SEQ ID NO: 257954 - DNA, 33 bp, Homo sapien
ttgggttaagactggagatgccatcttgaaaac

SEQ ID NO: 257955 - DNA, 33 bp, Homo sapien
gtaagattaaattggaaagcaaggttaaaatgg

SEQ ID NO: 257956 - DNA, 33 bp, Homo sapien
gtaagattaaattggagagcaaggttaaaatgg

SEQ ID NO: 257957 - DNA, 33 bp, Homo sapien
tcagtcccttatcctggcagattaaaaaaaaaa

SEQ ID NO: 257958 - DNA, 33 bp, Homo sapien
tcagtcccttatcctgtcagattaaaaaaaaaa

SEQ ID NO: 257959 - DNA, 33 bp, Homo sapien
ctgccatccttcctacaaatgctggaccttcct

SEQ ID NO: 257960 - DNA, 33 bp, Homo sapien
ctgccatccttcctaccaatgctggaccttcct

SEQ ID NO: 257961 - DNA, 33 bp, Homo sapien
tctcaccacagtgaagaatcgacttttcagggc

SEQ ID NO: 257962 - DNA, 33 bp, Homo sapien
tctcaccacagtgaagcatcgacttttcagggc

SEQ ID NO: 257963 - DNA, 33 bp, Homo sapien
tgatgtgctagcacccaggaactctgagggtct

SEQ ID NO: 257964 - DNA, 33 bp, Homo sapien
tgatgtgctagcacccgggaactctgagggtct

SEQ ID NO: 257965 - DNA, 33 bp, Homo sapien
gtgaagcttcagctggacacggctgcagtcact

SEQ ID NO: 257966 - DNA, 33 bp, Homo sapien
gtgaagcttcagctgggcacggctgcagtcact

SEQ ID NO: 257967 - DNA, 33 bp, Homo sapien
tgggattgccaacaagaagatcacagaatatac

SEQ ID NO: 257968 - DNA, 33 bp, Homo sapien
tgggattgccaacaagcagatcacagaatatac

SEQ ID NO: 257969 - DNA, 33 bp, Homo sapien
gacgtagggtgacaaaggaggcaagttacgtca

SEQ ID NO: 257970 - DNA, 33 bp, Homo sapien
gacgtagggtgacaaatgaggcaagttacgtca

SEQ ID NO: 257971 - DNA, 33 bp, Homo sapien
ccgttacagaataatgcagaccaatggctataa

SEQ ID NO: 257972 - DNA, 33 bp, Homo sapien
ccgttacagaataatgtagaccaatggctataa

SEQ ID NO: 257973 - DNA, 33 bp, Homo sapien
cctaaaaatggcaccaccgcgttcacccagaat

SEQ ID NO: 257974 - DNA, 33 bp, Homo sapien
cctaaaaatggcaccatcgcgttcacccagaat

SEQ ID NO: 257975 - DNA, 33 bp, Homo sapien
atgcacactcctgagacaggttagaaaatgtga

SEQ ID NO: 257976 - DNA, 33 bp, Homo sapien
atgcacactcctgagataggttagaaaatgtga

SEQ ID NO: 257977 - DNA, 33 bp, Homo sapien
gagaaaatggatgtgtcaacctcttccttcagc

SEQ ID NO: 257978 - DNA, 33 bp, Homo sapien
gagaaaatggatgtgttaacctcttccttcagc

SEQ ID NO: 257979 - DNA, 33 bp, Homo sapien
tgcacaaactgaccaacaagacagccaataaaa

SEQ ID NO: 257980 - DNA, 33 bp, Homo sapien
tgcacaaactgaccaagaagacagccaataaaa

SEQ ID NO: 257981 - DNA, 33 bp, Homo sapien
ggcctctctacacccacgaatctggagatggac

SEQ ID NO: 257982 - DNA, 33 bp, Homo sapien
ggcctctctacacccatgaatctggagatggac

SEQ ID NO: 257983 - DNA, 33 bp, Homo sapien
agcttctgacaaccacaaagtgctcaagcgttt

SEQ ID NO: 257984 - DNA, 33 bp, Homo sapien
agcttctgacaaccacgaagtgctcaagcgttt

SEQ ID NO: 257985 - DNA, 33 bp, Homo sapien
aaataaacgttcctcacgctgtcatcactgcag

SEQ ID NO: 257986 - DNA, 33 bp, Homo sapien
aaataaacgttcctcatgctgtcatcactgcag

SEQ ID NO: 257987 - DNA, 33 bp, Homo sapien
acctacaggattttaaaatttgagcattccaag

SEQ ID NO: 257988 - DNA, 33 bp, Homo sapien
acctacaggattttaacatttgagcattccaag

SEQ ID NO: 257989 - DNA, 33 bp, Homo sapien
aagcatcgcagccaacggtcactccttggatga

SEQ ID NO: 257990 - DNA, 33 bp, Homo sapien
aagcatcgcagccaactgtcactccttggatga

SEQ ID NO: 257991 - DNA, 33 bp, Homo sapien
cccaggattccttttgcaccagaagtatcgact

SEQ ID NO: 257992 - DNA, 33 bp, Homo sapien
cccaggattccttttgtaccagaagtatcgact

SEQ ID NO: 257993 - DNA, 33 bp, Homo sapien
gattttctagcatctaaagacataagctgggaa

SEQ ID NO: 257994 - DNA, 33 bp, Homo sapien
gattttctagcatctagagacataagctgggaa

SEQ ID NO: 257995 - DNA, 33 bp, Homo sapien
acacaacatgtaaacaaacgagcagggttgtac

SEQ ID NO: 257996 - DNA, 33 bp, Homo sapien
acacaacatgtaaacagacgagcagggttgtac

SEQ ID NO: 257997 - DNA, 33 bp, Homo sapien
aatagtttagtctttgaaagctataccatcccc

SEQ ID NO: 257998 - DNA, 33 bp, Homo sapien
aatagtttagtctttggaagctataccatcccc

SEQ ID NO: 257999 - DNA, 33 bp, Homo sapien
tctagagccaatataaacaacttttccagaaca

SEQ ID NO: 258000 - DNA, 33 bp, Homo sapien
tctagagccaatataagcaacttttccagaaca

SEQ ID NO: 258001 - DNA, 33 bp, Homo sapien
acactttggacccaaaagtggacagaagacaaa

SEQ ID NO: 258002 - DNA, 33 bp, Homo sapien
acactttggacccaaatgtggacagaagacaaa

SEQ ID NO: 258003 - DNA, 33 bp, Homo sapien
ttgagaagtgctatggacaacctaatatagggc

SEQ ID NO: 258004 - DNA, 33 bp, Homo sapien
ttgagaagtgctatggccaacctaatatagggc

SEQ ID NO: 258005 - DNA, 33 bp, Homo sapien
cctgaggatctaagtgaacccatcatcccagct

SEQ ID NO: 258006 - DNA, 33 bp, Homo sapien
cctgaggatctaagtggacccatcatcccagct

SEQ ID NO: 258007 - DNA, 33 bp, Homo sapien
gcagctgagttccagaagcttggtattttgtaa

SEQ ID NO: 258008 - DNA, 33 bp, Homo sapien
gcagctgagttccagaggcttggtattttgtaa

SEQ ID NO: 258009 - DNA, 33 bp, Homo sapien
tttgtgcctaacttgaacacctccctgatgtga

SEQ ID NO: 258010 - DNA, 33 bp, Homo sapien
tttgtgcctaacttgagcacctccctgatgtga

SEQ ID NO: 258011 - DNA, 33 bp, Homo sapien
acaggcagctattagacgttgaccaccaagcca

SEQ ID NO: 258012 - DNA, 33 bp, Homo sapien
acaggcagctattagatgttgaccaccaagcca

SEQ ID NO: 258013 - DNA, 33 bp, Homo sapien
cttaacacttttgtcaaacataccaattacact

SEQ ID NO: 258014 - DNA, 33 bp, Homo sapien
cttaacacttttgtcagacataccaattacact

SEQ ID NO: 258015 - DNA, 33 bp, Homo sapien
ctcaatacacacacgaataactcttacagagaa

SEQ ID NO: 258016 - DNA, 33 bp, Homo sapien
ctcaatacacacacgagtaactcttacagagaa

SEQ ID NO: 258017 - DNA, 33 bp, Homo sapien
ctgccttgtgggcagaagacataatcctggata

SEQ ID NO: 258018 - DNA, 33 bp, Homo sapien
ctgccttgtgggcagaggacataatcctggata

SEQ ID NO: 258019 - DNA, 33 bp, Homo sapien
cgtgcctttctaagtcaaagctcaaactctcta

SEQ ID NO: 258020 - DNA, 33 bp, Homo sapien
cgtgcctttctaagtcgaagctcaaactctcta

SEQ ID NO: 258021 - DNA, 33 bp, Homo sapien
cactgtattcaggctacggggagaaagcgaagg

SEQ ID NO: 258022 - DNA, 33 bp, Homo sapien
cactgtattcaggctatggggagaaagcgaagg

SEQ ID NO: 258023 - DNA, 33 bp, Homo sapien
gatatctcttagacaaactgatttccttttgga

SEQ ID NO: 258024 - DNA, 33 bp, Homo sapien
gatatctcttagacaacctgatttccttttgga

SEQ ID NO: 258025 - DNA, 33 bp, Homo sapien
gaatgctcaggcttatgaaactgccttaataac

SEQ ID NO: 258026 - DNA, 33 bp, Homo sapien
gaatgctcaggcttattaaactgccttaataac

SEQ ID NO: 258027 - DNA, 33 bp, Homo sapien
tgctcaggatcgcacacctaaccagggccacac

SEQ ID NO: 258028 - DNA, 33 bp, Homo sapien
tgctcaggatcgcacatctaaccagggccacac

SEQ ID NO: 258029 - DNA, 33 bp, Homo sapien
gaacctgtttcatggcagaacgtgtccttgctg

SEQ ID NO: 258030 - DNA, 33 bp, Homo sapien
gaacctgtttcatggcggaacgtgtccttgctg

SEQ ID NO: 258031 - DNA, 33 bp, Homo sapien
gaatgggggaccgcaaagttcacttcttccgtc

SEQ ID NO: 258032 - DNA, 33 bp, Homo sapien
gaatgggggaccgcaaggttcacttcttccgtc

SEQ ID NO: 258033 - DNA, 33 bp, Homo sapien
ctaaagtaaacaaaacaaaagagctgtccagga

SEQ ID NO: 258034 - DNA, 33 bp, Homo sapien
ctaaagtaaacaaaacgaaagagctgtccagga

SEQ ID NO: 258035 - DNA, 33 bp, Homo sapien
cagcaagagacgtctaggtgaacacccacccag

SEQ ID NO: 258036 - DNA, 33 bp, Homo sapien
cagcaagagacgtctatgtgaacacccacccag

SEQ ID NO: 258037 - DNA, 33 bp, Homo sapien
tacagaatcctcatgccgaactcctttcacacc

SEQ ID NO: 258038 - DNA, 33 bp, Homo sapien
tacagaatcctcatgctgaactcctttcacacc

SEQ ID NO: 258039 - DNA, 33 bp, Homo sapien
aaattatagccctacaggtcttttagcagctct

SEQ ID NO: 258040 - DNA, 33 bp, Homo sapien
aaattatagccctacatgtcttttagcagctct

SEQ ID NO: 258041 - DNA, 33 bp, Homo sapien
ggacaaggcagaaaaactggttattgctacttc

SEQ ID NO: 258042 - DNA, 33 bp, Homo sapien
ggacaaggcagaaaaattggttattgctacttc

SEQ ID NO: 258043 - DNA, 33 bp, Homo sapien
gcctttccatagcttgcaacatggatagctaac

SEQ ID NO: 258044 - DNA, 33 bp, Homo sapien
gcctttccatagcttgtaacatggatagctaac

SEQ ID NO: 258045 - DNA, 33 bp, Homo sapien
agggtcatttgtactactaaaagacttagagta

SEQ ID NO: 258046 - DNA, 33 bp, Homo sapien
agggtcatttgtactattaaaagacttagagta

SEQ ID NO: 258047 - DNA, 33 bp, Homo sapien
ccatttccactcaatgaatagaaaatatatttt

SEQ ID NO: 258048 - DNA, 33 bp, Homo sapien
ccatttccactcaatgcatagaaaatatatttt

SEQ ID NO: 258049 - DNA, 33 bp, Homo sapien
tgggggaagatccagaactagtatccttggtgg

SEQ ID NO: 258050 - DNA, 33 bp, Homo sapien
tgggggaagatccagacctagtatccttggtgg

SEQ ID NO: 258051 - DNA, 33 bp, Homo sapien
aacacagtcatctaaggcaatggcatctctggc

SEQ ID NO: 258052 - DNA, 33 bp, Homo sapien
aacacagtcatctaagtcaatggcatctctggc

SEQ ID NO: 258053 - DNA, 33 bp, Homo sapien
caactaaacactatacagaagacatagaaaata

SEQ ID NO: 258054 - DNA, 33 bp, Homo sapien
caactaaacactatacggaagacatagaaaata

SEQ ID NO: 258055 - DNA, 33 bp, Homo sapien
gtaatgaactacagaacggttttataagttatt

SEQ ID NO: 258056 - DNA, 33 bp, Homo sapien
gtaatgaactacagaatggttttataagttatt

SEQ ID NO: 258057 - DNA, 33 bp, Homo sapien
ccggacagccacttcacgcctttccctggttcc

SEQ ID NO: 258058 - DNA, 33 bp, Homo sapien
ccggacagccacttcatgcctttccctggttcc

SEQ ID NO: 258059 - DNA, 33 bp, Homo sapien
catgttaatctcatgacagcactccttcagcta

SEQ ID NO: 258060 - DNA, 33 bp, Homo sapien
catgttaatctcatgatagcactccttcagcta

SEQ ID NO: 258061 - DNA, 33 bp, Homo sapien
cttcatagaaacttacagaagtcctcagagtgt

SEQ ID NO: 258062 - DNA, 33 bp, Homo sapien
cttcatagaaacttacggaagtcctcagagtgt

SEQ ID NO: 258063 - DNA, 33 bp, Homo sapien
tgcatacagatgcatactaagtgttaaacaata

SEQ ID NO: 258064 - DNA, 33 bp, Homo sapien
tgcatacagatgcatattaagtgttaaacaata

SEQ ID NO: 258065 - DNA, 33 bp, Homo sapien
tggggaatactgatacaattcctggtatagtat

SEQ ID NO: 258066 - DNA, 33 bp, Homo sapien
tggggaatactgatacgattcctggtatagtat

SEQ ID NO: 258067 - DNA, 33 bp, Homo sapien
ttattatgtgtcactaccttgtacctcttaaaa

SEQ ID NO: 258068 - DNA, 33 bp, Homo sapien
ttattatgtgtcactatcttgtacctcttaaaa

SEQ ID NO: 258069 - DNA, 33 bp, Homo sapien
agagacaccaaaatgaagttcaagaatgtacag

SEQ ID NO: 258070 - DNA, 33 bp, Homo sapien
agagacaccaaaatgaggttcaagaatgtacag

SEQ ID NO: 258071 - DNA, 33 bp, Homo sapien
tgccacccacgtgggaaactcaacagacatatt

SEQ ID NO: 258072 - DNA, 33 bp, Homo sapien
tgccacccacgtgggacactcaacagacatatt

SEQ ID NO: 258073 - DNA, 33 bp, Homo sapien
catgacctccctctccaaatccacttggacaat

SEQ ID NO: 258074 - DNA, 33 bp, Homo sapien
catgacctccctctccgaatccacttggacaat

SEQ ID NO: 258075 - DNA, 33 bp, Homo sapien
tcctcacacatcccaccggtcctgtatatgtgg

SEQ ID NO: 258076 - DNA, 33 bp, Homo sapien
tcctcacacatcccactggtcctgtatatgtgg

SEQ ID NO: 258077 - DNA, 33 bp, Homo sapien
tatatgtttatcaccaaaagtgctatatatcag

SEQ ID NO: 258078 - DNA, 33 bp, Homo sapien
tatatgtttatcaccagaagtgctatatatcag

SEQ ID NO: 258079 - DNA, 33 bp, Homo sapien
aacttgattaactaggaacatgcctcctttcaa

SEQ ID NO: 258080 - DNA, 33 bp, Homo sapien
aacttgattaactagggacatgcctcctttcaa

SEQ ID NO: 258081 - DNA, 33 bp, Homo sapien
atcagggtctcatgagaaaaaccatacctagat

SEQ ID NO: 258082 - DNA, 33 bp, Homo sapien
atcagggtctcatgaggaaaaccatacctagat

SEQ ID NO: 258083 - DNA, 33 bp, Homo sapien
gctggtttataggtcaactcttaggcacagact

SEQ ID NO: 258084 - DNA, 33 bp, Homo sapien
gctggtttataggtcagctcttaggcacagact

SEQ ID NO: 258085 - DNA, 33 bp, Homo sapien
gcatgtccagtgaacacgggaagcgccgctctg

SEQ ID NO: 258086 - DNA, 33 bp, Homo sapien
gcatgtccagtgaacatgggaagcgccgctctg

SEQ ID NO: 258087 - DNA, 33 bp, Homo sapien
tgtattccagtttcctaaaaacttagcaaaagc

SEQ ID NO: 258088 - DNA, 33 bp, Homo sapien
tgtattccagtttcctgaaaacttagcaaaagc

SEQ ID NO: 258089 - DNA, 33 bp, Homo sapien
ttgtctgccaacatcactgaacttttgtcattg

SEQ ID NO: 258090 - DNA, 33 bp, Homo sapien
ttgtctgccaacatcattgaacttttgtcattg

SEQ ID NO: 258091 - DNA, 33 bp, Homo sapien
caaatatcatctgctacgctttgaatatcccct

SEQ ID NO: 258092 - DNA, 33 bp, Homo sapien
caaatatcatctgctatgctttgaatatcccct

SEQ ID NO: 258093 - DNA, 33 bp, Homo sapien
ctggtgatgagttggacatcttgaaaacttaaa

SEQ ID NO: 258094 - DNA, 33 bp, Homo sapien
ctggtgatgagttggatatcttgaaaacttaaa

SEQ ID NO: 258095 - DNA, 33 bp, Homo sapien
ggggccctgggattcccagaagagtggcttggc

SEQ ID NO: 258096 - DNA, 33 bp, Homo sapien
ggggccctgggattcctagaagagtggcttggc

SEQ ID NO: 258097 - DNA, 33 bp, Homo sapien
cggctcttccaaaaaaaagtcagtattagaggt

SEQ ID NO: 258098 - DNA, 33 bp, Homo sapien
cggctcttccaaaaaacagtcagtattagaggt

SEQ ID NO: 258099 - DNA, 33 bp, Homo sapien
tagtatgaggactaaccagtgtgacttttttcc

SEQ ID NO: 258100 - DNA, 33 bp, Homo sapien
tagtatgaggactaactagtgtgacttttttcc

SEQ ID NO: 258101 - DNA, 33 bp, Homo sapien
ttaaacccagtaaggaccttgaacagtagacat

SEQ ID NO: 258102 - DNA, 33 bp, Homo sapien
ttaaacccagtaaggatcttgaacagtagacat

SEQ ID NO: 258103 - DNA, 33 bp, Homo sapien
agaacaaagaaaatgcgaacttctggggtcaat

SEQ ID NO: 258104 - DNA, 33 bp, Homo sapien
agaacaaagaaaatgctaacttctggggtcaat

SEQ ID NO: 258105 - DNA, 33 bp, Homo sapien
aatgtctttcaaggaacgctgttgtacaatgga

SEQ ID NO: 258106 - DNA, 33 bp, Homo sapien
aatgtctttcaaggaatgctgttgtacaatgga

SEQ ID NO: 258107 - DNA, 33 bp, Homo sapien
ttattacatctgtataaaaattactccaagatg

SEQ ID NO: 258108 - DNA, 33 bp, Homo sapien
ttattacatctgtatagaaattactccaagatg

SEQ ID NO: 258109 - DNA, 33 bp, Homo sapien
ttttttgctgctgtacactcaatggtcaggaaa

SEQ ID NO: 258110 - DNA, 33 bp, Homo sapien
ttttttgctgctgtactctcaatggtcaggaaa

SEQ ID NO: 258111 - DNA, 33 bp, Homo sapien
aatggtcaggaaagccaataggcaagattgggg

SEQ ID NO: 258112 - DNA, 33 bp, Homo sapien
aatggtcaggaaagcccataggcaagattgggg

SEQ ID NO: 258113 - DNA, 33 bp, Homo sapien
attttagcaactggaacttatcttacactacat

SEQ ID NO: 258114 - DNA, 33 bp, Homo sapien
attttagcaactggaatttatcttacactacat

SEQ ID NO: 258115 - DNA, 33 bp, Homo sapien
tactacatggctcccggatgttctgatttagta

SEQ ID NO: 258116 - DNA, 33 bp, Homo sapien
tactacatggctcccgtatgttctgatttagta

SEQ ID NO: 258117 - DNA, 33 bp, Homo sapien
cctccaagagaccaacaaagagctaaacaggta

SEQ ID NO: 258118 - DNA, 33 bp, Homo sapien
cctccaagagaccaacgaagagctaaacaggta

SEQ ID NO: 258119 - DNA, 33 bp, Homo sapien
tctccaagtctgtgaacgcagagtctgcctttt

SEQ ID NO: 258120 - DNA, 33 bp, Homo sapien
tctccaagtctgtgaatgcagagtctgcctttt

SEQ ID NO: 258121 - DNA, 33 bp, Homo sapien
tttgcttgaggagaaacggagatcttaaatgag

SEQ ID NO: 258122 - DNA, 33 bp, Homo sapien
tttgcttgaggagaaatggagatcttaaatgag

SEQ ID NO: 258123 - DNA, 33 bp, Homo sapien
cttatcagttgataggcactttggttgatttca

SEQ ID NO: 258124 - DNA, 33 bp, Homo sapien
cttatcagttgataggtactttggttgatttca

SEQ ID NO: 258125 - DNA, 33 bp, Homo sapien
aaaaggcaatgtgccacgccatgcagggtcttc

SEQ ID NO: 258126 - DNA, 33 bp, Homo sapien
aaaaggcaatgtgccatgccatgcagggtcttc

SEQ ID NO: 258127 - DNA, 33 bp, Homo sapien
aatttggaagtactacaactgattgaaataata

SEQ ID NO: 258128 - DNA, 33 bp, Homo sapien
aatttggaagtactaccactgattgaaataata

SEQ ID NO: 258129 - DNA, 33 bp, Homo sapien
tggaatctgtagtactaaaggcaaaaggtgctg

SEQ ID NO: 258130 - DNA, 33 bp, Homo sapien
tggaatctgtagtactgaaggcaaaaggtgctg

SEQ ID NO: 258131 - DNA, 33 bp, Homo sapien
aaagagtgcatcttaaggtaagcgaattaaaaa

SEQ ID NO: 258132 - DNA, 33 bp, Homo sapien
aaagagtgcatcttaatgtaagcgaattaaaaa

SEQ ID NO: 258133 - DNA, 33 bp, Homo sapien
agaaacagataatgtaactgtatccaaaataca

SEQ ID NO: 258134 - DNA, 33 bp, Homo sapien
agaaacagataatgtacctgtatccaaaataca

SEQ ID NO: 258135 - DNA, 33 bp, Homo sapien
tataaacgagtcaactcaactaccccaaatatc

SEQ ID NO: 258136 - DNA, 33 bp, Homo sapien
tataaacgagtcaacttaactaccccaaatatc

SEQ ID NO: 258137 - DNA, 33 bp, Homo sapien
acaggagcctgatatagagaaggttgcctgact

SEQ ID NO: 258138 - DNA, 33 bp, Homo sapien
acaggagcctgatatatagaaggttgcctgact

SEQ ID NO: 258139 - DNA, 33 bp, Homo sapien
caagcaaaagagaaaaaaatatgaggactcatc

SEQ ID NO: 258140 - DNA, 33 bp, Homo sapien
caagcaaaagagaaaacaatatgaggactcatc

SEQ ID NO: 258141 - DNA, 33 bp, Homo sapien
tggatgaagaagtacaaagtctggcctgggcaa

SEQ ID NO: 258142 - DNA, 33 bp, Homo sapien
tggatgaagaagtacatagtctggcctgggcaa

SEQ ID NO: 258143 - DNA, 33 bp, Homo sapien
ccttcaggactgtaaacgctcatcctggtgggg

SEQ ID NO: 258144 - DNA, 33 bp, Homo sapien
ccttcaggactgtaaatgctcatcctggtgggg

SEQ ID NO: 258145 - DNA, 33 bp, Homo sapien
gactcaggtgactatcactggaggagaggcgag

SEQ ID NO: 258146 - DNA, 33 bp, Homo sapien
gactcaggtgactatcgctggaggagaggcgag

SEQ ID NO: 258147 - DNA, 33 bp, Homo sapien
gagaggcgagaagaaccgaaccatccaatcaga

SEQ ID NO: 258148 - DNA, 33 bp, Homo sapien
gagaggcgagaagaactgaaccatccaatcaga

SEQ ID NO: 258149 - DNA, 33 bp, Homo sapien
cctaacaaagtaccaccgattggaaggctgaag

SEQ ID NO: 258150 - DNA, 33 bp, Homo sapien
cctaacaaagtaccacggattggaaggctgaag

SEQ ID NO: 258151 - DNA, 33 bp, Homo sapien
caaaagtgtgaataaactagtgaaaaatgtcat

SEQ ID NO: 258152 - DNA, 33 bp, Homo sapien
caaaagtgtgaataaagtagtgaaaaatgtcat

SEQ ID NO: 258153 - DNA, 33 bp, Homo sapien
aatggatgcaacttgcagaaatgttccttgaaa

SEQ ID NO: 258154 - DNA, 33 bp, Homo sapien
aatggatgcaacttgcggaaatgttccttgaaa

SEQ ID NO: 258155 - DNA, 33 bp, Homo sapien
aatgcatttcagtagacacaaattcaaaaggaa

SEQ ID NO: 258156 - DNA, 33 bp, Homo sapien
aatgcatttcagtagatacaaattcaaaaggaa

SEQ ID NO: 258157 - DNA, 33 bp, Homo sapien
ggatctgggctcttgaacaaatgttagaagttt

SEQ ID NO: 258158 - DNA, 33 bp, Homo sapien
ggatctgggctcttgagcaaatgttagaagttt

SEQ ID NO: 258159 - DNA, 33 bp, Homo sapien
cgccatgctgggctccaggaaatacacttttcg

SEQ ID NO: 258160 - DNA, 33 bp, Homo sapien
cgccatgctgggctccgggaaatacacttttcg

SEQ ID NO: 258161 - DNA, 33 bp, Homo sapien
atgaagtctagattggccacttcaggacttttc

SEQ ID NO: 258162 - DNA, 33 bp, Homo sapien
atgaagtctagattgggcacttcaggacttttc

SEQ ID NO: 258163 - DNA, 33 bp, Homo sapien
ctctaaaaggtcctgaaactgagaagtggatta

SEQ ID NO: 258164 - DNA, 33 bp, Homo sapien
ctctaaaaggtcctgagactgagaagtggatta

SEQ ID NO: 258165 - DNA, 33 bp, Homo sapien
gccatgacgcaagaaccatggaacacatttgtt

SEQ ID NO: 258166 - DNA, 33 bp, Homo sapien
gccatgacgcaagaacgatggaacacatttgtt

SEQ ID NO: 258167 - DNA, 33 bp, Homo sapien
aaagaactagattttgaaactatcctggaaagc

SEQ ID NO: 258168 - DNA, 33 bp, Homo sapien
aaagaactagattttgcaactatcctggaaagc

SEQ ID NO: 258169 - DNA, 33 bp, Homo sapien
ttgaccttgacctcacacatgggcaataaatga

SEQ ID NO: 258170 - DNA, 33 bp, Homo sapien
ttgaccttgacctcacgcatgggcaataaatga

SEQ ID NO: 258171 - DNA, 33 bp, Homo sapien
aatggactaatacttacgcaaaaggttcactcc

SEQ ID NO: 258172 - DNA, 33 bp, Homo sapien
aatggactaatacttatgcaaaaggttcactcc

SEQ ID NO: 258173 - DNA, 33 bp, Homo sapien
cagcactttgtaatgaaaatcatgttgggcctg

SEQ ID NO: 258174 - DNA, 33 bp, Homo sapien
cagcactttgtaatgagaatcatgttgggcctg

SEQ ID NO: 258175 - DNA, 33 bp, Homo sapien
gtaccttcagtccttaccaagcagtggctgtgt

SEQ ID NO: 258176 - DNA, 33 bp, Homo sapien
gtaccttcagtccttatcaagcagtggctgtgt

SEQ ID NO: 258177 - DNA, 33 bp, Homo sapien
tcagctcaagaaccaccgaggaggctgtctgat

SEQ ID NO: 258178 - DNA, 33 bp, Homo sapien
tcagctcaagaaccactgaggaggctgtctgat

SEQ ID NO: 258179 - DNA, 33 bp, Homo sapien
ttgcaatacaacacataactatccagtctatta

SEQ ID NO: 258180 - DNA, 33 bp, Homo sapien
ttgcaatacaacacatgactatccagtctatta

SEQ ID NO: 258181 - DNA, 33 bp, Homo sapien
ggacagcatcccccaacatcagttcacaggaag

SEQ ID NO: 258182 - DNA, 33 bp, Homo sapien
ggacagcatcccccaatatcagttcacaggaag

SEQ ID NO: 258183 - DNA, 33 bp, Homo sapien
gccaaaaccatggacaacagaggagtaggtggt

SEQ ID NO: 258184 - DNA, 33 bp, Homo sapien
gccaaaaccatggacagcagaggagtaggtggt

SEQ ID NO: 258185 - DNA, 33 bp, Homo sapien
tacatcatttactgcagcttgtagccccttttg

SEQ ID NO: 258186 - DNA, 33 bp, Homo sapien
tacatcatttactgcatcttgtagccccttttg

SEQ ID NO: 258187 - DNA, 33 bp, Homo sapien
atatggaatcatggcaacctaactgggtagcaa

SEQ ID NO: 258188 - DNA, 33 bp, Homo sapien
atatggaatcatggcagcctaactgggtagcaa

SEQ ID NO: 258189 - DNA, 33 bp, Homo sapien
gagcaaccatcacacccggtgtaacttccatcc

SEQ ID NO: 258190 - DNA, 33 bp, Homo sapien
gagcaaccatcacaccgggtgtaacttccatcc

SEQ ID NO: 258191 - DNA, 33 bp, Homo sapien
taaatcaataacagccaagatcaaacataccaa

SEQ ID NO: 258192 - DNA, 33 bp, Homo sapien
taaatcaataacagccgagatcaaacataccaa

SEQ ID NO: 258193 - DNA, 33 bp, Homo sapien
caattttgatgtggtaaaaagtctaataaaatt

SEQ ID NO: 258194 - DNA, 33 bp, Homo sapien
caattttgatgtggtagaaagtctaataaaatt

SEQ ID NO: 258195 - DNA, 33 bp, Homo sapien
atagctgaatagtgaaactaatatttaagtaat

SEQ ID NO: 258196 - DNA, 33 bp, Homo sapien
atagctgaatagtgaatctaatatttaagtaat

SEQ ID NO: 258197 - DNA, 33 bp, Homo sapien
catcattggtggcaggaattttgaagaaatcaa

SEQ ID NO: 258198 - DNA, 33 bp, Homo sapien
catcattggtggcaggcattttgaagaaatcaa

SEQ ID NO: 258199 - DNA, 33 bp, Homo sapien
ctttggtaaatttttgcaaagtatgttggcaat

SEQ ID NO: 258200 - DNA, 33 bp, Homo sapien
ctttggtaaatttttgtaaagtatgttggcaat

SEQ ID NO: 258201 - DNA, 33 bp, Homo sapien
caacatttcacatctgcagttaacttgaagcag

SEQ ID NO: 258202 - DNA, 33 bp, Homo sapien
caacatttcacatctgtagttaacttgaagcag

SEQ ID NO: 258203 - DNA, 33 bp, Homo sapien
tagttgatggttaacaatcaagctggagaagaa

SEQ ID NO: 258204 - DNA, 33 bp, Homo sapien
tagttgatggttaacagtcaagctggagaagaa

SEQ ID NO: 258205 - DNA, 33 bp, Homo sapien
ttccctagtatccctcacaccgaatacagttct

SEQ ID NO: 258206 - DNA, 33 bp, Homo sapien
ttccctagtatccctcgcaccgaatacagttct

SEQ ID NO: 258207 - DNA, 33 bp, Homo sapien
gagtgcctctaatttacggaagagtttttcagt

SEQ ID NO: 258208 - DNA, 33 bp, Homo sapien
gagtgcctctaatttatggaagagtttttcagt

SEQ ID NO: 258209 - DNA, 33 bp, Homo sapien
tatttcattttgtttacgccagagtttgacaaa

SEQ ID NO: 258210 - DNA, 33 bp, Homo sapien
tatttcattttgtttatgccagagtttgacaaa

SEQ ID NO: 258211 - DNA, 33 bp, Homo sapien
cttagaattactcaaaagctagaaagatattcc

SEQ ID NO: 258212 - DNA, 33 bp, Homo sapien
cttagaattactcaaaggctagaaagatattcc

SEQ ID NO: 258213 - DNA, 33 bp, Homo sapien
acaaaccaatttaagacgcatgaatgagaaaca

SEQ ID NO: 258214 - DNA, 33 bp, Homo sapien
acaaaccaatttaagatgcatgaatgagaaaca

SEQ ID NO: 258215 - DNA, 33 bp, Homo sapien
tgagctcaagatcaatcagtatctgtagtagtc

SEQ ID NO: 258216 - DNA, 33 bp, Homo sapien
tgagctcaagatcaatgagtatctgtagtagtc

SEQ ID NO: 258217 - DNA, 33 bp, Homo sapien
ggaattcctttcaaatcatcatggcttcacaga

SEQ ID NO: 258218 - DNA, 33 bp, Homo sapien
ggaattcctttcaaattatcatggcttcacaga

SEQ ID NO: 258219 - DNA, 33 bp, Homo sapien
ttctggaaaaggtacaactatggagaaaataaa

SEQ ID NO: 258220 - DNA, 33 bp, Homo sapien
ttctggaaaaggtacatctatggagaaaataaa

SEQ ID NO: 258221 - DNA, 33 bp, Homo sapien
aagtcatgaagagaaacagaagaaacttaagta

SEQ ID NO: 258222 - DNA, 33 bp, Homo sapien
aagtcatgaagagaaatagaagaaacttaagta

SEQ ID NO: 258223 - DNA, 33 bp, Homo sapien
tttggaagcaatcaaaatagccgatgaatgaat

SEQ ID NO: 258224 - DNA, 33 bp, Homo sapien
tttggaagcaatcaaagtagccgatgaatgaat

SEQ ID NO: 258225 - DNA, 33 bp, Homo sapien
tggccattctaatagacgtatagtggcatcatg

SEQ ID NO: 258226 - DNA, 33 bp, Homo sapien
tggccattctaatagatgtatagtggcatcatg

SEQ ID NO: 258227 - DNA, 33 bp, Homo sapien
gaagcaaactctctaaacctaacctgtaaaata

SEQ ID NO: 258228 - DNA, 33 bp, Homo sapien
gaagcaaactctctaagcctaacctgtaaaata

SEQ ID NO: 258229 - DNA, 33 bp, Homo sapien
atgtgtgtaaagatgccatttagtgagtttgct

SEQ ID NO: 258230 - DNA, 33 bp, Homo sapien
atgtgtgtaaagatgctatttagtgagtttgct

SEQ ID NO: 258231 - DNA, 33 bp, Homo sapien
aaggactgtgtcataacgtctgacttggtagct

SEQ ID NO: 258232 - DNA, 33 bp, Homo sapien
aaggactgtgtcataatgtctgacttggtagct

SEQ ID NO: 258233 - DNA, 33 bp, Homo sapien
cttttttgaggccatgcaatcaatgataaattg

SEQ ID NO: 258234 - DNA, 33 bp, Homo sapien
cttttttgaggccatgtaatcaatgataaattg

SEQ ID NO: 258235 - DNA, 33 bp, Homo sapien
aagttgtccatatttacgggactttattttgcc

SEQ ID NO: 258236 - DNA, 33 bp, Homo sapien
aagttgtccatatttaggggactttattttgcc

SEQ ID NO: 258237 - DNA, 33 bp, Homo sapien
cgcagcttcaatttgaaaattagaaagtaaata

SEQ ID NO: 258238 - DNA, 33 bp, Homo sapien
cgcagcttcaatttgagaattagaaagtaaata

SEQ ID NO: 258239 - DNA, 33 bp, Homo sapien
acagcagaactgataaatggtagtaggggtcta

SEQ ID NO: 258240 - DNA, 33 bp, Homo sapien
acagcagaactgataattggtagtaggggtcta

SEQ ID NO: 258241 - DNA, 33 bp, Homo sapien
ataggctaagagtgtaacagctgattcagaaag

SEQ ID NO: 258242 - DNA, 33 bp, Homo sapien
ataggctaagagtgtagcagctgattcagaaag

SEQ ID NO: 258243 - DNA, 33 bp, Homo sapien
caagttccaaagggcagtaatttcatggtggaa

SEQ ID NO: 258244 - DNA, 33 bp, Homo sapien
caagttccaaagggcattaatttcatggtggaa

SEQ ID NO: 258245 - DNA, 33 bp, Homo sapien
acattgtgtataaaataactgtagaggctgaaa

SEQ ID NO: 258246 - DNA, 33 bp, Homo sapien
acattgtgtataaaatgactgtagaggctgaaa

SEQ ID NO: 258247 - DNA, 33 bp, Homo sapien
ttaaaaaatattatgaagtaatctgctgaaact

SEQ ID NO: 258248 - DNA, 33 bp, Homo sapien
ttaaaaaatattatgaggtaatctgctgaaact

SEQ ID NO: 258249 - DNA, 33 bp, Homo sapien
aaacgagaccaacaataataccaagcacacata

SEQ ID NO: 258250 - DNA, 33 bp, Homo sapien
aaacgagaccaacaatgataccaagcacacata

SEQ ID NO: 258251 - DNA, 33 bp, Homo sapien
cttatttcttcttgacacatactgccagctaat

SEQ ID NO: 258252 - DNA, 33 bp, Homo sapien
cttatttcttcttgactcatactgccagctaat

SEQ ID NO: 258253 - DNA, 33 bp, Homo sapien
cacacaaatagcagaagacacaaaacatcagct

SEQ ID NO: 258254 - DNA, 33 bp, Homo sapien
cacacaaatagcagaatacacaaaacatcagct

SEQ ID NO: 258255 - DNA, 33 bp, Homo sapien
aaaaatgcagtaccttaaaaacaattattaggt

SEQ ID NO: 258256 - DNA, 33 bp, Homo sapien
aaaaatgcagtaccttgaaaacaattattaggt

SEQ ID NO: 258257 - DNA, 33 bp, Homo sapien
ttgtattatgcagaaaagcctttatagtttgca

SEQ ID NO: 258258 - DNA, 33 bp, Homo sapien
ttgtattatgcagaaacgcctttatagtttgca

SEQ ID NO: 258259 - DNA, 33 bp, Homo sapien
gttcccatgcccttgcacaattccctccacttt

SEQ ID NO: 258260 - DNA, 33 bp, Homo sapien
gttcccatgcccttgcgcaattccctccacttt

SEQ ID NO: 258261 - DNA, 33 bp, Homo sapien
aatgtttgaatgaaatcattaaagaaatgcaat

SEQ ID NO: 258262 - DNA, 33 bp, Homo sapien
aatgtttgaatgaaatgattaaagaaatgcaat

SEQ ID NO: 258263 - DNA, 33 bp, Homo sapien
tcattgatttgtggtcaccatctgagtattagg

SEQ ID NO: 258264 - DNA, 33 bp, Homo sapien
tcattgatttgtggtcgccatctgagtattagg

SEQ ID NO: 258265 - DNA, 33 bp, Homo sapien
cttaatgtttaatatacgtataatgcactatgt

SEQ ID NO: 258266 - DNA, 33 bp, Homo sapien
cttaatgtttaatatatgtataatgcactatgt

SEQ ID NO: 258267 - DNA, 33 bp, Homo sapien
ttggacatagtacatacctaaaacacaggatgt

SEQ ID NO: 258268 - DNA, 33 bp, Homo sapien
ttggacatagtacatagctaaaacacaggatgt

SEQ ID NO: 258269 - DNA, 33 bp, Homo sapien
tcagaggactgccactaagtacacgggaacctg

SEQ ID NO: 258270 - DNA, 33 bp, Homo sapien
tcagaggactgccactgagtacacgggaacctg

SEQ ID NO: 258271 - DNA, 33 bp, Homo sapien
gggttgcagctgcaaacagtgtttttgtctaca

SEQ ID NO: 258272 - DNA, 33 bp, Homo sapien
gggttgcagctgcaaagagtgtttttgtctaca

SEQ ID NO: 258273 - DNA, 33 bp, Homo sapien
caggcacttttcaggaagttggacagatctgca

SEQ ID NO: 258274 - DNA, 33 bp, Homo sapien
caggcacttttcaggatgttggacagatctgca

SEQ ID NO: 258275 - DNA, 33 bp, Homo sapien
gaattatagacaacacaatactacccaaaccac

SEQ ID NO: 258276 - DNA, 33 bp, Homo sapien
gaattatagacaacacgatactacccaaaccac

SEQ ID NO: 258277 - DNA, 33 bp, Homo sapien
gaacaggagcaaccagaagggtccttagaagct

SEQ ID NO: 258278 - DNA, 33 bp, Homo sapien
gaacaggagcaaccagcagggtccttagaagct

SEQ ID NO: 258279 - DNA, 33 bp, Homo sapien
acgctgtctatgtcacaggctgtcctagtacat

SEQ ID NO: 258280 - DNA, 33 bp, Homo sapien
acgctgtctatgtcacgggctgtcctagtacat

SEQ ID NO: 258281 - DNA, 33 bp, Homo sapien
aatgcagatatcaaaaagcacttggtatattct

SEQ ID NO: 258282 - DNA, 33 bp, Homo sapien
aatgcagatatcaaaaggcacttggtatattct

SEQ ID NO: 258283 - DNA, 33 bp, Homo sapien
tataattccctctgaaggtttagcagaagcact

SEQ ID NO: 258284 - DNA, 33 bp, Homo sapien
tataattccctctgaatgtttagcagaagcact

SEQ ID NO: 258285 - DNA, 33 bp, Homo sapien
gcatctaatgcagtgcccaaaactactcataaa

SEQ ID NO: 258286 - DNA, 33 bp, Homo sapien
gcatctaatgcagtgctcaaaactactcataaa

SEQ ID NO: 258287 - DNA, 33 bp, Homo sapien
gcactgggaggtgtcaagctaagagctccaagc

SEQ ID NO: 258288 - DNA, 33 bp, Homo sapien
gcactgggaggtgtcaggctaagagctccaagc

SEQ ID NO: 258289 - DNA, 33 bp, Homo sapien
aatgtattctgaggaaatggagcactgggaggt

SEQ ID NO: 258290 - DNA, 33 bp, Homo sapien
aatgtattctgaggaagtggagcactgggaggt

SEQ ID NO: 258291 - DNA, 33 bp, Homo sapien
acaaaggcagcacaagcaaacagtttattgaga

SEQ ID NO: 258292 - DNA, 33 bp, Homo sapien
acaaaggcagcacaaggaaacagtttattgaga

SEQ ID NO: 258293 - DNA, 33 bp, Homo sapien
tatcagtgtcaaagaaagatcagcttagaggat

SEQ ID NO: 258294 - DNA, 33 bp, Homo sapien
tatcagtgtcaaagaaggatcagcttagaggat

SEQ ID NO: 258295 - DNA, 33 bp, Homo sapien
ttaagagagaaaagcaaaccttctatttgaact

SEQ ID NO: 258296 - DNA, 33 bp, Homo sapien
ttaagagagaaaagcagaccttctatttgaact

SEQ ID NO: 258297 - DNA, 33 bp, Homo sapien
attttccttacttgccccttctatggaaacaga

SEQ ID NO: 258298 - DNA, 33 bp, Homo sapien
attttccttacttgcctcttctatggaaacaga

SEQ ID NO: 258299 - DNA, 33 bp, Homo sapien
aacgatttcagctaccaggaaagattaccctgc

SEQ ID NO: 258300 - DNA, 33 bp, Homo sapien
aacgatttcagctaccgggaaagattaccctgc

SEQ ID NO: 258301 - DNA, 33 bp, Homo sapien
tttttgcagtcagctacgatactaatttacaag

SEQ ID NO: 258302 - DNA, 33 bp, Homo sapien
tttttgcagtcagctaggatactaatttacaag

SEQ ID NO: 258303 - DNA, 33 bp, Homo sapien
aactcaacaaattcaggatcacattgccaggtt

SEQ ID NO: 258304 - DNA, 33 bp, Homo sapien
aactcaacaaattcagtatcacattgccaggtt

SEQ ID NO: 258305 - DNA, 33 bp, Homo sapien
cgagtcatctgagaaacgggccaaggatataaa

SEQ ID NO: 258306 - DNA, 33 bp, Homo sapien
cgagtcatctgagaaatgggccaaggatataaa

SEQ ID NO: 258307 - DNA, 33 bp, Homo sapien
atgcaatatcatgttaagtgataaattttgata

SEQ ID NO: 258308 - DNA, 33 bp, Homo sapien
atgcaatatcatgttatgtgataaattttgata

SEQ ID NO: 258309 - DNA, 33 bp, Homo sapien
tcaaaatcttttgaaccgaagaacagagagagg

SEQ ID NO: 258310 - DNA, 33 bp, Homo sapien
tcaaaatcttttgaactgaagaacagagagagg

SEQ ID NO: 258311 - DNA, 33 bp, Homo sapien
tgttatctgtgattaaggttataaaaagtgaaa

SEQ ID NO: 258312 - DNA, 33 bp, Homo sapien
tgttatctgtgattaatgttataaaaagtgaaa

SEQ ID NO: 258313 - DNA, 33 bp, Homo sapien
aatattgctgaccataccttacaacaaggcagt

SEQ ID NO: 258314 - DNA, 33 bp, Homo sapien
aatattgctgaccatatcttacaacaaggcagt

SEQ ID NO: 258315 - DNA, 33 bp, Homo sapien
gttgcttgttacagcaatatctctgaaaacaca

SEQ ID NO: 258316 - DNA, 33 bp, Homo sapien
gttgcttgttacagcagtatctctgaaaacaca

SEQ ID NO: 258317 - DNA, 33 bp, Homo sapien
aatgacacatggtttccagtagtccacttatag

SEQ ID NO: 258318 - DNA, 33 bp, Homo sapien
aatgacacatggtttctagtagtccacttatag

SEQ ID NO: 258319 - DNA, 33 bp, Homo sapien
catgacatctcctacaaacatatcctacaatat

SEQ ID NO: 258320 - DNA, 33 bp, Homo sapien
catgacatctcctacagacatatcctacaatat

SEQ ID NO: 258321 - DNA, 33 bp, Homo sapien
tctcattcaaaacttaactaacatacatttcat

SEQ ID NO: 258322 - DNA, 33 bp, Homo sapien
tctcattcaaaacttagctaacatacatttcat

SEQ ID NO: 258323 - DNA, 33 bp, Homo sapien
ccatttgggttagttcaatggctttgctcttgt

SEQ ID NO: 258324 - DNA, 33 bp, Homo sapien
ccatttgggttagttcgatggctttgctcttgt

SEQ ID NO: 258325 - DNA, 33 bp, Homo sapien
gagccattttagaaaccgataggggagttgaga

SEQ ID NO: 258326 - DNA, 33 bp, Homo sapien
gagccattttagaaactgataggggagttgaga

SEQ ID NO: 258327 - DNA, 33 bp, Homo sapien
tagactttgtcgtagcagaaaaggcagggtgct

SEQ ID NO: 258328 - DNA, 33 bp, Homo sapien
tagactttgtcgtagcggaaaaggcagggtgct

SEQ ID NO: 258329 - DNA, 33 bp, Homo sapien
tgacagagataaattgaatcctttacacctcac

SEQ ID NO: 258330 - DNA, 33 bp, Homo sapien
tgacagagataaattggatcctttacacctcac

SEQ ID NO: 258331 - DNA, 33 bp, Homo sapien
aaaccaaacaaagcaaaataacacaaaacttta

SEQ ID NO: 258332 - DNA, 33 bp, Homo sapien
aaaccaaacaaagcaagataacacaaaacttta

SEQ ID NO: 258333 - DNA, 33 bp, Homo sapien
ttacctaaacaagtccacctggaaaaatatcag

SEQ ID NO: 258334 - DNA, 33 bp, Homo sapien
ttacctaaacaagtccgcctggaaaaatatcag

SEQ ID NO: 258335 - DNA, 33 bp, Homo sapien
cctgagaaatattcaacagggtgaggcttacac

SEQ ID NO: 258336 - DNA, 33 bp, Homo sapien
cctgagaaatattcaatagggtgaggcttacac

SEQ ID NO: 258337 - DNA, 33 bp, Homo sapien
gttgcgtcaagcccaccaaccgtcttgtcgcta

SEQ ID NO: 258338 - DNA, 33 bp, Homo sapien
gttgcgtcaagcccactaaccgtcttgtcgcta

SEQ ID NO: 258339 - DNA, 33 bp, Homo sapien
aatcaacctatgagccaatcatttaatgaacac

SEQ ID NO: 258340 - DNA, 33 bp, Homo sapien
aatcaacctatgagccgatcatttaatgaacac

SEQ ID NO: 258341 - DNA, 33 bp, Homo sapien
ttggctggtggtttcaaaatcatgtaaggaaat

SEQ ID NO: 258342 - DNA, 33 bp, Homo sapien
ttggctggtggtttcagaatcatgtaaggaaat

SEQ ID NO: 258343 - DNA, 33 bp, Homo sapien
agacaactgctcataacgtgtcaaaccaaaaac

SEQ ID NO: 258344 - DNA, 33 bp, Homo sapien
agacaactgctcataatgtgtcaaaccaaaaac

SEQ ID NO: 258345 - DNA, 33 bp, Homo sapien
tgtaggagtcaattcaaggtatgatggtcacac

SEQ ID NO: 258346 - DNA, 33 bp, Homo sapien
tgtaggagtcaattcagggtatgatggtcacac

SEQ ID NO: 258347 - DNA, 33 bp, Homo sapien
ttcatggcctgagctcaattttggttaaagaga

SEQ ID NO: 258348 - DNA, 33 bp, Homo sapien
ttcatggcctgagctcgattttggttaaagaga

SEQ ID NO: 258349 - DNA, 33 bp, Homo sapien
ttcagacagttcaaccacctgcatatcgagggg

SEQ ID NO: 258350 - DNA, 33 bp, Homo sapien
ttcagacagttcaaccccctgcatatcgagggg

SEQ ID NO: 258351 - DNA, 33 bp, Homo sapien
aataagctcgtggataagaaacacgttatgcct

SEQ ID NO: 258352 - DNA, 33 bp, Homo sapien
aataagctcgtggataggaaacacgttatgcct

SEQ ID NO: 258353 - DNA, 33 bp, Homo sapien
aggctgagaaacagggcatggagtgaagaagat

SEQ ID NO: 258354 - DNA, 33 bp, Homo sapien
aggctgagaaacaggggatggagtgaagaagat

SEQ ID NO: 258355 - DNA, 33 bp, Homo sapien
aggtacgtgacagaaaacagagcaatgtaaaga

SEQ ID NO: 258356 - DNA, 33 bp, Homo sapien
aggtacgtgacagaaagcagagcaatgtaaaga

SEQ ID NO: 258357 - DNA, 33 bp, Homo sapien
actgtagaagactgtacggagacacagagaaaa

SEQ ID NO: 258358 - DNA, 33 bp, Homo sapien
actgtagaagactgtatggagacacagagaaaa

SEQ ID NO: 258359 - DNA, 33 bp, Homo sapien
atcccttgcagggtgacatgatgcagagggagg

SEQ ID NO: 258360 - DNA, 33 bp, Homo sapien
atcccttgcagggtgagatgatgcagagggagg

SEQ ID NO: 258361 - DNA, 33 bp, Homo sapien
aatcttcacgaaaaaaagtggctgtgtttgaag

SEQ ID NO: 258362 - DNA, 33 bp, Homo sapien
aatcttcacgaaaaaatgtggctgtgtttgaag

SEQ ID NO: 258363 - DNA, 33 bp, Homo sapien
tactcaagaacggtgacggaagaaacctcagga

SEQ ID NO: 258364 - DNA, 33 bp, Homo sapien
tactcaagaacggtgatggaagaaacctcagga

SEQ ID NO: 258365 - DNA, 33 bp, Homo sapien
gcagagaaatcagcacactatttgttaatctca

SEQ ID NO: 258366 - DNA, 33 bp, Homo sapien
gcagagaaatcagcactctatttgttaatctca

SEQ ID NO: 258367 - DNA, 33 bp, Homo sapien
ctgtgaattattcttcccaaacagtgtttaaga

SEQ ID NO: 258368 - DNA, 33 bp, Homo sapien
ctgtgaattattcttcgcaaacagtgtttaaga

SEQ ID NO: 258369 - DNA, 33 bp, Homo sapien
tcccccataatgacccaggatgtctcttaagcc

SEQ ID NO: 258370 - DNA, 33 bp, Homo sapien
tcccccataatgacccgggatgtctcttaagcc

SEQ ID NO: 258371 - DNA, 33 bp, Homo sapien
cacaaatcaggatgcaagttagttatactttct

SEQ ID NO: 258372 - DNA, 33 bp, Homo sapien
cacaaatcaggatgcacgttagttatactttct

SEQ ID NO: 258373 - DNA, 33 bp, Homo sapien
acagcttaacctttcacaatctcatcttcagag

SEQ ID NO: 258374 - DNA, 33 bp, Homo sapien
acagcttaacctttcagaatctcatcttcagag

SEQ ID NO: 258375 - DNA, 33 bp, Homo sapien
tgtgcaaatctgtcgacaacttctcttctactc

SEQ ID NO: 258376 - DNA, 33 bp, Homo sapien
tgtgcaaatctgtcgataacttctcttctactc

SEQ ID NO: 258377 - DNA, 33 bp, Homo sapien
tatttataaaatcttcaatggcctctgtgcaaa

SEQ ID NO: 258378 - DNA, 33 bp, Homo sapien
tatttataaaatcttcgatggcctctgtgcaaa

SEQ ID NO: 258379 - DNA, 33 bp, Homo sapien
cagaacaggagcctcaacctgaagaatgtgaag

SEQ ID NO: 258380 - DNA, 33 bp, Homo sapien
cagaacaggagcctcagcctgaagaatgtgaag

SEQ ID NO: 258381 - DNA, 33 bp, Homo sapien
cttgaaattgactcagacaaatggtagactgta

SEQ ID NO: 258382 - DNA, 33 bp, Homo sapien
cttgaaattgactcaggcaaatggtagactgta

SEQ ID NO: 258383 - DNA, 33 bp, Homo sapien
gggcctcactgtctccagcatcgcagcagcaat

SEQ ID NO: 258384 - DNA, 33 bp, Homo sapien
gggcctcactgtctccggcatcgcagcagcaat

SEQ ID NO: 258385 - DNA, 33 bp, Homo sapien
ctctcagtttccacaacatccgaaaattcagca

SEQ ID NO: 258386 - DNA, 33 bp, Homo sapien
ctctcagtttccacaatatccgaaaattcagca

SEQ ID NO: 258387 - DNA, 33 bp, Homo sapien
tgttacagtacacagcagactgaggatcaacag

SEQ ID NO: 258388 - DNA, 33 bp, Homo sapien
tgttacagtacacagcggactgaggatcaacag

SEQ ID NO: 258389 - DNA, 33 bp, Homo sapien
gaagacagaagggataagatagtacttggtttg

SEQ ID NO: 258390 - DNA, 33 bp, Homo sapien
gaagacagaagggatatgatagtacttggtttg

SEQ ID NO: 258391 - DNA, 33 bp, Homo sapien
tgggatcacaatggaaagaagtaacagtagaaa

SEQ ID NO: 258392 - DNA, 33 bp, Homo sapien
tgggatcacaatggaaggaagtaacagtagaaa

SEQ ID NO: 258393 - DNA, 33 bp, Homo sapien
aaatgggactaaagaggatggttttattttgtc

SEQ ID NO: 258394 - DNA, 33 bp, Homo sapien
aaatgggactaaagagtatggttttattttgtc

SEQ ID NO: 258395 - DNA, 33 bp, Homo sapien
ctttagtcttacttaacgtagcaaaaatctccc

SEQ ID NO: 258396 - DNA, 33 bp, Homo sapien
ctttagtcttacttaatgtagcaaaaatctccc

SEQ ID NO: 258397 - DNA, 33 bp, Homo sapien
caagaaggagattaaaatatatgcagcccaagg

SEQ ID NO: 258398 - DNA, 33 bp, Homo sapien
caagaaggagattaaagtatatgcagcccaagg

SEQ ID NO: 258399 - DNA, 33 bp, Homo sapien
tgttagaatgagtgcaataggagataagaggaa

SEQ ID NO: 258400 - DNA, 33 bp, Homo sapien
tgttagaatgagtgcagtaggagataagaggaa

SEQ ID NO: 258401 - DNA, 33 bp, Homo sapien
tctaacattcctggtaacacggtcacagcaaac

SEQ ID NO: 258402 - DNA, 33 bp, Homo sapien
tctaacattcctggtagcacggtcacagcaaac

SEQ ID NO: 258403 - DNA, 33 bp, Homo sapien
gattttcccacaataaaaacatcacttaacaat

SEQ ID NO: 258404 - DNA, 33 bp, Homo sapien
gattttcccacaataacaacatcacttaacaat

SEQ ID NO: 258405 - DNA, 33 bp, Homo sapien
atatttgttcatctgcactaaaatgttttcttc

SEQ ID NO: 258406 - DNA, 33 bp, Homo sapien
atatttgttcatctgcgctaaaatgttttcttc

SEQ ID NO: 258407 - DNA, 33 bp, Homo sapien
catttagaagcatacaagtttttttaaaggcat

SEQ ID NO: 258408 - DNA, 33 bp, Homo sapien
catttagaagcatacaggtttttttaaaggcat

SEQ ID NO: 258409 - DNA, 33 bp, Homo sapien
tttttgttttggtatacgatatgagatacgaac

SEQ ID NO: 258410 - DNA, 33 bp, Homo sapien
tttttgttttggtatatgatatgagatacgaac

SEQ ID NO: 258411 - DNA, 33 bp, Homo sapien
tatggccaaactacccacattcttattcttctt

SEQ ID NO: 258412 - DNA, 33 bp, Homo sapien
tatggccaaactacccgcattcttattcttctt

SEQ ID NO: 258413 - DNA, 33 bp, Homo sapien
ggcagccccttgtagactcctttctggttcctc

SEQ ID NO: 258414 - DNA, 33 bp, Homo sapien
ggcagccccttgtagattcctttctggttcctc

SEQ ID NO: 258415 - DNA, 33 bp, Homo sapien
gtttcactctgttcctcactcttccttcagcgc

SEQ ID NO: 258416 - DNA, 33 bp, Homo sapien
gtttcactctgttcctgactcttccttcagcgc

SEQ ID NO: 258417 - DNA, 33 bp, Homo sapien
ttcttagtgtagttaaaccagtattccaatcca

SEQ ID NO: 258418 - DNA, 33 bp, Homo sapien
ttcttagtgtagttaagccagtattccaatcca

SEQ ID NO: 258419 - DNA, 33 bp, Homo sapien
tccttaggccattctcccacatcccaagtgaca

SEQ ID NO: 258420 - DNA, 33 bp, Homo sapien
tccttaggccattctctcacatcccaagtgaca

SEQ ID NO: 258421 - DNA, 33 bp, Homo sapien
acagcaggagtctttaagttgattgaaacctga

SEQ ID NO: 258422 - DNA, 33 bp, Homo sapien
acagcaggagtctttaggttgattgaaacctga

SEQ ID NO: 258423 - DNA, 33 bp, Homo sapien
agacacttagtagaacaaaatgacaagtcacag

SEQ ID NO: 258424 - DNA, 33 bp, Homo sapien
agacacttagtagaacgaaatgacaagtcacag

SEQ ID NO: 258425 - DNA, 33 bp, Homo sapien
acaaaaacaagcaagagaaaaagctgtttgttc

SEQ ID NO: 258426 - DNA, 33 bp, Homo sapien
acaaaaacaagcaagataaaaagctgtttgttc

SEQ ID NO: 258427 - DNA, 33 bp, Homo sapien
gtacgcataataaacaatagcaaacgttacaca

SEQ ID NO: 258428 - DNA, 33 bp, Homo sapien
gtacgcataataaacagtagcaaacgttacaca

SEQ ID NO: 258429 - DNA, 33 bp, Homo sapien
gtcaatctcgacaaacacaattttcatcaaaag

SEQ ID NO: 258430 - DNA, 33 bp, Homo sapien
gtcaatctcgacaaacccaattttcatcaaaag

SEQ ID NO: 258431 - DNA, 33 bp, Homo sapien
tcctaatatttacacacgtcatagggcacagaa

SEQ ID NO: 258432 - DNA, 33 bp, Homo sapien
tcctaatatttacacatgtcatagggcacagaa

SEQ ID NO: 258433 - DNA, 33 bp, Homo sapien
acagtcagggaaacaactgcagagtaaacagat

SEQ ID NO: 258434 - DNA, 33 bp, Homo sapien
acagtcagggaaacaattgcagagtaaacagat

SEQ ID NO: 258435 - DNA, 33 bp, Homo sapien
gtaaccctaccgccaacgctgtgctccctgaaa

SEQ ID NO: 258436 - DNA, 33 bp, Homo sapien
gtaaccctaccgccaatgctgtgctccctgaaa

SEQ ID NO: 258437 - DNA, 33 bp, Homo sapien
agtggccataaaactcaacattttacacattat

SEQ ID NO: 258438 - DNA, 33 bp, Homo sapien
agtggccataaaactcgacattttacacattat

SEQ ID NO: 258439 - DNA, 33 bp, Homo sapien
aatcttttgtaccatacgacataatctaatcac

SEQ ID NO: 258440 - DNA, 33 bp, Homo sapien
aatcttttgtaccatatgacataatctaatcac

SEQ ID NO: 258441 - DNA, 33 bp, Homo sapien
aagtcttcgagggtacaaaacaaggaactatgg

SEQ ID NO: 258442 - DNA, 33 bp, Homo sapien
aagtcttcgagggtaccaaacaaggaactatgg

SEQ ID NO: 258443 - DNA, 33 bp, Homo sapien
ccaggacaggaagtaaaaacgttatcctctaaa

SEQ ID NO: 258444 - DNA, 33 bp, Homo sapien
ccaggacaggaagtaagaacgttatcctctaaa

SEQ ID NO: 258445 - DNA, 33 bp, Homo sapien
agacatctgcaaatcacggagacagccctcagc

SEQ ID NO: 258446 - DNA, 33 bp, Homo sapien
agacatctgcaaatcagggagacagccctcagc

SEQ ID NO: 258447 - DNA, 33 bp, Homo sapien
actactagggcagatcccaactgattagagatg

SEQ ID NO: 258448 - DNA, 33 bp, Homo sapien
actactagggcagatctcaactgattagagatg

SEQ ID NO: 258449 - DNA, 33 bp, Homo sapien
ctagtcatgtggcaccaaagtatgttactggtg

SEQ ID NO: 258450 - DNA, 33 bp, Homo sapien
ctagtcatgtggcaccgaagtatgttactggtg

SEQ ID NO: 258451 - DNA, 33 bp, Homo sapien
ctttgagaaggacagcaatgatatctctctctc

SEQ ID NO: 258452 - DNA, 33 bp, Homo sapien
ctttgagaaggacagcgatgatatctctctctc

SEQ ID NO: 258453 - DNA, 33 bp, Homo sapien
ctattgtggcctgatactaaaacattttatctt

SEQ ID NO: 258454 - DNA, 33 bp, Homo sapien
ctattgtggcctgatagtaaaacattttatctt

SEQ ID NO: 258455 - DNA, 33 bp, Homo sapien
ttgttagtctagttaccaaaagtcaaacaaaga

SEQ ID NO: 258456 - DNA, 33 bp, Homo sapien
ttgttagtctagttactaaaagtcaaacaaaga

SEQ ID NO: 258457 - DNA, 33 bp, Homo sapien
tttttaaagttaaagtgactgtgtcaggaattg

SEQ ID NO: 258458 - DNA, 33 bp, Homo sapien
tttttaaagttaaagttactgtgtcaggaattg

SEQ ID NO: 258459 - DNA, 33 bp, Homo sapien
gctgattctgctattacacttagataaagtatg

SEQ ID NO: 258460 - DNA, 33 bp, Homo sapien
gctgattctgctattagacttagataaagtatg

SEQ ID NO: 258461 - DNA, 33 bp, Homo sapien
tgcaatccacataaccaatgaagtatcactatc

SEQ ID NO: 258462 - DNA, 33 bp, Homo sapien
tgcaatccacataaccgatgaagtatcactatc

SEQ ID NO: 258463 - DNA, 33 bp, Homo sapien
caaatatcttcaccaccaatttttccaatcgtt

SEQ ID NO: 258464 - DNA, 33 bp, Homo sapien
caaatatcttcaccactaatttttccaatcgtt

SEQ ID NO: 258465 - DNA, 33 bp, Homo sapien
ggaagacagcctttcactaacaccttgagaaag

SEQ ID NO: 258466 - DNA, 33 bp, Homo sapien
ggaagacagcctttcattaacaccttgagaaag

SEQ ID NO: 258467 - DNA, 33 bp, Homo sapien
taggagactgggagctcaacttgcattgaatta

SEQ ID NO: 258468 - DNA, 33 bp, Homo sapien
taggagactgggagctgaacttgcattgaatta

SEQ ID NO: 258469 - DNA, 33 bp, Homo sapien
cattttatcctagaggaaactgatcataccagt

SEQ ID NO: 258470 - DNA, 33 bp, Homo sapien
cattttatcctagaggcaactgatcataccagt

SEQ ID NO: 258471 - DNA, 33 bp, Homo sapien
tttgaattttaaatggccaatttggtcaatgaa

SEQ ID NO: 258472 - DNA, 33 bp, Homo sapien
tttgaattttaaatggtcaatttggtcaatgaa

SEQ ID NO: 258473 - DNA, 33 bp, Homo sapien
acaaagctgcaagcaccgaagaatattaacaag

SEQ ID NO: 258474 - DNA, 33 bp, Homo sapien
acaaagctgcaagcactgaagaatattaacaag

SEQ ID NO: 258475 - DNA, 33 bp, Homo sapien
caggaggagttaatgactaagaggcgccttgag

SEQ ID NO: 258476 - DNA, 33 bp, Homo sapien
caggaggagttaatgattaagaggcgccttgag

SEQ ID NO: 258477 - DNA, 33 bp, Homo sapien
tagtgtcagagagagacgttcttgatagctgga

SEQ ID NO: 258478 - DNA, 33 bp, Homo sapien
tagtgtcagagagagatgttcttgatagctgga

SEQ ID NO: 258479 - DNA, 33 bp, Homo sapien
ttctcggcccatgcccggagtgagggttgcaga

SEQ ID NO: 258480 - DNA, 33 bp, Homo sapien
ttctcggcccatgccctgagtgagggttgcaga

SEQ ID NO: 258481 - DNA, 33 bp, Homo sapien
agccaggtggcaaaagcctttggacaattggat

SEQ ID NO: 258482 - DNA, 33 bp, Homo sapien
agccaggtggcaaaaggctttggacaattggat

SEQ ID NO: 258483 - DNA, 33 bp, Homo sapien
cagagttttctctgaaacatgtggaccagctat

SEQ ID NO: 258484 - DNA, 33 bp, Homo sapien
cagagttttctctgaagcatgtggaccagctat

SEQ ID NO: 258485 - DNA, 33 bp, Homo sapien
tttcaactagtttacacgttctgaaacctgcag

SEQ ID NO: 258486 - DNA, 33 bp, Homo sapien
tttcaactagtttacatgttctgaaacctgcag

SEQ ID NO: 258487 - DNA, 33 bp, Homo sapien
taaaacactcattcaaagaacacacacacacac

SEQ ID NO: 258488 - DNA, 33 bp, Homo sapien
taaaacactcattcaaggaacacacacacacac

SEQ ID NO: 258489 - DNA, 33 bp, Homo sapien
aagtactgagtatctacactttcatggtgcaga

SEQ ID NO: 258490 - DNA, 33 bp, Homo sapien
aagtactgagtatctatactttcatggtgcaga

SEQ ID NO: 258491 - DNA, 33 bp, Homo sapien
ggatttgcctgcaaaccactcttctccctcact

SEQ ID NO: 258492 - DNA, 33 bp, Homo sapien
ggatttgcctgcaaactactcttctccctcact

SEQ ID NO: 258493 - DNA, 33 bp, Homo sapien
ggcaccatggaaacatgagcaaaggacaccaag

SEQ ID NO: 258494 - DNA, 33 bp, Homo sapien
ggcaccatggaaacattagcaaaggacaccaag

SEQ ID NO: 258495 - DNA, 33 bp, Homo sapien
ttttaaattggatagcagaagaaaagtatcaca

SEQ ID NO: 258496 - DNA, 33 bp, Homo sapien
ttttaaattggatagccgaagaaaagtatcaca

SEQ ID NO: 258497 - DNA, 33 bp, Homo sapien
gaaaggtacaaataaaccatagcaaaaaacaaa

SEQ ID NO: 258498 - DNA, 33 bp, Homo sapien
gaaaggtacaaataaagcatagcaaaaaacaaa

SEQ ID NO: 258499 - DNA, 33 bp, Homo sapien
gagaaataaataacacacatttggtttcaagaa

SEQ ID NO: 258500 - DNA, 33 bp, Homo sapien
gagaaataaataacacgcatttggtttcaagaa

SEQ ID NO: 258501 - DNA, 33 bp, Homo sapien
caaggttttatcatccaccattcatgcagcact

SEQ ID NO: 258502 - DNA, 33 bp, Homo sapien
caaggttttatcatcctccattcatgcagcact

SEQ ID NO: 258503 - DNA, 33 bp, Homo sapien
attgaaaaaatatatgcaagactgccaagacca

SEQ ID NO: 258504 - DNA, 33 bp, Homo sapien
attgaaaaaatatatgtaagactgccaagacca

SEQ ID NO: 258505 - DNA, 33 bp, Homo sapien
aaatttgtttagttacagagtttggattgagag

SEQ ID NO: 258506 - DNA, 33 bp, Homo sapien
aaatttgtttagttactgagtttggattgagag

SEQ ID NO: 258507 - DNA, 33 bp, Homo sapien
atcatgggaaatacacacgtacctaatccgtgt

SEQ ID NO: 258508 - DNA, 33 bp, Homo sapien
atcatgggaaatacacgcgtacctaatccgtgt

SEQ ID NO: 258509 - DNA, 33 bp, Homo sapien
tatcataacacggtgaactattttgccttggaa

SEQ ID NO: 258510 - DNA, 33 bp, Homo sapien
tatcataacacggtgagctattttgccttggaa

SEQ ID NO: 258511 - DNA, 33 bp, Homo sapien
gccttccattctgggccgattactccaccttcc

SEQ ID NO: 258512 - DNA, 33 bp, Homo sapien
gccttccattctgggctgattactccaccttcc

SEQ ID NO: 258513 - DNA, 33 bp, Homo sapien
gggaaaaaagaagacgaatgtgacggcatccac

SEQ ID NO: 258514 - DNA, 33 bp, Homo sapien
gggaaaaaagaagacgtatgtgacggcatccac

SEQ ID NO: 258515 - DNA, 33 bp, Homo sapien
gagggctgccaactacaaggctgagtctggggt

SEQ ID NO: 258516 - DNA, 33 bp, Homo sapien
gagggctgccaactacgaggctgagtctggggt

SEQ ID NO: 258517 - DNA, 33 bp, Homo sapien
tttttagttaatactacgagcaagttatttgaa

SEQ ID NO: 258518 - DNA, 33 bp, Homo sapien
tttttagttaatactatgagcaagttatttgaa

SEQ ID NO: 258519 - DNA, 33 bp, Homo sapien
tttcactcaagccaaacatgagtctaagttttg

SEQ ID NO: 258520 - DNA, 33 bp, Homo sapien
tttcactcaagccaaatatgagtctaagttttg

SEQ ID NO: 258521 - DNA, 33 bp, Homo sapien
tacgatacatttcccaatcaaaatacagcaaat

SEQ ID NO: 258522 - DNA, 33 bp, Homo sapien
tacgatacatttcccagtcaaaatacagcaaat

SEQ ID NO: 258523 - DNA, 33 bp, Homo sapien
agaataacaaatgaagcagtcgagcaactggaa

SEQ ID NO: 258524 - DNA, 33 bp, Homo sapien
agaataacaaatgaaggagtcgagcaactggaa

SEQ ID NO: 258525 - DNA, 33 bp, Homo sapien
actaccagttagaaacaccatttatttttgtgt

SEQ ID NO: 258526 - DNA, 33 bp, Homo sapien
actaccagttagaaacgccatttatttttgtgt

SEQ ID NO: 258527 - DNA, 33 bp, Homo sapien
taagatgaagagatgacgttggggcagaggctc

SEQ ID NO: 258528 - DNA, 33 bp, Homo sapien
taagatgaagagatgatgttggggcagaggctc

SEQ ID NO: 258529 - DNA, 33 bp, Homo sapien
ggttctctgttcttccccatagatccacctctc

SEQ ID NO: 258530 - DNA, 33 bp, Homo sapien
ggttctctgttcttcctcatagatccacctctc

SEQ ID NO: 258531 - DNA, 33 bp, Homo sapien
cagtcaagacacagaacagttcccatatcacag

SEQ ID NO: 258532 - DNA, 33 bp, Homo sapien
cagtcaagacacagaatagttcccatatcacag

SEQ ID NO: 258533 - DNA, 33 bp, Homo sapien
tcttttgcaatcagtacgttagatgccttgaga

SEQ ID NO: 258534 - DNA, 33 bp, Homo sapien
tcttttgcaatcagtatgttagatgccttgaga

SEQ ID NO: 258535 - DNA, 33 bp, Homo sapien
ttacctacataatcccagctcgtccattgacga

SEQ ID NO: 258536 - DNA, 33 bp, Homo sapien
ttacctacataatcccggctcgtccattgacga

SEQ ID NO: 258537 - DNA, 33 bp, Homo sapien
cctggcctctctgagcaccgtaccttccttctg

SEQ ID NO: 258538 - DNA, 33 bp, Homo sapien
cctggcctctctgagcgccgtaccttccttctg

SEQ ID NO: 258539 - DNA, 33 bp, Homo sapien
tcccctctcctgatacagataaaaatgtttccc

SEQ ID NO: 258540 - DNA, 33 bp, Homo sapien
tcccctctcctgatacggataaaaatgtttccc

SEQ ID NO: 258541 - DNA, 33 bp, Homo sapien
tggagatcttgacccaaatcgtaaagtttcctt

SEQ ID NO: 258542 - DNA, 33 bp, Homo sapien
tggagatcttgacccacatcgtaaagtttcctt

SEQ ID NO: 258543 - DNA, 33 bp, Homo sapien
aagaaagggctttcagaagtaggtcatatcact

SEQ ID NO: 258544 - DNA, 33 bp, Homo sapien
aagaaagggctttcaggagtaggtcatatcact

SEQ ID NO: 258545 - DNA, 33 bp, Homo sapien
gctgcactgaggaggtcaattgaaggaaagtct

SEQ ID NO: 258546 - DNA, 33 bp, Homo sapien
gctgcactgaggaggtgaattgaaggaaagtct

SEQ ID NO: 258547 - DNA, 33 bp, Homo sapien
tcctctagtgatgcgacagagaaacatgagagg

SEQ ID NO: 258548 - DNA, 33 bp, Homo sapien
tcctctagtgatgcgatagagaaacatgagagg

SEQ ID NO: 258549 - DNA, 33 bp, Homo sapien
tccgccttaatgcaaacattgtaattgttacgg

SEQ ID NO: 258550 - DNA, 33 bp, Homo sapien
tccgccttaatgcaaatattgtaattgttacgg

SEQ ID NO: 258551 - DNA, 33 bp, Homo sapien
aatgccccagctcttcccaatttcctaacatac

SEQ ID NO: 258552 - DNA, 33 bp, Homo sapien
aatgccccagctcttcgcaatttcctaacatac

SEQ ID NO: 258553 - DNA, 33 bp, Homo sapien
agtcgtcgccaggccaactcctaaatgcacatc

SEQ ID NO: 258554 - DNA, 33 bp, Homo sapien
agtcgtcgccaggccagctcctaaatgcacatc

SEQ ID NO: 258555 - DNA, 33 bp, Homo sapien
gaatagtggcagttacccagagtcgtcgccagg

SEQ ID NO: 258556 - DNA, 33 bp, Homo sapien
gaatagtggcagttactcagagtcgtcgccagg

SEQ ID NO: 258557 - DNA, 33 bp, Homo sapien
aaattctagaactgaacctttggtaagagcaaa

SEQ ID NO: 258558 - DNA, 33 bp, Homo sapien
aaattctagaactgaagctttggtaagagcaaa

SEQ ID NO: 258559 - DNA, 33 bp, Homo sapien
gacttactttggttgagaattgctatgaatatt

SEQ ID NO: 258560 - DNA, 33 bp, Homo sapien
gacttactttggttgataattgctatgaatatt

SEQ ID NO: 258561 - DNA, 33 bp, Homo sapien
tagtaacttatcaatggagtgttttgagaatta

SEQ ID NO: 258562 - DNA, 33 bp, Homo sapien
tagtaacttatcaatgtagtgttttgagaatta

SEQ ID NO: 258563 - DNA, 33 bp, Homo sapien
aggtactggagatcaagagattaataagacatg

SEQ ID NO: 258564 - DNA, 33 bp, Homo sapien
aggtactggagatcaatagattaataagacatg

SEQ ID NO: 258565 - DNA, 33 bp, Homo sapien
cttcatgttctcttctaaacagggtgagttgct

SEQ ID NO: 258566 - DNA, 33 bp, Homo sapien
cttcatgttctcttcttaacagggtgagttgct

SEQ ID NO: 258567 - DNA, 33 bp, Homo sapien
ttatgaatataaatggcatttcaaatactatgg

SEQ ID NO: 258568 - DNA, 33 bp, Homo sapien
ttatgaatataaatgggatttcaaatactatgg

SEQ ID NO: 258569 - DNA, 33 bp, Homo sapien
acatttttcaagtaccagatgcagggccctatg

SEQ ID NO: 258570 - DNA, 33 bp, Homo sapien
acatttttcaagtaccggatgcagggccctatg

SEQ ID NO: 258571 - DNA, 33 bp, Homo sapien
acagaagttgaattacaggccttagggagcttg

SEQ ID NO: 258572 - DNA, 33 bp, Homo sapien
acagaagttgaattaccggccttagggagcttg

SEQ ID NO: 258573 - DNA, 33 bp, Homo sapien
tccagtgtcttcattcacaagtcctcattcaac

SEQ ID NO: 258574 - DNA, 33 bp, Homo sapien
tccagtgtcttcattctcaagtcctcattcaac

SEQ ID NO: 258575 - DNA, 33 bp, Homo sapien
acatagttacctgcccaaagataatgccacatt

SEQ ID NO: 258576 - DNA, 33 bp, Homo sapien
acatagttacctgcccgaagataatgccacatt

SEQ ID NO: 258577 - DNA, 33 bp, Homo sapien
tgacaggtcttacagaagcatatctttagtcat

SEQ ID NO: 258578 - DNA, 33 bp, Homo sapien
tgacaggtcttacagaggcatatctttagtcat

SEQ ID NO: 258579 - DNA, 33 bp, Homo sapien
atccctgactttctagccaagttggacaaaatg

SEQ ID NO: 258580 - DNA, 33 bp, Homo sapien
atccctgactttctaggcaagttggacaaaatg

SEQ ID NO: 258581 - DNA, 33 bp, Homo sapien
aaaatcactagtaagacagagggcttgaatgaa

SEQ ID NO: 258582 - DNA, 33 bp, Homo sapien
aaaatcactagtaagagagagggcttgaatgaa

SEQ ID NO: 258583 - DNA, 33 bp, Homo sapien
aaatatgctcaacttcacaataatcagaaaaat

SEQ ID NO: 258584 - DNA, 33 bp, Homo sapien
aaatatgctcaacttcgcaataatcagaaaaat

SEQ ID NO: 258585 - DNA, 33 bp, Homo sapien
ggccaccatcaattcccgccttccctcttcatg

SEQ ID NO: 258586 - DNA, 33 bp, Homo sapien
ggccaccatcaattcctgccttccctcttcatg

SEQ ID NO: 258587 - DNA, 33 bp, Homo sapien
ttatctggaagatgtgaataatgcctctaaaat

SEQ ID NO: 258588 - DNA, 33 bp, Homo sapien
ttatctggaagatgtggataatgcctctaaaat

SEQ ID NO: 258589 - DNA, 33 bp, Homo sapien
acatttggatcacagaccgtttggtatttattt

SEQ ID NO: 258590 - DNA, 33 bp, Homo sapien
acatttggatcacagatcgtttggtatttattt

SEQ ID NO: 258591 - DNA, 33 bp, Homo sapien
attggatcagaaggccaacctgaaattagtaaa

SEQ ID NO: 258592 - DNA, 33 bp, Homo sapien
attggatcagaaggccgacctgaaattagtaaa

SEQ ID NO: 258593 - DNA, 33 bp, Homo sapien
acatttctttttggtaactattggtagccaaca

SEQ ID NO: 258594 - DNA, 33 bp, Homo sapien
acatttctttttggtatctattggtagccaaca

SEQ ID NO: 258595 - DNA, 33 bp, Homo sapien
attctggatcacaaaacacacaccagcccatat

SEQ ID NO: 258596 - DNA, 33 bp, Homo sapien
attctggatcacaaaatacacaccagcccatat

SEQ ID NO: 258597 - DNA, 33 bp, Homo sapien
gtgtaatactaataaaggcagatcagccagacg

SEQ ID NO: 258598 - DNA, 33 bp, Homo sapien
gtgtaatactaataaatgcagatcagccagacg

SEQ ID NO: 258599 - DNA, 33 bp, Homo sapien
ggtagaccagctagaaaattaagagaccatcag

SEQ ID NO: 258600 - DNA, 33 bp, Homo sapien
ggtagaccagctagaagattaagagaccatcag

SEQ ID NO: 258601 - DNA, 33 bp, Homo sapien
acaaaggcctaactagaaaccagatataaaaag

SEQ ID NO: 258602 - DNA, 33 bp, Homo sapien
acaaaggcctaactagcaaccagatataaaaag

SEQ ID NO: 258603 - DNA, 33 bp, Homo sapien
ctcctactgaaatgagaattttagaatggggaa

SEQ ID NO: 258604 - DNA, 33 bp, Homo sapien
ctcctactgaaatgagtattttagaatggggaa

SEQ ID NO: 258605 - DNA, 33 bp, Homo sapien
actggcataacggagaagcacaagattggggct

SEQ ID NO: 258606 - DNA, 33 bp, Homo sapien
actggcataacggagaggcacaagattggggct

SEQ ID NO: 258607 - DNA, 33 bp, Homo sapien
ctttcatgttaaggaactgggctgggtgatata

SEQ ID NO: 258608 - DNA, 33 bp, Homo sapien
ctttcatgttaaggaattgggctgggtgatata

SEQ ID NO: 258609 - DNA, 33 bp, Homo sapien
ccacacacaggggcacagtcataggctgaaggc

SEQ ID NO: 258610 - DNA, 33 bp, Homo sapien
ccacacacaggggcacggtcataggctgaaggc

SEQ ID NO: 258611 - DNA, 33 bp, Homo sapien
cactgctgcacatctaagatatattctctaaca

SEQ ID NO: 258612 - DNA, 33 bp, Homo sapien
cactgctgcacatctaggatatattctctaaca

SEQ ID NO: 258613 - DNA, 33 bp, Homo sapien
agtaacattcctggaccctcttcaatttttctt

SEQ ID NO: 258614 - DNA, 33 bp, Homo sapien
agtaacattcctggactctcttcaatttttctt

SEQ ID NO: 258615 - DNA, 33 bp, Homo sapien
aaaccttagaagttgacctcctagaagttgaga

SEQ ID NO: 258616 - DNA, 33 bp, Homo sapien
aaaccttagaagttgatctcctagaagttgaga

SEQ ID NO: 258617 - DNA, 33 bp, Homo sapien
caaagatagccaggcacccaagggcattgtcac

SEQ ID NO: 258618 - DNA, 33 bp, Homo sapien
caaagatagccaggcatccaagggcattgtcac

SEQ ID NO: 258619 - DNA, 33 bp, Homo sapien
gccttcagtgatgggccctgttcatctcttctg

SEQ ID NO: 258620 - DNA, 33 bp, Homo sapien
gccttcagtgatgggctctgttcatctcttctg

SEQ ID NO: 258621 - DNA, 33 bp, Homo sapien
cttccctccttgctccggcctgacttggagatt

SEQ ID NO: 258622 - DNA, 33 bp, Homo sapien
cttccctccttgctcctgcctgacttggagatt

SEQ ID NO: 258623 - DNA, 33 bp, Homo sapien
cagacttagggctctccctcactcaccagtcta

SEQ ID NO: 258624 - DNA, 33 bp, Homo sapien
cagacttagggctctctctcactcaccagtcta

SEQ ID NO: 258625 - DNA, 33 bp, Homo sapien
actttgacttttcagacatacactcatacaaaa

SEQ ID NO: 258626 - DNA, 33 bp, Homo sapien
actttgacttttcagatatacactcatacaaaa

SEQ ID NO: 258627 - DNA, 33 bp, Homo sapien
tgcacattagtacttccactttgggaattcagc

SEQ ID NO: 258628 - DNA, 33 bp, Homo sapien
tgcacattagtacttctactttgggaattcagc

SEQ ID NO: 258629 - DNA, 33 bp, Homo sapien
ggtgtaaagacaacagaataaatatcgaacttc

SEQ ID NO: 258630 - DNA, 33 bp, Homo sapien
ggtgtaaagacaacaggataaatatcgaacttc

SEQ ID NO: 258631 - DNA, 33 bp, Homo sapien
tgctctcattctgtaaatcatagaaaagtttga

SEQ ID NO: 258632 - DNA, 33 bp, Homo sapien
tgctctcattctgtaagtcatagaaaagtttga

SEQ ID NO: 258633 - DNA, 33 bp, Homo sapien
gctgggaaatacagaaagtggcaagaacagggg

SEQ ID NO: 258634 - DNA, 33 bp, Homo sapien
gctgggaaatacagaaggtggcaagaacagggg

SEQ ID NO: 258635 - DNA, 33 bp, Homo sapien
atgcaccaaggcctcaagtcaggagccagcagc

SEQ ID NO: 258636 - DNA, 33 bp, Homo sapien
atgcaccaaggcctcaggtcaggagccagcagc

SEQ ID NO: 258637 - DNA, 33 bp, Homo sapien
aacctgaagtggtctaagaggcatcatttttcc

SEQ ID NO: 258638 - DNA, 33 bp, Homo sapien
aacctgaagtggtctaggaggcatcatttttcc

SEQ ID NO: 258639 - DNA, 33 bp, Homo sapien
tttagttgtcctttgacacttccctttgagcat

SEQ ID NO: 258640 - DNA, 33 bp, Homo sapien
tttagttgtcctttgatacttccctttgagcat

SEQ ID NO: 258641 - DNA, 33 bp, Homo sapien
tagtctcaacatagacaacttagaggtcattga

SEQ ID NO: 258642 - DNA, 33 bp, Homo sapien
tagtctcaacatagacgacttagaggtcattga

SEQ ID NO: 258643 - DNA, 33 bp, Homo sapien
aaaccttaagaagtcaaattcacaattgcaagc

SEQ ID NO: 258644 - DNA, 33 bp, Homo sapien
aaaccttaagaagtcagattcacaattgcaagc

SEQ ID NO: 258645 - DNA, 33 bp, Homo sapien
aataaccttcagaaaacactgtgcaatcaaaca

SEQ ID NO: 258646 - DNA, 33 bp, Homo sapien
aataaccttcagaaaatactgtgcaatcaaaca

SEQ ID NO: 258647 - DNA, 33 bp, Homo sapien
tattaaagaacagttacgagagatgtatgaagt

SEQ ID NO: 258648 - DNA, 33 bp, Homo sapien
tattaaagaacagttatgagagatgtatgaagt

SEQ ID NO: 258649 - DNA, 33 bp, Homo sapien
cagagggatcacataacctccttgcttccaaat

SEQ ID NO: 258650 - DNA, 33 bp, Homo sapien
cagagggatcacataatctccttgcttccaaat

SEQ ID NO: 258651 - DNA, 33 bp, Homo sapien
tttcattgccttattacgatctgtgtgtatggg

SEQ ID NO: 258652 - DNA, 33 bp, Homo sapien
tttcattgccttattatgatctgtgtgtatggg

SEQ ID NO: 258653 - DNA, 33 bp, Homo sapien
agaataatggcccccacagacattcgtgttcta

SEQ ID NO: 258654 - DNA, 33 bp, Homo sapien
agaataatggcccccagagacattcgtgttcta

SEQ ID NO: 258655 - DNA, 33 bp, Homo sapien
ctcaatgttacagtgaccctggttgctcatata

SEQ ID NO: 258656 - DNA, 33 bp, Homo sapien
ctcaatgttacagtgatcctggttgctcatata

SEQ ID NO: 258657 - DNA, 33 bp, Homo sapien
tgctaagcgctacaaacacaaatactatttaca

SEQ ID NO: 258658 - DNA, 33 bp, Homo sapien
tgctaagcgctacaaatacaaatactatttaca

SEQ ID NO: 258659 - DNA, 33 bp, Homo sapien
tcatgtttaagcacaaaaattcagtacagttta

SEQ ID NO: 258660 - DNA, 33 bp, Homo sapien
tcatgtttaagcacaacaattcagtacagttta

SEQ ID NO: 258661 - DNA, 33 bp, Homo sapien
cttttgtgctcataaaaccactttatcttcaac

SEQ ID NO: 258662 - DNA, 33 bp, Homo sapien
cttttgtgctcataaagccactttatcttcaac

SEQ ID NO: 258663 - DNA, 33 bp, Homo sapien
cattgaatgggagctccagtcttccgggaaaat

SEQ ID NO: 258664 - DNA, 33 bp, Homo sapien
cattgaatgggagctctagtcttccgggaaaat

SEQ ID NO: 258665 - DNA, 33 bp, Homo sapien
ctgatcatctttcaaccgatgctcccacagcct

SEQ ID NO: 258666 - DNA, 33 bp, Homo sapien
ctgatcatctttcaacggatgctcccacagcct

SEQ ID NO: 258667 - DNA, 33 bp, Homo sapien
gactgtcaaaagccacaatggacagcattcata

SEQ ID NO: 258668 - DNA, 33 bp, Homo sapien
gactgtcaaaagccacgatggacagcattcata

SEQ ID NO: 258669 - DNA, 33 bp, Homo sapien; identical to SEQ ID NO: 258667

SEQ ID NO: 258670 - DNA, 33 bp, Homo sapien; identical to SEQ ID NO: 258668

SEQ ID NO: 258671 - DNA, 33 bp, Homo sapien
tctgggttgattgtagaagcagagatgagtcct

SEQ ID NO: 258672 - DNA, 33 bp, Homo sapien
tctgggttgattgtagcagcagagatgagtcct

SEQ ID NO: 258673 - DNA, 33 bp, Homo sapien
gtgactgtaaatgcgcacaactcagaaggggag

SEQ ID NO: 258674 - DNA, 33 bp, Homo sapien
gtgactgtaaatgcgcgcaactcagaaggggag

SEQ ID NO: 258675 - DNA, 33 bp, Homo sapien
ggagacgcgatgcctgaaactgatttggaagaa

SEQ ID NO: 258676 - DNA, 33 bp, Homo sapien
ggagacgcgatgcctgcaactgatttggaagaa

SEQ ID NO: 258677 - DNA, 33 bp, Homo sapien
ccctgtgccatccagacatgtgagggtgaggtc

SEQ ID NO: 258678 - DNA, 33 bp, Homo sapien
ccctgtgccatccagatatgtgagggtgaggtc

SEQ ID NO: 258679 - DNA, 33 bp, Homo sapien
tctgcttgaaagattcaacataaacttgtcaat

SEQ ID NO: 258680 - DNA, 33 bp, Homo sapien
tctgcttgaaagattccacataaacttgtcaat

SEQ ID NO: 258681 - DNA, 33 bp, Homo sapien
aagtcgaaaaagacgtaaagacagatatctgga

SEQ ID NO: 258682 - DNA, 33 bp, Homo sapien
aagtcgaaaaagacgtgaagacagatatctgga

SEQ ID NO: 258683 - DNA, 33 bp, Homo sapien
ggctactaaattaatcaacaacctggagttacc

SEQ ID NO: 258684 - DNA, 33 bp, Homo sapien
ggctactaaattaatcgacaacctggagttacc

SEQ ID NO: 258685 - DNA, 33 bp, Homo sapien
gagtaatgccatcaacaaaaacaaatatcatct

SEQ ID NO: 258686 - DNA, 33 bp, Homo sapien
gagtaatgccatcaaccaaaacaaatatcatct

SEQ ID NO: 258687 - DNA, 33 bp, Homo sapien
ttggatttattattacagaagttattgctatct

SEQ ID NO: 258688 - DNA, 33 bp, Homo sapien
ttggatttattattacggaagttattgctatct

SEQ ID NO: 258689 - DNA, 33 bp, Homo sapien
catttatggactgatacggtcttttcaagtgat

SEQ ID NO: 258690 - DNA, 33 bp, Homo sapien
catttatggactgatatggtcttttcaagtgat

SEQ ID NO: 258691 - DNA, 33 bp, Homo sapien
ataaatgctcaatgaaggtgtagaatgaatctt

SEQ ID NO: 258692 - DNA, 33 bp, Homo sapien
ataaatgctcaatgaatgtgtagaatgaatctt

SEQ ID NO: 258693 - DNA, 33 bp, Homo sapien
aatgataaatgtccaaattatatgctcttgatt

SEQ ID NO: 258694 - DNA, 33 bp, Homo sapien
aatgataaatgtccaagttatatgctcttgatt

SEQ ID NO: 258695 - DNA, 33 bp, Homo sapien
ctatttttatgttacaaatgttcactttgtggg

SEQ ID NO: 258696 - DNA, 33 bp, Homo sapien
ctatttttatgttacacatgttcactttgtggg

SEQ ID NO: 258697 - DNA, 33 bp, Homo sapien
ttagaaaaatcattcaaatctgtggaaataatc

SEQ ID NO: 258698 - DNA, 33 bp, Homo sapien
ttagaaaaatcattcagatctgtggaaataatc

SEQ ID NO: 258699 - DNA, 33 bp, Homo sapien
cttactgaaaaagaaacggcacaagagtattct

SEQ ID NO: 258700 - DNA, 33 bp, Homo sapien
cttactgaaaaagaaatggcacaagagtattct

SEQ ID NO: 258701 - DNA, 33 bp, Homo sapien
tttgcacttcgtgctacccagtgtctgaaagtg

SEQ ID NO: 258702 - DNA, 33 bp, Homo sapien
tttgcacttcgtgctatccagtgtctgaaagtg

SEQ ID NO: 258703 - DNA, 33 bp, Homo sapien
aagagctccggaaatcacatacaagttcccagg

SEQ ID NO: 258704 - DNA, 33 bp, Homo sapien
aagagctccggaaatcgcatacaagttcccagg

SEQ ID NO: 258705 - DNA, 33 bp, Homo sapien
acaatatgtgcatttacctttttcacccatgga

SEQ ID NO: 258706 - DNA, 33 bp, Homo sapien
acaatatgtgcatttatctttttcacccatgga

SEQ ID NO: 258707 - DNA, 33 bp, Homo sapien
acatctggttggccaactggaaaagataaaatt

SEQ ID NO: 258708 - DNA, 33 bp, Homo sapien
acatctggttggccaattggaaaagataaaatt

SEQ ID NO: 258709 - DNA, 33 bp, Homo sapien
tgtatttcaaatcacacgggaaaaagtagagtt

SEQ ID NO: 258710 - DNA, 33 bp, Homo sapien
tgtatttcaaatcacaggggaaaaagtagagtt

SEQ ID NO: 258711 - DNA, 33 bp, Homo sapien
acctggattacttggaaccaaagaagaagctag

SEQ ID NO: 258712 - DNA, 33 bp, Homo sapien
acctggattacttggagccaaagaagaagctag

SEQ ID NO: 258713 - DNA, 33 bp, Homo sapien
caaatagtcatagattaaaaaaaacttgccaat

SEQ ID NO: 258714 - DNA, 33 bp, Homo sapien
caaatagtcatagatttaaaaaaacttgccaat

SEQ ID NO: 258715 - DNA, 33 bp, Homo sapien
tgaaaataacaagtcaataaatcacttgatagc

SEQ ID NO: 258716 - DNA, 33 bp, Homo sapien
tgaaaataacaagtcactaaatcacttgatagc

SEQ ID NO: 258717 - DNA, 33 bp, Homo sapien
gagtgaacacaacccacgtcactcactgcactc

SEQ ID NO: 258718 - DNA, 33 bp, Homo sapien
gagtgaacacaacccatgtcactcactgcactc

SEQ ID NO: 258719 - DNA, 33 bp, Homo sapien
ttattactgacagataggagttcttcatcttta

SEQ ID NO: 258720 - DNA, 33 bp, Homo sapien
ttattactgacagatatgagttcttcatcttta

SEQ ID NO: 258721 - DNA, 33 bp, Homo sapien
tttcttttgagtgtcacgtagatacttgtttca

SEQ ID NO: 258722 - DNA, 33 bp, Homo sapien
tttcttttgagtgtcatgtagatacttgtttca

SEQ ID NO: 258723 - DNA, 33 bp, Homo sapien
tcagtgtcttctgtaaccttgtttattctttac

SEQ ID NO: 258724 - DNA, 33 bp, Homo sapien
tcagtgtcttctgtaatcttgtttattctttac

SEQ ID NO: 258725 - DNA, 33 bp, Homo sapien
aatattgcaagtaataaacggtggtcattctca

SEQ ID NO: 258726 - DNA, 33 bp, Homo sapien
aatattgcaagtaatacacggtggtcattctca

SEQ ID NO: 258727 - DNA, 33 bp, Homo sapien
ggaaacgatattcatcgccttgtacttctccat

SEQ ID NO: 258728 - DNA, 33 bp, Homo sapien
ggaaacgatattcatctccttgtacttctccat

SEQ ID NO: 258729 - DNA, 33 bp, Homo sapien; identical to SEQ ID NO: 258727

SEQ ID NO: 258730 - DNA, 33 bp, Homo sapien; identical to SEQ ID NO: 258728

SEQ ID NO: 258731 - DNA, 33 bp, Homo sapien
cgtttccccctttgcacataaacccatgattga

SEQ ID NO: 258732 - DNA, 33 bp, Homo sapien
cgtttccccctttgcatataaacccatgattga

SEQ ID NO: 258733 - DNA, 33 bp, Homo sapien
gtccccccaacttgacaaggacctcagacggtc

SEQ ID NO: 258734 - DNA, 33 bp, Homo sapien
gtccccccaacttgacgaggacctcagacggtc

SEQ ID NO: 258735 - DNA, 33 bp, Homo sapien
ggaggtgactatgcataaactcagtcctgccca

SEQ ID NO: 258736 - DNA, 33 bp, Homo sapien
ggaggtgactatgcatgaactcagtcctgccca

SEQ ID NO: 258737 - DNA, 33 bp, Homo sapien
taaggttacctgctcactacgagggctaatgct

SEQ ID NO: 258738 - DNA, 33 bp, Homo sapien
taaggttacctgctcagtacgagggctaatgct

SEQ ID NO: 258739 - DNA, 33 bp, Homo sapien
tgggcttaattcagacgagtggaaatgtctagg

SEQ ID NO: 258740 - DNA, 33 bp, Homo sapien
tgggcttaattcagactagtggaaatgtctagg

SEQ ID NO: 258741 - DNA, 33 bp, Homo sapien
agtgtgcgtaagagcacggcatacttgggctta

SEQ ID NO: 258742 - DNA, 33 bp, Homo sapien
agtgtgcgtaagagcagggcatacttgggctta

SEQ ID NO: 258743 - DNA, 33 bp, Homo sapien
caggaagatgttggagcctcagaatatgttagt

SEQ ID NO: 258744 - DNA, 33 bp, Homo sapien
caggaagatgttggagtctcagaatatgttagt

SEQ ID NO: 258745 - DNA, 33 bp, Homo sapien
gggcccgatagtcaccgggggactgggtatgta

SEQ ID NO: 258746 - DNA, 33 bp, Homo sapien
gggcccgatagtcacctggggactgggtatgta

SEQ ID NO: 258747 - DNA, 33 bp, Homo sapien
gcccaacgtggatacccacaccacaggtggaca

SEQ ID NO: 258748 - DNA, 33 bp, Homo sapien
gcccaacgtggatacctacaccacaggtggaca

SEQ ID NO: 258749 - DNA, 33 bp, Homo sapien
cttaggttgtataaaacgataaaatgtgtgttt

SEQ ID NO: 258750 - DNA, 33 bp, Homo sapien
cttaggttgtataaaatgataaaatgtgtgttt

SEQ ID NO: 258751 - DNA, 33 bp, Homo sapien
ccacccgggacctgaacgtacctgggaccttgt

SEQ ID NO: 258752 - DNA, 33 bp, Homo sapien
ccacccgggacctgaatgtacctgggaccttgt

SEQ ID NO: 258753 - DNA, 33 bp, Homo sapien
ctgcataaacatcagggcccagtttggcacata

SEQ ID NO: 258754 - DNA, 33 bp, Homo sapien
ctgcataaacatcaggtcccagtttggcacata

SEQ ID NO: 258755 - DNA, 33 bp, Homo sapien
tgtttttgtaatgatagcggctttcaagggtca

SEQ ID NO: 258756 - DNA, 33 bp, Homo sapien
tgtttttgtaatgatatcggctttcaagggtca

SEQ ID NO: 258757 - DNA, 33 bp, Homo sapien
ctagaacatgagaaaacatgacctggtgccacg

SEQ ID NO: 258758 - DNA, 33 bp, Homo sapien
ctagaacatgagaaaatatgacctggtgccacg

SEQ ID NO: 258759 - DNA, 33 bp, Homo sapien
taacttcaaacacctgaaagaataatgtaaaat

SEQ ID NO: 258760 - DNA, 33 bp, Homo sapien
taacttcaaacacctggaagaataatgtaaaat

SEQ ID NO: 258761 - DNA, 33 bp, Homo sapien
ttcagggatggacagaacatttttcttatcact

SEQ ID NO: 258762 - DNA, 33 bp, Homo sapien
ttcagggatggacagagcatttttcttatcact

SEQ ID NO: 258763 - DNA, 33 bp, Homo sapien
accattactcaattagcaagttctctttgtttc

SEQ ID NO: 258764 - DNA, 33 bp, Homo sapien
accattactcaattaggaagttctctttgtttc

SEQ ID NO: 258765 - DNA, 33 bp, Homo sapien
ttgggtatgttcctcaagccatgtgttcaccat

SEQ ID NO: 258766 - DNA, 33 bp, Homo sapien
ttgggtatgttcctcaggccatgtgttcaccat

SEQ ID NO: 258767 - DNA, 33 bp, Homo sapien
accttttaagactctcaagaacactgttatgag

SEQ ID NO: 258768 - DNA, 33 bp, Homo sapien
accttttaagactctcgagaacactgttatgag

SEQ ID NO: 258769 - DNA, 33 bp, Homo sapien
tcaggattgcgtttgacaaccaggtttctctta

SEQ ID NO: 258770 - DNA, 33 bp, Homo sapien
tcaggattgcgtttgataaccaggtttctctta

SEQ ID NO: 258771 - DNA, 33 bp, Homo sapien
ctggccccaggcacaacgaggcagatggaatag

SEQ ID NO: 258772 - DNA, 33 bp, Homo sapien
ctggccccaggcacaatgaggcagatggaatag

SEQ ID NO: 258773 - DNA, 33 bp, Homo sapien
gcactaatctgtgtcaaactccaaagtgcaaat

SEQ ID NO: 258774 - DNA, 33 bp, Homo sapien
gcactaatctgtgtcagactccaaagtgcaaat

SEQ ID NO: 258775 - DNA, 33 bp, Homo sapien
gatgtgagtaccccaggatgtaaatttgtgcgg

SEQ ID NO: 258776 - DNA, 33 bp, Homo sapien
gatgtgagtaccccagtatgtaaatttgtgcgg

SEQ ID NO: 258777 - DNA, 33 bp, Homo sapien
atgcttgtattgtgtacgtgagtagggaatgca

SEQ ID NO: 258778 - DNA, 33 bp, Homo sapien
atgcttgtattgtgtatgtgagtagggaatgca

SEQ ID NO: 258779 - DNA, 33 bp, Homo sapien
ctaactatggttattaacaggaaagaacaatta

SEQ ID NO: 258780 - DNA, 33 bp, Homo sapien
ctaactatggttattagcaggaaagaacaatta

SEQ ID NO: 258781 - DNA, 33 bp, Homo sapien
tttatgctgtaaaataacatctatactggagac

SEQ ID NO: 258782 - DNA, 33 bp, Homo sapien
tttatgctgtaaaatatcatctatactggagac

SEQ ID NO: 258783 - DNA, 33 bp, Homo sapien
aggacgatgttaaataaaaacaggattctgagg

SEQ ID NO: 258784 - DNA, 33 bp, Homo sapien
aggacgatgttaaatagaaacaggattctgagg

SEQ ID NO: 258785 - DNA, 33 bp, Homo sapien
agccactctacttttcacttccagtatctttct

SEQ ID NO: 258786 - DNA, 33 bp, Homo sapien
agccactctacttttcgcttccagtatctttct

SEQ ID NO: 258787 - DNA, 33 bp, Homo sapien
tagcaggttgttttacaccagcatcacgagaaa

SEQ ID NO: 258788 - DNA, 33 bp, Homo sapien
tagcaggttgttttacgccagcatcacgagaaa

SEQ ID NO: 258789 - DNA, 33 bp, Homo sapien
ctgaataatgtggatacgaaaaaatgatatgtg

SEQ ID NO: 258790 - DNA, 33 bp, Homo sapien
ctgaataatgtggatatgaaaaaatgatatgtg

SEQ ID NO: 258791 - DNA, 33 bp, Homo sapien
ttcaaaagacactaataaatgctaatgattatg

SEQ ID NO: 258792 - DNA, 33 bp, Homo sapien
ttcaaaagacactaatgaatgctaatgattatg

SEQ ID NO: 258793 - DNA, 33 bp, Homo sapien
atccttccactgtgaacctctattgtatttgcg

SEQ ID NO: 258794 - DNA, 33 bp, Homo sapien
atccttccactgtgaatctctattgtatttgcg

SEQ ID NO: 258795 - DNA, 33 bp, Homo sapien
tctaaaggctatgaagcatcttattggaaagct

SEQ ID NO: 258796 - DNA, 33 bp, Homo sapien
tctaaaggctatgaagtatcttattggaaagct

SEQ ID NO: 258797 - DNA, 33 bp, Homo sapien
cttcagaatttttcaacatggtacaggacaatc

SEQ ID NO: 258798 - DNA, 33 bp, Homo sapien
cttcagaatttttcaagatggtacaggacaatc

SEQ ID NO: 258799 - DNA, 33 bp, Homo sapien
aaaaaatctacctatcacaggcaatctctaggg

SEQ ID NO: 258800 - DNA, 33 bp, Homo sapien
aaaaaatctacctatcgcaggcaatctctaggg

SEQ ID NO: 258801 - DNA, 33 bp, Homo sapien
tatactaaacacaggacaaatgcatcaagtaga

SEQ ID NO: 258802 - DNA, 33 bp, Homo sapien
tatactaaacacaggataaatgcatcaagtaga

SEQ ID NO: 258803 - DNA, 33 bp, Homo sapien
cttagaaaaagatactcagatccagagaagttc

SEQ ID NO: 258804 - DNA, 33 bp, Homo sapien
cttagaaaaagatactgagatccagagaagttc

SEQ ID NO: 258805 - DNA, 33 bp, Homo sapien
ctcagcacctcctcaaatgtgggcgtgtggcgt

SEQ ID NO: 258806 - DNA, 33 bp, Homo sapien
ctcagcacctcctcaagtgtgggcgtgtggcgt

SEQ ID NO: 258807 - DNA, 33 bp, Homo sapien
atacaatgaaatcctacgcagcaacgaaacgga

SEQ ID NO: 258808 - DNA, 33 bp, Homo sapien
atacaatgaaatcctatgcagcaacgaaacgga

SEQ ID NO: 258809 - DNA, 33 bp, Homo sapien
gtatatatcttctgggaaaaagtttattgtcag

SEQ ID NO: 258810 - DNA, 33 bp, Homo sapien
gtatatatcttctggggaaaagtttattgtcag

SEQ ID NO: 258811 - DNA, 33 bp, Homo sapien
cgaagatacagcagaaataaaacagactgaagt

SEQ ID NO: 258812 - DNA, 33 bp, Homo sapien
cgaagatacagcagaagtaaaacagactgaagt

SEQ ID NO: 258813 - DNA, 33 bp, Homo sapien
aaacaatcaccttggccgaactgagtcaaaggt

SEQ ID NO: 258814 - DNA, 33 bp, Homo sapien
aaacaatcaccttggctgaactgagtcaaaggt

SEQ ID NO: 258815 - DNA, 33 bp, Homo sapien
aggctctctcctggccaaatttccatcatgaag

SEQ ID NO: 258816 - DNA, 33 bp, Homo sapien
aggctctctcctggccgaatttccatcatgaag

SEQ ID NO: 258817 - DNA, 33 bp, Homo sapien
tcccaagactagaatgcaaaaatacagccacat

SEQ ID NO: 258818 - DNA, 33 bp, Homo sapien
tcccaagactagaatggaaaaatacagccacat

SEQ ID NO: 258819 - DNA, 33 bp, Homo sapien
agacctagctatttaaataattcccgataccca

SEQ ID NO: 258820 - DNA, 33 bp, Homo sapien
agacctagctatttaagtaattcccgataccca

SEQ ID NO: 258821 - DNA, 33 bp, Homo sapien
cttaggccaatgcctaacacttactaaatagcc

SEQ ID NO: 258822 - DNA, 33 bp, Homo sapien
cttaggccaatgcctagcacttactaaatagcc

SEQ ID NO: 258823 - DNA, 33 bp, Homo sapien
ccacaggggattgagtcaagcacaggttcagag

SEQ ID NO: 258824 - DNA, 33 bp, Homo sapien
ccacaggggattgagttaagcacaggttcagag

SEQ ID NO: 258825 - DNA, 33 bp, Homo sapien
catgcttgtggaatacagtaaaccaggcatcat

SEQ ID NO: 258826 - DNA, 33 bp, Homo sapien
catgcttgtggaatacggtaaaccaggcatcat

SEQ ID NO: 258827 - DNA, 33 bp, Homo sapien
aaccctccaccagctaaattgtttatttctaaa

SEQ ID NO: 258828 - DNA, 33 bp, Homo sapien
aaccctccaccagctagattgtttatttctaaa

SEQ ID NO: 258829 - DNA, 33 bp, Homo sapien
cctaaccctgtgtctacacaagcagtaagttgc

SEQ ID NO: 258830 - DNA, 33 bp, Homo sapien
cctaaccctgtgtctatacaagcagtaagttgc

SEQ ID NO: 258831 - DNA, 33 bp, Homo sapien
agccagatgaggcttcactttttctttttgatc

SEQ ID NO: 258832 - DNA, 33 bp, Homo sapien
agccagatgaggcttcgctttttctttttgatc

SEQ ID NO: 258833 - DNA, 33 bp, Homo sapien
cacaggcactaacctaacatttcaatacaagat

SEQ ID NO: 258834 - DNA, 33 bp, Homo sapien
cacaggcactaacctaccatttcaatacaagat

SEQ ID NO: 258835 - DNA, 33 bp, Homo sapien
tagaaaattctttgagacagacaggcacggtgg

SEQ ID NO: 258836 - DNA, 33 bp, Homo sapien
tagaaaattctttgaggcagacaggcacggtgg

SEQ ID NO: 258837 - DNA, 33 bp, Homo sapien
cttcctcatcaaaaccacatggcagataagtct

SEQ ID NO: 258838 - DNA, 33 bp, Homo sapien
cttcctcatcaaaaccgcatggcagataagtct

SEQ ID NO: 258839 - DNA, 33 bp, Homo sapien
atccttaacagccttcaatgttgtctgtgttct

SEQ ID NO: 258840 - DNA, 33 bp, Homo sapien
atccttaacagccttcgatgttgtctgtgttct

SEQ ID NO: 258841 - DNA, 33 bp, Homo sapien
atgggaatatgaaatacagcacctgttatcaga

SEQ ID NO: 258842 - DNA, 33 bp, Homo sapien
atgggaatatgaaatatagcacctgttatcaga

SEQ ID NO: 258843 - DNA, 33 bp, Homo sapien
cctctgatatagaacactgtgtggctggagctc

SEQ ID NO: 258844 - DNA, 33 bp, Homo sapien
cctctgatatagaacattgtgtggctggagctc

SEQ ID NO: 258845 - DNA, 33 bp, Homo sapien
atagagcgtcagagaaattatgtaccttgggct

SEQ ID NO: 258846 - DNA, 33 bp, Homo sapien
atagagcgtcagagaagttatgtaccttgggct

SEQ ID NO: 258847 - DNA, 33 bp, Homo sapien
taggctttattgcaaaagtgagatctgagcaaa

SEQ ID NO: 258848 - DNA, 33 bp, Homo sapien
taggctttattgcaaaggtgagatctgagcaaa

SEQ ID NO: 258849 - DNA, 33 bp, Homo sapien
aggtcattgtaaaaccagagctgttctatggca

SEQ ID NO: 258850 - DNA, 33 bp, Homo sapien
aggtcattgtaaaaccggagctgttctatggca

SEQ ID NO: 258851 - DNA, 33 bp, Homo sapien
cacaagaaagagtcaacgtgtaggaaagatgag

SEQ ID NO: 258852 - DNA, 33 bp, Homo sapien
cacaagaaagagtcaatgtgtaggaaagatgag

SEQ ID NO: 258853 - DNA, 33 bp, Homo sapien
ctttgttatttgaaagactatcagctgtgcaca

SEQ ID NO: 258854 - DNA, 33 bp, Homo sapien
ctttgttatttgaaaggctatcagctgtgcaca

SEQ ID NO: 258855 - DNA, 33 bp, Homo sapien
ctcacatttgatgccaaacctgtagtggatata

SEQ ID NO: 258856 - DNA, 33 bp, Homo sapien
ctcacatttgatgccagacctgtagtggatata

SEQ ID NO: 258857 - DNA, 33 bp, Homo sapien
tctcaataggacaaaaataaattactgatggac

SEQ ID NO: 258858 - DNA, 33 bp, Homo sapien
tctcaataggacaaaagtaaattactgatggac

SEQ ID NO: 258859 - DNA, 33 bp, Homo sapien
tttataaccagaaagagcagctcatctggtgcc

SEQ ID NO: 258860 - DNA, 33 bp, Homo sapien
tttataaccagaaagatcagctcatctggtgcc

SEQ ID NO: 258861 - DNA, 33 bp, Homo sapien
ctgagaatgttcaccaatccattctttgaatga

SEQ ID NO: 258862 - DNA, 33 bp, Homo sapien
ctgagaatgttcaccagtccattctttgaatga

SEQ ID NO: 258863 - DNA, 33 bp, Homo sapien
aatatacgtatgaaaaaactgcatttgcagaat

SEQ ID NO: 258864 - DNA, 33 bp, Homo sapien
aatatacgtatgaaaagactgcatttgcagaat

SEQ ID NO: 258865 - DNA, 33 bp, Homo sapien
cagctgctggcttaacagatccacgtggataaa

SEQ ID NO: 258866 - DNA, 33 bp, Homo sapien
cagctgctggcttaacggatccacgtggataaa

SEQ ID NO: 258867 - DNA, 33 bp, Homo sapien
ccaaactgggaaggaagaagcaaaactacctct

SEQ ID NO: 258868 - DNA, 33 bp, Homo sapien
ccaaactgggaaggaataagcaaaactacctct

SEQ ID NO: 258869 - DNA, 33 bp, Homo sapien
tattcagattttcctcaaacttttttaatgcct

SEQ ID NO: 258870 - DNA, 33 bp, Homo sapien
tattcagattttcctccaacttttttaatgcct

SEQ ID NO: 258871 - DNA, 33 bp, Homo sapien
gccatactgcccaaacaaatgtacagattcaga

SEQ ID NO: 258872 - DNA, 33 bp, Homo sapien
gccatactgcccaaaccaatgtacagattcaga

SEQ ID NO: 258873 - DNA, 33 bp, Homo sapien
attccctgaacagaacaaaaatgagctccaaaa

SEQ ID NO: 258874 - DNA, 33 bp, Homo sapien
attccctgaacagaacgaaaatgagctccaaaa

SEQ ID NO: 258875 - DNA, 33 bp, Homo sapien
gtccactttgctcttacatattagctgtgttag

SEQ ID NO: 258876 - DNA, 33 bp, Homo sapien
gtccactttgctcttatatattagctgtgttag

SEQ ID NO: 258877 - DNA, 33 bp, Homo sapien
tcttaaatccaacaccagatggctaaagtagga

SEQ ID NO: 258878 - DNA, 33 bp, Homo sapien
tcttaaatccaacaccggatggctaaagtagga

SEQ ID NO: 258879 - DNA, 33 bp, Homo sapien
taaaactatggagaaacggccacaagaaagagg

SEQ ID NO: 258880 - DNA, 33 bp, Homo sapien
taaaactatggagaaatggccacaagaaagagg

SEQ ID NO: 258881 - DNA, 33 bp, Homo sapien
tgtcaaacaagtttcaataagtcctggtatgca

SEQ ID NO: 258882 - DNA, 33 bp, Homo sapien
tgtcaaacaagtttcagtaagtcctggtatgca

SEQ ID NO: 258883 - DNA, 33 bp, Homo sapien
catggttatgtcttaaagatatgctaaacaagg

SEQ ID NO: 258884 - DNA, 33 bp, Homo sapien
catggttatgtcttaatgatatgctaaacaagg

SEQ ID NO: 258885 - DNA, 33 bp, Homo sapien
ttttgctacagcttacaactagcctcacaaatc

SEQ ID NO: 258886 - DNA, 33 bp, Homo sapien
ttttgctacagcttacgactagcctcacaaatc

SEQ ID NO: 258887 - DNA, 33 bp, Homo sapien
ggaataaacaggattaacctaaattgcagaaac

SEQ ID NO: 258888 - DNA, 33 bp, Homo sapien
ggaataaacaggattagcctaaattgcagaaac

SEQ ID NO: 258889 - DNA, 33 bp, Homo sapien
aatgctttgcacgcccacgaaaaataacatact

SEQ ID NO: 258890 - DNA, 33 bp, Homo sapien
aatgctttgcacgcccgcgaaaaataacatact

SEQ ID NO: 258891 - DNA, 33 bp, Homo sapien
attggggtgcaaaagacggcagggaatcacggc

SEQ ID NO: 258892 - DNA, 33 bp, Homo sapien
attggggtgcaaaagatggcagggaatcacggc

SEQ ID NO: 258893 - DNA, 33 bp, Homo sapien
atagacttagcaaagacgtcaaagtgaaacaaa

SEQ ID NO: 258894 - DNA, 33 bp, Homo sapien
atagacttagcaaagatgtcaaagtgaaacaaa

SEQ ID NO: 258895 - DNA, 33 bp, Homo sapien
catgtgaaggcttgaacagaacaagaccaacct

SEQ ID NO: 258896 - DNA, 33 bp, Homo sapien
catgtgaaggcttgaatagaacaagaccaacct

SEQ ID NO: 258897 - DNA, 33 bp, Homo sapien
agacctatagactgtaccgcagaaagagtgaat

SEQ ID NO: 258898 - DNA, 33 bp, Homo sapien
agacctatagactgtatcgcagaaagagtgaat

SEQ ID NO: 258899 - DNA, 33 bp, Homo sapien
aaggaaagtgctgtaaggtgcaaattgcacagg

SEQ ID NO: 258900 - DNA, 33 bp, Homo sapien
aaggaaagtgctgtaatgtgcaaattgcacagg

SEQ ID NO: 258901 - DNA, 33 bp, Homo sapien
tccttaagacatacatcatccactcagcagttt

SEQ ID NO: 258902 - DNA, 33 bp, Homo sapien
tccttaagacatacattatccactcagcagttt

SEQ ID NO: 258903 - DNA, 33 bp, Homo sapien
actgatgaatgatgaacgtgatggactattgta

SEQ ID NO: 258904 - DNA, 33 bp, Homo sapien
actgatgaatgatgaatgtgatggactattgta

SEQ ID NO: 258905 - DNA, 33 bp, Homo sapien
tgagaacgcacagtgaaccataagcttgccaat

SEQ ID NO: 258906 - DNA, 33 bp, Homo sapien
tgagaacgcacagtgagccataagcttgccaat

SEQ ID NO: 258907 - DNA, 33 bp, Homo sapien
agaatgcaggttaaacagatgcaatgagagcag

SEQ ID NO: 258908 - DNA, 33 bp, Homo sapien
agaatgcaggttaaacggatgcaatgagagcag

SEQ ID NO: 258909 - DNA, 33 bp, Homo sapien
atgggctaagaaaagacggtacaagccagaaca

SEQ ID NO: 258910 - DNA, 33 bp, Homo sapien
atgggctaagaaaagatggtacaagccagaaca

SEQ ID NO: 258911 - DNA, 33 bp, Homo sapien
agaacagctgagagaccgaacaagtgtggagac

SEQ ID NO: 258912 - DNA, 33 bp, Homo sapien
agaacagctgagagactgaacaagtgtggagac

SEQ ID NO: 258913 - DNA, 33 bp, Homo sapien
cacatttccttcctccgaagtccctcacaaatg

SEQ ID NO: 258914 - DNA, 33 bp, Homo sapien
cacatttccttcctcctaagtccctcacaaatg

SEQ ID NO: 258915 - DNA, 33 bp, Homo sapien
agaaactgaatccgacaggcttgggagcttcct

SEQ ID NO: 258916 - DNA, 33 bp, Homo sapien
agaaactgaatccgacgggcttgggagcttcct

SEQ ID NO: 258917 - DNA, 33 bp, Homo sapien
tagaggagcctaaggaaacacggcagctacatg

SEQ ID NO: 258918 - DNA, 33 bp, Homo sapien
tagaggagcctaaggagacacggcagctacatg

SEQ ID NO: 258919 - DNA, 33 bp, Homo sapien
ctcataatgagaaaaacgccagacacaccaaat

SEQ ID NO: 258920 - DNA, 33 bp, Homo sapien
ctcataatgagaaaaatgccagacacaccaaat

SEQ ID NO: 258921 - DNA, 33 bp, Homo sapien
ttttgtttgttttttcacatcagactgactcac

SEQ ID NO: 258922 - DNA, 33 bp, Homo sapien
ttttgtttgttttttcgcatcagactgactcac

SEQ ID NO: 258923 - DNA, 33 bp, Homo sapien
gagttccacaaggaacactgttaatgacaatat

SEQ ID NO: 258924 - DNA, 33 bp, Homo sapien
gagttccacaaggaacgctgttaatgacaatat

SEQ ID NO: 258925 - DNA, 33 bp, Homo sapien
tcttcatgtccagctacaaatgtagaaatgctt

SEQ ID NO: 258926 - DNA, 33 bp, Homo sapien
tcttcatgtccagctataaatgtagaaatgctt

SEQ ID NO: 258927 - DNA, 33 bp, Homo sapien
gggcaggtgtatcaccaacagattgcacacaag

SEQ ID NO: 258928 - DNA, 33 bp, Homo sapien
gggcaggtgtatcacccacagattgcacacaag

SEQ ID NO: 258929 - DNA, 33 bp, Homo sapien
catttcacgggtttcaaatgaaacatgactgtt

SEQ ID NO: 258930 - DNA, 33 bp, Homo sapien
catttcacgggtttcagatgaaacatgactgtt

SEQ ID NO: 258931 - DNA, 33 bp, Homo sapien
aggtcataaatgtgtacgtaatcctatgttttc

SEQ ID NO: 258932 - DNA, 33 bp, Homo sapien
aggtcataaatgtgtatgtaatcctatgttttc

SEQ ID NO: 258933 - DNA, 33 bp, Homo sapien
aatgggacagaaaatacatagtgcacagcacag

SEQ ID NO: 258934 - DNA, 33 bp, Homo sapien
aatgggacagaaaatatatagtgcacagcacag

SEQ ID NO: 258935 - DNA, 33 bp, Homo sapien
gcttaagtgggaaaaacttatggctgcaattgt

SEQ ID NO: 258936 - DNA, 33 bp, Homo sapien
gcttaagtgggaaaaagttatggctgcaattgt

SEQ ID NO: 258937 - DNA, 33 bp, Homo sapien
aggctgttgggggcacaaatcaccataaccatg

SEQ ID NO: 258938 - DNA, 33 bp, Homo sapien
aggctgttgggggcacgaatcaccataaccatg

SEQ ID NO: 258939 - DNA, 33 bp, Homo sapien
gcactctttcaaaccacaggtcaaaccagaaac

SEQ ID NO: 258940 - DNA, 33 bp, Homo sapien
gcactctttcaaaccataggtcaaaccagaaac

SEQ ID NO: 258941 - DNA, 33 bp, Homo sapien
gaactgaatggccataacactgggagtcagctg

SEQ ID NO: 258942 - DNA, 33 bp, Homo sapien
gaactgaatggccataccactgggagtcagctg

SEQ ID NO: 258943 - DNA, 33 bp, Homo sapien
tatttgttcataaaagcataaatttgtttaaaa

SEQ ID NO: 258944 - DNA, 33 bp, Homo sapien
tatttgttcataaaaggataaatttgtttaaaa

SEQ ID NO: 258945 - DNA, 33 bp, Homo sapien
cccttcataatatccactccaagcattcctttg

SEQ ID NO: 258946 - DNA, 33 bp, Homo sapien
cccttcataatatccattccaagcattcctttg

SEQ ID NO: 258947 - DNA, 33 bp, Homo sapien
gaaacatttctaacgacattgtgggagacctaa

SEQ ID NO: 258948 - DNA, 33 bp, Homo sapien
gaaacatttctaacgatattgtgggagacctaa

SEQ ID NO: 258949 - DNA, 33 bp, Homo sapien
caacttctaaatcacacattttgccagctaaat

SEQ ID NO: 258950 - DNA, 33 bp, Homo sapien
caacttctaaatcacatattttgccagctaaat

SEQ ID NO: 258951 - DNA, 33 bp, Homo sapien
taaaacaaattttggacggaagtgcctttgcca

SEQ ID NO: 258952 - DNA, 33 bp, Homo sapien
taaaacaaattttggatggaagtgcctttgcca

SEQ ID NO: 258953 - DNA, 33 bp, Homo sapien
gtcattagacctatcacgtgcccagggacatca

SEQ ID NO: 258954 - DNA, 33 bp, Homo sapien
gtcattagacctatcatgtgcccagggacatca

SEQ ID NO: 258955 - DNA, 33 bp, Homo sapien
agtttgttactcacacagaagaaagtaaaatgg

SEQ ID NO: 258956 - DNA, 33 bp, Homo sapien
agtttgttactcacacggaagaaagtaaaatgg

SEQ ID NO: 258957 - DNA, 33 bp, Homo sapien
ttttttccttgtgagactaaatgccatttattt

SEQ ID NO: 258958 - DNA, 33 bp, Homo sapien
ttttttccttgtgagattaaatgccatttattt

SEQ ID NO: 258959 - DNA, 33 bp, Homo sapien
tttcccttccctccaagtctgattatactagaa

SEQ ID NO: 258960 - DNA, 33 bp, Homo sapien
tttcccttccctccaattctgattatactagaa

SEQ ID NO: 258961 - DNA, 33 bp, Homo sapien
aagttctgtagtagaaaaggcattcgagcctgt

SEQ ID NO: 258962 - DNA, 33 bp, Homo sapien
aagttctgtagtagaataggcattcgagcctgt

SEQ ID NO: 258963 - DNA, 33 bp, Homo sapien
aactaactttacacacagtattttggacaagga

SEQ ID NO: 258964 - DNA, 33 bp, Homo sapien
aactaactttacacacggtattttggacaagga

SEQ ID NO: 258965 - DNA, 33 bp, Homo sapien
tgtgccagaagctggaaacaaagtcagcaaaga

SEQ ID NO: 258966 - DNA, 33 bp, Homo sapien
tgtgccagaagctggagacaaagtcagcaaaga

SEQ ID NO: 258967 - DNA, 33 bp, Homo sapien
cactggagctaaagaaagattcaaaacataaaa

SEQ ID NO: 258968 - DNA, 33 bp, Homo sapien
cactggagctaaagaaggattcaaaacataaaa

SEQ ID NO: 258969 - DNA, 33 bp, Homo sapien
ttcatctttaaccacaacctttctagaagttac

SEQ ID NO: 258970 - DNA, 33 bp, Homo sapien
ttcatctttaaccacatcctttctagaagttac

SEQ ID NO: 258971 - DNA, 33 bp, Homo sapien
cggagccacatgatgaacctggcgtggagggct

SEQ ID NO: 258972 - DNA, 33 bp, Homo sapien
cggagccacatgatgagcctggcgtggagggct

SEQ ID NO: 258973 - DNA, 33 bp, Homo sapien
aagaacttggatattacgtccaaacaccatggc

SEQ ID NO: 258974 - DNA, 33 bp, Homo sapien
aagaacttggatattatgtccaaacaccatggc

SEQ ID NO: 258975 - DNA, 33 bp, Homo sapien
aaaagtacataataaacgtataagactgagatg

SEQ ID NO: 258976 - DNA, 33 bp, Homo sapien
aaaagtacataataaaggtataagactgagatg

SEQ ID NO: 258977 - DNA, 33 bp, Homo sapien
gcagcacccagctccaaattccgtgactggcag

SEQ ID NO: 258978 - DNA, 33 bp, Homo sapien
gcagcacccagctccagattccgtgactggcag

SEQ ID NO: 258979 - DNA, 33 bp, Homo sapien
taggctgactggaggaaaagggctgaattttca

SEQ ID NO: 258980 - DNA, 33 bp, Homo sapien
taggctgactggaggagaagggctgaattttca

SEQ ID NO: 258981 - DNA, 33 bp, Homo sapien
aattttgtattcatccaaacgtattttacttat

SEQ ID NO: 258982 - DNA, 33 bp, Homo sapien
aattttgtattcatccgaacgtattttacttat

SEQ ID NO: 258983 - DNA, 33 bp, Homo sapien
catcaaatcctcacaaaaattttgagcttggtg

SEQ ID NO: 258984 - DNA, 33 bp, Homo sapien
catcaaatcctcacaacaattttgagcttggtg

SEQ ID NO: 258985 - DNA, 33 bp, Homo sapien
gatcaattggtccctaaagaaaatggcttcatt

SEQ ID NO: 258986 - DNA, 33 bp, Homo sapien
gatcaattggtccctatagaaaatggcttcatt

SEQ ID NO: 258987 - DNA, 33 bp, Homo sapien
tcagtcttcacacatacggtgtcactggaacag

SEQ ID NO: 258988 - DNA, 33 bp, Homo sapien
tcagtcttcacacatatggtgtcactggaacag

SEQ ID NO: 258989 - DNA, 33 bp, Homo sapien
tctccctcccagaggacggattctgtccccaga

SEQ ID NO: 258990 - DNA, 33 bp, Homo sapien
tctccctcccagaggatggattctgtccccaga

SEQ ID NO: 258991 - DNA, 33 bp, Homo sapien
ttcatactatagaacagactgtcaatcatcaag

SEQ ID NO: 258992 - DNA, 33 bp, Homo sapien
ttcatactatagaacatactgtcaatcatcaag

SEQ ID NO: 258993 - DNA, 33 bp, Homo sapien
gtttgttgaggtacaacgaggaacaaaagtaaa

SEQ ID NO: 258994 - DNA, 33 bp, Homo sapien
gtttgttgaggtacaaggaggaacaaaagtaaa

SEQ ID NO: 258995 - DNA, 33 bp, Homo sapien
ttatatttgattagataaatactcaacttacaa

SEQ ID NO: 258996 - DNA, 33 bp, Homo sapien
ttatatttgattagatgaatactcaacttacaa

SEQ ID NO: 258997 - DNA, 33 bp, Homo sapien
atcacataatttctaaacatctatgattatgta

SEQ ID NO: 258998 - DNA, 33 bp, Homo sapien
atcacataatttctaagcatctatgattatgta

SEQ ID NO: 258999 - DNA, 33 bp, Homo sapien
aaaataagatatggaaaaagtgtatttggagaa

SEQ ID NO: 259000 - DNA, 33 bp, Homo sapien
aaaataagatatggaagaagtgtatttggagaa

SEQ ID NO: 259001 - DNA, 33 bp, Homo sapien
tttgttagcacatgaaaccagacaaggaaacca

SEQ ID NO: 259002 - DNA, 33 bp, Homo sapien
tttgttagcacatgaagccagacaaggaaacca

SEQ ID NO: 259003 - DNA, 33 bp, Homo sapien
atacaagaaatgctaacttacaaacatataaaa

SEQ ID NO: 259004 - DNA, 33 bp, Homo sapien
atacaagaaatgctaagttacaaacatataaaa

SEQ ID NO: 259005 - DNA, 33 bp, Homo sapien
aagccaaacaaatacaaagttcactcattcaac

SEQ ID NO: 259006 - DNA, 33 bp, Homo sapien
aagccaaacaaatacagagttcactcattcaac

SEQ ID NO: 259007 - DNA, 33 bp, Homo sapien
cacgaggttggccttgcaccccactggcatggg

SEQ ID NO: 259008 - DNA, 33 bp, Homo sapien
cacgaggttggccttggaccccactggcatggg

SEQ ID NO: 259009 - DNA, 33 bp, Homo sapien
tctagccaaaggatcgcaaatgcaccaatcaat

SEQ ID NO: 259010 - DNA, 33 bp, Homo sapien
tctagccaaaggatcgtaaatgcaccaatcaat

SEQ ID NO: 259011 - DNA, 33 bp, Homo sapien; identical to SEQ ID NO: 259009

SEQ ID NO: 259012 - DNA, 33 bp, Homo sapien; identical to SEQ ID NO: 259010

SEQ ID NO: 259013 - DNA, 33 bp, Homo sapien
gggacccccaggcatgaagtagcggacaatgcg

SEQ ID NO: 259014 - DNA, 33 bp, Homo sapien
gggacccccaggcatggagtagcggacaatgcg

SEQ ID NO: 259015 - DNA, 33 bp, Homo sapien
ggtggtctctgcaacacagagtgagaaagctcg

SEQ ID NO: 259016 - DNA, 33 bp, Homo sapien
ggtggtctctgcaacatagagtgagaaagctcg

SEQ ID NO: 259017 - DNA, 33 bp, Homo sapien
tgattggataagagcaagtcttagaacaaccaa

SEQ ID NO: 259018 - DNA, 33 bp, Homo sapien
tgattggataagagcaggtcttagaacaaccaa

SEQ ID NO: 259019 - DNA, 33 bp, Homo sapien
caccaaccacagcgacacaagccgcagtcgtgc

SEQ ID NO: 259020 - DNA, 33 bp, Homo sapien
caccaaccacagcgacgcaagccgcagtcgtgc

SEQ ID NO: 259021 - DNA, 33 bp, Homo sapien
aaagagcaatgaaaaacgtttaacagcaaaaat

SEQ ID NO: 259022 - DNA, 33 bp, Homo sapien
aaagagcaatgaaaaatgtttaacagcaaaaat

SEQ ID NO: 259023 - DNA, 33 bp, Homo sapien
tagtgtttatgcttttaaaaaaacctgaattta

SEQ ID NO: 259024 - DNA, 33 bp, Homo sapien
tagtgtttatgctttttaaaaaacctgaattta

SEQ ID NO: 259025 - DNA, 33 bp, Homo sapien
taggatgtgatgtaggcccaggactccataggc

SEQ ID NO: 259026 - DNA, 33 bp, Homo sapien
taggatgtgatgtaggtccaggactccataggc

SEQ ID NO: 259027 - DNA, 33 bp, Homo sapien
catgtcacacaactcacgctttaaaagttgaac

SEQ ID NO: 259028 - DNA, 33 bp, Homo sapien
catgtcacacaactcatgctttaaaagttgaac

SEQ ID NO: 259029 - DNA, 33 bp, Homo sapien
gtaattggaacgtgtggcaagaactccaattgt

SEQ ID NO: 259030 - DNA, 33 bp, Homo sapien
gtaattggaacgtgtgtcaagaactccaattgt

SEQ ID NO: 259031 - DNA, 33 bp, Homo sapien
ttatgttgcctgtgtaaccttctgtcctggaaa

SEQ ID NO: 259032 - DNA, 33 bp, Homo sapien
ttatgttgcctgtgtatccttctgtcctggaaa

SEQ ID NO: 259033 - DNA, 33 bp, Homo sapien; identical to SEQ ID NO: 259031

SEQ ID NO: 259034 - DNA, 33 bp, Homo sapien; identical to SEQ ID NO: 259032

SEQ ID NO: 259035 - DNA, 33 bp, Homo sapien
agaggttatacaatgactaggtccctgggcgag

SEQ ID NO: 259036 - DNA, 33 bp, Homo sapien
agaggttatacaatgattaggtccctgggcgag

SEQ ID NO: 259037 - DNA, 33 bp, Homo sapien
ctctttctaaggaaaccatatgccaaattccaa

SEQ ID NO: 259038 - DNA, 33 bp, Homo sapien
ctctttctaaggaaactatatgccaaattccaa

SEQ ID NO: 259039 - DNA, 33 bp, Homo sapien
ccaacagcccgactgacaaatgaacaaaggaaa

SEQ ID NO: 259040 - DNA, 33 bp, Homo sapien
ccaacagcccgactgagaaatgaacaaaggaaa

SEQ ID NO: 259041 - DNA, 33 bp, Homo sapien
ttctttcttcagcataagaaccatttcagtaaa

SEQ ID NO: 259042 - DNA, 33 bp, Homo sapien
ttctttcttcagcatatgaaccatttcagtaaa

SEQ ID NO: 259043 - DNA, 33 bp, Homo sapien
agatcataaaactgctcaatgtggaaaagtctg

SEQ ID NO: 259044 - DNA, 33 bp, Homo sapien
agatcataaaactgctgaatgtggaaaagtctg

SEQ ID NO: 259045 - DNA, 33 bp, Homo sapien
ttctgttcatcattgaataatgaaggtgagaaa

SEQ ID NO: 259046 - DNA, 33 bp, Homo sapien
ttctgttcatcattgagtaatgaaggtgagaaa

SEQ ID NO: 259047 - DNA, 33 bp, Homo sapien
tgtgtagaggaataaaaagcactcagttttgga

SEQ ID NO: 259048 - DNA, 33 bp, Homo sapien
tgtgtagaggaataaagagcactcagttttgga

SEQ ID NO: 259049 - DNA, 33 bp, Homo sapien
ggcacagcagccttaactcaggttcctcatgaa

SEQ ID NO: 259050 - DNA, 33 bp, Homo sapien
ggcacagcagccttaattcaggttcctcatgaa

SEQ ID NO: 259051 - DNA, 33 bp, Homo sapien
tgtgtgtatgtatatgaagcaagtgtacaaaac

SEQ ID NO: 259052 - DNA, 33 bp, Homo sapien
tgtgtgtatgtatatgcagcaagtgtacaaaac

SEQ ID NO: 259053 - DNA, 33 bp, Homo sapien
gataaatcgtatggaacgtaaattttcagccct

SEQ ID NO: 259054 - DNA, 33 bp, Homo sapien
gataaatcgtatggaatgtaaattttcagccct

SEQ ID NO: 259055 - DNA, 33 bp, Homo sapien
taaaattttctgaatgacaattgattgaaagag

SEQ ID NO: 259056 - DNA, 33 bp, Homo sapien
taaaattttctgaatggcaattgattgaaagag

SEQ ID NO: 259057 - DNA, 33 bp, Homo sapien
ggttgcagaggagtcaacaaactgcagagtgca

SEQ ID NO: 259058 - DNA, 33 bp, Homo sapien
ggttgcagaggagtcagcaaactgcagagtgca

SEQ ID NO: 259059 - DNA, 33 bp, Homo sapien
agccaggtgtgtaaccagcctatgatgaaagcc

SEQ ID NO: 259060 - DNA, 33 bp, Homo sapien
agccaggtgtgtaaccggcctatgatgaaagcc

SEQ ID NO: 259061 - DNA, 33 bp, Homo sapien
cagggtggtgttctggacattgctgtggcaaca

SEQ ID NO: 259062 - DNA, 33 bp, Homo sapien
cagggtggtgttctgggcattgctgtggcaaca

SEQ ID NO: 259063 - DNA, 33 bp, Homo sapien
gactcttaacgagagaggaatagatacaaaaag

SEQ ID NO: 259064 - DNA, 33 bp, Homo sapien
gactcttaacgagagatgaatagatacaaaaag

SEQ ID NO: 259065 - DNA, 33 bp, Homo sapien
aactgcatattggttaaaagttcaagcactcta

SEQ ID NO: 259066 - DNA, 33 bp, Homo sapien
aactgcatattggttagaagttcaagcactcta

SEQ ID NO: 259067 - DNA, 33 bp, Homo sapien
cagggtggaagttcaacaggggtctcgcaggtt

SEQ ID NO: 259068 - DNA, 33 bp, Homo sapien
cagggtggaagttcaataggggtctcgcaggtt

SEQ ID NO: 259069 - DNA, 33 bp, Homo sapien
caacagtggctacctccagaaagaagacaggac

SEQ ID NO: 259070 - DNA, 33 bp, Homo sapien
caacagtggctacctctagaaagaagacaggac

SEQ ID NO: 259071 - DNA, 33 bp, Homo sapien
ccaaaaatgctctacaaaacagtctatatgtta

SEQ ID NO: 259072 - DNA, 33 bp, Homo sapien
ccaaaaatgctctacagaacagtctatatgtta

SEQ ID NO: 259073 - DNA, 33 bp, Homo sapien
tatgtcaggcactgtaaatgcaaaaatagctaa

SEQ ID NO: 259074 - DNA, 33 bp, Homo sapien
tatgtcaggcactgtagatgcaaaaatagctaa

SEQ ID NO: 259075 - DNA, 33 bp, Homo sapien
gagttttataaaggaacgacagcaaacaatcag

SEQ ID NO: 259076 - DNA, 33 bp, Homo sapien
gagttttataaaggaatgacagcaaacaatcag

SEQ ID NO: 259077 - DNA, 33 bp, Homo sapien
aaaatagttcctcagaagcctactgtctgttta

SEQ ID NO: 259078 - DNA, 33 bp, Homo sapien
aaaatagttcctcagacgcctactgtctgttta

SEQ ID NO: 259079 - DNA, 33 bp, Homo sapien
gagaatgaaccctttcccaatgtgtgtcttagt

SEQ ID NO: 259080 - DNA, 33 bp, Homo sapien
gagaatgaaccctttcgcaatgtgtgtcttagt

SEQ ID NO: 259081 - DNA, 33 bp, Homo sapien
tgtgtgtgtaatatcaatcaaggtccagaacct

SEQ ID NO: 259082 - DNA, 33 bp, Homo sapien
tgtgtgtgtaatatcagtcaaggtccagaacct

SEQ ID NO: 259083 - DNA, 33 bp, Homo sapien
ctcgtcagcattatcaaatttcaaggaactaga

SEQ ID NO: 259084 - DNA, 33 bp, Homo sapien
ctcgtcagcattatcagatttcaaggaactaga

SEQ ID NO: 259085 - DNA, 33 bp, Homo sapien
tcctcacaagaaatcaaatatccttgttataag

SEQ ID NO: 259086 - DNA, 33 bp, Homo sapien
tcctcacaagaaatcagatatccttgttataag

SEQ ID NO: 259087 - DNA, 33 bp, Homo sapien
cctatccgtacctagaacacaaacttgtttttc

SEQ ID NO: 259088 - DNA, 33 bp, Homo sapien
cctatccgtacctagagcacaaacttgtttttc

SEQ ID NO: 259089 - DNA, 33 bp, Homo sapien
agatcccaggtaagaacggcttgctcaatttca

SEQ ID NO: 259090 - DNA, 33 bp, Homo sapien
agatcccaggtaagaatggcttgctcaatttca

SEQ ID NO: 259091 - DNA, 33 bp, Homo sapien
cctgggcccacggtggaagtatttttctctatg

SEQ ID NO: 259092 - DNA, 33 bp, Homo sapien
cctgggcccacggtgggagtatttttctctatg

SEQ ID NO: 259093 - DNA, 33 bp, Homo sapien
aggtctacatgagacagagttggcatcattact

SEQ ID NO: 259094 - DNA, 33 bp, Homo sapien
aggtctacatgagacatagttggcatcattact

SEQ ID NO: 259095 - DNA, 33 bp, Homo sapien
tcagaatgactgttaccgaactgtcaaaaataa

SEQ ID NO: 259096 - DNA, 33 bp, Homo sapien
tcagaatgactgttactgaactgtcaaaaataa

SEQ ID NO: 259097 - DNA, 33 bp, Homo sapien
acagaaaaaaatcatgaatactaccaggcttca

SEQ ID NO: 259098 - DNA, 33 bp, Homo sapien
acagaaaaaaatcatggatactaccaggcttca

SEQ ID NO: 259099 - DNA, 33 bp, Homo sapien
gaaggatggaagataaaaaatgcatgtggacac

SEQ ID NO: 259100 - DNA, 33 bp, Homo sapien
gaaggatggaagataacaaatgcatgtggacac

SEQ ID NO: 259101 - DNA, 33 bp, Homo sapien
ggcatggtcaaagagacaaatggctgacttgaa

SEQ ID NO: 259102 - DNA, 33 bp, Homo sapien
ggcatggtcaaagagagaaatggctgacttgaa

SEQ ID NO: 259103 - DNA, 33 bp, Homo sapien
gttaatataaacgcaacgtcccatccaggatgt

SEQ ID NO: 259104 - DNA, 33 bp, Homo sapien
gttaatataaacgcaaggtcccatccaggatgt

SEQ ID NO: 259105 - DNA, 33 bp, Homo sapien
ccatgtgcattattagacatccccctgacaggt

SEQ ID NO: 259106 - DNA, 33 bp, Homo sapien
ccatgtgcattattaggcatccccctgacaggt

SEQ ID NO: 259107 - DNA, 33 bp, Homo sapien
atgctctggaaatacaaccacctgtagctctga

SEQ ID NO: 259108 - DNA, 33 bp, Homo sapien
atgctctggaaatacagccacctgtagctctga

SEQ ID NO: 259109 - DNA, 33 bp, Homo sapien
acagcgtggcatatatcaatattagcaagtaac

SEQ ID NO: 259110 - DNA, 33 bp, Homo sapien
acagcgtggcatatatgaatattagcaagtaac

SEQ ID NO: 259111 - DNA, 33 bp, Homo sapien
tcttgtgaggagcttacatttttgttatccaat

SEQ ID NO: 259112 - DNA, 33 bp, Homo sapien
tcttgtgaggagcttatatttttgttatccaat

SEQ ID NO: 259113 - DNA, 33 bp, Homo sapien
gaatagatggaattaacactagaatcacatggt

SEQ ID NO: 259114 - DNA, 33 bp, Homo sapien
gaatagatggaattaatactagaatcacatggt

SEQ ID NO: 259115 - DNA, 33 bp, Homo sapien
ctgtcattctcaactaagtttttaaaaatattt

SEQ ID NO: 259116 - DNA, 33 bp, Homo sapien
ctgtcattctcaactaggtttttaaaaatattt

SEQ ID NO: 259117 - DNA, 33 bp, Homo sapien
ctctgccacttaacaacttgacttgtcttggac

SEQ ID NO: 259118 - DNA, 33 bp, Homo sapien
ctctgccacttaacaatttgacttgtcttggac

SEQ ID NO: 259119 - DNA, 33 bp, Homo sapien
atctgttatttttggactattttgacttgcatt

SEQ ID NO: 259120 - DNA, 33 bp, Homo sapien
atctgttatttttggattattttgacttgcatt

SEQ ID NO: 259121 - DNA, 33 bp, Homo sapien
accatgaatattcaggaaggctgtgaactgagc

SEQ ID NO: 259122 - DNA, 33 bp, Homo sapien
accatgaatattcaggcaggctgtgaactgagc

SEQ ID NO: 259123 - DNA, 33 bp, Homo sapien
ctaccacgtggatgaaccttgagttaaataaac

SEQ ID NO: 259124 - DNA, 33 bp, Homo sapien
ctaccacgtggatgaatcttgagttaaataaac

SEQ ID NO: 259125 - DNA, 33 bp, Homo sapien
tggtgattgtacctgacaggaaatttttcttcc

SEQ ID NO: 259126 - DNA, 33 bp, Homo sapien
tggtgattgtacctgataggaaatttttcttcc

SEQ ID NO: 259127 - DNA, 33 bp, Homo sapien
tcatggacgctgggaccggtttgcaaagttagt

SEQ ID NO: 259128 - DNA, 33 bp, Homo sapien
tcatggacgctgggactggtttgcaaagttagt

SEQ ID NO: 259129 - DNA, 33 bp, Homo sapien
tgaagactcacagtaacagtctgaagtatatgc

SEQ ID NO: 259130 - DNA, 33 bp, Homo sapien
tgaagactcacagtaatagtctgaagtatatgc

SEQ ID NO: 259131 - DNA, 33 bp, Homo sapien
catcagtgtacattcaccttcccattccatgcc

SEQ ID NO: 259132 - DNA, 33 bp, Homo sapien
catcagtgtacattcatcttcccattccatgcc

SEQ ID NO: 259133 - DNA, 33 bp, Homo sapien
gtgaggggacagaagacaggtgcactggaagtg

SEQ ID NO: 259134 - DNA, 33 bp, Homo sapien
gtgaggggacagaagagaggtgcactggaagtg

SEQ ID NO: 259135 - DNA, 33 bp, Homo sapien
gaatctgtctcaacaaaacaagggaaaaagcac

SEQ ID NO: 259136 - DNA, 33 bp, Homo sapien
gaatctgtctcaacaagacaagggaaaaagcac

SEQ ID NO: 259137 - DNA, 33 bp, Homo sapien
cttatcaaatagggaacatcagtaagttggggc

SEQ ID NO: 259138 - DNA, 33 bp, Homo sapien
cttatcaaatagggaatatcagtaagttggggc

SEQ ID NO: 259139 - DNA, 33 bp, Homo sapien
agccaaaggtatgcaccggaaagcatggtacaa

SEQ ID NO: 259140 - DNA, 33 bp, Homo sapien
agccaaaggtatgcactggaaagcatggtacaa

SEQ ID NO: 259141 - DNA, 33 bp, Homo sapien
ccagagaattttcatccctttcagagttacagg

SEQ ID NO: 259142 - DNA, 33 bp, Homo sapien
ccagagaattttcatcgctttcagagttacagg

SEQ ID NO: 259143 - DNA, 33 bp, Homo sapien
gccctacttagagtcactcctaatcagctaatc

SEQ ID NO: 259144 - DNA, 33 bp, Homo sapien
gccctacttagagtcagtcctaatcagctaatc

SEQ ID NO: 259145 - DNA, 33 bp, Homo sapien
tttaagtcctgttatgcaagatgctcactcgca

SEQ ID NO: 259146 - DNA, 33 bp, Homo sapien
tttaagtcctgttatggaagatgctcactcgca

SEQ ID NO: 259147 - DNA, 33 bp, Homo sapien
ccttttttgccccccaaattacatggatagact

SEQ ID NO: 259148 - DNA, 33 bp, Homo sapien
ccttttttgccccccagattacatggatagact

SEQ ID NO: 259149 - DNA, 33 bp, Homo sapien
atctcggatgctcttacgcttttagaattgcaa

SEQ ID NO: 259150 - DNA, 33 bp, Homo sapien
atctcggatgctcttatgcttttagaattgcaa

SEQ ID NO: 259151 - DNA, 33 bp, Homo sapien
agtgggagcagtaaaaactggagcacacagaat

SEQ ID NO: 259152 - DNA, 33 bp, Homo sapien
agtgggagcagtaaaagctggagcacacagaat

SEQ ID NO: 259153 - DNA, 33 bp, Homo sapien
ctccctaagaaacacaatgatgcagtcctgctt

SEQ ID NO: 259154 - DNA, 33 bp, Homo sapien
ctccctaagaaacacagtgatgcagtcctgctt

SEQ ID NO: 259155 - DNA, 33 bp, Homo sapien
gggctgcctttgaggaccctttagagagctgtg

SEQ ID NO: 259156 - DNA, 33 bp, Homo sapien
gggctgcctttgaggatcctttagagagctgtg

SEQ ID NO: 259157 - DNA, 33 bp, Homo sapien
gcctctgaaaaaaaaaccaggattctactacta

SEQ ID NO: 259158 - DNA, 33 bp, Homo sapien
gcctctgaaaaaaaaatcaggattctactacta

SEQ ID NO: 259159 - DNA, 33 bp, Homo sapien
cgacaattgtgtctatcctggagtttccctggc

SEQ ID NO: 259160 - DNA, 33 bp, Homo sapien
cgacaattgtgtctattctggagtttccctggc

SEQ ID NO: 259161 - DNA, 33 bp, Homo sapien
tggatgctgaaatgtcaagatttacaagacatt

SEQ ID NO: 259162 - DNA, 33 bp, Homo sapien
tggatgctgaaatgtcgagatttacaagacatt

SEQ ID NO: 259163 - DNA, 33 bp, Homo sapien
tggggtgaaaggccaccgaactgaaagaagaag

SEQ ID NO: 259164 - DNA, 33 bp, Homo sapien
tggggtgaaaggccactgaactgaaagaagaag

SEQ ID NO: 259165 - DNA, 33 bp, Homo sapien
tcacacagctttttcccatgtgtctctgagtcc

SEQ ID NO: 259166 - DNA, 33 bp, Homo sapien
tcacacagctttttcctatgtgtctctgagtcc

SEQ ID NO: 259167 - DNA, 33 bp, Homo sapien
ttaccatctgttatatgaaggtgctgcagaaag

SEQ ID NO: 259168 - DNA, 33 bp, Homo sapien
ttaccatctgttatattaaggtgctgcagaaag

SEQ ID NO: 259169 - DNA, 33 bp, Homo sapien
tataaatgaactttaacctaaacgactaggctt

SEQ ID NO: 259170 - DNA, 33 bp, Homo sapien
tataaatgaactttaatctaaacgactaggctt

SEQ ID NO: 259171 - DNA, 33 bp, Homo sapien
cagggttggccagaaaaactcaaagcacgtaga

SEQ ID NO: 259172 - DNA, 33 bp, Homo sapien
cagggttggccagaaacactcaaagcacgtaga

SEQ ID NO: 259173 - DNA, 33 bp, Homo sapien
tgagaatctctgcaagcaactggctcagtcttt

SEQ ID NO: 259174 - DNA, 33 bp, Homo sapien
tgagaatctctgcaaggaactggctcagtcttt

SEQ ID NO: 259175 - DNA, 33 bp, Homo sapien
gcccaagtcccaactcagaggtcctaagtagac

SEQ ID NO: 259176 - DNA, 33 bp, Homo sapien
gcccaagtcccaactcggaggtcctaagtagac

SEQ ID NO: 259177 - DNA, 33 bp, Homo sapien
gtcatcaatctccatgaatatttcaaaatgacc

SEQ ID NO: 259178 - DNA, 33 bp, Homo sapien
gtcatcaatctccatggatatttcaaaatgacc

SEQ ID NO: 259179 - DNA, 33 bp, Homo sapien
acaccagtggaggacacgaattctatacctgta

SEQ ID NO: 259180 - DNA, 33 bp, Homo sapien
acaccagtggaggacatgaattctatacctgta

SEQ ID NO: 259181 - DNA, 33 bp, Homo sapien
tccctcttagccacagaaagccctgaagaaagt

SEQ ID NO: 259182 - DNA, 33 bp, Homo sapien
tccctcttagccacaggaagccctgaagaaagt

SEQ ID NO: 259183 - DNA, 33 bp, Homo sapien
atgagactgaattgtcacattaacactcaagta

SEQ ID NO: 259184 - DNA, 33 bp, Homo sapien
atgagactgaattgtcgcattaacactcaagta

SEQ ID NO: 259185 - DNA, 33 bp, Homo sapien
gcaaaggttttgaaaccctgagagatgggaact

SEQ ID NO: 259186 - DNA, 33 bp, Homo sapien
gcaaaggttttgaaactctgagagatgggaact

SEQ ID NO: 259187 - DNA, 33 bp, Homo sapien
accctagaagacagataacttgccacagaaggc

SEQ ID NO: 259188 - DNA, 33 bp, Homo sapien
accctagaagacagatcacttgccacagaaggc

SEQ ID NO: 259189 - DNA, 33 bp, Homo sapien
tgaataattacgtcataaagaggcagaaataga

SEQ ID NO: 259190 - DNA, 33 bp, Homo sapien
tgaataattacgtcatcaagaggcagaaataga

SEQ ID NO: 259191 - DNA, 33 bp, Homo sapien
caatggtggaactaaggatcttgacgtggatat

SEQ ID NO: 259192 - DNA, 33 bp, Homo sapien
caatggtggaactaagtatcttgacgtggatat

SEQ ID NO: 259193 - DNA, 33 bp, Homo sapien
agtgtgattgttacaaaggtagagtccaagtgt

SEQ ID NO: 259194 - DNA, 33 bp, Homo sapien
agtgtgattgttacaagggtagagtccaagtgt

SEQ ID NO: 259195 - DNA, 33 bp, Homo sapien
ttcctagcaatgcatgacacagagtaagctcat

SEQ ID NO: 259196 - DNA, 33 bp, Homo sapien
ttcctagcaatgcatggcacagagtaagctcat

SEQ ID NO: 259197 - DNA, 33 bp, Homo sapien
ttaaatggatgcgttacatatcaattagatctc

SEQ ID NO: 259198 - DNA, 33 bp, Homo sapien
ttaaatggatgcgttatatatcaattagatctc

SEQ ID NO: 259199 - DNA, 33 bp, Homo sapien
tttgtcctgcacagaaaacaaaactcctcactg

SEQ ID NO: 259200 - DNA, 33 bp, Homo sapien
tttgtcctgcacagaatacaaaactcctcactg

SEQ ID NO: 259201 - DNA, 33 bp, Homo sapien
caaaatgcaataaagcaaggcagaataaaacgt

SEQ ID NO: 259202 - DNA, 33 bp, Homo sapien
caaaatgcaataaagctaggcagaataaaacgt

SEQ ID NO: 259203 - DNA, 33 bp, Homo sapien
agctttggatttaaaagagagatgggcgactct

SEQ ID NO: 259204 - DNA, 33 bp, Homo sapien
agctttggatttaaaatagagatgggcgactct

SEQ ID NO: 259205 - DNA, 33 bp, Homo sapien
caaagtctaatccaaagcaagtctctaactctc

SEQ ID NO: 259206 - DNA, 33 bp, Homo sapien
caaagtctaatccaaatcaagtctctaactctc

SEQ ID NO: 259207 - DNA, 33 bp, Homo sapien
gagagaggtgaagaaaagtttgaagctagtaga

SEQ ID NO: 259208 - DNA, 33 bp, Homo sapien
gagagaggtgaagaaaggtttgaagctagtaga

SEQ ID NO: 259209 - DNA, 33 bp, Homo sapien
cagagcttcaaaggacacaatgattctccggtt

SEQ ID NO: 259210 - DNA, 33 bp, Homo sapien
cagagcttcaaaggacgcaatgattctccggtt

SEQ ID NO: 259211 - DNA, 33 bp, Homo sapien
taatggagaagtacaacgagatgaatattgttt

SEQ ID NO: 259212 - DNA, 33 bp, Homo sapien
taatggagaagtacaatgagatgaatattgttt

SEQ ID NO: 259213 - DNA, 33 bp, Homo sapien
gagtggtttcttgtgacggaaactacctctggt

SEQ ID NO: 259214 - DNA, 33 bp, Homo sapien
gagtggtttcttgtgatggaaactacctctggt

SEQ ID NO: 259215 - DNA, 33 bp, Homo sapien
gctgttctcaaaacacaaagcactgtaaccggc

SEQ ID NO: 259216 - DNA, 33 bp, Homo sapien
gctgttctcaaaacaccaagcactgtaaccggc

SEQ ID NO: 259217 - DNA, 33 bp, Homo sapien
agcttcacctggagccaagaatgggtgatgtgg

SEQ ID NO: 259218 - DNA, 33 bp, Homo sapien
agcttcacctggagccgagaatgggtgatgtgg

SEQ ID NO: 259219 - DNA, 33 bp, Homo sapien
cactgaggaatagctacgtttccacactaaccc

SEQ ID NO: 259220 - DNA, 33 bp, Homo sapien
cactgaggaatagctatgtttccacactaaccc

SEQ ID NO: 259221 - DNA, 33 bp, Homo sapien
gtgatgaagtggtcacaatgaggaagatggatg

SEQ ID NO: 259222 - DNA, 33 bp, Homo sapien
gtgatgaagtggtcacgatgaggaagatggatg

SEQ ID NO: 259223 - DNA, 33 bp, Homo sapien
gtctctatagtcctcaaagcttccacccttcta

SEQ ID NO: 259224 - DNA, 33 bp, Homo sapien
gtctctatagtcctcagagcttccacccttcta

SEQ ID NO: 259225 - DNA, 33 bp, Homo sapien
tgaggactatagagacacaaaaaggcagaaact

SEQ ID NO: 259226 - DNA, 33 bp, Homo sapien
tgaggactatagagacgcaaaaaggcagaaact

SEQ ID NO: 259227 - DNA, 33 bp, Homo sapien
catccatggttcagtaaccgagtctgtggtggg

SEQ ID NO: 259228 - DNA, 33 bp, Homo sapien
catccatggttcagtagccgagtctgtggtggg

SEQ ID NO: 259229 - DNA, 33 bp, Homo sapien
gccactgcctgtaccactgcagtcttgcctagg

SEQ ID NO: 259230 - DNA, 33 bp, Homo sapien
gccactgcctgtaccattgcagtcttgcctagg

SEQ ID NO: 259231 - DNA, 33 bp, Homo sapien
aaatgtgcagctaaaagcgtcctgaatgttgtt

SEQ ID NO: 259232 - DNA, 33 bp, Homo sapien
aaatgtgcagctaaaatcgtcctgaatgttgtt

SEQ ID NO: 259233 - DNA, 33 bp, Homo sapien
aaataggagaaaccaactagctggagaggtagg

SEQ ID NO: 259234 - DNA, 33 bp, Homo sapien
aaataggagaaaccaagtagctggagaggtagg

SEQ ID NO: 259235 - DNA, 33 bp, Homo sapien
attcatgggaagtggacgatacaactttttaag

SEQ ID NO: 259236 - DNA, 33 bp, Homo sapien
attcatgggaagtggatgatacaactttttaag

SEQ ID NO: 259237 - DNA, 33 bp, Homo sapien
ttgtacagctgttgccactgattccaggacctt

SEQ ID NO: 259238 - DNA, 33 bp, Homo sapien
ttgtacagctgttgccgctgattccaggacctt

SEQ ID NO: 259239 - DNA, 33 bp, Homo sapien
aagggtttatgccaagcctcactcttagggaac

SEQ ID NO: 259240 - DNA, 33 bp, Homo sapien
aagggtttatgccaagtctcactcttagggaac

SEQ ID NO: 259241 - DNA, 33 bp, Homo sapien
agcaagctgctgagtacggggtgagtagtgatt

SEQ ID NO: 259242 - DNA, 33 bp, Homo sapien
agcaagctgctgagtatggggtgagtagtgatt

SEQ ID NO: 259243 - DNA, 33 bp, Homo sapien
taatatttatgtgatgaaatagtcaagtataaa

SEQ ID NO: 259244 - DNA, 33 bp, Homo sapien
taatatttatgtgatggaatagtcaagtataaa

SEQ ID NO: 259245 - DNA, 33 bp, Homo sapien
ctgtttactctttccagctttacaatttcttcc

SEQ ID NO: 259246 - DNA, 33 bp, Homo sapien
ctgtttactctttccatctttacaatttcttcc

SEQ ID NO: 259247 - DNA, 33 bp, Homo sapien
ttgggggacttcatcccaggagaaaaatcagcc

SEQ ID NO: 259248 - DNA, 33 bp, Homo sapien
ttgggggacttcatcctaggagaaaaatcagcc

SEQ ID NO: 259249 - DNA, 33 bp, Homo sapien
ccttgttttgtttccaaactcactggactaaat

SEQ ID NO: 259250 - DNA, 33 bp, Homo sapien
ccttgttttgtttccagactcactggactaaat

SEQ ID NO: 259251 - DNA, 33 bp, Homo sapien
caggcaagaatcaggacagggtaatttctgggg

SEQ ID NO: 259252 - DNA, 33 bp, Homo sapien
caggcaagaatcaggatagggtaatttctgggg

SEQ ID NO: 259253 - DNA, 33 bp, Homo sapien
tggggcttaaatttcacgggttcttcaattctc

SEQ ID NO: 259254 - DNA, 33 bp, Homo sapien
tggggcttaaatttcatgggttcttcaattctc

SEQ ID NO: 259255 - DNA, 33 bp, Homo sapien
ctcagtcatgcaaaaacgtaacttaatgtaatg

SEQ ID NO: 259256 - DNA, 33 bp, Homo sapien
ctcagtcatgcaaaaatgtaacttaatgtaatg

SEQ ID NO: 259257 - DNA, 33 bp, Homo sapien
ccttcagccgacacacagatgctctaatgccag

SEQ ID NO: 259258 - DNA, 33 bp, Homo sapien
ccttcagccgacacacggatgctctaatgccag

SEQ ID NO: 259259 - DNA, 33 bp, Homo sapien
ctgtggtttctcccaacggcagcaacttcaggg

SEQ ID NO: 259260 - DNA, 33 bp, Homo sapien
ctgtggtttctcccaatggcagcaacttcaggg

SEQ ID NO: 259261 - DNA, 33 bp, Homo sapien
ggagaaaccacagtaaacaacagtcaaacaaaa

SEQ ID NO: 259262 - DNA, 33 bp, Homo sapien
ggagaaaccacagtaaccaacagtcaaacaaaa

SEQ ID NO: 259263 - DNA, 33 bp, Homo sapien
actctgccagagatagaaagagaacagaactaa

SEQ ID NO: 259264 - DNA, 33 bp, Homo sapien
actctgccagagataggaagagaacagaactaa

SEQ ID NO: 259265 - DNA, 33 bp, Homo sapien
caatatgctttttaaacgaccagtgacttagta

SEQ ID NO: 259266 - DNA, 33 bp, Homo sapien
caatatgctttttaaatgaccagtgacttagta

SEQ ID NO: 259267 - DNA, 33 bp, Homo sapien
agttcacaggcactgacattagtagtaatggtc

SEQ ID NO: 259268 - DNA, 33 bp, Homo sapien
agttcacaggcactgatattagtagtaatggtc

SEQ ID NO: 259269 - DNA, 33 bp, Homo sapien
tgttcttgatgggttccatttttatttgcccct

SEQ ID NO: 259270 - DNA, 33 bp, Homo sapien
tgttcttgatgggttctatttttatttgcccct

SEQ ID NO: 259271 - DNA, 33 bp, Homo sapien
tgtgagattctcgtgaaggaccctgaaaacaac

SEQ ID NO: 259272 - DNA, 33 bp, Homo sapien
tgtgagattctcgtgagggaccctgaaaacaac

SEQ ID NO: 259273 - DNA, 33 bp, Homo sapien
tcaggacggcccatgacgcacgggtaccacaga

SEQ ID NO: 259274 - DNA, 33 bp, Homo sapien
tcaggacggcccatgatgcacgggtaccacaga

SEQ ID NO: 259275 - DNA, 33 bp, Homo sapien
aagtgcaggaactgtcactttccaccgcccagg

SEQ ID NO: 259276 - DNA, 33 bp, Homo sapien
aagtgcaggaactgtcgctttccaccgcccagg

SEQ ID NO: 259277 - DNA, 33 bp, Homo sapien
tccacatccaggaaaaatgaagttacgtggaca

SEQ ID NO: 259278 - DNA, 33 bp, Homo sapien
tccacatccaggaaaagtgaagttacgtggaca

SEQ ID NO: 259279 - DNA, 33 bp, Homo sapien
aagctaaaattccccccctgaagaatatggaag

SEQ ID NO: 259280 - DNA, 33 bp, Homo sapien
aagctaaaattccccctctgaagaatatggaag

SEQ ID NO: 259281 - DNA, 33 bp, Homo sapien
tagaaggaatgccgtacgttttgttggtggggg

SEQ ID NO: 259282 - DNA, 33 bp, Homo sapien
tagaaggaatgccgtaggttttgttggtggggg

SEQ ID NO: 259283 - DNA, 33 bp, Homo sapien
actgaggcttggaaaaattcaaggactgtcaca

SEQ ID NO: 259284 - DNA, 33 bp, Homo sapien
actgaggcttggaaaagttcaaggactgtcaca

SEQ ID NO: 259285 - DNA, 33 bp, Homo sapien
actttgcatgggtaacaggcttttataggagcc

SEQ ID NO: 259286 - DNA, 33 bp, Homo sapien
actttgcatgggtaacgggcttttataggagcc

SEQ ID NO: 259287 - DNA, 33 bp, Homo sapien
cattttactaattcacaatggtgctgattttct

SEQ ID NO: 259288 - DNA, 33 bp, Homo sapien
cattttactaattcacgatggtgctgattttct

SEQ ID NO: 259289 - DNA, 33 bp, Homo sapien
tgtctgaaggtgctccactgttgggaaatgatt

SEQ ID NO: 259290 - DNA, 33 bp, Homo sapien
tgtctgaaggtgctccgctgttgggaaatgatt

SEQ ID NO: 259291 - DNA, 33 bp, Homo sapien
actgaagcaaattgtcacgcattttaactcaga

SEQ ID NO: 259292 - DNA, 33 bp, Homo sapien
actgaagcaaattgtcgcgcattttaactcaga

SEQ ID NO: 259293 - DNA, 33 bp, Homo sapien
tgccttcagctccacaaatccttactgagggct

SEQ ID NO: 259294 - DNA, 33 bp, Homo sapien
tgccttcagctccacagatccttactgagggct

SEQ ID NO: 259295 - DNA, 33 bp, Homo sapien
caggttagctggaaacagtcagatgggcccata

SEQ ID NO: 259296 - DNA, 33 bp, Homo sapien
caggttagctggaaacggtcagatgggcccata

SEQ ID NO: 259297 - DNA, 33 bp, Homo sapien
tgaggtatccagtgagaactttatctgggtatc

SEQ ID NO: 259298 - DNA, 33 bp, Homo sapien
tgaggtatccagtgagcactttatctgggtatc

SEQ ID NO: 259299 - DNA, 33 bp, Homo sapien
gaacagattccataagccaatatgtaggatgca

SEQ ID NO: 259300 - DNA, 33 bp, Homo sapien
gaacagattccataagtcaatatgtaggatgca

SEQ ID NO: 259301 - DNA, 33 bp, Homo sapien
ataaaaatgaagttacagaggcagctgggagac

SEQ ID NO: 259302 - DNA, 33 bp, Homo sapien
ataaaaatgaagttacggaggcagctgggagac

SEQ ID NO: 259303 - DNA, 33 bp, Homo sapien
gcttccttctctgtgacgttctgggcctggatg

SEQ ID NO: 259304 - DNA, 33 bp, Homo sapien
gcttccttctctgtgatgttctgggcctggatg

SEQ ID NO: 259305 - DNA, 33 bp, Homo sapien
actcctggttaggagccaatggcctggctgaat

SEQ ID NO: 259306 - DNA, 33 bp, Homo sapien
actcctggttaggagctaatggcctggctgaat

SEQ ID NO: 259307 - DNA, 33 bp, Homo sapien
aagctcctgacgtggacctgagtagtggaagag

SEQ ID NO: 259308 - DNA, 33 bp, Homo sapien
aagctcctgacgtggatctgagtagtggaagag

SEQ ID NO: 259309 - DNA, 33 bp, Homo sapien
tggaaatcatagcggacgcatatgggtgtggat

SEQ ID NO: 259310 - DNA, 33 bp, Homo sapien
tggaaatcatagcggatgcatatgggtgtggat

SEQ ID NO: 259311 - DNA, 33 bp, Homo sapien
gggaccagtgaaggcaaagaaattcacaaagaa

SEQ ID NO: 259312 - DNA, 33 bp, Homo sapien
gggaccagtgaaggcagagaaattcacaaagaa

SEQ ID NO: 259313 - DNA, 33 bp, Homo sapien
cagtatctcaaactcacaacagtagtcagcact

SEQ ID NO: 259314 - DNA, 33 bp, Homo sapien
cagtatctcaaactcagaacagtagtcagcact

SEQ ID NO: 259315 - DNA, 33 bp, Homo sapien
tttgggctccttttaccacttggctattgtgag

SEQ ID NO: 259316 - DNA, 33 bp, Homo sapien
tttgggctccttttactacttggctattgtgag

SEQ ID NO: 259317 - DNA, 33 bp, Homo sapien
aagttctgtcgtacaagagtgtgaatatacttg

SEQ ID NO: 259318 - DNA, 33 bp, Homo sapien
aagttctgtcgtacaatagtgtgaatatacttg

SEQ ID NO: 259319 - DNA, 33 bp, Homo sapien
caacatcatggattagcagttagcgacactgcg

SEQ ID NO: 259320 - DNA, 33 bp, Homo sapien
caacatcatggattagtagttagcgacactgcg

SEQ ID NO: 259321 - DNA, 33 bp, Homo sapien
caactctggctgaggtaaatcacaagagaggtt

SEQ ID NO: 259322 - DNA, 33 bp, Homo sapien
caactctggctgaggttaatcacaagagaggtt

SEQ ID NO: 259323 - DNA, 33 bp, Homo sapien
ccttgcagataaaggacggaagcagaatattgg

SEQ ID NO: 259324 - DNA, 33 bp, Homo sapien
ccttgcagataaaggatggaagcagaatattgg

SEQ ID NO: 259325 - DNA, 33 bp, Homo sapien
atcatgacattcagtacaataaactgaccatgg

SEQ ID NO: 259326 - DNA, 33 bp, Homo sapien
atcatgacattcagtagaataaactgaccatgg

SEQ ID NO: 259327 - DNA, 33 bp, Homo sapien
gatccaaacaacagaactgtgagtaacaagaag

SEQ ID NO: 259328 - DNA, 33 bp, Homo sapien
gatccaaacaacagaagtgtgagtaacaagaag

SEQ ID NO: 259329 - DNA, 33 bp, Homo sapien
taaatacttctgaatgcacttacaagacagacc

SEQ ID NO: 259330 - DNA, 33 bp, Homo sapien
taaatacttctgaatgtacttacaagacagacc

SEQ ID NO: 259331 - DNA, 33 bp, Homo sapien
ctgccttctctagacacagttaaaagttatatc

SEQ ID NO: 259332 - DNA, 33 bp, Homo sapien
ctgccttctctagacatagttaaaagttatatc

SEQ ID NO: 259333 - DNA, 33 bp, Homo sapien
attaagtagtttccaaaatatatcattgtattt

SEQ ID NO: 259334 - DNA, 33 bp, Homo sapien
attaagtagtttccaacatatatcattgtattt

SEQ ID NO: 259335 - DNA, 33 bp, Homo sapien
ttattcatgggtaatgaagaaatggtttgcatt

SEQ ID NO: 259336 - DNA, 33 bp, Homo sapien
ttattcatgggtaatgcagaaatggtttgcatt

SEQ ID NO: 259337 - DNA, 33 bp, Homo sapien
aagaatggaataggtgaaattcatcaaaatgtt

SEQ ID NO: 259338 - DNA, 33 bp, Homo sapien
aagaatggaataggtgtaattcatcaaaatgtt

SEQ ID NO: 259339 - DNA, 33 bp, Homo sapien
aacattcatgagactgaatctctataaacaaac

SEQ ID NO: 259340 - DNA, 33 bp, Homo sapien
aacattcatgagactgtatctctataaacaaac

SEQ ID NO: 259341 - DNA, 33 bp, Homo sapien
caaagcaacaaaaaaacaagcagacaaacaaaa

SEQ ID NO: 259342 - DNA, 33 bp, Homo sapien
caaagcaacaaaaaaagaagcagacaaacaaaa

SEQ ID NO: 259343 - DNA, 33 bp, Homo sapien
aagactatactttctccattgaattgtctttgt

SEQ ID NO: 259344 - DNA, 33 bp, Homo sapien
aagactatactttctctattgaattgtctttgt

SEQ ID NO: 259345 - DNA, 33 bp, Homo sapien
atgcaagcatgtgatacaaaagtacaaacttgt

SEQ ID NO: 259346 - DNA, 33 bp, Homo sapien
atgcaagcatgtgatagaaaagtacaaacttgt

SEQ ID NO: 259347 - DNA, 33 bp, Homo sapien
atatgaaatttattacagaaattgactcacaag

SEQ ID NO: 259348 - DNA, 33 bp, Homo sapien
atatgaaatttattacggaaattgactcacaag

SEQ ID NO: 259349 - DNA, 33 bp, Homo sapien
ctggcctcttcatgccaacgaggttctcatgta

SEQ ID NO: 259350 - DNA, 33 bp, Homo sapien
ctggcctcttcatgccgacgaggttctcatgta

SEQ ID NO: 259351 - DNA, 33 bp, Homo sapien
gtttacaaattgttcactgaaaattgagttgca

SEQ ID NO: 259352 - DNA, 33 bp, Homo sapien
gtttacaaattgttcattgaaaattgagttgca

SEQ ID NO: 259353 - DNA, 33 bp, Homo sapien
acagacttttgtcctgcaacctcaaagaactca

SEQ ID NO: 259354 - DNA, 33 bp, Homo sapien
acagacttttgtcctgtaacctcaaagaactca

SEQ ID NO: 259355 - DNA, 33 bp, Homo sapien
cctggttccagcttcactaggagtagctaaatg

SEQ ID NO: 259356 - DNA, 33 bp, Homo sapien
cctggttccagcttcattaggagtagctaaatg

SEQ ID NO: 259357 - DNA, 33 bp, Homo sapien; identical to SEQ ID NO: 259355

SEQ ID NO: 259358 - DNA, 33 bp, Homo sapien; identical to SEQ ID NO: 259356

SEQ ID NO: 259359 - DNA, 33 bp, Homo sapien
gtaaccttttgctttacagtcatcagattaaca

SEQ ID NO: 259360 - DNA, 33 bp, Homo sapien
gtaaccttttgctttatagtcatcagattaaca

SEQ ID NO: 259361 - DNA, 33 bp, Homo sapien
ccttgaaaacacactaagtgcaagaagttggta

SEQ ID NO: 259362 - DNA, 33 bp, Homo sapien
ccttgaaaacacactaggtgcaagaagttggta

SEQ ID NO: 259363 - DNA, 33 bp, Homo sapien; identical to SEQ ID NO: 259361

SEQ ID NO: 259364 - DNA, 33 bp, Homo sapien; identical to SEQ ID NO: 259362

SEQ ID NO: 259365 - DNA, 33 bp, Homo sapien
tagagaggactcctcaatcgcagagtgacccac

SEQ ID NO: 259366 - DNA, 33 bp, Homo sapien
tagagaggactcctcagtcgcagagtgacccac

SEQ ID NO: 259367 - DNA, 33 bp, Homo sapien
ggttgggacagaaaaccacaaaatggcctcagg

SEQ ID NO: 259368 - DNA, 33 bp, Homo sapien
ggttgggacagaaaactacaaaatggcctcagg

SEQ ID NO: 259369 - DNA, 33 bp, Homo sapien
atagtataaacacgctaaactataaaacaattt

SEQ ID NO: 259370 - DNA, 33 bp, Homo sapien
atagtataaacacgctgaactataaaacaattt

SEQ ID NO: 259371 - DNA, 33 bp, Homo sapien
ggaataaatatctgtcactcacaacccctgagt

SEQ ID NO: 259372 - DNA, 33 bp, Homo sapien
ggaataaatatctgtcgctcacaacccctgagt

SEQ ID NO: 259373 - DNA, 33 bp, Homo sapien
cagacatttattcctcactgtaactgcgtgtta

SEQ ID NO: 259374 - DNA, 33 bp, Homo sapien
cagacatttattcctcgctgtaactgcgtgtta

SEQ ID NO: 259375 - DNA, 33 bp, Homo sapien
accattgaattctgcacgggcaaaaagtctggg

SEQ ID NO: 259376 - DNA, 33 bp, Homo sapien
accattgaattctgcatgggcaaaaagtctggg

SEQ ID NO: 259377 - DNA, 33 bp, Homo sapien
tttaaattttaaatggccaatttggtcaatgaa

SEQ ID NO: 259378 - DNA, 33 bp, Homo sapien
tttaaattttaaatggtcaatttggtcaatgaa

SEQ ID NO: 259379 - DNA, 33 bp, Homo sapien
aagtcaaaaagagggaatattcgtcaggtgagg

SEQ ID NO: 259380 - DNA, 33 bp, Homo sapien
aagtcaaaaagagggattattcgtcaggtgagg

SEQ ID NO: 259381 - DNA, 33 bp, Homo sapien
agtataatcagtaatacagcaacagacatcttt

SEQ ID NO: 259382 - DNA, 33 bp, Homo sapien
agtataatcagtaatatagcaacagacatcttt

SEQ ID NO: 259383 - DNA, 33 bp, Homo sapien
gttattggtgacactgaatatttatctgtgtag

SEQ ID NO: 259384 - DNA, 33 bp, Homo sapien
gttattggtgacactggatatttatctgtgtag

SEQ ID NO: 259385 - DNA, 33 bp, Homo sapien
tagattttctcttttacggattgtttatgtcct

SEQ ID NO: 259386 - DNA, 33 bp, Homo sapien
tagattttctcttttatggattgtttatgtcct

SEQ ID NO: 259387 - DNA, 33 bp, Homo sapien
acaaataaatgcaaaaagtatatagtatgattg

SEQ ID NO: 259388 - DNA, 33 bp, Homo sapien
acaaataaatgcaaaaggtatatagtatgattg

SEQ ID NO: 259389 - DNA, 33 bp, Homo sapien
atacacactgtttaaaactatcacataagtaaa

SEQ ID NO: 259390 - DNA, 33 bp, Homo sapien
atacacactgtttaaagctatcacataagtaaa

SEQ ID NO: 259391 - DNA, 33 bp, Homo sapien
tgaaaatgtctactgaatatacaggtagaggta

SEQ ID NO: 259392 - DNA, 33 bp, Homo sapien
tgaaaatgtctactgagtatacaggtagaggta

SEQ ID NO: 259393 - DNA, 33 bp, Homo sapien
ctttttgaagatagataaggaattctaataaga

SEQ ID NO: 259394 - DNA, 33 bp, Homo sapien
ctttttgaagatagatgaggaattctaataaga

SEQ ID NO: 259395 - DNA, 33 bp, Homo sapien
tgcttgataacctggaacacctattaaatatcc

SEQ ID NO: 259396 - DNA, 33 bp, Homo sapien
tgcttgataacctggagcacctattaaatatcc

SEQ ID NO: 259397 - DNA, 33 bp, Homo sapien
tatgtatctacgccctaagcttttaagagaatt

SEQ ID NO: 259398 - DNA, 33 bp, Homo sapien
tatgtatctacgccctgagcttttaagagaatt

SEQ ID NO: 259399 - DNA, 33 bp, Homo sapien
tggaaatgcagtcagcaaagtctggaatgtggg

SEQ ID NO: 259400 - DNA, 33 bp, Homo sapien
tggaaatgcagtcagcgaagtctggaatgtggg

SEQ ID NO: 259401 - DNA, 33 bp, Homo sapien
tacttccagaaagcacaggatactgtcatcttt

SEQ ID NO: 259402 - DNA, 33 bp, Homo sapien
tacttccagaaagcacgggatactgtcatcttt

SEQ ID NO: 259403 - DNA, 33 bp, Homo sapien
atttgactgcattaaaaaatctgcatgaccaaa

SEQ ID NO: 259404 - DNA, 33 bp, Homo sapien
atttgactgcattaaacaatctgcatgaccaaa

SEQ ID NO: 259405 - DNA, 33 bp, Homo sapien
atgattcttctatttgccaaaatcactcacttg

SEQ ID NO: 259406 - DNA, 33 bp, Homo sapien
atgattcttctatttgtcaaaatcactcacttg

SEQ ID NO: 259407 - DNA, 33 bp, Homo sapien
acctgccgcattctacacggagtcattccactg

SEQ ID NO: 259408 - DNA, 33 bp, Homo sapien
acctgccgcattctactcggagtcattccactg

SEQ ID NO: 259409 - DNA, 33 bp, Homo sapien
gacaaaatccttaagacgtgacgatttgctgta

SEQ ID NO: 259410 - DNA, 33 bp, Homo sapien
gacaaaatccttaagatgtgacgatttgctgta

SEQ ID NO: 259411 - DNA, 33 bp, Homo sapien
attctgcttttctgtcaagtttttgggatcttt

SEQ ID NO: 259412 - DNA, 33 bp, Homo sapien
attctgcttttctgtcgagtttttgggatcttt

SEQ ID NO: 259413 - DNA, 33 bp, Homo sapien
tctgtagagctgacaactgtgggtacccgaccc

SEQ ID NO: 259414 - DNA, 33 bp, Homo sapien
tctgtagagctgacaattgtgggtacccgaccc

SEQ ID NO: 259415 - DNA, 33 bp, Homo sapien
ctccctgacctagccaatgagagcgaagtgatt

SEQ ID NO: 259416 - DNA, 33 bp, Homo sapien
ctccctgacctagccagtgagagcgaagtgatt

SEQ ID NO: 259417 - DNA, 33 bp, Homo sapien
cttgtcacttcaactgcaaaaggtctacttaga

SEQ ID NO: 259418 - DNA, 33 bp, Homo sapien
cttgtcacttcaactggaaaaggtctacttaga

SEQ ID NO: 259419 - DNA, 33 bp, Homo sapien
tatagcatcaacattacggaacaaatatatata

SEQ ID NO: 259420 - DNA, 33 bp, Homo sapien
tatagcatcaacattatggaacaaatatatata

SEQ ID NO: 259421 - DNA, 33 bp, Homo sapien
agaatacccaatgtaacgtctgatggcacatgt

SEQ ID NO: 259422 - DNA, 33 bp, Homo sapien
agaatacccaatgtaatgtctgatggcacatgt

SEQ ID NO: 259423 - DNA, 33 bp, Homo sapien
cttaaggtaaaaatgccaatttgtacaggcaaa

SEQ ID NO: 259424 - DNA, 33 bp, Homo sapien
cttaaggtaaaaatgcgaatttgtacaggcaaa

SEQ ID NO: 259425 - DNA, 33 bp, Homo sapien
cttagacataggagacactattgaaaaaatgtt

SEQ ID NO: 259426 - DNA, 33 bp, Homo sapien
cttagacataggagacgctattgaaaaaatgtt

SEQ ID NO: 259427 - DNA, 33 bp, Homo sapien
caaagtgcagaaactcacagattggataaagca

SEQ ID NO: 259428 - DNA, 33 bp, Homo sapien
caaagtgcagaaactcccagattggataaagca

SEQ ID NO: 259429 - DNA, 33 bp, Homo sapien
gcaaaattcaacagtacgctatctaagtagtat

SEQ ID NO: 259430 - DNA, 33 bp, Homo sapien
gcaaaattcaacagtatgctatctaagtagtat

SEQ ID NO: 259431 - DNA, 33 bp, Homo sapien
atacagtttggccatacatagagccagcattct

SEQ ID NO: 259432 - DNA, 33 bp, Homo sapien
atacagtttggccatatatagagccagcattct

SEQ ID NO: 259433 - DNA, 33 bp, Homo sapien
tttaagtttccattcaccttagactcagttttt

SEQ ID NO: 259434 - DNA, 33 bp, Homo sapien
tttaagtttccattcatcttagactcagttttt

SEQ ID NO: 259435 - DNA, 33 bp, Homo sapien
ctgagaaactccaggacgcacgtttgcctcctc

SEQ ID NO: 259436 - DNA, 33 bp, Homo sapien
ctgagaaactccaggatgcacgtttgcctcctc

SEQ ID NO: 259437 - DNA, 33 bp, Homo sapien
ggctatgctgcctgcaatgactgcttagagtgt

SEQ ID NO: 259438 - DNA, 33 bp, Homo sapien
ggctatgctgcctgcagtgactgcttagagtgt

SEQ ID NO: 259439 - DNA, 33 bp, Homo sapien; identical to SEQ ID NO: 259437

SEQ ID NO: 259440 - DNA, 33 bp, Homo sapien; identical to SEQ ID NO: 259438

SEQ ID NO: 259441 - DNA, 33 bp, Homo sapien
aaggagttccgtgcacagtcaaggggacagtgt

SEQ ID NO: 259442 - DNA, 33 bp, Homo sapien
aaggagttccgtgcacggtcaaggggacagtgt

SEQ ID NO: 259443 - DNA, 33 bp, Homo sapien
aatgcatgaaggcttgaagaaggaataaagatc

SEQ ID NO: 259444 - DNA, 33 bp, Homo sapien
aatgcatgaaggcttggagaaggaataaagatc

SEQ ID NO: 259445 - DNA, 33 bp, Homo sapien
cctcatgatactctgaaaagtgaatatcctctt

SEQ ID NO: 259446 - DNA, 33 bp, Homo sapien
cctcatgatactctgagaagtgaatatcctctt

SEQ ID NO: 259447 - DNA, 33 bp, Homo sapien
tatgctcgcactactacggctaacacacgcacc

SEQ ID NO: 259448 - DNA, 33 bp, Homo sapien
tatgctcgcactactatggctaacacacgcacc

SEQ ID NO: 259449 - DNA, 33 bp, Homo sapien
ctgcatgaccttttgcactccaccttctctccg

SEQ ID NO: 259450 - DNA, 33 bp, Homo sapien
ctgcatgaccttttgcgctccaccttctctccg

SEQ ID NO: 259451 - DNA, 33 bp, Homo sapien
gtgtgcatggagtttcacaaacagcctctgtca

SEQ ID NO: 259452 - DNA, 33 bp, Homo sapien
gtgtgcatggagtttcgcaaacagcctctgtca

SEQ ID NO: 259453 - DNA, 33 bp, Homo sapien; identical to SEQ ID NO: 259451

SEQ ID NO: 259454 - DNA, 33 bp, Homo sapien; identical to SEQ ID NO: 259452

SEQ ID NO: 259455 - DNA, 33 bp, Homo sapien
ggtatggcgtctctaacgtggcctctctgtggc

SEQ ID NO: 259456 - DNA, 33 bp, Homo sapien
ggtatggcgtctctaatgtggcctctctgtggc

SEQ ID NO: 259457 - DNA, 33 bp, Homo sapien
ctttcttctctgttcagaacggtgcctggggca

SEQ ID NO: 259458 - DNA, 33 bp, Homo sapien
ctttcttctctgttcataacggtgcctggggca

SEQ ID NO: 259459 - DNA, 33 bp, Homo sapien
aaaaaaaaaaatgtcaatcatgagtgttgctaa

SEQ ID NO: 259460 - DNA, 33 bp, Homo sapien
aaaaaaaaaaatgtcagtcatgagtgttgctaa

SEQ ID NO: 259461 - DNA, 33 bp, Homo sapien
ggagacaatttcatgactcagtgttacctcatt

SEQ ID NO: 259462 - DNA, 33 bp, Homo sapien
ggagacaatttcatgattcagtgttacctcatt

SEQ ID NO: 259463 - DNA, 33 bp, Homo sapien
ttactagaagaaagaaccagagtcttatatttc

SEQ ID NO: 259464 - DNA, 33 bp, Homo sapien
ttactagaagaaagaatcagagtcttatatttc

SEQ ID NO: 259465 - DNA, 33 bp, Homo sapien
aaatggactgcggttaaggcatctgactgggga

SEQ ID NO: 259466 - DNA, 33 bp, Homo sapien
aaatggactgcggttagggcatctgactgggga

SEQ ID NO: 259467 - DNA, 33 bp, Homo sapien
aaagcttctgagaaaactagacatccctgtctg

SEQ ID NO: 259468 - DNA, 33 bp, Homo sapien
aaagcttctgagaaaagtagacatccctgtctg

SEQ ID NO: 259469 - DNA, 33 bp, Homo sapien
gtttcctggcccaagacagagctgtaggcagga

SEQ ID NO: 259470 - DNA, 33 bp, Homo sapien
gtttcctggcccaagatagagctgtaggcagga

SEQ ID NO: 259471 - DNA, 33 bp, Homo sapien
gtgactttctaaaaagaagagaccatgttggca

SEQ ID NO: 259472 - DNA, 33 bp, Homo sapien
gtgactttctaaaaaggagagaccatgttggca

SEQ ID NO: 259473 - DNA, 33 bp, Homo sapien
cacatattgcaagctacgatattattcaatttt

SEQ ID NO: 259474 - DNA, 33 bp, Homo sapien
cacatattgcaagctaggatattattcaatttt

SEQ ID NO: 259475 - DNA, 33 bp, Homo sapien
ttttgtccatgtttaacacagtttatttgaagt

SEQ ID NO: 259476 - DNA, 33 bp, Homo sapien
ttttgtccatgtttaagacagtttatttgaagt

SEQ ID NO: 259477 - DNA, 33 bp, Homo sapien
cccattactgggtacacattcaaaacaagagaa

SEQ ID NO: 259478 - DNA, 33 bp, Homo sapien
cccattactgggtacatattcaaaacaagagaa

SEQ ID NO: 259479 - DNA, 33 bp, Homo sapien
tggtgcattggacttaaaacaaaacatcctgga

SEQ ID NO: 259480 - DNA, 33 bp, Homo sapien
tggtgcattggacttacaacaaaacatcctgga

SEQ ID NO: 259481 - DNA, 33 bp, Homo sapien
gtcctgtcaaatatcaaaaaactcagttttgag

SEQ ID NO: 259482 - DNA, 33 bp, Homo sapien
gtcctgtcaaatatcagaaaactcagttttgag

SEQ ID NO: 259483 - DNA, 33 bp, Homo sapien
gtgccaaaaatctagacgatgtgctgctttctt

SEQ ID NO: 259484 - DNA, 33 bp, Homo sapien
gtgccaaaaatctagatgatgtgctgctttctt

SEQ ID NO: 259485 - DNA, 33 bp, Homo sapien
atgtcaaaacatgataaattcagtgaaagaaaa

SEQ ID NO: 259486 - DNA, 33 bp, Homo sapien
atgtcaaaacatgatacattcagtgaaagaaaa

SEQ ID NO: 259487 - DNA, 33 bp, Homo sapien
gtgatcagtgtcaaaacacgttgaattcagtga

SEQ ID NO: 259488 - DNA, 33 bp, Homo sapien
gtgatcagtgtcaaaatacgttgaattcagtga

SEQ ID NO: 259489 - DNA, 33 bp, Homo sapien
ctcaggtaggaagtaaacattagaagcagatga

SEQ ID NO: 259490 - DNA, 33 bp, Homo sapien
ctcaggtaggaagtaatcattagaagcagatga

SEQ ID NO: 259491 - DNA, 33 bp, Homo sapien
gtgatgttcttacatgacagtatatacaacaat

SEQ ID NO: 259492 - DNA, 33 bp, Homo sapien
gtgatgttcttacatggcagtatatacaacaat

SEQ ID NO: 259493 - DNA, 33 bp, Homo sapien
accatctatgtaacctaaaatctgtcatctgta

SEQ ID NO: 259494 - DNA, 33 bp, Homo sapien
accatctatgtaacctcaaatctgtcatctgta

SEQ ID NO: 259495 - DNA, 33 bp, Homo sapien
tttcccccagcatcgacggcagatttagctcca

SEQ ID NO: 259496 - DNA, 33 bp, Homo sapien
tttcccccagcatcgatggcagatttagctcca

SEQ ID NO: 259497 - DNA, 33 bp, Homo sapien
agggcacagggcataaagctgtggacatagaca

SEQ ID NO: 259498 - DNA, 33 bp, Homo sapien
agggcacagggcataaggctgtggacatagaca

SEQ ID NO: 259499 - DNA, 33 bp, Homo sapien
agaaaatgccagaatacaacacgaatgcctatt

SEQ ID NO: 259500 - DNA, 33 bp, Homo sapien
agaaaatgccagaatagaacacgaatgcctatt

SEQ ID NO: 259501 - DNA, 33 bp, Homo sapien
ttcaggcataaaaaaacgagatcttgacactta

SEQ ID NO: 259502 - DNA, 33 bp, Homo sapien
ttcaggcataaaaaaatgagatcttgacactta

SEQ ID NO: 259503 - DNA, 33 bp, Homo sapien
cccataggaaagaagaacttgagatagcaattg

SEQ ID NO: 259504 - DNA, 33 bp, Homo sapien
cccataggaaagaagatcttgagatagcaattg

SEQ ID NO: 259505 - DNA, 33 bp, Homo sapien
ttcatcaatattccaccaggagaaatcatagga

SEQ ID NO: 259506 - DNA, 33 bp, Homo sapien
ttcatcaatattccactaggagaaatcatagga

SEQ ID NO: 259507 - DNA, 33 bp, Homo sapien
tttttatcaggctataacttccttgatctttcc

SEQ ID NO: 259508 - DNA, 33 bp, Homo sapien
tttttatcaggctatagcttccttgatctttcc

SEQ ID NO: 259509 - DNA, 33 bp, Homo sapien
atgcagcttagatttggaggacgtgatagggtg

SEQ ID NO: 259510 - DNA, 33 bp, Homo sapien
atgcagcttagatttgtaggacgtgatagggtg

SEQ ID NO: 259511 - DNA, 33 bp, Homo sapien
ttttctcaccacaaaacagagttgaattaaatg

SEQ ID NO: 259512 - DNA, 33 bp, Homo sapien
ttttctcaccacaaaagagagttgaattaaatg

SEQ ID NO: 259513 - DNA, 33 bp, Homo sapien
agtttgagtgaatgcaatcttaatggccacaat

SEQ ID NO: 259514 - DNA, 33 bp, Homo sapien
agtttgagtgaatgcagtcttaatggccacaat

SEQ ID NO: 259515 - DNA, 33 bp, Homo sapien
ggtcctcctccaatgacgggtatgaatatgaac

SEQ ID NO: 259516 - DNA, 33 bp, Homo sapien
ggtcctcctccaatgatgggtatgaatatgaac

SEQ ID NO: 259517 - DNA, 33 bp, Homo sapien
acacatgaaaatcaaaggacacacattaaatga

SEQ ID NO: 259518 - DNA, 33 bp, Homo sapien
acacatgaaaatcaaatgacacacattaaatga

SEQ ID NO: 259519 - DNA, 33 bp, Homo sapien
aatttaggttgacttccagtagatggcacataa

SEQ ID NO: 259520 - DNA, 33 bp, Homo sapien
aatttaggttgacttctagtagatggcacataa

SEQ ID NO: 259521 - DNA, 33 bp, Homo sapien
tcacctctcttcccaccgtactgcagagcacag

SEQ ID NO: 259522 - DNA, 33 bp, Homo sapien
tcacctctcttcccactgtactgcagagcacag

SEQ ID NO: 259523 - DNA, 33 bp, Homo sapien
tcacagtcacttgttacaagacagctgcttgaa

SEQ ID NO: 259524 - DNA, 33 bp, Homo sapien
tcacagtcacttgttataagacagctgcttgaa

SEQ ID NO: 259525 - DNA, 33 bp, Homo sapien
ccgccatgttctcaacacactcatcattctcac

SEQ ID NO: 259526 - DNA, 33 bp, Homo sapien
ccgccatgttctcaacgcactcatcattctcac

SEQ ID NO: 259527 - DNA, 33 bp, Homo sapien
ttagatgacccataaaagctttgtgcatgtaat

SEQ ID NO: 259528 - DNA, 33 bp, Homo sapien
ttagatgacccataaatgctttgtgcatgtaat

SEQ ID NO: 259529 - DNA, 33 bp, Homo sapien
gctttgttctttcacaataaatcatgctgctgc

SEQ ID NO: 259530 - DNA, 33 bp, Homo sapien
gctttgttctttcacagtaaatcatgctgctgc

SEQ ID NO: 259531 - DNA, 33 bp, Homo sapien
attgtcaaagaggaaaatcaccttcctagtaat

SEQ ID NO: 259532 - DNA, 33 bp, Homo sapien
attgtcaaagaggaaagtcaccttcctagtaat

SEQ ID NO: 259533 - DNA, 33 bp, Homo sapien
gattttttaaagaagccgaatgataccagtcta

SEQ ID NO: 259534 - DNA, 33 bp, Homo sapien
gattttttaaagaagctgaatgataccagtcta

SEQ ID NO: 259535 - DNA, 33 bp, Homo sapien
gggcaacaaaagttaaatctgaaccctgtggta

SEQ ID NO: 259536 - DNA, 33 bp, Homo sapien
gggcaacaaaagttaactctgaaccctgtggta

SEQ ID NO: 259537 - DNA, 33 bp, Homo sapien
agtaaaatatcacttccccatgacacaaataaa

SEQ ID NO: 259538 - DNA, 33 bp, Homo sapien
agtaaaatatcacttctccatgacacaaataaa

SEQ ID NO: 259539 - DNA, 33 bp, Homo sapien; identical to SEQ ID NO: 259537

SEQ ID NO: 259540 - DNA, 33 bp, Homo sapien; identical to SEQ ID NO: 259538

SEQ ID NO: 259541 - DNA, 33 bp, Homo sapien
aaaaggggaaggcatgaataatctaccccttat

SEQ ID NO: 259542 - DNA, 33 bp, Homo sapien
aaaaggggaaggcatggataatctaccccttat

SEQ ID NO: 259543 - DNA, 33 bp, Homo sapien
gaaggggcctgtacaaccactattcaaattcac

SEQ ID NO: 259544 - DNA, 33 bp, Homo sapien
gaaggggcctgtacaagcactattcaaattcac

SEQ ID NO: 259545 - DNA, 33 bp, Homo sapien
caggacccaggctgaaaggcacttccatcttca

SEQ ID NO: 259546 - DNA, 33 bp, Homo sapien
caggacccaggctgaagggcacttccatcttca

SEQ ID NO: 259547 - DNA, 33 bp, Homo sapien
ctttttctttctaacaatggagatcaaagtcaa

SEQ ID NO: 259548 - DNA, 33 bp, Homo sapien
ctttttctttctaacagtggagatcaaagtcaa

SEQ ID NO: 259549 - DNA, 33 bp, Homo sapien
gaaagctgaagatccaagtagaaactcaaaggt

SEQ ID NO: 259550 - DNA, 33 bp, Homo sapien
gaaagctgaagatccaggtagaaactcaaaggt

SEQ ID NO: 259551 - DNA, 33 bp, Homo sapien
gttagactggtttgaacaggcagttccagaata

SEQ ID NO: 259552 - DNA, 33 bp, Homo sapien
gttagactggtttgaagaggcagttccagaata

SEQ ID NO: 259553 - DNA, 33 bp, Homo sapien
aactgctaatagcctacggttgactggaagcct

SEQ ID NO: 259554 - DNA, 33 bp, Homo sapien
aactgctaatagcctatggttgactggaagcct

SEQ ID NO: 259555 - DNA, 33 bp, Homo sapien
attttctcaaacagaaatgcccactctagaaga

SEQ ID NO: 259556 - DNA, 33 bp, Homo sapien
attttctcaaacagaagtgcccactctagaaga

SEQ ID NO: 259557 - DNA, 33 bp, Homo sapien
tgagttttcccacaaactccatgaggtcaagtt

SEQ ID NO: 259558 - DNA, 33 bp, Homo sapien
tgagttttcccacaaattccatgaggtcaagtt

SEQ ID NO: 259559 - DNA, 33 bp, Homo sapien
ctcctgactagcctacaccctacccacactagt

SEQ ID NO: 259560 - DNA, 33 bp, Homo sapien
ctcctgactagcctacgccctacccacactagt

SEQ ID NO: 259561 - DNA, 33 bp, Homo sapien
ctcagtcagaaatgaactatttgacacatggtt

SEQ ID NO: 259562 - DNA, 33 bp, Homo sapien
ctcagtcagaaatgaagtatttgacacatggtt

SEQ ID NO: 259563 - DNA, 33 bp, Homo sapien
cctttctgggttagcaaggactaagtcagggcc

SEQ ID NO: 259564 - DNA, 33 bp, Homo sapien
cctttctgggttagcagggactaagtcagggcc

SEQ ID NO: 259565 - DNA, 33 bp, Homo sapien
ggccacgggtgagaaaacctgctgtagtctaat

SEQ ID NO: 259566 - DNA, 33 bp, Homo sapien
ggccacgggtgagaaaccctgctgtagtctaat

SEQ ID NO: 259567 - DNA, 33 bp, Homo sapien
agcttctgggtagtaacagcaagtgcaggattg

SEQ ID NO: 259568 - DNA, 33 bp, Homo sapien
agcttctgggtagtaatagcaagtgcaggattg

SEQ ID NO: 259569 - DNA, 33 bp, Homo sapien
tgcctgtcaagatgaacgagaacttaggctgga

SEQ ID NO: 259570 - DNA, 33 bp, Homo sapien
tgcctgtcaagatgaatgagaacttaggctgga

SEQ ID NO: 259571 - DNA, 33 bp, Homo sapien
tcaaattagtcctctcaccggataaacctctaa

SEQ ID NO: 259572 - DNA, 33 bp, Homo sapien
tcaaattagtcctctcgccggataaacctctaa

SEQ ID NO: 259573 - DNA, 33 bp, Homo sapien
caaattccacctctgcaaatgacgagagggagg

SEQ ID NO: 259574 - DNA, 33 bp, Homo sapien
caaattccacctctgcgaatgacgagagggagg

SEQ ID NO: 259575 - DNA, 33 bp, Homo sapien
acatagtctttcaaaaaagctgggcagctggag

SEQ ID NO: 259576 - DNA, 33 bp, Homo sapien
acatagtctttcaaaagagctgggcagctggag

SEQ ID NO: 259577 - DNA, 33 bp, Homo sapien
tcgggaccttctttggccacgttaatgcctcac

SEQ ID NO: 259578 - DNA, 33 bp, Homo sapien
tcgggaccttctttgggcacgttaatgcctcac

SEQ ID NO: 259579 - DNA, 33 bp, Homo sapien
aacctcttcctttaacacggagagcagctgtgc

SEQ ID NO: 259580 - DNA, 33 bp, Homo sapien
aacctcttcctttaacgcggagagcagctgtgc

SEQ ID NO: 259581 - DNA, 33 bp, Homo sapien
agcactgggcttccccaccaaatgcattctggg

SEQ ID NO: 259582 - DNA, 33 bp, Homo sapien
agcactgggcttccccgccaaatgcattctggg

SEQ ID NO: 259583 - DNA, 33 bp, Homo sapien
cagccatactccaaagcataaatgccaggtggg

SEQ ID NO: 259584 - DNA, 33 bp, Homo sapien
cagccatactccaaagtataaatgccaggtggg

SEQ ID NO: 259585 - DNA, 33 bp, Homo sapien
ggcctgaactgtgccgcactccctctgtgtgat

SEQ ID NO: 259586 - DNA, 33 bp, Homo sapien
ggcctgaactgtgccgtactccctctgtgtgat

SEQ ID NO: 259587 - DNA, 33 bp, Homo sapien
ctcaaagcctgctccactgacatttgcaaagca

SEQ ID NO: 259588 - DNA, 33 bp, Homo sapien
ctcaaagcctgctccattgacatttgcaaagca

SEQ ID NO: 259589 - DNA, 33 bp, Homo sapien
cagctgcctggaggatcaggagagacttcccca

SEQ ID NO: 259590 - DNA, 33 bp, Homo sapien
cagctgcctggaggattaggagagacttcccca

SEQ ID NO: 259591 - DNA, 33 bp, Homo sapien
atttctagaacacagaccctaatgagctcacag

SEQ ID NO: 259592 - DNA, 33 bp, Homo sapien
atttctagaacacagagcctaatgagctcacag

SEQ ID NO: 259593 - DNA, 33 bp, Homo sapien
ccccctaggaataccaagtggaatgctagaccc

SEQ ID NO: 259594 - DNA, 33 bp, Homo sapien
ccccctaggaataccaggtggaatgctagaccc

SEQ ID NO: 259595 - DNA, 33 bp, Homo sapien
gcaggtattgaacaacgacctactgagcagtat

SEQ ID NO: 259596 - DNA, 33 bp, Homo sapien
gcaggtattgaacaactacctactgagcagtat

SEQ ID NO: 259597 - DNA, 33 bp, Homo sapien
atgcttaagtctctgacgtaaaatggtgtattt

SEQ ID NO: 259598 - DNA, 33 bp, Homo sapien
atgcttaagtctctgatgtaaaatggtgtattt

SEQ ID NO: 259599 - DNA, 33 bp, Homo sapien
cctcatttaatttccaatgatgctgtaaaacta

SEQ ID NO: 259600 - DNA, 33 bp, Homo sapien
cctcatttaatttccagtgatgctgtaaaacta

SEQ ID NO: 259601 - DNA, 33 bp, Homo sapien
cccacagcaactaagaagctggacagggactca

SEQ ID NO: 259602 - DNA, 33 bp, Homo sapien
cccacagcaactaagaggctggacagggactca

SEQ ID NO: 259603 - DNA, 33 bp, Homo sapien
cgaggcgcgcgccatggaacagcccttagctga

SEQ ID NO: 259604 - DNA, 33 bp, Homo sapien
cgaggcgcgcgccatgtaacagcccttagctga

SEQ ID NO: 259605 - DNA, 33 bp, Homo sapien
ccaggtgtaaatcaaacgaaggcttaattactg

SEQ ID NO: 259606 - DNA, 33 bp, Homo sapien
ccaggtgtaaatcaaatgaaggcttaattactg

SEQ ID NO: 259607 - DNA, 33 bp, Homo sapien
ttaaccaacgagtaaaatggtaaggtgacttgc

SEQ ID NO: 259608 - DNA, 33 bp, Homo sapien
ttaaccaacgagtaaagtggtaaggtgacttgc

SEQ ID NO: 259609 - DNA, 33 bp, Homo sapien
ttgcaaactgcagcaactaaaagtggtgtgttt

SEQ ID NO: 259610 - DNA, 33 bp, Homo sapien
ttgcaaactgcagcaagtaaaagtggtgtgttt

SEQ ID NO: 259611 - DNA, 33 bp, Homo sapien
tttactccaagcatcacataatgttgtggtggg

SEQ ID NO: 259612 - DNA, 33 bp, Homo sapien
tttactccaagcatcatataatgttgtggtggg

SEQ ID NO: 259613 - DNA, 33 bp, Homo sapien
ctattctagcatgtagcaagcctctttttcctc

SEQ ID NO: 259614 - DNA, 33 bp, Homo sapien
ctattctagcatgtagtaagcctctttttcctc

SEQ ID NO: 259615 - DNA, 33 bp, Homo sapien
attgtactatacttgcactacttttaagaatca

SEQ ID NO: 259616 - DNA, 33 bp, Homo sapien
attgtactatacttgcgctacttttaagaatca

SEQ ID NO: 259617 - DNA, 33 bp, Homo sapien
agcaaattttgtggaaagcaggagattataagt

SEQ ID NO: 259618 - DNA, 33 bp, Homo sapien
agcaaattttgtggaaggcaggagattataagt

SEQ ID NO: 259619 - DNA, 33 bp, Homo sapien
aaaaatactactttacactatcatccacctatt

SEQ ID NO: 259620 - DNA, 33 bp, Homo sapien
aaaaatactactttacgctatcatccacctatt

SEQ ID NO: 259621 - DNA, 33 bp, Homo sapien
attacaagcactgtcactgaaattatgaaacat

SEQ ID NO: 259622 - DNA, 33 bp, Homo sapien
attacaagcactgtcattgaaattatgaaacat

SEQ ID NO: 259623 - DNA, 33 bp, Homo sapien
taaacgttagcatccactatgttaaggacaagg

SEQ ID NO: 259624 - DNA, 33 bp, Homo sapien
taaacgttagcatccattatgttaaggacaagg

SEQ ID NO: 259625 - DNA, 33 bp, Homo sapien
tgaaccaggacctttacagtatcaacatttgtg

SEQ ID NO: 259626 - DNA, 33 bp, Homo sapien
tgaaccaggacctttatagtatcaacatttgtg

SEQ ID NO: 259627 - DNA, 33 bp, Homo sapien
tccagtccataagataacatttaaagtatgtac

SEQ ID NO: 259628 - DNA, 33 bp, Homo sapien
tccagtccataagataccatttaaagtatgtac

SEQ ID NO: 259629 - DNA, 33 bp, Homo sapien
accagtttttttcctgaagatagcctatactac

SEQ ID NO: 259630 - DNA, 33 bp, Homo sapien
accagtttttttcctgcagatagcctatactac

SEQ ID NO: 259631 - DNA, 33 bp, Homo sapien
tgtacacctaagagtgacaatgacacgtggttg

SEQ ID NO: 259632 - DNA, 33 bp, Homo sapien
tgtacacctaagagtggcaatgacacgtggttg

SEQ ID NO: 259633 - DNA, 33 bp, Homo sapien
atgacactaagccctacgagtgctagagttatc

SEQ ID NO: 259634 - DNA, 33 bp, Homo sapien
atgacactaagccctatgagtgctagagttatc

SEQ ID NO: 259635 - DNA, 33 bp, Homo sapien
taagtaactagggaggaactcttagtactaaca

SEQ ID NO: 259636 - DNA, 33 bp, Homo sapien
taagtaactagggagggactcttagtactaaca

SEQ ID NO: 259637 - DNA, 33 bp, Homo sapien
attaagcgaagaagcaatgaaagctgtctagac

SEQ ID NO: 259638 - DNA, 33 bp, Homo sapien
attaagcgaagaagcagtgaaagctgtctagac

SEQ ID NO: 259639 - DNA, 33 bp, Homo sapien
taaaaagtatgaagagaaacaatgggaaataag

SEQ ID NO: 259640 - DNA, 33 bp, Homo sapien
taaaaagtatgaagaggaacaatgggaaataag

SEQ ID NO: 259641 - DNA, 33 bp, Homo sapien
tacacagaaagcatataacataaggaagtagaa

SEQ ID NO: 259642 - DNA, 33 bp, Homo sapien
tacacagaaagcatatgacataaggaagtagaa

SEQ ID NO: 259643 - DNA, 33 bp, Homo sapien
agtgctaggcttgagtcaaacggtggaaaaatt

SEQ ID NO: 259644 - DNA, 33 bp, Homo sapien
agtgctaggcttgagttaaacggtggaaaaatt

SEQ ID NO: 259645 - DNA, 33 bp, Homo sapien
cacaggttatgtgtgcaaactaaactataacta

SEQ ID NO: 259646 - DNA, 33 bp, Homo sapien
cacaggttatgtgtgcgaactaaactataacta

SEQ ID NO: 259647 - DNA, 33 bp, Homo sapien
tacagtatgtatcagcagaaaaacaaagatgtt

SEQ ID NO: 259648 - DNA, 33 bp, Homo sapien
tacagtatgtatcagctgaaaaacaaagatgtt

SEQ ID NO: 259649 - DNA, 33 bp, Homo sapien
gaaaccaaaaccaaaggcagattcacacttggg

SEQ ID NO: 259650 - DNA, 33 bp, Homo sapien
gaaaccaaaaccaaagtcagattcacacttggg

SEQ ID NO: 259651 - DNA, 33 bp, Homo sapien
tgttacctcatttggcaaaaagtaagaaatggt

SEQ ID NO: 259652 - DNA, 33 bp, Homo sapien
tgttacctcatttggcgaaaagtaagaaatggt

SEQ ID NO: 259653 - DNA, 33 bp, Homo sapien
tgtagtctggaaggagcaaaagaataagaatat

SEQ ID NO: 259654 - DNA, 33 bp, Homo sapien
tgtagtctggaaggaggaaaagaataagaatat

SEQ ID NO: 259655 - DNA, 33 bp, Homo sapien
aaggggagaattgctacagtcatgttcttgagg

SEQ ID NO: 259656 - DNA, 33 bp, Homo sapien
aaggggagaattgctatagtcatgttcttgagg

SEQ ID NO: 259657 - DNA, 33 bp, Homo sapien
aagctctttactgatacggaagtagtgaatata

SEQ ID NO: 259658 - DNA, 33 bp, Homo sapien
aagctctttactgatatggaagtagtgaatata

SEQ ID NO: 259659 - DNA, 33 bp, Homo sapien
caattacttacttcccacacagtctcttcacct

SEQ ID NO: 259660 - DNA, 33 bp, Homo sapien
caattacttacttcccgcacagtctcttcacct

SEQ ID NO: 259661 - DNA, 33 bp, Homo sapien
gttgtgtgaatgacaaaccaaccagaatcaatt

SEQ ID NO: 259662 - DNA, 33 bp, Homo sapien
gttgtgtgaatgacaagccaaccagaatcaatt

SEQ ID NO: 259663 - DNA, 33 bp, Homo sapien
gtcaccgttctacccaaattggatcttgagaca

SEQ ID NO: 259664 - DNA, 33 bp, Homo sapien
gtcaccgttctacccagattggatcttgagaca

SEQ ID NO: 259665 - DNA, 33 bp, Homo sapien
taattcctgtatctgcacttcctcggctcaggg

SEQ ID NO: 259666 - DNA, 33 bp, Homo sapien
taattcctgtatctgcgcttcctcggctcaggg

SEQ ID NO: 259667 - DNA, 33 bp, Homo sapien
atgttgtttttcctgaggcataatggattgact

SEQ ID NO: 259668 - DNA, 33 bp, Homo sapien
atgttgtttttcctgatgcataatggattgact

SEQ ID NO: 259669 - DNA, 33 bp, Homo sapien
gaggccggctcaatcactgaaaatattcaaagc

SEQ ID NO: 259670 - DNA, 33 bp, Homo sapien
gaggccggctcaatcagtgaaaatattcaaagc

SEQ ID NO: 259671 - DNA, 33 bp, Homo sapien
cttaatgactgggacacgttctgaaaaatgtgt

SEQ ID NO: 259672 - DNA, 33 bp, Homo sapien
cttaatgactgggacatgttctgaaaaatgtgt

SEQ ID NO: 259673 - DNA, 33 bp, Homo sapien
ttcatcccaaaggtaacgcccatcgcttctgga

SEQ ID NO: 259674 - DNA, 33 bp, Homo sapien
ttcatcccaaaggtaatgcccatcgcttctgga

SEQ ID NO: 259675 - DNA, 33 bp, Homo sapien; identical to SEQ ID NO: 259673

SEQ ID NO: 259676 - DNA, 33 bp, Homo sapien; identical to SEQ ID NO: 259674

SEQ ID NO: 259677 - DNA, 33 bp, Homo sapien
tgggcccttgtatgtacgatctctgtgatccca

SEQ ID NO: 259678 - DNA, 33 bp, Homo sapien
tgggcccttgtatgtatgatctctgtgatccca

SEQ ID NO: 259679 - DNA, 33 bp, Homo sapien
aagccttacacttacaatcatctgatattgcaa

SEQ ID NO: 259680 - DNA, 33 bp, Homo sapien
aagccttacacttacagtcatctgatattgcaa

SEQ ID NO: 259681 - DNA, 33 bp, Homo sapien
ataccttttctgaaacagtaagaaagcatcctt

SEQ ID NO: 259682 - DNA, 33 bp, Homo sapien
ataccttttctgaaacggtaagaaagcatcctt

SEQ ID NO: 259683 - DNA, 33 bp, Homo sapien
acattcaaccttaaaaagaacatcagagttttt

SEQ ID NO: 259684 - DNA, 33 bp, Homo sapien
acattcaaccttaaaacgaacatcagagttttt

SEQ ID NO: 259685 - DNA, 33 bp, Homo sapien; identical to SEQ ID NO: 259683

SEQ ID NO: 259686 - DNA, 33 bp, Homo sapien; identical to SEQ ID NO: 259684

SEQ ID NO: 259687 - DNA, 33 bp, Homo sapien
tctaagtctttgaagccgaactatatatatata

SEQ ID NO: 259688 - DNA, 33 bp, Homo sapien
tctaagtctttgaagcggaactatatatatata

SEQ ID NO: 259689 - DNA, 33 bp, Homo sapien
gtgggagttgtaggaaccccaacttgaagccaa

SEQ ID NO: 259690 - DNA, 33 bp, Homo sapien
gtgggagttgtaggaatcccaacttgaagccaa

SEQ ID NO: 259691 - DNA, 33 bp, Homo sapien
gctcccagaccctggtcaataattcatggcgcc

SEQ ID NO: 259692 - DNA, 33 bp, Homo sapien
gctcccagaccctggttaataattcatggcgcc

SEQ ID NO: 259693 - DNA, 33 bp, Homo sapien
ataccttgaaagcaggacaaaactagcactaaa

SEQ ID NO: 259694 - DNA, 33 bp, Homo sapien
ataccttgaaagcagggcaaaactagcactaaa

SEQ ID NO: 259695 - DNA, 33 bp, Homo sapien
ccctcttcctatagcacgaccataagtagcatc

SEQ ID NO: 259696 - DNA, 33 bp, Homo sapien
ccctcttcctatagcatgaccataagtagcatc

SEQ ID NO: 259697 - DNA, 33 bp, Homo sapien; identical to SEQ ID NO: 259695

SEQ ID NO: 259698 - DNA, 33 bp, Homo sapien; identical to SEQ ID NO: 259696

SEQ ID NO: 259699 - DNA, 33 bp, Homo sapien
gcctaacattgatggtaaaattacttctccctc

SEQ ID NO: 259700 - DNA, 33 bp, Homo sapien
gcctaacattgatggtgaaattacttctccctc

SEQ ID NO: 259701 - DNA, 33 bp, Homo sapien
aatttctccactgtcactaagatttctcctctg

SEQ ID NO: 259702 - DNA, 33 bp, Homo sapien
aatttctccactgtcagtaagatttctcctctg

SEQ ID NO: 259703 - DNA, 33 bp, Homo sapien
tctgatgtcctcagaaatggctcaactaaatat

SEQ ID NO: 259704 - DNA, 33 bp, Homo sapien
tctgatgtcctcagaagtggctcaactaaatat

SEQ ID NO: 259705 - DNA, 33 bp, Homo sapien
actatgtaacagacaaaagtcaacttctatatt

SEQ ID NO: 259706 - DNA, 33 bp, Homo sapien
actatgtaacagacaagagtcaacttctatatt

SEQ ID NO: 259707 - DNA, 33 bp, Homo sapien
cttgtaccaacgcctacctgcgcactttgaaca

SEQ ID NO: 259708 - DNA, 33 bp, Homo sapien
cttgtaccaacgcctatctgcgcactttgaaca

SEQ ID NO: 259709 - DNA, 33 bp, Homo sapien
ttttcctagagaactccaaagccggagaacaaa

SEQ ID NO: 259710 - DNA, 33 bp, Homo sapien
ttttcctagagaactctaaagccggagaacaaa

SEQ ID NO: 259711 - DNA, 33 bp, Homo sapien
tatttcccaactgtgccgacaacttcatgggta

SEQ ID NO: 259712 - DNA, 33 bp, Homo sapien
tatttcccaactgtgctgacaacttcatgggta

SEQ ID NO: 259713 - DNA, 33 bp, Homo sapien
cccattctattcaaagccattcctctactcact

SEQ ID NO: 259714 - DNA, 33 bp, Homo sapien
cccattctattcaaagtcattcctctactcact

SEQ ID NO: 259715 - DNA, 33 bp, Homo sapien
tctgtcttgcttttcaggtatctctccactctc

SEQ ID NO: 259716 - DNA, 33 bp, Homo sapien
tctgtcttgcttttcatgtatctctccactctc

SEQ ID NO: 259717 - DNA, 33 bp, Homo sapien
tgtcttctgccacagaagttttggtattcttca

SEQ ID NO: 259718 - DNA, 33 bp, Homo sapien
tgtcttctgccacagatgttttggtattcttca

SEQ ID NO: 259719 - DNA, 33 bp, Homo sapien
atatctagaaaatacccatcgaaatagcatgaa

SEQ ID NO: 259720 - DNA, 33 bp, Homo sapien
atatctagaaaatacctatcgaaatagcatgaa

SEQ ID NO: 259721 - DNA, 33 bp, Homo sapien
acctgtgttccatgtacagaaaatggcagataa

SEQ ID NO: 259722 - DNA, 33 bp, Homo sapien
acctgtgttccatgtagagaaaatggcagataa

SEQ ID NO: 259723 - DNA, 33 bp, Homo sapien
aaagattgaaataagccgacggataatggttcc

SEQ ID NO: 259724 - DNA, 33 bp, Homo sapien
aaagattgaaataagctgacggataatggttcc

SEQ ID NO: 259725 - DNA, 33 bp, Homo sapien
acagctgaaaggatacaagtattttcagataag

SEQ ID NO: 259726 - DNA, 33 bp, Homo sapien
acagctgaaaggatacgagtattttcagataag

SEQ ID NO: 259727 - DNA, 33 bp, Homo sapien
ttgtcagtgcaccctcagaaagaggtcactgaa

SEQ ID NO: 259728 - DNA, 33 bp, Homo sapien
ttgtcagtgcaccctcggaaagaggtcactgaa

SEQ ID NO: 259729 - DNA, 33 bp, Homo sapien
aaacaaaaaatgtgaccaaacaccataaattca

SEQ ID NO: 259730 - DNA, 33 bp, Homo sapien
aaacaaaaaatgtgactaaacaccataaattca

SEQ ID NO: 259731 - DNA, 33 bp, Homo sapien
ttatagaagcaattgacacatttggaaaaatca

SEQ ID NO: 259732 - DNA, 33 bp, Homo sapien
ttatagaagcaattgatacatttggaaaaatca

SEQ ID NO: 259733 - DNA, 33 bp, Homo sapien
aatcacagttggcaaaatcatataaacaggtct

SEQ ID NO: 259734 - DNA, 33 bp, Homo sapien
aatcacagttggcaaagtcatataaacaggtct

SEQ ID NO: 259735 - DNA, 33 bp, Homo sapien
agattggcagctgaaacacaagagcaagaccca

SEQ ID NO: 259736 - DNA, 33 bp, Homo sapien
agattggcagctgaaatacaagagcaagaccca

SEQ ID NO: 259737 - DNA, 33 bp, Homo sapien
cttccttagctcattcacaaatcaaataccaac

SEQ ID NO: 259738 - DNA, 33 bp, Homo sapien
cttccttagctcattcgcaaatcaaataccaac

SEQ ID NO: 259739 - DNA, 33 bp, Homo sapien
caccctgacatcatgaaactggacagggaagac

SEQ ID NO: 259740 - DNA, 33 bp, Homo sapien
caccctgacatcatgagactggacagggaagac

SEQ ID NO: 259741 - DNA, 33 bp, Homo sapien
ttactgagttgagagagcccaaacagaagagag

SEQ ID NO: 259742 - DNA, 33 bp, Homo sapien
ttactgagttgagagatcccaaacagaagagag

SEQ ID NO: 259743 - DNA, 33 bp, Homo sapien
gatgcaccaggagtaacggattttggtggagaa

SEQ ID NO: 259744 - DNA, 33 bp, Homo sapien
gatgcaccaggagtaatggattttggtggagaa

SEQ ID NO: 259745 - DNA, 33 bp, Homo sapien
atgttaagaatggaaacgctgattcccctcaga

SEQ ID NO: 259746 - DNA, 33 bp, Homo sapien
atgttaagaatggaaatgctgattcccctcaga

SEQ ID NO: 259747 - DNA, 33 bp, Homo sapien
accaggctcactctcacggtggttctggggatg

SEQ ID NO: 259748 - DNA, 33 bp, Homo sapien
accaggctcactctcatggtggttctggggatg

SEQ ID NO: 259749 - DNA, 33 bp, Homo sapien
gaccacgggcactgccaacgctctccctccggg

SEQ ID NO: 259750 - DNA, 33 bp, Homo sapien
gaccacgggcactgccgacgctctccctccggg

SEQ ID NO: 259751 - DNA, 33 bp, Homo sapien
taatcaaaacacaggcactgcttgcacactgta

SEQ ID NO: 259752 - DNA, 33 bp, Homo sapien
taatcaaaacacaggcgctgcttgcacactgta

SEQ ID NO: 259753 - DNA, 33 bp, Homo sapien
gcaacagattctcttcaagcccctgcactgtca

SEQ ID NO: 259754 - DNA, 33 bp, Homo sapien
gcaacagattctcttcgagcccctgcactgtca

SEQ ID NO: 259755 - DNA, 33 bp, Homo sapien
ctggacctcaggtgctaaaggagaatgaagact

SEQ ID NO: 259756 - DNA, 33 bp, Homo sapien
ctggacctcaggtgctgaaggagaatgaagact

SEQ ID NO: 259757 - DNA, 33 bp, Homo sapien
gacatcttcttccaaactaagttttacaccaaa

SEQ ID NO: 259758 - DNA, 33 bp, Homo sapien
gacatcttcttccaaagtaagttttacaccaaa

SEQ ID NO: 259759 - DNA, 33 bp, Homo sapien
accaggagccaaaaaaactgctgcctcgacatc

SEQ ID NO: 259760 - DNA, 33 bp, Homo sapien
accaggagccaaaaaacctgctgcctcgacatc

SEQ ID NO: 259761 - DNA, 33 bp, Homo sapien
acttcacgtcagtgccccgattttctcatctgt

SEQ ID NO: 259762 - DNA, 33 bp, Homo sapien
acttcacgtcagtgcctcgattttctcatctgt

SEQ ID NO: 259763 - DNA, 33 bp, Homo sapien
catgtgtctcctcctaaaaactatcagctccac

SEQ ID NO: 259764 - DNA, 33 bp, Homo sapien
catgtgtctcctcctataaactatcagctccac

SEQ ID NO: 259765 - DNA, 33 bp, Homo sapien
atcaccatgaaccacaatgattgtacaaaagcc

SEQ ID NO: 259766 - DNA, 33 bp, Homo sapien
atcaccatgaaccacattgattgtacaaaagcc

SEQ ID NO: 259767 - DNA, 33 bp, Homo sapien
atcagctacttgatataacatggcaagtttcca

SEQ ID NO: 259768 - DNA, 33 bp, Homo sapien
atcagctacttgatatgacatggcaagtttcca

SEQ ID NO: 259769 - DNA, 33 bp, Homo sapien
tagataaaaggatcacaagaatataaaatatac

SEQ ID NO: 259770 - DNA, 33 bp, Homo sapien
tagataaaaggatcacgagaatataaaatatac

SEQ ID NO: 259771 - DNA, 33 bp, Homo sapien
aatttgcaaagctaataaaaatgttctagattt

SEQ ID NO: 259772 - DNA, 33 bp, Homo sapien
aatttgcaaagctaatgaaaatgttctagattt

SEQ ID NO: 259773 - DNA, 33 bp, Homo sapien
tacatctacagatctacattacatctacaagta

SEQ ID NO: 259774 - DNA, 33 bp, Homo sapien
tacatctacagatctatattacatctacaagta

SEQ ID NO: 259775 - DNA, 33 bp, Homo sapien
accctgctcatatggaaattccattacatctac

SEQ ID NO: 259776 - DNA, 33 bp, Homo sapien
accctgctcatatggagattccattacatctac

SEQ ID NO: 259777 - DNA, 33 bp, Homo sapien
atttacatattaacacgctgatcaagacaagaa

SEQ ID NO: 259778 - DNA, 33 bp, Homo sapien
atttacatattaacactctgatcaagacaagaa

SEQ ID NO: 259779 - DNA, 33 bp, Homo sapien
gcaaatacttgaagaccacctctgagatgaaga

SEQ ID NO: 259780 - DNA, 33 bp, Homo sapien
gcaaatacttgaagactacctctgagatgaaga

SEQ ID NO: 259781 - DNA, 33 bp, Homo sapien
tcagaagctaaatgttgaacagaggtagcaaga

SEQ ID NO: 259782 - DNA, 33 bp, Homo sapien
tcagaagctaaatgtttaacagaggtagcaaga

SEQ ID NO: 259783 - DNA, 33 bp, Homo sapien
agagctgcccacatgacagacagtgctttggga

SEQ ID NO: 259784 - DNA, 33 bp, Homo sapien
agagctgcccacatgagagacagtgctttggga

SEQ ID NO: 259785 - DNA, 33 bp, Homo sapien
actcacctggctataaatatttgttgactgaat

SEQ ID NO: 259786 - DNA, 33 bp, Homo sapien
actcacctggctataagtatttgttgactgaat

SEQ ID NO: 259787 - DNA, 33 bp, Homo sapien
tcagaaaagttatggcccaaagtctgcagccag

SEQ ID NO: 259788 - DNA, 33 bp, Homo sapien
tcagaaaagttatggctcaaagtctgcagccag

SEQ ID NO: 259789 - DNA, 33 bp, Homo sapien
ggtgctggagagaatcacatctttgtcatagct

SEQ ID NO: 259790 - DNA, 33 bp, Homo sapien
ggtgctggagagaatcccatctttgtcatagct

SEQ ID NO: 259791 - DNA, 33 bp, Homo sapien
tgtaaggatcttcgtccaatacatattcaccca

SEQ ID NO: 259792 - DNA, 33 bp, Homo sapien
tgtaaggatcttcgtctaatacatattcaccca

SEQ ID NO: 259793 - DNA, 33 bp, Homo sapien
gtttgacttcacactccaataatgattttatgc

SEQ ID NO: 259794 - DNA, 33 bp, Homo sapien
gtttgacttcacactcgaataatgattttatgc

SEQ ID NO: 259795 - DNA, 33 bp, Homo sapien
cagataattggacaacacctgagtgagacgtgc

SEQ ID NO: 259796 - DNA, 33 bp, Homo sapien
cagataattggacaacccctgagtgagacgtgc

SEQ ID NO: 259797 - DNA, 33 bp, Homo sapien
atgggatgtaatgaaaagaatcgtctgttggag

SEQ ID NO: 259798 - DNA, 33 bp, Homo sapien
atgggatgtaatgaaatgaatcgtctgttggag

SEQ ID NO: 259799 - DNA, 33 bp, Homo sapien
gggagcaatgctaaaagacaactgtgggaagtc

SEQ ID NO: 259800 - DNA, 33 bp, Homo sapien
gggagcaatgctaaaatacaactgtgggaagtc

SEQ ID NO: 259801 - DNA, 33 bp, Homo sapien
tgtgtccctgcaccagcattaccttaacccgtg

SEQ ID NO: 259802 - DNA, 33 bp, Homo sapien
tgtgtccctgcaccaggattaccttaacccgtg

SEQ ID NO: 259803 - DNA, 33 bp, Homo sapien
gccctcaagccagtgcaaaaatgtggaccccgc

SEQ ID NO: 259804 - DNA, 33 bp, Homo sapien
gccctcaagccagtgcgaaaatgtggaccccgc

SEQ ID NO: 259805 - DNA, 33 bp, Homo sapien
actgctggtttcaggacaatcacagagtcatgt

SEQ ID NO: 259806 - DNA, 33 bp, Homo sapien
actgctggtttcaggataatcacagagtcatgt

SEQ ID NO: 259807 - DNA, 33 bp, Homo sapien
ggggagtccaaacaccactttctaagtttgcac

SEQ ID NO: 259808 - DNA, 33 bp, Homo sapien
ggggagtccaaacaccgctttctaagtttgcac

SEQ ID NO: 259809 - DNA, 33 bp, Homo sapien
ttcagggtatcccacaataagatggaatcaggt

SEQ ID NO: 259810 - DNA, 33 bp, Homo sapien
ttcagggtatcccacagtaagatggaatcaggt

SEQ ID NO: 259811 - DNA, 33 bp, Homo sapien
gagagggcacgctgaagccagtgtctgctcggc

SEQ ID NO: 259812 - DNA, 33 bp, Homo sapien
gagagggcacgctgaatccagtgtctgctcggc

SEQ ID NO: 259813 - DNA, 33 bp, Homo sapien
ccttactgtttttcacagcacacataggtttgc

SEQ ID NO: 259814 - DNA, 33 bp, Homo sapien
ccttactgtttttcacggcacacataggtttgc

SEQ ID NO: 259815 - DNA, 33 bp, Homo sapien
atcgtaggccaatgaacccttgaatttgtggtc

SEQ ID NO: 259816 - DNA, 33 bp, Homo sapien
atcgtaggccaatgaatccttgaatttgtggtc

SEQ ID NO: 259817 - DNA, 33 bp, Homo sapien
agtctacatttttaacaaggtactctaagtgat

SEQ ID NO: 259818 - DNA, 33 bp, Homo sapien
agtctacatttttaaccaggtactctaagtgat

SEQ ID NO: 259819 - DNA, 33 bp, Homo sapien
caatcaaatgtaaagacatagaaccctttaaat

SEQ ID NO: 259820 - DNA, 33 bp, Homo sapien
caatcaaatgtaaagatatagaaccctttaaat

SEQ ID NO: 259821 - DNA, 33 bp, Homo sapien
aacactgctgtaaaccacccatcatggtcagta

SEQ ID NO: 259822 - DNA, 33 bp, Homo sapien
aacactgctgtaaaccgcccatcatggtcagta

SEQ ID NO: 259823 - DNA, 33 bp, Homo sapien
ttcaacttcagacatacatttgtgtgtttatat

SEQ ID NO: 259824 - DNA, 33 bp, Homo sapien
ttcaacttcagacatatatttgtgtgtttatat

SEQ ID NO: 259825 - DNA, 33 bp, Homo sapien
atgaagcacataaacaatatggtaacttttata

SEQ ID NO: 259826 - DNA, 33 bp, Homo sapien
atgaagcacataaacagtatggtaacttttata

SEQ ID NO: 259827 - DNA, 33 bp, Homo sapien
ctactttgattgaatacgttagttcgaatcact

SEQ ID NO: 259828 - DNA, 33 bp, Homo sapien
ctactttgattgaatatgttagttcgaatcact

SEQ ID NO: 259829 - DNA, 33 bp, Homo sapien
cttgttttgacagttgaagcaaagagttgtaaa

SEQ ID NO: 259830 - DNA, 33 bp, Homo sapien
cttgttttgacagttgtagcaaagagttgtaaa

SEQ ID NO: 259831 - DNA, 33 bp, Homo sapien
atatctttcagcactacaatgttggctccatga

SEQ ID NO: 259832 - DNA, 33 bp, Homo sapien
atatctttcagcactagaatgttggctccatga

SEQ ID NO: 259833 - DNA, 33 bp, Homo sapien
atgacagagctggtaccaaagacgaatggaatg

SEQ ID NO: 259834 - DNA, 33 bp, Homo sapien
atgacagagctggtactaaagacgaatggaatg

SEQ ID NO: 259835 - DNA, 33 bp, Homo sapien
tacactggacagatgacaaaaatgcccacttga

SEQ ID NO: 259836 - DNA, 33 bp, Homo sapien
tacactggacagatgataaaaatgcccacttga

SEQ ID NO: 259837 - DNA, 33 bp, Homo sapien
tcaaccagtttttccactagtgtacttctgttt

SEQ ID NO: 259838 - DNA, 33 bp, Homo sapien
tcaaccagtttttccattagtgtacttctgttt

SEQ ID NO: 259839 - DNA, 33 bp, Homo sapien
gggtctaaggaggaagacaccttgacatattta

SEQ ID NO: 259840 - DNA, 33 bp, Homo sapien
gggtctaaggaggaaggcaccttgacatattta

SEQ ID NO: 259841 - DNA, 33 bp, Homo sapien
accattctgggccacaatcaatttttccattaa

SEQ ID NO: 259842 - DNA, 33 bp, Homo sapien
accattctgggccacagtcaatttttccattaa

SEQ ID NO: 259843 - DNA, 33 bp, Homo sapien
aaaatgtgaaataccacgcgggggaaattgttg

SEQ ID NO: 259844 - DNA, 33 bp, Homo sapien
aaaatgtgaaataccatgcgggggaaattgttg

SEQ ID NO: 259845 - DNA, 33 bp, Homo sapien
catataacagtcttcacgtcttttgtaccagtc

SEQ ID NO: 259846 - DNA, 33 bp, Homo sapien
catataacagtcttcatgtcttttgtaccagtc

SEQ ID NO: 259847 - DNA, 33 bp, Homo sapien
cagagcatatcacatacagtaagggcaagtatt

SEQ ID NO: 259848 - DNA, 33 bp, Homo sapien
cagagcatatcacatatagtaagggcaagtatt

SEQ ID NO: 259849 - DNA, 33 bp, Homo sapien
gaactaaaaagtggtacagataaagtgtcaata

SEQ ID NO: 259850 - DNA, 33 bp, Homo sapien
gaactaaaaagtggtatagataaagtgtcaata

SEQ ID NO: 259851 - DNA, 33 bp, Homo sapien
gattcctaagatgctgaaagttatatagaggag

SEQ ID NO: 259852 - DNA, 33 bp, Homo sapien
gattcctaagatgctgtaagttatatagaggag

SEQ ID NO: 259853 - DNA, 33 bp, Homo sapien
ctgatatttttctgtcaagtcataaaacaccag

SEQ ID NO: 259854 - DNA, 33 bp, Homo sapien
ctgatatttttctgtcgagtcataaaacaccag

SEQ ID NO: 259855 - DNA, 33 bp, Homo sapien
aacttctggaaacacaaatttgaatgagactta

SEQ ID NO: 259856 - DNA, 33 bp, Homo sapien
aacttctggaaacacagatttgaatgagactta

SEQ ID NO: 259857 - DNA, 33 bp, Homo sapien
gcccttaaaatcaccactgccaggtaagtgtcc

SEQ ID NO: 259858 - DNA, 33 bp, Homo sapien
gcccttaaaatcaccattgccaggtaagtgtcc

SEQ ID NO: 259859 - DNA, 33 bp, Homo sapien
ccagttctctctttaacgctatgtctatgagag

SEQ ID NO: 259860 - DNA, 33 bp, Homo sapien
ccagttctctctttaatgctatgtctatgagag

SEQ ID NO: 259861 - DNA, 33 bp, Homo sapien
atgtggagcttttcctaaacacgtgcgtgcaca

SEQ ID NO: 259862 - DNA, 33 bp, Homo sapien
atgtggagcttttcctcaacacgtgcgtgcaca

SEQ ID NO: 259863 - DNA, 33 bp, Homo sapien
gggtatttggagttaactgattggaccaaagcc

SEQ ID NO: 259864 - DNA, 33 bp, Homo sapien
gggtatttggagttaagtgattggaccaaagcc

SEQ ID NO: 259865 - DNA, 33 bp, Homo sapien
agtactcaaatgaaacggagcttcttgtgttca

SEQ ID NO: 259866 - DNA, 33 bp, Homo sapien
agtactcaaatgaaactgagcttcttgtgttca

SEQ ID NO: 259867 - DNA, 33 bp, Homo sapien
attcgcatttactgaaagaacaagttaacacca

SEQ ID NO: 259868 - DNA, 33 bp, Homo sapien
attcgcatttactgaaggaacaagttaacacca

SEQ ID NO: 259869 - DNA, 33 bp, Homo sapien
tgtgttttaagtgtgacgaggtggcaaggtgtg

SEQ ID NO: 259870 - DNA, 33 bp, Homo sapien
tgtgttttaagtgtgaggaggtggcaaggtgtg

SEQ ID NO: 259871 - DNA, 33 bp, Homo sapien
ttataatcatgcttaaaagaccactataaacta

SEQ ID NO: 259872 - DNA, 33 bp, Homo sapien
ttataatcatgcttaagagaccactataaacta

SEQ ID NO: 259873 - DNA, 33 bp, Homo sapien
cacttaaacaaggagtaacaatattaaccagtt

SEQ ID NO: 259874 - DNA, 33 bp, Homo sapien
cacttaaacaaggagtgacaatattaaccagtt

SEQ ID NO: 259875 - DNA, 33 bp, Homo sapien
gtcagggttcacaccaaaagaaaacgctcactc

SEQ ID NO: 259876 - DNA, 33 bp, Homo sapien
gtcagggttcacaccagaagaaaacgctcactc

SEQ ID NO: 259877 - DNA, 33 bp, Homo sapien
atggaaaccttgttccaaatccatcaattgatt

SEQ ID NO: 259878 - DNA, 33 bp, Homo sapien
atggaaaccttgttccgaatccatcaattgatt

SEQ ID NO: 259879 - DNA, 33 bp, Homo sapien
aggaggcatgatccctcacgagaattagtgtcc

SEQ ID NO: 259880 - DNA, 33 bp, Homo sapien
aggaggcatgatccctgacgagaattagtgtcc

SEQ ID NO: 259881 - DNA, 33 bp, Homo sapien
aactccatagcctgcaatgacctctcaatatga

SEQ ID NO: 259882 - DNA, 33 bp, Homo sapien
aactccatagcctgcagtgacctctcaatatga

SEQ ID NO: 259883 - DNA, 33 bp, Homo sapien
gaaaacagtgcagtcactacaaagccttcgtaa

SEQ ID NO: 259884 - DNA, 33 bp, Homo sapien
gaaaacagtgcagtcattacaaagccttcgtaa

SEQ ID NO: 259885 - DNA, 33 bp, Homo sapien
aagtgaacaaagtgcacggaggagacatcaacc

SEQ ID NO: 259886 - DNA, 33 bp, Homo sapien
aagtgaacaaagtgcatggaggagacatcaacc

SEQ ID NO: 259887 - DNA, 33 bp, Homo sapien
ttgtagcatttaacagcatctgtgctagattat

SEQ ID NO: 259888 - DNA, 33 bp, Homo sapien
ttgtagcatttaacagtatctgtgctagattat

SEQ ID NO: 259889 - DNA, 33 bp, Homo sapien
gaactaatacattgtgaaagctgcattggtaat

SEQ ID NO: 259890 - DNA, 33 bp, Homo sapien
gaactaatacattgtggaagctgcattggtaat

SEQ ID NO: 259891 - DNA, 33 bp, Homo sapien
cctttgaatagcttcactaacttttagcaaaca

SEQ ID NO: 259892 - DNA, 33 bp, Homo sapien
cctttgaatagcttcattaacttttagcaaaca

SEQ ID NO: 259893 - DNA, 33 bp, Homo sapien
cccattcctagtcaaacgccagcttcccagaaa

SEQ ID NO: 259894 - DNA, 33 bp, Homo sapien
cccattcctagtcaaatgccagcttcccagaaa

SEQ ID NO: 259895 - DNA, 33 bp, Homo sapien
actggtggtattttcaccgtcaagaatgagaac

SEQ ID NO: 259896 - DNA, 33 bp, Homo sapien
actggtggtattttcagcgtcaagaatgagaac

SEQ ID NO: 259897 - DNA, 33 bp, Homo sapien
aatttttttatggtagccggtgtatactgtctt

SEQ ID NO: 259898 - DNA, 33 bp, Homo sapien
aatttttttatggtagtcggtgtatactgtctt

SEQ ID NO: 259899 - DNA, 33 bp, Homo sapien
aacgaacacacgcccactggcagcattctaagc

SEQ ID NO: 259900 - DNA, 33 bp, Homo sapien
aacgaacacacgcccattggcagcattctaagc

SEQ ID NO: 259901 - DNA, 33 bp, Homo sapien
cactatacctacacacaattgtactagaaacca

SEQ ID NO: 259902 - DNA, 33 bp, Homo sapien
cactatacctacacacgattgtactagaaacca

SEQ ID NO: 259903 - DNA, 33 bp, Homo sapien
gctgacaagtaatgacaccatgaagcagcgttc

SEQ ID NO: 259904 - DNA, 33 bp, Homo sapien
gctgacaagtaatgacgccatgaagcagcgttc

SEQ ID NO: 259905 - DNA, 33 bp, Homo sapien
tgttttaagaagtctacgaggttaaattatacg

SEQ ID NO: 259906 - DNA, 33 bp, Homo sapien
tgttttaagaagtctatgaggttaaattatacg

SEQ ID NO: 259907 - DNA, 33 bp, Homo sapien
ttatgcaaggtatagaatagtcccagtttgact

SEQ ID NO: 259908 - DNA, 33 bp, Homo sapien
ttatgcaaggtatagagtagtcccagtttgact

SEQ ID NO: 259909 - DNA, 33 bp, Homo sapien
ttgcgtatttcagaaaaagtcatcaaggcagat

SEQ ID NO: 259910 - DNA, 33 bp, Homo sapien
ttgcgtatttcagaaacagtcatcaaggcagat

SEQ ID NO: 259911 - DNA, 33 bp, Homo sapien
tcatgcatacctctacagcaatcctgaccactg

SEQ ID NO: 259912 - DNA, 33 bp, Homo sapien
tcatgcatacctctacggcaatcctgaccactg

SEQ ID NO: 259913 - DNA, 33 bp, Homo sapien
tcatgccccatggtacaatggcctcgcatttca

SEQ ID NO: 259914 - DNA, 33 bp, Homo sapien
tcatgccccatggtacgatggcctcgcatttca

SEQ ID NO: 259915 - DNA, 33 bp, Homo sapien
gaacagattatgggaacgacaagaatgtttact

SEQ ID NO: 259916 - DNA, 33 bp, Homo sapien
gaacagattatgggaaggacaagaatgtttact

SEQ ID NO: 259917 - DNA, 33 bp, Homo sapien
cgcctgctgttcatagcatatagctcctagaag

SEQ ID NO: 259918 - DNA, 33 bp, Homo sapien
cgcctgctgttcatagtatatagctcctagaag

SEQ ID NO: 259919 - DNA, 33 bp, Homo sapien
caatgtagaaaacaaacaccacattggaagatt

SEQ ID NO: 259920 - DNA, 33 bp, Homo sapien
caatgtagaaaacaaagaccacattggaagatt

SEQ ID NO: 259921 - DNA, 33 bp, Homo sapien
aggtgcagaaaacaaaataacttgatcacagta

SEQ ID NO: 259922 - DNA, 33 bp, Homo sapien
aggtgcagaaaacaaagtaacttgatcacagta

SEQ ID NO: 259923 - DNA, 33 bp, Homo sapien
cagctatggaaatgctcaagtatttgtaaatgg

SEQ ID NO: 259924 - DNA, 33 bp, Homo sapien
cagctatggaaatgctgaagtatttgtaaatgg

SEQ ID NO: 259925 - DNA, 33 bp, Homo sapien
tggccatgtttgtctacagcctcttgccaatgc

SEQ ID NO: 259926 - DNA, 33 bp, Homo sapien
tggccatgtttgtctagagcctcttgccaatgc

SEQ ID NO: 259927 - DNA, 33 bp, Homo sapien
acaggatcatgagagagataattacctgcaaca

SEQ ID NO: 259928 - DNA, 33 bp, Homo sapien
acaggatcatgagagatataattacctgcaaca

SEQ ID NO: 259929 - DNA, 33 bp, Homo sapien
gaaaggtgttcacaaccaaagtctattggctca

SEQ ID NO: 259930 - DNA, 33 bp, Homo sapien
gaaaggtgttcacaactaaagtctattggctca

SEQ ID NO: 259931 - DNA, 33 bp, Homo sapien
aatcactattttccaacgctatttcagagcctt

SEQ ID NO: 259932 - DNA, 33 bp, Homo sapien
aatcactattttccaatgctatttcagagcctt

SEQ ID NO: 259933 - DNA, 33 bp, Homo sapien
aacttttaaagacttgaaattctgtattattat

SEQ ID NO: 259934 - DNA, 33 bp, Homo sapien
aacttttaaagacttggaattctgtattattat

SEQ ID NO: 259935 - DNA, 33 bp, Homo sapien
agttaacatagtagctaagatgaagagtacctc

SEQ ID NO: 259936 - DNA, 33 bp, Homo sapien
agttaacatagtagctgagatgaagagtacctc

SEQ ID NO: 259937 - DNA, 33 bp, Homo sapien
gcataaattgtcctccaaaatttctcataggtt

SEQ ID NO: 259938 - DNA, 33 bp, Homo sapien
gcataaattgtcctccgaaatttctcataggtt

SEQ ID NO: 259939 - DNA, 33 bp, Homo sapien
gagagagagatcttaacgctgactcctctccca

SEQ ID NO: 259940 - DNA, 33 bp, Homo sapien
gagagagagatcttaatgctgactcctctccca

SEQ ID NO: 259941 - DNA, 33 bp, Homo sapien
ggacattaaggattccaaatgtttgttcctgtc

SEQ ID NO: 259942 - DNA, 33 bp, Homo sapien
ggacattaaggattccgaatgtttgttcctgtc

SEQ ID NO: 259943 - DNA, 33 bp, Homo sapien
atcatgacattcgctagcaggaacacctgacat

SEQ ID NO: 259944 - DNA, 33 bp, Homo sapien
atcatgacattcgctatcaggaacacctgacat

SEQ ID NO: 259945 - DNA, 33 bp, Homo sapien
tgagtaagccaaaacaccgcatcggtggacagg

SEQ ID NO: 259946 - DNA, 33 bp, Homo sapien
tgagtaagccaaaacagcgcatcggtggacagg

SEQ ID NO: 259947 - DNA, 33 bp, Homo sapien
tgacagtaccaaacaccggtgaagatacgcaaa

SEQ ID NO: 259948 - DNA, 33 bp, Homo sapien
tgacagtaccaaacactggtgaagatacgcaaa

SEQ ID NO: 259949 - DNA, 33 bp, Homo sapien
tatactagttactttaccacgcctagaggcaaa

SEQ ID NO: 259950 - DNA, 33 bp, Homo sapien
tatactagttactttatcacgcctagaggcaaa

SEQ ID NO: 259951 - DNA, 33 bp, Homo sapien
tgagcttcctctcatcaatcttaatatttacac

SEQ ID NO: 259952 - DNA, 33 bp, Homo sapien
tgagcttcctctcatcgatcttaatatttacac

SEQ ID NO: 259953 - DNA, 33 bp, Homo sapien
ttttacactacgggtaactagccacgaattcta

SEQ ID NO: 259954 - DNA, 33 bp, Homo sapien
ttttacactacgggtacctagccacgaattcta

SEQ ID NO: 259955 - DNA, 33 bp, Homo sapien
gtgtttataaacacgcactcctaacctgttctg

SEQ ID NO: 259956 - DNA, 33 bp, Homo sapien
gtgtttataaacacgcgctcctaacctgttctg

SEQ ID NO: 259957 - DNA, 33 bp, Homo sapien
acttctttactccccaaaccactccttaacaca

SEQ ID NO: 259958 - DNA, 33 bp, Homo sapien
acttctttactccccataccactccttaacaca

SEQ ID NO: 259959 - DNA, 33 bp, Homo sapien
tagaattcagtaacagaagaaatttcaaaacaa

SEQ ID NO: 259960 - DNA, 33 bp, Homo sapien
tagaattcagtaacaggagaaatttcaaaacaa

SEQ ID NO: 259961 - DNA, 33 bp, Homo sapien
ttcaaccatgcatttccattgtgcatagcatct

SEQ ID NO: 259962 - DNA, 33 bp, Homo sapien
ttcaaccatgcatttctattgtgcatagcatct

SEQ ID NO: 259963 - DNA, 33 bp, Homo sapien
agagtttttaaagcgcactctgccttttggctc

SEQ ID NO: 259964 - DNA, 33 bp, Homo sapien
agagtttttaaagcgcgctctgccttttggctc

SEQ ID NO: 259965 - DNA, 33 bp, Homo sapien
gagttgcttctaaggacggtagcagagtttttg

SEQ ID NO: 259966 - DNA, 33 bp, Homo sapien
gagttgcttctaaggatggtagcagagtttttg

SEQ ID NO: 259967 - DNA, 33 bp, Homo sapien
ggtgatgaactcctgagtgattgcctcagctaa

SEQ ID NO: 259968 - DNA, 33 bp, Homo sapien
ggtgatgaactcctgattgattgcctcagctaa

SEQ ID NO: 259969 - DNA, 33 bp, Homo sapien
ccatctgtagcctaaaaacaatgttgccaaggg

SEQ ID NO: 259970 - DNA, 33 bp, Homo sapien
ccatctgtagcctaaagacaatgttgccaaggg

SEQ ID NO: 259971 - DNA, 33 bp, Homo sapien
atgacttaggtcagaactaagctgcaaagacta

SEQ ID NO: 259972 - DNA, 33 bp, Homo sapien
atgacttaggtcagaattaagctgcaaagacta

SEQ ID NO: 259973 - DNA, 33 bp, Homo sapien
atttgagtaagaaagcactggggtcttttctct

SEQ ID NO: 259974 - DNA, 33 bp, Homo sapien
atttgagtaagaaagcgctggggtcttttctct

SEQ ID NO: 259975 - DNA, 33 bp, Homo sapien
gaaacgatatattattgaaggatgcataattta

SEQ ID NO: 259976 - DNA, 33 bp, Homo sapien
gaaacgatatattatttaaggatgcataattta

SEQ ID NO: 259977 - DNA, 33 bp, Homo sapien
aacatcctgataaaaaatggtaacaggacattc

SEQ ID NO: 259978 - DNA, 33 bp, Homo sapien
aacatcctgataaaaattggtaacaggacattc

SEQ ID NO: 259979 - DNA, 33 bp, Homo sapien
acagagaatggtgatcacggggtttttggtgtg

SEQ ID NO: 259980 - DNA, 33 bp, Homo sapien
acagagaatggtgatcgcggggtttttggtgtg

SEQ ID NO: 259981 - DNA, 33 bp, Homo sapien
ccaggcctgtaaagtacggtgagccacagtctc

SEQ ID NO: 259982 - DNA, 33 bp, Homo sapien
ccaggcctgtaaagtatggtgagccacagtctc

SEQ ID NO: 259983 - DNA, 33 bp, Homo sapien
agttttgccaaaggtacagagtcaggtaacccc

SEQ ID NO: 259984 - DNA, 33 bp, Homo sapien
agttttgccaaaggtatagagtcaggtaacccc

SEQ ID NO: 259985 - DNA, 33 bp, Homo sapien
tggatgcatttctaccaatttgcagatggcaag

SEQ ID NO: 259986 - DNA, 33 bp, Homo sapien
tggatgcatttctaccgatttgcagatggcaag

SEQ ID NO: 259987 - DNA, 33 bp, Homo sapien
ctaaataggcattaacaggccctgggatccaac

SEQ ID NO: 259988 - DNA, 33 bp, Homo sapien
ctaaataggcattaactggccctgggatccaac

SEQ ID NO: 259989 - DNA, 33 bp, Homo sapien
tgatagtaataccttcaattggctcgcttgaga

SEQ ID NO: 259990 - DNA, 33 bp, Homo sapien
tgatagtaataccttcgattggctcgcttgaga

SEQ ID NO: 259991 - DNA, 33 bp, Homo sapien
ctttttactaaaatacactaacaatcgcctaag

SEQ ID NO: 259992 - DNA, 33 bp, Homo sapien
ctttttactaaaatacgctaacaatcgcctaag

SEQ ID NO: 259993 - DNA, 33 bp, Homo sapien
acaacaaaggatttagaacatgacataaactta

SEQ ID NO: 259994 - DNA, 33 bp, Homo sapien
acaacaaaggatttagcacatgacataaactta

SEQ ID NO: 259995 - DNA, 33 bp, Homo sapien
cctttcttttgtataaacacgggatacagacac

SEQ ID NO: 259996 - DNA, 33 bp, Homo sapien
cctttcttttgtataagcacgggatacagacac

SEQ ID NO: 259997 - DNA, 33 bp, Homo sapien
taaaaaacattgttaaactgactatccatcaat

SEQ ID NO: 259998 - DNA, 33 bp, Homo sapien
taaaaaacattgttaacctgactatccatcaat

SEQ ID NO: 259999 - DNA, 33 bp, Homo sapien
attttattaaggatgaaagcgctcagatgtaat

SEQ ID NO: 260000 - DNA, 33 bp, Homo sapien
attttattaaggatgagagcgctcagatgtaat

SEQ ID NO: 260001 - DNA, 33 bp, Homo sapien
cacgtgaatcattgtaaaggccagaatatgtag

SEQ ID NO: 260002 - DNA, 33 bp, Homo sapien
cacgtgaatcattgtagaggccagaatatgtag

SEQ ID NO: 260003 - DNA, 33 bp, Homo sapien
ggcagtagtctaagaactatggtaatagggtct

SEQ ID NO: 260004 - DNA, 33 bp, Homo sapien
ggcagtagtctaagaattatggtaatagggtct

SEQ ID NO: 260005 - DNA, 33 bp, Homo sapien
aagccccaagattacaatcagcaaggtgtagcc

SEQ ID NO: 260006 - DNA, 33 bp, Homo sapien
aagccccaagattacagtcagcaaggtgtagcc

SEQ ID NO: 260007 - DNA, 33 bp, Homo sapien
tgttttgctcagatgacccaggtgtcaagaatt

SEQ ID NO: 260008 - DNA, 33 bp, Homo sapien
tgttttgctcagatgatccaggtgtcaagaatt

SEQ ID NO: 260009 - DNA, 33 bp, Homo sapien
ttcggagcttataaaaccaggagagagacttga

SEQ ID NO: 260010 - DNA, 33 bp, Homo sapien
ttcggagcttataaaatcaggagagagacttga

SEQ ID NO: 260011 - DNA, 33 bp, Homo sapien
tagcctttaaacaagcactctgaagaagctgtg

SEQ ID NO: 260012 - DNA, 33 bp, Homo sapien
tagcctttaaacaagcgctctgaagaagctgtg

SEQ ID NO: 260013 - DNA, 33 bp, Homo sapien
tcaacccgatgctttcaagtggcgtgccttagc

SEQ ID NO: 260014 - DNA, 33 bp, Homo sapien
tcaacccgatgctttcgagtggcgtgccttagc

SEQ ID NO: 260015 - DNA, 33 bp, Homo sapien
tggtatttgagttacccatcctttctgagcttc

SEQ ID NO: 260016 - DNA, 33 bp, Homo sapien
tggtatttgagttacctatcctttctgagcttc

SEQ ID NO: 260017 - DNA, 33 bp, Homo sapien
tggagaaaccatgaaacgataaataatcaagct

SEQ ID NO: 260018 - DNA, 33 bp, Homo sapien
tggagaaaccatgaaatgataaataatcaagct

SEQ ID NO: 260019 - DNA, 33 bp, Homo sapien
tgttctcttttgtcaacgccaagggagccgccc

SEQ ID NO: 260020 - DNA, 33 bp, Homo sapien
tgttctcttttgtcaatgccaagggagccgccc

SEQ ID NO: 260021 - DNA, 33 bp, Homo sapien
acaagccccatattccaaattctggtacagatt

SEQ ID NO: 260022 - DNA, 33 bp, Homo sapien
acaagccccatattccgaattctggtacagatt

SEQ ID NO: 260023 - DNA, 33 bp, Homo sapien
cttattgtaggattggaaaacagtgaaggaaat

SEQ ID NO: 260024 - DNA, 33 bp, Homo sapien
cttattgtaggattgggaaacagtgaaggaaat

SEQ ID NO: 260025 - DNA, 33 bp, Homo sapien
gaaaggaacaagcgataagttctatctgatggt

SEQ ID NO: 260026 - DNA, 33 bp, Homo sapien
gaaaggaacaagcgatcagttctatctgatggt

SEQ ID NO: 260027 - DNA, 33 bp, Homo sapien
cattcccctgtcttgaaggtggatactggtctt

SEQ ID NO: 260028 - DNA, 33 bp, Homo sapien
cattcccctgtcttgagggtggatactggtctt

SEQ ID NO: 260029 - DNA, 33 bp, Homo sapien
tattaactgaacgcgacatgaggttgaaatgat

SEQ ID NO: 260030 - DNA, 33 bp, Homo sapien
tattaactgaacgcgatatgaggttgaaatgat

SEQ ID NO: 260031 - DNA, 33 bp, Homo sapien
gttggagacataaatacaagtgtgactttggac

SEQ ID NO: 260032 - DNA, 33 bp, Homo sapien
gttggagacataaatagaagtgtgactttggac

SEQ ID NO: 260033 - DNA, 33 bp, Homo sapien
taagaaaacccagctcagaaagattgacacagt

SEQ ID NO: 260034 - DNA, 33 bp, Homo sapien
taagaaaacccagctcggaaagattgacacagt

SEQ ID NO: 260035 - DNA, 33 bp, Homo sapien
tcagattccaccacaacagaatgcctctgtaat

SEQ ID NO: 260036 - DNA, 33 bp, Homo sapien
tcagattccaccacaatagaatgcctctgtaat

SEQ ID NO: 260037 - DNA, 33 bp, Homo sapien
aggtatcgtagggtcacggaccatcgtgtaaaa

SEQ ID NO: 260038 - DNA, 33 bp, Homo sapien
aggtatcgtagggtcatggaccatcgtgtaaaa

SEQ ID NO: 260039 - DNA, 33 bp, Homo sapien
ctgccccaacgcattccctctcctacacacaca

SEQ ID NO: 260040 - DNA, 33 bp, Homo sapien
ctgccccaacgcattctctctcctacacacaca

SEQ ID NO: 260041 - DNA, 33 bp, Homo sapien
tgagcatatgtgtataagtacagaaattgttca

SEQ ID NO: 260042 - DNA, 33 bp, Homo sapien
tgagcatatgtgtatacgtacagaaattgttca

SEQ ID NO: 260043 - DNA, 33 bp, Homo sapien
tctgtccagctataaaacaaacaatttttgttg

SEQ ID NO: 260044 - DNA, 33 bp, Homo sapien
tctgtccagctataaagcaaacaatttttgttg

SEQ ID NO: 260045 - DNA, 33 bp, Homo sapien
ggccctttctggtgcccaggtaaactggttgct

SEQ ID NO: 260046 - DNA, 33 bp, Homo sapien
ggccctttctggtgcctaggtaaactggttgct

SEQ ID NO: 260047 - DNA, 33 bp, Homo sapien
aaagcaacacttcagacagctaactgtggcatg

SEQ ID NO: 260048 - DNA, 33 bp, Homo sapien
aaagcaacacttcagagagctaactgtggcatg

SEQ ID NO: 260049 - DNA, 33 bp, Homo sapien
tcttcgttttacaaagaaaggtagttgctaatt

SEQ ID NO: 260050 - DNA, 33 bp, Homo sapien
tcttcgttttacaaaggaaggtagttgctaatt

SEQ ID NO: 260051 - DNA, 33 bp, Homo sapien
ctaatcagataatgtacgatgtttttagtgttc

SEQ ID NO: 260052 - DNA, 33 bp, Homo sapien
ctaatcagataatgtatgatgtttttagtgttc

SEQ ID NO: 260053 - DNA, 33 bp, Homo sapien
tggaacagtatttatccaccgtctgtgcaaacc

SEQ ID NO: 260054 - DNA, 33 bp, Homo sapien
tggaacagtatttatctaccgtctgtgcaaacc

SEQ ID NO: 260055 - DNA, 33 bp, Homo sapien
cactaaacggaggccccgctgctgggtaaagta

SEQ ID NO: 260056 - DNA, 33 bp, Homo sapien
cactaaacggaggccctgctgctgggtaaagta

SEQ ID NO: 260057 - DNA, 33 bp, Homo sapien
gaacgcaagcactccaatgacagaagtttagaa

SEQ ID NO: 260058 - DNA, 33 bp, Homo sapien
gaacgcaagcactccagtgacagaagtttagaa

SEQ ID NO: 260059 - DNA, 33 bp, Homo sapien
ctctaacatcgtaagcaaagtcatcatcacctc

SEQ ID NO: 260060 - DNA, 33 bp, Homo sapien
ctctaacatcgtaagcgaagtcatcatcacctc

SEQ ID NO: 260061 - DNA, 33 bp, Homo sapien
gtgtgtcttacagccacgatgagcttcaggaga

SEQ ID NO: 260062 - DNA, 33 bp, Homo sapien
gtgtgtcttacagccatgatgagcttcaggaga

SEQ ID NO: 260063 - DNA, 33 bp, Homo sapien
aagcaaaccaagaaaagtatccactacaagaca

SEQ ID NO: 260064 - DNA, 33 bp, Homo sapien
aagcaaaccaagaaaattatccactacaagaca

SEQ ID NO: 260065 - DNA, 33 bp, Homo sapien
tcatgttaagtggttacgtaggatgccagctgg

SEQ ID NO: 260066 - DNA, 33 bp, Homo sapien
tcatgttaagtggttatgtaggatgccagctgg

SEQ ID NO: 260067 - DNA, 33 bp, Homo sapien
ggaacactggaaagccagatgtctagaggaatg

SEQ ID NO: 260068 - DNA, 33 bp, Homo sapien
ggaacactggaaagccggatgtctagaggaatg

SEQ ID NO: 260069 - DNA, 33 bp, Homo sapien
tcacatcctggacctacgtgctcctattgtatg

SEQ ID NO: 260070 - DNA, 33 bp, Homo sapien
tcacatcctggacctatgtgctcctattgtatg

SEQ ID NO: 260071 - DNA, 33 bp, Homo sapien
tggttctgcttgtatacagtgagtactcgtaga

SEQ ID NO: 260072 - DNA, 33 bp, Homo sapien
tggttctgcttgtatatagtgagtactcgtaga

SEQ ID NO: 260073 - DNA, 33 bp, Homo sapien
tcggtacaagggagtaacactgagggtggccta

SEQ ID NO: 260074 - DNA, 33 bp, Homo sapien
tcggtacaagggagtagcactgagggtggccta

SEQ ID NO: 260075 - DNA, 33 bp, Homo sapien
agaataaccaggatcagacatttggaagagctt

SEQ ID NO: 260076 - DNA, 33 bp, Homo sapien
agaataaccaggatcatacatttggaagagctt

SEQ ID NO: 260077 - DNA, 33 bp, Homo sapien
aaaaaaactgttgtacaaactctgcagattgag

SEQ ID NO: 260078 - DNA, 33 bp, Homo sapien
aaaaaaactgttgtacgaactctgcagattgag

SEQ ID NO: 260079 - DNA, 33 bp, Homo sapien
agtgtctgccaaattgccaaatatggttgttta

SEQ ID NO: 260080 - DNA, 33 bp, Homo sapien
agtgtctgccaaattgtcaaatatggttgttta

SEQ ID NO: 260081 - DNA, 33 bp, Homo sapien
cagactatcaaaattgaaatgattaatataaca

SEQ ID NO: 260082 - DNA, 33 bp, Homo sapien
cagactatcaaaattgtaatgattaatataaca

SEQ ID NO: 260083 - DNA, 33 bp, Homo sapien
ggctgtcataaccacaaaatgaagctcccactc

SEQ ID NO: 260084 - DNA, 33 bp, Homo sapien
ggctgtcataaccacacaatgaagctcccactc

SEQ ID NO: 260085 - DNA, 33 bp, Homo sapien
cacccttatccatctcaatgctcagaagtggaa

SEQ ID NO: 260086 - DNA, 33 bp, Homo sapien
cacccttatccatctccatgctcagaagtggaa

SEQ ID NO: 260087 - DNA, 33 bp, Homo sapien
cacttacaacatttagaattggtgtgattctta

SEQ ID NO: 260088 - DNA, 33 bp, Homo sapien
cacttacaacatttaggattggtgtgattctta

SEQ ID NO: 260089 - DNA, 33 bp, Homo sapien
gctttcaaacatttccaagagctctgcaataat

SEQ ID NO: 260090 - DNA, 33 bp, Homo sapien
gctttcaaacatttccgagagctctgcaataat

SEQ ID NO: 260091 - DNA, 33 bp, Homo sapien
ggaagtaaattagaagcagcttgagctggggga

SEQ ID NO: 260092 - DNA, 33 bp, Homo sapien
ggaagtaaattagaaggagcttgagctggggga

SEQ ID NO: 260093 - DNA, 33 bp, Homo sapien
atcccataagcatacccaattgaataatccaga

SEQ ID NO: 260094 - DNA, 33 bp, Homo sapien
atcccataagcatacctaattgaataatccaga

SEQ ID NO: 260095 - DNA, 33 bp, Homo sapien
atccaagaacatccccaccaagcgaggcagaaa

SEQ ID NO: 260096 - DNA, 33 bp, Homo sapien
atccaagaacatccccgccaagcgaggcagaaa

SEQ ID NO: 260097 - DNA, 33 bp, Homo sapien
atattaaaaactgcacactatattttaattttt

SEQ ID NO: 260098 - DNA, 33 bp, Homo sapien
atattaaaaactgcacgctatattttaattttt

SEQ ID NO: 260099 - DNA, 33 bp, Homo sapien
taggcttaacctccaccaaaggtctcatattac

SEQ ID NO: 260100 - DNA, 33 bp, Homo sapien
taggcttaacctccactaaaggtctcatattac

SEQ ID NO: 260101 - DNA, 33 bp, Homo sapien
gatgcatgtgatcacaaaggaaaggagcacacg

SEQ ID NO: 260102 - DNA, 33 bp, Homo sapien
gatgcatgtgatcacagaggaaaggagcacacg

SEQ ID NO: 260103 - DNA, 33 bp, Homo sapien
ctattgttaagcaatacgcatctgtattttgta

SEQ ID NO: 260104 - DNA, 33 bp, Homo sapien
ctattgttaagcaatatgcatctgtattttgta

SEQ ID NO: 260105 - DNA, 33 bp, Homo sapien
ttgtaacctgtcgatcgctgcctgtatgatttg

SEQ ID NO: 260106 - DNA, 33 bp, Homo sapien
ttgtaacctgtcgatctctgcctgtatgatttg

SEQ ID NO: 260107 - DNA, 33 bp, Homo sapien
aaggttacaagctctacagaggaggctggtctg

SEQ ID NO: 260108 - DNA, 33 bp, Homo sapien
aaggttacaagctctagagaggaggctggtctg

SEQ ID NO: 260109 - DNA, 33 bp, Homo sapien
agaggatgtcccaatacgttgaactgagatgcc

SEQ ID NO: 260110 - DNA, 33 bp, Homo sapien
agaggatgtcccaatatgttgaactgagatgcc

SEQ ID NO: 260111 - DNA, 33 bp, Homo sapien
ttctggcacagagtgacgcacgaagaaatttga

SEQ ID NO: 260112 - DNA, 33 bp, Homo sapien
ttctggcacagagtgatgcacgaagaaatttga

SEQ ID NO: 260113 - DNA, 33 bp, Homo sapien
cttttctagtttgtcaacacattcgtggacagc

SEQ ID NO: 260114 - DNA, 33 bp, Homo sapien
cttttctagtttgtcaccacattcgtggacagc

SEQ ID NO: 260115 - DNA, 33 bp, Homo sapien
cccacaaccaccatgacagatcctctatgagat

SEQ ID NO: 260116 - DNA, 33 bp, Homo sapien
cccacaaccaccatgatagatcctctatgagat

SEQ ID NO: 260117 - DNA, 33 bp, Homo sapien
tatttaatatctaaaccaccctcacccctctcc

SEQ ID NO: 260118 - DNA, 33 bp, Homo sapien
tatttaatatctaaactaccctcacccctctcc

SEQ ID NO: 260119 - DNA, 33 bp, Homo sapien
gtgagaagcctccgaacttacttgcctcaaaaa

SEQ ID NO: 260120 - DNA, 33 bp, Homo sapien
gtgagaagcctccgaatttacttgcctcaaaaa

SEQ ID NO: 260121 - DNA, 33 bp, Homo sapien
tgaattctggctttgcaacctaccggtgaggcc

SEQ ID NO: 260122 - DNA, 33 bp, Homo sapien
tgaattctggctttgctacctaccggtgaggcc

SEQ ID NO: 260123 - DNA, 33 bp, Homo sapien
ttgatctttaacggaaatcctttgatctttaaa

SEQ ID NO: 260124 - DNA, 33 bp, Homo sapien
ttgatctttaacggaagtcctttgatctttaaa

SEQ ID NO: 260125 - DNA, 33 bp, Homo sapien
aagtatacaagtcatacaaagaaggaaccaaca

SEQ ID NO: 260126 - DNA, 33 bp, Homo sapien
aagtatacaagtcatataaagaaggaaccaaca

SEQ ID NO: 260127 - DNA, 33 bp, Homo sapien
tgtgctttgtattaaccgatttgtggtgcgact

SEQ ID NO: 260128 - DNA, 33 bp, Homo sapien
tgtgctttgtattaactgatttgtggtgcgact

SEQ ID NO: 260129 - DNA, 33 bp, Homo sapien
tccatgttatagcaaacgataggatgtcctttt

SEQ ID NO: 260130 - DNA, 33 bp, Homo sapien
tccatgttatagcaaatgataggatgtcctttt

SEQ ID NO: 260131 - DNA, 33 bp, Homo sapien
gccccactcctctttcaatggccctgagggagc

SEQ ID NO: 260132 - DNA, 33 bp, Homo sapien
gccccactcctctttcgatggccctgagggagc

SEQ ID NO: 260133 - DNA, 33 bp, Homo sapien
tgctcttcggtgcttgaaagcagatcatgtgaa

SEQ ID NO: 260134 - DNA, 33 bp, Homo sapien
tgctcttcggtgcttggaagcagatcatgtgaa

SEQ ID NO: 260135 - DNA, 33 bp, Homo sapien
gttgaccaccccgatagagaattttgtgatttc

SEQ ID NO: 260136 - DNA, 33 bp, Homo sapien
gttgaccaccccgatatagaattttgtgatttc

SEQ ID NO: 260137 - DNA, 33 bp, Homo sapien
tgtggctaagaggttcaaataaatgttctcagg

SEQ ID NO: 260138 - DNA, 33 bp, Homo sapien
tgtggctaagaggttccaataaatgttctcagg

SEQ ID NO: 260139 - DNA, 33 bp, Homo sapien
tagaaactctgaaataagccttgagacccagac

SEQ ID NO: 260140 - DNA, 33 bp, Homo sapien
tagaaactctgaaataggccttgagacccagac

SEQ ID NO: 260141 - DNA, 33 bp, Homo sapien
cttagttcccaaatgaaacaaaatatgaatagt

SEQ ID NO: 260142 - DNA, 33 bp, Homo sapien
cttagttcccaaatgagacaaaatatgaatagt

SEQ ID NO: 260143 - DNA, 33 bp, Homo sapien
aattgcaataaattcaaagtgcaattaagaagt

SEQ ID NO: 260144 - DNA, 33 bp, Homo sapien
aattgcaataaattcagagtgcaattaagaagt

SEQ ID NO: 260145 - DNA, 33 bp, Homo sapien
aacactgctttaggcacagaggttagggtctgc

SEQ ID NO: 260146 - DNA, 33 bp, Homo sapien
aacactgctttaggcagagaggttagggtctgc

SEQ ID NO: 260147 - DNA, 33 bp, Homo sapien
tcttgtctcctaaaacaagacttgggttaagcc

SEQ ID NO: 260148 - DNA, 33 bp, Homo sapien
tcttgtctcctaaaacgagacttgggttaagcc

SEQ ID NO: 260149 - DNA, 33 bp, Homo sapien
gacctgtttccacaagcacatgatgtcgtttgt

SEQ ID NO: 260150 - DNA, 33 bp, Homo sapien
gacctgtttccacaagtacatgatgtcgtttgt

SEQ ID NO: 260151 - DNA, 33 bp, Homo sapien
ttcccacagtccagcaatgaagaggtaatgctg

SEQ ID NO: 260152 - DNA, 33 bp, Homo sapien
ttcccacagtccagcactgaagaggtaatgctg

SEQ ID NO: 260153 - DNA, 33 bp, Homo sapien
aggaaattagcaaggaagaaatataactacgtg

SEQ ID NO: 260154 - DNA, 33 bp, Homo sapien
aggaaattagcaaggaggaaatataactacgtg

SEQ ID NO: 260155 - DNA, 33 bp, Homo sapien
ttaacaaccacattgcaaaaatgtcactgaatc

SEQ ID NO: 260156 - DNA, 33 bp, Homo sapien
ttaacaaccacattgcgaaaatgtcactgaatc

SEQ ID NO: 260157 - DNA, 33 bp, Homo sapien
gcaatgctgagatgaacagaaatagtgaatggc

SEQ ID NO: 260158 - DNA, 33 bp, Homo sapien
gcaatgctgagatgaatagaaatagtgaatggc

SEQ ID NO: 260159 - DNA, 33 bp, Homo sapien
atgaggctatcttatccaagactctgttctcaa

SEQ ID NO: 260160 - DNA, 33 bp, Homo sapien
atgaggctatcttatctaagactctgttctcaa

SEQ ID NO: 260161 - DNA, 33 bp, Homo sapien
ttttatatacatgttacggatggcaatcagtct

SEQ ID NO: 260162 - DNA, 33 bp, Homo sapien
ttttatatacatgttatggatggcaatcagtct

SEQ ID NO: 260163 - DNA, 33 bp, Homo sapien
aatgtattgtgtaacccatgatttttctaaatg

SEQ ID NO: 260164 - DNA, 33 bp, Homo sapien
aatgtattgtgtaacctatgatttttctaaatg

SEQ ID NO: 260165 - DNA, 33 bp, Homo sapien
tcttcataatatcttcaccatttatactgagaa

SEQ ID NO: 260166 - DNA, 33 bp, Homo sapien
tcttcataatatcttcgccatttatactgagaa

SEQ ID NO: 260167 - DNA, 33 bp, Homo sapien
aagatttaactgggaacggcaaaatgaccctca

SEQ ID NO: 260168 - DNA, 33 bp, Homo sapien
aagatttaactgggaatggcaaaatgaccctca

SEQ ID NO: 260169 - DNA, 33 bp, Homo sapien
ttttactgaaaaaaaaagcttgccaatctttag

SEQ ID NO: 260170 - DNA, 33 bp, Homo sapien
ttttactgaaaaaaaaggcttgccaatctttag

SEQ ID NO: 260171 - DNA, 33 bp, Homo sapien
cattagcctcataatacaatgattccaaaagaa

SEQ ID NO: 260172 - DNA, 33 bp, Homo sapien
cattagcctcataatataatgattccaaaagaa

SEQ ID NO: 260173 - DNA, 33 bp, Homo sapien
aggaagacaaaactcaataaaattgaacatagg

SEQ ID NO: 260174 - DNA, 33 bp, Homo sapien
aggaagacaaaactcagtaaaattgaacatagg

SEQ ID NO: 260175 - DNA, 33 bp, Homo sapien
gttttatgatattcacagtatggagagagaggg

SEQ ID NO: 260176 - DNA, 33 bp, Homo sapien
gttttatgatattcacggtatggagagagaggg

SEQ ID NO: 260177 - DNA, 33 bp, Homo sapien
tagaaatgacaggaaaaccccaaaactggagta

SEQ ID NO: 260178 - DNA, 33 bp, Homo sapien
tagaaatgacaggaaacccccaaaactggagta

SEQ ID NO: 260179 - DNA, 33 bp, Homo sapien
tcacttgctcaatgaccggtggatctagaatcc

SEQ ID NO: 260180 - DNA, 33 bp, Homo sapien
tcacttgctcaatgactggtggatctagaatcc

SEQ ID NO: 260181 - DNA, 33 bp, Homo sapien
atattaacgaacactgaacatttcaaaacattg

SEQ ID NO: 260182 - DNA, 33 bp, Homo sapien
atattaacgaacactggacatttcaaaacattg

SEQ ID NO: 260183 - DNA, 33 bp, Homo sapien
ccaaaaccaagatgtcaacgaaagtggtctctg

SEQ ID NO: 260184 - DNA, 33 bp, Homo sapien
ccaaaaccaagatgtcgacgaaagtggtctctg

SEQ ID NO: 260185 - DNA, 33 bp, Homo sapien
tagaatgagaaagaaaacgtcatatttcactaa

SEQ ID NO: 260186 - DNA, 33 bp, Homo sapien
tagaatgagaaagaaatcgtcatatttcactaa

SEQ ID NO: 260187 - DNA, 33 bp, Homo sapien
gcaaacggcagttaaaggttcagtaggcagagc

SEQ ID NO: 260188 - DNA, 33 bp, Homo sapien
gcaaacggcagttaaatgttcagtaggcagagc

SEQ ID NO: 260189 - DNA, 33 bp, Homo sapien
ctaggttttcctttccaccaagcctgcaccatc

SEQ ID NO: 260190 - DNA, 33 bp, Homo sapien
ctaggttttcctttccgccaagcctgcaccatc

SEQ ID NO: 260191 - DNA, 33 bp, Homo sapien
agtgaaagcctgaatgcagtggatttaagagag

SEQ ID NO: 260192 - DNA, 33 bp, Homo sapien
agtgaaagcctgaatgtagtggatttaagagag

SEQ ID NO: 260193 - DNA, 33 bp, Homo sapien
gtatcttagggatttaagttacatctctcccac

SEQ ID NO: 260194 - DNA, 33 bp, Homo sapien
gtatcttagggatttaggttacatctctcccac

SEQ ID NO: 260195 - DNA, 33 bp, Homo sapien
gaagaaacagctgcacagtaacaaaaggtgaaa

SEQ ID NO: 260196 - DNA, 33 bp, Homo sapien
gaagaaacagctgcacggtaacaaaaggtgaaa

SEQ ID NO: 260197 - DNA, 33 bp, Homo sapien
ttttactgagatttagacctctttggatggatc

SEQ ID NO: 260198 - DNA, 33 bp, Homo sapien
ttttactgagatttaggcctctttggatggatc

SEQ ID NO: 260199 - DNA, 33 bp, Homo sapien
ctgtatgcagggcttacggtctagtggaaggag

SEQ ID NO: 260200 - DNA, 33 bp, Homo sapien
ctgtatgcagggcttatggtctagtggaaggag

SEQ ID NO: 260201 - DNA, 33 bp, Homo sapien
gagctaccctgcacaaatcccgacctctacatg

SEQ ID NO: 260202 - DNA, 33 bp, Homo sapien
gagctaccctgcacaagtcccgacctctacatg

SEQ ID NO: 260203 - DNA, 33 bp, Homo sapien
tatgtccttctctagcacctgagttccttgact

SEQ ID NO: 260204 - DNA, 33 bp, Homo sapien
tatgtccttctctagcgcctgagttccttgact

SEQ ID NO: 260205 - DNA, 33 bp, Homo sapien
cgtagagtcttgaaacaattacatttcctccct

SEQ ID NO: 260206 - DNA, 33 bp, Homo sapien
cgtagagtcttgaaacgattacatttcctccct

SEQ ID NO: 260207 - DNA, 33 bp, Homo sapien
atgaaggagggtggaaaaatcaaatctccagta

SEQ ID NO: 260208 - DNA, 33 bp, Homo sapien
atgaaggagggtggaataatcaaatctccagta

SEQ ID NO: 260209 - DNA, 33 bp, Homo sapien
cctcatggaagcctcaatattaggttggaaggg

SEQ ID NO: 260210 - DNA, 33 bp, Homo sapien
cctcatggaagcctcagtattaggttggaaggg

SEQ ID NO: 260211 - DNA, 33 bp, Homo sapien
atatgctaactgtggaaggaagagcgaaagcca

SEQ ID NO: 260212 - DNA, 33 bp, Homo sapien
atatgctaactgtggatggaagagcgaaagcca

SEQ ID NO: 260213 - DNA, 33 bp, Homo sapien
tgaattttatagcacacactttttatagcaata

SEQ ID NO: 260214 - DNA, 33 bp, Homo sapien
tgaattttatagcacatactttttatagcaata

SEQ ID NO: 260215 - DNA, 33 bp, Homo sapien
aaatatcacactgatcaatggtgttgaagacat

SEQ ID NO: 260216 - DNA, 33 bp, Homo sapien
aaatatcacactgatcgatggtgttgaagacat

SEQ ID NO: 260217 - DNA, 33 bp, Homo sapien
tggggacttttggacactatctctgaatggaca

SEQ ID NO: 260218 - DNA, 33 bp, Homo sapien
tggggacttttggacattatctctgaatggaca

SEQ ID NO: 260219 - DNA, 33 bp, Homo sapien
cctgtcttttcctcacgcaaggcaccagagctg

SEQ ID NO: 260220 - DNA, 33 bp, Homo sapien
cctgtcttttcctcactcaaggcaccagagctg

SEQ ID NO: 260221 - DNA, 33 bp, Homo sapien
aggccaggttataaaacaggttggtgtgttacc

SEQ ID NO: 260222 - DNA, 33 bp, Homo sapien
aggccaggttataaaagaggttggtgtgttacc

SEQ ID NO: 260223 - DNA, 33 bp, Homo sapien
atcagcttgacctgtacgtgaaacatggagtca

SEQ ID NO: 260224 - DNA, 33 bp, Homo sapien
atcagcttgacctgtatgtgaaacatggagtca

SEQ ID NO: 260225 - DNA, 33 bp, Homo sapien
cttgggaggccttacaagtgatagtgatagtga

SEQ ID NO: 260226 - DNA, 33 bp, Homo sapien
cttgggaggccttacaggtgatagtgatagtga

SEQ ID NO: 260227 - DNA, 33 bp, Homo sapien
gactgtagcctatctgcatttgctaattggctt

SEQ ID NO: 260228 - DNA, 33 bp, Homo sapien
gactgtagcctatctgtatttgctaattggctt

SEQ ID NO: 260229 - DNA, 33 bp, Homo sapien
tgccagtttctgctaaagttcctagtctggcag

SEQ ID NO: 260230 - DNA, 33 bp, Homo sapien
tgccagtttctgctaaggttcctagtctggcag

SEQ ID NO: 260231 - DNA, 33 bp, Homo sapien
tctgcctggggtactacaatggcctgaactgca

SEQ ID NO: 260232 - DNA, 33 bp, Homo sapien
tctgcctggggtactataatggcctgaactgca

SEQ ID NO: 260233 - DNA, 33 bp, Homo sapien
cgtctgtcttgtccttgaagaatctagtcactc

SEQ ID NO: 260234 - DNA, 33 bp, Homo sapien
cgtctgtcttgtcctttaagaatctagtcactc

SEQ ID NO: 260235 - DNA, 33 bp, Homo sapien
tagccatgcagtaaaaaatagttttggactaat

SEQ ID NO: 260236 - DNA, 33 bp, Homo sapien
tagccatgcagtaaaagatagttttggactaat

SEQ ID NO: 260237 - DNA, 33 bp, Homo sapien
actctaaatcaaataaaaggcttagtgtgagtt

SEQ ID NO: 260238 - DNA, 33 bp, Homo sapien
actctaaatcaaataacaggcttagtgtgagtt

SEQ ID NO: 260239 - DNA, 33 bp, Homo sapien
atggtcactctattccaacatttcatatgactc

SEQ ID NO: 260240 - DNA, 33 bp, Homo sapien
atggtcactctattccgacatttcatatgactc

SEQ ID NO: 260241 - DNA, 33 bp, Homo sapien
aaatggctgaagttaaatgagcagaggaacaat

SEQ ID NO: 260242 - DNA, 33 bp, Homo sapien
aaatggctgaagttaagtgagcagaggaacaat

SEQ ID NO: 260243 - DNA, 33 bp, Homo sapien
gtccaatagggcaatgaaggatagtgtgagcag

SEQ ID NO: 260244 - DNA, 33 bp, Homo sapien
gtccaatagggcaatggaggatagtgtgagcag

SEQ ID NO: 260245 - DNA, 33 bp, Homo sapien
cttctaacctattcagaacaaaatgatgagcca

SEQ ID NO: 260246 - DNA, 33 bp, Homo sapien
cttctaacctattcaggacaaaatgatgagcca

SEQ ID NO: 260247 - DNA, 33 bp, Homo sapien
ctaacatcagttgccaagacacaaacaactcta

SEQ ID NO: 260248 - DNA, 33 bp, Homo sapien
ctaacatcagttgccaggacacaaacaactcta

SEQ ID NO: 260249 - DNA, 33 bp, Homo sapien
agctgaggagtgacaaatcgaaatgaggcttgt

SEQ ID NO: 260250 - DNA, 33 bp, Homo sapien
agctgaggagtgacaagtcgaaatgaggcttgt

SEQ ID NO: 260251 - DNA, 33 bp, Homo sapien
atgtgtgttcacaatagctgaagtcgttgtact

SEQ ID NO: 260252 - DNA, 33 bp, Homo sapien
atgtgtgttcacaatatctgaagtcgttgtact

SEQ ID NO: 260253 - DNA, 33 bp, Homo sapien
gtttattggattggtacctggcctttgtagtgt

SEQ ID NO: 260254 - DNA, 33 bp, Homo sapien
gtttattggattggtagctggcctttgtagtgt

SEQ ID NO: 260255 - DNA, 33 bp, Homo sapien
acttcctggtagcaaaagagattagagcgttcc

SEQ ID NO: 260256 - DNA, 33 bp, Homo sapien
acttcctggtagcaaaggagattagagcgttcc

SEQ ID NO: 260257 - DNA, 33 bp, Homo sapien
tctgtctatgtgatctcacagtaacctgcagta

SEQ ID NO: 260258 - DNA, 33 bp, Homo sapien
tctgtctatgtgatcttacagtaacctgcagta

SEQ ID NO: 260259 - DNA, 33 bp, Homo sapien
taatgatgaactatccaaaaaaggcatcaagaa

SEQ ID NO: 260260 - DNA, 33 bp, Homo sapien
taatgatgaactatccgaaaaaggcatcaagaa

SEQ ID NO: 260261 - DNA, 33 bp, Homo sapien
tcaaactcactcttcaatccaatgcagattggc

SEQ ID NO: 260262 - DNA, 33 bp, Homo sapien
tcaaactcactcttcagtccaatgcagattggc

SEQ ID NO: 260263 - DNA, 33 bp, Homo sapien
atcattggtatatggaactttttgagataaaca

SEQ ID NO: 260264 - DNA, 33 bp, Homo sapien
atcattggtatatggatctttttgagataaaca

SEQ ID NO: 260265 - DNA, 33 bp, Homo sapien
aggaatttgataaataccacaggaaaggtggga

SEQ ID NO: 260266 - DNA, 33 bp, Homo sapien
aggaatttgataaatatcacaggaaaggtggga

SEQ ID NO: 260267 - DNA, 33 bp, Homo sapien
taatcttaaggtagcaatatgtcctgcttcagg

SEQ ID NO: 260268 - DNA, 33 bp, Homo sapien
taatcttaaggtagcactatgtcctgcttcagg

SEQ ID NO: 260269 - DNA, 33 bp, Homo sapien
ggggtctgatttaagactctctcatgtgtaaaa

SEQ ID NO: 260270 - DNA, 33 bp, Homo sapien
ggggtctgatttaagattctctcatgtgtaaaa

SEQ ID NO: 260271 - DNA, 33 bp, Homo sapien
cagctcttgatgtcaccaaaaggtggcttttac

SEQ ID NO: 260272 - DNA, 33 bp, Homo sapien
cagctcttgatgtcactaaaaggtggcttttac

SEQ ID NO: 260273 - DNA, 33 bp, Homo sapien
attatttctagtggctcaattttcaaatacctt

SEQ ID NO: 260274 - DNA, 33 bp, Homo sapien
attatttctagtggcttaattttcaaatacctt

SEQ ID NO: 260275 - DNA, 33 bp, Homo sapien
cctccaagatctggcacggaaattctttcaatt

SEQ ID NO: 260276 - DNA, 33 bp, Homo sapien
cctccaagatctggcatggaaattctttcaatt

SEQ ID NO: 260277 - DNA, 33 bp, Homo sapien
caatttcatcaccactcaaagctaccactttaa

SEQ ID NO: 260278 - DNA, 33 bp, Homo sapien
caatttcatcaccactgaaagctaccactttaa

SEQ ID NO: 260279 - DNA, 33 bp, Homo sapien
tgagtaaccggctgtaacttttaaataactttt

SEQ ID NO: 260280 - DNA, 33 bp, Homo sapien
tgagtaaccggctgtaccttttaaataactttt

SEQ ID NO: 260281 - DNA, 33 bp, Homo sapien
ttgtaacataaggcaacggatgcaaaacaagtt

SEQ ID NO: 260282 - DNA, 33 bp, Homo sapien
ttgtaacataaggcaatggatgcaaaacaagtt

SEQ ID NO: 260283 - DNA, 33 bp, Homo sapien
ttcttttgctcatgaacctcttcctccatcttc

SEQ ID NO: 260284 - DNA, 33 bp, Homo sapien
ttcttttgctcatgaatctcttcctccatcttc

SEQ ID NO: 260285 - DNA, 33 bp, Homo sapien
gtgcagctatcaccacaatctatctccagcttt

SEQ ID NO: 260286 - DNA, 33 bp, Homo sapien
gtgcagctatcaccaccatctatctccagcttt

SEQ ID NO: 260287 - DNA, 33 bp, Homo sapien
gacggggtagaaagtaactttgatttggtgact

SEQ ID NO: 260288 - DNA, 33 bp, Homo sapien
gacggggtagaaagtagctttgatttggtgact

SEQ ID NO: 260289 - DNA, 33 bp, Homo sapien
agctggataagacaagccttcagaaagtctatt

SEQ ID NO: 260290 - DNA, 33 bp, Homo sapien
agctggataagacaaggcttcagaaagtctatt

SEQ ID NO: 260291 - DNA, 33 bp, Homo sapien
ataccttgaacatacagtgcgttgtctcctctt

SEQ ID NO: 260292 - DNA, 33 bp, Homo sapien
ataccttgaacatacattgcgttgtctcctctt

SEQ ID NO: 260293 - DNA, 33 bp, Homo sapien
tgacactagtgaacaaatctttttcatctcctt

SEQ ID NO: 260294 - DNA, 33 bp, Homo sapien
tgacactagtgaacaactctttttcatctcctt

SEQ ID NO: 260295 - DNA, 33 bp, Homo sapien
agttttctgtgtctaccggcttaaaaagataag

SEQ ID NO: 260296 - DNA, 33 bp, Homo sapien
agttttctgtgtctactggcttaaaaagataag

SEQ ID NO: 260297 - DNA, 33 bp, Homo sapien
ggtactgttatcctagaagaggcagctctatgt

SEQ ID NO: 260298 - DNA, 33 bp, Homo sapien
ggtactgttatcctaggagaggcagctctatgt

SEQ ID NO: 260299 - DNA, 33 bp, Homo sapien
tctttttgagctgagaatcgtaatcagtgtaaa

SEQ ID NO: 260300 - DNA, 33 bp, Homo sapien
tctttttgagctgagagtcgtaatcagtgtaaa

SEQ ID NO: 260301 - DNA, 33 bp, Homo sapien
ccactagaggtaaataagaacaaagttatgtct

SEQ ID NO: 260302 - DNA, 33 bp, Homo sapien
ccactagaggtaaataggaacaaagttatgtct

SEQ ID NO: 260303 - DNA, 33 bp, Homo sapien
agcaataaaagagatcaataggtcaatatcatt

SEQ ID NO: 260304 - DNA, 33 bp, Homo sapien
agcaataaaagagatcgataggtcaatatcatt

SEQ ID NO: 260305 - DNA, 33 bp, Homo sapien
agcaagatgtgtctcaacctccgtggtgtgata

SEQ ID NO: 260306 - DNA, 33 bp, Homo sapien
agcaagatgtgtctcagcctccgtggtgtgata

SEQ ID NO: 260307 - DNA, 33 bp, Homo sapien
aaagagccagccaaacagtaattacaaaagtgt

SEQ ID NO: 260308 - DNA, 33 bp, Homo sapien
aaagagccagccaaactgtaattacaaaagtgt

SEQ ID NO: 260309 - DNA, 33 bp, Homo sapien
tgtgcccaattcatggaaagtctctttagtgtt

SEQ ID NO: 260310 - DNA, 33 bp, Homo sapien
tgtgcccaattcatggtaagtctctttagtgtt

SEQ ID NO: 260311 - DNA, 33 bp, Homo sapien
atggtaaaattgacaaaggtgagagagaatagc

SEQ ID NO: 260312 - DNA, 33 bp, Homo sapien
atggtaaaattgacaagggtgagagagaatagc

SEQ ID NO: 260313 - DNA, 33 bp, Homo sapien
tgactgaagagtaaaaatgagtatgataggaga

SEQ ID NO: 260314 - DNA, 33 bp, Homo sapien
tgactgaagagtaaaagtgagtatgataggaga

SEQ ID NO: 260315 - DNA, 33 bp, Homo sapien
gtattttgattgccctaaatttttatcaatgag

SEQ ID NO: 260316 - DNA, 33 bp, Homo sapien
gtattttgattgccctcaatttttatcaatgag

SEQ ID NO: 260317 - DNA, 33 bp, Homo sapien
gaataggaaatatttgaaatacatgaaatttgc

SEQ ID NO: 260318 - DNA, 33 bp, Homo sapien
gaataggaaatatttgcaatacatgaaatttgc

SEQ ID NO: 260319 - DNA, 33 bp, Homo sapien
gtggtcgtgataaagacgacatttgcctttgaa

SEQ ID NO: 260320 - DNA, 33 bp, Homo sapien
gtggtcgtgataaagatgacatttgcctttgaa

SEQ ID NO: 260321 - DNA, 33 bp, Homo sapien
gtggaacaagtgcaaacgaaatagcatttgtga

SEQ ID NO: 260322 - DNA, 33 bp, Homo sapien
gtggaacaagtgcaaaggaaatagcatttgtga

SEQ ID NO: 260323 - DNA, 33 bp, Homo sapien
gctcctcctggatccaaaaagaactggtttccc

SEQ ID NO: 260324 - DNA, 33 bp, Homo sapien
gctcctcctggatccataaagaactggtttccc

SEQ ID NO: 260325 - DNA, 33 bp, Homo sapien
ggaaatgccagcttcacgttgcaaatgagaaaa

SEQ ID NO: 260326 - DNA, 33 bp, Homo sapien
ggaaatgccagcttcatgttgcaaatgagaaaa

SEQ ID NO: 260327 - DNA, 33 bp, Homo sapien
gacgttcacaaattcaacaaatatgatgtctat

SEQ ID NO: 260328 - DNA, 33 bp, Homo sapien
gacgttcacaaattcagcaaatatgatgtctat

SEQ ID NO: 260329 - DNA, 33 bp, Homo sapien
aaactaataccaatcaaaatcccagcaagcttt

SEQ ID NO: 260330 - DNA, 33 bp, Homo sapien
aaactaataccaatcagaatcccagcaagcttt

SEQ ID NO: 260331 - DNA, 33 bp, Homo sapien
tttttccatgcaaagtaacgtttacaggctctg

SEQ ID NO: 260332 - DNA, 33 bp, Homo sapien
tttttccatgcaaagtgacgtttacaggctctg

SEQ ID NO: 260333 - DNA, 33 bp, Homo sapien
aaaaaactactagaacggataagcacattcagt

SEQ ID NO: 260334 - DNA, 33 bp, Homo sapien
aaaaaactactagaactgataagcacattcagt

SEQ ID NO: 260335 - DNA, 33 bp, Homo sapien
ggccctggatttatcagggatggatttcatgga

SEQ ID NO: 260336 - DNA, 33 bp, Homo sapien
ggccctggatttatcatggatggatttcatgga

SEQ ID NO: 260337 - DNA, 33 bp, Homo sapien
cggacactgggttgaccgggggtacagcactga

SEQ ID NO: 260338 - DNA, 33 bp, Homo sapien
cggacactgggttgactgggggtacagcactga

SEQ ID NO: 260339 - DNA, 33 bp, Homo sapien
acagcactgaacaatacggaaaacacaaaccct

SEQ ID NO: 260340 - DNA, 33 bp, Homo sapien
acagcactgaacaatatggaaaacacaaaccct

SEQ ID NO: 260341 - DNA, 33 bp, Homo sapien
ggccccagatggccacactttctgagtacttgg

SEQ ID NO: 260342 - DNA, 33 bp, Homo sapien
ggccccagatggccacgctttctgagtacttgg

SEQ ID NO: 260343 - DNA, 33 bp, Homo sapien
gaacgaagcatttacaatcttgccttcttgggc

SEQ ID NO: 260344 - DNA, 33 bp, Homo sapien
gaacgaagcatttacactcttgccttcttgggc

SEQ ID NO: 260345 - DNA, 33 bp, Homo sapien
aggaacagaacaccaaatactgtatgtttttac

SEQ ID NO: 260346 - DNA, 33 bp, Homo sapien
aggaacagaacaccaactactgtatgtttttac

SEQ ID NO: 260347 - DNA, 33 bp, Homo sapien
gaatcctagcttcctaaatagttggtaaaatgt

SEQ ID NO: 260348 - DNA, 33 bp, Homo sapien
gaatcctagcttcctagatagttggtaaaatgt

SEQ ID NO: 260349 - DNA, 33 bp, Homo sapien
gcattctatatcgtaaactctgcaaacctccac

SEQ ID NO: 260350 - DNA, 33 bp, Homo sapien
gcattctatatcgtaagctctgcaaacctccac

SEQ ID NO: 260351 - DNA, 33 bp, Homo sapien
gtacagcagctgcaaaagtgagaagagagcatt

SEQ ID NO: 260352 - DNA, 33 bp, Homo sapien
gtacagcagctgcaaaggtgagaagagagcatt

SEQ ID NO: 260353 - DNA, 33 bp, Homo sapien
tgttcactcaacattcaatgtgtgtttattgag

SEQ ID NO: 260354 - DNA, 33 bp, Homo sapien
tgttcactcaacattcgatgtgtgtttattgag

SEQ ID NO: 260355 - DNA, 33 bp, Homo sapien
cccagaggttcaacaccgtctatttctgagcta

SEQ ID NO: 260356 - DNA, 33 bp, Homo sapien
cccagaggttcaacactgtctatttctgagcta

SEQ ID NO: 260357 - DNA, 33 bp, Homo sapien
aaccctaatacagacaagatatgagagatgaag

SEQ ID NO: 260358 - DNA, 33 bp, Homo sapien
aaccctaatacagacaggatatgagagatgaag

SEQ ID NO: 260359 - DNA, 33 bp, Homo sapien
gagataaagagttacacggtaaggttggtgttt

SEQ ID NO: 260360 - DNA, 33 bp, Homo sapien
gagataaagagttacatggtaaggttggtgttt

SEQ ID NO: 260361 - DNA, 33 bp, Homo sapien
gcaccatgtaacgagaaagtggcagcctataat

SEQ ID NO: 260362 - DNA, 33 bp, Homo sapien
gcaccatgtaacgagagagtggcagcctataat

SEQ ID NO: 260363 - DNA, 33 bp, Homo sapien
gatgttaatgccaacacaaggttgcagtttccc

SEQ ID NO: 260364 - DNA, 33 bp, Homo sapien
gatgttaatgccaacagaaggttgcagtttccc

SEQ ID NO: 260365 - DNA, 33 bp, Homo sapien
caacaaatagagaagacgaccaggcaaagacct

SEQ ID NO: 260366 - DNA, 33 bp, Homo sapien
caacaaatagagaagatgaccaggcaaagacct

SEQ ID NO: 260367 - DNA, 33 bp, Homo sapien
acaaatatcagaaaacaatacaaatgcttgcag

SEQ ID NO: 260368 - DNA, 33 bp, Homo sapien
acaaatatcagaaaacgatacaaatgcttgcag

SEQ ID NO: 260369 - DNA, 33 bp, Homo sapien
tattaagagtccaatacaagccaggagccatcc

SEQ ID NO: 260370 - DNA, 33 bp, Homo sapien
tattaagagtccaatataagccaggagccatcc

SEQ ID NO: 260371 - DNA, 33 bp, Homo sapien
attctgccatttttcacactcctttgtccctcg

SEQ ID NO: 260372 - DNA, 33 bp, Homo sapien
attctgccatttttcatactcctttgtccctcg

SEQ ID NO: 260373 - DNA, 33 bp, Homo sapien
agcctttgacagtaacacacggtagcagttgtc

SEQ ID NO: 260374 - DNA, 33 bp, Homo sapien
agcctttgacagtaacgcacggtagcagttgtc

SEQ ID NO: 260375 - DNA, 33 bp, Homo sapien
tcagagagctggactaaggaaagagcaatgaga

SEQ ID NO: 260376 - DNA, 33 bp, Homo sapien
tcagagagctggactacggaaagagcaatgaga

SEQ ID NO: 260377 - DNA, 33 bp, Homo sapien
tattccaatctcacaacgataaagtcaggattc

SEQ ID NO: 260378 - DNA, 33 bp, Homo sapien
tattccaatctcacaatgataaagtcaggattc

SEQ ID NO: 260379 - DNA, 33 bp, Homo sapien
ttctgtcttgggaaccagcctcgaggacttaaa

SEQ ID NO: 260380 - DNA, 33 bp, Homo sapien
ttctgtcttgggaaccggcctcgaggacttaaa

SEQ ID NO: 260381 - DNA, 33 bp, Homo sapien
tctaagctgtatctataaatggcaacacagtct

SEQ ID NO: 260382 - DNA, 33 bp, Homo sapien
tctaagctgtatctatgaatggcaacacagtct

SEQ ID NO: 260383 - DNA, 33 bp, Homo sapien
agagtcttaactggaacggaaaatcttcaggaa

SEQ ID NO: 260384 - DNA, 33 bp, Homo sapien
agagtcttaactggaatggaaaatcttcaggaa

SEQ ID NO: 260385 - DNA, 33 bp, Homo sapien
ggggatgggtaaagggcaaaagatcaaagaggt

SEQ ID NO: 260386 - DNA, 33 bp, Homo sapien
ggggatgggtaaagggtaaaagatcaaagaggt

SEQ ID NO: 260387 - DNA, 33 bp, Homo sapien
tgtactaggcattataaaaggaggaaagaggac

SEQ ID NO: 260388 - DNA, 33 bp, Homo sapien
tgtactaggcattatagaaggaggaaagaggac

SEQ ID NO: 260389 - DNA, 33 bp, Homo sapien
aaattaatgacctaaacatagacatggaagcca

SEQ ID NO: 260390 - DNA, 33 bp, Homo sapien
aaattaatgacctaaatatagacatggaagcca

SEQ ID NO: 260391 - DNA, 33 bp, Homo sapien
gtctctatatgacgacaacgttcaagaggttat

SEQ ID NO: 260392 - DNA, 33 bp, Homo sapien
gtctctatatgacgacgacgttcaagaggttat

SEQ ID NO: 260393 - DNA, 33 bp, Homo sapien
atcccagggaggaagagtattaaaaggttactc

SEQ ID NO: 260394 - DNA, 33 bp, Homo sapien
atcccagggaggaagattattaaaaggttactc

SEQ ID NO: 260395 - DNA, 33 bp, Homo sapien
atcttgaagaagaaaacgtctttcaaaatatta

SEQ ID NO: 260396 - DNA, 33 bp, Homo sapien
atcttgaagaagaaaatgtctttcaaaatatta

SEQ ID NO: 260397 - DNA, 33 bp, Homo sapien
tgtcaaaagtctgctaagctaatatttctctgc

SEQ ID NO: 260398 - DNA, 33 bp, Homo sapien
tgtcaaaagtctgctaggctaatatttctctgc

SEQ ID NO: 260399 - DNA, 33 bp, Homo sapien
tcactgctgaaaggataaaaagtgtatgtggca

SEQ ID NO: 260400 - DNA, 33 bp, Homo sapien
tcactgctgaaaggatgaaaagtgtatgtggca

SEQ ID NO: 260401 - DNA, 33 bp, Homo sapien
gcattttatattcagcacttaggtactagcata

SEQ ID NO: 260402 - DNA, 33 bp, Homo sapien
gcattttatattcagcgcttaggtactagcata

SEQ ID NO: 260403 - DNA, 33 bp, Homo sapien
acagaagcaactaaataagccaaaggaaggaac

SEQ ID NO: 260404 - DNA, 33 bp, Homo sapien
acagaagcaactaaatcagccaaaggaaggaac

SEQ ID NO: 260405 - DNA, 33 bp, Homo sapien
gaagatgaatgttaaacgaacaactgagggaca

SEQ ID NO: 260406 - DNA, 33 bp, Homo sapien
gaagatgaatgttaaatgaacaactgagggaca

SEQ ID NO: 260407 - DNA, 33 bp, Homo sapien
agcatggaaagtgctacgacagaagactggttc

SEQ ID NO: 260408 - DNA, 33 bp, Homo sapien
agcatggaaagtgctatgacagaagactggttc

SEQ ID NO: 260409 - DNA, 33 bp, Homo sapien
ctttggatacctggaaactagacgacaggaggg

SEQ ID NO: 260410 - DNA, 33 bp, Homo sapien
ctttggatacctggaagctagacgacaggaggg

SEQ ID NO: 260411 - DNA, 33 bp, Homo sapien
tagccatgtatggaaacagaattggagtgatgg

SEQ ID NO: 260412 - DNA, 33 bp, Homo sapien
tagccatgtatggaaatagaattggagtgatgg

SEQ ID NO: 260413 - DNA, 33 bp, Homo sapien
tatatccagctaactacgcctaaggacaaggaa

SEQ ID NO: 260414 - DNA, 33 bp, Homo sapien
tatatccagctaactatgcctaaggacaaggaa

SEQ ID NO: 260415 - DNA, 33 bp, Homo sapien
tttaatacaaggtagacgcaagaaagcgagaga

SEQ ID NO: 260416 - DNA, 33 bp, Homo sapien
tttaatacaaggtagatgcaagaaagcgagaga

SEQ ID NO: 260417 - DNA, 33 bp, Homo sapien
ggccatgaggaaacaacggtcaccagttcaact

SEQ ID NO: 260418 - DNA, 33 bp, Homo sapien
ggccatgaggaaacaatggtcaccagttcaact

SEQ ID NO: 260419 - DNA, 33 bp, Homo sapien
ctgtgttgtggagtatcaccatcctttcagagt

SEQ ID NO: 260420 - DNA, 33 bp, Homo sapien
ctgtgttgtggagtatgaccatcctttcagagt

SEQ ID NO: 260421 - DNA, 33 bp, Homo sapien
ctgtacaatcagcaaacattttttgaataatca

SEQ ID NO: 260422 - DNA, 33 bp, Homo sapien
ctgtacaatcagcaaatattttttgaataatca

SEQ ID NO: 260423 - DNA, 33 bp, Homo sapien
agggatttggaagggaaaacatgtcggcacttc

SEQ ID NO: 260424 - DNA, 33 bp, Homo sapien
agggatttggaagggacaacatgtcggcacttc

SEQ ID NO: 260425 - DNA, 33 bp, Homo sapien
ctatgtgccaggcataatacaggtgttaactag

SEQ ID NO: 260426 - DNA, 33 bp, Homo sapien
ctatgtgccaggcatattacaggtgttaactag

SEQ ID NO: 260427 - DNA, 33 bp, Homo sapien
ctgttcacctcaatgcagaaatcagtatctgca

SEQ ID NO: 260428 - DNA, 33 bp, Homo sapien
ctgttcacctcaatgcggaaatcagtatctgca

SEQ ID NO: 260429 - DNA, 33 bp, Homo sapien
aggaatagagcagaagaagtaatggaagataag

SEQ ID NO: 260430 - DNA, 33 bp, Homo sapien
aggaatagagcagaagtagtaatggaagataag

SEQ ID NO: 260431 - DNA, 33 bp, Homo sapien
tccatggctcaaagtaacatctttatgctgatg

SEQ ID NO: 260432 - DNA, 33 bp, Homo sapien
tccatggctcaaagtagcatctttatgctgatg

SEQ ID NO: 260433 - DNA, 33 bp, Homo sapien
gcagctaacaggcatacagacttgctacacatt

SEQ ID NO: 260434 - DNA, 33 bp, Homo sapien
gcagctaacaggcatatagacttgctacacatt

SEQ ID NO: 260435 - DNA, 33 bp, Homo sapien
acagagggttgaattacgaccagaagggggaac

SEQ ID NO: 260436 - DNA, 33 bp, Homo sapien
acagagggttgaattaggaccagaagggggaac

SEQ ID NO: 260437 - DNA, 33 bp, Homo sapien
ttgtgtttctgcttgaccattcatagtttaaaa

SEQ ID NO: 260438 - DNA, 33 bp, Homo sapien
ttgtgtttctgcttgagcattcatagtttaaaa

SEQ ID NO: 260439 - DNA, 33 bp, Homo sapien
cagaaaagatttcggaataagtgaacaaaaaca

SEQ ID NO: 260440 - DNA, 33 bp, Homo sapien
cagaaaagatttcggagtaagtgaacaaaaaca

SEQ ID NO: 260441 - DNA, 33 bp, Homo sapien
tgcatggataaagtaacggtgttaggatttgga

SEQ ID NO: 260442 - DNA, 33 bp, Homo sapien
tgcatggataaagtaatggtgttaggatttgga

SEQ ID NO: 260443 - DNA, 33 bp, Homo sapien
gtgccagatataactcccacttttcttaaaatg

SEQ ID NO: 260444 - DNA, 33 bp, Homo sapien
gtgccagatataactctcacttttcttaaaatg

SEQ ID NO: 260445 - DNA, 33 bp, Homo sapien
tcagcatgtttgcctgcagaataaaatgaatgg

SEQ ID NO: 260446 - DNA, 33 bp, Homo sapien
tcagcatgtttgcctgtagaataaaatgaatgg

SEQ ID NO: 260447 - DNA, 33 bp, Homo sapien
tagtctgtccacctcaaaaagtttgatgaaagt

SEQ ID NO: 260448 - DNA, 33 bp, Homo sapien
tagtctgtccacctcagaaagtttgatgaaagt

SEQ ID NO: 260449 - DNA, 33 bp, Homo sapien
ctcaattcggaagcacaccacctcatctgcccc

SEQ ID NO: 260450 - DNA, 33 bp, Homo sapien
ctcaattcggaagcacgccacctcatctgcccc

SEQ ID NO: 260451 - DNA, 33 bp, Homo sapien
caggtgcttcttgaaacgtgagaagttatttct

SEQ ID NO: 260452 - DNA, 33 bp, Homo sapien
caggtgcttcttgaaaggtgagaagttatttct

SEQ ID NO: 260453 - DNA, 33 bp, Homo sapien
gctaacacgtgtctgcacacccctgtctgaatg

SEQ ID NO: 260454 - DNA, 33 bp, Homo sapien
gctaacacgtgtctgcgcacccctgtctgaatg

SEQ ID NO: 260455 - DNA, 33 bp, Homo sapien
taactgaagtgatcgactaattaattggatctc

SEQ ID NO: 260456 - DNA, 33 bp, Homo sapien
taactgaagtgatcgattaattaattggatctc

SEQ ID NO: 260457 - DNA, 33 bp, Homo sapien
atgcaaagatgacttacatctacaaggagcaca

SEQ ID NO: 260458 - DNA, 33 bp, Homo sapien
atgcaaagatgacttagatctacaaggagcaca

SEQ ID NO: 260459 - DNA, 33 bp, Homo sapien
taaggaggaaatgcaacgtcaaggtatttggta

SEQ ID NO: 260460 - DNA, 33 bp, Homo sapien
taaggaggaaatgcaaggtcaaggtatttggta

SEQ ID NO: 260461 - DNA, 33 bp, Homo sapien
cctgccctcaccaaaacgcctttaataatcaga

SEQ ID NO: 260462 - DNA, 33 bp, Homo sapien
cctgccctcaccaaaatgcctttaataatcaga

SEQ ID NO: 260463 - DNA, 33 bp, Homo sapien
aattttctaatgattacgataggaaaaatagca

SEQ ID NO: 260464 - DNA, 33 bp, Homo sapien
aattttctaatgattaggataggaaaaatagca

SEQ ID NO: 260465 - DNA, 33 bp, Homo sapien
gtcaaagggaggttgacgaaatattatgcaact

SEQ ID NO: 260466 - DNA, 33 bp, Homo sapien
gtcaaagggaggttgatgaaatattatgcaact

SEQ ID NO: 260467 - DNA, 33 bp, Homo sapien
ttgagtaaatgctgtacataagtgcagagtttt

SEQ ID NO: 260468 - DNA, 33 bp, Homo sapien
ttgagtaaatgctgtatataagtgcagagtttt

SEQ ID NO: 260469 - DNA, 33 bp, Homo sapien
ttgcaactggaaaaagaaacatatggctttcaa

SEQ ID NO: 260470 - DNA, 33 bp, Homo sapien
ttgcaactggaaaaagcaacatatggctttcaa

SEQ ID NO: 260471 - DNA, 33 bp, Homo sapien
cctaaatgcaaaacacaaaacatctgtgggata

SEQ ID NO: 260472 - DNA, 33 bp, Homo sapien
cctaaatgcaaaacacgaaacatctgtgggata

SEQ ID NO: 260473 - DNA, 33 bp, Homo sapien
agcatggggatttgacagctaagatggacgctg

SEQ ID NO: 260474 - DNA, 33 bp, Homo sapien
agcatggggatttgacggctaagatggacgctg

SEQ ID NO: 260475 - DNA, 33 bp, Homo sapien
ggccaatggaacataaccagagatgttttctag

SEQ ID NO: 260476 - DNA, 33 bp, Homo sapien
ggccaatggaacataagcagagatgttttctag

SEQ ID NO: 260477 - DNA, 33 bp, Homo sapien
tgttccattggccacactaagtgcaagggatat

SEQ ID NO: 260478 - DNA, 33 bp, Homo sapien
tgttccattggccacattaagtgcaagggatat

SEQ ID NO: 260479 - DNA, 33 bp, Homo sapien
tacttggtctcacttacactgtgggtcagcctt

SEQ ID NO: 260480 - DNA, 33 bp, Homo sapien
tacttggtctcacttatactgtgggtcagcctt

SEQ ID NO: 260481 - DNA, 33 bp, Homo sapien
tcagccttaggctgtaccttttctaagctatat

SEQ ID NO: 260482 - DNA, 33 bp, Homo sapien
tcagccttaggctgtatcttttctaagctatat

SEQ ID NO: 260483 - DNA, 33 bp, Homo sapien
gctacacgagcttacaactttctgtcttgcttt

SEQ ID NO: 260484 - DNA, 33 bp, Homo sapien
gctacacgagcttacacctttctgtcttgcttt

SEQ ID NO: 260485 - DNA, 33 bp, Homo sapien
cttgctattgaatgaaaagttccttgctactcc

SEQ ID NO: 260486 - DNA, 33 bp, Homo sapien
cttgctattgaatgaagagttccttgctactcc

SEQ ID NO: 260487 - DNA, 33 bp, Homo sapien
atggaactctgatccaaaatgtgcagaaaccag

SEQ ID NO: 260488 - DNA, 33 bp, Homo sapien
atggaactctgatccacaatgtgcagaaaccag

SEQ ID NO: 260489 - DNA, 33 bp, Homo sapien
gaattagggctgaatacattacgttctttccat

SEQ ID NO: 260490 - DNA, 33 bp, Homo sapien
gaattagggctgaatagattacgttctttccat

SEQ ID NO: 260491 - DNA, 33 bp, Homo sapien
tactgtggctcagagcactcttctgcaacatcc

SEQ ID NO: 260492 - DNA, 33 bp, Homo sapien
tactgtggctcagagcgctcttctgcaacatcc

SEQ ID NO: 260493 - DNA, 33 bp, Homo sapien
aggttagaattagaaacagtgccatcggtcaca

SEQ ID NO: 260494 - DNA, 33 bp, Homo sapien
aggttagaattagaaagagtgccatcggtcaca

SEQ ID NO: 260495 - DNA, 33 bp, Homo sapien
aaaagcttgaaatgtgaaaggctttgtctagta

SEQ ID NO: 260496 - DNA, 33 bp, Homo sapien
aaaagcttgaaatgtggaaggctttgtctagta

SEQ ID NO: 260497 - DNA, 33 bp, Homo sapien
tcctggtcagtgaagtaaatgcttgcaaagtcc

SEQ ID NO: 260498 - DNA, 33 bp, Homo sapien
tcctggtcagtgaagtgaatgcttgcaaagtcc

SEQ ID NO: 260499 - DNA, 33 bp, Homo sapien
ccatttgcatatctccaatagtcagaattataa

SEQ ID NO: 260500 - DNA, 33 bp, Homo sapien
ccatttgcatatctcccatagtcagaattataa

SEQ ID NO: 260501 - DNA, 33 bp, Homo sapien
ctttaaaacctcattacggatatttcctagccc

SEQ ID NO: 260502 - DNA, 33 bp, Homo sapien
ctttaaaacctcattatggatatttcctagccc

SEQ ID NO: 260503 - DNA, 33 bp, Homo sapien
gcacagcctcagtaacaagggccatagagtagc

SEQ ID NO: 260504 - DNA, 33 bp, Homo sapien
gcacagcctcagtaacgagggccatagagtagc

SEQ ID NO: 260505 - DNA, 33 bp, Homo sapien
ataaacactggctatcaattcagagaggtgagg

SEQ ID NO: 260506 - DNA, 33 bp, Homo sapien
ataaacactggctatcgattcagagaggtgagg

SEQ ID NO: 260507 - DNA, 33 bp, Homo sapien
agggcctaaaccaagacaaatgaatgtcgcctc

SEQ ID NO: 260508 - DNA, 33 bp, Homo sapien
agggcctaaaccaagagaaatgaatgtcgcctc

SEQ ID NO: 260509 - DNA, 33 bp, Homo sapien
tgagtaaaataaaccaatctgaacaggctacat

SEQ ID NO: 260510 - DNA, 33 bp, Homo sapien
tgagtaaaataaaccagtctgaacaggctacat

SEQ ID NO: 260511 - DNA, 33 bp, Homo sapien
ctttaactcacttacacactacaaatcagttat

SEQ ID NO: 260512 - DNA, 33 bp, Homo sapien
ctttaactcacttacatactacaaatcagttat

SEQ ID NO: 260513 - DNA, 33 bp, Homo sapien
ccttcacaaaacttacagcaatcacaattgttg

SEQ ID NO: 260514 - DNA, 33 bp, Homo sapien
ccttcacaaaacttactgcaatcacaattgttg

SEQ ID NO: 260515 - DNA, 33 bp, Homo sapien
atagatgatttgtaacggacagaactttgcagc

SEQ ID NO: 260516 - DNA, 33 bp, Homo sapien
atagatgatttgtaactgacagaactttgcagc

SEQ ID NO: 260517 - DNA, 33 bp, Homo sapien
gaatatagctctggggacatttctaccctatca

SEQ ID NO: 260518 - DNA, 33 bp, Homo sapien
gaatatagctctgggggcatttctaccctatca

SEQ ID NO: 260519 - DNA, 33 bp, Homo sapien
atattcaatggcttcactaattggaactttgag

SEQ ID NO: 260520 - DNA, 33 bp, Homo sapien
atattcaatggcttcattaattggaactttgag

SEQ ID NO: 260521 - DNA, 33 bp, Homo sapien
ccactggtactaccaaacttagataaagatata

SEQ ID NO: 260522 - DNA, 33 bp, Homo sapien
ccactggtactaccaaccttagataaagatata

SEQ ID NO: 260523 - DNA, 33 bp, Homo sapien
agtctttcagattaaacttggagggcacttgcc

SEQ ID NO: 260524 - DNA, 33 bp, Homo sapien
agtctttcagattaaatttggagggcacttgcc

SEQ ID NO: 260525 - DNA, 33 bp, Homo sapien
atattaatcgatttggaagatgactgggacttt

SEQ ID NO: 260526 - DNA, 33 bp, Homo sapien
atattaatcgatttgggagatgactgggacttt

SEQ ID NO: 260527 - DNA, 33 bp, Homo sapien
cttattaggtgacaaaggtataaatggcaaata

SEQ ID NO: 260528 - DNA, 33 bp, Homo sapien
cttattaggtgacaaatgtataaatggcaaata

SEQ ID NO: 260529 - DNA, 33 bp, Homo sapien
ataatatgtgatctacaacgtattataaactcc

SEQ ID NO: 260530 - DNA, 33 bp, Homo sapien
ataatatgtgatctacgacgtattataaactcc

SEQ ID NO: 260531 - DNA, 33 bp, Homo sapien
cagtattcaaatgaacagaaattcagagaaggg

SEQ ID NO: 260532 - DNA, 33 bp, Homo sapien
cagtattcaaatgaacggaaattcagagaaggg

SEQ ID NO: 260533 - DNA, 33 bp, Homo sapien
tgtgcctgtctgggcaaaatttttagattcctc

SEQ ID NO: 260534 - DNA, 33 bp, Homo sapien
tgtgcctgtctgggcagaatttttagattcctc

SEQ ID NO: 260535 - DNA, 33 bp, Homo sapien
gggctttttcttgtccaagcctgaaccactgat

SEQ ID NO: 260536 - DNA, 33 bp, Homo sapien
gggctttttcttgtccgagcctgaaccactgat

SEQ ID NO: 260537 - DNA, 33 bp, Homo sapien
gaagtgaggttgccgcactgaggctgtctgctg

SEQ ID NO: 260538 - DNA, 33 bp, Homo sapien
gaagtgaggttgccgcgctgaggctgtctgctg

SEQ ID NO: 260539 - DNA, 33 bp, Homo sapien
agtaggaaatatttacagaagatttagggaagt

SEQ ID NO: 260540 - DNA, 33 bp, Homo sapien
agtaggaaatatttacggaagatttagggaagt

SEQ ID NO: 260541 - DNA, 33 bp, Homo sapien
ccttaccactcctctggaaggatgcctggcttg

SEQ ID NO: 260542 - DNA, 33 bp, Homo sapien
ccttaccactcctctgtaaggatgcctggcttg

SEQ ID NO: 260543 - DNA, 33 bp, Homo sapien
gccagagtagttgcagaacaattttgaaaccat

SEQ ID NO: 260544 - DNA, 33 bp, Homo sapien
gccagagtagttgcaggacaattttgaaaccat

SEQ ID NO: 260545 - DNA, 33 bp, Homo sapien
ttcaggatcatgccaaagtacccctgtctacaa

SEQ ID NO: 260546 - DNA, 33 bp, Homo sapien
ttcaggatcatgccaaggtacccctgtctacaa

SEQ ID NO: 260547 - DNA, 33 bp, Homo sapien
actagcccttcagaaacgacggagaacaggaat

SEQ ID NO: 260548 - DNA, 33 bp, Homo sapien
actagcccttcagaaatgacggagaacaggaat

SEQ ID NO: 260549 - DNA, 33 bp, Homo sapien
aaagaggtatatgacaatcatcaggaagataac

SEQ ID NO: 260550 - DNA, 33 bp, Homo sapien
aaagaggtatatgacattcatcaggaagataac

SEQ ID NO: 260551 - DNA, 33 bp, Homo sapien
catggaaatgtcctaacagtccttgtctcagag

SEQ ID NO: 260552 - DNA, 33 bp, Homo sapien
catggaaatgtcctaatagtccttgtctcagag

SEQ ID NO: 260553 - DNA, 33 bp, Homo sapien
catattttcttgtgtacgtcaggtaacttgggg

SEQ ID NO: 260554 - DNA, 33 bp, Homo sapien
catattttcttgtgtatgtcaggtaacttgggg

SEQ ID NO: 260555 - DNA, 33 bp, Homo sapien
ttgactgaggatgatccgagaatttttcacaga

SEQ ID NO: 260556 - DNA, 33 bp, Homo sapien
ttgactgaggatgatctgagaatttttcacaga

SEQ ID NO: 260557 - DNA, 33 bp, Homo sapien
gaaaacaaacaagcaacaaacttcctctagcct

SEQ ID NO: 260558 - DNA, 33 bp, Homo sapien
gaaaacaaacaagcaataaacttcctctagcct

SEQ ID NO: 260559 - DNA, 33 bp, Homo sapien
caacacacacaaaaaacgcacaactcattcccc

SEQ ID NO: 260560 - DNA, 33 bp, Homo sapien
caacacacacaaaaaatgcacaactcattcccc

SEQ ID NO: 260561 - DNA, 33 bp, Homo sapien
tagctatcactctcagaaaaatacacctgccca

SEQ ID NO: 260562 - DNA, 33 bp, Homo sapien
tagctatcactctcaggaaaatacacctgccca

SEQ ID NO: 260563 - DNA, 33 bp, Homo sapien
ctgcataatagcatccagagagaaccccagaaa

SEQ ID NO: 260564 - DNA, 33 bp, Homo sapien
ctgcataatagcatccggagagaaccccagaaa

SEQ ID NO: 260565 - DNA, 33 bp, Homo sapien
tggaggaagctgtccacggcagaatgaggaagg

SEQ ID NO: 260566 - DNA, 33 bp, Homo sapien
tggaggaagctgtccagggcagaatgaggaagg

SEQ ID NO: 260567 - DNA, 33 bp, Homo sapien
agcaaaattgaatttcccttagaagttggaatg

SEQ ID NO: 260568 - DNA, 33 bp, Homo sapien
agcaaaattgaatttctcttagaagttggaatg

SEQ ID NO: 260569 - DNA, 33 bp, Homo sapien
attactcaacataacaatggtttaaacaataca

SEQ ID NO: 260570 - DNA, 33 bp, Homo sapien
attactcaacataacagtggtttaaacaataca

SEQ ID NO: 260571 - DNA, 33 bp, Homo sapien
ttcctagaggttaacaataatagtaagccatta

SEQ ID NO: 260572 - DNA, 33 bp, Homo sapien
ttcctagaggttaacagtaatagtaagccatta

SEQ ID NO: 260573 - DNA, 33 bp, Homo sapien
acatgatgaaagtgacaaaaggaaagctacaca

SEQ ID NO: 260574 - DNA, 33 bp, Homo sapien
acatgatgaaagtgacgaaaggaaagctacaca

SEQ ID NO: 260575 - DNA, 33 bp, Homo sapien
agaactagaaatgtggcaagatctacatttgca

SEQ ID NO: 260576 - DNA, 33 bp, Homo sapien
agaactagaaatgtgggaagatctacatttgca

SEQ ID NO: 260577 - DNA, 33 bp, Homo sapien
agatatttggggtttacgctcagacactttcat

SEQ ID NO: 260578 - DNA, 33 bp, Homo sapien
agatatttggggtttatgctcagacactttcat

SEQ ID NO: 260579 - DNA, 33 bp, Homo sapien
agaatgtctgggttcaaagaaggagttgtggag

SEQ ID NO: 260580 - DNA, 33 bp, Homo sapien
agaatgtctgggttcagagaaggagttgtggag

SEQ ID NO: 260581 - DNA, 33 bp, Homo sapien
ctgggacgagtgcgcaaattgagcccagcgttt

SEQ ID NO: 260582 - DNA, 33 bp, Homo sapien
ctgggacgagtgcgcagattgagcccagcgttt

SEQ ID NO: 260583 - DNA, 33 bp, Homo sapien
gaatcttgcctctcaacaaagaaccctgcaagc

SEQ ID NO: 260584 - DNA, 33 bp, Homo sapien
gaatcttgcctctcaataaagaaccctgcaagc

SEQ ID NO: 260585 - DNA, 33 bp, Homo sapien
tctaaagtttcgattacgctactcatctatgca

SEQ ID NO: 260586 - DNA, 33 bp, Homo sapien
tctaaagtttcgattatgctactcatctatgca

SEQ ID NO: 260587 - DNA, 33 bp, Homo sapien
agagaaagatcagcacagctagtattctgcgcc

SEQ ID NO: 260588 - DNA, 33 bp, Homo sapien
agagaaagatcagcacggctagtattctgcgcc

SEQ ID NO: 260589 - DNA, 33 bp, Homo sapien
gggctgtgcgagtgagccctccagccaggagcc

SEQ ID NO: 260590 - DNA, 33 bp, Homo sapien
gggctgtgcgagtgagtcctccagccaggagcc

SEQ ID NO: 260591 - DNA, 33 bp, Homo sapien
gcaaggaccacatctccattcttgtgtgcccag

SEQ ID NO: 260592 - DNA, 33 bp, Homo sapien
gcaaggaccacatctcgattcttgtgtgcccag

SEQ ID NO: 260593 - DNA, 33 bp, Homo sapien
tagtgcaaaatcaatacgtatccgcctctacaa

SEQ ID NO: 260594 - DNA, 33 bp, Homo sapien
tagtgcaaaatcaatatgtatccgcctctacaa

SEQ ID NO: 260595 - DNA, 33 bp, Homo sapien
gagaacaggaacttaacctgttctgctcctttt

SEQ ID NO: 260596 - DNA, 33 bp, Homo sapien
gagaacaggaacttaatctgttctgctcctttt

SEQ ID NO: 260597 - DNA, 33 bp, Homo sapien
ccaaactggcatgaccaagctctaaatttggtg

SEQ ID NO: 260598 - DNA, 33 bp, Homo sapien
ccaaactggcatgaccgagctctaaatttggtg

SEQ ID NO: 260599 - DNA, 33 bp, Homo sapien
actgcagcttccattaaattgtaaatactcttt

SEQ ID NO: 260600 - DNA, 33 bp, Homo sapien
actgcagcttccattagattgtaaatactcttt

SEQ ID NO: 260601 - DNA, 33 bp, Homo sapien
ttgcagaaagcaaatccctaactggaaacagga

SEQ ID NO: 260602 - DNA, 33 bp, Homo sapien
ttgcagaaagcaaatctctaactggaaacagga

SEQ ID NO: 260603 - DNA, 33 bp, Homo sapien
ttcaaataatggaaaaccatgatctcaatcagc

SEQ ID NO: 260604 - DNA, 33 bp, Homo sapien
ttcaaataatggaaaatcatgatctcaatcagc

SEQ ID NO: 260605 - DNA, 33 bp, Homo sapien
gaaacttctgtgacacagctccaaaaggtgcct

SEQ ID NO: 260606 - DNA, 33 bp, Homo sapien
gaaacttctgtgacacggctccaaaaggtgcct

SEQ ID NO: 260607 - DNA, 33 bp, Homo sapien
tcaccctggtgagttacggtttgccatttgctt

SEQ ID NO: 260608 - DNA, 33 bp, Homo sapien
tcaccctggtgagttatggtttgccatttgctt

SEQ ID NO: 260609 - DNA, 33 bp, Homo sapien
tgggtcacaaattgtacattagcttaacttgta

SEQ ID NO: 260610 - DNA, 33 bp, Homo sapien
tgggtcacaaattgtatattagcttaacttgta

SEQ ID NO: 260611 - DNA, 33 bp, Homo sapien
aacaatagcaataacaacagcggcagatggcaa

SEQ ID NO: 260612 - DNA, 33 bp, Homo sapien
aacaatagcaataacatcagcggcagatggcaa

SEQ ID NO: 260613 - DNA, 33 bp, Homo sapien
gccttcccagctatggacacaacaacactttta

SEQ ID NO: 260614 - DNA, 33 bp, Homo sapien
gccttcccagctatgggcacaacaacactttta

SEQ ID NO: 260615 - DNA, 33 bp, Homo sapien
ccatcactcagtctcaaagctgacttgaagact

SEQ ID NO: 260616 - DNA, 33 bp, Homo sapien
ccatcactcagtctcagagctgacttgaagact

SEQ ID NO: 260617 - DNA, 33 bp, Homo sapien
gagtgaaattcctcaacgggctcatgctggtca

SEQ ID NO: 260618 - DNA, 33 bp, Homo sapien
gagtgaaattcctcaatgggctcatgctggtca

SEQ ID NO: 260619 - DNA, 33 bp, Homo sapien
ggccactgagctagtaataagtcaggattcaag

SEQ ID NO: 260620 - DNA, 33 bp, Homo sapien
ggccactgagctagtagtaagtcaggattcaag

SEQ ID NO: 260621 - DNA, 33 bp, Homo sapien
cttacctcctctaagcagaatctgacatgaagc

SEQ ID NO: 260622 - DNA, 33 bp, Homo sapien
cttacctcctctaagctgaatctgacatgaagc

SEQ ID NO: 260623 - DNA, 33 bp, Homo sapien
tctgtctatagtatccaacagtataacaaaatg

SEQ ID NO: 260624 - DNA, 33 bp, Homo sapien
tctgtctatagtatccgacagtataacaaaatg

SEQ ID NO: 260625 - DNA, 33 bp, Homo sapien
gtgagatcccgaggagaaaacaatttgaaagcc

SEQ ID NO: 260626 - DNA, 33 bp, Homo sapien
gtgagatcccgaggaggaaacaatttgaaagcc

SEQ ID NO: 260627 - DNA, 33 bp, Homo sapien
acactatgtgattccaatgaagttctgcttttt

SEQ ID NO: 260628 - DNA, 33 bp, Homo sapien
acactatgtgattccagtgaagttctgcttttt

SEQ ID NO: 260629 - DNA, 33 bp, Homo sapien
ccagtgaggaggctaacgttggcttatgtgcac

SEQ ID NO: 260630 - DNA, 33 bp, Homo sapien
ccagtgaggaggctaatgttggcttatgtgcac

SEQ ID NO: 260631 - DNA, 33 bp, Homo sapien
ttcagttatttaacacaggtctttgcagctggc

SEQ ID NO: 260632 - DNA, 33 bp, Homo sapien
ttcagttatttaacacgggtctttgcagctggc

SEQ ID NO: 260633 - DNA, 33 bp, Homo sapien
tttgttgcaatccccacagtcatcatggtcccg

SEQ ID NO: 260634 - DNA, 33 bp, Homo sapien
tttgttgcaatccccatagtcatcatggtcccg

SEQ ID NO: 260635 - DNA, 33 bp, Homo sapien
atcagtcacctcctcacgaacaaagtacagttg

SEQ ID NO: 260636 - DNA, 33 bp, Homo sapien
atcagtcacctcctcatgaacaaagtacagttg

SEQ ID NO: 260637 - DNA, 33 bp, Homo sapien
actgttactgttcacagagcaagttagtttagt

SEQ ID NO: 260638 - DNA, 33 bp, Homo sapien
actgttactgttcacatagcaagttagtttagt

SEQ ID NO: 260639 - DNA, 33 bp, Homo sapien
tccatccaccctggacagctttcttgagccttg

SEQ ID NO: 260640 - DNA, 33 bp, Homo sapien
tccatccaccctggacggctttcttgagccttg

SEQ ID NO: 260641 - DNA, 33 bp, Homo sapien
aaatgagcataggaaacggttcaccgtggtaca

SEQ ID NO: 260642 - DNA, 33 bp, Homo sapien
aaatgagcataggaaatggttcaccgtggtaca

SEQ ID NO: 260643 - DNA, 33 bp, Homo sapien
taggcagccctgtgtacaggaattcttaatcct

SEQ ID NO: 260644 - DNA, 33 bp, Homo sapien
taggcagccctgtgtataggaattcttaatcct

SEQ ID NO: 260645 - DNA, 33 bp, Homo sapien
aaggcacaccctatcaaaagtatcaaccaggcc

SEQ ID NO: 260646 - DNA, 33 bp, Homo sapien
aaggcacaccctatcagaagtatcaaccaggcc

SEQ ID NO: 260647 - DNA, 33 bp, Homo sapien
gagaacaaggaaatagccctacagcagagtcat

SEQ ID NO: 260648 - DNA, 33 bp, Homo sapien
gagaacaaggaaataggcctacagcagagtcat

SEQ ID NO: 260649 - DNA, 33 bp, Homo sapien
gggctcaaagccataacattggccctaagatcc

SEQ ID NO: 260650 - DNA, 33 bp, Homo sapien
gggctcaaagccataatattggccctaagatcc

SEQ ID NO: 260651 - DNA, 33 bp, Homo sapien
ttctttctaatccactaaccttttgctgtcagc

SEQ ID NO: 260652 - DNA, 33 bp, Homo sapien
ttctttctaatccactgaccttttgctgtcagc

SEQ ID NO: 260653 - DNA, 33 bp, Homo sapien
agtctaaactgaacaccgtcaagcggtattagg

SEQ ID NO: 260654 - DNA, 33 bp, Homo sapien
agtctaaactgaacactgtcaagcggtattagg

SEQ ID NO: 260655 - DNA, 33 bp, Homo sapien
cccatgacaataatgacgatggctaacaactat

SEQ ID NO: 260656 - DNA, 33 bp, Homo sapien
cccatgacaataatgatgatggctaacaactat

SEQ ID NO: 260657 - DNA, 33 bp, Homo sapien
ttgctcctctcttcaccagatctgcacatgtgg

SEQ ID NO: 260658 - DNA, 33 bp, Homo sapien
ttgctcctctcttcactagatctgcacatgtgg

SEQ ID NO: 260659 - DNA, 33 bp, Homo sapien
actggccttcccttccgcaaagctgggtgacaa

SEQ ID NO: 260660 - DNA, 33 bp, Homo sapien
actggccttcccttcctcaaagctgggtgacaa

SEQ ID NO: 260661 - DNA, 33 bp, Homo sapien
tcttcccaggaggctgaatttcctcaaacacga

SEQ ID NO: 260662 - DNA, 33 bp, Homo sapien
tcttcccaggaggctggatttcctcaaacacga

SEQ ID NO: 260663 - DNA, 33 bp, Homo sapien
ttctctgtgttctaggaaatcataatgtcagct

SEQ ID NO: 260664 - DNA, 33 bp, Homo sapien
ttctctgtgttctagggaatcataatgtcagct

SEQ ID NO: 260665 - DNA, 33 bp, Homo sapien; identical to SEQ ID NO: 260663

SEQ ID NO: 260666 - DNA, 33 bp, Homo sapien; identical to SEQ ID NO: 260664

SEQ ID NO: 260667 - DNA, 33 bp, Homo sapien
agactcattcgctcaacaaacacttgtgcagga

SEQ ID NO: 260668 - DNA, 33 bp, Homo sapien
agactcattcgctcaataaacacttgtgcagga

SEQ ID NO: 260669 - DNA, 33 bp, Homo sapien
ccttacctgatatgcaaagagaagtgaacctct

SEQ ID NO: 260670 - DNA, 33 bp, Homo sapien
ccttacctgatatgcagagagaagtgaacctct

SEQ ID NO: 260671 - DNA, 33 bp, Homo sapien
tttgagctgaaccctgacagatggctctcagca

SEQ ID NO: 260672 - DNA, 33 bp, Homo sapien
tttgagctgaaccctggcagatggctctcagca

SEQ ID NO: 260673 - DNA, 33 bp, Homo sapien
ctgaggcgtctgtctcaattctgtcaatcagaa

SEQ ID NO: 260674 - DNA, 33 bp, Homo sapien
ctgaggcgtctgtctcgattctgtcaatcagaa

SEQ ID NO: 260675 - DNA, 33 bp, Homo sapien
atgtacaggtccacaaacttactggcattgttc

SEQ ID NO: 260676 - DNA, 33 bp, Homo sapien
atgtacaggtccacaatcttactggcattgttc

SEQ ID NO: 260677 - DNA, 33 bp, Homo sapien; identical to SEQ ID NO: 260675

SEQ ID NO: 260678 - DNA, 33 bp, Homo sapien; identical to SEQ ID NO: 260676

SEQ ID NO: 260679 - DNA, 33 bp, Homo sapien
gcctcaagtgatcatcccaccccagcttcctga

SEQ ID NO: 260680 - DNA, 33 bp, Homo sapien
gcctcaagtgatcatcgcaccccagcttcctga

SEQ ID NO: 260681 - DNA, 33 bp, Homo sapien
gcctggccaacttctacaactttaacacctggt

SEQ ID NO: 260682 - DNA, 33 bp, Homo sapien
gcctggccaacttctataactttaacacctggt

SEQ ID NO: 260683 - DNA, 33 bp, Homo sapien
acctccccatcttataagagtcaacttctgtaa

SEQ ID NO: 260684 - DNA, 33 bp, Homo sapien
acctccccatcttataggagtcaacttctgtaa

SEQ ID NO: 260685 - DNA, 33 bp, Homo sapien
cggtggtgctcacagagaataggttgtcttagc

SEQ ID NO: 260686 - DNA, 33 bp, Homo sapien
cggtggtgctcacagataataggttgtcttagc

SEQ ID NO: 260687 - DNA, 33 bp, Homo sapien
gttattcaaccaaaacactgatcaaattaaata

SEQ ID NO: 260688 - DNA, 33 bp, Homo sapien
gttattcaaccaaaacgctgatcaaattaaata

SEQ ID NO: 260689 - DNA, 33 bp, Homo sapien
tggattctatttgggcaataagccagctcagag

SEQ ID NO: 260690 - DNA, 33 bp, Homo sapien
tggattctatttgggccataagccagctcagag

SEQ ID NO: 260691 - DNA, 33 bp, Homo sapien
gtacaccatagtgggacagggtgccaggagacc

SEQ ID NO: 260692 - DNA, 33 bp, Homo sapien
gtacaccatagtgggatagggtgccaggagacc

SEQ ID NO: 260693 - DNA, 33 bp, Homo sapien
gcaccttgcacagtcaacacaaaataaattcct

SEQ ID NO: 260694 - DNA, 33 bp, Homo sapien
gcaccttgcacagtcagcacaaaataaattcct

SEQ ID NO: 260695 - DNA, 33 bp, Homo sapien
atatcttaaaatgaaaaagcagtttgtgacctc

SEQ ID NO: 260696 - DNA, 33 bp, Homo sapien
atatcttaaaatgaaacagcagtttgtgacctc

SEQ ID NO: 260697 - DNA, 33 bp, Homo sapien
ctgtggaggtgaccagacatatgcgaaggtcct

SEQ ID NO: 260698 - DNA, 33 bp, Homo sapien
ctgtggaggtgaccaggcatatgcgaaggtcct

SEQ ID NO: 260699 - DNA, 33 bp, Homo sapien
tcaaagcatccaatacagagattagaaaacata

SEQ ID NO: 260700 - DNA, 33 bp, Homo sapien
tcaaagcatccaatacggagattagaaaacata

SEQ ID NO: 260701 - DNA, 33 bp, Homo sapien
tgtcttctaaaaacacccgttcagctctttaca

SEQ ID NO: 260702 - DNA, 33 bp, Homo sapien
tgtcttctaaaaacactcgttcagctctttaca

SEQ ID NO: 260703 - DNA, 33 bp, Homo sapien
taccaagttatcaaaacacagcatcactgaaac

SEQ ID NO: 260704 - DNA, 33 bp, Homo sapien
taccaagttatcaaaagacagcatcactgaaac

SEQ ID NO: 260705 - DNA, 33 bp, Homo sapien
aatggcagctttgagcaactgagctagagatga

SEQ ID NO: 260706 - DNA, 33 bp, Homo sapien
aatggcagctttgagcgactgagctagagatga

SEQ ID NO: 260707 - DNA, 33 bp, Homo sapien
cacagagccaacttgacgggtctcctactggcc

SEQ ID NO: 260708 - DNA, 33 bp, Homo sapien
cacagagccaacttgatgggtctcctactggcc

SEQ ID NO: 260709 - DNA, 33 bp, Homo sapien
ttgtatttcctagctccatccactgaaagagct

SEQ ID NO: 260710 - DNA, 33 bp, Homo sapien
ttgtatttcctagctcgatccactgaaagagct

SEQ ID NO: 260711 - DNA, 33 bp, Homo sapien
ttgtggattctcatccaaaaacaatcccacgtc

SEQ ID NO: 260712 - DNA, 33 bp, Homo sapien
ttgtggattctcatccgaaaacaatcccacgtc

SEQ ID NO: 260713 - DNA, 33 bp, Homo sapien
ccacactctgtcaatactagctttctggttgtt

SEQ ID NO: 260714 - DNA, 33 bp, Homo sapien
ccacactctgtcaatagtagctttctggttgtt

SEQ ID NO: 260715 - DNA, 33 bp, Homo sapien
aggatacagcaggatcaagggtgctggagcaag

SEQ ID NO: 260716 - DNA, 33 bp, Homo sapien
aggatacagcaggatcgagggtgctggagcaag

SEQ ID NO: 260717 - DNA, 33 bp, Homo sapien
gaaaaacaggttgtgaaagttcataggccaatt

SEQ ID NO: 260718 - DNA, 33 bp, Homo sapien
gaaaaacaggttgtgagagttcataggccaatt

SEQ ID NO: 260719 - DNA, 33 bp, Homo sapien
tcttgaatttgtagataaagtctctaaattcct

SEQ ID NO: 260720 - DNA, 33 bp, Homo sapien
tcttgaatttgtagatgaagtctctaaattcct

SEQ ID NO: 260721 - DNA, 33 bp, Homo sapien
tacaagaattgggaccggagtacagatgaccta

SEQ ID NO: 260722 - DNA, 33 bp, Homo sapien
tacaagaattgggacctgagtacagatgaccta

SEQ ID NO: 260723 - DNA, 33 bp, Homo sapien
acagaaatggtacatagcaaggtcaatatcaga

SEQ ID NO: 260724 - DNA, 33 bp, Homo sapien
acagaaatggtacatatcaaggtcaatatcaga

SEQ ID NO: 260725 - DNA, 33 bp, Homo sapien
aatctttaccaccccacgcctcttattactctt

SEQ ID NO: 260726 - DNA, 33 bp, Homo sapien
aatctttaccaccccatgcctcttattactctt

SEQ ID NO: 260727 - DNA, 33 bp, Homo sapien
tctgtcccttcaccatgactggattgtgtgttt

SEQ ID NO: 260728 - DNA, 33 bp, Homo sapien
tctgtcccttcaccattactggattgtgtgttt

SEQ ID NO: 260729 - DNA, 33 bp, Homo sapien
atttcctgcagtgtaacgggtaagaaaaattga

SEQ ID NO: 260730 - DNA, 33 bp, Homo sapien
atttcctgcagtgtaatgggtaagaaaaattga

SEQ ID NO: 260731 - DNA, 33 bp, Homo sapien
agggataaaagactacaaatatgatgcagtgta

SEQ ID NO: 260732 - DNA, 33 bp, Homo sapien
agggataaaagactactaatatgatgcagtgta

SEQ ID NO: 260733 - DNA, 33 bp, Homo sapien
aatgactgatttctcacgatgacattttggtaa

SEQ ID NO: 260734 - DNA, 33 bp, Homo sapien
aatgactgatttctcaggatgacattttggtaa

SEQ ID NO: 260735 - DNA, 33 bp, Homo sapien
ctgggaaggatgccaacagacctgtgtcagaga

SEQ ID NO: 260736 - DNA, 33 bp, Homo sapien
ctgggaaggatgccaatagacctgtgtcagaga

SEQ ID NO: 260737 - DNA, 33 bp, Homo sapien
ttccagtcattggcacgcattttctctttatta

SEQ ID NO: 260738 - DNA, 33 bp, Homo sapien
ttccagtcattggcactcattttctctttatta

SEQ ID NO: 260739 - DNA, 33 bp, Homo sapien
agggttgttggttaaaataaatcacttctgagt

SEQ ID NO: 260740 - DNA, 33 bp, Homo sapien
agggttgttggttaaactaaatcacttctgagt

SEQ ID NO: 260741 - DNA, 33 bp, Homo sapien
ctcttacttatccaacagtcttaggtactttct

SEQ ID NO: 260742 - DNA, 33 bp, Homo sapien
ctcttacttatccaacggtcttaggtactttct

SEQ ID NO: 260743 - DNA, 33 bp, Homo sapien
acatgatcataaaaggaacatttcaaatgaaga

SEQ ID NO: 260744 - DNA, 33 bp, Homo sapien
acatgatcataaaagggacatttcaaatgaaga

SEQ ID NO: 260745 - DNA, 33 bp, Homo sapien
atttcttccaaaataacagtagatcacccacag

SEQ ID NO: 260746 - DNA, 33 bp, Homo sapien
atttcttccaaaataatagtagatcacccacag

SEQ ID NO: 260747 - DNA, 33 bp, Homo sapien
acaaatcttcaacaaacgtatcaaattcaagaa

SEQ ID NO: 260748 - DNA, 33 bp, Homo sapien
acaaatcttcaacaaatgtatcaaattcaagaa

SEQ ID NO: 260749 - DNA, 33 bp, Homo sapien
ctacattaaacaaaagccagaattctacatgtt

SEQ ID NO: 260750 - DNA, 33 bp, Homo sapien
ctacattaaacaaaagtcagaattctacatgtt

SEQ ID NO: 260751 - DNA, 33 bp, Homo sapien; identical to SEQ ID NO: 260749

SEQ ID NO: 260752 - DNA, 33 bp, Homo sapien; identical to SEQ ID NO: 260750

SEQ ID NO: 260753 - DNA, 33 bp, Homo sapien
ggctttttctggttccaagttggcagctgccct

SEQ ID NO: 260754 - DNA, 33 bp, Homo sapien
ggctttttctggttcctagttggcagctgccct

SEQ ID NO: 260755 - DNA, 33 bp, Homo sapien
agcacctatgtaataacgcacacggctaaaggc

SEQ ID NO: 260756 - DNA, 33 bp, Homo sapien
agcacctatgtaataatgcacacggctaaaggc

SEQ ID NO: 260757 - DNA, 33 bp, Homo sapien
tggttgacatccaagtaaacaaggccctctgca

SEQ ID NO: 260758 - DNA, 33 bp, Homo sapien
tggttgacatccaagttaacaaggccctctgca

SEQ ID NO: 260759 - DNA, 33 bp, Homo sapien
taaatgtctgctgctacggaagcaagaaaattc

SEQ ID NO: 260760 - DNA, 33 bp, Homo sapien
taaatgtctgctgctatggaagcaagaaaattc

SEQ ID NO: 260761 - DNA, 33 bp, Homo sapien
ttcattaggttgttgcaaggattagataaaatg

SEQ ID NO: 260762 - DNA, 33 bp, Homo sapien
ttcattaggttgttgcgaggattagataaaatg

SEQ ID NO: 260763 - DNA, 33 bp, Homo sapien
gagcttgttcagaatcacaaactggctgggcat

SEQ ID NO: 260764 - DNA, 33 bp, Homo sapien
gagcttgttcagaatctcaaactggctgggcat

SEQ ID NO: 260765 - DNA, 33 bp, Homo sapien
tgtcctgttaagaacacgtgaagattccaggtg

SEQ ID NO: 260766 - DNA, 33 bp, Homo sapien
tgtcctgttaagaacaggtgaagattccaggtg

SEQ ID NO: 260767 - DNA, 33 bp, Homo sapien
tcttgaatatcaacctcacctttcttctgagtc

SEQ ID NO: 260768 - DNA, 33 bp, Homo sapien
tcttgaatatcaaccttacctttcttctgagtc

SEQ ID NO: 260769 - DNA, 33 bp, Homo sapien
ccatttccatatcaaaaaattatgaaagcatgg

SEQ ID NO: 260770 - DNA, 33 bp, Homo sapien
ccatttccatatcaaacaattatgaaagcatgg

SEQ ID NO: 260771 - DNA, 33 bp, Homo sapien
ttccccaagaacctaccgagaaggtgttaataa

SEQ ID NO: 260772 - DNA, 33 bp, Homo sapien
ttccccaagaacctactgagaaggtgttaataa

SEQ ID NO: 260773 - DNA, 33 bp, Homo sapien
tagtagttgccaggtacggtgaaagaaaggggt

SEQ ID NO: 260774 - DNA, 33 bp, Homo sapien
tagtagttgccaggtatggtgaaagaaaggggt

SEQ ID NO: 260775 - DNA, 33 bp, Homo sapien
acagccactacagtgaatataaagtggtatctc

SEQ ID NO: 260776 - DNA, 33 bp, Homo sapien
acagccactacagtgagtataaagtggtatctc

SEQ ID NO: 260777 - DNA, 33 bp, Homo sapien
tggtgtatctcaaacaccatctatttaactatc

SEQ ID NO: 260778 - DNA, 33 bp, Homo sapien
tggtgtatctcaaacatcatctatttaactatc

SEQ ID NO: 260779 - DNA, 33 bp, Homo sapien
ttcacatttcagtagcaaagtgagaactgcaaa

SEQ ID NO: 260780 - DNA, 33 bp, Homo sapien
ttcacatttcagtagcgaagtgagaactgcaaa

SEQ ID NO: 260781 - DNA, 33 bp, Homo sapien
tgataaaaactcagaccactaaacaaaacatat

SEQ ID NO: 260782 - DNA, 33 bp, Homo sapien
tgataaaaactcagacgactaaacaaaacatat

SEQ ID NO: 260783 - DNA, 33 bp, Homo sapien
acacctgtccttgccccgcagaagtaacaattt

SEQ ID NO: 260784 - DNA, 33 bp, Homo sapien
acacctgtccttgccctgcagaagtaacaattt

SEQ ID NO: 260785 - DNA, 33 bp, Homo sapien
gagcggtcacaggcaacgaagtttctccatgac

SEQ ID NO: 260786 - DNA, 33 bp, Homo sapien
gagcggtcacaggcaatgaagtttctccatgac

SEQ ID NO: 260787 - DNA, 33 bp, Homo sapien
acaaggctgacccacaaagaagcccaagaaagg

SEQ ID NO: 260788 - DNA, 33 bp, Homo sapien
acaaggctgacccacacagaagcccaagaaagg

SEQ ID NO: 260789 - DNA, 33 bp, Homo sapien
gcctccttctctcagacgctcactttaacccct

SEQ ID NO: 260790 - DNA, 33 bp, Homo sapien
gcctccttctctcagatgctcactttaacccct

SEQ ID NO: 260791 - DNA, 33 bp, Homo sapien
ggaccacaagtgtacaacaccactcctggctaa

SEQ ID NO: 260792 - DNA, 33 bp, Homo sapien
ggaccacaagtgtacaccaccactcctggctaa

SEQ ID NO: 260793 - DNA, 33 bp, Homo sapien
tggcaaaattcttccaactcctctttgtttcaa

SEQ ID NO: 260794 - DNA, 33 bp, Homo sapien
tggcaaaattcttccagctcctctttgtttcaa

SEQ ID NO: 260795 - DNA, 33 bp, Homo sapien
tttcctattcccggccagagggacagcccattt

SEQ ID NO: 260796 - DNA, 33 bp, Homo sapien
tttcctattcccggcctgagggacagcccattt

SEQ ID NO: 260797 - DNA, 33 bp, Homo sapien
catagcgataaatccaatggaaactcccaaata

SEQ ID NO: 260798 - DNA, 33 bp, Homo sapien
catagcgataaatccagtggaaactcccaaata

SEQ ID NO: 260799 - DNA, 33 bp, Homo sapien
aagtagtgagacaccactggggcaggaaatcat

SEQ ID NO: 260800 - DNA, 33 bp, Homo sapien
aagtagtgagacaccattggggcaggaaatcat

SEQ ID NO: 260801 - DNA, 33 bp, Homo sapien
tggatgtatctcaaaggcataatgttgaatgaa

SEQ ID NO: 260802 - DNA, 33 bp, Homo sapien
tggatgtatctcaaagtcataatgttgaatgaa

SEQ ID NO: 260803 - DNA, 33 bp, Homo sapien
ggtagttgagtcaataagatttgttgatttact

SEQ ID NO: 260804 - DNA, 33 bp, Homo sapien
ggtagttgagtcaataggatttgttgatttact

SEQ ID NO: 260805 - DNA, 33 bp, Homo sapien
ccactgaattcctccaacacgagacttctcttt

SEQ ID NO: 260806 - DNA, 33 bp, Homo sapien
ccactgaattcctccatcacgagacttctcttt

SEQ ID NO: 260807 - DNA, 33 bp, Homo sapien
tcacttgatccattgcaacaaggaaattttaat

SEQ ID NO: 260808 - DNA, 33 bp, Homo sapien
tcacttgatccattgctacaaggaaattttaat

SEQ ID NO: 260809 - DNA, 33 bp, Homo sapien
gacagatgacaagaacaagtggagtctgggaat

SEQ ID NO: 260810 - DNA, 33 bp, Homo sapien
gacagatgacaagaaccagtggagtctgggaat

SEQ ID NO: 260811 - DNA, 33 bp, Homo sapien
cagtgccttctggaacacttcccaaaggatctg

SEQ ID NO: 260812 - DNA, 33 bp, Homo sapien
cagtgccttctggaacgcttcccaaaggatctg

SEQ ID NO: 260813 - DNA, 33 bp, Homo sapien
gaagattataatgaagcagaaaaagtcctactg

SEQ ID NO: 260814 - DNA, 33 bp, Homo sapien
gaagattataatgaagtagaaaaagtcctactg

SEQ ID NO: 260815 - DNA, 33 bp, Homo sapien
ttcgataaacagttaccatgaaagaaaccacac

SEQ ID NO: 260816 - DNA, 33 bp, Homo sapien
ttcgataaacagttactatgaaagaaaccacac

SEQ ID NO: 260817 - DNA, 33 bp, Homo sapien
tggacagcttacccacccaggtgcttcacttct

SEQ ID NO: 260818 - DNA, 33 bp, Homo sapien
tggacagcttacccacgcaggtgcttcacttct

SEQ ID NO: 260819 - DNA, 33 bp, Homo sapien
tgggataaaacaaggcaatgtctcagaggcaga

SEQ ID NO: 260820 - DNA, 33 bp, Homo sapien
tgggataaaacaaggcgatgtctcagaggcaga

SEQ ID NO: 260821 - DNA, 33 bp, Homo sapien
ggccctgggtgtctcaaataaactgtgagtagg

SEQ ID NO: 260822 - DNA, 33 bp, Homo sapien
ggccctgggtgtctcagataaactgtgagtagg

SEQ ID NO: 260823 - DNA, 33 bp, Homo sapien
attgtgagtagttccaccagacatcggcactgg

SEQ ID NO: 260824 - DNA, 33 bp, Homo sapien
attgtgagtagttccagcagacatcggcactgg

SEQ ID NO: 260825 - DNA, 33 bp, Homo sapien
agaggggcacagaatcaaaagctatgcgtggag

SEQ ID NO: 260826 - DNA, 33 bp, Homo sapien
agaggggcacagaatcgaaagctatgcgtggag

SEQ ID NO: 260827 - DNA, 33 bp, Homo sapien
ttttcccatcccctaacaacttctcttttctac

SEQ ID NO: 260828 - DNA, 33 bp, Homo sapien
ttttcccatcccctaataacttctcttttctac

SEQ ID NO: 260829 - DNA, 33 bp, Homo sapien
catgcacttctcctaacctgagcgtaggaccag

SEQ ID NO: 260830 - DNA, 33 bp, Homo sapien
catgcacttctcctaatctgagcgtaggaccag

SEQ ID NO: 260831 - DNA, 33 bp, Homo sapien
agccagggattggaaactgaaagcctcggaact

SEQ ID NO: 260832 - DNA, 33 bp, Homo sapien
agccagggattggaaattgaaagcctcggaact

SEQ ID NO: 260833 - DNA, 33 bp, Homo sapien
caactgggataaatacaacagaagtgagcgcag

SEQ ID NO: 260834 - DNA, 33 bp, Homo sapien
caactgggataaatacgacagaagtgagcgcag

SEQ ID NO: 260835 - DNA, 33 bp, Homo sapien
agcactcaagtatccacctggtacctgcaagat

SEQ ID NO: 260836 - DNA, 33 bp, Homo sapien
agcactcaagtatccatctggtacctgcaagat

SEQ ID NO: 260837 - DNA, 33 bp, Homo sapien
acaaagtcaggggacacatttagcaggatcttt

SEQ ID NO: 260838 - DNA, 33 bp, Homo sapien
acaaagtcaggggacatatttagcaggatcttt

SEQ ID NO: 260839 - DNA, 33 bp, Homo sapien
caagccgctgtacgtgcagaaaaacaaatcgat

SEQ ID NO: 260840 - DNA, 33 bp, Homo sapien
caagccgctgtacgtggagaaaaacaaatcgat

SEQ ID NO: 260841 - DNA, 33 bp, Homo sapien
tcggccatttcaagaacgtaatgtgagtggaat

SEQ ID NO: 260842 - DNA, 33 bp, Homo sapien
tcggccatttcaagaatgtaatgtgagtggaat

SEQ ID NO: 260843 - DNA, 33 bp, Homo sapien
aattgcaacaatacaaatagtgtagtgatgcaa

SEQ ID NO: 260844 - DNA, 33 bp, Homo sapien
aattgcaacaatacaagtagtgtagtgatgcaa

SEQ ID NO: 260845 - DNA, 33 bp, Homo sapien
atgacaacctcaagacagcactaatagcaaatt

SEQ ID NO: 260846 - DNA, 33 bp, Homo sapien
atgacaacctcaagacggcactaatagcaaatt

SEQ ID NO: 260847 - DNA, 33 bp, Homo sapien
tgccagtaactaccagcaaggatctcatttagc

SEQ ID NO: 260848 - DNA, 33 bp, Homo sapien
tgccagtaactaccaggaaggatctcatttagc

SEQ ID NO: 260849 - DNA, 33 bp, Homo sapien
aacaaataaacggaaagataagctctttacagc

SEQ ID NO: 260850 - DNA, 33 bp, Homo sapien
aacaaataaacggaaatataagctctttacagc

SEQ ID NO: 260851 - DNA, 33 bp, Homo sapien
atggcacatttcctgacgagggacaggctccgg

SEQ ID NO: 260852 - DNA, 33 bp, Homo sapien
atggcacatttcctgatgagggacaggctccgg

SEQ ID NO: 260853 - DNA, 33 bp, Homo sapien
actagcagagccaggaactaaaacatgggcaag

SEQ ID NO: 260854 - DNA, 33 bp, Homo sapien
actagcagagccaggagctaaaacatgggcaag

SEQ ID NO: 260855 - DNA, 33 bp, Homo sapien
tagcaaatgtagaaaaaaaatacagcacaccaa

SEQ ID NO: 260856 - DNA, 33 bp, Homo sapien
tagcaaatgtagaaaacaaatacagcacaccaa

SEQ ID NO: 260857 - DNA, 33 bp, Homo sapien
ttcttctaaaaatagggattagagcagatgtag

SEQ ID NO: 260858 - DNA, 33 bp, Homo sapien
ttcttctaaaaataggtattagagcagatgtag

SEQ ID NO: 260859 - DNA, 33 bp, Homo sapien
agggctggatggagaaaagatagaagaggaagg

SEQ ID NO: 260860 - DNA, 33 bp, Homo sapien
agggctggatggagaagagatagaagaggaagg

SEQ ID NO: 260861 - DNA, 33 bp, Homo sapien
cagggtctgctctttgaatgctccccaccactt

SEQ ID NO: 260862 - DNA, 33 bp, Homo sapien
cagggtctgctctttggatgctccccaccactt

SEQ ID NO: 260863 - DNA, 33 bp, Homo sapien
tcagtctctcaggaagcctcaaggagtcactga

SEQ ID NO: 260864 - DNA, 33 bp, Homo sapien
tcagtctctcaggaaggctcaaggagtcactga

SEQ ID NO: 260865 - DNA, 33 bp, Homo sapien
gtctgaccttaggcaactctatccagcctgtac

SEQ ID NO: 260866 - DNA, 33 bp, Homo sapien
gtctgaccttaggcaattctatccagcctgtac

SEQ ID NO: 260867 - DNA, 33 bp, Homo sapien
acacacctttaactaaagaagcagaccacatgc

SEQ ID NO: 260868 - DNA, 33 bp, Homo sapien
acacacctttaactaaggaagcagaccacatgc

SEQ ID NO: 260869 - DNA, 33 bp, Homo sapien
tctcacccattgtctacgagtccatccacatga

SEQ ID NO: 260870 - DNA, 33 bp, Homo sapien
tctcacccattgtctatgagtccatccacatga

SEQ ID NO: 260871 - DNA, 33 bp, Homo sapien
gtttaagttcaccttcaaggttgaccttcatga

SEQ ID NO: 260872 - DNA, 33 bp, Homo sapien
gtttaagttcaccttcgaggttgaccttcatga

SEQ ID NO: 260873 - DNA, 33 bp, Homo sapien
atgactcccagttttaccccctccagaccaaag

SEQ ID NO: 260874 - DNA, 33 bp, Homo sapien
atgactcccagttttatcccctccagaccaaag

SEQ ID NO: 260875 - DNA, 33 bp, Homo sapien
gccccctgaaagagaaactttggcccaataggg

SEQ ID NO: 260876 - DNA, 33 bp, Homo sapien
gccccctgaaagagaacctttggcccaataggg

SEQ ID NO: 260877 - DNA, 33 bp, Homo sapien
gagtgagactaaggagaacagcagatcccaaca

SEQ ID NO: 260878 - DNA, 33 bp, Homo sapien
gagtgagactaaggaggacagcagatcccaaca

SEQ ID NO: 260879 - DNA, 33 bp, Homo sapien
aactttcccactttcaagatgagcagactgagg

SEQ ID NO: 260880 - DNA, 33 bp, Homo sapien
aactttcccactttcacgatgagcagactgagg

SEQ ID NO: 260881 - DNA, 33 bp, Homo sapien
gtgattcagtgcatatcaaaacctgagaagcac

SEQ ID NO: 260882 - DNA, 33 bp, Homo sapien
gtgattcagtgcatattaaaacctgagaagcac

SEQ ID NO: 260883 - DNA, 33 bp, Homo sapien
atcctctaggcttcggaattttgtaaagctctc

SEQ ID NO: 260884 - DNA, 33 bp, Homo sapien
atcctctaggcttcgggattttgtaaagctctc

SEQ ID NO: 260885 - DNA, 33 bp, Homo sapien
aaggatctagccatgcagacatttgtgctaggt

SEQ ID NO: 260886 - DNA, 33 bp, Homo sapien
aaggatctagccatgcggacatttgtgctaggt

SEQ ID NO: 260887 - DNA, 33 bp, Homo sapien
attaccagtagatccacgtaagagcttgccttt

SEQ ID NO: 260888 - DNA, 33 bp, Homo sapien
attaccagtagatccatgtaagagcttgccttt

SEQ ID NO: 260889 - DNA, 33 bp, Homo sapien
tactaggagcaaaacaagcaaacaggaacacag

SEQ ID NO: 260890 - DNA, 33 bp, Homo sapien
tactaggagcaaaacacgcaaacaggaacacag

SEQ ID NO: 260891 - DNA, 33 bp, Homo sapien
ccggcacacttggagaaggggctggttagttag

SEQ ID NO: 260892 - DNA, 33 bp, Homo sapien
ccggcacacttggagagggggctggttagttag

SEQ ID NO: 260893 - DNA, 33 bp, Homo sapien
ggacttcctttcccagcctcaatcttagccatc

SEQ ID NO: 260894 - DNA, 33 bp, Homo sapien
ggacttcctttcccaggctcaatcttagccatc

SEQ ID NO: 260895 - DNA, 33 bp, Homo sapien
cttggacagcgacatacatccctttctggggca

SEQ ID NO: 260896 - DNA, 33 bp, Homo sapien
cttggacagcgacatagatccctttctggggca

SEQ ID NO: 260897 - DNA, 33 bp, Homo sapien
tctcctcatttttgctcaaagcacgaagaacac

SEQ ID NO: 260898 - DNA, 33 bp, Homo sapien
tctcctcatttttgctgaaagcacgaagaacac

SEQ ID NO: 260899 - DNA, 33 bp, Homo sapien; identical to SEQ ID NO: 260897

SEQ ID NO: 260900 - DNA, 33 bp, Homo sapien; identical to SEQ ID NO: 260898

SEQ ID NO: 260901 - DNA, 33 bp, Homo sapien
acattcacaaaaactgacacccttgaattgctg

SEQ ID NO: 260902 - DNA, 33 bp, Homo sapien
acattcacaaaaactggcacccttgaattgctg

SEQ ID NO: 260903 - DNA, 33 bp, Homo sapien
gtgtacactaaggatacacagacgagcaggcca

SEQ ID NO: 260904 - DNA, 33 bp, Homo sapien
gtgtacactaaggatatacagacgagcaggcca

SEQ ID NO: 260905 - DNA, 33 bp, Homo sapien
tccagagaccattcgaaagtctttgttgtgtat

SEQ ID NO: 260906 - DNA, 33 bp, Homo sapien
tccagagaccattcgagagtctttgttgtgtat

SEQ ID NO: 260907 - DNA, 33 bp, Homo sapien
aggaaggtgaagtttacgtttgatggcccctga

SEQ ID NO: 260908 - DNA, 33 bp, Homo sapien
aggaaggtgaagtttatgtttgatggcccctga

SEQ ID NO: 260909 - DNA, 33 bp, Homo sapien
agctggagtgtcaccaatataagaggcaactcc

SEQ ID NO: 260910 - DNA, 33 bp, Homo sapien
agctggagtgtcaccagtataagaggcaactcc

SEQ ID NO: 260911 - DNA, 33 bp, Homo sapien
ccctggcttcgttccacgtgaaggaggagagat

SEQ ID NO: 260912 - DNA, 33 bp, Homo sapien
ccctggcttcgttccatgtgaaggaggagagat

SEQ ID NO: 260913 - DNA, 33 bp, Homo sapien
tgttagctttgtgataccaggcaagctatttaa

SEQ ID NO: 260914 - DNA, 33 bp, Homo sapien
tgttagctttgtgatatcaggcaagctatttaa

SEQ ID NO: 260915 - DNA, 33 bp, Homo sapien
tttgtacaggagctcacggttgaaagaggcagc

SEQ ID NO: 260916 - DNA, 33 bp, Homo sapien
tttgtacaggagctcatggttgaaagaggcagc

SEQ ID NO: 260917 - DNA, 33 bp, Homo sapien
gtggtacaaatgtacacagaagatcctatttta

SEQ ID NO: 260918 - DNA, 33 bp, Homo sapien
gtggtacaaatgtacatagaagatcctatttta

SEQ ID NO: 260919 - DNA, 33 bp, Homo sapien
atgatgttactatggacgaacagaaacagatca

SEQ ID NO: 260920 - DNA, 33 bp, Homo sapien
atgatgttactatggatgaacagaaacagatca

SEQ ID NO: 260921 - DNA, 33 bp, Homo sapien
ccaacacagtccggatcagcagcattctcaact

SEQ ID NO: 260922 - DNA, 33 bp, Homo sapien
ccaacacagtccggatgagcagcattctcaact

SEQ ID NO: 260923 - DNA, 33 bp, Homo sapien
gcttgagtctctccagcatcatgactcctaaat

SEQ ID NO: 260924 - DNA, 33 bp, Homo sapien
gcttgagtctctccagtatcatgactcctaaat

SEQ ID NO: 260925 - DNA, 33 bp, Homo sapien
tttaaaatgctaaagacggaagagctcctttag

SEQ ID NO: 260926 - DNA, 33 bp, Homo sapien
tttaaaatgctaaagatggaagagctcctttag

SEQ ID NO: 260927 - DNA, 33 bp, Homo sapien
caatgctagtaagcaaagggtataagacatgat

SEQ ID NO: 260928 - DNA, 33 bp, Homo sapien
caatgctagtaagcaaggggtataagacatgat

SEQ ID NO: 260929 - DNA, 33 bp, Homo sapien
acatacataaaattaaatccagcaaatactgat

SEQ ID NO: 260930 - DNA, 33 bp, Homo sapien
acatacataaaattaagtccagcaaatactgat

SEQ ID NO: 260931 - DNA, 33 bp, Homo sapien
tggctagaaacccgagcagatgtctccaggaag

SEQ ID NO: 260932 - DNA, 33 bp, Homo sapien
tggctagaaacccgaggagatgtctccaggaag

SEQ ID NO: 260933 - DNA, 33 bp, Homo sapien
gttcgagttcacaagagatttgaccatttggaa

SEQ ID NO: 260934 - DNA, 33 bp, Homo sapien
gttcgagttcacaagatatttgaccatttggaa

SEQ ID NO: 260935 - DNA, 33 bp, Homo sapien
acactgaaaactacagaatattgctgaaggaac

SEQ ID NO: 260936 - DNA, 33 bp, Homo sapien
acactgaaaactacaggatattgctgaaggaac

SEQ ID NO: 260937 - DNA, 33 bp, Homo sapien
aggtacgtgagctaacacatggtatccagtgct

SEQ ID NO: 260938 - DNA, 33 bp, Homo sapien
aggtacgtgagctaacgcatggtatccagtgct

SEQ ID NO: 260939 - DNA, 33 bp, Homo sapien
cacattgtgctaaataggtggtagttgtagata

SEQ ID NO: 260940 - DNA, 33 bp, Homo sapien
cacattgtgctaaatatgtggtagttgtagata

SEQ ID NO: 260941 - DNA, 33 bp, Homo sapien
taacattagtgcaaccacttgggaaattaatta

SEQ ID NO: 260942 - DNA, 33 bp, Homo sapien
taacattagtgcaacctcttgggaaattaatta

SEQ ID NO: 260943 - DNA, 33 bp, Homo sapien
gtctgctgtggatcaacgtcaaattttggacta

SEQ ID NO: 260944 - DNA, 33 bp, Homo sapien
gtctgctgtggatcaatgtcaaattttggacta

SEQ ID NO: 260945 - DNA, 33 bp, Homo sapien
gtttgtttgtttgctacgtgactcttatgaact

SEQ ID NO: 260946 - DNA, 33 bp, Homo sapien
gtttgtttgtttgctatgtgactcttatgaact

SEQ ID NO: 260947 - DNA, 33 bp, Homo sapien
taaagtgtgaatttaaaagtgcaatcatgcctc

SEQ ID NO: 260948 - DNA, 33 bp, Homo sapien
taaagtgtgaatttaagagtgcaatcatgcctc

SEQ ID NO: 260949 - DNA, 33 bp, Homo sapien
ttctgattgattttacacatttacagtacaata

SEQ ID NO: 260950 - DNA, 33 bp, Homo sapien
ttctgattgattttacgcatttacagtacaata

SEQ ID NO: 260951 - DNA, 33 bp, Homo sapien
aatgaatttcttttacgggaatcgtaagttcag

SEQ ID NO: 260952 - DNA, 33 bp, Homo sapien
aatgaatttcttttactggaatcgtaagttcag

SEQ ID NO: 260953 - DNA, 33 bp, Homo sapien
atgacacaaaatgatcaagaaatttcacattct

SEQ ID NO: 260954 - DNA, 33 bp, Homo sapien
atgacacaaaatgatcgagaaatttcacattct

SEQ ID NO: 260955 - DNA, 33 bp, Homo sapien
ataaccgtagaattacccagtaggtaaagaaat

SEQ ID NO: 260956 - DNA, 33 bp, Homo sapien
ataaccgtagaattactcagtaggtaaagaaat

SEQ ID NO: 260957 - DNA, 33 bp, Homo sapien
agtcattggtcagaggaaaagcaaaagagaatt

SEQ ID NO: 260958 - DNA, 33 bp, Homo sapien
agtcattggtcagagggaaagcaaaagagaatt

SEQ ID NO: 260959 - DNA, 33 bp, Homo sapien
acaactatccaacaaccgcatcatggatctctc

SEQ ID NO: 260960 - DNA, 33 bp, Homo sapien
acaactatccaacaactgcatcatggatctctc

SEQ ID NO: 260961 - DNA, 33 bp, Homo sapien
aaagctcgtaatacaacagcccaaagacacata

SEQ ID NO: 260962 - DNA, 33 bp, Homo sapien
aaagctcgtaatacaatagcccaaagacacata

SEQ ID NO: 260963 - DNA, 33 bp, Homo sapien
gccaaaaaggataccacattcccgcttccttct

SEQ ID NO: 260964 - DNA, 33 bp, Homo sapien
gccaaaaaggataccagattcccgcttccttct

SEQ ID NO: 260965 - DNA, 33 bp, Homo sapien
gggttctgcaccatcaagaagagaatatcctac

SEQ ID NO: 260966 - DNA, 33 bp, Homo sapien
gggttctgcaccatcaggaagagaatatcctac

SEQ ID NO: 260967 - DNA, 33 bp, Homo sapien
gacgtcattcccactgaacctaaaatccaaaat

SEQ ID NO: 260968 - DNA, 33 bp, Homo sapien
gacgtcattcccactgtacctaaaatccaaaat

SEQ ID NO: 260969 - DNA, 33 bp, Homo sapien
agaccttccttaggaacagaaattgatatgtgt

SEQ ID NO: 260970 - DNA, 33 bp, Homo sapien
agaccttccttaggaatagaaattgatatgtgt

SEQ ID NO: 260971 - DNA, 33 bp, Homo sapien
atgttaggcttatatgaataaaagtgagaaggc

SEQ ID NO: 260972 - DNA, 33 bp, Homo sapien
atgttaggcttatatgcataaaagtgagaaggc

SEQ ID NO: 260973 - DNA, 33 bp, Homo sapien
tatagtggtgagaaaacgagtcccagttccgca

SEQ ID NO: 260974 - DNA, 33 bp, Homo sapien
tatagtggtgagaaaatgagtcccagttccgca

SEQ ID NO: 260975 - DNA, 33 bp, Homo sapien
acacatatcataccaacaacacatcagctgcca

SEQ ID NO: 260976 - DNA, 33 bp, Homo sapien
acacatatcataccaagaacacatcagctgcca

SEQ ID NO: 260977 - DNA, 33 bp, Homo sapien
acaggcaatctagacacgatttaaagtatacag

SEQ ID NO: 260978 - DNA, 33 bp, Homo sapien
acaggcaatctagacatgatttaaagtatacag

SEQ ID NO: 260979 - DNA, 33 bp, Homo sapien
ttatctagaaacaccaaatgtgtaggaattaat

SEQ ID NO: 260980 - DNA, 33 bp, Homo sapien
ttatctagaaacaccagatgtgtaggaattaat

SEQ ID NO: 260981 - DNA, 33 bp, Homo sapien
agcatcctataaaagggactaccaggtttgtta

SEQ ID NO: 260982 - DNA, 33 bp, Homo sapien
agcatcctataaaaggtactaccaggtttgtta

SEQ ID NO: 260983 - DNA, 33 bp, Homo sapien
ccaagagcctcctccacgaatcgtctgagatgt

SEQ ID NO: 260984 - DNA, 33 bp, Homo sapien
ccaagagcctcctccatgaatcgtctgagatgt

SEQ ID NO: 260985 - DNA, 33 bp, Homo sapien
gtaattgtgtcttcaacgtaccctgttggctgg

SEQ ID NO: 260986 - DNA, 33 bp, Homo sapien
gtaattgtgtcttcaatgtaccctgttggctgg

SEQ ID NO: 260987 - DNA, 33 bp, Homo sapien
tggagagatgaagactcactggggctagaatta

SEQ ID NO: 260988 - DNA, 33 bp, Homo sapien
tggagagatgaagacttactggggctagaatta

SEQ ID NO: 260989 - DNA, 33 bp, Homo sapien
ctttggtgtcataaaaataacttggttttaata

SEQ ID NO: 260990 - DNA, 33 bp, Homo sapien
ctttggtgtcataaaattaacttggttttaata

SEQ ID NO: 260991 - DNA, 33 bp, Homo sapien
agaaagaagaaaacccaaagaaacacagaagcc

SEQ ID NO: 260992 - DNA, 33 bp, Homo sapien
agaaagaagaaaacccgaagaaacacagaagcc

SEQ ID NO: 260993 - DNA, 33 bp, Homo sapien
agctgtagccctccaacgtctgggaatttatcg

SEQ ID NO: 260994 - DNA, 33 bp, Homo sapien
agctgtagccctccaaggtctgggaatttatcg

SEQ ID NO: 260995 - DNA, 33 bp, Homo sapien
acaagtctttagctggcaagatctagcactgaa

SEQ ID NO: 260996 - DNA, 33 bp, Homo sapien
acaagtctttagctggtaagatctagcactgaa

SEQ ID NO: 260997 - DNA, 33 bp, Homo sapien
tgctagggagtgacaaacccaagtcattcttga

SEQ ID NO: 260998 - DNA, 33 bp, Homo sapien
tgctagggagtgacaagcccaagtcattcttga

SEQ ID NO: 260999 - DNA, 33 bp, Homo sapien
tgaaaaggccaataataaacatggattttggag

SEQ ID NO: 261000 - DNA, 33 bp, Homo sapien
tgaaaaggccaataatgaacatggattttggag

SEQ ID NO: 261001 - DNA, 33 bp, Homo sapien
cccacatcctgcatgaagaacagaccattggtg

SEQ ID NO: 261002 - DNA, 33 bp, Homo sapien
cccacatcctgcatgacgaacagaccattggtg

SEQ ID NO: 261003 - DNA, 33 bp, Homo sapien
ctgcttcaccagtatgaaagatcagaataactg

SEQ ID NO: 261004 - DNA, 33 bp, Homo sapien
ctgcttcaccagtatggaagatcagaataactg

SEQ ID NO: 261005 - DNA, 33 bp, Homo sapien
tctcaggagtttggaacctgaacagaaacatac

SEQ ID NO: 261006 - DNA, 33 bp, Homo sapien
tctcaggagtttggaatctgaacagaaacatac

SEQ ID NO: 261007 - DNA, 33 bp, Homo sapien
ggcctagttgtatgtacatggaataccttctac

SEQ ID NO: 261008 - DNA, 33 bp, Homo sapien
ggcctagttgtatgtatatggaataccttctac

SEQ ID NO: 261009 - DNA, 33 bp, Homo sapien
cacatgcaattatgtacggtgaataatactcaa

SEQ ID NO: 261010 - DNA, 33 bp, Homo sapien
cacatgcaattatgtatggtgaataatactcaa

SEQ ID NO: 261011 - DNA, 33 bp, Homo sapien
caattgtaatacaatgacaagcattcgtgtatc

SEQ ID NO: 261012 - DNA, 33 bp, Homo sapien
caattgtaatacaatggcaagcattcgtgtatc

SEQ ID NO: 261013 - DNA, 33 bp, Homo sapien
ttgctctagctcctcaatgagatttggagttgt

SEQ ID NO: 261014 - DNA, 33 bp, Homo sapien
ttgctctagctcctcactgagatttggagttgt

SEQ ID NO: 261015 - DNA, 33 bp, Homo sapien
agatatgatcacaaacaatagaagccagaagac

SEQ ID NO: 261016 - DNA, 33 bp, Homo sapien
agatatgatcacaaactatagaagccagaagac

SEQ ID NO: 261017 - DNA, 33 bp, Homo sapien
ctccagagccctggatcagatatttcgcctgga

SEQ ID NO: 261018 - DNA, 33 bp, Homo sapien
ctccagagccctggattagatatttcgcctgga

SEQ ID NO: 261019 - DNA, 33 bp, Homo sapien
ttgtatttgaaaaaaaatcctggcaccccagtc

SEQ ID NO: 261020 - DNA, 33 bp, Homo sapien
ttgtatttgaaaaaaactcctggcaccccagtc

SEQ ID NO: 261021 - DNA, 33 bp, Homo sapien
gaatggttccacagaactagaagatgagactgc

SEQ ID NO: 261022 - DNA, 33 bp, Homo sapien
gaatggttccacagaattagaagatgagactgc

SEQ ID NO: 261023 - DNA, 33 bp, Homo sapien
aaacactttatactacagatcagaagaatcaat

SEQ ID NO: 261024 - DNA, 33 bp, Homo sapien
aaacactttatactacggatcagaagaatcaat

SEQ ID NO: 261025 - DNA, 33 bp, Homo sapien
atggaagcataaacagaaggttgaccatgtatc

SEQ ID NO: 261026 - DNA, 33 bp, Homo sapien
atggaagcataaacaggaggttgaccatgtatc

SEQ ID NO: 261027 - DNA, 33 bp, Homo sapien
gtcaactgccttgctaagattgagatatcttaa

SEQ ID NO: 261028 - DNA, 33 bp, Homo sapien
gtcaactgccttgctaggattgagatatcttaa

SEQ ID NO: 261029 - DNA, 33 bp, Homo sapien
cttctgtgtattgtcaccgcccccaccagggcc

SEQ ID NO: 261030 - DNA, 33 bp, Homo sapien
cttctgtgtattgtcatcgcccccaccagggcc

SEQ ID NO: 261031 - DNA, 33 bp, Homo sapien
gactctcttgctttgacactactgttttaatca

SEQ ID NO: 261032 - DNA, 33 bp, Homo sapien
gactctcttgctttgagactactgttttaatca

SEQ ID NO: 261033 - DNA, 33 bp, Homo sapien
gaggcaggtgcttgaaatcacaggctctttaga

SEQ ID NO: 261034 - DNA, 33 bp, Homo sapien
gaggcaggtgcttgaactcacaggctctttaga

SEQ ID NO: 261035 - DNA, 33 bp, Homo sapien
gtcatatcatctgttaaaatttgtttccctctt

SEQ ID NO: 261036 - DNA, 33 bp, Homo sapien
gtcatatcatctgttagaatttgtttccctctt

SEQ ID NO: 261037 - DNA, 33 bp, Homo sapien
taagggcagagactgactaatttttttattcta

SEQ ID NO: 261038 - DNA, 33 bp, Homo sapien
taagggcagagactgattaatttttttattcta

SEQ ID NO: 261039 - DNA, 33 bp, Homo sapien
cgacagggcaccagccagaatagagtgtggtca

SEQ ID NO: 261040 - DNA, 33 bp, Homo sapien
cgacagggcaccagccggaatagagtgtggtca

SEQ ID NO: 261041 - DNA, 33 bp, Homo sapien
atgcagtatgtttaacactctgaaacatgaaac

SEQ ID NO: 261042 - DNA, 33 bp, Homo sapien
atgcagtatgtttaaccctctgaaacatgaaac

SEQ ID NO: 261043 - DNA, 33 bp, Homo sapien
tcctccttctccagaactggctttattaacagc

SEQ ID NO: 261044 - DNA, 33 bp, Homo sapien
tcctccttctccagaattggctttattaacagc

SEQ ID NO: 261045 - DNA, 33 bp, Homo sapien
tttattctgcactcacacttgattgagagcttg

SEQ ID NO: 261046 - DNA, 33 bp, Homo sapien
tttattctgcactcacgcttgattgagagcttg

SEQ ID NO: 261047 - DNA, 33 bp, Homo sapien
gaattgcatagcttacccctctggtgattttat

SEQ ID NO: 261048 - DNA, 33 bp, Homo sapien
gaattgcatagcttactcctctggtgattttat

SEQ ID NO: 261049 - DNA, 33 bp, Homo sapien
ttgcgctattcctagacagagattggatgggca

SEQ ID NO: 261050 - DNA, 33 bp, Homo sapien
ttgcgctattcctagatagagattggatgggca

SEQ ID NO: 261051 - DNA, 33 bp, Homo sapien
tatttagcaagcttggaataggagcacaggaag

SEQ ID NO: 261052 - DNA, 33 bp, Homo sapien
tatttagcaagcttgggataggagcacaggaag

SEQ ID NO: 261053 - DNA, 33 bp, Homo sapien
gctgaccaacttctacaaggcaatcgccaccaa

SEQ ID NO: 261054 - DNA, 33 bp, Homo sapien
gctgaccaacttctacgaggcaatcgccaccaa

SEQ ID NO: 261055 - DNA, 33 bp, Homo sapien
gtctttaaagggtccaagtttgtgacgggagtg

SEQ ID NO: 261056 - DNA, 33 bp, Homo sapien
gtctttaaagggtccaggtttgtgacgggagtg

SEQ ID NO: 261057 - DNA, 33 bp, Homo sapien
atcctggaactacacagtggttcagagactctg

SEQ ID NO: 261058 - DNA, 33 bp, Homo sapien
atcctggaactacacattggttcagagactctg

SEQ ID NO: 261059 - DNA, 33 bp, Homo sapien
taggattattattaaaagacccatctctaaggg

SEQ ID NO: 261060 - DNA, 33 bp, Homo sapien
taggattattattaaaggacccatctctaaggg

SEQ ID NO: 261061 - DNA, 33 bp, Homo sapien
aggtgttctcagagccaggccacaaaatcctgg

SEQ ID NO: 261062 - DNA, 33 bp, Homo sapien
aggtgttctcagagccgggccacaaaatcctgg

SEQ ID NO: 261063 - DNA, 33 bp, Homo sapien
tttcattggatacctgcaccttctgcatgtgag

SEQ ID NO: 261064 - DNA, 33 bp, Homo sapien
tttcattggatacctgtaccttctgcatgtgag

SEQ ID NO: 261065 - DNA, 33 bp, Homo sapien
gaaatatgaatctagaagagagtaatgcagaga

SEQ ID NO: 261066 - DNA, 33 bp, Homo sapien
gaaatatgaatctagaggagagtaatgcagaga

SEQ ID NO: 261067 - DNA, 33 bp, Homo sapien
gggtcatttgccattacgtggaagctctaaact

SEQ ID NO: 261068 - DNA, 33 bp, Homo sapien
gggtcatttgccattatgtggaagctctaaact

SEQ ID NO: 261069 - DNA, 33 bp, Homo sapien
attatgcgaaatgcaacgggtagtcagatggtt

SEQ ID NO: 261070 - DNA, 33 bp, Homo sapien
attatgcgaaatgcaatgggtagtcagatggtt

SEQ ID NO: 261071 - DNA, 33 bp, Homo sapien
gctccacgtgtacatcagactgagctaggatca

SEQ ID NO: 261072 - DNA, 33 bp, Homo sapien
gctccacgtgtacatcggactgagctaggatca

SEQ ID NO: 261073 - DNA, 33 bp, Homo sapien
gcgttctaattgtggccgacatctttcttcagc

SEQ ID NO: 261074 - DNA, 33 bp, Homo sapien
gcgttctaattgtggctgacatctttcttcagc

SEQ ID NO: 261075 - DNA, 33 bp, Homo sapien
aaaggttaggtgaatacggtctctctttctctc

SEQ ID NO: 261076 - DNA, 33 bp, Homo sapien
aaaggttaggtgaatatggtctctctttctctc

SEQ ID NO: 261077 - DNA, 33 bp, Homo sapien
actttagttcttctacaagagttagatgcatgt

SEQ ID NO: 261078 - DNA, 33 bp, Homo sapien
actttagttcttctaccagagttagatgcatgt

SEQ ID NO: 261079 - DNA, 33 bp, Homo sapien
ggtggcataaattccaagagaggcatgtggctg

SEQ ID NO: 261080 - DNA, 33 bp, Homo sapien
ggtggcataaattccaggagaggcatgtggctg

SEQ ID NO: 261081 - DNA, 33 bp, Homo sapien
tggttcagcgtttttcactggtttattcttatt

SEQ ID NO: 261082 - DNA, 33 bp, Homo sapien
tggttcagcgtttttctctggtttattcttatt

SEQ ID NO: 261083 - DNA, 33 bp, Homo sapien
cattttgggacaggaaagaaagcatccttttgt

SEQ ID NO: 261084 - DNA, 33 bp, Homo sapien
cattttgggacaggaaggaaagcatccttttgt

SEQ ID NO: 261085 - DNA, 33 bp, Homo sapien
tctgtcttggagaaccaactgttctagaatttt

SEQ ID NO: 261086 - DNA, 33 bp, Homo sapien
tctgtcttggagaaccgactgttctagaatttt

SEQ ID NO: 261087 - DNA, 33 bp, Homo sapien
tggtgatgaccctggaaataaggacaaaacaga

SEQ ID NO: 261088 - DNA, 33 bp, Homo sapien
tggtgatgaccctggatataaggacaaaacaga

SEQ ID NO: 261089 - DNA, 33 bp, Homo sapien
caactcactggggcacaaagagataagcagctt

SEQ ID NO: 261090 - DNA, 33 bp, Homo sapien
caactcactggggcacgaagagataagcagctt

SEQ ID NO: 261091 - DNA, 33 bp, Homo sapien
ctgacagatatgtaacagtatgtcgttgtgact

SEQ ID NO: 261092 - DNA, 33 bp, Homo sapien
ctgacagatatgtaacggtatgtcgttgtgact

SEQ ID NO: 261093 - DNA, 33 bp, Homo sapien
tataatgaacagaatacgcgtcatagagtcctc

SEQ ID NO: 261094 - DNA, 33 bp, Homo sapien
tataatgaacagaatatgcgtcatagagtcctc

SEQ ID NO: 261095 - DNA, 33 bp, Homo sapien
tctcatagctgtagagaccttttagaaggggca

SEQ ID NO: 261096 - DNA, 33 bp, Homo sapien
tctcatagctgtagaggccttttagaaggggca

SEQ ID NO: 261097 - DNA, 33 bp, Homo sapien
atactgtcagttttataaatggaaactgaatga

SEQ ID NO: 261098 - DNA, 33 bp, Homo sapien
atactgtcagttttattaatggaaactgaatga

SEQ ID NO: 261099 - DNA, 33 bp, Homo sapien
ccaggttctgaaaacacgctgaatttggtttgt

SEQ ID NO: 261100 - DNA, 33 bp, Homo sapien
ccaggttctgaaaacatgctgaatttggtttgt

SEQ ID NO: 261101 - DNA, 33 bp, Homo sapien
ggtccgtggtatgcccagaaaggctacctgccg

SEQ ID NO: 261102 - DNA, 33 bp, Homo sapien
ggtccgtggtatgcccggaaaggctacctgccg

SEQ ID NO: 261103 - DNA, 33 bp, Homo sapien
cccttaagccacactccataggatcaccatttc

SEQ ID NO: 261104 - DNA, 33 bp, Homo sapien
cccttaagccacactctataggatcaccatttc

SEQ ID NO: 261105 - DNA, 33 bp, Homo sapien
gatatcaagagcatcaagctagtctgacaaggc

SEQ ID NO: 261106 - DNA, 33 bp, Homo sapien
gatatcaagagcatcaggctagtctgacaaggc

SEQ ID NO: 261107 - DNA, 33 bp, Homo sapien
tgatatccgaggctaccgaaccagtttccctag

SEQ ID NO: 261108 - DNA, 33 bp, Homo sapien
tgatatccgaggctactgaaccagtttccctag

SEQ ID NO: 261109 - DNA, 33 bp, Homo sapien
aagcagcggtctctggacatctacatgacgcac

SEQ ID NO: 261110 - DNA, 33 bp, Homo sapien
aagcagcggtctctgggcatctacatgacgcac

SEQ ID NO: 261111 - DNA, 33 bp, Homo sapien
gaaccactttgaaaaccctttggcaatgccctc

SEQ ID NO: 261112 - DNA, 33 bp, Homo sapien
gaaccactttgaaaactctttggcaatgccctc

SEQ ID NO: 261113 - DNA, 33 bp, Homo sapien
tgagtcacctcagctgacaccacgaggcatccc

SEQ ID NO: 261114 - DNA, 33 bp, Homo sapien
tgagtcacctcagctggcaccacgaggcatccc

SEQ ID NO: 261115 - DNA, 33 bp, Homo sapien
cggagacagagtagcacagtagttgagaacata

SEQ ID NO: 261116 - DNA, 33 bp, Homo sapien
cggagacagagtagcatagtagttgagaacata

SEQ ID NO: 261117 - DNA, 33 bp, Homo sapien
taatatccacctctcaaagctgttatggccatt

SEQ ID NO: 261118 - DNA, 33 bp, Homo sapien
taatatccacctctcagagctgttatggccatt

SEQ ID NO: 261119 - DNA, 33 bp, Homo sapien
aggaacttctcatgagcagctagattttctcac

SEQ ID NO: 261120 - DNA, 33 bp, Homo sapien
aggaacttctcatgagtagctagattttctcac

SEQ ID NO: 261121 - DNA, 33 bp, Homo sapien
aaagtaaaagtaaatcaataggaatgcctcttt

SEQ ID NO: 261122 - DNA, 33 bp, Homo sapien
aaagtaaaagtaaatctataggaatgcctcttt

SEQ ID NO: 261123 - DNA, 33 bp, Homo sapien
cttctttactttctggaataacacgatattcta

SEQ ID NO: 261124 - DNA, 33 bp, Homo sapien
cttctttactttctggtataacacgatattcta

SEQ ID NO: 261125 - DNA, 33 bp, Homo sapien
atccaattagaaaaccagtagtaggcaaaacca

SEQ ID NO: 261126 - DNA, 33 bp, Homo sapien
atccaattagaaaaccggtagtaggcaaaacca

SEQ ID NO: 261127 - DNA, 33 bp, Homo sapien
gaagatctgcatttcaacattggctctgctaat

SEQ ID NO: 261128 - DNA, 33 bp, Homo sapien
gaagatctgcatttcagcattggctctgctaat

SEQ ID NO: 261129 - DNA, 33 bp, Homo sapien
tggcccatcacactaacaaccagaagatctgca

SEQ ID NO: 261130 - DNA, 33 bp, Homo sapien
tggcccatcacactaagaaccagaagatctgca

SEQ ID NO: 261131 - DNA, 33 bp, Homo sapien
ttccattgtcctctcacctgagaaaaaaaactt

SEQ ID NO: 261132 - DNA, 33 bp, Homo sapien
ttccattgtcctctcatctgagaaaaaaaactt

SEQ ID NO: 261133 - DNA, 33 bp, Homo sapien
cagcagtgaatacaaactgagaaatcaaaagag

SEQ ID NO: 261134 - DNA, 33 bp, Homo sapien
cagcagtgaatacaaattgagaaatcaaaagag

SEQ ID NO: 261135 - DNA, 33 bp, Homo sapien
gaatatggcaacatgaactattaaccagcacat

SEQ ID NO: 261136 - DNA, 33 bp, Homo sapien
gaatatggcaacatgagctattaaccagcacat

SEQ ID NO: 261137 - DNA, 33 bp, Homo sapien
actaaggggctggaagacatcaagaaaggctgt

SEQ ID NO: 261138 - DNA, 33 bp, Homo sapien
actaaggggctggaaggcatcaagaaaggctgt

SEQ ID NO: 261139 - DNA, 33 bp, Homo sapien
tcctggcaactacctcacagggttttataactt

SEQ ID NO: 261140 - DNA, 33 bp, Homo sapien
tcctggcaactacctcgcagggttttataactt

SEQ ID NO: 261141 - DNA, 33 bp, Homo sapien
gtcagacaactggagaagaaacttaatgcaaca

SEQ ID NO: 261142 - DNA, 33 bp, Homo sapien
gtcagacaactggagaggaaacttaatgcaaca

SEQ ID NO: 261143 - DNA, 33 bp, Homo sapien
gtcacttctgttttaaagacacatctcgtctag

SEQ ID NO: 261144 - DNA, 33 bp, Homo sapien
gtcacttctgttttaaggacacatctcgtctag

SEQ ID NO: 261145 - DNA, 33 bp, Homo sapien
gagtctcaagactccaatgcaaatgatgaaggc

SEQ ID NO: 261146 - DNA, 33 bp, Homo sapien
gagtctcaagactccagtgcaaatgatgaaggc

SEQ ID NO: 261147 - DNA, 33 bp, Homo sapien
attggctcctcctgaacgccccttttagcctgg

SEQ ID NO: 261148 - DNA, 33 bp, Homo sapien
attggctcctcctgaatgccccttttagcctgg

SEQ ID NO: 261149 - DNA, 33 bp, Homo sapien
gattggagagaggaaaagacctcagactttgaa

SEQ ID NO: 261150 - DNA, 33 bp, Homo sapien
gattggagagaggaaaggacctcagactttgaa

SEQ ID NO: 261151 - DNA, 33 bp, Homo sapien
caggacatgggcttcacatatggctgttgtata

SEQ ID NO: 261152 - DNA, 33 bp, Homo sapien
caggacatgggcttcatatatggctgttgtata

SEQ ID NO: 261153 - DNA, 33 bp, Homo sapien
gtttgggaagtttcacagagaacatgaaactca

SEQ ID NO: 261154 - DNA, 33 bp, Homo sapien
gtttgggaagtttcacggagaacatgaaactca

SEQ ID NO: 261155 - DNA, 33 bp, Homo sapien
gctgagcctgtgactcactttaaccagtaaact

SEQ ID NO: 261156 - DNA, 33 bp, Homo sapien
gctgagcctgtgactccctttaaccagtaaact

SEQ ID NO: 261157 - DNA, 33 bp, Homo sapien
gccaaatcgccaagacgctggcaatgtcctttt

SEQ ID NO: 261158 - DNA, 33 bp, Homo sapien
gccaaatcgccaagactctggcaatgtcctttt

SEQ ID NO: 261159 - DNA, 33 bp, Homo sapien
tgacttcactggatccgcaggttacagatgagg

SEQ ID NO: 261160 - DNA, 33 bp, Homo sapien
tgacttcactggatcctcaggttacagatgagg

SEQ ID NO: 261161 - DNA, 33 bp, Homo sapien
agaaatacaaccggaaacaaattgcaaaccccg

SEQ ID NO: 261162 - DNA, 33 bp, Homo sapien
agaaatacaaccggaagcaaattgcaaaccccg

SEQ ID NO: 261163 - DNA, 33 bp, Homo sapien
gggtaatatttgggtacagaaatctggtttggt

SEQ ID NO: 261164 - DNA, 33 bp, Homo sapien
gggtaatatttgggtatagaaatctggtttggt

SEQ ID NO: 261165 - DNA, 33 bp, Homo sapien
acgcaacaccaccttcacgtgttttaaatgcct

SEQ ID NO: 261166 - DNA, 33 bp, Homo sapien
acgcaacaccaccttcgcgtgttttaaatgcct

SEQ ID NO: 261167 - DNA, 33 bp, Homo sapien
gcttgttcattacacaagtattctggatctgct

SEQ ID NO: 261168 - DNA, 33 bp, Homo sapien
gcttgttcattacacaggtattctggatctgct

SEQ ID NO: 261169 - DNA, 33 bp, Homo sapien
ggaacttgctctgtagcagtttaacagatggtg

SEQ ID NO: 261170 - DNA, 33 bp, Homo sapien
ggaacttgctctgtaggagtttaacagatggtg

SEQ ID NO: 261171 - DNA, 33 bp, Homo sapien
atactctgtgctaaagacctcatacagattgtc

SEQ ID NO: 261172 - DNA, 33 bp, Homo sapien
atactctgtgctaaaggcctcatacagattgtc

SEQ ID NO: 261173 - DNA, 33 bp, Homo sapien
taaaaataggtagttacgtcaggtacaaaactt

SEQ ID NO: 261174 - DNA, 33 bp, Homo sapien
taaaaataggtagttatgtcaggtacaaaactt

SEQ ID NO: 261175 - DNA, 33 bp, Homo sapien
tgcccccactgctcacaagtgtctgctcttgct

SEQ ID NO: 261176 - DNA, 33 bp, Homo sapien
tgcccccactgctcacgagtgtctgctcttgct

SEQ ID NO: 261177 - DNA, 33 bp, Homo sapien
gcacaaaccaagttcacaagcctacaggatgga

SEQ ID NO: 261178 - DNA, 33 bp, Homo sapien
gcacaaaccaagttcataagcctacaggatgga

SEQ ID NO: 261179 - DNA, 33 bp, Homo sapien
acatggagttacagctaaaagtgttaatgagaa

SEQ ID NO: 261180 - DNA, 33 bp, Homo sapien
acatggagttacagctgaaagtgttaatgagaa

SEQ ID NO: 261181 - DNA, 33 bp, Homo sapien
gatttttaggatggacaaacatgcttcaatctt

SEQ ID NO: 261182 - DNA, 33 bp, Homo sapien
gatttttaggatggacgaacatgcttcaatctt

SEQ ID NO: 261183 - DNA, 33 bp, Homo sapien
tttatgtctaacctcaacaccaatgggattaga

SEQ ID NO: 261184 - DNA, 33 bp, Homo sapien
tttatgtctaacctcagcaccaatgggattaga

SEQ ID NO: 261185 - DNA, 33 bp, Homo sapien
tatgttgccattcaacagttcctgatacctgac

SEQ ID NO: 261186 - DNA, 33 bp, Homo sapien
tatgttgccattcaacggttcctgatacctgac

SEQ ID NO: 261187 - DNA, 33 bp, Homo sapien
tttgctataatggacaaaattgggagacagagt

SEQ ID NO: 261188 - DNA, 33 bp, Homo sapien
tttgctataatggacacaattgggagacagagt

SEQ ID NO: 261189 - DNA, 33 bp, Homo sapien
ctatgatgagtaggaggagatcgtaaatcagct

SEQ ID NO: 261190 - DNA, 33 bp, Homo sapien
ctatgatgagtaggagtagatcgtaaatcagct

SEQ ID NO: 261191 - DNA, 33 bp, Homo sapien
taataatattaaatgccgacttagtgcttacta

SEQ ID NO: 261192 - DNA, 33 bp, Homo sapien
taataatattaaatgctgacttagtgcttacta

SEQ ID NO: 261193 - DNA, 33 bp, Homo sapien
tggattcttcttgctcacgcatcttgcccacct

SEQ ID NO: 261194 - DNA, 33 bp, Homo sapien
tggattcttcttgctcgcgcatcttgcccacct

SEQ ID NO: 261195 - DNA, 33 bp, Homo sapien
acagtttgctgagctacctggaattttccctag

SEQ ID NO: 261196 - DNA, 33 bp, Homo sapien
acagtttgctgagctatctggaattttccctag

SEQ ID NO: 261197 - DNA, 33 bp, Homo sapien
cagtgtgaggaaagtcactatggaatccaaggg

SEQ ID NO: 261198 - DNA, 33 bp, Homo sapien
cagtgtgaggaaagtcgctatggaatccaaggg

SEQ ID NO: 261199 - DNA, 33 bp, Homo sapien
aaagtaccatactccaagagcttattttatttt

SEQ ID NO: 261200 - DNA, 33 bp, Homo sapien
aaagtaccatactccatgagcttattttatttt

SEQ ID NO: 261201 - DNA, 33 bp, Homo sapien
ctgaagtgttttgaaactttactctcatatcta

SEQ ID NO: 261202 - DNA, 33 bp, Homo sapien
ctgaagtgttttgaaagtttactctcatatcta

SEQ ID NO: 261203 - DNA, 33 bp, Homo sapien
ttctgctcccatgagaagcttgccgttcctcct

SEQ ID NO: 261204 - DNA, 33 bp, Homo sapien
ttctgctcccatgagaggcttgccgttcctcct

SEQ ID NO: 261205 - DNA, 33 bp, Homo sapien
gaataacagcttacgacgactgtgggttgatgc

SEQ ID NO: 261206 - DNA, 33 bp, Homo sapien
gaataacagcttacgatgactgtgggttgatgc

SEQ ID NO: 261207 - DNA, 33 bp, Homo sapien
tctcagtgtctcatagcctagtccaaaaccatg

SEQ ID NO: 261208 - DNA, 33 bp, Homo sapien
tctcagtgtctcatagtctagtccaaaaccatg

SEQ ID NO: 261209 - DNA, 33 bp, Homo sapien
attagtttaaagagacaagagatgtcataacta

SEQ ID NO: 261210 - DNA, 33 bp, Homo sapien
attagtttaaagagaccagagatgtcataacta

SEQ ID NO: 261211 - DNA, 33 bp, Homo sapien
tttctcatacaaatcccgaggaaaacaacattt

SEQ ID NO: 261212 - DNA, 33 bp, Homo sapien
tttctcatacaaatccggaggaaaacaacattt

SEQ ID NO: 261213 - DNA, 33 bp, Homo sapien
tgtccttctcaagggcaacaagcaaggagaatt

SEQ ID NO: 261214 - DNA, 33 bp, Homo sapien
tgtccttctcaagggcgacaagcaaggagaatt

SEQ ID NO: 261215 - DNA, 33 bp, Homo sapien
gaacccgttagcttgaccagctcctctagacat

SEQ ID NO: 261216 - DNA, 33 bp, Homo sapien
gaacccgttagcttgatcagctcctctagacat

SEQ ID NO: 261217 - DNA, 33 bp, Homo sapien
tgagcttctaggatcgaaaactcccatctaaaa

SEQ ID NO: 261218 - DNA, 33 bp, Homo sapien
tgagcttctaggatcggaaactcccatctaaaa

SEQ ID NO: 261219 - DNA, 33 bp, Homo sapien
aaacttgcataaaatcaaatttcctacatactt

SEQ ID NO: 261220 - DNA, 33 bp, Homo sapien
aaacttgcataaaatcgaatttcctacatactt

SEQ ID NO: 261221 - DNA, 33 bp, Homo sapien
aagttacctatcactcgcaaaagtttccttatg

SEQ ID NO: 261222 - DNA, 33 bp, Homo sapien
aagttacctatcactctcaaaagtttccttatg

SEQ ID NO: 261223 - DNA, 33 bp, Homo sapien
tgtgtgtccacaggtgaatagattaaaacaaat

SEQ ID NO: 261224 - DNA, 33 bp, Homo sapien
tgtgtgtccacaggtggatagattaaaacaaat

SEQ ID NO: 261225 - DNA, 33 bp, Homo sapien
aactggaattccatacactgcgagtgggaacat

SEQ ID NO: 261226 - DNA, 33 bp, Homo sapien
aactggaattccatacgctgcgagtgggaacat

SEQ ID NO: 261227 - DNA, 33 bp, Homo sapien
atagacgtgaagtacccaaaaagaaatgaatat

SEQ ID NO: 261228 - DNA, 33 bp, Homo sapien
atagacgtgaagtacctaaaaagaaatgaatat

SEQ ID NO: 261229 - DNA, 33 bp, Homo sapien
tatgtcattttttacaacttcactgagatccaa

SEQ ID NO: 261230 - DNA, 33 bp, Homo sapien
tatgtcattttttacagcttcactgagatccaa

SEQ ID NO: 261231 - DNA, 33 bp, Homo sapien
cacttttcatgatgacaaatacccgtccaatcg

SEQ ID NO: 261232 - DNA, 33 bp, Homo sapien
cacttttcatgatgacgaatacccgtccaatcg

SEQ ID NO: 261233 - DNA, 33 bp, Homo sapien
aacacacaataggtagaagggctgagacttgaa

SEQ ID NO: 261234 - DNA, 33 bp, Homo sapien
aacacacaataggtagtagggctgagacttgaa

SEQ ID NO: 261235 - DNA, 33 bp, Homo sapien
gaaatacgaaatgttaagtaagctacatggtac

SEQ ID NO: 261236 - DNA, 33 bp, Homo sapien
gaaatacgaaatgttacgtaagctacatggtac

SEQ ID NO: 261237 - DNA, 33 bp, Homo sapien
attttatttctaaaaccagcttacttgtcacat

SEQ ID NO: 261238 - DNA, 33 bp, Homo sapien
attttatttctaaaactagcttacttgtcacat

SEQ ID NO: 261239 - DNA, 33 bp, Homo sapien
tttattggcagctttccattatgtagaaaatag

SEQ ID NO: 261240 - DNA, 33 bp, Homo sapien
tttattggcagctttcgattatgtagaaaatag

SEQ ID NO: 261241 - DNA, 33 bp, Homo sapien
gactacaaaactatgaatagagcttcctctcaa

SEQ ID NO: 261242 - DNA, 33 bp, Homo sapien
gactacaaaactatgactagagcttcctctcaa

SEQ ID NO: 261243 - DNA, 33 bp, Homo sapien
tttggaacagtctttacgatagttaaagggagt

SEQ ID NO: 261244 - DNA, 33 bp, Homo sapien
tttggaacagtctttatgatagttaaagggagt

SEQ ID NO: 261245 - DNA, 33 bp, Homo sapien
ctgctttttctgatgaaacactaatatgctctt

SEQ ID NO: 261246 - DNA, 33 bp, Homo sapien
ctgctttttctgatgagacactaatatgctctt

SEQ ID NO: 261247 - DNA, 33 bp, Homo sapien
tgaatttaaagtcatactacttggagcatttta

SEQ ID NO: 261248 - DNA, 33 bp, Homo sapien
tgaatttaaagtcatagtacttggagcatttta

SEQ ID NO: 261249 - DNA, 33 bp, Homo sapien
ttattggtagtaggtaataagtggtgttggtca

SEQ ID NO: 261250 - DNA, 33 bp, Homo sapien
ttattggtagtaggtagtaagtggtgttggtca

SEQ ID NO: 261251 - DNA, 33 bp, Homo sapien
gagtttactctagggtaaaaaataggccactgg

SEQ ID NO: 261252 - DNA, 33 bp, Homo sapien
gagtttactctagggtgaaaaataggccactgg

SEQ ID NO: 261253 - DNA, 33 bp, Homo sapien
tatgtaacataaaagacctcatatggttaggat

SEQ ID NO: 261254 - DNA, 33 bp, Homo sapien
tatgtaacataaaagatctcatatggttaggat

SEQ ID NO: 261255 - DNA, 33 bp, Homo sapien
accgtatgtatgaattcaatcttaaaagacaag

SEQ ID NO: 261256 - DNA, 33 bp, Homo sapien
accgtatgtatgaattgaatcttaaaagacaag

SEQ ID NO: 261257 - DNA, 33 bp, Homo sapien
caagacctggtagaatcaaactaatttgtaagc

SEQ ID NO: 261258 - DNA, 33 bp, Homo sapien
caagacctggtagaatgaaactaatttgtaagc

SEQ ID NO: 261259 - DNA, 33 bp, Homo sapien
atggcaatagacattgaagaacagtttagtgaa

SEQ ID NO: 261260 - DNA, 33 bp, Homo sapien
atggcaatagacattgcagaacagtttagtgaa

SEQ ID NO: 261261 - DNA, 33 bp, Homo sapien
ggccaactgaaactaacagtcctgagaccattc

SEQ ID NO: 261262 - DNA, 33 bp, Homo sapien
ggccaactgaaactaagagtcctgagaccattc

SEQ ID NO: 261263 - DNA, 33 bp, Homo sapien; identical to SEQ ID NO: 261261

SEQ ID NO: 261264 - DNA, 33 bp, Homo sapien; identical to SEQ ID NO: 261262

SEQ ID NO: 261265 - DNA, 33 bp, Homo sapien
atatggaaaatgaagagcacaaaaataaacctt

SEQ ID NO: 261266 - DNA, 33 bp, Homo sapien
atatggaaaatgaagatcacaaaaataaacctt

SEQ ID NO: 261267 - DNA, 33 bp, Homo sapien
tcttcatatgtgagcacaataaaggataaaata

SEQ ID NO: 261268 - DNA, 33 bp, Homo sapien
tcttcatatgtgagcataataaaggataaaata

SEQ ID NO: 261269 - DNA, 33 bp, Homo sapien
cagcctccttaacctacgtactggtaaattccc

SEQ ID NO: 261270 - DNA, 33 bp, Homo sapien
cagcctccttaacctatgtactggtaaattccc

SEQ ID NO: 261271 - DNA, 33 bp, Homo sapien
aaattgtactcatttgaatataggcatctgaca

SEQ ID NO: 261272 - DNA, 33 bp, Homo sapien
aaattgtactcatttgcatataggcatctgaca

SEQ ID NO: 261273 - DNA, 33 bp, Homo sapien
atctttctcatttccaagttttaacatgaacaa

SEQ ID NO: 261274 - DNA, 33 bp, Homo sapien
atctttctcatttccaggttttaacatgaacaa

SEQ ID NO: 261275 - DNA, 33 bp, Homo sapien
tgatagtattacctagccagtatttgagtagat

SEQ ID NO: 261276 - DNA, 33 bp, Homo sapien
tgatagtattacctagtcagtatttgagtagat

SEQ ID NO: 261277 - DNA, 33 bp, Homo sapien
aacccactagacactacgagagaaatagaggaa

SEQ ID NO: 261278 - DNA, 33 bp, Homo sapien
aacccactagacactatgagagaaatagaggaa

SEQ ID NO: 261279 - DNA, 33 bp, Homo sapien
cagcataacaacaatccagaaggatgaaaattt

SEQ ID NO: 261280 - DNA, 33 bp, Homo sapien
cagcataacaacaatctagaaggatgaaaattt

SEQ ID NO: 261281 - DNA, 33 bp, Homo sapien
cattaagtaatacaacagaactacaattcttga

SEQ ID NO: 261282 - DNA, 33 bp, Homo sapien
cattaagtaatacaacggaactacaattcttga

SEQ ID NO: 261283 - DNA, 33 bp, Homo sapien
cttttatacacatttaagacataactcgagaat

SEQ ID NO: 261284 - DNA, 33 bp, Homo sapien
cttttatacacatttaggacataactcgagaat

SEQ ID NO: 261285 - DNA, 33 bp, Homo sapien
tgggttctgtattcaaagattcgaccaaccatg

SEQ ID NO: 261286 - DNA, 33 bp, Homo sapien
tgggttctgtattcaaggattcgaccaaccatg

SEQ ID NO: 261287 - DNA, 33 bp, Homo sapien
atgggaccggtaacaaatgccaagacaatgtga

SEQ ID NO: 261288 - DNA, 33 bp, Homo sapien
atgggaccggtaacaagtgccaagacaatgtga

SEQ ID NO: 261289 - DNA, 33 bp, Homo sapien
tataaaaataatatcaatacaacttttctatgt

SEQ ID NO: 261290 - DNA, 33 bp, Homo sapien
tataaaaataatatcagtacaacttttctatgt

SEQ ID NO: 261291 - DNA, 33 bp, Homo sapien
cagagagcttgcatacaatactcttacaagaat

SEQ ID NO: 261292 - DNA, 33 bp, Homo sapien
cagagagcttgcatacgatactcttacaagaat

SEQ ID NO: 261293 - DNA, 33 bp, Homo sapien
catttaggcaaaagggaaaatggcaagtaacag

SEQ ID NO: 261294 - DNA, 33 bp, Homo sapien
catttaggcaaaaggggaaatggcaagtaacag

SEQ ID NO: 261295 - DNA, 33 bp, Homo sapien
gaattccattgagttcaagaaaaaaaatcgaat

SEQ ID NO: 261296 - DNA, 33 bp, Homo sapien
gaattccattgagttccagaaaaaaaatcgaat

SEQ ID NO: 261297 - DNA, 33 bp, Homo sapien
gcagtttttggtccaaagctgatgtgactttgt

SEQ ID NO: 261298 - DNA, 33 bp, Homo sapien
gcagtttttggtccaaggctgatgtgactttgt

SEQ ID NO: 261299 - DNA, 33 bp, Homo sapien
gctgcagtggtcctgcaatgacacggtgccagc

SEQ ID NO: 261300 - DNA, 33 bp, Homo sapien
gctgcagtggtcctgcgatgacacggtgccagc

SEQ ID NO: 261301 - DNA, 33 bp, Homo sapien
ccaaaagactcttggcgagaacttgagttttag

SEQ ID NO: 261302 - DNA, 33 bp, Homo sapien
ccaaaagactcttggctagaacttgagttttag

SEQ ID NO: 261303 - DNA, 33 bp, Homo sapien
atgaacaaggtcagaacaaggtcatgtaaaagg

SEQ ID NO: 261304 - DNA, 33 bp, Homo sapien
atgaacaaggtcagaagaaggtcatgtaaaagg

SEQ ID NO: 261305 - DNA, 33 bp, Homo sapien
taatctaaaggctgtccaaccaaaggacattca

SEQ ID NO: 261306 - DNA, 33 bp, Homo sapien
taatctaaaggctgtctaaccaaaggacattca

SEQ ID NO: 261307 - DNA, 33 bp, Homo sapien
tgaaatggatggctcccgaatctatctttgaca

SEQ ID NO: 261308 - DNA, 33 bp, Homo sapien
tgaaatggatggctcctgaatctatctttgaca

SEQ ID NO: 261309 - DNA, 33 bp, Homo sapien
gtgctatactgagtcccatgaaggcagtatatg

SEQ ID NO: 261310 - DNA, 33 bp, Homo sapien
gtgctatactgagtccgatgaaggcagtatatg

SEQ ID NO: 261311 - DNA, 33 bp, Homo sapien
gaccatacttcgagagacactgcaccagaatct

SEQ ID NO: 261312 - DNA, 33 bp, Homo sapien
gaccatacttcgagagccactgcaccagaatct

SEQ ID NO: 261313 - DNA, 33 bp, Homo sapien
aaataacactatgtctaaaaacaagcagggaag

SEQ ID NO: 261314 - DNA, 33 bp, Homo sapien
aaataacactatgtctgaaaacaagcagggaag

SEQ ID NO: 261315 - DNA, 33 bp, Homo sapien
tgtgtgcgtatgcagccataattggagagtaaa

SEQ ID NO: 261316 - DNA, 33 bp, Homo sapien
tgtgtgcgtatgcagctataattggagagtaaa

SEQ ID NO: 261317 - DNA, 33 bp, Homo sapien
gttttacagatgcaaaattgaggcaaacagaat

SEQ ID NO: 261318 - DNA, 33 bp, Homo sapien
gttttacagatgcaaagttgaggcaaacagaat

SEQ ID NO: 261319 - DNA, 33 bp, Homo sapien
gcaccttgctggctcaaacaatgatcacacatc

SEQ ID NO: 261320 - DNA, 33 bp, Homo sapien
gcaccttgctggctcacacaatgatcacacatc

SEQ ID NO: 261321 - DNA, 33 bp, Homo sapien
gttcccaggctatatccaacttgtaccaacatt

SEQ ID NO: 261322 - DNA, 33 bp, Homo sapien
gttcccaggctatatctaacttgtaccaacatt

SEQ ID NO: 261323 - DNA, 33 bp, Homo sapien
cacttctatgatacccaatgcagttttatgcca

SEQ ID NO: 261324 - DNA, 33 bp, Homo sapien
cacttctatgatacccgatgcagttttatgcca

SEQ ID NO: 261325 - DNA, 33 bp, Homo sapien
atatcctggataggaaaagaatagtgccagaaa

SEQ ID NO: 261326 - DNA, 33 bp, Homo sapien
atatcctggataggaatagaatagtgccagaaa

SEQ ID NO: 261327 - DNA, 33 bp, Homo sapien
cttaatggtagatacacgagttatactttttct

SEQ ID NO: 261328 - DNA, 33 bp, Homo sapien
cttaatggtagatacatgagttatactttttct

SEQ ID NO: 261329 - DNA, 33 bp, Homo sapien
gagaatggtaactctaacttattcattcttgag

SEQ ID NO: 261330 - DNA, 33 bp, Homo sapien
gagaatggtaactctaccttattcattcttgag

SEQ ID NO: 261331 - DNA, 33 bp, Homo sapien
tttgtttgcttttcataacaattctgtgaggtt

SEQ ID NO: 261332 - DNA, 33 bp, Homo sapien
tttgtttgcttttcattacaattctgtgaggtt

SEQ ID NO: 261333 - DNA, 33 bp, Homo sapien
ggatgtgctaagagaaaaggggaacatcatgct

SEQ ID NO: 261334 - DNA, 33 bp, Homo sapien
ggatgtgctaagagaagaggggaacatcatgct

SEQ ID NO: 261335 - DNA, 33 bp, Homo sapien
aagtgagcatgcctaccgacagcctgtgtcact

SEQ ID NO: 261336 - DNA, 33 bp, Homo sapien
aagtgagcatgcctactgacagcctgtgtcact

SEQ ID NO: 261337 - DNA, 33 bp, Homo sapien
tttttctttggaagaacgcaagtctttaagttg

SEQ ID NO: 261338 - DNA, 33 bp, Homo sapien
tttttctttggaagaatgcaagtctttaagttg

SEQ ID NO: 261339 - DNA, 33 bp, Homo sapien
acattacttagaaactcaagaaaatgttaggac

SEQ ID NO: 261340 - DNA, 33 bp, Homo sapien
acattacttagaaactgaagaaaatgttaggac

SEQ ID NO: 261341 - DNA, 33 bp, Homo sapien
ttaagtgctgacttaacggttctgagtccccgc

SEQ ID NO: 261342 - DNA, 33 bp, Homo sapien
ttaagtgctgacttaatggttctgagtccccgc

SEQ ID NO: 261343 - DNA, 33 bp, Homo sapien
tggttgtgtgagatgacagatgtttagcaaatt

SEQ ID NO: 261344 - DNA, 33 bp, Homo sapien
tggttgtgtgagatgagagatgtttagcaaatt

SEQ ID NO: 261345 - DNA, 33 bp, Homo sapien
tgtttatgaccaaaaccaactagaatttatgcc

SEQ ID NO: 261346 - DNA, 33 bp, Homo sapien
tgtttatgaccaaaacgaactagaatttatgcc

SEQ ID NO: 261347 - DNA, 33 bp, Homo sapien
tataatctggccaaacaagccgaccatgggtgg

SEQ ID NO: 261348 - DNA, 33 bp, Homo sapien
tataatctggccaaacgagccgaccatgggtgg

SEQ ID NO: 261349 - DNA, 33 bp, Homo sapien
tcaggttaccagaagagagtgacacaaaatttg

SEQ ID NO: 261350 - DNA, 33 bp, Homo sapien
tcaggttaccagaagatagtgacacaaaatttg

SEQ ID NO: 261351 - DNA, 33 bp, Homo sapien
atatagggagagagaactaaactggactgtgat

SEQ ID NO: 261352 - DNA, 33 bp, Homo sapien
atatagggagagagaattaaactggactgtgat

SEQ ID NO: 261353 - DNA, 33 bp, Homo sapien
aagaatgtgtgctctcaaaacaaaactgcagta

SEQ ID NO: 261354 - DNA, 33 bp, Homo sapien
aagaatgtgtgctctccaaacaaaactgcagta

SEQ ID NO: 261355 - DNA, 33 bp, Homo sapien
atggggcaggccacacaaactgggagaattact

SEQ ID NO: 261356 - DNA, 33 bp, Homo sapien
atggggcaggccacacgaactgggagaattact

SEQ ID NO: 261357 - DNA, 33 bp, Homo sapien
ttttgttgtgctttaaaaatagtaatttagtag

SEQ ID NO: 261358 - DNA, 33 bp, Homo sapien
ttttgttgtgctttaagaatagtaatttagtag

SEQ ID NO: 261359 - DNA, 33 bp, Homo sapien
atttctttaaataagacctgagaacctttaatg

SEQ ID NO: 261360 - DNA, 33 bp, Homo sapien
atttctttaaataagatctgagaacctttaatg

SEQ ID NO: 261361 - DNA, 33 bp, Homo sapien
agaaataccagtctacactcttcaaaacaaaac

SEQ ID NO: 261362 - DNA, 33 bp, Homo sapien
agaaataccagtctacgctcttcaaaacaaaac

SEQ ID NO: 261363 - DNA, 33 bp, Homo sapien
atggcttgttaaaagcgctggatgatgaaaaca

SEQ ID NO: 261364 - DNA, 33 bp, Homo sapien
atggcttgttaaaagctctggatgatgaaaaca

SEQ ID NO: 261365 - DNA, 33 bp, Homo sapien
tatgcctaaaaaattcaaccaactagtgtggct

SEQ ID NO: 261366 - DNA, 33 bp, Homo sapien
tatgcctaaaaaattctaccaactagtgtggct

SEQ ID NO: 261367 - DNA, 33 bp, Homo sapien
gggttttattttgggcactttcttgttttcttc

SEQ ID NO: 261368 - DNA, 33 bp, Homo sapien
gggttttattttgggcgctttcttgttttcttc

SEQ ID NO: 261369 - DNA, 33 bp, Homo sapien
aatgaatctcagatgcagatgagaactttctaa

SEQ ID NO: 261370 - DNA, 33 bp, Homo sapien
aatgaatctcagatgcggatgagaactttctaa

SEQ ID NO: 261371 - DNA, 33 bp, Homo sapien
ggccacaacagaactcacaaatggcagagctag

SEQ ID NO: 261372 - DNA, 33 bp, Homo sapien
ggccacaacagaactcgcaaatggcagagctag

SEQ ID NO: 261373 - DNA, 33 bp, Homo sapien
aatgttctgtaacatcactacctaatagtagaa

SEQ ID NO: 261374 - DNA, 33 bp, Homo sapien
aatgttctgtaacatcgctacctaatagtagaa

SEQ ID NO: 261375 - DNA, 33 bp, Homo sapien
attgcaaatttccggaagctaccaacattttta

SEQ ID NO: 261376 - DNA, 33 bp, Homo sapien
attgcaaatttccggacgctaccaacattttta

SEQ ID NO: 261377 - DNA, 33 bp, Homo sapien
catttgcataaccagacgaaggtctaccagact

SEQ ID NO: 261378 - DNA, 33 bp, Homo sapien
catttgcataaccagatgaaggtctaccagact

SEQ ID NO: 261379 - DNA, 33 bp, Homo sapien
gtgttttctattgtcaaaatcagtttccttcta

SEQ ID NO: 261380 - DNA, 33 bp, Homo sapien
gtgttttctattgtcataatcagtttccttcta

SEQ ID NO: 261381 - DNA, 33 bp, Homo sapien
tacattccatttcaagacagtaagaggcacatg

SEQ ID NO: 261382 - DNA, 33 bp, Homo sapien
tacattccatttcaagccagtaagaggcacatg

SEQ ID NO: 261383 - DNA, 33 bp, Homo sapien
cttccttgcctctgaaccagaagggatccaggg

SEQ ID NO: 261384 - DNA, 33 bp, Homo sapien
cttccttgcctctgaagcagaagggatccaggg

SEQ ID NO: 261385 - DNA, 33 bp, Homo sapien
cttgtgaccataaagcaacatcagagttggcag

SEQ ID NO: 261386 - DNA, 33 bp, Homo sapien
cttgtgaccataaagcgacatcagagttggcag

SEQ ID NO: 261387 - DNA, 33 bp, Homo sapien
agttataaaaattgatcacatgattgtgggagg

SEQ ID NO: 261388 - DNA, 33 bp, Homo sapien
agttataaaaattgattacatgattgtgggagg

SEQ ID NO: 261389 - DNA, 33 bp, Homo sapien
acttaatgccatgaacacctttcaatagcatct

SEQ ID NO: 261390 - DNA, 33 bp, Homo sapien
acttaatgccatgaacgcctttcaatagcatct

SEQ ID NO: 261391 - DNA, 33 bp, Homo sapien
taccatccgtttacaaattgctcatcgcattga

SEQ ID NO: 261392 - DNA, 33 bp, Homo sapien
taccatccgtttacaacttgctcatcgcattga

SEQ ID NO: 261393 - DNA, 33 bp, Homo sapien
gactgtatcttttggtaacagacagacttctga

SEQ ID NO: 261394 - DNA, 33 bp, Homo sapien
gactgtatcttttggttacagacagacttctga

SEQ ID NO: 261395 - DNA, 33 bp, Homo sapien
ttcaatcttaaagcaacttctgttctatggact

SEQ ID NO: 261396 - DNA, 33 bp, Homo sapien
ttcaatcttaaagcaatttctgttctatggact

SEQ ID NO: 261397 - DNA, 33 bp, Homo sapien
tatttcatgaaaaaagcacatttcaatatcaaa

SEQ ID NO: 261398 - DNA, 33 bp, Homo sapien
tatttcatgaaaaaaggacatttcaatatcaaa

SEQ ID NO: 261399 - DNA, 33 bp, Homo sapien
aagaacgtgttcgcccagaggttaggcgatttg

SEQ ID NO: 261400 - DNA, 33 bp, Homo sapien
aagaacgtgttcgcccggaggttaggcgatttg

SEQ ID NO: 261401 - DNA, 33 bp, Homo sapien
cacatcataagcattcaatttcaggggcgattt

SEQ ID NO: 261402 - DNA, 33 bp, Homo sapien
cacatcataagcattcgatttcaggggcgattt

SEQ ID NO: 261403 - DNA, 33 bp, Homo sapien
cacaatcccttatagcccatgctctcgcttaaa

SEQ ID NO: 261404 - DNA, 33 bp, Homo sapien
cacaatcccttatagctcatgctctcgcttaaa

SEQ ID NO: 261405 - DNA, 33 bp, Homo sapien
atgagaatacttaggaaagacaagaaagatggc

SEQ ID NO: 261406 - DNA, 33 bp, Homo sapien
atgagaatacttaggagagacaagaaagatggc

SEQ ID NO: 261407 - DNA, 33 bp, Homo sapien
atcagaaagtattttacggagcattgatgaaag

SEQ ID NO: 261408 - DNA, 33 bp, Homo sapien
atcagaaagtattttagggagcattgatgaaag

SEQ ID NO: 261409 - DNA, 33 bp, Homo sapien
gagggtatccacagtcaacgggaaacgagggga

SEQ ID NO: 261410 - DNA, 33 bp, Homo sapien
gagggtatccacagtccacgggaaacgagggga

SEQ ID NO: 261411 - DNA, 33 bp, Homo sapien
ccatgtgcttgaaaacaaagttgagggcttttt

SEQ ID NO: 261412 - DNA, 33 bp, Homo sapien
ccatgtgcttgaaaacgaagttgagggcttttt

SEQ ID NO: 261413 - DNA, 33 bp, Homo sapien
ggaatcttgcttgccactgcaaaaagggcttgt

SEQ ID NO: 261414 - DNA, 33 bp, Homo sapien
ggaatcttgcttgccattgcaaaaagggcttgt

SEQ ID NO: 261415 - DNA, 33 bp, Homo sapien
aatgtgagccactgcaagatgttaaggagagga

SEQ ID NO: 261416 - DNA, 33 bp, Homo sapien
aatgtgagccactgcaggatgttaaggagagga

SEQ ID NO: 261417 - DNA, 33 bp, Homo sapien
atttgcggccgaatcaatgaataaaagaattat

SEQ ID NO: 261418 - DNA, 33 bp, Homo sapien
atttgcggccgaatcattgaataaaagaattat

SEQ ID NO: 261419 - DNA, 33 bp, Homo sapien
agctccacgtagagataaggaaagcaaagctct

SEQ ID NO: 261420 - DNA, 33 bp, Homo sapien
agctccacgtagagatgaggaaagcaaagctct

SEQ ID NO: 261421 - DNA, 33 bp, Homo sapien
gtgtgctcttattaaacatggttgtgtcatttg

SEQ ID NO: 261422 - DNA, 33 bp, Homo sapien
gtgtgctcttattaaatatggttgtgtcatttg

SEQ ID NO: 261423 - DNA, 33 bp, Homo sapien
gagtggaagctggacacactgggtgacttgtat

SEQ ID NO: 261424 - DNA, 33 bp, Homo sapien
gagtggaagctggacatactgggtgacttgtat

SEQ ID NO: 261425 - DNA, 33 bp, Homo sapien; identical to SEQ ID NO: 261423

SEQ ID NO: 261426 - DNA, 33 bp, Homo sapien; identical to SEQ ID NO: 261424

SEQ ID NO: 261427 - DNA, 33 bp, Homo sapien
ttctttagtcatcaaccatgaccttcccaccaa

SEQ ID NO: 261428 - DNA, 33 bp, Homo sapien
ttctttagtcatcaactatgaccttcccaccaa

SEQ ID NO: 261429 - DNA, 33 bp, Homo sapien
ttctggtgaggcctgaaaatttgcatttttaac

SEQ ID NO: 261430 - DNA, 33 bp, Homo sapien
ttctggtgaggcctgagaatttgcatttttaac

SEQ ID NO: 261431 - DNA, 33 bp, Homo sapien
gcagtcttgtcagcaggatgttggccgctggat

SEQ ID NO: 261432 - DNA, 33 bp, Homo sapien
gcagtcttgtcagcagtatgttggccgctggat

SEQ ID NO: 261433 - DNA, 33 bp, Homo sapien
ggcgtgtccataccaccataataagaccatccc

SEQ ID NO: 261434 - DNA, 33 bp, Homo sapien
ggcgtgtccataccacgataataagaccatccc

SEQ ID NO: 261435 - DNA, 33 bp, Homo sapien
ctggctaagtcacctcggaggctacacctgtgt

SEQ ID NO: 261436 - DNA, 33 bp, Homo sapien
ctggctaagtcacctctgaggctacacctgtgt

SEQ ID NO: 261437 - DNA, 33 bp, Homo sapien
gcatttacctcgtaataatacttgtataaataa

SEQ ID NO: 261438 - DNA, 33 bp, Homo sapien
gcatttacctcgtaatgatacttgtataaataa

SEQ ID NO: 261439 - DNA, 33 bp, Homo sapien
ccacagctacgtgttcaaatgaaacggccatgg

SEQ ID NO: 261440 - DNA, 33 bp, Homo sapien
ccacagctacgtgttcgaatgaaacggccatgg

SEQ ID NO: 261441 - DNA, 33 bp, Homo sapien
gatcagagaacattgaaaagttagcagccctct

SEQ ID NO: 261442 - DNA, 33 bp, Homo sapien
gatcagagaacattgagaagttagcagccctct

SEQ ID NO: 261443 - DNA, 33 bp, Homo sapien
aagacgtgagaggcggaagttggcatttagagt

SEQ ID NO: 261444 - DNA, 33 bp, Homo sapien
aagacgtgagaggcggcagttggcatttagagt

SEQ ID NO: 261445 - DNA, 33 bp, Homo sapien
cacatggtatagaaagacattttggcataaacc

SEQ ID NO: 261446 - DNA, 33 bp, Homo sapien
cacatggtatagaaaggcattttggcataaacc

SEQ ID NO: 261447 - DNA, 33 bp, Homo sapien
ttccttagccattccacgctgagtttttctcat

SEQ ID NO: 261448 - DNA, 33 bp, Homo sapien
ttccttagccattccatgctgagtttttctcat

SEQ ID NO: 261449 - DNA, 33 bp, Homo sapien
caagttctagtgattcgcctaagcatattccac

SEQ ID NO: 261450 - DNA, 33 bp, Homo sapien
caagttctagtgattctcctaagcatattccac

SEQ ID NO: 261451 - DNA, 33 bp, Homo sapien
gcatattccacaattagctggttctacctctct

SEQ ID NO: 261452 - DNA, 33 bp, Homo sapien
gcatattccacaattatctggttctacctctct

SEQ ID NO: 261453 - DNA, 33 bp, Homo sapien
cagtgcagcccacacaatactgaggataaaatg

SEQ ID NO: 261454 - DNA, 33 bp, Homo sapien
cagtgcagcccacacagtactgaggataaaatg

SEQ ID NO: 261455 - DNA, 33 bp, Homo sapien
ccaacgtaccatcagcacataaaagatgtttgc

SEQ ID NO: 261456 - DNA, 33 bp, Homo sapien
ccaacgtaccatcagcgcataaaagatgtttgc

SEQ ID NO: 261457 - DNA, 33 bp, Homo sapien
ccttgcattgaatattaaagaatagctaatcat

SEQ ID NO: 261458 - DNA, 33 bp, Homo sapien
ccttgcattgaatattgaagaatagctaatcat

SEQ ID NO: 261459 - DNA, 33 bp, Homo sapien
gctgttaccttcaaaacgatcttagggaatgat

SEQ ID NO: 261460 - DNA, 33 bp, Homo sapien
gctgttaccttcaaaatgatcttagggaatgat

SEQ ID NO: 261461 - DNA, 33 bp, Homo sapien
ctataattttgtgaaacagcaattgagatgaca

SEQ ID NO: 261462 - DNA, 33 bp, Homo sapien
ctataattttgtgaaatagcaattgagatgaca

SEQ ID NO: 261463 - DNA, 33 bp, Homo sapien
catatggttttggagacaaagtattgtactcag

SEQ ID NO: 261464 - DNA, 33 bp, Homo sapien
catatggttttggagataaagtattgtactcag

SEQ ID NO: 261465 - DNA, 33 bp, Homo sapien
ttatcacaattcacacagcggtctacaactgcc

SEQ ID NO: 261466 - DNA, 33 bp, Homo sapien
ttatcacaattcacacggcggtctacaactgcc

SEQ ID NO: 261467 - DNA, 33 bp, Homo sapien
agtagatccactttaactgggagtgaattaaaa

SEQ ID NO: 261468 - DNA, 33 bp, Homo sapien
agtagatccactttaattgggagtgaattaaaa

SEQ ID NO: 261469 - DNA, 33 bp, Homo sapien
cattgtgctccaagaaactaacacagtaaacac

SEQ ID NO: 261470 - DNA, 33 bp, Homo sapien
cattgtgctccaagaagctaacacagtaaacac

SEQ ID NO: 261471 - DNA, 33 bp, Homo sapien
gtgtaatttagacaaacctgactaatacacata

SEQ ID NO: 261472 - DNA, 33 bp, Homo sapien
gtgtaatttagacaaagctgactaatacacata

SEQ ID NO: 261473 - DNA, 33 bp, Homo sapien
tctatatgaagatagcactacctataaaaacta

SEQ ID NO: 261474 - DNA, 33 bp, Homo sapien
tctatatgaagatagcgctacctataaaaacta

SEQ ID NO: 261475 - DNA, 33 bp, Homo sapien
gaggatgctgtcttcaacttttttattctgtgt

SEQ ID NO: 261476 - DNA, 33 bp, Homo sapien
gaggatgctgtcttcagcttttttattctgtgt

SEQ ID NO: 261477 - DNA, 33 bp, Homo sapien
caggtagtttgagataactggctaaatatgttt

SEQ ID NO: 261478 - DNA, 33 bp, Homo sapien
caggtagtttgagatatctggctaaatatgttt

SEQ ID NO: 261479 - DNA, 33 bp, Homo sapien
ccactgcctaggaggacgctctaattgggaacc

SEQ ID NO: 261480 - DNA, 33 bp, Homo sapien
ccactgcctaggaggatgctctaattgggaacc

SEQ ID NO: 261481 - DNA, 33 bp, Homo sapien
actattagggtaattcacttttctttgggaggc

SEQ ID NO: 261482 - DNA, 33 bp, Homo sapien
actattagggtaattcgcttttctttgggaggc

SEQ ID NO: 261483 - DNA, 33 bp, Homo sapien
ctcaactgctatgttccagtgcctcccaaagaa

SEQ ID NO: 261484 - DNA, 33 bp, Homo sapien
ctcaactgctatgttctagtgcctcccaaagaa

SEQ ID NO: 261485 - DNA, 33 bp, Homo sapien
aaaggcacacatctagcaaagagcagagccacg

SEQ ID NO: 261486 - DNA, 33 bp, Homo sapien
aaaggcacacatctagtaaagagcagagccacg

SEQ ID NO: 261487 - DNA, 33 bp, Homo sapien
atgtgtgcctttggacaaatcacataattaatg

SEQ ID NO: 261488 - DNA, 33 bp, Homo sapien
atgtgtgcctttggacgaatcacataattaatg

SEQ ID NO: 261489 - DNA, 33 bp, Homo sapien
ttctaatgtcaggtaccatttaaaatatttttc

SEQ ID NO: 261490 - DNA, 33 bp, Homo sapien
ttctaatgtcaggtactatttaaaatatttttc

SEQ ID NO: 261491 - DNA, 33 bp, Homo sapien
acattagaagcactcactatgtattggctacca

SEQ ID NO: 261492 - DNA, 33 bp, Homo sapien
acattagaagcactcagtatgtattggctacca

SEQ ID NO: 261493 - DNA, 33 bp, Homo sapien
aggtcacttttctgctgaataaaataaggataa

SEQ ID NO: 261494 - DNA, 33 bp, Homo sapien
aggtcacttttctgcttaataaaataaggataa

SEQ ID NO: 261495 - DNA, 33 bp, Homo sapien
tgccaaaatctggtgccacatctagaagaaatt

SEQ ID NO: 261496 - DNA, 33 bp, Homo sapien
tgccaaaatctggtgctacatctagaagaaatt

SEQ ID NO: 261497 - DNA, 33 bp, Homo sapien
aggggtttgaaaataacgcctcatattcttcat

SEQ ID NO: 261498 - DNA, 33 bp, Homo sapien
aggggtttgaaaataatgcctcatattcttcat

SEQ ID NO: 261499 - DNA, 33 bp, Homo sapien
taaaaaggcaggtaagaacgcatagaaagggag

SEQ ID NO: 261500 - DNA, 33 bp, Homo sapien
taaaaaggcaggtaaggacgcatagaaagggag

SEQ ID NO: 261501 - DNA, 33 bp, Homo sapien
tgtcctacagtaactcagagatgcaggacttaa

SEQ ID NO: 261502 - DNA, 33 bp, Homo sapien
tgtcctacagtaactcggagatgcaggacttaa

SEQ ID NO: 261503 - DNA, 33 bp, Homo sapien
tgcaagtagtttaagacgataagaagtgtggtg

SEQ ID NO: 261504 - DNA, 33 bp, Homo sapien
tgcaagtagtttaagaggataagaagtgtggtg

SEQ ID NO: 261505 - DNA, 33 bp, Homo sapien
tttatctttggaaaacaagtagcttccagaatg

SEQ ID NO: 261506 - DNA, 33 bp, Homo sapien
tttatctttggaaaacgagtagcttccagaatg

SEQ ID NO: 261507 - DNA, 33 bp, Homo sapien
agagctttctgaacctcagattttttaatttaa

SEQ ID NO: 261508 - DNA, 33 bp, Homo sapien
agagctttctgaaccttagattttttaatttaa

SEQ ID NO: 261509 - DNA, 33 bp, Homo sapien
actacactcttaaacacagtaccctctactggt

SEQ ID NO: 261510 - DNA, 33 bp, Homo sapien
actacactcttaaacatagtaccctctactggt

SEQ ID NO: 261511 - DNA, 33 bp, Homo sapien
aggcttctatcaaaacccctgaactttcaggtt

SEQ ID NO: 261512 - DNA, 33 bp, Homo sapien
aggcttctatcaaaacgcctgaactttcaggtt

SEQ ID NO: 261513 - DNA, 33 bp, Homo sapien
gcttctagtcatgatagcacagtccttgattaa

SEQ ID NO: 261514 - DNA, 33 bp, Homo sapien
gcttctagtcatgatatcacagtccttgattaa

SEQ ID NO: 261515 - DNA, 33 bp, Homo sapien
aacatctctcacatcaagtccaaggagaacctt

SEQ ID NO: 261516 - DNA, 33 bp, Homo sapien
aacatctctcacatcaggtccaaggagaacctt

SEQ ID NO: 261517 - DNA, 33 bp, Homo sapien
attgctttataaactgaatgaaaatgtaagctc

SEQ ID NO: 261518 - DNA, 33 bp, Homo sapien
attgctttataaactggatgaaaatgtaagctc

SEQ ID NO: 261519 - DNA, 33 bp, Homo sapien
agttacttgatggaagaaattttgcatgatctt

SEQ ID NO: 261520 - DNA, 33 bp, Homo sapien
agttacttgatggaaggaattttgcatgatctt

SEQ ID NO: 261521 - DNA, 33 bp, Homo sapien
aggcaccttcttgatacgctgtcaaaatgttct

SEQ ID NO: 261522 - DNA, 33 bp, Homo sapien
aggcaccttcttgatatgctgtcaaaatgttct

SEQ ID NO: 261523 - DNA, 33 bp, Homo sapien
gtcatctacagtgaaaagtcaaaggagaattaa

SEQ ID NO: 261524 - DNA, 33 bp, Homo sapien
gtcatctacagtgaaatgtcaaaggagaattaa

SEQ ID NO: 261525 - DNA, 33 bp, Homo sapien
ttttattgtgctatgggaaatgtcatcatgatg

SEQ ID NO: 261526 - DNA, 33 bp, Homo sapien
ttttattgtgctatggtaaatgtcatcatgatg

SEQ ID NO: 261527 - DNA, 33 bp, Homo sapien
tcccccacctacaataactgatcaccttcatgt

SEQ ID NO: 261528 - DNA, 33 bp, Homo sapien
tcccccacctacaatatctgatcaccttcatgt

SEQ ID NO: 261529 - DNA, 33 bp, Homo sapien
acaactctcttcatagcatcaaacacaccagaa

SEQ ID NO: 261530 - DNA, 33 bp, Homo sapien
acaactctcttcatagtatcaaacacaccagaa

SEQ ID NO: 261531 - DNA, 33 bp, Homo sapien
atcagggtggccataaacattgaaagggctgag

SEQ ID NO: 261532 - DNA, 33 bp, Homo sapien
atcagggtggccataagcattgaaagggctgag

SEQ ID NO: 261533 - DNA, 33 bp, Homo sapien
atccataaatccaggacagtttcctcatcttaa

SEQ ID NO: 261534 - DNA, 33 bp, Homo sapien
atccataaatccaggatagtttcctcatcttaa

SEQ ID NO: 261535 - DNA, 33 bp, Homo sapien
aggaaggcccaagacaccgagacattgctgcac

SEQ ID NO: 261536 - DNA, 33 bp, Homo sapien
aggaaggcccaagacatcgagacattgctgcac

SEQ ID NO: 261537 - DNA, 33 bp, Homo sapien
tgttgtgtgtgtagtaagaaagagctttgatta

SEQ ID NO: 261538 - DNA, 33 bp, Homo sapien
tgttgtgtgtgtagtatgaaagagctttgatta

SEQ ID NO: 261539 - DNA, 33 bp, Homo sapien
cactgagtggctggtacaggaaagaactcttta

SEQ ID NO: 261540 - DNA, 33 bp, Homo sapien
cactgagtggctggtataggaaagaactcttta

SEQ ID NO: 261541 - DNA, 33 bp, Homo sapien
aaatacaatatctgccctgcaatgttgctaaat

SEQ ID NO: 261542 - DNA, 33 bp, Homo sapien
aaatacaatatctgccttgcaatgttgctaaat

SEQ ID NO: 261543 - DNA, 33 bp, Homo sapien
tgttaaagatctaaagacctcatcacagaagac

SEQ ID NO: 261544 - DNA, 33 bp, Homo sapien
tgttaaagatctaaagtcctcatcacagaagac

SEQ ID NO: 261545 - DNA, 33 bp, Homo sapien
ttctttgtgtgctctacggcaaattctgtggta

SEQ ID NO: 261546 - DNA, 33 bp, Homo sapien
ttctttgtgtgctctatggcaaattctgtggta

SEQ ID NO: 261547 - DNA, 33 bp, Homo sapien
agacaaaaacagccaacgcagtttatgcctttt

SEQ ID NO: 261548 - DNA, 33 bp, Homo sapien
agacaaaaacagccaatgcagtttatgcctttt

SEQ ID NO: 261549 - DNA, 33 bp, Homo sapien
ctggctctaagcaacacggccagaagctagagt

SEQ ID NO: 261550 - DNA, 33 bp, Homo sapien
ctggctctaagcaacatggccagaagctagagt

SEQ ID NO: 261551 - DNA, 33 bp, Homo sapien
atattttttctggtctcacattggctatataac

SEQ ID NO: 261552 - DNA, 33 bp, Homo sapien
atattttttctggtcttacattggctatataac

SEQ ID NO: 261553 - DNA, 33 bp, Homo sapien
gcttttcccatcccaccgtgagacttctcaagc

SEQ ID NO: 261554 - DNA, 33 bp, Homo sapien
gcttttcccatcccactgtgagacttctcaagc

SEQ ID NO: 261555 - DNA, 33 bp, Homo sapien
gtgtgagagatgagaaatgtctacaggtacccc

SEQ ID NO: 261556 - DNA, 33 bp, Homo sapien
gtgtgagagatgagaagtgtctacaggtacccc

SEQ ID NO: 261557 - DNA, 33 bp, Homo sapien
agtggctccttagaaccccctctgggacaggtg

SEQ ID NO: 261558 - DNA, 33 bp, Homo sapien
agtggctccttagaacgccctctgggacaggtg

SEQ ID NO: 261559 - DNA, 33 bp, Homo sapien
acatgctaagtgatcaccgaaactattcatctg

SEQ ID NO: 261560 - DNA, 33 bp, Homo sapien
acatgctaagtgatcatcgaaactattcatctg

SEQ ID NO: 261561 - DNA, 33 bp, Homo sapien
tgttcagctctgcaaaaaagctgatgctagagt

SEQ ID NO: 261562 - DNA, 33 bp, Homo sapien
tgttcagctctgcaaacaagctgatgctagagt

SEQ ID NO: 261563 - DNA, 33 bp, Homo sapien
aggagtatgtaatgtacggagaatgctctgaag

SEQ ID NO: 261564 - DNA, 33 bp, Homo sapien
aggagtatgtaatgtagggagaatgctctgaag

SEQ ID NO: 261565 - DNA, 33 bp, Homo sapien
tcccttcctgggttacccaacttattggctgtc

SEQ ID NO: 261566 - DNA, 33 bp, Homo sapien
tcccttcctgggttactcaacttattggctgtc

SEQ ID NO: 261567 - DNA, 33 bp, Homo sapien
acatagtaaattaacaacaggaacgcaatcaaa

SEQ ID NO: 261568 - DNA, 33 bp, Homo sapien
acatagtaaattaacagcaggaacgcaatcaaa

SEQ ID NO: 261569 - DNA, 33 bp, Homo sapien
acgcaatcaaacattacaaaagccagaagaaaa

SEQ ID NO: 261570 - DNA, 33 bp, Homo sapien
acgcaatcaaacattagaaaagccagaagaaaa

SEQ ID NO: 261571 - DNA, 33 bp, Homo sapien
cactctctgctagatacagtaacttccaatatt

SEQ ID NO: 261572 - DNA, 33 bp, Homo sapien
cactctctgctagatatagtaacttccaatatt

SEQ ID NO: 261573 - DNA, 33 bp, Homo sapien
tcaaggaactcaaacacgtgtcaccgaaatata

SEQ ID NO: 261574 - DNA, 33 bp, Homo sapien
tcaaggaactcaaacatgtgtcaccgaaatata

SEQ ID NO: 261575 - DNA, 33 bp, Homo sapien
ggtatatattcagataactttgcttgcatatta

SEQ ID NO: 261576 - DNA, 33 bp, Homo sapien
ggtatatattcagatagctttgcttgcatatta

SEQ ID NO: 261577 - DNA, 33 bp, Homo sapien
gccaagccctacaggcacttcaaaatcaaggaa

SEQ ID NO: 261578 - DNA, 33 bp, Homo sapien
gccaagccctacaggcgcttcaaaatcaaggaa

SEQ ID NO: 261579 - DNA, 33 bp, Homo sapien
cccaagactcctcacacctaaattccacatgct

SEQ ID NO: 261580 - DNA, 33 bp, Homo sapien
cccaagactcctcacatctaaattccacatgct

SEQ ID NO: 261581 - DNA, 33 bp, Homo sapien
tgtctatgcctctaccaataccatactattttg

SEQ ID NO: 261582 - DNA, 33 bp, Homo sapien
tgtctatgcctctaccgataccatactattttg

SEQ ID NO: 261583 - DNA, 33 bp, Homo sapien
tgaactaatgaaatggaaatgtatgcatattca

SEQ ID NO: 261584 - DNA, 33 bp, Homo sapien
tgaactaatgaaatgggaatgtatgcatattca

SEQ ID NO: 261585 - DNA, 33 bp, Homo sapien
ggaattagaaaactacaccaaacaaatcatgag

SEQ ID NO: 261586 - DNA, 33 bp, Homo sapien
ggaattagaaaactacgccaaacaaatcatgag

SEQ ID NO: 261587 - DNA, 33 bp, Homo sapien
ggcagcttttgtgtggcacagcatttaaggaaa

SEQ ID NO: 261588 - DNA, 33 bp, Homo sapien
ggcagcttttgtgtggtacagcatttaaggaaa

SEQ ID NO: 261589 - DNA, 33 bp, Homo sapien
cccactgattacaaacaatggaacttaaacaag

SEQ ID NO: 261590 - DNA, 33 bp, Homo sapien
cccactgattacaaacgatggaacttaaacaag

SEQ ID NO: 261591 - DNA, 33 bp, Homo sapien
tgcaaactttttctacaaacagccatagagcaa

SEQ ID NO: 261592 - DNA, 33 bp, Homo sapien
tgcaaactttttctacgaacagccatagagcaa

SEQ ID NO: 261593 - DNA, 33 bp, Homo sapien
taacatagaaatttcaaatcagtggctcacagt

SEQ ID NO: 261594 - DNA, 33 bp, Homo sapien
taacatagaaatttcacatcagtggctcacagt

SEQ ID NO: 261595 - DNA, 33 bp, Homo sapien
ctccagatggaccaaccctcattatatgatttt

SEQ ID NO: 261596 - DNA, 33 bp, Homo sapien
ctccagatggaccaactctcattatatgatttt

SEQ ID NO: 261597 - DNA, 33 bp, Homo sapien
attcaaaagccctcaaatatcaggaaagtgact

SEQ ID NO: 261598 - DNA, 33 bp, Homo sapien
attcaaaagccctcaagtatcaggaaagtgact

SEQ ID NO: 261599 - DNA, 33 bp, Homo sapien
ttcactgtcttcctgaccctgcaccctacttac

SEQ ID NO: 261600 - DNA, 33 bp, Homo sapien
ttcactgtcttcctgatcctgcaccctacttac

SEQ ID NO: 261601 - DNA, 33 bp, Homo sapien
ctggctttagctcacaacccttgaatttttctt

SEQ ID NO: 261602 - DNA, 33 bp, Homo sapien
ctggctttagctcacaccccttgaatttttctt

SEQ ID NO: 261603 - DNA, 33 bp, Homo sapien
aatctctttctctcgaactctgatgaatggacc

SEQ ID NO: 261604 - DNA, 33 bp, Homo sapien
aatctctttctctcgagctctgatgaatggacc

SEQ ID NO: 261605 - DNA, 33 bp, Homo sapien
tagttttcatgaagcaactctgagtaaagtact

SEQ ID NO: 261606 - DNA, 33 bp, Homo sapien
tagttttcatgaagcagctctgagtaaagtact

SEQ ID NO: 261607 - DNA, 33 bp, Homo sapien
gagcagcagctgcaacaaagagtggcagaagag

SEQ ID NO: 261608 - DNA, 33 bp, Homo sapien
gagcagcagctgcaaccaagagtggcagaagag

SEQ ID NO: 261609 - DNA, 33 bp, Homo sapien
ctcaagtaagagcacccatttagccaacactgg

SEQ ID NO: 261610 - DNA, 33 bp, Homo sapien
ctcaagtaagagcacctatttagccaacactgg

SEQ ID NO: 261611 - DNA, 33 bp, Homo sapien
ggaggcaagaaacctacactccataaaagtagc

SEQ ID NO: 261612 - DNA, 33 bp, Homo sapien
ggaggcaagaaacctatactccataaaagtagc

SEQ ID NO: 261613 - DNA, 33 bp, Homo sapien
tttctgtctgcaactcagaaaggatatatgggc

SEQ ID NO: 261614 - DNA, 33 bp, Homo sapien
tttctgtctgcaactcggaaaggatatatgggc

SEQ ID NO: 261615 - DNA, 33 bp, Homo sapien
cactcctctgaattcccatgcattttatttatt

SEQ ID NO: 261616 - DNA, 33 bp, Homo sapien
cactcctctgaattcctatgcattttatttatt

SEQ ID NO: 261617 - DNA, 33 bp, Homo sapien
tctttgttcctacaaccccggccacttctgcca

SEQ ID NO: 261618 - DNA, 33 bp, Homo sapien
tctttgttcctacaactccggccacttctgcca

SEQ ID NO: 261619 - DNA, 33 bp, Homo sapien
atgctgaatgacaaggaccctgccctctagaga

SEQ ID NO: 261620 - DNA, 33 bp, Homo sapien
atgctgaatgacaaggtccctgccctctagaga

SEQ ID NO: 261621 - DNA, 33 bp, Homo sapien
cccaggtgctgcaaaaatttagttgtgggcaca

SEQ ID NO: 261622 - DNA, 33 bp, Homo sapien
cccaggtgctgcaaaagtttagttgtgggcaca

SEQ ID NO: 261623 - DNA, 33 bp, Homo sapien
cattctggaaaagcaacgttggaggaacagaaa

SEQ ID NO: 261624 - DNA, 33 bp, Homo sapien
cattctggaaaagcaatgttggaggaacagaaa

SEQ ID NO: 261625 - DNA, 33 bp, Homo sapien
aactcttcctaattagaatgatcagagcaccta

SEQ ID NO: 261626 - DNA, 33 bp, Homo sapien
aactcttcctaattagcatgatcagagcaccta

SEQ ID NO: 261627 - DNA, 33 bp, Homo sapien
aatattgagaactgaacctgctcttgctgaggt

SEQ ID NO: 261628 - DNA, 33 bp, Homo sapien
aatattgagaactgaatctgctcttgctgaggt

SEQ ID NO: 261629 - DNA, 33 bp, Homo sapien
cattatctaggcaccacgtcaagactcaaggaa

SEQ ID NO: 261630 - DNA, 33 bp, Homo sapien
cattatctaggcaccatgtcaagactcaaggaa

SEQ ID NO: 261631 - DNA, 33 bp, Homo sapien
ctctgcctacagataacgcttttacatctctag

SEQ ID NO: 261632 - DNA, 33 bp, Homo sapien
ctctgcctacagataatgcttttacatctctag

SEQ ID NO: 261633 - DNA, 33 bp, Homo sapien
ggtttgttcaaagaagcaaacgaaggaacaagt

SEQ ID NO: 261634 - DNA, 33 bp, Homo sapien
ggtttgttcaaagaagtaaacgaaggaacaagt

SEQ ID NO: 261635 - DNA, 33 bp, Homo sapien
ttccttaggattttgaccatcattcgtaacaga

SEQ ID NO: 261636 - DNA, 33 bp, Homo sapien
ttccttaggattttgagcatcattcgtaacaga

SEQ ID NO: 261637 - DNA, 33 bp, Homo sapien
gttgatagaattactacacagggacagttaaac

SEQ ID NO: 261638 - DNA, 33 bp, Homo sapien
gttgatagaattactagacagggacagttaaac

SEQ ID NO: 261639 - DNA, 33 bp, Homo sapien
gcaatcaattgaaactaaccaagaaatgacaca

SEQ ID NO: 261640 - DNA, 33 bp, Homo sapien
gcaatcaattgaaactgaccaagaaatgacaca

SEQ ID NO: 261641 - DNA, 33 bp, Homo sapien
ataactttactccagaaaaaagctcaagaatac

SEQ ID NO: 261642 - DNA, 33 bp, Homo sapien
ataactttactccagagaaaagctcaagaatac

SEQ ID NO: 261643 - DNA, 33 bp, Homo sapien
taaatgtctctgttgaaatgagtccatgcaggc

SEQ ID NO: 261644 - DNA, 33 bp, Homo sapien
taaatgtctctgttgagatgagtccatgcaggc

SEQ ID NO: 261645 - DNA, 33 bp, Homo sapien
atcagggagaaagagacaggctccagaaaatat

SEQ ID NO: 261646 - DNA, 33 bp, Homo sapien
atcagggagaaagagataggctccagaaaatat

SEQ ID NO: 261647 - DNA, 33 bp, Homo sapien
gcattcttcaaacagtaacaaagtaaaacaatc

SEQ ID NO: 261648 - DNA, 33 bp, Homo sapien
gcattcttcaaacagtgacaaagtaaaacaatc

SEQ ID NO: 261649 - DNA, 33 bp, Homo sapien
tgtgccctgaaatttaccatttacatatttcca

SEQ ID NO: 261650 - DNA, 33 bp, Homo sapien
tgtgccctgaaatttagcatttacatatttcca

SEQ ID NO: 261651 - DNA, 33 bp, Homo sapien
gtgagtagttgcaacaaagacaacaaaacccac

SEQ ID NO: 261652 - DNA, 33 bp, Homo sapien
gtgagtagttgcaacagagacaacaaaacccac

SEQ ID NO: 261653 - DNA, 33 bp, Homo sapien
tttcactgtgcattcaacaaacaaaattgtcct

SEQ ID NO: 261654 - DNA, 33 bp, Homo sapien
tttcactgtgcattcagcaaacaaaattgtcct

SEQ ID NO: 261655 - DNA, 33 bp, Homo sapien
tgggtatgatttgctacgtggaagatgggctgg

SEQ ID NO: 261656 - DNA, 33 bp, Homo sapien
tgggtatgatttgctatgtggaagatgggctgg

SEQ ID NO: 261657 - DNA, 33 bp, Homo sapien
atgtgcagaaaaatgacactaaagggtgctaag

SEQ ID NO: 261658 - DNA, 33 bp, Homo sapien
atgtgcagaaaaatgatactaaagggtgctaag

SEQ ID NO: 261659 - DNA, 33 bp, Homo sapien
gcaatgtgaccaagcaatcctccttctaggtat

SEQ ID NO: 261660 - DNA, 33 bp, Homo sapien
gcaatgtgaccaagcattcctccttctaggtat

SEQ ID NO: 261661 - DNA, 33 bp, Homo sapien
ctcctacaacttggcaaatagaatatgcgagag

SEQ ID NO: 261662 - DNA, 33 bp, Homo sapien
ctcctacaacttggcagatagaatatgcgagag

SEQ ID NO: 261663 - DNA, 33 bp, Homo sapien
aggagatgcagttgttcaaaagaatctgggacc

SEQ ID NO: 261664 - DNA, 33 bp, Homo sapien
aggagatgcagttgtttaaaagaatctgggacc

SEQ ID NO: 261665 - DNA, 33 bp, Homo sapien
cagggagggtgacaaaagaatgagggtctaaaa

SEQ ID NO: 261666 - DNA, 33 bp, Homo sapien
cagggagggtgacaaatgaatgagggtctaaaa

SEQ ID NO: 261667 - DNA, 33 bp, Homo sapien
tttgtgtgtggaataactgatacatgatttttc

SEQ ID NO: 261668 - DNA, 33 bp, Homo sapien
tttgtgtgtggaataattgatacatgatttttc

SEQ ID NO: 261669 - DNA, 33 bp, Homo sapien
aagctgttaagaaagcccaatgcaccctctttt

SEQ ID NO: 261670 - DNA, 33 bp, Homo sapien
aagctgttaagaaagctcaatgcaccctctttt

SEQ ID NO: 261671 - DNA, 33 bp, Homo sapien
atgtcttctgtggagcaacattagtgaattcac

SEQ ID NO: 261672 - DNA, 33 bp, Homo sapien
atgtcttctgtggagcgacattagtgaattcac

SEQ ID NO: 261673 - DNA, 33 bp, Homo sapien
tacacaatcacactaacaatgttttagcagggc

SEQ ID NO: 261674 - DNA, 33 bp, Homo sapien
tacacaatcacactaagaatgttttagcagggc

SEQ ID NO: 261675 - DNA, 33 bp, Homo sapien
atagagcaatcagtcaataattagtggaacctg

SEQ ID NO: 261676 - DNA, 33 bp, Homo sapien
atagagcaatcagtcagtaattagtggaacctg

SEQ ID NO: 261677 - DNA, 33 bp, Homo sapien
aaacttcaacagaatacgccaactcaccctgtg

SEQ ID NO: 261678 - DNA, 33 bp, Homo sapien
aaacttcaacagaatatgccaactcaccctgtg

SEQ ID NO: 261679 - DNA, 33 bp, Homo sapien
tctggagtagagctcaagagtctgctttttaaa

SEQ ID NO: 261680 - DNA, 33 bp, Homo sapien
tctggagtagagctcaggagtctgctttttaaa

SEQ ID NO: 261681 - DNA, 33 bp, Homo sapien
gcttcattcgtgcttaagtaccctatacaggaa

SEQ ID NO: 261682 - DNA, 33 bp, Homo sapien
gcttcattcgtgcttacgtaccctatacaggaa

SEQ ID NO: 261683 - DNA, 33 bp, Homo sapien
aatgggtggtaaactgaatggtaagataccttc

SEQ ID NO: 261684 - DNA, 33 bp, Homo sapien
aatgggtggtaaactggatggtaagataccttc

SEQ ID NO: 261685 - DNA, 33 bp, Homo sapien
ttatatggttatgtcacagggttttttgggctc

SEQ ID NO: 261686 - DNA, 33 bp, Homo sapien
ttatatggttatgtcagagggttttttgggctc

SEQ ID NO: 261687 - DNA, 33 bp, Homo sapien
aaagtatcatgaacacagtaaagaaatactccc

SEQ ID NO: 261688 - DNA, 33 bp, Homo sapien
aaagtatcatgaacacggtaaagaaatactccc

SEQ ID NO: 261689 - DNA, 33 bp, Homo sapien
tcgcgttaagtattagcagatgctggtgtccct

SEQ ID NO: 261690 - DNA, 33 bp, Homo sapien
tcgcgttaagtattagtagatgctggtgtccct

SEQ ID NO: 261691 - DNA, 33 bp, Homo sapien
ctccagcctaattagcacatttctccagtgaaa

SEQ ID NO: 261692 - DNA, 33 bp, Homo sapien
ctccagcctaattagcgcatttctccagtgaaa

SEQ ID NO: 261693 - DNA, 33 bp, Homo sapien
ctcagccagtacctacacactgctaacagactc

SEQ ID NO: 261694 - DNA, 33 bp, Homo sapien
ctcagccagtacctacgcactgctaacagactc

SEQ ID NO: 261695 - DNA, 33 bp, Homo sapien
ggactagaatggtgtacccactatagaaaacaa

SEQ ID NO: 261696 - DNA, 33 bp, Homo sapien
ggactagaatggtgtatccactatagaaaacaa

SEQ ID NO: 261697 - DNA, 33 bp, Homo sapien
ctactaagtgactaataagtgggtagtgcacac

SEQ ID NO: 261698 - DNA, 33 bp, Homo sapien
ctactaagtgactaatgagtgggtagtgcacac

SEQ ID NO: 261699 - DNA, 33 bp, Homo sapien
ttgtcaactatgggcaagattttcacttggcag

SEQ ID NO: 261700 - DNA, 33 bp, Homo sapien
ttgtcaactatgggcacgattttcacttggcag

SEQ ID NO: 261701 - DNA, 33 bp, Homo sapien
actccagatttggcaccgcttcccctcatcatc

SEQ ID NO: 261702 - DNA, 33 bp, Homo sapien
actccagatttggcactgcttcccctcatcatc

SEQ ID NO: 261703 - DNA, 33 bp, Homo sapien
atccatgttcatatacacagctcttattcattc

SEQ ID NO: 261704 - DNA, 33 bp, Homo sapien
atccatgttcatatacgcagctcttattcattc

SEQ ID NO: 261705 - DNA, 33 bp, Homo sapien
acagcttagtttgcaacagttccacattggaaa

SEQ ID NO: 261706 - DNA, 33 bp, Homo sapien
acagcttagtttgcaatagttccacattggaaa

SEQ ID NO: 261707 - DNA, 33 bp, Homo sapien
aaattgggtgcaatgaatatagacaatgctttc

SEQ ID NO: 261708 - DNA, 33 bp, Homo sapien
aaattgggtgcaatgagtatagacaatgctttc

SEQ ID NO: 261709 - DNA, 33 bp, Homo sapien
caagtctcgggcataccaagtcctagattctca

SEQ ID NO: 261710 - DNA, 33 bp, Homo sapien
caagtctcgggcatacgaagtcctagattctca

SEQ ID NO: 261711 - DNA, 33 bp, Homo sapien
gacccatgatggaacacgaggcaaaaggaaaaa

SEQ ID NO: 261712 - DNA, 33 bp, Homo sapien
gacccatgatggaacatgaggcaaaaggaaaaa

SEQ ID NO: 261713 - DNA, 33 bp, Homo sapien
cttaactggcttgaaaatggctcagaagagtag

SEQ ID NO: 261714 - DNA, 33 bp, Homo sapien
cttaactggcttgaaagtggctcagaagagtag

SEQ ID NO: 261715 - DNA, 33 bp, Homo sapien
tcactcactcaccaagccttcctgctaaatgag

SEQ ID NO: 261716 - DNA, 33 bp, Homo sapien
tcactcactcaccaaggcttcctgctaaatgag

SEQ ID NO: 261717 - DNA, 33 bp, Homo sapien
ggctgcttgaaatccactcattatgtcagcatt

SEQ ID NO: 261718 - DNA, 33 bp, Homo sapien
ggctgcttgaaatccagtcattatgtcagcatt

SEQ ID NO: 261719 - DNA, 33 bp, Homo sapien
actggctaggctataaactggcttcacttgagt

SEQ ID NO: 261720 - DNA, 33 bp, Homo sapien
actggctaggctataatctggcttcacttgagt

SEQ ID NO: 261721 - DNA, 33 bp, Homo sapien
ttaactaatttaagcaagggcaaaaggaggctg

SEQ ID NO: 261722 - DNA, 33 bp, Homo sapien
ttaactaatttaagcaggggcaaaaggaggctg

SEQ ID NO: 261723 - DNA, 33 bp, Homo sapien
gctaattgggcacagacgttagtggcacacgtg

SEQ ID NO: 261724 - DNA, 33 bp, Homo sapien
gctaattgggcacagatgttagtggcacacgtg

SEQ ID NO: 261725 - DNA, 33 bp, Homo sapien
aagtcactgaacaaacagacgacaaacagcaac

SEQ ID NO: 261726 - DNA, 33 bp, Homo sapien
aagtcactgaacaaacggacgacaaacagcaac

SEQ ID NO: 261727 - DNA, 33 bp, Homo sapien
aaaccttggggaatgacaaaaatctgattttca

SEQ ID NO: 261728 - DNA, 33 bp, Homo sapien
aaaccttggggaatgagaaaaatctgattttca

SEQ ID NO: 261729 - DNA, 33 bp, Homo sapien
agtataagcagaagaaaagtcaaaagaatagaa

SEQ ID NO: 261730 - DNA, 33 bp, Homo sapien
agtataagcagaagaagagtcaaaagaatagaa

SEQ ID NO: 261731 - DNA, 33 bp, Homo sapien
aggcatgactgactatcaactcaatctccagcg

SEQ ID NO: 261732 - DNA, 33 bp, Homo sapien
aggcatgactgactattaactcaatctccagcg

SEQ ID NO: 261733 - DNA, 33 bp, Homo sapien
agaagtactacaagcacccatgtttcaaccatg

SEQ ID NO: 261734 - DNA, 33 bp, Homo sapien
agaagtactacaagcatccatgtttcaaccatg

SEQ ID NO: 261735 - DNA, 33 bp, Homo sapien
ttaagccctaatgccccatgtcacccactctat

SEQ ID NO: 261736 - DNA, 33 bp, Homo sapien
ttaagccctaatgccctatgtcacccactctat

SEQ ID NO: 261737 - DNA, 33 bp, Homo sapien
ttttgggagtgcaaataaagtttccttgaagta

SEQ ID NO: 261738 - DNA, 33 bp, Homo sapien
ttttgggagtgcaaatgaagtttccttgaagta

SEQ ID NO: 261739 - DNA, 33 bp, Homo sapien
aattgtttggaagacacataagactttaacaaa

SEQ ID NO: 261740 - DNA, 33 bp, Homo sapien
aattgtttggaagacatataagactttaacaaa

SEQ ID NO: 261741 - DNA, 33 bp, Homo sapien
gaactgcttggggcttaaaccacagcaattcaa

SEQ ID NO: 261742 - DNA, 33 bp, Homo sapien
gaactgcttggggcttgaaccacagcaattcaa

SEQ ID NO: 261743 - DNA, 33 bp, Homo sapien
atggtggacatggtgccgatgaaacagacagca

SEQ ID NO: 261744 - DNA, 33 bp, Homo sapien
atggtggacatggtgctgatgaaacagacagca

SEQ ID NO: 261745 - DNA, 33 bp, Homo sapien
agaaatttggtgtgaccgaagaaatggtggaca

SEQ ID NO: 261746 - DNA, 33 bp, Homo sapien
agaaatttggtgtgactgaagaaatggtggaca

SEQ ID NO: 261747 - DNA, 33 bp, Homo sapien
gattacagctacattcaataaacacttttaaaa

SEQ ID NO: 261748 - DNA, 33 bp, Homo sapien
gattacagctacattccataaacacttttaaaa

SEQ ID NO: 261749 - DNA, 33 bp, Homo sapien
ctatttgttcacattcagaaacaaatcttactg

SEQ ID NO: 261750 - DNA, 33 bp, Homo sapien
ctatttgttcacattcggaaacaaatcttactg

SEQ ID NO: 261751 - DNA, 33 bp, Homo sapien
aagtcaagagagaatcaaagtcacagaagtaat

SEQ ID NO: 261752 - DNA, 33 bp, Homo sapien
aagtcaagagagaatcgaagtcacagaagtaat

SEQ ID NO: 261753 - DNA, 33 bp, Homo sapien
actttgatggatttcacatgtaagtgaaatcat

SEQ ID NO: 261754 - DNA, 33 bp, Homo sapien
actttgatggatttcatatgtaagtgaaatcat

SEQ ID NO: 261755 - DNA, 33 bp, Homo sapien
ctaattaatacattcaccacctcacacagctac

SEQ ID NO: 261756 - DNA, 33 bp, Homo sapien
ctaattaatacattcatcacctcacacagctac

SEQ ID NO: 261757 - DNA, 33 bp, Homo sapien
ctcccaggcaacagtgcaaatggaattggaaca

SEQ ID NO: 261758 - DNA, 33 bp, Homo sapien
ctcccaggcaacagtgtaaatggaattggaaca

SEQ ID NO: 261759 - DNA, 33 bp, Homo sapien
aagggttcagatagagacatggtgttatttctg

SEQ ID NO: 261760 - DNA, 33 bp, Homo sapien
aagggttcagatagaggcatggtgttatttctg

SEQ ID NO: 261761 - DNA, 33 bp, Homo sapien
ttcatttaaagcagagcaagctggtgtaggatc

SEQ ID NO: 261762 - DNA, 33 bp, Homo sapien
ttcatttaaagcagaggaagctggtgtaggatc

SEQ ID NO: 261763 - DNA, 33 bp, Homo sapien
gagaactcattccattcaatgccttgattccag

SEQ ID NO: 261764 - DNA, 33 bp, Homo sapien
gagaactcattccatttaatgccttgattccag

SEQ ID NO: 261765 - DNA, 33 bp, Homo sapien
acataacctaatcccacgagtcaaattcatcat

SEQ ID NO: 261766 - DNA, 33 bp, Homo sapien
acataacctaatcccatgagtcaaattcatcat

SEQ ID NO: 261767 - DNA, 33 bp, Homo sapien
tcccctgcacatagtcccccaaatgtctcaact

SEQ ID NO: 261768 - DNA, 33 bp, Homo sapien
tcccctgcacatagtctcccaaatgtctcaact

SEQ ID NO: 261769 - DNA, 33 bp, Homo sapien
ttcataatagtcacgacgtggaaacgaatatca

SEQ ID NO: 261770 - DNA, 33 bp, Homo sapien
ttcataatagtcacgatgtggaaacgaatatca

SEQ ID NO: 261771 - DNA, 33 bp, Homo sapien
atagatgaattttgagaacattatcctaagtga

SEQ ID NO: 261772 - DNA, 33 bp, Homo sapien
atagatgaattttgaggacattatcctaagtga

SEQ ID NO: 261773 - DNA, 33 bp, Homo sapien
agactgcattatatcaatttttctacatgttgc

SEQ ID NO: 261774 - DNA, 33 bp, Homo sapien
agactgcattatatcagtttttctacatgttgc

SEQ ID NO: 261775 - DNA, 33 bp, Homo sapien
ctgaggaagaacaaaactaaatgagccaattta

SEQ ID NO: 261776 - DNA, 33 bp, Homo sapien
ctgaggaagaacaaaattaaatgagccaattta

SEQ ID NO: 261777 - DNA, 33 bp, Homo sapien
attggtaatggacaaactgcagcccacagatgg

SEQ ID NO: 261778 - DNA, 33 bp, Homo sapien
attggtaatggacaaattgcagcccacagatgg

SEQ ID NO: 261779 - DNA, 33 bp, Homo sapien
tgtggctccctgggaacattgcaggtgtccagc

SEQ ID NO: 261780 - DNA, 33 bp, Homo sapien
tgtggctccctgggaatattgcaggtgtccagc

SEQ ID NO: 261781 - DNA, 33 bp, Homo sapien
caagacatattctaaacgagcgagccctacgac

SEQ ID NO: 261782 - DNA, 33 bp, Homo sapien
caagacatattctaaatgagcgagccctacgac

SEQ ID NO: 261783 - DNA, 33 bp, Homo sapien
cagatcaggagttcacagtacgatggattaaga

SEQ ID NO: 261784 - DNA, 33 bp, Homo sapien
cagatcaggagttcacggtacgatggattaaga

SEQ ID NO: 261785 - DNA, 33 bp, Homo sapien
caacagccagtcaatacgttattttcaaagaca

SEQ ID NO: 261786 - DNA, 33 bp, Homo sapien
caacagccagtcaatatgttattttcaaagaca

SEQ ID NO: 261787 - DNA, 33 bp, Homo sapien
tgtgttaggaacattcaaaatccaatcttctag

SEQ ID NO: 261788 - DNA, 33 bp, Homo sapien
tgtgttaggaacattcgaaatccaatcttctag

SEQ ID NO: 261789 - DNA, 33 bp, Homo sapien
gttggttaatggatacaaaagtacatccagata

SEQ ID NO: 261790 - DNA, 33 bp, Homo sapien
gttggttaatggatacgaaagtacatccagata

SEQ ID NO: 261791 - DNA, 33 bp, Homo sapien
acaactcaacagtaaaaatcaaaataattcaat

SEQ ID NO: 261792 - DNA, 33 bp, Homo sapien
acaactcaacagtaaacatcaaaataattcaat

SEQ ID NO: 261793 - DNA, 33 bp, Homo sapien
taaatagcagaagttaagtctataggttttaaa

SEQ ID NO: 261794 - DNA, 33 bp, Homo sapien
taaatagcagaagttaggtctataggttttaaa

SEQ ID NO: 261795 - DNA, 33 bp, Homo sapien
gtcaacaggtacagccccactattagtgtaaaa

SEQ ID NO: 261796 - DNA, 33 bp, Homo sapien
gtcaacaggtacagcctcactattagtgtaaaa

SEQ ID NO: 261797 - DNA, 33 bp, Homo sapien
cagcttgaagagggtacgcaattaatatatgtt

SEQ ID NO: 261798 - DNA, 33 bp, Homo sapien
cagcttgaagagggtatgcaattaatatatgtt

SEQ ID NO: 261799 - DNA, 33 bp, Homo sapien
cagagcttatcatccacaggctttatcttagtc

SEQ ID NO: 261800 - DNA, 33 bp, Homo sapien
cagagcttatcatccataggctttatcttagtc

SEQ ID NO: 261801 - DNA, 33 bp, Homo sapien
gggtcctaggcaagagaataacaggcccaggct

SEQ ID NO: 261802 - DNA, 33 bp, Homo sapien
gggtcctaggcaagaggataacaggcccaggct

SEQ ID NO: 261803 - DNA, 33 bp, Homo sapien
agattatctttctgaaataagacaggcagacaa

SEQ ID NO: 261804 - DNA, 33 bp, Homo sapien
agattatctttctgaattaagacaggcagacaa

SEQ ID NO: 261805 - DNA, 33 bp, Homo sapien
ttccagtatggttctaaccatggcaaattccat

SEQ ID NO: 261806 - DNA, 33 bp, Homo sapien
ttccagtatggttctacccatggcaaattccat

SEQ ID NO: 261807 - DNA, 33 bp, Homo sapien; identical to SEQ ID NO: 261805

SEQ ID NO: 261808 - DNA, 33 bp, Homo sapien; identical to SEQ ID NO: 261806

SEQ ID NO: 261809 - DNA, 33 bp, Homo sapien
acacagctaaggacacagtaaagctgaatgtct

SEQ ID NO: 261810 - DNA, 33 bp, Homo sapien
acacagctaaggacacggtaaagctgaatgtct

SEQ ID NO: 261811 - DNA, 33 bp, Homo sapien
aattgttcaattactaactaatcaaaggtagtc

SEQ ID NO: 261812 - DNA, 33 bp, Homo sapien
aattgttcaattactatctaatcaaaggtagtc

SEQ ID NO: 261813 - DNA, 33 bp, Homo sapien
gccacgttaaaattccacactcagccaagcaac

SEQ ID NO: 261814 - DNA, 33 bp, Homo sapien
gccacgttaaaattccgcactcagccaagcaac

SEQ ID NO: 261815 - DNA, 33 bp, Homo sapien
ttttgttgttgtttaaaaccttgcagaatgacc

SEQ ID NO: 261816 - DNA, 33 bp, Homo sapien
ttttgttgttgtttaacaccttgcagaatgacc

SEQ ID NO: 261817 - DNA, 33 bp, Homo sapien
ggatctggcatggtcccaacacaaagaaatgat

SEQ ID NO: 261818 - DNA, 33 bp, Homo sapien
ggatctggcatggtcctaacacaaagaaatgat

SEQ ID NO: 261819 - DNA, 33 bp, Homo sapien
tcacagagacaacagaaactaccatggtcagaa

SEQ ID NO: 261820 - DNA, 33 bp, Homo sapien
tcacagagacaacagacactaccatggtcagaa

SEQ ID NO: 261821 - DNA, 33 bp, Homo sapien
gctggctaattgaacactattcttacagcatgg

SEQ ID NO: 261822 - DNA, 33 bp, Homo sapien
gctggctaattgaacattattcttacagcatgg

SEQ ID NO: 261823 - DNA, 33 bp, Homo sapien
ggattgcagacgcagacggagcaaagcaagaag

SEQ ID NO: 261824 - DNA, 33 bp, Homo sapien
ggattgcagacgcagatggagcaaagcaagaag

SEQ ID NO: 261825 - DNA, 33 bp, Homo sapien
caaatggagctggttaacttcttctcaaaccta

SEQ ID NO: 261826 - DNA, 33 bp, Homo sapien
caaatggagctggttagcttcttctcaaaccta

SEQ ID NO: 261827 - DNA, 33 bp, Homo sapien
acaaagaaagatgctcagaaagatcaagatacg

SEQ ID NO: 261828 - DNA, 33 bp, Homo sapien
acaaagaaagatgctccgaaagatcaagatacg

SEQ ID NO: 261829 - DNA, 33 bp, Homo sapien
atttcattaatttgcccaaagtcacaggtgata

SEQ ID NO: 261830 - DNA, 33 bp, Homo sapien
atttcattaatttgcctaaagtcacaggtgata

SEQ ID NO: 261831 - DNA, 33 bp, Homo sapien
gggattctttagttgacggttgggatagttaag

SEQ ID NO: 261832 - DNA, 33 bp, Homo sapien
gggattctttagttgatggttgggatagttaag

SEQ ID NO: 261833 - DNA, 33 bp, Homo sapien
gcacagtaaatgcaataatcagcagagtgaaca

SEQ ID NO: 261834 - DNA, 33 bp, Homo sapien
gcacagtaaatgcaatgatcagcagagtgaaca

SEQ ID NO: 261835 - DNA, 33 bp, Homo sapien
gtttctctagtttctcaaggtatgaccttagat

SEQ ID NO: 261836 - DNA, 33 bp, Homo sapien
gtttctctagtttctcgaggtatgaccttagat

SEQ ID NO: 261837 - DNA, 33 bp, Homo sapien
caaaatacactggaaactgtcaccaatagaatc

SEQ ID NO: 261838 - DNA, 33 bp, Homo sapien
caaaatacactggaaattgtcaccaatagaatc

SEQ ID NO: 261839 - DNA, 33 bp, Homo sapien
acaaggtaggataccacagaggattgagctcca

SEQ ID NO: 261840 - DNA, 33 bp, Homo sapien
acaaggtaggataccagagaggattgagctcca

SEQ ID NO: 261841 - DNA, 33 bp, Homo sapien
aaactccactctgatcaaaactcaaacccaaaa

SEQ ID NO: 261842 - DNA, 33 bp, Homo sapien
aaactccactctgatcgaaactcaaacccaaaa

SEQ ID NO: 261843 - DNA, 33 bp, Homo sapien
aatcttcattccaaaagacgaaattatgtaaaa

SEQ ID NO: 261844 - DNA, 33 bp, Homo sapien
aatcttcattccaaaatacgaaattatgtaaaa

SEQ ID NO: 261845 - DNA, 33 bp, Homo sapien
cagggctgtctactcaacttgtcatttaatacc

SEQ ID NO: 261846 - DNA, 33 bp, Homo sapien
cagggctgtctactcatcttgtcatttaatacc

SEQ ID NO: 261847 - DNA, 33 bp, Homo sapien
acgacgaatcaccttccctaattacaaaaatgc

SEQ ID NO: 261848 - DNA, 33 bp, Homo sapien
acgacgaatcaccttctctaattacaaaaatgc

SEQ ID NO: 261849 - DNA, 33 bp, Homo sapien
caaggattttactctcaagtgggagaaggtgaa

SEQ ID NO: 261850 - DNA, 33 bp, Homo sapien
caaggattttactctcgagtgggagaaggtgaa

SEQ ID NO: 261851 - DNA, 33 bp, Homo sapien
acggactaatagaacaacccacagagtcagagg

SEQ ID NO: 261852 - DNA, 33 bp, Homo sapien
acggactaatagaacaccccacagagtcagagg

SEQ ID NO: 261853 - DNA, 33 bp, Homo sapien
ggtatttaaatgataacgcttgatatggtttgg

SEQ ID NO: 261854 - DNA, 33 bp, Homo sapien
ggtatttaaatgataatgcttgatatggtttgg

SEQ ID NO: 261855 - DNA, 33 bp, Homo sapien
agtaataccaacaggaccatcttgatgtttgta

SEQ ID NO: 261856 - DNA, 33 bp, Homo sapien
agtaataccaacaggatcatcttgatgtttgta

SEQ ID NO: 261857 - DNA, 33 bp, Homo sapien
tttgtcagtcttactacaggtttatcagtttca

SEQ ID NO: 261858 - DNA, 33 bp, Homo sapien
tttgtcagtcttactataggtttatcagtttca

SEQ ID NO: 261859 - DNA, 33 bp, Homo sapien
tctgtataccaacagcccattctttgttaatct

SEQ ID NO: 261860 - DNA, 33 bp, Homo sapien
tctgtataccaacagctcattctttgttaatct

SEQ ID NO: 261861 - DNA, 33 bp, Homo sapien
gtcaaaaaacactcacaccaccagtttcttcta

SEQ ID NO: 261862 - DNA, 33 bp, Homo sapien
gtcaaaaaacactcacgccaccagtttcttcta

SEQ ID NO: 261863 - DNA, 33 bp, Homo sapien
attccaacatcaaagcccacgttcatcatgacg

SEQ ID NO: 261864 - DNA, 33 bp, Homo sapien
attccaacatcaaagctcacgttcatcatgacg

SEQ ID NO: 261865 - DNA, 33 bp, Homo sapien
gggtgacgtgagataacagacatgaaagttgga

SEQ ID NO: 261866 - DNA, 33 bp, Homo sapien
gggtgacgtgagataatagacatgaaagttgga

SEQ ID NO: 261867 - DNA, 33 bp, Homo sapien
agtgctgtgtcttacacgaaggcagaatctttt

SEQ ID NO: 261868 - DNA, 33 bp, Homo sapien
agtgctgtgtcttacatgaaggcagaatctttt

SEQ ID NO: 261869 - DNA, 33 bp, Homo sapien
gaggagagaggaggcaatgatacagcaacacga

SEQ ID NO: 261870 - DNA, 33 bp, Homo sapien
gaggagagaggaggcagtgatacagcaacacga

SEQ ID NO: 261871 - DNA, 33 bp, Homo sapien
caagtttaaatgatagaaaaattgagtgtgtgt

SEQ ID NO: 261872 - DNA, 33 bp, Homo sapien
caagtttaaatgataggaaaattgagtgtgtgt

SEQ ID NO: 261873 - DNA, 33 bp, Homo sapien
cactttttactcaaatcagaagacattttccca

SEQ ID NO: 261874 - DNA, 33 bp, Homo sapien
cactttttactcaaattagaagacattttccca

SEQ ID NO: 261875 - DNA, 33 bp, Homo sapien
caaatctgctggaaaaggagatgcggcacctgg

SEQ ID NO: 261876 - DNA, 33 bp, Homo sapien
caaatctgctggaaaatgagatgcggcacctgg

SEQ ID NO: 261877 - DNA, 33 bp, Homo sapien
aaactttcgtagtgcaacaaagtaatgatgagt

SEQ ID NO: 261878 - DNA, 33 bp, Homo sapien
aaactttcgtagtgcagcaaagtaatgatgagt

SEQ ID NO: 261879 - DNA, 33 bp, Homo sapien
tgcttggaagagatgacgagaattctgggtgcg

SEQ ID NO: 261880 - DNA, 33 bp, Homo sapien
tgcttggaagagatgatgagaattctgggtgcg

SEQ ID NO: 261881 - DNA, 33 bp, Homo sapien
ttgtgctctggtaaacacatgttcagagtgaag

SEQ ID NO: 261882 - DNA, 33 bp, Homo sapien
ttgtgctctggtaaacccatgttcagagtgaag

SEQ ID NO: 261883 - DNA, 33 bp, Homo sapien
attttcagtttagcaccgtgacaggtaccatga

SEQ ID NO: 261884 - DNA, 33 bp, Homo sapien
attttcagtttagcactgtgacaggtaccatga

SEQ ID NO: 261885 - DNA, 33 bp, Homo sapien
ttgatcgaatgtagcaacttgagtgttttaaac

SEQ ID NO: 261886 - DNA, 33 bp, Homo sapien
ttgatcgaatgtagcaccttgagtgttttaaac

SEQ ID NO: 261887 - DNA, 33 bp, Homo sapien
tttcagctgtttgttaagttgggagccaaaaga

SEQ ID NO: 261888 - DNA, 33 bp, Homo sapien
tttcagctgtttgttaggttgggagccaaaaga

SEQ ID NO: 261889 - DNA, 33 bp, Homo sapien
tgcaggtccattttggaagaggacgctaaagta

SEQ ID NO: 261890 - DNA, 33 bp, Homo sapien
tgcaggtccattttgggagaggacgctaaagta

SEQ ID NO: 261891 - DNA, 33 bp, Homo sapien
ttattaagttgccagaactattttgtctcctta

SEQ ID NO: 261892 - DNA, 33 bp, Homo sapien
ttattaagttgccagagctattttgtctcctta

SEQ ID NO: 261893 - DNA, 33 bp, Homo sapien
tccaccctgtatctgcactattctttgtatttt

SEQ ID NO: 261894 - DNA, 33 bp, Homo sapien
tccaccctgtatctgcgctattctttgtatttt

SEQ ID NO: 261895 - DNA, 33 bp, Homo sapien
tctaaatgtatcaacccagaaacatttcaaaga

SEQ ID NO: 261896 - DNA, 33 bp, Homo sapien
tctaaatgtatcaacctagaaacatttcaaaga

SEQ ID NO: 261897 - DNA, 33 bp, Homo sapien
aaaaccaatagtgtggaaatgactttataacta

SEQ ID NO: 261898 - DNA, 33 bp, Homo sapien
aaaaccaatagtgtgggaatgactttataacta

SEQ ID NO: 261899 - DNA, 33 bp, Homo sapien
cggttgaacctggaaacagggatatgaagacct

SEQ ID NO: 261900 - DNA, 33 bp, Homo sapien
cggttgaacctggaaatagggatatgaagacct

SEQ ID NO: 261901 - DNA, 33 bp, Homo sapien
gcttagtatacccccacgctcatagcagcatta

SEQ ID NO: 261902 - DNA, 33 bp, Homo sapien
gcttagtatacccccaggctcatagcagcatta

SEQ ID NO: 261903 - DNA, 33 bp, Homo sapien
gaaatgaaatttcatacaggcttgtcagaaaca

SEQ ID NO: 261904 - DNA, 33 bp, Homo sapien
gaaatgaaatttcatataggcttgtcagaaaca

SEQ ID NO: 261905 - DNA, 33 bp, Homo sapien
ccttttatttcatttgcaactggataacaccct

SEQ ID NO: 261906 - DNA, 33 bp, Homo sapien
ccttttatttcatttgtaactggataacaccct

SEQ ID NO: 261907 - DNA, 33 bp, Homo sapien
attcctactctaatgccacacccactgtgcagg

SEQ ID NO: 261908 - DNA, 33 bp, Homo sapien
attcctactctaatgctacacccactgtgcagg

SEQ ID NO: 261909 - DNA, 33 bp, Homo sapien
ggttggattaaaaatacgagagttcatgttgaa

SEQ ID NO: 261910 - DNA, 33 bp, Homo sapien
ggttggattaaaaatatgagagttcatgttgaa

SEQ ID NO: 261911 - DNA, 33 bp, Homo sapien
gtcaaggacaggaccaggtatttgccatattct

SEQ ID NO: 261912 - DNA, 33 bp, Homo sapien
gtcaaggacaggaccatgtatttgccatattct

SEQ ID NO: 261913 - DNA, 33 bp, Homo sapien
taatgccgatgaagcactctgtaaaggtgactc

SEQ ID NO: 261914 - DNA, 33 bp, Homo sapien
taatgccgatgaagcagtctgtaaaggtgactc

SEQ ID NO: 261915 - DNA, 33 bp, Homo sapien
tacccatccattgtccaaacttctgaggtgaat

SEQ ID NO: 261916 - DNA, 33 bp, Homo sapien
tacccatccattgtcccaacttctgaggtgaat

SEQ ID NO: 261917 - DNA, 33 bp, Homo sapien
ctacggctcagttttacagcagttgcagcagtt

SEQ ID NO: 261918 - DNA, 33 bp, Homo sapien
ctacggctcagttttatagcagttgcagcagtt

SEQ ID NO: 261919 - DNA, 33 bp, Homo sapien
aggaaaaaagtagtcaatagaaatgggtattga

SEQ ID NO: 261920 - DNA, 33 bp, Homo sapien
aggaaaaaagtagtcagtagaaatgggtattga

SEQ ID NO: 261921 - DNA, 33 bp, Homo sapien
tgcccagggctgccacactgactctcctacatg

SEQ ID NO: 261922 - DNA, 33 bp, Homo sapien
tgcccagggctgccactctgactctcctacatg

SEQ ID NO: 261923 - DNA, 33 bp, Homo sapien
cgcgattacctggtgtgaaatgcgttaccgggg

SEQ ID NO: 261924 - DNA, 33 bp, Homo sapien
cgcgattacctggtgttaaatgcgttaccgggg

SEQ ID NO: 261925 - DNA, 33 bp, Homo sapien
actgttctaacttagtaacaaagacagagtgga

SEQ ID NO: 261926 - DNA, 33 bp, Homo sapien
actgttctaacttagtcacaaagacagagtgga

SEQ ID NO: 261927 - DNA, 33 bp, Homo sapien
cattacatactgatgaaagacaataccacagtt

SEQ ID NO: 261928 - DNA, 33 bp, Homo sapien
cattacatactgatgatagacaataccacagtt

SEQ ID NO: 261929 - DNA, 33 bp, Homo sapien
ttttccacacgaaaataacttacataagctacc

SEQ ID NO: 261930 - DNA, 33 bp, Homo sapien
ttttccacacgaaaatgacttacataagctacc

SEQ ID NO: 261931 - DNA, 33 bp, Homo sapien
tttaacttcaaatgtacgacttgcaggagtaat

SEQ ID NO: 261932 - DNA, 33 bp, Homo sapien
tttaacttcaaatgtatgacttgcaggagtaat

SEQ ID NO: 261933 - DNA, 33 bp, Homo sapien
cttttccaaatgtaaacgtcagctataacaact

SEQ ID NO: 261934 - DNA, 33 bp, Homo sapien
cttttccaaatgtaaatgtcagctataacaact

SEQ ID NO: 261935 - DNA, 33 bp, Homo sapien
gacggccatacagcgacatcacaaaaatcccat

SEQ ID NO: 261936 - DNA, 33 bp, Homo sapien
gacggccatacagcgatatcacaaaaatcccat

SEQ ID NO: 261937 - DNA, 33 bp, Homo sapien
tacgcacacactcatacactcatacaatccctc

SEQ ID NO: 261938 - DNA, 33 bp, Homo sapien
tacgcacacactcatatactcatacaatccctc

SEQ ID NO: 261939 - DNA, 33 bp, Homo sapien
gcagcttccggagcaaagagagcttgctgcccc

SEQ ID NO: 261940 - DNA, 33 bp, Homo sapien
gcagcttccggagcaaggagagcttgctgcccc

SEQ ID NO: 261941 - DNA, 33 bp, Homo sapien
aactgagcatctgttacgtgcctagcaccagct

SEQ ID NO: 261942 - DNA, 33 bp, Homo sapien
aactgagcatctgttatgtgcctagcaccagct

SEQ ID NO: 261943 - DNA, 33 bp, Homo sapien
cctgtcacctcatctgaaaccaccaagtggtga

SEQ ID NO: 261944 - DNA, 33 bp, Homo sapien
cctgtcacctcatctgtaaccaccaagtggtga

SEQ ID NO: 261945 - DNA, 33 bp, Homo sapien
gagaagccgctatgcacagtcagcagctgcgtg

SEQ ID NO: 261946 - DNA, 33 bp, Homo sapien
gagaagccgctatgcagagtcagcagctgcgtg

SEQ ID NO: 261947 - DNA, 33 bp, Homo sapien
ccagtgcctgccgcgtcaatttggcggtgcagt

SEQ ID NO: 261948 - DNA, 33 bp, Homo sapien
ccagtgcctgccgcgtgaatttggcggtgcagt

SEQ ID NO: 261949 - DNA, 33 bp, Homo sapien
gccaagtctttcagcactctcttcgaaaatcct

SEQ ID NO: 261950 - DNA, 33 bp, Homo sapien
gccaagtctttcagcagtctcttcgaaaatcct

SEQ ID NO: 261951 - DNA, 33 bp, Homo sapien
gagtcatgaaattgatgactgttgatccagtgg

SEQ ID NO: 261952 - DNA, 33 bp, Homo sapien
gagtcatgaaattgattactgttgatccagtgg

SEQ ID NO: 261953 - DNA, 33 bp, Homo sapien
aactggaacatgagacagtatctgcaggactgg

SEQ ID NO: 261954 - DNA, 33 bp, Homo sapien
aactggaacatgagactgtatctgcaggactgg

SEQ ID NO: 261955 - DNA, 33 bp, Homo sapien
gctagctcttacctataaggctggttgaaatgt

SEQ ID NO: 261956 - DNA, 33 bp, Homo sapien
gctagctcttacctatgaggctggttgaaatgt

SEQ ID NO: 261957 - DNA, 33 bp, Homo sapien
cagcccagaggaataccctgagaggatctctct

SEQ ID NO: 261958 - DNA, 33 bp, Homo sapien
cagcccagaggaatacgctgagaggatctctct

SEQ ID NO: 261959 - DNA, 33 bp, Homo sapien
tgagcagcacaagtcaaatgtcggcgaaagact

SEQ ID NO: 261960 - DNA, 33 bp, Homo sapien
tgagcagcacaagtcagatgtcggcgaaagact

SEQ ID NO: 261961 - DNA, 33 bp, Homo sapien
ggtgtttctcaggaaacgtcactaaaattccag

SEQ ID NO: 261962 - DNA, 33 bp, Homo sapien
ggtgtttctcaggaaatgtcactaaaattccag

SEQ ID NO: 261963 - DNA, 33 bp, Homo sapien
tattgattgtaaccaacgtacccaccaaagtaa

SEQ ID NO: 261964 - DNA, 33 bp, Homo sapien
tattgattgtaaccaatgtacccaccaaagtaa

SEQ ID NO: 261965 - DNA, 33 bp, Homo sapien
caccaaagtaagatacacgttcctaatgggaaa

SEQ ID NO: 261966 - DNA, 33 bp, Homo sapien
caccaaagtaagatacgcgttcctaatgggaaa

SEQ ID NO: 261967 - DNA, 33 bp, Homo sapien
cctccctgccaaaaggaatattgagaagtgact

SEQ ID NO: 261968 - DNA, 33 bp, Homo sapien
cctccctgccaaaagggatattgagaagtgact

SEQ ID NO: 261969 - DNA, 33 bp, Homo sapien
gcagtcccgtctcttcaagctgcccatcttctc

SEQ ID NO: 261970 - DNA, 33 bp, Homo sapien
gcagtcccgtctcttcgagctgcccatcttctc

SEQ ID NO: 261971 - DNA, 33 bp, Homo sapien
ctgcctctcaccggctaaagatggccttccccc

SEQ ID NO: 261972 - DNA, 33 bp, Homo sapien
ctgcctctcaccggctcaagatggccttccccc

SEQ ID NO: 261973 - DNA, 33 bp, Homo sapien
ataatcagctcttaatcaatggtttgtcaatat

SEQ ID NO: 261974 - DNA, 33 bp, Homo sapien
ataatcagctcttaattaatggtttgtcaatat

SEQ ID NO: 261975 - DNA, 33 bp, Homo sapien
catatttgctcacggaactgatgaggaatcaga

SEQ ID NO: 261976 - DNA, 33 bp, Homo sapien
catatttgctcacggatctgatgaggaatcaga

SEQ ID NO: 261977 - DNA, 33 bp, Homo sapien
gttctaaaacatttgcaagttctgagaaggaac

SEQ ID NO: 261978 - DNA, 33 bp, Homo sapien
gttctaaaacatttgctagttctgagaaggaac

SEQ ID NO: 261979 - DNA, 33 bp, Homo sapien
tctggtaggaggacgacgacagagacctctagt

SEQ ID NO: 261980 - DNA, 33 bp, Homo sapien
tctggtaggaggacgatgacagagacctctagt

SEQ ID NO: 261981 - DNA, 33 bp, Homo sapien
ggtctctctaactccacgccgtgactgctgagg

SEQ ID NO: 261982 - DNA, 33 bp, Homo sapien
ggtctctctaactccaggccgtgactgctgagg

SEQ ID NO: 261983 - DNA, 33 bp, Homo sapien
ggaggcagttatgaagccactgagaaataaatg

SEQ ID NO: 261984 - DNA, 33 bp, Homo sapien
ggaggcagttatgaaggcactgagaaataaatg

SEQ ID NO: 261985 - DNA, 33 bp, Homo sapien
cacacacggctcaaaaattcaaaagctacccaa

SEQ ID NO: 261986 - DNA, 33 bp, Homo sapien
cacacacggctcaaaatttcaaaagctacccaa

SEQ ID NO: 261987 - DNA, 33 bp, Homo sapien
aggagggctgcttgccactcggctaattatccc

SEQ ID NO: 261988 - DNA, 33 bp, Homo sapien
aggagggctgcttgccgctcggctaattatccc

SEQ ID NO: 261989 - DNA, 33 bp, Homo sapien
aggtgcttgctactccaagtgaccctgagagct

SEQ ID NO: 261990 - DNA, 33 bp, Homo sapien
aggtgcttgctactcccagtgaccctgagagct

SEQ ID NO: 261991 - DNA, 33 bp, Homo sapien
aatccatatgaccttacctacctacacgctctt

SEQ ID NO: 261992 - DNA, 33 bp, Homo sapien
aatccatatgaccttagctacctacacgctctt

SEQ ID NO: 261993 - DNA, 33 bp, Homo sapien
gactgtggcctagatcacagggttgtattaatg

SEQ ID NO: 261994 - DNA, 33 bp, Homo sapien
gactgtggcctagatcgcagggttgtattaatg

SEQ ID NO: 261995 - DNA, 33 bp, Homo sapien
ctgacactgtggaaaaactgcgggccaggaaga

SEQ ID NO: 261996 - DNA, 33 bp, Homo sapien
ctgacactgtggaaaagctgcgggccaggaaga

SEQ ID NO: 261997 - DNA, 33 bp, Homo sapien
tccagctactggggaacctaaagtgaggcgatc

SEQ ID NO: 261998 - DNA, 33 bp, Homo sapien
tccagctactggggaagctaaagtgaggcgatc

SEQ ID NO: 261999 - DNA, 33 bp, Homo sapien
aagtgacttctcagcaaaaaggattcagtatga

SEQ ID NO: 262000 - DNA, 33 bp, Homo sapien
aagtgacttctcagcagaaaggattcagtatga

SEQ ID NO: 262001 - DNA, 33 bp, Homo sapien
agtatgtcaaccttaaacttagatgttgctctc

SEQ ID NO: 262002 - DNA, 33 bp, Homo sapien
agtatgtcaaccttaaccttagatgttgctctc

SEQ ID NO: 262003 - DNA, 33 bp, Homo sapien
tatgtaaagtacctgacatagttctatgtatag

SEQ ID NO: 262004 - DNA, 33 bp, Homo sapien
tatgtaaagtacctgatatagttctatgtatag

SEQ ID NO: 262005 - DNA, 33 bp, Homo sapien
aatctccagctaaacaagggaaacctgaagaca

SEQ ID NO: 262006 - DNA, 33 bp, Homo sapien
aatctccagctaaacaggggaaacctgaagaca

SEQ ID NO: 262007 - DNA, 33 bp, Homo sapien
tcttgctgcattaagacagaaaaaggcataaga

SEQ ID NO: 262008 - DNA, 33 bp, Homo sapien
tcttgctgcattaagagagaaaaaggcataaga

SEQ ID NO: 262009 - DNA, 33 bp, Homo sapien
agcttctgaagtgttcaagtgagctgaaatctc

SEQ ID NO: 262010 - DNA, 33 bp, Homo sapien
agcttctgaagtgttcgagtgagctgaaatctc

SEQ ID NO: 262011 - DNA, 33 bp, Homo sapien
gtgtcaaatgcaaacgaaagagacctaattcca

SEQ ID NO: 262012 - DNA, 33 bp, Homo sapien
gtgtcaaatgcaaacggaagagacctaattcca

SEQ ID NO: 262013 - DNA, 33 bp, Homo sapien
cagtgacctgctgaaaatcactctgtctctact

SEQ ID NO: 262014 - DNA, 33 bp, Homo sapien
cagtgacctgctgaaagtcactctgtctctact

SEQ ID NO: 262015 - DNA, 33 bp, Homo sapien
tttgctacatgaacaactaagatctgctttaat

SEQ ID NO: 262016 - DNA, 33 bp, Homo sapien
tttgctacatgaacaattaagatctgctttaat

SEQ ID NO: 262017 - DNA, 33 bp, Homo sapien
tggctaaaggtagtcaaatggttgttactgtac

SEQ ID NO: 262018 - DNA, 33 bp, Homo sapien
tggctaaaggtagtcagatggttgttactgtac

SEQ ID NO: 262019 - DNA, 33 bp, Homo sapien
tgcatatgagtctctgaaaacaatactctgaaa

SEQ ID NO: 262020 - DNA, 33 bp, Homo sapien
tgcatatgagtctctgtaaacaatactctgaaa

SEQ ID NO: 262021 - DNA, 33 bp, Homo sapien
agcaaatcagcagttacattgactattacatca

SEQ ID NO: 262022 - DNA, 33 bp, Homo sapien
agcaaatcagcagttatattgactattacatca

SEQ ID NO: 262023 - DNA, 33 bp, Homo sapien
tgttccttttaattgacaatgtgtctcatgaat

SEQ ID NO: 262024 - DNA, 33 bp, Homo sapien
tgttccttttaattgagaatgtgtctcatgaat

SEQ ID NO: 262025 - DNA, 33 bp, Homo sapien
accagagacttaggtccgaagcaaagagctgtg

SEQ ID NO: 262026 - DNA, 33 bp, Homo sapien
accagagacttaggtctgaagcaaagagctgtg

SEQ ID NO: 262027 - DNA, 33 bp, Homo sapien
aaaggtatggatgggggatgaatagagttaaat

SEQ ID NO: 262028 - DNA, 33 bp, Homo sapien
aaaggtatggatggggtatgaatagagttaaat

SEQ ID NO: 262029 - DNA, 33 bp, Homo sapien
ttaagtcatacaaaaaattttcttctattaaat

SEQ ID NO: 262030 - DNA, 33 bp, Homo sapien
ttaagtcatacaaaaatttttcttctattaaat

SEQ ID NO: 262031 - DNA, 33 bp, Homo sapien
gagaacagaagaaatgcagtttgtgcttttact

SEQ ID NO: 262032 - DNA, 33 bp, Homo sapien
gagaacagaagaaatgtagtttgtgcttttact

SEQ ID NO: 262033 - DNA, 33 bp, Homo sapien
aagggatccaagataaagagagcaatgttgagg

SEQ ID NO: 262034 - DNA, 33 bp, Homo sapien
aagggatccaagataatgagagcaatgttgagg

SEQ ID NO: 262035 - DNA, 33 bp, Homo sapien
ggcatattccgatccacaggaagaagaagggag

SEQ ID NO: 262036 - DNA, 33 bp, Homo sapien
ggcatattccgatccataggaagaagaagggag

SEQ ID NO: 262037 - DNA, 33 bp, Homo sapien
catgtctcatgcctcccaaaagtatataaaacc

SEQ ID NO: 262038 - DNA, 33 bp, Homo sapien
catgtctcatgcctcctaaaagtatataaaacc

SEQ ID NO: 262039 - DNA, 33 bp, Homo sapien; identical to SEQ ID NO: 262037

SEQ ID NO: 262040 - DNA, 33 bp, Homo sapien; identical to SEQ ID NO: 262038

SEQ ID NO: 262041 - DNA, 33 bp, Homo sapien
tccctattcatgagtcacttaatagccatctcg

SEQ ID NO: 262042 - DNA, 33 bp, Homo sapien
tccctattcatgagtctcttaatagccatctcg

SEQ ID NO: 262043 - DNA, 33 bp, Homo sapien
ctctttaggtcaggaccataggaccacagctct

SEQ ID NO: 262044 - DNA, 33 bp, Homo sapien
ctctttaggtcaggacgataggaccacagctct

SEQ ID NO: 262045 - DNA, 33 bp, Homo sapien
tttgaatttcaggcaaaccagtaacactttgct

SEQ ID NO: 262046 - DNA, 33 bp, Homo sapien
tttgaatttcaggcaagccagtaacactttgct

SEQ ID NO: 262047 - DNA, 33 bp, Homo sapien
gcagcctccaagatgacgaacacctcctggaac

SEQ ID NO: 262048 - DNA, 33 bp, Homo sapien
gcagcctccaagatgatgaacacctcctggaac

SEQ ID NO: 262049 - DNA, 33 bp, Homo sapien
tttgaaaaacgttaaagagccttgctgatgatg

SEQ ID NO: 262050 - DNA, 33 bp, Homo sapien
tttgaaaaacgttaaatagccttgctgatgatg

SEQ ID NO: 262051 - DNA, 33 bp, Homo sapien
ggtctccactccttcgccatcgctgtttcctgg

SEQ ID NO: 262052 - DNA, 33 bp, Homo sapien
ggtctccactccttcggcatcgctgtttcctgg

SEQ ID NO: 262053 - DNA, 33 bp, Homo sapien
ggatagagctaggtacagacaaggcccaagcag

SEQ ID NO: 262054 - DNA, 33 bp, Homo sapien
ggatagagctaggtacggacaaggcccaagcag

SEQ ID NO: 262055 - DNA, 33 bp, Homo sapien
tttgttttctgtatccactttctttcacagttt

SEQ ID NO: 262056 - DNA, 33 bp, Homo sapien
tttgttttctgtatccgctttctttcacagttt

SEQ ID NO: 262057 - DNA, 33 bp, Homo sapien
ggattggcagagccagaccaaaacctttctata

SEQ ID NO: 262058 - DNA, 33 bp, Homo sapien
ggattggcagagccaggccaaaacctttctata

SEQ ID NO: 262059 - DNA, 33 bp, Homo sapien
agatcaaattctgctacatgtttgctttttaaa

SEQ ID NO: 262060 - DNA, 33 bp, Homo sapien
agatcaaattctgctatatgtttgctttttaaa

SEQ ID NO: 262061 - DNA, 33 bp, Homo sapien
cagatgaggcgaacagaaagatgctccaagttt

SEQ ID NO: 262062 - DNA, 33 bp, Homo sapien
cagatgaggcgaacaggaagatgctccaagttt

SEQ ID NO: 262063 - DNA, 33 bp, Homo sapien
agacgacttgtcatagaacatgcagctggcagg

SEQ ID NO: 262064 - DNA, 33 bp, Homo sapien
agacgacttgtcataggacatgcagctggcagg

SEQ ID NO: 262065 - DNA, 33 bp, Homo sapien
ggttaatagaagaagggcaagaggccacaccga

SEQ ID NO: 262066 - DNA, 33 bp, Homo sapien
ggttaatagaagaaggtcaagaggccacaccga

SEQ ID NO: 262067 - DNA, 33 bp, Homo sapien
ttgttattcagcattacaggagagacctaagta

SEQ ID NO: 262068 - DNA, 33 bp, Homo sapien
ttgttattcagcattataggagagacctaagta

SEQ ID NO: 262069 - DNA, 33 bp, Homo sapien
ctggggtgaattaagacggtgctttcttggaaa

SEQ ID NO: 262070 - DNA, 33 bp, Homo sapien
ctggggtgaattaagatggtgctttcttggaaa

SEQ ID NO: 262071 - DNA, 33 bp, Homo sapien
gatgttcatctgccaaagggagtttaactggct

SEQ ID NO: 262072 - DNA, 33 bp, Homo sapien
gatgttcatctgccaaggggagtttaactggct

SEQ ID NO: 262073 - DNA, 33 bp, Homo sapien
ctgaatggctggaatacatagctgcctctggga

SEQ ID NO: 262074 - DNA, 33 bp, Homo sapien
ctgaatggctggaatatatagctgcctctggga

SEQ ID NO: 262075 - DNA, 33 bp, Homo sapien
tgtctaccacgtaccaagtactgcgtaggctcc

SEQ ID NO: 262076 - DNA, 33 bp, Homo sapien
tgtctaccacgtaccaggtactgcgtaggctcc

SEQ ID NO: 262077 - DNA, 33 bp, Homo sapien
gaactctgaggactgaagaacagcatcagtcaa

SEQ ID NO: 262078 - DNA, 33 bp, Homo sapien
gaactctgaggactgacgaacagcatcagtcaa

SEQ ID NO: 262079 - DNA, 33 bp, Homo sapien
ggtgagtgatgcccacagaaaaccatgtggtaa

SEQ ID NO: 262080 - DNA, 33 bp, Homo sapien
ggtgagtgatgcccacggaaaaccatgtggtaa

SEQ ID NO: 262081 - DNA, 33 bp, Homo sapien
agacattaacatttaaaacaagcgaatcatgct

SEQ ID NO: 262082 - DNA, 33 bp, Homo sapien
agacattaacatttaacacaagcgaatcatgct

SEQ ID NO: 262083 - DNA, 33 bp, Homo sapien
atttttctcttgagtacgaataatgttgattct

SEQ ID NO: 262084 - DNA, 33 bp, Homo sapien
atttttctcttgagtatgaataatgttgattct

SEQ ID NO: 262085 - DNA, 33 bp, Homo sapien
cctgtatgatctgacacgaacagatagccacaa

SEQ ID NO: 262086 - DNA, 33 bp, Homo sapien
cctgtatgatctgacatgaacagatagccacaa

SEQ ID NO: 262087 - DNA, 33 bp, Homo sapien
ttagctgtctagaacaacctgacagaattttaa

SEQ ID NO: 262088 - DNA, 33 bp, Homo sapien
ttagctgtctagaacaccctgacagaattttaa

SEQ ID NO: 262089 - DNA, 33 bp, Homo sapien
tgggatgaaagcatgggcatctccacttagaaa

SEQ ID NO: 262090 - DNA, 33 bp, Homo sapien
tgggatgaaagcatggtcatctccacttagaaa

SEQ ID NO: 262091 - DNA, 33 bp, Homo sapien
tccaattacataaaaccgtgctatagagaaaaa

SEQ ID NO: 262092 - DNA, 33 bp, Homo sapien
tccaattacataaaactgtgctatagagaaaaa

SEQ ID NO: 262093 - DNA, 33 bp, Homo sapien
caaattcatattcttaacaattcctttttggta

SEQ ID NO: 262094 - DNA, 33 bp, Homo sapien
caaattcatattcttaccaattcctttttggta

SEQ ID NO: 262095 - DNA, 33 bp, Homo sapien
ttctttcttcagagaaacttttcctgacatcta

SEQ ID NO: 262096 - DNA, 33 bp, Homo sapien
ttctttcttcagagaagcttttcctgacatcta

SEQ ID NO: 262097 - DNA, 33 bp, Homo sapien
ggatggctccaagagacgtctgacttaagcaac

SEQ ID NO: 262098 - DNA, 33 bp, Homo sapien
ggatggctccaagagatgtctgacttaagcaac

SEQ ID NO: 262099 - DNA, 33 bp, Homo sapien
aaactccaggatggacaacgggaagaagctggt

SEQ ID NO: 262100 - DNA, 33 bp, Homo sapien
aaactccaggatggacgacgggaagaagctggt

SEQ ID NO: 262101 - DNA, 33 bp, Homo sapien
cacatccccaacatccaagtcgtacacattcta

SEQ ID NO: 262102 - DNA, 33 bp, Homo sapien
cacatccccaacatccgagtcgtacacattcta

SEQ ID NO: 262103 - DNA, 33 bp, Homo sapien
ttgtgaacgaatgaacgaagtaagattttccaa

SEQ ID NO: 262104 - DNA, 33 bp, Homo sapien
ttgtgaacgaatgaactaagtaagattttccaa

SEQ ID NO: 262105 - DNA, 33 bp, Homo sapien
attgagcaactactacaagctgaaccctgatga

SEQ ID NO: 262106 - DNA, 33 bp, Homo sapien
attgagcaactactacgagctgaaccctgatga

SEQ ID NO: 262107 - DNA, 33 bp, Homo sapien
tgattcttatgaggtcaaggatgaaattaaaat

SEQ ID NO: 262108 - DNA, 33 bp, Homo sapien
tgattcttatgaggtccaggatgaaattaaaat

SEQ ID NO: 262109 - DNA, 33 bp, Homo sapien
tttatttatagcaccacgagcgtgtttattttc

SEQ ID NO: 262110 - DNA, 33 bp, Homo sapien
tttatttatagcaccatgagcgtgtttattttc

SEQ ID NO: 262111 - DNA, 33 bp, Homo sapien
gtcaatatttaattacacatgagttcaaaataa

SEQ ID NO: 262112 - DNA, 33 bp, Homo sapien
gtcaatatttaattacgcatgagttcaaaataa

SEQ ID NO: 262113 - DNA, 33 bp, Homo sapien
ttacatatacataatacggcttggaagtaaaat

SEQ ID NO: 262114 - DNA, 33 bp, Homo sapien
ttacatatacataatatggcttggaagtaaaat

SEQ ID NO: 262115 - DNA, 33 bp, Homo sapien
gaatgaaccttgagctcagagtccctggacaca

SEQ ID NO: 262116 - DNA, 33 bp, Homo sapien
gaatgaaccttgagcttagagtccctggacaca

SEQ ID NO: 262117 - DNA, 33 bp, Homo sapien
agcccttacctagtaagctcaccaaatcagaat

SEQ ID NO: 262118 - DNA, 33 bp, Homo sapien
agcccttacctagtaatctcaccaaatcagaat

SEQ ID NO: 262119 - DNA, 33 bp, Homo sapien
ccttgctatataattacggttgttgttctaagc

SEQ ID NO: 262120 - DNA, 33 bp, Homo sapien
ccttgctatataattatggttgttgttctaagc

SEQ ID NO: 262121 - DNA, 33 bp, Homo sapien
ttggtttacaattacaagtctttcataagctgt

SEQ ID NO: 262122 - DNA, 33 bp, Homo sapien
ttggtttacaattacatgtctttcataagctgt

SEQ ID NO: 262123 - DNA, 33 bp, Homo sapien
ggctagctgatgcagactacaggagcaacctaa

SEQ ID NO: 262124 - DNA, 33 bp, Homo sapien
ggctagctgatgcagattacaggagcaacctaa

SEQ ID NO: 262125 - DNA, 33 bp, Homo sapien
tctggatagaagacaaacgattagaaaattgca

SEQ ID NO: 262126 - DNA, 33 bp, Homo sapien
tctggatagaagacaagcgattagaaaattgca

SEQ ID NO: 262127 - DNA, 33 bp, Homo sapien
ttttaatatgtaaaaacgtagatgtactaattc

SEQ ID NO: 262128 - DNA, 33 bp, Homo sapien
ttttaatatgtaaaaatgtagatgtactaattc

SEQ ID NO: 262129 - DNA, 33 bp, Homo sapien
tttaattgcacctaaaggtttatgagttaactt

SEQ ID NO: 262130 - DNA, 33 bp, Homo sapien
tttaattgcacctaaatgtttatgagttaactt

SEQ ID NO: 262131 - DNA, 33 bp, Homo sapien
gacagagttctgaaaccgactcaactatttact

SEQ ID NO: 262132 - DNA, 33 bp, Homo sapien
gacagagttctgaaactgactcaactatttact

SEQ ID NO: 262133 - DNA, 33 bp, Homo sapien
tgaccggttcctcaagacagcaaataatgtgtt

SEQ ID NO: 262134 - DNA, 33 bp, Homo sapien
tgaccggttcctcaaggcagcaaataatgtgtt

SEQ ID NO: 262135 - DNA, 33 bp, Homo sapien
cacctctacctgcttgcatggtcccggtatgac

SEQ ID NO: 262136 - DNA, 33 bp, Homo sapien
cacctctacctgcttgtatggtcccggtatgac

SEQ ID NO: 262137 - DNA, 33 bp, Homo sapien
cactttctcaacacagcacttcatgcgtgcatg

SEQ ID NO: 262138 - DNA, 33 bp, Homo sapien
cactttctcaacacaggacttcatgcgtgcatg

SEQ ID NO: 262139 - DNA, 33 bp, Homo sapien
aataatcagaattggcacgaaaaacctgtttgc

SEQ ID NO: 262140 - DNA, 33 bp, Homo sapien
aataatcagaattggcgcgaaaaacctgtttgc

SEQ ID NO: 262141 - DNA, 33 bp, Homo sapien
ttggttccttcacttcaagttactgttgtaggt

SEQ ID NO: 262142 - DNA, 33 bp, Homo sapien
ttggttccttcacttcgagttactgttgtaggt

SEQ ID NO: 262143 - DNA, 33 bp, Homo sapien
attagattgaatttaccgatttcacaagcatgt

SEQ ID NO: 262144 - DNA, 33 bp, Homo sapien
attagattgaatttactgatttcacaagcatgt

SEQ ID NO: 262145 - DNA, 33 bp, Homo sapien
tttctgagaataatcaaggacttggctgtcaca

SEQ ID NO: 262146 - DNA, 33 bp, Homo sapien
tttctgagaataatcagggacttggctgtcaca

SEQ ID NO: 262147 - DNA, 33 bp, Homo sapien
atgggttcctttgaaaaatactgtgctgaggtg

SEQ ID NO: 262148 - DNA, 33 bp, Homo sapien
atgggttcctttgaaagatactgtgctgaggtg

SEQ ID NO: 262149 - DNA, 33 bp, Homo sapien
atgtcattatgttgaactgaatttctgttaact

SEQ ID NO: 262150 - DNA, 33 bp, Homo sapien
atgtcattatgttgaattgaatttctgttaact

SEQ ID NO: 262151 - DNA, 33 bp, Homo sapien
ccctccttagactccccgcatgtaggttttgca

SEQ ID NO: 262152 - DNA, 33 bp, Homo sapien
ccctccttagactccctgcatgtaggttttgca

SEQ ID NO: 262153 - DNA, 33 bp, Homo sapien
tgtggcctattgcagccccctaaaaggatacat

SEQ ID NO: 262154 - DNA, 33 bp, Homo sapien
tgtggcctattgcagcgccctaaaaggatacat

SEQ ID NO: 262155 - DNA, 33 bp, Homo sapien
aatatctaaataaatacgtgagcaacaaaaatc

SEQ ID NO: 262156 - DNA, 33 bp, Homo sapien
aatatctaaataaatatgtgagcaacaaaaatc

SEQ ID NO: 262157 - DNA, 33 bp, Homo sapien
gggacctgtggtggaaatggtaagctatctagt

SEQ ID NO: 262158 - DNA, 33 bp, Homo sapien
gggacctgtggtggaagtggtaagctatctagt

SEQ ID NO: 262159 - DNA, 33 bp, Homo sapien
acatgaaaggcccatgaaatatcaaggtgattc

SEQ ID NO: 262160 - DNA, 33 bp, Homo sapien
acatgaaaggcccatgtaatatcaaggtgattc

SEQ ID NO: 262161 - DNA, 33 bp, Homo sapien
ctcgcatgccattctaaggctagcctggcgttc

SEQ ID NO: 262162 - DNA, 33 bp, Homo sapien
ctcgcatgccattctagggctagcctggcgttc

SEQ ID NO: 262163 - DNA, 33 bp, Homo sapien
ctggctttcagtgcaaactacttacagaaacaa

SEQ ID NO: 262164 - DNA, 33 bp, Homo sapien
ctggctttcagtgcaagctacttacagaaacaa

SEQ ID NO: 262165 - DNA, 33 bp, Homo sapien
gaacctgcctgaagacacatttcagttctgtta

SEQ ID NO: 262166 - DNA, 33 bp, Homo sapien
gaacctgcctgaagacccatttcagttctgtta

SEQ ID NO: 262167 - DNA, 33 bp, Homo sapien
tgtcagaagttgcatacatcagttccacttgca

SEQ ID NO: 262168 - DNA, 33 bp, Homo sapien
tgtcagaagttgcatatatcagttccacttgca

SEQ ID NO: 262169 - DNA, 33 bp, Homo sapien
cacaccctcatagctccattcaggcaaggtata

SEQ ID NO: 262170 - DNA, 33 bp, Homo sapien
cacaccctcatagctctattcaggcaaggtata

SEQ ID NO: 262171 - DNA, 33 bp, Homo sapien
tgccttgactaggacacagatagccttgaaaga

SEQ ID NO: 262172 - DNA, 33 bp, Homo sapien
tgccttgactaggacagagatagccttgaaaga

SEQ ID NO: 262173 - DNA, 33 bp, Homo sapien
tctctggattgtctcaagtctttccatgtactt

SEQ ID NO: 262174 - DNA, 33 bp, Homo sapien
tctctggattgtctcaggtctttccatgtactt

SEQ ID NO: 262175 - DNA, 33 bp, Homo sapien
acaaacaaaagggcagaactcatgatggaaaag

SEQ ID NO: 262176 - DNA, 33 bp, Homo sapien
acaaacaaaagggcaggactcatgatggaaaag

SEQ ID NO: 262177 - DNA, 33 bp, Homo sapien
aaagtaaagatggaaaccagaccagtaaataag

SEQ ID NO: 262178 - DNA, 33 bp, Homo sapien
aaagtaaagatggaaatcagaccagtaaataag

SEQ ID NO: 262179 - DNA, 33 bp, Homo sapien
ataagtcctttgatgaacttctgagtctctaca

SEQ ID NO: 262180 - DNA, 33 bp, Homo sapien
ataagtcctttgatgaccttctgagtctctaca

SEQ ID NO: 262181 - DNA, 33 bp, Homo sapien
gtgtcatgccagaagtaacaaaagatgagacgt

SEQ ID NO: 262182 - DNA, 33 bp, Homo sapien
gtgtcatgccagaagtgacaaaagatgagacgt

SEQ ID NO: 262183 - DNA, 33 bp, Homo sapien
gttagggagatggagacgaagttacagagcaca

SEQ ID NO: 262184 - DNA, 33 bp, Homo sapien
gttagggagatggagaggaagttacagagcaca

SEQ ID NO: 262185 - DNA, 33 bp, Homo sapien
tgaaagcttgtagataaccaacatttgcataac

SEQ ID NO: 262186 - DNA, 33 bp, Homo sapien
tgaaagcttgtagatatccaacatttgcataac

SEQ ID NO: 262187 - DNA, 33 bp, Homo sapien
ccactttgccctctccaagaaaatctagtgatc

SEQ ID NO: 262188 - DNA, 33 bp, Homo sapien
ccactttgccctctccgagaaaatctagtgatc

SEQ ID NO: 262189 - DNA, 33 bp, Homo sapien
agtggccagcagagcaaggattttttctagaag

SEQ ID NO: 262190 - DNA, 33 bp, Homo sapien
agtggccagcagagcacggattttttctagaag

SEQ ID NO: 262191 - DNA, 33 bp, Homo sapien
tggagggttgtgcttaacgatgagtcttttgtc

SEQ ID NO: 262192 - DNA, 33 bp, Homo sapien
tggagggttgtgcttagcgatgagtcttttgtc

SEQ ID NO: 262193 - DNA, 33 bp, Homo sapien
aggcttctttagctcccaagcagaggccagagc

SEQ ID NO: 262194 - DNA, 33 bp, Homo sapien
aggcttctttagctcctaagcagaggccagagc

SEQ ID NO: 262195 - DNA, 33 bp, Homo sapien
atgttggcataaaaaacgatgttgagaaaagca

SEQ ID NO: 262196 - DNA, 33 bp, Homo sapien
atgttggcataaaaaatgatgttgagaaaagca

SEQ ID NO: 262197 - DNA, 33 bp, Homo sapien
gtctgcccttcttcacactttcttctcaactct

SEQ ID NO: 262198 - DNA, 33 bp, Homo sapien
gtctgcccttcttcacgctttcttctcaactct

SEQ ID NO: 262199 - DNA, 33 bp, Homo sapien
tttaatatagcacaacaacccattgagaaatta

SEQ ID NO: 262200 - DNA, 33 bp, Homo sapien
tttaatatagcacaacgacccattgagaaatta

SEQ ID NO: 262201 - DNA, 33 bp, Homo sapien
cctggaaattgacagaaggtacaaaagcaaacc

SEQ ID NO: 262202 - DNA, 33 bp, Homo sapien
cctggaaattgacagacggtacaaaagcaaacc

SEQ ID NO: 262203 - DNA, 33 bp, Homo sapien
catgaaacactgtcaccattgctccttccttgt

SEQ ID NO: 262204 - DNA, 33 bp, Homo sapien
catgaaacactgtcactattgctccttccttgt

SEQ ID NO: 262205 - DNA, 33 bp, Homo sapien
ggattgagacatcattcaaaggtacttccaagt

SEQ ID NO: 262206 - DNA, 33 bp, Homo sapien
ggattgagacatcattgaaaggtacttccaagt

SEQ ID NO: 262207 - DNA, 33 bp, Homo sapien
agtcttccagcactaaagatgctatgttctctt

SEQ ID NO: 262208 - DNA, 33 bp, Homo sapien
agtcttccagcactaaggatgctatgttctctt

SEQ ID NO: 262209 - DNA, 33 bp, Homo sapien
agcctctcacttagcacattagagacgggaccc

SEQ ID NO: 262210 - DNA, 33 bp, Homo sapien
agcctctcacttagcatattagagacgggaccc

SEQ ID NO: 262211 - DNA, 33 bp, Homo sapien
agagaagtgaaatggaagcaattacaaagattg

SEQ ID NO: 262212 - DNA, 33 bp, Homo sapien
agagaagtgaaatggatgcaattacaaagattg

SEQ ID NO: 262213 - DNA, 33 bp, Homo sapien
ggaagatacatgaggaagcttgttatagtcttg

SEQ ID NO: 262214 - DNA, 33 bp, Homo sapien
ggaagatacatgaggatgcttgttatagtcttg

SEQ ID NO: 262215 - DNA, 33 bp, Homo sapien
tttgctataaaccatgcatttggaatatcaaat

SEQ ID NO: 262216 - DNA, 33 bp, Homo sapien
tttgctataaaccatggatttggaatatcaaat

SEQ ID NO: 262217 - DNA, 33 bp, Homo sapien
tctccagaatttgttcaccgactattcaaaaaa

SEQ ID NO: 262218 - DNA, 33 bp, Homo sapien
tctccagaatttgttcgccgactattcaaaaaa

SEQ ID NO: 262219 - DNA, 33 bp, Homo sapien
agcttatagactacaacgcatgggacaggggaa

SEQ ID NO: 262220 - DNA, 33 bp, Homo sapien
agcttatagactacaaggcatgggacaggggaa

SEQ ID NO: 262221 - DNA, 33 bp, Homo sapien
aactgatgagcactggaaactaaaaacctatgc

SEQ ID NO: 262222 - DNA, 33 bp, Homo sapien
aactgatgagcactgggaactaaaaacctatgc

SEQ ID NO: 262223 - DNA, 33 bp, Homo sapien
accttgaccacacccaaggttaggagtccctgt

SEQ ID NO: 262224 - DNA, 33 bp, Homo sapien
accttgaccacacccagggttaggagtccctgt

SEQ ID NO: 262225 - DNA, 33 bp, Homo sapien
agagaaggcaaataaccgtcagataaaagcgaa

SEQ ID NO: 262226 - DNA, 33 bp, Homo sapien
agagaaggcaaataactgtcagataaaagcgaa

SEQ ID NO: 262227 - DNA, 33 bp, Homo sapien
ctcacaggctaccaaccaggctctggttaaaat

SEQ ID NO: 262228 - DNA, 33 bp, Homo sapien
ctcacaggctaccaactaggctctggttaaaat

SEQ ID NO: 262229 - DNA, 33 bp, Homo sapien
gcccagtagcaagcaagttaatagtggtaaata

SEQ ID NO: 262230 - DNA, 33 bp, Homo sapien
gcccagtagcaagcaatttaatagtggtaaata

SEQ ID NO: 262231 - DNA, 33 bp, Homo sapien
tctgaacaaagatgacaggaggagctgccttgg

SEQ ID NO: 262232 - DNA, 33 bp, Homo sapien
tctgaacaaagatgaccggaggagctgccttgg

SEQ ID NO: 262233 - DNA, 33 bp, Homo sapien
tctggacccttcctgacggtctgcagatatgaa

SEQ ID NO: 262234 - DNA, 33 bp, Homo sapien
tctggacccttcctgatggtctgcagatatgaa

SEQ ID NO: 262235 - DNA, 33 bp, Homo sapien
gagctccagcagcggacgtcttccctgtcgtgc

SEQ ID NO: 262236 - DNA, 33 bp, Homo sapien
gagctccagcagcggatgtcttccctgtcgtgc

SEQ ID NO: 262237 - DNA, 33 bp, Homo sapien
aaataaagttcataaacggattcattccaaccc

SEQ ID NO: 262238 - DNA, 33 bp, Homo sapien
aaataaagttcataaatggattcattccaaccc

SEQ ID NO: 262239 - DNA, 33 bp, Homo sapien
ttgttcgatccattacaacttctaagacaagac

SEQ ID NO: 262240 - DNA, 33 bp, Homo sapien
ttgttcgatccattacgacttctaagacaagac

SEQ ID NO: 262241 - DNA, 33 bp, Homo sapien
attcagttcaaccaaacttattgggtgccaggc

SEQ ID NO: 262242 - DNA, 33 bp, Homo sapien
attcagttcaaccaaatttattgggtgccaggc

SEQ ID NO: 262243 - DNA, 33 bp, Homo sapien
tactaatagacaatcaatatagcctaaggagtt

SEQ ID NO: 262244 - DNA, 33 bp, Homo sapien
tactaatagacaatcagtatagcctaaggagtt

SEQ ID NO: 262245 - DNA, 33 bp, Homo sapien
agattattctccactaatacattgttccttcaa

SEQ ID NO: 262246 - DNA, 33 bp, Homo sapien
agattattctccactattacattgttccttcaa

SEQ ID NO: 262247 - DNA, 33 bp, Homo sapien
gctaatgatgatagaacgtcgcttgtgcataat

SEQ ID NO: 262248 - DNA, 33 bp, Homo sapien
gctaatgatgatagaatgtcgcttgtgcataat

SEQ ID NO: 262249 - DNA, 33 bp, Homo sapien
gctggccggtactgtaaagactccttcagatca

SEQ ID NO: 262250 - DNA, 33 bp, Homo sapien
gctggccggtactgtacagactccttcagatca

SEQ ID NO: 262251 - DNA, 33 bp, Homo sapien
ggtcaggttataaaagcctgtgacttccttctt

SEQ ID NO: 262252 - DNA, 33 bp, Homo sapien
ggtcaggttataaaaggctgtgacttccttctt

SEQ ID NO: 262253 - DNA, 33 bp, Homo sapien
ctattcagccacagtgaaaacctactaggtagg

SEQ ID NO: 262254 - DNA, 33 bp, Homo sapien
ctattcagccacagtggaaacctactaggtagg

SEQ ID NO: 262255 - DNA, 33 bp, Homo sapien
aagattctgaagacacacgtgtagttttatgtt

SEQ ID NO: 262256 - DNA, 33 bp, Homo sapien
aagattctgaagacacgcgtgtagttttatgtt

SEQ ID NO: 262257 - DNA, 33 bp, Homo sapien
atgtgtgagagagaaacttgcccaactgcacac

SEQ ID NO: 262258 - DNA, 33 bp, Homo sapien
atgtgtgagagagaaatttgcccaactgcacac

SEQ ID NO: 262259 - DNA, 33 bp, Homo sapien
gcagaatgtggaggggacatatttctgggtgat

SEQ ID NO: 262260 - DNA, 33 bp, Homo sapien
gcagaatgtggaggggtcatatttctgggtgat

SEQ ID NO: 262261 - DNA, 33 bp, Homo sapien
aggtgttccaagtcccaatgggaagcagagcat

SEQ ID NO: 262262 - DNA, 33 bp, Homo sapien
aggtgttccaagtcccgatgggaagcagagcat

SEQ ID NO: 262263 - DNA, 33 bp, Homo sapien
cctacattctggaacacaggatgtttgaaattc

SEQ ID NO: 262264 - DNA, 33 bp, Homo sapien
cctacattctggaacagaggatgtttgaaattc

SEQ ID NO: 262265 - DNA, 33 bp, Homo sapien
tttccttgtgtcatcccagattcaggtggctcc

SEQ ID NO: 262266 - DNA, 33 bp, Homo sapien
tttccttgtgtcatcctagattcaggtggctcc

SEQ ID NO: 262267 - DNA, 33 bp, Homo sapien
gattagaagttaataagggtgagaattttctct

SEQ ID NO: 262268 - DNA, 33 bp, Homo sapien
gattagaagttaataatggtgagaattttctct

SEQ ID NO: 262269 - DNA, 33 bp, Homo sapien
tcagcgcataggaatcacctggggatcttgtaa

SEQ ID NO: 262270 - DNA, 33 bp, Homo sapien
tcagcgcataggaatcgcctggggatcttgtaa

SEQ ID NO: 262271 - DNA, 33 bp, Homo sapien
actttaagggcagagaaagttgagttagccgga

SEQ ID NO: 262272 - DNA, 33 bp, Homo sapien
actttaagggcagagagagttgagttagccgga

SEQ ID NO: 262273 - DNA, 33 bp, Homo sapien
cactgacaagaaccgacgcatccggctaactca

SEQ ID NO: 262274 - DNA, 33 bp, Homo sapien
cactgacaagaaccgaggcatccggctaactca

SEQ ID NO: 262275 - DNA, 33 bp, Homo sapien
tactatccatcagtcagaggtctaagtattttt

SEQ ID NO: 262276 - DNA, 33 bp, Homo sapien
tactatccatcagtcataggtctaagtattttt

SEQ ID NO: 262277 - DNA, 33 bp, Homo sapien
actgctgtattccgaaactctagaacgtctggc

SEQ ID NO: 262278 - DNA, 33 bp, Homo sapien
actgctgtattccgaatctctagaacgtctggc

SEQ ID NO: 262279 - DNA, 33 bp, Homo sapien
acatcttcactctacacggtagcaaagtgccag

SEQ ID NO: 262280 - DNA, 33 bp, Homo sapien
acatcttcactctacatggtagcaaagtgccag

SEQ ID NO: 262281 - DNA, 33 bp, Homo sapien
agccctctcactgttgaaaacatggctgtcttt

SEQ ID NO: 262282 - DNA, 33 bp, Homo sapien
agccctctcactgttggaaacatggctgtcttt

SEQ ID NO: 262283 - DNA, 33 bp, Homo sapien
catcagtgctgtctgcaaacaggtttcaggtga

SEQ ID NO: 262284 - DNA, 33 bp, Homo sapien
catcagtgctgtctgcgaacaggtttcaggtga

SEQ ID NO: 262285 - DNA, 33 bp, Homo sapien
ccttcatttgcataaacgggcctgattaggaac

SEQ ID NO: 262286 - DNA, 33 bp, Homo sapien
ccttcatttgcataaatgggcctgattaggaac

SEQ ID NO: 262287 - DNA, 33 bp, Homo sapien
ggggcagagaggtatggacacgcagcctcgatg

SEQ ID NO: 262288 - DNA, 33 bp, Homo sapien
ggggcagagaggtatgtacacgcagcctcgatg

SEQ ID NO: 262289 - DNA, 33 bp, Homo sapien
ttatgctaaccctcacaaagatctgtaaagtac

SEQ ID NO: 262290 - DNA, 33 bp, Homo sapien
ttatgctaaccctcacgaagatctgtaaagtac

SEQ ID NO: 262291 - DNA, 33 bp, Homo sapien
gtttgacctgagtcaaggattcctaacttgact

SEQ ID NO: 262292 - DNA, 33 bp, Homo sapien
gtttgacctgagtcaatgattcctaacttgact

SEQ ID NO: 262293 - DNA, 33 bp, Homo sapien
cggggaaaaaactctacacatctggtgtcagaa

SEQ ID NO: 262294 - DNA, 33 bp, Homo sapien
cggggaaaaaactctatacatctggtgtcagaa

SEQ ID NO: 262295 - DNA, 33 bp, Homo sapien
ttctagtttgggaataacaataatgctgcagta

SEQ ID NO: 262296 - DNA, 33 bp, Homo sapien
ttctagtttgggaatagcaataatgctgcagta

SEQ ID NO: 262297 - DNA, 33 bp, Homo sapien
ctcaagatttcctgaacaactcctccccagcca

SEQ ID NO: 262298 - DNA, 33 bp, Homo sapien
ctcaagatttcctgaagaactcctccccagcca

SEQ ID NO: 262299 - DNA, 33 bp, Homo sapien
cacaaggatgtattcaaggtttagtctgagccc

SEQ ID NO: 262300 - DNA, 33 bp, Homo sapien
cacaaggatgtattcagggtttagtctgagccc

SEQ ID NO: 262301 - DNA, 33 bp, Homo sapien
ggctggaagctataatcacccggtgtataattt

SEQ ID NO: 262302 - DNA, 33 bp, Homo sapien
ggctggaagctataattacccggtgtataattt

SEQ ID NO: 262303 - DNA, 33 bp, Homo sapien
tagtgggaccactctgcaaatgaaacttctgtt

SEQ ID NO: 262304 - DNA, 33 bp, Homo sapien
tagtgggaccactctgtaaatgaaacttctgtt

SEQ ID NO: 262305 - DNA, 33 bp, Homo sapien
tatacggtaaattccaaccaacatcaggggcct

SEQ ID NO: 262306 - DNA, 33 bp, Homo sapien
tatacggtaaattccagccaacatcaggggcct

SEQ ID NO: 262307 - DNA, 33 bp, Homo sapien
attccacttaccagcaaaatgaatggcataagt

SEQ ID NO: 262308 - DNA, 33 bp, Homo sapien
attccacttaccagcataatgaatggcataagt

SEQ ID NO: 262309 - DNA, 33 bp, Homo sapien
ctccaccgtggctgaaagtattcaagcagagac

SEQ ID NO: 262310 - DNA, 33 bp, Homo sapien
ctccaccgtggctgaaggtattcaagcagagac

SEQ ID NO: 262311 - DNA, 33 bp, Homo sapien
aagtcatctacttaacactcagttctagaattg

SEQ ID NO: 262312 - DNA, 33 bp, Homo sapien
aagtcatctacttaaccctcagttctagaattg

SEQ ID NO: 262313 - DNA, 33 bp, Homo sapien
tccagctctagataaactgctttcatgattcct

SEQ ID NO: 262314 - DNA, 33 bp, Homo sapien
tccagctctagataaattgctttcatgattcct

SEQ ID NO: 262315 - DNA, 33 bp, Homo sapien
gagatcctttcaagaacatcccacggcttctca

SEQ ID NO: 262316 - DNA, 33 bp, Homo sapien
gagatcctttcaagaatatcccacggcttctca

SEQ ID NO: 262317 - DNA, 33 bp, Homo sapien
cctctcagcgctttccacatctcttcaggggct

SEQ ID NO: 262318 - DNA, 33 bp, Homo sapien
cctctcagcgctttccgcatctcttcaggggct

SEQ ID NO: 262319 - DNA, 33 bp, Homo sapien
caccaggataagtaggccacttttctgagcatc

SEQ ID NO: 262320 - DNA, 33 bp, Homo sapien
caccaggataagtagggcacttttctgagcatc

SEQ ID NO: 262321 - DNA, 33 bp, Homo sapien
cagcagtgcctggcacagaatagacactctata

SEQ ID NO: 262322 - DNA, 33 bp, Homo sapien
cagcagtgcctggcacggaatagacactctata

SEQ ID NO: 262323 - DNA, 33 bp, Homo sapien
gctgaaaactggacatgaggatggaaatgcatg

SEQ ID NO: 262324 - DNA, 33 bp, Homo sapien
gctgaaaactggacattaggatggaaatgcatg

SEQ ID NO: 262325 - DNA, 33 bp, Homo sapien
ccgggaacattctgtaaaatgcaacccacagac

SEQ ID NO: 262326 - DNA, 33 bp, Homo sapien
ccgggaacattctgtacaatgcaacccacagac

SEQ ID NO: 262327 - DNA, 33 bp, Homo sapien
ggaagaagtggaatcacggaaaacatcctccca

SEQ ID NO: 262328 - DNA, 33 bp, Homo sapien
ggaagaagtggaatcatggaaaacatcctccca

SEQ ID NO: 262329 - DNA, 33 bp, Homo sapien
acaaaaagcaagcaaccgctggaaacacacctg

SEQ ID NO: 262330 - DNA, 33 bp, Homo sapien
acaaaaagcaagcaacggctggaaacacacctg

SEQ ID NO: 262331 - DNA, 33 bp, Homo sapien
agctgttgctctttcaaaataaagagaagccac

SEQ ID NO: 262332 - DNA, 33 bp, Homo sapien
agctgttgctctttcacaataaagagaagccac

SEQ ID NO: 262333 - DNA, 33 bp, Homo sapien
agtgcctggctttctgaagatcagtggatgtct

SEQ ID NO: 262334 - DNA, 33 bp, Homo sapien
agtgcctggctttctggagatcagtggatgtct

SEQ ID NO: 262335 - DNA, 33 bp, Homo sapien
ttctcagctgaggaaactccaccactgccacca

SEQ ID NO: 262336 - DNA, 33 bp, Homo sapien
ttctcagctgaggaaattccaccactgccacca

SEQ ID NO: 262337 - DNA, 33 bp, Homo sapien
attccgctgcttctgccgaatcttctcagtgct

SEQ ID NO: 262338 - DNA, 33 bp, Homo sapien
attccgctgcttctgctgaatcttctcagtgct

SEQ ID NO: 262339 - DNA, 33 bp, Homo sapien
gtcacacaacccctaaaggaaaggcatgagagg

SEQ ID NO: 262340 - DNA, 33 bp, Homo sapien
gtcacacaacccctaagggaaaggcatgagagg

SEQ ID NO: 262341 - DNA, 33 bp, Homo sapien
cctcataggcattaccaccttactgttgtgagg

SEQ ID NO: 262342 - DNA, 33 bp, Homo sapien
cctcataggcattaccgccttactgttgtgagg

SEQ ID NO: 262343 - DNA, 33 bp, Homo sapien
taacttgggaaacagaagcttgaatgaactagt

SEQ ID NO: 262344 - DNA, 33 bp, Homo sapien
taacttgggaaacagatgcttgaatgaactagt

SEQ ID NO: 262345 - DNA, 33 bp, Homo sapien
gggaattggctcacacgactttagaggcccaga

SEQ ID NO: 262346 - DNA, 33 bp, Homo sapien
gggaattggctcacactactttagaggcccaga

SEQ ID NO: 262347 - DNA, 33 bp, Homo sapien
tctctcaagagctgggaagttatttgcattaag

SEQ ID NO: 262348 - DNA, 33 bp, Homo sapien
tctctcaagagctgggtagttatttgcattaag

SEQ ID NO: 262349 - DNA, 33 bp, Homo sapien
ccacagccactgaagcaatataagcctgtcaca

SEQ ID NO: 262350 - DNA, 33 bp, Homo sapien
ccacagccactgaagcgatataagcctgtcaca

SEQ ID NO: 262351 - DNA, 33 bp, Homo sapien
ttgattcttccttccaatctgactctcaaacct

SEQ ID NO: 262352 - DNA, 33 bp, Homo sapien
ttgattcttccttccagtctgactctcaaacct

SEQ ID NO: 262353 - DNA, 33 bp, Homo sapien
cacacctatcagtgaaactagtgaaacagctgt

SEQ ID NO: 262354 - DNA, 33 bp, Homo sapien
cacacctatcagtgaacctagtgaaacagctgt

SEQ ID NO: 262355 - DNA, 33 bp, Homo sapien
aatgtgtgtgtacaacccaaatttacagtatga

SEQ ID NO: 262356 - DNA, 33 bp, Homo sapien
aatgtgtgtgtacaactcaaatttacagtatga

SEQ ID NO: 262357 - DNA, 33 bp, Homo sapien
ccctaaaagtctaagtaaagctcgaatagtact

SEQ ID NO: 262358 - DNA, 33 bp, Homo sapien
ccctaaaagtctaagttaagctcgaatagtact

SEQ ID NO: 262359 - DNA, 33 bp, Homo sapien
aaggtctggaagaaaacgataattcataatcac

SEQ ID NO: 262360 - DNA, 33 bp, Homo sapien
aaggtctggaagaaaaggataattcataatcac

SEQ ID NO: 262361 - DNA, 33 bp, Homo sapien
tgggtgggctctaatccaacatgactggtgtcc

SEQ ID NO: 262362 - DNA, 33 bp, Homo sapien
tgggtgggctctaatcgaacatgactggtgtcc

SEQ ID NO: 262363 - DNA, 33 bp, Homo sapien
acacatcaacttcaaactaacatgtaaaatgtc

SEQ ID NO: 262364 - DNA, 33 bp, Homo sapien
acacatcaacttcaaattaacatgtaaaatgtc

SEQ ID NO: 262365 - DNA, 33 bp, Homo sapien
ttggagataaaagatacgttctgagtcactgtg

SEQ ID NO: 262366 - DNA, 33 bp, Homo sapien
ttggagataaaagatatgttctgagtcactgtg

SEQ ID NO: 262367 - DNA, 33 bp, Homo sapien
tctaaaatatactggccgatacaattattaaat

SEQ ID NO: 262368 - DNA, 33 bp, Homo sapien
tctaaaatatactggctgatacaattattaaat

SEQ ID NO: 262369 - DNA, 33 bp, Homo sapien
acatacatagctatagaaagagaaaaggtagga

SEQ ID NO: 262370 - DNA, 33 bp, Homo sapien
acatacatagctatagtaagagaaaaggtagga

SEQ ID NO: 262371 - DNA, 33 bp, Homo sapien
ttgtctttggccatacccataaatctgactcag

SEQ ID NO: 262372 - DNA, 33 bp, Homo sapien
ttgtctttggccatactcataaatctgactcag

SEQ ID NO: 262373 - DNA, 33 bp, Homo sapien
tgtctcaggagtgacaacttcttccaaacaagc

SEQ ID NO: 262374 - DNA, 33 bp, Homo sapien
tgtctcaggagtgacaccttcttccaaacaagc

SEQ ID NO: 262375 - DNA, 33 bp, Homo sapien
tcaccaaaactgtgcaacaaggccaccagtgat

SEQ ID NO: 262376 - DNA, 33 bp, Homo sapien
tcaccaaaactgtgcatcaaggccaccagtgat

SEQ ID NO: 262377 - DNA, 33 bp, Homo sapien
caaaagaaacatatctaaagacatccagtgaag

SEQ ID NO: 262378 - DNA, 33 bp, Homo sapien
caaaagaaacatatctgaagacatccagtgaag

SEQ ID NO: 262379 - DNA, 33 bp, Homo sapien
tatggacaggtaggaacgaataaggaccgatag

SEQ ID NO: 262380 - DNA, 33 bp, Homo sapien
tatggacaggtaggaatgaataaggaccgatag

SEQ ID NO: 262381 - DNA, 33 bp, Homo sapien
cagagcagggtgatataactgagcaggaatgat

SEQ ID NO: 262382 - DNA, 33 bp, Homo sapien
cagagcagggtgatatgactgagcaggaatgat

SEQ ID NO: 262383 - DNA, 33 bp, Homo sapien
cagccactcagcagtacggtcagctgtcaaggg

SEQ ID NO: 262384 - DNA, 33 bp, Homo sapien
cagccactcagcagtatggtcagctgtcaaggg

SEQ ID NO: 262385 - DNA, 33 bp, Homo sapien
agtaatactcgttataacctctttgctttgaca

SEQ ID NO: 262386 - DNA, 33 bp, Homo sapien
agtaatactcgttatatcctctttgctttgaca

SEQ ID NO: 262387 - DNA, 33 bp, Homo sapien
ctctctgtatcctcaaccattaaacctatttat

SEQ ID NO: 262388 - DNA, 33 bp, Homo sapien
ctctctgtatcctcaatcattaaacctatttat

SEQ ID NO: 262389 - DNA, 33 bp, Homo sapien
tacagtactgtaggtaacagcttgccagcagac

SEQ ID NO: 262390 - DNA, 33 bp, Homo sapien
tacagtactgtaggtagcagcttgccagcagac

SEQ ID NO: 262391 - DNA, 33 bp, Homo sapien
taaactggacactttaagaacctgtatttgaag

SEQ ID NO: 262392 - DNA, 33 bp, Homo sapien
taaactggacactttaggaacctgtatttgaag

SEQ ID NO: 262393 - DNA, 33 bp, Homo sapien
tgctgtgttttccagtaactcagcaggtggtag

SEQ ID NO: 262394 - DNA, 33 bp, Homo sapien
tgctgtgttttccagtgactcagcaggtggtag

SEQ ID NO: 262395 - DNA, 33 bp, Homo sapien
ataatgaaaagtgaaacgtgcaatgttgttaag

SEQ ID NO: 262396 - DNA, 33 bp, Homo sapien
ataatgaaaagtgaaatgtgcaatgttgttaag

SEQ ID NO: 262397 - DNA, 33 bp, Homo sapien
ctacatggcctatctaccatcaaagaaaattaa

SEQ ID NO: 262398 - DNA, 33 bp, Homo sapien
ctacatggcctatctatcatcaaagaaaattaa

SEQ ID NO: 262399 - DNA, 33 bp, Homo sapien
gccctgacttgacagcaaccttgtgagagcccc

SEQ ID NO: 262400 - DNA, 33 bp, Homo sapien
gccctgacttgacagcgaccttgtgagagcccc

SEQ ID NO: 262401 - DNA, 33 bp, Homo sapien
cgatttgtgagaaagaaagactagctaaataat

SEQ ID NO: 262402 - DNA, 33 bp, Homo sapien
cgatttgtgagaaagagagactagctaaataat

SEQ ID NO: 262403 - DNA, 33 bp, Homo sapien
taatcataggtatcaccgtagagactcaatatg

SEQ ID NO: 262404 - DNA, 33 bp, Homo sapien
taatcataggtatcactgtagagactcaatatg

SEQ ID NO: 262405 - DNA, 33 bp, Homo sapien
gcgctatttcggctcactataacctccgcctcc

SEQ ID NO: 262406 - DNA, 33 bp, Homo sapien
gcgctatttcggctcattataacctccgcctcc

SEQ ID NO: 262407 - DNA, 33 bp, Homo sapien
aaccattttccatcagcacttaaagtgtctcgc

SEQ ID NO: 262408 - DNA, 33 bp, Homo sapien
aaccattttccatcaggacttaaagtgtctcgc

SEQ ID NO: 262409 - DNA, 33 bp, Homo sapien
gtgcatcagctcaaggcaactggtgtggctctg

SEQ ID NO: 262410 - DNA, 33 bp, Homo sapien
gtgcatcagctcaaggtaactggtgtggctctg

SEQ ID NO: 262411 - DNA, 33 bp, Homo sapien
tggaactccacagccaaaagattagacgttgtt

SEQ ID NO: 262412 - DNA, 33 bp, Homo sapien
tggaactccacagccagaagattagacgttgtt

SEQ ID NO: 262413 - DNA, 33 bp, Homo sapien
acagggtttggagaaactaggcttcatcttttt

SEQ ID NO: 262414 - DNA, 33 bp, Homo sapien
acagggtttggagaaattaggcttcatcttttt

SEQ ID NO: 262415 - DNA, 33 bp, Homo sapien
gtcatgctttcagttactttggataaatatcca

SEQ ID NO: 262416 - DNA, 33 bp, Homo sapien
gtcatgctttcagttattttggataaatatcca

SEQ ID NO: 262417 - DNA, 33 bp, Homo sapien
tttggtgtgggctacacgtctagagggaagaga

SEQ ID NO: 262418 - DNA, 33 bp, Homo sapien
tttggtgtgggctacaggtctagagggaagaga

SEQ ID NO: 262419 - DNA, 33 bp, Homo sapien
tctttctggtagaggagcctatttgggaaacaa

SEQ ID NO: 262420 - DNA, 33 bp, Homo sapien
tctttctggtagaggatcctatttgggaaacaa

SEQ ID NO: 262421 - DNA, 33 bp, Homo sapien
ccctcaaatgcagtacagaccacacggaggcct

SEQ ID NO: 262422 - DNA, 33 bp, Homo sapien
ccctcaaatgcagtacggaccacacggaggcct

SEQ ID NO: 262423 - DNA, 33 bp, Homo sapien
ttattttccttctcccaaagataaatgtaggtg

SEQ ID NO: 262424 - DNA, 33 bp, Homo sapien
ttattttccttctccccaagataaatgtaggtg

SEQ ID NO: 262425 - DNA, 33 bp, Homo sapien
ctttctggactgtatacagacatcggcttttca

SEQ ID NO: 262426 - DNA, 33 bp, Homo sapien
ctttctggactgtatatagacatcggcttttca

SEQ ID NO: 262427 - DNA, 33 bp, Homo sapien
ttcagcccaagatgccaacagtcctgagaatga

SEQ ID NO: 262428 - DNA, 33 bp, Homo sapien
ttcagcccaagatgccgacagtcctgagaatga

SEQ ID NO: 262429 - DNA, 33 bp, Homo sapien
cagctttgaaaacatacggaattagaacagcag

SEQ ID NO: 262430 - DNA, 33 bp, Homo sapien
cagctttgaaaacatatggaattagaacagcag

SEQ ID NO: 262431 - DNA, 33 bp, Homo sapien
agaaactggaatgtaaagcaggtatccaagaac

SEQ ID NO: 262432 - DNA, 33 bp, Homo sapien
agaaactggaatgtaacgcaggtatccaagaac

SEQ ID NO: 262433 - DNA, 33 bp, Homo sapien
atgtcattaaggatgaaagcctagacactataa

SEQ ID NO: 262434 - DNA, 33 bp, Homo sapien
atgtcattaaggatgagagcctagacactataa

SEQ ID NO: 262435 - DNA, 33 bp, Homo sapien
gttctgcattaacaaacgagatggaaattagtg

SEQ ID NO: 262436 - DNA, 33 bp, Homo sapien
gttctgcattaacaaaggagatggaaattagtg

SEQ ID NO: 262437 - DNA, 33 bp, Homo sapien
caaggtagtgggaaggaagtcaaaacacaactc

SEQ ID NO: 262438 - DNA, 33 bp, Homo sapien
caaggtagtgggaagggagtcaaaacacaactc

SEQ ID NO: 262439 - DNA, 33 bp, Homo sapien
cgcctggccaaaatcaatattatttctaaaggt

SEQ ID NO: 262440 - DNA, 33 bp, Homo sapien
cgcctggccaaaatcagtattatttctaaaggt

SEQ ID NO: 262441 - DNA, 33 bp, Homo sapien
gaattgcttgtttcacaatacatcatgacagat

SEQ ID NO: 262442 - DNA, 33 bp, Homo sapien
gaattgcttgtttcacgatacatcatgacagat

SEQ ID NO: 262443 - DNA, 33 bp, Homo sapien
gaaatgtattttaaaactagataaaagccagaa

SEQ ID NO: 262444 - DNA, 33 bp, Homo sapien
gaaatgtattttaaaagtagataaaagccagaa

SEQ ID NO: 262445 - DNA, 33 bp, Homo sapien
gtttgtgaggccctggcagaattagcaaattca

SEQ ID NO: 262446 - DNA, 33 bp, Homo sapien
gtttgtgaggccctggtagaattagcaaattca

SEQ ID NO: 262447 - DNA, 33 bp, Homo sapien
agactctacagttatagcagtcctttatgaaac

SEQ ID NO: 262448 - DNA, 33 bp, Homo sapien
agactctacagttatatcagtcctttatgaaac

SEQ ID NO: 262449 - DNA, 33 bp, Homo sapien
atgtaaaaaaacccaaatggagtacataataac

SEQ ID NO: 262450 - DNA, 33 bp, Homo sapien
atgtaaaaaaacccaagtggagtacataataac

SEQ ID NO: 262451 - DNA, 33 bp, Homo sapien
cacatccctgaagaataaacgtgacagttcagg

SEQ ID NO: 262452 - DNA, 33 bp, Homo sapien
cacatccctgaagaatgaacgtgacagttcagg

SEQ ID NO: 262453 - DNA, 33 bp, Homo sapien
ctaacaatgcccttcactagtttgattccacag

SEQ ID NO: 262454 - DNA, 33 bp, Homo sapien
ctaacaatgcccttcagtagtttgattccacag

SEQ ID NO: 262455 - DNA, 33 bp, Homo sapien
gagttcacatcttctccatggcacgatctgtat

SEQ ID NO: 262456 - DNA, 33 bp, Homo sapien
gagttcacatcttctctatggcacgatctgtat

SEQ ID NO: 262457 - DNA, 33 bp, Homo sapien
tttaattaaactaaacaatgagatgatgcttcc

SEQ ID NO: 262458 - DNA, 33 bp, Homo sapien
tttaattaaactaaactatgagatgatgcttcc

SEQ ID NO: 262459 - DNA, 33 bp, Homo sapien
tcatcactcttgacctgactctatcacagttag

SEQ ID NO: 262460 - DNA, 33 bp, Homo sapien
tcatcactcttgaccttactctatcacagttag

SEQ ID NO: 262461 - DNA, 33 bp, Homo sapien
aatgaatcctgtaaccaaggctgatgtctactg

SEQ ID NO: 262462 - DNA, 33 bp, Homo sapien
aatgaatcctgtaaccgaggctgatgtctactg

SEQ ID NO: 262463 - DNA, 33 bp, Homo sapien
ttgctaggaaaagtcaacttcgaatcactggac

SEQ ID NO: 262464 - DNA, 33 bp, Homo sapien
ttgctaggaaaagtcagcttcgaatcactggac

SEQ ID NO: 262465 - DNA, 33 bp, Homo sapien
taatcagcatgtggtacatctatctactgaagc

SEQ ID NO: 262466 - DNA, 33 bp, Homo sapien
taatcagcatgtggtatatctatctactgaagc

SEQ ID NO: 262467 - DNA, 33 bp, Homo sapien
tccctacattaaggaaatacgacaaacacgagg

SEQ ID NO: 262468 - DNA, 33 bp, Homo sapien
tccctacattaaggaagtacgacaaacacgagg

SEQ ID NO: 262469 - DNA, 33 bp, Homo sapien
gaatgataggtagttacacagagagaatcccta

SEQ ID NO: 262470 - DNA, 33 bp, Homo sapien
gaatgataggtagttatacagagagaatcccta

SEQ ID NO: 262471 - DNA, 33 bp, Homo sapien
taagcccatatgatcacagtcgtgttaaactgc

SEQ ID NO: 262472 - DNA, 33 bp, Homo sapien
taagcccatatgatcatagtcgtgttaaactgc

SEQ ID NO: 262473 - DNA, 33 bp, Homo sapien
ttattgctaaaagcccagacattttaatgccta

SEQ ID NO: 262474 - DNA, 33 bp, Homo sapien
ttattgctaaaagcccggacattttaatgccta

SEQ ID NO: 262475 - DNA, 33 bp, Homo sapien
attctgaacacctactatgagtcacgagccagg

SEQ ID NO: 262476 - DNA, 33 bp, Homo sapien
attctgaacacctactgtgagtcacgagccagg

SEQ ID NO: 262477 - DNA, 33 bp, Homo sapien
ctttgtgccttcgtggcattagacactgctgac

SEQ ID NO: 262478 - DNA, 33 bp, Homo sapien
ctttgtgccttcgtggtattagacactgctgac

SEQ ID NO: 262479 - DNA, 33 bp, Homo sapien
tcaggcagtattatgaagtgacaggaaatattt

SEQ ID NO: 262480 - DNA, 33 bp, Homo sapien
tcaggcagtattatgaggtgacaggaaatattt

SEQ ID NO: 262481 - DNA, 33 bp, Homo sapien
tactatctgtaacaagcaggtttgggcactgtg

SEQ ID NO: 262482 - DNA, 33 bp, Homo sapien
tactatctgtaacaagtaggtttgggcactgtg

SEQ ID NO: 262483 - DNA, 33 bp, Homo sapien
aaccccacattagatacatagcagtactgtatt

SEQ ID NO: 262484 - DNA, 33 bp, Homo sapien
aaccccacattagatatatagcagtactgtatt

SEQ ID NO: 262485 - DNA, 33 bp, Homo sapien
catgggagtgagctagcagttagtcataaacct

SEQ ID NO: 262486 - DNA, 33 bp, Homo sapien
catgggagtgagctagtagttagtcataaacct

SEQ ID NO: 262487 - DNA, 33 bp, Homo sapien
cattttgcatagtttgaagaagagccttccatt

SEQ ID NO: 262488 - DNA, 33 bp, Homo sapien
cattttgcatagtttggagaagagccttccatt

SEQ ID NO: 262489 - DNA, 33 bp, Homo sapien
aaaatgaatcaatcagcagtgaacaaatttatg

SEQ ID NO: 262490 - DNA, 33 bp, Homo sapien
aaaatgaatcaatcagtagtgaacaaatttatg

SEQ ID NO: 262491 - DNA, 33 bp, Homo sapien
acttagaatatagctacgacaaccgagaggctg

SEQ ID NO: 262492 - DNA, 33 bp, Homo sapien
acttagaatatagctaggacaaccgagaggctg

SEQ ID NO: 262493 - DNA, 33 bp, Homo sapien
gttgaagatacaaacaaaccctctataatcctc

SEQ ID NO: 262494 - DNA, 33 bp, Homo sapien
gttgaagatacaaacagaccctctataatcctc

SEQ ID NO: 262495 - DNA, 33 bp, Homo sapien
ttggaatgctgaaagaaaaaggagcccagggaa

SEQ ID NO: 262496 - DNA, 33 bp, Homo sapien
ttggaatgctgaaagagaaaggagcccagggaa

SEQ ID NO: 262497 - DNA, 33 bp, Homo sapien
atatcaaaatctgcataagcagcccaggtgaga

SEQ ID NO: 262498 - DNA, 33 bp, Homo sapien
atatcaaaatctgcatgagcagcccaggtgaga

SEQ ID NO: 262499 - DNA, 33 bp, Homo sapien
ctaaattaggcaatacaaagtggtccctcttca

SEQ ID NO: 262500 - DNA, 33 bp, Homo sapien
ctaaattaggcaatacgaagtggtccctcttca

SEQ ID NO: 262501 - DNA, 33 bp, Homo sapien
aaaagttaagaagaacagtagatgaagagtcca

SEQ ID NO: 262502 - DNA, 33 bp, Homo sapien
aaaagttaagaagaacggtagatgaagagtcca

SEQ ID NO: 262503 - DNA, 33 bp, Homo sapien
ctacacaaatgctatcaaataatagtgaggggc

SEQ ID NO: 262504 - DNA, 33 bp, Homo sapien
ctacacaaatgctatccaataatagtgaggggc

SEQ ID NO: 262505 - DNA, 33 bp, Homo sapien
gagaaaccagtatcttcaacatcgtgttctgtg

SEQ ID NO: 262506 - DNA, 33 bp, Homo sapien
gagaaaccagtatctttaacatcgtgttctgtg

SEQ ID NO: 262507 - DNA, 33 bp, Homo sapien
agtgtcagaggtaaaacattgtcaaccaaacct

SEQ ID NO: 262508 - DNA, 33 bp, Homo sapien
agtgtcagaggtaaaatattgtcaaccaaacct

SEQ ID NO: 262509 - DNA, 33 bp, Homo sapien
agttggattactgttgcatttcaaaagtagagc

SEQ ID NO: 262510 - DNA, 33 bp, Homo sapien
agttggattactgttggatttcaaaagtagagc

SEQ ID NO: 262511 - DNA, 33 bp, Homo sapien
acttaaaacagctctgaagaacaaaaatggtgc

SEQ ID NO: 262512 - DNA, 33 bp, Homo sapien
acttaaaacagctctggagaacaaaaatggtgc

SEQ ID NO: 262513 - DNA, 33 bp, Homo sapien
tcaacggctgtagtccaaaagactgtagtcaga

SEQ ID NO: 262514 - DNA, 33 bp, Homo sapien
tcaacggctgtagtcccaaagactgtagtcaga

SEQ ID NO: 262515 - DNA, 33 bp, Homo sapien
gaagaggcggaaaaaaactggtggattaaagaa

SEQ ID NO: 262516 - DNA, 33 bp, Homo sapien
gaagaggcggaaaaaatctggtggattaaagaa

SEQ ID NO: 262517 - DNA, 33 bp, Homo sapien
aatggctccatttctaagagaggtaactaaaat

SEQ ID NO: 262518 - DNA, 33 bp, Homo sapien
aatggctccatttctatgagaggtaactaaaat

SEQ ID NO: 262519 - DNA, 33 bp, Homo sapien
cacagggctccatgtacccataaggtagtctct

SEQ ID NO: 262520 - DNA, 33 bp, Homo sapien
cacagggctccatgtatccataaggtagtctct

SEQ ID NO: 262521 - DNA, 33 bp, Homo sapien
gagccttagagcagatgacatttcccataaaat

SEQ ID NO: 262522 - DNA, 33 bp, Homo sapien
gagccttagagcagattacatttcccataaaat

SEQ ID NO: 262523 - DNA, 33 bp, Homo sapien
gactgattgttttgcccaagaaacagcagccct

SEQ ID NO: 262524 - DNA, 33 bp, Homo sapien
gactgattgttttgcctaagaaacagcagccct

SEQ ID NO: 262525 - DNA, 33 bp, Homo sapien
agaaagaagcgtgcccaagtccacaggcttagc

SEQ ID NO: 262526 - DNA, 33 bp, Homo sapien
agaaagaagcgtgcccgagtccacaggcttagc

SEQ ID NO: 262527 - DNA, 33 bp, Homo sapien
acctgtcagagtaatgaagaagaatctcagaac

SEQ ID NO: 262528 - DNA, 33 bp, Homo sapien
acctgtcagagtaatggagaagaatctcagaac

SEQ ID NO: 262529 - DNA, 33 bp, Homo sapien
accatgaggatcgttaaacttcctgtcatatgt

SEQ ID NO: 262530 - DNA, 33 bp, Homo sapien
accatgaggatcgttagacttcctgtcatatgt

SEQ ID NO: 262531 - DNA, 33 bp, Homo sapien
gaacaaactgccaatcagaactcccctcctccc

SEQ ID NO: 262532 - DNA, 33 bp, Homo sapien
gaacaaactgccaatcggaactcccctcctccc

SEQ ID NO: 262533 - DNA, 33 bp, Homo sapien
atgctagtcctcttccgcatgctagctgttgca

SEQ ID NO: 262534 - DNA, 33 bp, Homo sapien
atgctagtcctcttcctcatgctagctgttgca

SEQ ID NO: 262535 - DNA, 33 bp, Homo sapien
ccgtattatgcccatcaccagtattatcatctt

SEQ ID NO: 262536 - DNA, 33 bp, Homo sapien
ccgtattatgcccatcgccagtattatcatctt

SEQ ID NO: 262537 - DNA, 33 bp, Homo sapien
atgttagaaaagaacccgaacataggcattgct

SEQ ID NO: 262538 - DNA, 33 bp, Homo sapien
atgttagaaaagaacctgaacataggcattgct

SEQ ID NO: 262539 - DNA, 33 bp, Homo sapien
ctttgcatttaatttgcagcttatggcctgaag

SEQ ID NO: 262540 - DNA, 33 bp, Homo sapien
ctttgcatttaatttgtagcttatggcctgaag

SEQ ID NO: 262541 - DNA, 33 bp, Homo sapien
tctcaaggtctcctacaatagagaaacttccat

SEQ ID NO: 262542 - DNA, 33 bp, Homo sapien
tctcaaggtctcctacgatagagaaacttccat

SEQ ID NO: 262543 - DNA, 33 bp, Homo sapien
cgcttctgaagatttaagagagagcggtcacat

SEQ ID NO: 262544 - DNA, 33 bp, Homo sapien
cgcttctgaagatttatgagagagcggtcacat

SEQ ID NO: 262545 - DNA, 33 bp, Homo sapien
ttggattccacagtaccgaccttctgacgattc

SEQ ID NO: 262546 - DNA, 33 bp, Homo sapien
ttggattccacagtactgaccttctgacgattc

SEQ ID NO: 262547 - DNA, 33 bp, Homo sapien
ctggcacatttactgcacttaatgtatgatagt

SEQ ID NO: 262548 - DNA, 33 bp, Homo sapien
ctggcacatttactgcgcttaatgtatgatagt

SEQ ID NO: 262549 - DNA, 33 bp, Homo sapien
agcaggcaaatgttggcccaaactcagcattgc

SEQ ID NO: 262550 - DNA, 33 bp, Homo sapien
agcaggcaaatgttggtccaaactcagcattgc

SEQ ID NO: 262551 - DNA, 33 bp, Homo sapien
cttgtagttggtgtcaaaagtcaggatagtgtt

SEQ ID NO: 262552 - DNA, 33 bp, Homo sapien
cttgtagttggtgtcagaagtcaggatagtgtt

SEQ ID NO: 262553 - DNA, 33 bp, Homo sapien
cctccattattgtcacaatgccatagatgagtg

SEQ ID NO: 262554 - DNA, 33 bp, Homo sapien
cctccattattgtcaccatgccatagatgagtg

SEQ ID NO: 262555 - DNA, 33 bp, Homo sapien
ccctggacaatcaaaagagattaaacagagaat

SEQ ID NO: 262556 - DNA, 33 bp, Homo sapien
ccctggacaatcaaaatagattaaacagagaat

SEQ ID NO: 262557 - DNA, 33 bp, Homo sapien
aagagcagccacaacacaagaggattttaaaat

SEQ ID NO: 262558 - DNA, 33 bp, Homo sapien
aagagcagccacaacagaagaggattttaaaat

SEQ ID NO: 262559 - DNA, 33 bp, Homo sapien
tacagttgttctagcacccttgttaaaaagact

SEQ ID NO: 262560 - DNA, 33 bp, Homo sapien
tacagttgttctagcatccttgttaaaaagact

SEQ ID NO: 262561 - DNA, 33 bp, Homo sapien
gatgggaaaaggaagaagttttgcggatactac

SEQ ID NO: 262562 - DNA, 33 bp, Homo sapien
gatgggaaaaggaagaggttttgcggatactac

SEQ ID NO: 262563 - DNA, 33 bp, Homo sapien
tgttcgtatcacttaccattcagctcaatattg

SEQ ID NO: 262564 - DNA, 33 bp, Homo sapien
tgttcgtatcacttactattcagctcaatattg

SEQ ID NO: 262565 - DNA, 33 bp, Homo sapien
atctgcagtgcaattgaagttaccagtcatctg

SEQ ID NO: 262566 - DNA, 33 bp, Homo sapien
atctgcagtgcaattgtagttaccagtcatctg

SEQ ID NO: 262567 - DNA, 33 bp, Homo sapien
tgtgtgtaatttagtacaaaaatgtttgggtca

SEQ ID NO: 262568 - DNA, 33 bp, Homo sapien
tgtgtgtaatttagtataaaaatgtttgggtca

SEQ ID NO: 262569 - DNA, 33 bp, Homo sapien
gaaaatggtggcctaaataagccatttgttccc

SEQ ID NO: 262570 - DNA, 33 bp, Homo sapien
gaaaatggtggcctaagtaagccatttgttccc

SEQ ID NO: 262571 - DNA, 33 bp, Homo sapien
acatgattctaagaaacctggaccagaactatc

SEQ ID NO: 262572 - DNA, 33 bp, Homo sapien
acatgattctaagaaatctggaccagaactatc

SEQ ID NO: 262573 - DNA, 33 bp, Homo sapien
ggctggccagcaaggaaacaggagttgggctca

SEQ ID NO: 262574 - DNA, 33 bp, Homo sapien
ggctggccagcaaggagacaggagttgggctca

SEQ ID NO: 262575 - DNA, 33 bp, Homo sapien
gggcaagttttaattacacagacgcatttctta

SEQ ID NO: 262576 - DNA, 33 bp, Homo sapien
gggcaagttttaattatacagacgcatttctta

SEQ ID NO: 262577 - DNA, 33 bp, Homo sapien
tcctttacgtaagagaaccctacagatacactc

SEQ ID NO: 262578 - DNA, 33 bp, Homo sapien
tcctttacgtaagagagccctacagatacactc

SEQ ID NO: 262579 - DNA, 33 bp, Homo sapien
gatgagattgagtacacggtgctttcagggtca

SEQ ID NO: 262580 - DNA, 33 bp, Homo sapien
gatgagattgagtacatggtgctttcagggtca

SEQ ID NO: 262581 - DNA, 33 bp, Homo sapien
ctaaatgtcctccatcaactgtcatttagcaga

SEQ ID NO: 262582 - DNA, 33 bp, Homo sapien
ctaaatgtcctccatccactgtcatttagcaga

SEQ ID NO: 262583 - DNA, 33 bp, Homo sapien
gccaagtgagtcctaaacctgatgttgctaata

SEQ ID NO: 262584 - DNA, 33 bp, Homo sapien
gccaagtgagtcctaaccctgatgttgctaata

SEQ ID NO: 262585 - DNA, 33 bp, Homo sapien
gatttcgtctggggagaagttttgaccttgcct

SEQ ID NO: 262586 - DNA, 33 bp, Homo sapien
gatttcgtctggggaggagttttgaccttgcct

SEQ ID NO: 262587 - DNA, 33 bp, Homo sapien
ggaaacttaacttctaaccagatatggtgaaat

SEQ ID NO: 262588 - DNA, 33 bp, Homo sapien
ggaaacttaacttctagccagatatggtgaaat

SEQ ID NO: 262589 - DNA, 33 bp, Homo sapien
gaggctggcaactagcaagcccaggtctaagca

SEQ ID NO: 262590 - DNA, 33 bp, Homo sapien
gaggctggcaactagcgagcccaggtctaagca

SEQ ID NO: 262591 - DNA, 33 bp, Homo sapien
ccaagagcactgaaaaaggttgcaagatgaccc

SEQ ID NO: 262592 - DNA, 33 bp, Homo sapien
ccaagagcactgaaaagggttgcaagatgaccc

SEQ ID NO: 262593 - DNA, 33 bp, Homo sapien
tctgtctttttaatccaccagtatcatttatcc

SEQ ID NO: 262594 - DNA, 33 bp, Homo sapien
tctgtctttttaatccgccagtatcatttatcc

SEQ ID NO: 262595 - DNA, 33 bp, Homo sapien
gatacagatagctcaacattctggggcagctgc

SEQ ID NO: 262596 - DNA, 33 bp, Homo sapien
gatacagatagctcaagattctggggcagctgc

SEQ ID NO: 262597 - DNA, 33 bp, Homo sapien
aacctgtgcttacttaaactcacaaagaggaat

SEQ ID NO: 262598 - DNA, 33 bp, Homo sapien
aacctgtgcttacttacactcacaaagaggaat

SEQ ID NO: 262599 - DNA, 33 bp, Homo sapien
agctgagtagctgtacccaagttactttatctc

SEQ ID NO: 262600 - DNA, 33 bp, Homo sapien
agctgagtagctgtacgcaagttactttatctc

SEQ ID NO: 262601 - DNA, 33 bp, Homo sapien
gaacaagtggcttgaacgaacatcagaatttta

SEQ ID NO: 262602 - DNA, 33 bp, Homo sapien
gaacaagtggcttgaatgaacatcagaatttta

SEQ ID NO: 262603 - DNA, 33 bp, Homo sapien
actgtcatgatactcacctggggaataacacag

SEQ ID NO: 262604 - DNA, 33 bp, Homo sapien
actgtcatgatactcatctggggaataacacag

SEQ ID NO: 262605 - DNA, 33 bp, Homo sapien
taaggacctcgggttacgtcttgggggaggtgg

SEQ ID NO: 262606 - DNA, 33 bp, Homo sapien
taaggacctcgggttatgtcttgggggaggtgg

SEQ ID NO: 262607 - DNA, 33 bp, Homo sapien
ggagatttcagcattacggagctcagattttaa

SEQ ID NO: 262608 - DNA, 33 bp, Homo sapien
ggagatttcagcattatggagctcagattttaa

SEQ ID NO: 262609 - DNA, 33 bp, Homo sapien
gtgtcatctttatgtacagagaaaagtgagtta

SEQ ID NO: 262610 - DNA, 33 bp, Homo sapien
gtgtcatctttatgtagagagaaaagtgagtta

SEQ ID NO: 262611 - DNA, 33 bp, Homo sapien
cattacaccgcttcataagagaaaataagcatt

SEQ ID NO: 262612 - DNA, 33 bp, Homo sapien
cattacaccgcttcatgagagaaaataagcatt

SEQ ID NO: 262613 - DNA, 33 bp, Homo sapien
tgcacctttgtgggacccatctctttggagagc

SEQ ID NO: 262614 - DNA, 33 bp, Homo sapien
tgcacctttgtgggactcatctctttggagagc

SEQ ID NO: 262615 - DNA, 33 bp, Homo sapien
acgtgtcaggggcccaaagacaggtgaagaaac

SEQ ID NO: 262616 - DNA, 33 bp, Homo sapien
acgtgtcaggggcccacagacaggtgaagaaac

SEQ ID NO: 262617 - DNA, 33 bp, Homo sapien
ggggaagagaacgacaaggccatgcttgggcag

SEQ ID NO: 262618 - DNA, 33 bp, Homo sapien
ggggaagagaacgacacggccatgcttgggcag

SEQ ID NO: 262619 - DNA, 33 bp, Homo sapien
caccgcactccccttccaggaaggattccaggc

SEQ ID NO: 262620 - DNA, 33 bp, Homo sapien
caccgcactccccttctaggaaggattccaggc

SEQ ID NO: 262621 - DNA, 33 bp, Homo sapien
gaaaggctcccagatacagttatgtgtgcagag

SEQ ID NO: 262622 - DNA, 33 bp, Homo sapien
gaaaggctcccagatagagttatgtgtgcagag

SEQ ID NO: 262623 - DNA, 33 bp, Homo sapien
gttgtcacgcaagacacgctgtttctgacagga

SEQ ID NO: 262624 - DNA, 33 bp, Homo sapien
gttgtcacgcaagacatgctgtttctgacagga

SEQ ID NO: 262625 - DNA, 33 bp, Homo sapien
tgctggtaaaaggtgaaatggtacaactgcggc

SEQ ID NO: 262626 - DNA, 33 bp, Homo sapien
tgctggtaaaaggtgagatggtacaactgcggc

SEQ ID NO: 262627 - DNA, 33 bp, Homo sapien
taactttccttcctctaacatgctagaacatga

SEQ ID NO: 262628 - DNA, 33 bp, Homo sapien
taactttccttcctctgacatgctagaacatga

SEQ ID NO: 262629 - DNA, 33 bp, Homo sapien
tcagaaaatcatggcccgaaaacaaatcacctc

SEQ ID NO: 262630 - DNA, 33 bp, Homo sapien
tcagaaaatcatggcctgaaaacaaatcacctc

SEQ ID NO: 262631 - DNA, 33 bp, Homo sapien
tttggcagcatgaaccagacaggcaaaccttac

SEQ ID NO: 262632 - DNA, 33 bp, Homo sapien
tttggcagcatgaaccggacaggcaaaccttac

SEQ ID NO: 262633 - DNA, 33 bp, Homo sapien
tgagattttaaacaagactctagggatggttca

SEQ ID NO: 262634 - DNA, 33 bp, Homo sapien
tgagattttaaacaaggctctagggatggttca

SEQ ID NO: 262635 - DNA, 33 bp, Homo sapien
ctgcaacctgtgaaaacgtctaggccaaggggg

SEQ ID NO: 262636 - DNA, 33 bp, Homo sapien
ctgcaacctgtgaaaatgtctaggccaaggggg

SEQ ID NO: 262637 - DNA, 33 bp, Homo sapien
aaggaaagattagaccagaggagcctcgggctg

SEQ ID NO: 262638 - DNA, 33 bp, Homo sapien
aaggaaagattagaccggaggagcctcgggctg

SEQ ID NO: 262639 - DNA, 33 bp, Homo sapien
ttctgcagaaacgctgaagcacaacatggagtg

SEQ ID NO: 262640 - DNA, 33 bp, Homo sapien
ttctgcagaaacgctggagcacaacatggagtg

SEQ ID NO: 262641 - DNA, 33 bp, Homo sapien
gggaacatgtcacaaacagccaatgcgctgggc

SEQ ID NO: 262642 - DNA, 33 bp, Homo sapien
gggaacatgtcacaaagagccaatgcgctgggc

SEQ ID NO: 262643 - DNA, 33 bp, Homo sapien
aaacggagcccaaggcaaatgacagacagaatt

SEQ ID NO: 262644 - DNA, 33 bp, Homo sapien
aaacggagcccaaggccaatgacagacagaatt

SEQ ID NO: 262645 - DNA, 33 bp, Homo sapien
actcatttctccacaacgccctggctgggcttc

SEQ ID NO: 262646 - DNA, 33 bp, Homo sapien
actcatttctccacaatgccctggctgggcttc

SEQ ID NO: 262647 - DNA, 33 bp, Homo sapien
gtgtaacaggagcaaacctttaggaaatgagca

SEQ ID NO: 262648 - DNA, 33 bp, Homo sapien
gtgtaacaggagcaaagctttaggaaatgagca

SEQ ID NO: 262649 - DNA, 33 bp, Homo sapien
tgcggatgtctactgaatctaaaggaatgctca

SEQ ID NO: 262650 - DNA, 33 bp, Homo sapien
tgcggatgtctactgagtctaaaggaatgctca

SEQ ID NO: 262651 - DNA, 33 bp, Homo sapien
tggactgattgtttagccaaaccctctcagaga

SEQ ID NO: 262652 - DNA, 33 bp, Homo sapien
tggactgattgtttaggcaaaccctctcagaga

SEQ ID NO: 262653 - DNA, 33 bp, Homo sapien
ggaggtggctgggctccgaacagacattggcaa

SEQ ID NO: 262654 - DNA, 33 bp, Homo sapien
ggaggtggctgggctctgaacagacattggcaa

SEQ ID NO: 262655 - DNA, 33 bp, Homo sapien
aaaaggatgactacaggactttcagtgtcatat

SEQ ID NO: 262656 - DNA, 33 bp, Homo sapien
aaaaggatgactacagtactttcagtgtcatat

SEQ ID NO: 262657 - DNA, 33 bp, Homo sapien
atagtaggtcaaaccaagtgtactcccctagag

SEQ ID NO: 262658 - DNA, 33 bp, Homo sapien
atagtaggtcaaaccaggtgtactcccctagag

SEQ ID NO: 262659 - DNA, 33 bp, Homo sapien
gttagcacctatttacactggacccaacacctg

SEQ ID NO: 262660 - DNA, 33 bp, Homo sapien
gttagcacctatttactctggacccaacacctg

SEQ ID NO: 262661 - DNA, 33 bp, Homo sapien
acacatggaaatcaaacatgtacttcacagttt

SEQ ID NO: 262662 - DNA, 33 bp, Homo sapien
acacatggaaatcaaatatgtacttcacagttt

SEQ ID NO: 262663 - DNA, 33 bp, Homo sapien
aaatgaaaatattgccaaaaagggagacctatt

SEQ ID NO: 262664 - DNA, 33 bp, Homo sapien
aaatgaaaatattgccgaaaagggagacctatt

SEQ ID NO: 262665 - DNA, 33 bp, Homo sapien
tgtcgcctttgtttcaacgccttcagtctcccc

SEQ ID NO: 262666 - DNA, 33 bp, Homo sapien
tgtcgcctttgtttcagcgccttcagtctcccc

SEQ ID NO: 262667 - DNA, 33 bp, Homo sapien
cacatctttgtatttggaatcctactttgctct

SEQ ID NO: 262668 - DNA, 33 bp, Homo sapien
cacatctttgtatttgtaatcctactttgctct

SEQ ID NO: 262669 - DNA, 33 bp, Homo sapien
tcatttcctttgtatgcatatcgtctaaacgga

SEQ ID NO: 262670 - DNA, 33 bp, Homo sapien
tcatttcctttgtatgtatatcgtctaaacgga

SEQ ID NO: 262671 - DNA, 33 bp, Homo sapien
atttggtcaatctgcaataataaaaaatagagg

SEQ ID NO: 262672 - DNA, 33 bp, Homo sapien
atttggtcaatctgcattaataaaaaatagagg

SEQ ID NO: 262673 - DNA, 33 bp, Homo sapien
tatacatagtccgaagcctactttaaggaggca

SEQ ID NO: 262674 - DNA, 33 bp, Homo sapien
tatacatagtccgaaggctactttaaggaggca

SEQ ID NO: 262675 - DNA, 33 bp, Homo sapien
atgtttcagcaattccaaagaaacatcattctc

SEQ ID NO: 262676 - DNA, 33 bp, Homo sapien
atgtttcagcaattccgaagaaacatcattctc

SEQ ID NO: 262677 - DNA, 33 bp, Homo sapien
cttcattgtcacaacaactccatagaggtattt

SEQ ID NO: 262678 - DNA, 33 bp, Homo sapien
cttcattgtcacaacatctccatagaggtattt

SEQ ID NO: 262679 - DNA, 33 bp, Homo sapien
tgtttcgaaaagtgtcaaatgctatagcagtat

SEQ ID NO: 262680 - DNA, 33 bp, Homo sapien
tgtttcgaaaagtgtcgaatgctatagcagtat

SEQ ID NO: 262681 - DNA, 33 bp, Homo sapien
tggagtcacagacctccgaagtggaagtgctgg

SEQ ID NO: 262682 - DNA, 33 bp, Homo sapien
tggagtcacagacctctgaagtggaagtgctgg

SEQ ID NO: 262683 - DNA, 33 bp, Homo sapien
ccttttaaagctttaacacaaggacttgaggga

SEQ ID NO: 262684 - DNA, 33 bp, Homo sapien
ccttttaaagctttaagacaaggacttgaggga

SEQ ID NO: 262685 - DNA, 33 bp, Homo sapien
aaggtttgccactccccgctctagagaccaaac

SEQ ID NO: 262686 - DNA, 33 bp, Homo sapien
aaggtttgccactccctgctctagagaccaaac

SEQ ID NO: 262687 - DNA, 33 bp, Homo sapien
caccccttgactttccaaatctgcccattttag

SEQ ID NO: 262688 - DNA, 33 bp, Homo sapien
caccccttgactttccgaatctgcccattttag

SEQ ID NO: 262689 - DNA, 33 bp, Homo sapien
caacccattaagggtcaaaaatacaagctgggg

SEQ ID NO: 262690 - DNA, 33 bp, Homo sapien
caacccattaagggtcgaaaatacaagctgggg

SEQ ID NO: 262691 - DNA, 33 bp, Homo sapien
gccgcaaagaagacgaaaagtcactggagtcca

SEQ ID NO: 262692 - DNA, 33 bp, Homo sapien
gccgcaaagaagacgataagtcactggagtcca

SEQ ID NO: 262693 - DNA, 33 bp, Homo sapien
cagatgtaagcattaggactcagagcttaagta

SEQ ID NO: 262694 - DNA, 33 bp, Homo sapien
cagatgtaagcattagtactcagagcttaagta

SEQ ID NO: 262695 - DNA, 33 bp, Homo sapien
ctactgaaataaagcaaaatttttagacttctc

SEQ ID NO: 262696 - DNA, 33 bp, Homo sapien
ctactgaaataaagcagaatttttagacttctc

SEQ ID NO: 262697 - DNA, 33 bp, Homo sapien
catttacttttacaacagaattactgagcccaa

SEQ ID NO: 262698 - DNA, 33 bp, Homo sapien
catttacttttacaacggaattactgagcccaa

SEQ ID NO: 262699 - DNA, 33 bp, Homo sapien
taccctctcgactgccaacagacaggagctacg

SEQ ID NO: 262700 - DNA, 33 bp, Homo sapien
taccctctcgactgccgacagacaggagctacg

SEQ ID NO: 262701 - DNA, 33 bp, Homo sapien
agctgaacacttgaccagatgacctgcctacag

SEQ ID NO: 262702 - DNA, 33 bp, Homo sapien
agctgaacacttgaccggatgacctgcctacag

SEQ ID NO: 262703 - DNA, 33 bp, Homo sapien
tgtatatcaatccaacacaaataatgatctacc

SEQ ID NO: 262704 - DNA, 33 bp, Homo sapien
tgtatatcaatccaactcaaataatgatctacc

SEQ ID NO: 262705 - DNA, 33 bp, Homo sapien
taagtactgagttatcacaattattttagtaca

SEQ ID NO: 262706 - DNA, 33 bp, Homo sapien
taagtactgagttatcccaattattttagtaca

SEQ ID NO: 262707 - DNA, 33 bp, Homo sapien
agctaatggtatgtcccagagataagatgataa

SEQ ID NO: 262708 - DNA, 33 bp, Homo sapien
agctaatggtatgtcctagagataagatgataa

SEQ ID NO: 262709 - DNA, 33 bp, Homo sapien
accacacttagtcacaaaaatctttaaaagaat

SEQ ID NO: 262710 - DNA, 33 bp, Homo sapien
accacacttagtcacagaaatctttaaaagaat

SEQ ID NO: 262711 - DNA, 33 bp, Homo sapien
cattgccatctgtatcaaagaatgcgtttattt

SEQ ID NO: 262712 - DNA, 33 bp, Homo sapien
cattgccatctgtatccaagaatgcgtttattt

SEQ ID NO: 262713 - DNA, 33 bp, Homo sapien
tagacaccaccagtcccgagctgggcaaccctg

SEQ ID NO: 262714 - DNA, 33 bp, Homo sapien
tagacaccaccagtcctgagctgggcaaccctg

SEQ ID NO: 262715 - DNA, 33 bp, Homo sapien
aaataatgaaatacaacttggctcagcagcaaa

SEQ ID NO: 262716 - DNA, 33 bp, Homo sapien
aaataatgaaatacaatttggctcagcagcaaa

SEQ ID NO: 262717 - DNA, 33 bp, Homo sapien
agtataaatctatgaccctacaaaaaccttgtc

SEQ ID NO: 262718 - DNA, 33 bp, Homo sapien
agtataaatctatgactctacaaaaaccttgtc

SEQ ID NO: 262719 - DNA, 33 bp, Homo sapien
gaggattttagaagaacgatggtgtttacagtc

SEQ ID NO: 262720 - DNA, 33 bp, Homo sapien
gaggattttagaagaatgatggtgtttacagtc

SEQ ID NO: 262721 - DNA, 33 bp, Homo sapien
ctccttctccacatgaaccctgctggcagttgt

SEQ ID NO: 262722 - DNA, 33 bp, Homo sapien
ctccttctccacatgagccctgctggcagttgt

SEQ ID NO: 262723 - DNA, 33 bp, Homo sapien
gaaagaaagaaagccaaagcggcaataacaaca

SEQ ID NO: 262724 - DNA, 33 bp, Homo sapien
gaaagaaagaaagccagagcggcaataacaaca

SEQ ID NO: 262725 - DNA, 33 bp, Homo sapien
gcagaagatggccagaagacaaagagagcagag

SEQ ID NO: 262726 - DNA, 33 bp, Homo sapien
gcagaagatggccagaggacaaagagagcagag

SEQ ID NO: 262727 - DNA, 33 bp, Homo sapien
atgagtacagaagttaaggatattgaaaaataa

SEQ ID NO: 262728 - DNA, 33 bp, Homo sapien
atgagtacagaagttagggatattgaaaaataa

SEQ ID NO: 262729 - DNA, 33 bp, Homo sapien
gagatgccttgggaagaacattgtgctcttttt

SEQ ID NO: 262730 - DNA, 33 bp, Homo sapien
gagatgccttgggaaggacattgtgctcttttt

SEQ ID NO: 262731 - DNA, 33 bp, Homo sapien
ccagtggctgtgggtgaaactctcattacctgc

SEQ ID NO: 262732 - DNA, 33 bp, Homo sapien
ccagtggctgtgggtggaactctcattacctgc

SEQ ID NO: 262733 - DNA, 33 bp, Homo sapien
acatagtctgtgaaaccctttaaggacactctc

SEQ ID NO: 262734 - DNA, 33 bp, Homo sapien
acatagtctgtgaaactctttaaggacactctc

SEQ ID NO: 262735 - DNA, 33 bp, Homo sapien
aaacactcatatggaaaaaccgcgatctcaggc

SEQ ID NO: 262736 - DNA, 33 bp, Homo sapien
aaacactcatatggaagaaccgcgatctcaggc

SEQ ID NO: 262737 - DNA, 33 bp, Homo sapien
ctcactggttttctcaggtgcctgctcatcagc

SEQ ID NO: 262738 - DNA, 33 bp, Homo sapien
ctcactggttttctcatgtgcctgctcatcagc

SEQ ID NO: 262739 - DNA, 33 bp, Homo sapien
aggaaggcagagaagacgaagctggaaggcacc

SEQ ID NO: 262740 - DNA, 33 bp, Homo sapien
aggaaggcagagaagatgaagctggaaggcacc

SEQ ID NO: 262741 - DNA, 33 bp, Homo sapien
ttctttttacctgaacacattcaagctcatgct

SEQ ID NO: 262742 - DNA, 33 bp, Homo sapien
ttctttttacctgaacgcattcaagctcatgct

SEQ ID NO: 262743 - DNA, 33 bp, Homo sapien
ggaatttcaggaatgacggcaagttcttagaag

SEQ ID NO: 262744 - DNA, 33 bp, Homo sapien
ggaatttcaggaatgatggcaagttcttagaag

SEQ ID NO: 262745 - DNA, 33 bp, Homo sapien
gttctctgaagagaagccctaacatagctacct

SEQ ID NO: 262746 - DNA, 33 bp, Homo sapien
gttctctgaagagaaggcctaacatagctacct

SEQ ID NO: 262747 - DNA, 33 bp, Homo sapien
agcatattctgcatcccgagggctttggggcag

SEQ ID NO: 262748 - DNA, 33 bp, Homo sapien
agcatattctgcatcctgagggctttggggcag

SEQ ID NO: 262749 - DNA, 33 bp, Homo sapien
ctgatcattgggaccaagtgagtgatgctgctc

SEQ ID NO: 262750 - DNA, 33 bp, Homo sapien
ctgatcattgggaccaggtgagtgatgctgctc

SEQ ID NO: 262751 - DNA, 33 bp, Homo sapien
ctaggccattgacaaccgcccataaaataataa

SEQ ID NO: 262752 - DNA, 33 bp, Homo sapien
ctaggccattgacaactgcccataaaataataa

SEQ ID NO: 262753 - DNA, 33 bp, Homo sapien
ctggaaagaatggtagcattatagcaggactac

SEQ ID NO: 262754 - DNA, 33 bp, Homo sapien
ctggaaagaatggtaggattatagcaggactac

SEQ ID NO: 262755 - DNA, 33 bp, Homo sapien
ccacagctcagtgaggccagtcgtataagctct

SEQ ID NO: 262756 - DNA, 33 bp, Homo sapien
ccacagctcagtgaggtcagtcgtataagctct

SEQ ID NO: 262757 - DNA, 33 bp, Homo sapien
atgcctaacctcgagaagtgcacactttggtga

SEQ ID NO: 262758 - DNA, 33 bp, Homo sapien
atgcctaacctcgagatgtgcacactttggtga

SEQ ID NO: 262759 - DNA, 33 bp, Homo sapien
ccattctgtttccaataagggcactcttcctgg

SEQ ID NO: 262760 - DNA, 33 bp, Homo sapien
ccattctgtttccaatgagggcactcttcctgg

SEQ ID NO: 262761 - DNA, 33 bp, Homo sapien
caaggactttgttctgcagcctaaacactgtgc

SEQ ID NO: 262762 - DNA, 33 bp, Homo sapien
caaggactttgttctgtagcctaaacactgtgc

SEQ ID NO: 262763 - DNA, 33 bp, Homo sapien
gagtcctcaaaagaaacccctcattttgcagat

SEQ ID NO: 262764 - DNA, 33 bp, Homo sapien
gagtcctcaaaagaaagccctcattttgcagat

SEQ ID NO: 262765 - DNA, 33 bp, Homo sapien
ctcagttccacttagcaaacattcattcagcat

SEQ ID NO: 262766 - DNA, 33 bp, Homo sapien
ctcagttccacttagccaacattcattcagcat

SEQ ID NO: 262767 - DNA, 33 bp, Homo sapien
acaagtggcatctaccacctttgatataaagaa

SEQ ID NO: 262768 - DNA, 33 bp, Homo sapien
acaagtggcatctaccgcctttgatataaagaa

SEQ ID NO: 262769 - DNA, 33 bp, Homo sapien
aatgccaaaacataacggtgttccccacaaatc

SEQ ID NO: 262770 - DNA, 33 bp, Homo sapien
aatgccaaaacataactgtgttccccacaaatc

SEQ ID NO: 262771 - DNA, 33 bp, Homo sapien
ccgtacttccacttccaatcactgacctactct

SEQ ID NO: 262772 - DNA, 33 bp, Homo sapien
ccgtacttccacttccgatcactgacctactct

SEQ ID NO: 262773 - DNA, 33 bp, Homo sapien
tctgttgagggttgttaaacaaagcataatcag

SEQ ID NO: 262774 - DNA, 33 bp, Homo sapien
tctgttgagggttgttgaacaaagcataatcag

SEQ ID NO: 262775 - DNA, 33 bp, Homo sapien
tccagaaaggccttaacgcactgggatagaagc

SEQ ID NO: 262776 - DNA, 33 bp, Homo sapien
tccagaaaggccttaatgcactgggatagaagc

SEQ ID NO: 262777 - DNA, 33 bp, Homo sapien
ttaaattgtagttcccaaaaattgcacgtgttg

SEQ ID NO: 262778 - DNA, 33 bp, Homo sapien
ttaaattgtagttccccaaaattgcacgtgttg

SEQ ID NO: 262779 - DNA, 33 bp, Homo sapien
gtatctcacatttttacagattttcaacagaga

SEQ ID NO: 262780 - DNA, 33 bp, Homo sapien
gtatctcacatttttatagattttcaacagaga

SEQ ID NO: 262781 - DNA, 33 bp, Homo sapien
ctcctgtctttgtccaatccaaacctgttcttc

SEQ ID NO: 262782 - DNA, 33 bp, Homo sapien
ctcctgtctttgtccagtccaaacctgttcttc

SEQ ID NO: 262783 - DNA, 33 bp, Homo sapien
tgttctacatccacctcaagtgtgcaggccttt

SEQ ID NO: 262784 - DNA, 33 bp, Homo sapien
tgttctacatccacctgaagtgtgcaggccttt

SEQ ID NO: 262785 - DNA, 33 bp, Homo sapien
ctaccaacaaattagccgaatttatttcacatc

SEQ ID NO: 262786 - DNA, 33 bp, Homo sapien
ctaccaacaaattagcggaatttatttcacatc

SEQ ID NO: 262787 - DNA, 33 bp, Homo sapien
tggaggtccacaatggcattgcaccatgagaga

SEQ ID NO: 262788 - DNA, 33 bp, Homo sapien
tggaggtccacaatggtattgcaccatgagaga

SEQ ID NO: 262789 - DNA, 33 bp, Homo sapien
gcatggactttaccaaactgatctcaggtcaaa

SEQ ID NO: 262790 - DNA, 33 bp, Homo sapien
gcatggactttaccaagctgatctcaggtcaaa

SEQ ID NO: 262791 - DNA, 33 bp, Homo sapien
aaccttatgatttacaacccacttactattcac

SEQ ID NO: 262792 - DNA, 33 bp, Homo sapien
aaccttatgatttacatcccacttactattcac

SEQ ID NO: 262793 - DNA, 33 bp, Homo sapien
agccagactggttcaacaggacccttcctgggg

SEQ ID NO: 262794 - DNA, 33 bp, Homo sapien
agccagactggttcaataggacccttcctgggg

SEQ ID NO: 262795 - DNA, 33 bp, Homo sapien
ggctcagggacaatgacgattcagctaacctag

SEQ ID NO: 262796 - DNA, 33 bp, Homo sapien
ggctcagggacaatgatgattcagctaacctag

SEQ ID NO: 262797 - DNA, 33 bp, Homo sapien
tgaatcccagtcagaaatcacatgcatcactgc

SEQ ID NO: 262798 - DNA, 33 bp, Homo sapien
tgaatcccagtcagaagtcacatgcatcactgc

SEQ ID NO: 262799 - DNA, 33 bp, Homo sapien
cattcaaggtcatgtacaaagtgtgctcaccaa

SEQ ID NO: 262800 - DNA, 33 bp, Homo sapien
cattcaaggtcatgtagaaagtgtgctcaccaa

SEQ ID NO: 262801 - DNA, 33 bp, Homo sapien
aaagtgtgctcaccaacgcagagttttaccagg

SEQ ID NO: 262802 - DNA, 33 bp, Homo sapien
aaagtgtgctcaccaatgcagagttttaccagg

SEQ ID NO: 262803 - DNA, 33 bp, Homo sapien
gatttacacaccaatcacaagaaatgactggca

SEQ ID NO: 262804 - DNA, 33 bp, Homo sapien
gatttacacaccaatcgcaagaaatgactggca

SEQ ID NO: 262805 - DNA, 33 bp, Homo sapien
gggttgtacctgtagcacaccatgagctcttgg

SEQ ID NO: 262806 - DNA, 33 bp, Homo sapien
gggttgtacctgtagcgcaccatgagctcttgg

SEQ ID NO: 262807 - DNA, 33 bp, Homo sapien
aacaggatgcagatggcatgggcttcacgagcc

SEQ ID NO: 262808 - DNA, 33 bp, Homo sapien
aacaggatgcagatggtatgggcttcacgagcc

SEQ ID NO: 262809 - DNA, 33 bp, Homo sapien
gcataatcagtgctcactgaatacgaaaaagag

SEQ ID NO: 262810 - DNA, 33 bp, Homo sapien
gcataatcagtgctcattgaatacgaaaaagag

SEQ ID NO: 262811 - DNA, 33 bp, Homo sapien
cctactgccaggggaaatgtgcttatcaaaagt

SEQ ID NO: 262812 - DNA, 33 bp, Homo sapien
cctactgccaggggaagtgtgcttatcaaaagt

SEQ ID NO: 262813 - DNA, 33 bp, Homo sapien
tatgcagaccatctaggagagcttgtcagttga

SEQ ID NO: 262814 - DNA, 33 bp, Homo sapien
tatgcagaccatctagtagagcttgtcagttga

SEQ ID NO: 262815 - DNA, 33 bp, Homo sapien
agcaatccactcctgacgtttgggtgattgcat

SEQ ID NO: 262816 - DNA, 33 bp, Homo sapien
agcaatccactcctgatgtttgggtgattgcat

SEQ ID NO: 262817 - DNA, 33 bp, Homo sapien
aaagccaaagaggagacgttgtacaagcaataa

SEQ ID NO: 262818 - DNA, 33 bp, Homo sapien
aaagccaaagaggagatgttgtacaagcaataa

SEQ ID NO: 262819 - DNA, 33 bp, Homo sapien
tactctctgtcataggaattaaagaaataaaag

SEQ ID NO: 262820 - DNA, 33 bp, Homo sapien
tactctctgtcatagggattaaagaaataaaag

SEQ ID NO: 262821 - DNA, 33 bp, Homo sapien
gacgcagcaaacacaaacttccttagctttgcc

SEQ ID NO: 262822 - DNA, 33 bp, Homo sapien
gacgcagcaaacacaagcttccttagctttgcc

SEQ ID NO: 262823 - DNA, 33 bp, Homo sapien
actgttgaatgattaacatcctgagttatgata

SEQ ID NO: 262824 - DNA, 33 bp, Homo sapien
actgttgaatgattaatatcctgagttatgata

SEQ ID NO: 262825 - DNA, 33 bp, Homo sapien
tctttttactacttaccccaaccctctcagagc

SEQ ID NO: 262826 - DNA, 33 bp, Homo sapien
tctttttactacttactccaaccctctcagagc

SEQ ID NO: 262827 - DNA, 33 bp, Homo sapien
taaagtgccatcaacaaaggggccacatctgtc

SEQ ID NO: 262828 - DNA, 33 bp, Homo sapien
taaagtgccatcaacacaggggccacatctgtc

SEQ ID NO: 262829 - DNA, 33 bp, Homo sapien
gcctgttccatctttcaagactccagatcaaat

SEQ ID NO: 262830 - DNA, 33 bp, Homo sapien
gcctgttccatctttccagactccagatcaaat

SEQ ID NO: 262831 - DNA, 33 bp, Homo sapien
aaacagaagtaaacacaagatcaaaagtgaaaa

SEQ ID NO: 262832 - DNA, 33 bp, Homo sapien
aaacagaagtaaacacgagatcaaaagtgaaaa

SEQ ID NO: 262833 - DNA, 33 bp, Homo sapien
ccagatccgtcatctacaaggtggtttctaaaa

SEQ ID NO: 262834 - DNA, 33 bp, Homo sapien
ccagatccgtcatctagaaggtggtttctaaaa

SEQ ID NO: 262835 - DNA, 33 bp, Homo sapien
ctacatctttggcccaagactgagactaggagg

SEQ ID NO: 262836 - DNA, 33 bp, Homo sapien
ctacatctttggcccaggactgagactaggagg

SEQ ID NO: 262837 - DNA, 33 bp, Homo sapien
ttgagggaggtaattacggttagatgagattgt

SEQ ID NO: 262838 - DNA, 33 bp, Homo sapien
ttgagggaggtaattatggttagatgagattgt

SEQ ID NO: 262839 - DNA, 33 bp, Homo sapien
atgctactgactgggaacaggaggacttgttgg

SEQ ID NO: 262840 - DNA, 33 bp, Homo sapien
atgctactgactgggaccaggaggacttgttgg

SEQ ID NO: 262841 - DNA, 33 bp, Homo sapien
acaatgaaatgcatgacgggcacaaacaggttt

SEQ ID NO: 262842 - DNA, 33 bp, Homo sapien
acaatgaaatgcatgatgggcacaaacaggttt

SEQ ID NO: 262843 - DNA, 33 bp, Homo sapien
acttctctttctgccaccccaccgtgataaggc

SEQ ID NO: 262844 - DNA, 33 bp, Homo sapien
acttctctttctgccatcccaccgtgataaggc

SEQ ID NO: 262845 - DNA, 33 bp, Homo sapien
gttgtatgctcctataatagcccttctccaagg

SEQ ID NO: 262846 - DNA, 33 bp, Homo sapien
gttgtatgctcctatagtagcccttctccaagg

SEQ ID NO: 262847 - DNA, 33 bp, Homo sapien
gcggtgaggattccacaatgttggtgaagagat

SEQ ID NO: 262848 - DNA, 33 bp, Homo sapien
gcggtgaggattccacgatgttggtgaagagat

SEQ ID NO: 262849 - DNA, 33 bp, Homo sapien
caagtccatgttcagaacctgcacggcctcctc

SEQ ID NO: 262850 - DNA, 33 bp, Homo sapien
caagtccatgttcagagcctgcacggcctcctc

SEQ ID NO: 262851 - DNA, 33 bp, Homo sapien
aattcaacatgtgtcacggtaaacctggctctc

SEQ ID NO: 262852 - DNA, 33 bp, Homo sapien
aattcaacatgtgtcatggtaaacctggctctc

SEQ ID NO: 262853 - DNA, 33 bp, Homo sapien
ttggtatttttaagtacgtctttataatgaact

SEQ ID NO: 262854 - DNA, 33 bp, Homo sapien
ttggtatttttaagtatgtctttataatgaact

SEQ ID NO: 262855 - DNA, 33 bp, Homo sapien
aagattctagttacaaatgtgattgaaaataac

SEQ ID NO: 262856 - DNA, 33 bp, Homo sapien
aagattctagttacaagtgtgattgaaaataac

SEQ ID NO: 262857 - DNA, 33 bp, Homo sapien
agtatcagactcattacgcaatacttacatttt

SEQ ID NO: 262858 - DNA, 33 bp, Homo sapien
agtatcagactcattatgcaatacttacatttt

SEQ ID NO: 262859 - DNA, 33 bp, Homo sapien
atactgagggcattaagtaccacccttaagttt

SEQ ID NO: 262860 - DNA, 33 bp, Homo sapien
atactgagggcattaattaccacccttaagttt

SEQ ID NO: 262861 - DNA, 33 bp, Homo sapien
aaacatcctcaaactacattatctgagcaagtg

SEQ ID NO: 262862 - DNA, 33 bp, Homo sapien
aaacatcctcaaactatattatctgagcaagtg

SEQ ID NO: 262863 - DNA, 33 bp, Homo sapien
caagtcatactgttctcacctcatttgtgccaa

SEQ ID NO: 262864 - DNA, 33 bp, Homo sapien
caagtcatactgttcttacctcatttgtgccaa

SEQ ID NO: 262865 - DNA, 33 bp, Homo sapien
cctaaaacttccaaatcatgtggatcagtaaat

SEQ ID NO: 262866 - DNA, 33 bp, Homo sapien
cctaaaacttccaaattatgtggatcagtaaat

SEQ ID NO: 262867 - DNA, 33 bp, Homo sapien
ccccattctgcaaatgaaagtaaggctcagttg

SEQ ID NO: 262868 - DNA, 33 bp, Homo sapien
ccccattctgcaaatggaagtaaggctcagttg

SEQ ID NO: 262869 - DNA, 33 bp, Homo sapien
tggtcatctactggaagaatgttaggcatagaa

SEQ ID NO: 262870 - DNA, 33 bp, Homo sapien
tggtcatctactggaataatgttaggcatagaa

SEQ ID NO: 262871 - DNA, 33 bp, Homo sapien
actgccagcttaggacacataatttgtacattg

SEQ ID NO: 262872 - DNA, 33 bp, Homo sapien
actgccagcttaggacgcataatttgtacattg

SEQ ID NO: 262873 - DNA, 33 bp, Homo sapien
tgaataaacatttgtacgcttgagccctcttaa

SEQ ID NO: 262874 - DNA, 33 bp, Homo sapien
tgaataaacatttgtaggcttgagccctcttaa

SEQ ID NO: 262875 - DNA, 33 bp, Homo sapien
tggtagctgaaattggcattctatttatagcac

SEQ ID NO: 262876 - DNA, 33 bp, Homo sapien
tggtagctgaaattggtattctatttatagcac

SEQ ID NO: 262877 - DNA, 33 bp, Homo sapien
atttcttacgattttaagaccttttatgattaa

SEQ ID NO: 262878 - DNA, 33 bp, Homo sapien
atttcttacgattttaggaccttttatgattaa

SEQ ID NO: 262879 - DNA, 33 bp, Homo sapien
gcagaggggaaggagacatggtccctgttatta

SEQ ID NO: 262880 - DNA, 33 bp, Homo sapien
gcagaggggaaggagatatggtccctgttatta

SEQ ID NO: 262881 - DNA, 33 bp, Homo sapien
gcctggaagccgttaccccttcctttgtaaggc

SEQ ID NO: 262882 - DNA, 33 bp, Homo sapien
gcctggaagccgttactccttcctttgtaaggc

SEQ ID NO: 262883 - DNA, 33 bp, Homo sapien
actgtagatttgtcacaaagtatgataaaagca

SEQ ID NO: 262884 - DNA, 33 bp, Homo sapien
actgtagatttgtcacgaagtatgataaaagca

SEQ ID NO: 262885 - DNA, 33 bp, Homo sapien
gaaactaaaatctgtacgcattgaacaactccc

SEQ ID NO: 262886 - DNA, 33 bp, Homo sapien
gaaactaaaatctgtatgcattgaacaactccc

SEQ ID NO: 262887 - DNA, 33 bp, Homo sapien
agatgtctcactaatccctcaaactccaccttt

SEQ ID NO: 262888 - DNA, 33 bp, Homo sapien
agatgtctcactaatctctcaaactccaccttt

SEQ ID NO: 262889 - DNA, 33 bp, Homo sapien
atatcaatgaactatacacattctacggtttgt

SEQ ID NO: 262890 - DNA, 33 bp, Homo sapien
atatcaatgaactatatacattctacggtttgt

SEQ ID NO: 262891 - DNA, 33 bp, Homo sapien
ggagacaactatgagtgaccttgaggctaccta

SEQ ID NO: 262892 - DNA, 33 bp, Homo sapien
ggagacaactatgagttaccttgaggctaccta

SEQ ID NO: 262893 - DNA, 33 bp, Homo sapien
gattgaaatggtgcaacgaggagtattgattaa

SEQ ID NO: 262894 - DNA, 33 bp, Homo sapien
gattgaaatggtgcaatgaggagtattgattaa

SEQ ID NO: 262895 - DNA, 33 bp, Homo sapien
cacaattaacagtacaccccactctcaacttgg

SEQ ID NO: 262896 - DNA, 33 bp, Homo sapien
cacaattaacagtacagcccactctcaacttgg

SEQ ID NO: 262897 - DNA, 33 bp, Homo sapien
tcccttgctgtgactacggccttgagcagaaca

SEQ ID NO: 262898 - DNA, 33 bp, Homo sapien
tcccttgctgtgactatggccttgagcagaaca

SEQ ID NO: 262899 - DNA, 33 bp, Homo sapien
gtgggtactgtcctaagtgtccattatggcatt

SEQ ID NO: 262900 - DNA, 33 bp, Homo sapien
gtgggtactgtcctaattgtccattatggcatt

SEQ ID NO: 262901 - DNA, 33 bp, Homo sapien
ggcattgcctcccttactaaagtgttcctctga

SEQ ID NO: 262902 - DNA, 33 bp, Homo sapien
ggcattgcctcccttattaaagtgttcctctga

SEQ ID NO: 262903 - DNA, 33 bp, Homo sapien
gaagtgacttgttatacgatttctgcaagaaaa

SEQ ID NO: 262904 - DNA, 33 bp, Homo sapien
gaagtgacttgttatatgatttctgcaagaaaa

SEQ ID NO: 262905 - DNA, 33 bp, Homo sapien
ctgctctggcctactaactgttaccactgagag

SEQ ID NO: 262906 - DNA, 33 bp, Homo sapien
ctgctctggcctactatctgttaccactgagag

SEQ ID NO: 262907 - DNA, 33 bp, Homo sapien
caatatctggtcctggaaatgtcagactcaaaa

SEQ ID NO: 262908 - DNA, 33 bp, Homo sapien
caatatctggtcctgggaatgtcagactcaaaa

SEQ ID NO: 262909 - DNA, 33 bp, Homo sapien
gatttctgatttagttgcaagatgtaaaaatcc

SEQ ID NO: 262910 - DNA, 33 bp, Homo sapien
gatttctgatttagtttcaagatgtaaaaatcc

SEQ ID NO: 262911 - DNA, 33 bp, Homo sapien
agtttaactagattcaactgtcaatttttgctt

SEQ ID NO: 262912 - DNA, 33 bp, Homo sapien
agtttaactagattcagctgtcaatttttgctt

SEQ ID NO: 262913 - DNA, 33 bp, Homo sapien
tgacttaaacttggaccaagaacacagctaccc

SEQ ID NO: 262914 - DNA, 33 bp, Homo sapien
tgacttaaacttggactaagaacacagctaccc

SEQ ID NO: 262915 - DNA, 33 bp, Homo sapien
ctgtctgctgactactcaaatggaaatgcgcct

SEQ ID NO: 262916 - DNA, 33 bp, Homo sapien
ctgtctgctgactactgaaatggaaatgcgcct

SEQ ID NO: 262917 - DNA, 33 bp, Homo sapien
tgtgaagttctagcctaaatgccgtgttgcccc

SEQ ID NO: 262918 - DNA, 33 bp, Homo sapien
tgtgaagttctagcctgaatgccgtgttgcccc

SEQ ID NO: 262919 - DNA, 33 bp, Homo sapien
cattttgactattgtggagtttagagactccaa

SEQ ID NO: 262920 - DNA, 33 bp, Homo sapien
cattttgactattgtgtagtttagagactccaa

SEQ ID NO: 262921 - DNA, 33 bp, Homo sapien
gggaaagaatgttgggaatgagttttatttaca

SEQ ID NO: 262922 - DNA, 33 bp, Homo sapien
gggaaagaatgttggggatgagttttatttaca

SEQ ID NO: 262923 - DNA, 33 bp, Homo sapien
aactaaaagctttgtacaacgcgtgctgctatg

SEQ ID NO: 262924 - DNA, 33 bp, Homo sapien
aactaaaagctttgtataacgcgtgctgctatg

SEQ ID NO: 262925 - DNA, 33 bp, Homo sapien
gcattcagatcccaaaggaaaacgcacctagaa

SEQ ID NO: 262926 - DNA, 33 bp, Homo sapien
gcattcagatcccaaatgaaaacgcacctagaa

SEQ ID NO: 262927 - DNA, 33 bp, Homo sapien
gtcaaatattgtataacgcaaagagaaaagaga

SEQ ID NO: 262928 - DNA, 33 bp, Homo sapien
gtcaaatattgtataatgcaaagagaaaagaga

SEQ ID NO: 262929 - DNA, 33 bp, Homo sapien
tttgtgcagtggacagccctatcaggaagagta

SEQ ID NO: 262930 - DNA, 33 bp, Homo sapien
tttgtgcagtggacagtcctatcaggaagagta

SEQ ID NO: 262931 - DNA, 33 bp, Homo sapien
acagaatgggccacaaaacttgcttacttgtgt

SEQ ID NO: 262932 - DNA, 33 bp, Homo sapien
acagaatgggccacaagacttgcttacttgtgt

SEQ ID NO: 262933 - DNA, 33 bp, Homo sapien
ggttgataagtctaccaatgttaaaaacgaggc

SEQ ID NO: 262934 - DNA, 33 bp, Homo sapien
ggttgataagtctaccgatgttaaaaacgaggc

SEQ ID NO: 262935 - DNA, 33 bp, Homo sapien
attcttccagtcctcaacactgcatccagtccc

SEQ ID NO: 262936 - DNA, 33 bp, Homo sapien
attcttccagtcctcagcactgcatccagtccc

SEQ ID NO: 262937 - DNA, 33 bp, Homo sapien
ggaaggaaggatttcaagattcccagtttgggt

SEQ ID NO: 262938 - DNA, 33 bp, Homo sapien
ggaaggaaggatttcaggattcccagtttgggt

SEQ ID NO: 262939 - DNA, 33 bp, Homo sapien
tgtattcttgccaagaagtggggagcttccagg

SEQ ID NO: 262940 - DNA, 33 bp, Homo sapien
tgtattcttgccaagaggtggggagcttccagg

SEQ ID NO: 262941 - DNA, 33 bp, Homo sapien
ttacagaaaacagacaagcaatatccatatagc

SEQ ID NO: 262942 - DNA, 33 bp, Homo sapien
ttacagaaaacagacaggcaatatccatatagc

SEQ ID NO: 262943 - DNA, 33 bp, Homo sapien
cttcctccaacatcacactgctggctagcagca

SEQ ID NO: 262944 - DNA, 33 bp, Homo sapien
cttcctccaacatcacgctgctggctagcagca

SEQ ID NO: 262945 - DNA, 33 bp, Homo sapien
catcaaggtttgtttaacatcttctgagtgatg

SEQ ID NO: 262946 - DNA, 33 bp, Homo sapien
catcaaggtttgtttagcatcttctgagtgatg

SEQ ID NO: 262947 - DNA, 33 bp, Homo sapien
attggccttagaattacagaaggttagagctga

SEQ ID NO: 262948 - DNA, 33 bp, Homo sapien
attggccttagaattatagaaggttagagctga

SEQ ID NO: 262949 - DNA, 33 bp, Homo sapien
aagaaacatcaaaatacaggtggtccaggggaa

SEQ ID NO: 262950 - DNA, 33 bp, Homo sapien
aagaaacatcaaaatataggtggtccaggggaa

SEQ ID NO: 262951 - DNA, 33 bp, Homo sapien
gagaggctcagagataaccagtgaagctgtgtg

SEQ ID NO: 262952 - DNA, 33 bp, Homo sapien
gagaggctcagagatagccagtgaagctgtgtg

SEQ ID NO: 262953 - DNA, 33 bp, Homo sapien
atgccgtgtagcttcaaagagaacaataggaaa

SEQ ID NO: 262954 - DNA, 33 bp, Homo sapien
atgccgtgtagcttcagagagaacaataggaaa

SEQ ID NO: 262955 - DNA, 33 bp, Homo sapien
tgccagttttcagagcaaatctaattaaactaa

SEQ ID NO: 262956 - DNA, 33 bp, Homo sapien
tgccagttttcagagcgaatctaattaaactaa

SEQ ID NO: 262957 - DNA, 33 bp, Homo sapien
gggattatggatgtgaaccagccttccttcctt

SEQ ID NO: 262958 - DNA, 33 bp, Homo sapien
gggattatggatgtgagccagccttccttcctt

SEQ ID NO: 262959 - DNA, 33 bp, Homo sapien
cttgaaggttgtgaaccacaaagcatgtatcct

SEQ ID NO: 262960 - DNA, 33 bp, Homo sapien
cttgaaggttgtgaactacaaagcatgtatcct

SEQ ID NO: 262961 - DNA, 33 bp, Homo sapien
ttattacaacgagcaacctttagatattatgat

SEQ ID NO: 262962 - DNA, 33 bp, Homo sapien
ttattacaacgagcaatctttagatattatgat

SEQ ID NO: 262963 - DNA, 33 bp, Homo sapien
acataagttgtctaaaactctcctacccaatat

SEQ ID NO: 262964 - DNA, 33 bp, Homo sapien
acataagttgtctaaacctctcctacccaatat

SEQ ID NO: 262965 - DNA, 33 bp, Homo sapien
ggaaatgaaaacagaaagaattgctgaaggtag

SEQ ID NO: 262966 - DNA, 33 bp, Homo sapien
ggaaatgaaaacagaatgaattgctgaaggtag

SEQ ID NO: 262967 - DNA, 33 bp, Homo sapien
aagaaaatatgagctacatagtggccaatcata

SEQ ID NO: 262968 - DNA, 33 bp, Homo sapien
aagaaaatatgagctatatagtggccaatcata

SEQ ID NO: 262969 - DNA, 33 bp, Homo sapien
agtggcagagttaacaaaagtgtagagaacaga

SEQ ID NO: 262970 - DNA, 33 bp, Homo sapien
agtggcagagttaacagaagtgtagagaacaga

SEQ ID NO: 262971 - DNA, 33 bp, Homo sapien
gattacaggcttgcaccatctcaccaagataat

SEQ ID NO: 262972 - DNA, 33 bp, Homo sapien
gattacaggcttgcactatctcaccaagataat

SEQ ID NO: 262973 - DNA, 33 bp, Homo sapien
agttttgcttgttttcaaactctatataaattg

SEQ ID NO: 262974 - DNA, 33 bp, Homo sapien
agttttgcttgttttcgaactctatataaattg

SEQ ID NO: 262975 - DNA, 33 bp, Homo sapien
cctggagagcaatttaaaaacctcagttgcaag

SEQ ID NO: 262976 - DNA, 33 bp, Homo sapien
cctggagagcaatttacaaacctcagttgcaag

SEQ ID NO: 262977 - DNA, 33 bp, Homo sapien
tagggaaggaagctacactcctagtataccaga

SEQ ID NO: 262978 - DNA, 33 bp, Homo sapien
tagggaaggaagctactctcctagtataccaga

SEQ ID NO: 262979 - DNA, 33 bp, Homo sapien
aaatttaatttgaagaatatcagaggaagaaag

SEQ ID NO: 262980 - DNA, 33 bp, Homo sapien
aaatttaatttgaagactatcagaggaagaaag

SEQ ID NO: 262981 - DNA, 33 bp, Homo sapien
agccctactatataataagctgatacctctctc

SEQ ID NO: 262982 - DNA, 33 bp, Homo sapien
agccctactatataatgagctgatacctctctc

SEQ ID NO: 262983 - DNA, 33 bp, Homo sapien
tgagctcagctccaaacgcaggaaagatggcag

SEQ ID NO: 262984 - DNA, 33 bp, Homo sapien
tgagctcagctccaaatgcaggaaagatggcag

SEQ ID NO: 262985 - DNA, 33 bp, Homo sapien
acatgctgaatataacaaagaagtatttaaaac

SEQ ID NO: 262986 - DNA, 33 bp, Homo sapien
acatgctgaatataacgaagaagtatttaaaac

SEQ ID NO: 262987 - DNA, 33 bp, Homo sapien
ctttcggaaacatcccaaaacttcaggaaagag

SEQ ID NO: 262988 - DNA, 33 bp, Homo sapien
ctttcggaaacatcccgaaacttcaggaaagag

SEQ ID NO: 262989 - DNA, 33 bp, Homo sapien
aactgtgtagtgtatcaaatattctggtttctt

SEQ ID NO: 262990 - DNA, 33 bp, Homo sapien
aactgtgtagtgtatcgaatattctggtttctt

SEQ ID NO: 262991 - DNA, 33 bp, Homo sapien
tggagaatcctgttgccgatagtttgggattac

SEQ ID NO: 262992 - DNA, 33 bp, Homo sapien
tggagaatcctgttgctgatagtttgggattac

SEQ ID NO: 262993 - DNA, 33 bp, Homo sapien
gaaccccaaaagagaaaagaaacattagaatac

SEQ ID NO: 262994 - DNA, 33 bp, Homo sapien
gaaccccaaaagagaagagaaacattagaatac

SEQ ID NO: 262995 - DNA, 33 bp, Homo sapien
tgcaacttgatttctaactccttaatcccaggt

SEQ ID NO: 262996 - DNA, 33 bp, Homo sapien
tgcaacttgatttctagctccttaatcccaggt

SEQ ID NO: 262997 - DNA, 33 bp, Homo sapien
aatgctgtttcagtgacgcaaagtagagaagtt

SEQ ID NO: 262998 - DNA, 33 bp, Homo sapien
aatgctgtttcagtgatgcaaagtagagaagtt

SEQ ID NO: 262999 - DNA, 33 bp, Homo sapien
ggaattcaatactctcactcgacttctctacac

SEQ ID NO: 263000 - DNA, 33 bp, Homo sapien
ggaattcaatactctctctcgacttctctacac

SEQ ID NO: 263001 - DNA, 33 bp, Homo sapien
tacctgtgttacagaccatgggctcttagattc

SEQ ID NO: 263002 - DNA, 33 bp, Homo sapien
tacctgtgttacagactatgggctcttagattc

SEQ ID NO: 263003 - DNA, 33 bp, Homo sapien
caacgtttgaaaaaaactttgatttctttgtct

SEQ ID NO: 263004 - DNA, 33 bp, Homo sapien
caacgtttgaaaaaaattttgatttctttgtct

SEQ ID NO: 263005 - DNA, 33 bp, Homo sapien
agagcttgacacatcacagttttaacaaatgtg

SEQ ID NO: 263006 - DNA, 33 bp, Homo sapien
agagcttgacacatcatagttttaacaaatgtg

SEQ ID NO: 263007 - DNA, 33 bp, Homo sapien
tgatggtgaaaaaacacaagtctaggccaaagc

SEQ ID NO: 263008 - DNA, 33 bp, Homo sapien
tgatggtgaaaaaacagaagtctaggccaaagc

SEQ ID NO: 263009 - DNA, 33 bp, Homo sapien
aatgtgcctacttgctaaagtttatatgtaatc

SEQ ID NO: 263010 - DNA, 33 bp, Homo sapien
aatgtgcctacttgctcaagtttatatgtaatc

SEQ ID NO: 263011 - DNA, 33 bp, Homo sapien
actcatggaatttctacagtagacacatttgta

SEQ ID NO: 263012 - DNA, 33 bp, Homo sapien
actcatggaatttctatagtagacacatttgta

SEQ ID NO: 263013 - DNA, 33 bp, Homo sapien
aggcagctactaggccaaccaacaatcatgtag

SEQ ID NO: 263014 - DNA, 33 bp, Homo sapien
aggcagctactaggccgaccaacaatcatgtag

SEQ ID NO: 263015 - DNA, 33 bp, Homo sapien
tagacgttagcccccactgaaccatgctttctg

SEQ ID NO: 263016 - DNA, 33 bp, Homo sapien
tagacgttagcccccattgaaccatgctttctg

SEQ ID NO: 263017 - DNA, 33 bp, Homo sapien
tagggtgtgaagagataaaaaaggagacaattg

SEQ ID NO: 263018 - DNA, 33 bp, Homo sapien
tagggtgtgaagagattaaaaaggagacaattg

SEQ ID NO: 263019 - DNA, 33 bp, Homo sapien
atctcttcacaccctacgtacaccccgctcccg

SEQ ID NO: 263020 - DNA, 33 bp, Homo sapien
atctcttcacaccctatgtacaccccgctcccg

SEQ ID NO: 263021 - DNA, 33 bp, Homo sapien
agatgtcaccttggtcaaatcattctacttaga

SEQ ID NO: 263022 - DNA, 33 bp, Homo sapien
agatgtcaccttggtcgaatcattctacttaga

SEQ ID NO: 263023 - DNA, 33 bp, Homo sapien
gccatgcattgtaagaagattagaagaaagaaa

SEQ ID NO: 263024 - DNA, 33 bp, Homo sapien
gccatgcattgtaagatgattagaagaaagaaa

SEQ ID NO: 263025 - DNA, 33 bp, Homo sapien
atccttaagaattagacgatggagctaagccat

SEQ ID NO: 263026 - DNA, 33 bp, Homo sapien
atccttaagaattagatgatggagctaagccat

SEQ ID NO: 263027 - DNA, 33 bp, Homo sapien
agcaactagttaacaacttcatcatgggaacaa

SEQ ID NO: 263028 - DNA, 33 bp, Homo sapien
agcaactagttaacaatttcatcatgggaacaa

SEQ ID NO: 263029 - DNA, 33 bp, Homo sapien
ttaattttgtggttgactagttgcaggagtact

SEQ ID NO: 263030 - DNA, 33 bp, Homo sapien
ttaattttgtggttgattagttgcaggagtact

SEQ ID NO: 263031 - DNA, 33 bp, Homo sapien
ctctccattatctttgaagccactttttattgt

SEQ ID NO: 263032 - DNA, 33 bp, Homo sapien
ctctccattatctttggagccactttttattgt

SEQ ID NO: 263033 - DNA, 33 bp, Homo sapien
agcaaggctaaaatataacggagcggaatgact

SEQ ID NO: 263034 - DNA, 33 bp, Homo sapien
agcaaggctaaaatattacggagcggaatgact

SEQ ID NO: 263035 - DNA, 33 bp, Homo sapien
ggtaagctgtcatctcccttcgtaattataaaa

SEQ ID NO: 263036 - DNA, 33 bp, Homo sapien
ggtaagctgtcatctctcttcgtaattataaaa

SEQ ID NO: 263037 - DNA, 33 bp, Homo sapien
ctgtacatattcagtaaagacacaatcatccat

SEQ ID NO: 263038 - DNA, 33 bp, Homo sapien
ctgtacatattcagtatagacacaatcatccat

SEQ ID NO: 263039 - DNA, 33 bp, Homo sapien
catacatgtcccttgaagaatttggactttatg

SEQ ID NO: 263040 - DNA, 33 bp, Homo sapien
catacatgtcccttgaggaatttggactttatg

SEQ ID NO: 263041 - DNA, 33 bp, Homo sapien
cctccctggcaggatacgtcattaggagagctc

SEQ ID NO: 263042 - DNA, 33 bp, Homo sapien
cctccctggcaggataggtcattaggagagctc

SEQ ID NO: 263043 - DNA, 33 bp, Homo sapien
tgcagccaccaaaaatcatgggtaccaagagtc

SEQ ID NO: 263044 - DNA, 33 bp, Homo sapien
tgcagccaccaaaaatgatgggtaccaagagtc

SEQ ID NO: 263045 - DNA, 33 bp, Homo sapien
gtgccatttttcgataccaacctattagaaagc

SEQ ID NO: 263046 - DNA, 33 bp, Homo sapien
gtgccatttttcgatatcaacctattagaaagc

SEQ ID NO: 263047 - DNA, 33 bp, Homo sapien
agttatgcaacaaaaaatgcaactaatttttag

SEQ ID NO: 263048 - DNA, 33 bp, Homo sapien
agttatgcaacaaaaactgcaactaatttttag

SEQ ID NO: 263049 - DNA, 33 bp, Homo sapien
aaaattaaagaattgccattgaaaatttaactt

SEQ ID NO: 263050 - DNA, 33 bp, Homo sapien
aaaattaaagaattgcgattgaaaatttaactt

SEQ ID NO: 263051 - DNA, 33 bp, Homo sapien
tggatcaaacttctgaatataacgattgatgtg

SEQ ID NO: 263052 - DNA, 33 bp, Homo sapien
tggatcaaacttctgagtataacgattgatgtg

SEQ ID NO: 263053 - DNA, 33 bp, Homo sapien
tctcacatatgcagaacgtctaggcggcagagg

SEQ ID NO: 263054 - DNA, 33 bp, Homo sapien
tctcacatatgcagaatgtctaggcggcagagg

SEQ ID NO: 263055 - DNA, 33 bp, Homo sapien
gaaattgcctgtgtgccgacatcaacccagggt

SEQ ID NO: 263056 - DNA, 33 bp, Homo sapien
gaaattgcctgtgtgctgacatcaacccagggt

SEQ ID NO: 263057 - DNA, 33 bp, Homo sapien
tgcactaagaataataccagatgaactcaactc

SEQ ID NO: 263058 - DNA, 33 bp, Homo sapien
tgcactaagaataatagcagatgaactcaactc

SEQ ID NO: 263059 - DNA, 33 bp, Homo sapien
atagtagcatcattgaaagtattaataagaaat

SEQ ID NO: 263060 - DNA, 33 bp, Homo sapien
atagtagcatcattgagagtattaataagaaat

SEQ ID NO: 263061 - DNA, 33 bp, Homo sapien
acactagtggatgggcaaccatatttggcacag

SEQ ID NO: 263062 - DNA, 33 bp, Homo sapien
acactagtggatgggcgaccatatttggcacag

SEQ ID NO: 263063 - DNA, 33 bp, Homo sapien
gcgcatcttctgaccccagtgttttgttgatct

SEQ ID NO: 263064 - DNA, 33 bp, Homo sapien
gcgcatcttctgaccctagtgttttgttgatct

SEQ ID NO: 263065 - DNA, 33 bp, Homo sapien
cttactaggtatgctacgacacaggcctcaata

SEQ ID NO: 263066 - DNA, 33 bp, Homo sapien
cttactaggtatgctatgacacaggcctcaata

SEQ ID NO: 263067 - DNA, 33 bp, Homo sapien
atgatctcaactccaccgtgaatatttagagca

SEQ ID NO: 263068 - DNA, 33 bp, Homo sapien
atgatctcaactccactgtgaatatttagagca

SEQ ID NO: 263069 - DNA, 33 bp, Homo sapien
aaatgccttaacctacgaattggctgagctgaa

SEQ ID NO: 263070 - DNA, 33 bp, Homo sapien
aaatgccttaacctactaattggctgagctgaa

SEQ ID NO: 263071 - DNA, 33 bp, Homo sapien
gacctcctggaggtgaggtttaagttgtctttc

SEQ ID NO: 263072 - DNA, 33 bp, Homo sapien
gacctcctggaggtgatgtttaagttgtctttc

SEQ ID NO: 263073 - DNA, 33 bp, Homo sapien
ttcagcacagaaagacactcgctaaaagttagg

SEQ ID NO: 263074 - DNA, 33 bp, Homo sapien
ttcagcacagaaagacgctcgctaaaagttagg

SEQ ID NO: 263075 - DNA, 33 bp, Homo sapien
cctggtgtttagcaaaatccttgacacagttct

SEQ ID NO: 263076 - DNA, 33 bp, Homo sapien
cctggtgtttagcaaagtccttgacacagttct

SEQ ID NO: 263077 - DNA, 33 bp, Homo sapien
caaacattaatgggccaaagaatcacatgggat

SEQ ID NO: 263078 - DNA, 33 bp, Homo sapien
caaacattaatgggccgaagaatcacatgggat

SEQ ID NO: 263079 - DNA, 33 bp, Homo sapien
tttgatactctggaaccgctgatggttatgtgg

SEQ ID NO: 263080 - DNA, 33 bp, Homo sapien
tttgatactctggaactgctgatggttatgtgg

SEQ ID NO: 263081 - DNA, 33 bp, Homo sapien
tggttggaatgcaaaacaaatcaaagatgcaag

SEQ ID NO: 263082 - DNA, 33 bp, Homo sapien
tggttggaatgcaaaataaatcaaagatgcaag

SEQ ID NO: 263083 - DNA, 33 bp, Homo sapien
gcaatacgataacggaactatcacctcaccttt

SEQ ID NO: 263084 - DNA, 33 bp, Homo sapien
gcaatacgataacggagctatcacctcaccttt

SEQ ID NO: 263085 - DNA, 33 bp, Homo sapien
tctccatctgcttcctaagaacatggcagctct

SEQ ID NO: 263086 - DNA, 33 bp, Homo sapien
tctccatctgcttcctgagaacatggcagctct

SEQ ID NO: 263087 - DNA, 33 bp, Homo sapien
gaagtggtgtttagtacgctaaaatcttagaag

SEQ ID NO: 263088 - DNA, 33 bp, Homo sapien
gaagtggtgtttagtaggctaaaatcttagaag

SEQ ID NO: 263089 - DNA, 33 bp, Homo sapien
tattgtaattttagcaccaatgtgtgtctcccg

SEQ ID NO: 263090 - DNA, 33 bp, Homo sapien
tattgtaattttagcatcaatgtgtgtctcccg

SEQ ID NO: 263091 - DNA, 33 bp, Homo sapien
acaggtagcactatcacctttccccaaccctac

SEQ ID NO: 263092 - DNA, 33 bp, Homo sapien
acaggtagcactatcatctttccccaaccctac

SEQ ID NO: 263093 - DNA, 33 bp, Homo sapien
atgagtttgcttagaacttagaggtaagaaatg

SEQ ID NO: 263094 - DNA, 33 bp, Homo sapien
atgagtttgcttagaatttagaggtaagaaatg

SEQ ID NO: 263095 - DNA, 33 bp, Homo sapien
gtgatctgtggtaaaacgattgcatgttaatct

SEQ ID NO: 263096 - DNA, 33 bp, Homo sapien
gtgatctgtggtaaaatgattgcatgttaatct

SEQ ID NO: 263097 - DNA, 33 bp, Homo sapien
atgttgatgacaaagaacttatcattatttcaa

SEQ ID NO: 263098 - DNA, 33 bp, Homo sapien
atgttgatgacaaagagcttatcattatttcaa

SEQ ID NO: 263099 - DNA, 33 bp, Homo sapien
gagcagggctgggtagaaataagaaattcaaag

SEQ ID NO: 263100 - DNA, 33 bp, Homo sapien
gagcagggctgggtaggaataagaaattcaaag

SEQ ID NO: 263101 - DNA, 33 bp, Homo sapien
aaaagaaccaagtggacattgtagagctaaaaa

SEQ ID NO: 263102 - DNA, 33 bp, Homo sapien
aaaagaaccaagtggatattgtagagctaaaaa

SEQ ID NO: 263103 - DNA, 33 bp, Homo sapien
agaattgtgaacatcaacttctctgaataatca

SEQ ID NO: 263104 - DNA, 33 bp, Homo sapien
agaattgtgaacatcagcttctctgaataatca

SEQ ID NO: 263105 - DNA, 33 bp, Homo sapien
atagcatatgttgccactgcattacaataaggg

SEQ ID NO: 263106 - DNA, 33 bp, Homo sapien
atagcatatgttgccagtgcattacaataaggg

SEQ ID NO: 263107 - DNA, 33 bp, Homo sapien
caccttgtaacttttcacacatctcctttgcat

SEQ ID NO: 263108 - DNA, 33 bp, Homo sapien
caccttgtaacttttcgcacatctcctttgcat

SEQ ID NO: 263109 - DNA, 33 bp, Homo sapien
acatccagttatgaaaacaacatagaagcttgc

SEQ ID NO: 263110 - DNA, 33 bp, Homo sapien
acatccagttatgaaagcaacatagaagcttgc

SEQ ID NO: 263111 - DNA, 33 bp, Homo sapien
gcactgtttgcaataccgtaatatcaagttcaa

SEQ ID NO: 263112 - DNA, 33 bp, Homo sapien
gcactgtttgcaatactgtaatatcaagttcaa

SEQ ID NO: 263113 - DNA, 33 bp, Homo sapien
tttttccttgtccaaaatacttctcagtgggga

SEQ ID NO: 263114 - DNA, 33 bp, Homo sapien
tttttccttgtccaaagtacttctcagtgggga

SEQ ID NO: 263115 - DNA, 33 bp, Homo sapien
actgatgagttattaacggttcatgatctgtag

SEQ ID NO: 263116 - DNA, 33 bp, Homo sapien
actgatgagttattaatggttcatgatctgtag

SEQ ID NO: 263117 - DNA, 33 bp, Homo sapien
cccggggcctcaatgcacaacttccatttggta

SEQ ID NO: 263118 - DNA, 33 bp, Homo sapien
cccggggcctcaatgcgcaacttccatttggta

SEQ ID NO: 263119 - DNA, 33 bp, Homo sapien
ctgattaacaatgagacgtctattactttcctg

SEQ ID NO: 263120 - DNA, 33 bp, Homo sapien
ctgattaacaatgagatgtctattactttcctg

SEQ ID NO: 263121 - DNA, 33 bp, Homo sapien
aaatgttaggagcacaataatggaatcataaac

SEQ ID NO: 263122 - DNA, 33 bp, Homo sapien
aaatgttaggagcacagtaatggaatcataaac

SEQ ID NO: 263123 - DNA, 33 bp, Homo sapien
atcccttagggtggcactaaataccctacggat

SEQ ID NO: 263124 - DNA, 33 bp, Homo sapien
atcccttagggtggcattaaataccctacggat

SEQ ID NO: 263125 - DNA, 33 bp, Homo sapien
ggattctgatgttgcaatagctaaccctgaaac

SEQ ID NO: 263126 - DNA, 33 bp, Homo sapien
ggattctgatgttgcagtagctaaccctgaaac

SEQ ID NO: 263127 - DNA, 33 bp, Homo sapien
gagcccagagataaaacaggaagcgtaaagtgc

SEQ ID NO: 263128 - DNA, 33 bp, Homo sapien
gagcccagagataaaataggaagcgtaaagtgc

SEQ ID NO: 263129 - DNA, 33 bp, Homo sapien
attaaattttgcattacgggaatcggccgattg

SEQ ID NO: 263130 - DNA, 33 bp, Homo sapien
attaaattttgcattatgggaatcggccgattg

SEQ ID NO: 263131 - DNA, 33 bp, Homo sapien
ttccttaagacggaacccagagttgaaaggagg

SEQ ID NO: 263132 - DNA, 33 bp, Homo sapien
ttccttaagacggaactcagagttgaaaggagg

SEQ ID NO: 263133 - DNA, 33 bp, Homo sapien
tctgagatctctgtaagaatgttatctttctca

SEQ ID NO: 263134 - DNA, 33 bp, Homo sapien
tctgagatctctgtaataatgttatctttctca

SEQ ID NO: 263135 - DNA, 33 bp, Homo sapien
acgtttcgcaggtgccccgacctctaagccctt

SEQ ID NO: 263136 - DNA, 33 bp, Homo sapien
acgtttcgcaggtgcctcgacctctaagccctt

SEQ ID NO: 263137 - DNA, 33 bp, Homo sapien
tgcgtctttgatcccaactgagtgaaatctgtg

SEQ ID NO: 263138 - DNA, 33 bp, Homo sapien
tgcgtctttgatcccagctgagtgaaatctgtg

SEQ ID NO: 263139 - DNA, 33 bp, Homo sapien
cctccgcaagttggaaaagtcaagaaaaaggat

SEQ ID NO: 263140 - DNA, 33 bp, Homo sapien
cctccgcaagttggaagagtcaagaaaaaggat

SEQ ID NO: 263141 - DNA, 33 bp, Homo sapien
tctagagggaggaagggatactctagcctaagc

SEQ ID NO: 263142 - DNA, 33 bp, Homo sapien
tctagagggaggaaggtatactctagcctaagc

SEQ ID NO: 263143 - DNA, 33 bp, Homo sapien
ggtgagggagagacaactgttggggtgagattc

SEQ ID NO: 263144 - DNA, 33 bp, Homo sapien
ggtgagggagagacaattgttggggtgagattc

SEQ ID NO: 263145 - DNA, 33 bp, Homo sapien
ttgataatctgggtagaaaaatcagatccactg

SEQ ID NO: 263146 - DNA, 33 bp, Homo sapien
ttgataatctgggtaggaaaatcagatccactg

SEQ ID NO: 263147 - DNA, 33 bp, Homo sapien
atgaaatacaataaaccgagcataaaacttttt

SEQ ID NO: 263148 - DNA, 33 bp, Homo sapien
atgaaatacaataaactgagcataaaacttttt

SEQ ID NO: 263149 - DNA, 33 bp, Homo sapien
acaatgccctttacaacgcgagatgggacctcc

SEQ ID NO: 263150 - DNA, 33 bp, Homo sapien
acaatgccctttacaatgcgagatgggacctcc

SEQ ID NO: 263151 - DNA, 33 bp, Homo sapien
agggcttagcggcaagcagcaagtcagtacttt

SEQ ID NO: 263152 - DNA, 33 bp, Homo sapien
agggcttagcggcaaggagcaagtcagtacttt

SEQ ID NO: 263153 - DNA, 33 bp, Homo sapien
tgccactattttttaagtatctgcttccatgtc

SEQ ID NO: 263154 - DNA, 33 bp, Homo sapien
tgccactattttttaattatctgcttccatgtc

SEQ ID NO: 263155 - DNA, 33 bp, Homo sapien
tttggtaaatccatacaggcctaaaatcttctt

SEQ ID NO: 263156 - DNA, 33 bp, Homo sapien
tttggtaaatccataccggcctaaaatcttctt

SEQ ID NO: 263157 - DNA, 33 bp, Homo sapien
tccagccctattggcaacttttaaatagaactg

SEQ ID NO: 263158 - DNA, 33 bp, Homo sapien
tccagccctattggcagcttttaaatagaactg

SEQ ID NO: 263159 - DNA, 33 bp, Homo sapien
ccttgaggaattttacacaagagaatgaaacaa

SEQ ID NO: 263160 - DNA, 33 bp, Homo sapien
ccttgaggaattttacgcaagagaatgaaacaa

SEQ ID NO: 263161 - DNA, 33 bp, Homo sapien
gacctttccctttggcaatctctatctaccaac

SEQ ID NO: 263162 - DNA, 33 bp, Homo sapien
gacctttccctttggcgatctctatctaccaac

SEQ ID NO: 263163 - DNA, 33 bp, Homo sapien
ctctacagttccttgacagaggctgtttacccg

SEQ ID NO: 263164 - DNA, 33 bp, Homo sapien
ctctacagttccttgagagaggctgtttacccg

SEQ ID NO: 263165 - DNA, 33 bp, Homo sapien
ggtggaagacagacgacgtgcaagaagtgtgtc

SEQ ID NO: 263166 - DNA, 33 bp, Homo sapien
ggtggaagacagacgatgtgcaagaagtgtgtc

SEQ ID NO: 263167 - DNA, 33 bp, Homo sapien
cctgcccatctggtcacgcagcttccttaaata

SEQ ID NO: 263168 - DNA, 33 bp, Homo sapien
cctgcccatctggtcatgcagcttccttaaata

SEQ ID NO: 263169 - DNA, 33 bp, Homo sapien
agtcagtatctgcttcacaattggtttcatgtt

SEQ ID NO: 263170 - DNA, 33 bp, Homo sapien
agtcagtatctgcttcgcaattggtttcatgtt

SEQ ID NO: 263171 - DNA, 33 bp, Homo sapien
agtgaaagtggcttcaaatagaacttttccagt

SEQ ID NO: 263172 - DNA, 33 bp, Homo sapien
agtgaaagtggcttcagatagaacttttccagt

SEQ ID NO: 263173 - DNA, 33 bp, Homo sapien
caacaaatcaaaggttaaaatctgcctgcatag

SEQ ID NO: 263174 - DNA, 33 bp, Homo sapien
caacaaatcaaaggttgaaatctgcctgcatag

SEQ ID NO: 263175 - DNA, 33 bp, Homo sapien
aatgtgttgaaatcacaaaggctgaaggaatag

SEQ ID NO: 263176 - DNA, 33 bp, Homo sapien
aatgtgttgaaatcacgaaggctgaaggaatag

SEQ ID NO: 263177 - DNA, 33 bp, Homo sapien
ttcagaatgaaagccacgctaattattgaacca

SEQ ID NO: 263178 - DNA, 33 bp, Homo sapien
ttcagaatgaaagccatgctaattattgaacca

SEQ ID NO: 263179 - DNA, 33 bp, Homo sapien
ggtgctgtatgaagaaataaagattgattgtga

SEQ ID NO: 263180 - DNA, 33 bp, Homo sapien
ggtgctgtatgaagaagtaaagattgattgtga

SEQ ID NO: 263181 - DNA, 33 bp, Homo sapien
ttgtcctcttacaacacaggtaccaaagaaggg

SEQ ID NO: 263182 - DNA, 33 bp, Homo sapien
ttgtcctcttacaacataggtaccaaagaaggg

SEQ ID NO: 263183 - DNA, 33 bp, Homo sapien
aatatttatatgcaaccagagattaatttgaga

SEQ ID NO: 263184 - DNA, 33 bp, Homo sapien
aatatttatatgcaactagagattaatttgaga

SEQ ID NO: 263185 - DNA, 33 bp, Homo sapien
tttaacatacttgtcacgagagggtaatacttt

SEQ ID NO: 263186 - DNA, 33 bp, Homo sapien
tttaacatacttgtcatgagagggtaatacttt

SEQ ID NO: 263187 - DNA, 33 bp, Homo sapien
gaaaaagtggcctacaagggagagcttattatt

SEQ ID NO: 263188 - DNA, 33 bp, Homo sapien
gaaaaagtggcctacaggggagagcttattatt

SEQ ID NO: 263189 - DNA, 33 bp, Homo sapien
tgacacagtaagatacaccttggcccttgatag

SEQ ID NO: 263190 - DNA, 33 bp, Homo sapien
tgacacagtaagatacgccttggcccttgatag

SEQ ID NO: 263191 - DNA, 33 bp, Homo sapien
agcgagacatggttgccacaaaaaatttttgaa

SEQ ID NO: 263192 - DNA, 33 bp, Homo sapien
agcgagacatggttgctacaaaaaatttttgaa

SEQ ID NO: 263193 - DNA, 33 bp, Homo sapien
acatacggcatttaagaaaattttgtggttagt

SEQ ID NO: 263194 - DNA, 33 bp, Homo sapien
acatacggcatttaaggaaattttgtggttagt

SEQ ID NO: 263195 - DNA, 33 bp, Homo sapien
gccacacctggaaaaccaggaaagtgtaaggtc

SEQ ID NO: 263196 - DNA, 33 bp, Homo sapien
gccacacctggaaaactaggaaagtgtaaggtc

SEQ ID NO: 263197 - DNA, 33 bp, Homo sapien
atgttatttaaagcaccatttgaagaagcaggt

SEQ ID NO: 263198 - DNA, 33 bp, Homo sapien
atgttatttaaagcactatttgaagaagcaggt

SEQ ID NO: 263199 - DNA, 33 bp, Homo sapien
atacattaaatactaaatgtgctatgaccttat

SEQ ID NO: 263200 - DNA, 33 bp, Homo sapien
atacattaaatactaagtgtgctatgaccttat

SEQ ID NO: 263201 - DNA, 33 bp, Homo sapien
aaatctgttatgaggactacatgagtgcctagg

SEQ ID NO: 263202 - DNA, 33 bp, Homo sapien
aaatctgttatgaggattacatgagtgcctagg

SEQ ID NO: 263203 - DNA, 33 bp, Homo sapien
tccttgtagagaccaccgcctgtataatgaatc

SEQ ID NO: 263204 - DNA, 33 bp, Homo sapien
tccttgtagagaccactgcctgtataatgaatc

SEQ ID NO: 263205 - DNA, 33 bp, Homo sapien
gtctagtggttctcacagctgcggccccttgtt

SEQ ID NO: 263206 - DNA, 33 bp, Homo sapien
gtctagtggttctcacggctgcggccccttgtt

SEQ ID NO: 263207 - DNA, 33 bp, Homo sapien
gtatcctttagctgtaccatcatatatttaaaa

SEQ ID NO: 263208 - DNA, 33 bp, Homo sapien
gtatcctttagctgtatcatcatatatttaaaa

SEQ ID NO: 263209 - DNA, 33 bp, Homo sapien
gccagggcctgaaccacgattcatctaagtcaa

SEQ ID NO: 263210 - DNA, 33 bp, Homo sapien
gccagggcctgaaccatgattcatctaagtcaa

SEQ ID NO: 263211 - DNA, 33 bp, Homo sapien
gcaactaatagtgccaataagtaaaaactacaa

SEQ ID NO: 263212 - DNA, 33 bp, Homo sapien
gcaactaatagtgccattaagtaaaaactacaa

SEQ ID NO: 263213 - DNA, 33 bp, Homo sapien
aaacagaacctgtgcaataatccttcaaaacag

SEQ ID NO: 263214 - DNA, 33 bp, Homo sapien
aaacagaacctgtgcagtaatccttcaaaacag

SEQ ID NO: 263215 - DNA, 33 bp, Homo sapien
atatttttggaattgcaaggccatagtcttaca

SEQ ID NO: 263216 - DNA, 33 bp, Homo sapien
atatttttggaattgcgaggccatagtcttaca

SEQ ID NO: 263217 - DNA, 33 bp, Homo sapien
actgaatagtatttgccgaagatcgttttaaaa

SEQ ID NO: 263218 - DNA, 33 bp, Homo sapien
actgaatagtatttgctgaagatcgttttaaaa

SEQ ID NO: 263219 - DNA, 33 bp, Homo sapien
ttcattcattcaaaaaacatgtactgtccatga

SEQ ID NO: 263220 - DNA, 33 bp, Homo sapien
ttcattcattcaaaaagcatgtactgtccatga

SEQ ID NO: 263221 - DNA, 33 bp, Homo sapien
cactgactccagcaacaggtgactcttagtgat

SEQ ID NO: 263222 - DNA, 33 bp, Homo sapien
cactgactccagcaacgggtgactcttagtgat

SEQ ID NO: 263223 - DNA, 33 bp, Homo sapien
atctacaaagtcaaaactgatagcagcacttga

SEQ ID NO: 263224 - DNA, 33 bp, Homo sapien
atctacaaagtcaaaattgatagcagcacttga

SEQ ID NO: 263225 - DNA, 33 bp, Homo sapien
cagcaaaatacttgaggcctacccaggtgtgaa

SEQ ID NO: 263226 - DNA, 33 bp, Homo sapien
cagcaaaatacttgagtcctacccaggtgtgaa

SEQ ID NO: 263227 - DNA, 33 bp, Homo sapien
taatggcataataccaagtaacaatggctcatt

SEQ ID NO: 263228 - DNA, 33 bp, Homo sapien
taatggcataataccaggtaacaatggctcatt

SEQ ID NO: 263229 - DNA, 33 bp, Homo sapien
aggaaaagccattgacaaaatctctgcaacgtg

SEQ ID NO: 263230 - DNA, 33 bp, Homo sapien
aggaaaagccattgacgaaatctctgcaacgtg

SEQ ID NO: 263231 - DNA, 33 bp, Homo sapien
ctttaaaactggactacattttgtggcttgtcc

SEQ ID NO: 263232 - DNA, 33 bp, Homo sapien
ctttaaaactggactagattttgtggcttgtcc

SEQ ID NO: 263233 - DNA, 33 bp, Homo sapien
tgaatgaagtcagaaacgaatattctttcacat

SEQ ID NO: 263234 - DNA, 33 bp, Homo sapien
tgaatgaagtcagaaatgaatattctttcacat

SEQ ID NO: 263235 - DNA, 33 bp, Homo sapien
atgctttggcatttcacgaggaacagcatagaa

SEQ ID NO: 263236 - DNA, 33 bp, Homo sapien
atgctttggcatttcatgaggaacagcatagaa

SEQ ID NO: 263237 - DNA, 33 bp, Homo sapien
actagctaatcaacaaactgtataagcaaatta

SEQ ID NO: 263238 - DNA, 33 bp, Homo sapien
actagctaatcaacaagctgtataagcaaatta

SEQ ID NO: 263239 - DNA, 33 bp, Homo sapien
agctttcctatacagacgagctctatagttccc

SEQ ID NO: 263240 - DNA, 33 bp, Homo sapien
agctttcctatacagatgagctctatagttccc

SEQ ID NO: 263241 - DNA, 33 bp, Homo sapien
ggctcctagttagcccacaaacacagatcccca

SEQ ID NO: 263242 - DNA, 33 bp, Homo sapien
ggctcctagttagcccgcaaacacagatcccca

SEQ ID NO: 263243 - DNA, 33 bp, Homo sapien
aaatacattctatgtgcacatttcaacctactc

SEQ ID NO: 263244 - DNA, 33 bp, Homo sapien
aaatacattctatgtgtacatttcaacctactc

SEQ ID NO: 263245 - DNA, 33 bp, Homo sapien
gatgtaacagctgtaacgtgaaagtcaggagga

SEQ ID NO: 263246 - DNA, 33 bp, Homo sapien
gatgtaacagctgtaatgtgaaagtcaggagga

SEQ ID NO: 263247 - DNA, 33 bp, Homo sapien
ctgtcagctttgaataccttctagttgagttag

SEQ ID NO: 263248 - DNA, 33 bp, Homo sapien
ctgtcagctttgaatagcttctagttgagttag

SEQ ID NO: 263249 - DNA, 33 bp, Homo sapien
tcaatatgcaccaagcaaacaggtggtggctaa

SEQ ID NO: 263250 - DNA, 33 bp, Homo sapien
tcaatatgcaccaagcgaacaggtggtggctaa

SEQ ID NO: 263251 - DNA, 33 bp, Homo sapien
gaagtaggaactgtcacgagatgtataaagatg

SEQ ID NO: 263252 - DNA, 33 bp, Homo sapien
gaagtaggaactgtcatgagatgtataaagatg

SEQ ID NO: 263253 - DNA, 33 bp, Homo sapien
acaatcacacagaaacaatgaagtaggaactgt

SEQ ID NO: 263254 - DNA, 33 bp, Homo sapien
acaatcacacagaaactatgaagtaggaactgt

SEQ ID NO: 263255 - DNA, 33 bp, Homo sapien
tattatcctgcagctcaccaattactcgattta

SEQ ID NO: 263256 - DNA, 33 bp, Homo sapien
tattatcctgcagctcgccaattactcgattta

SEQ ID NO: 263257 - DNA, 33 bp, Homo sapien
tgatgcctattgattacgaatatggttgtcctt

SEQ ID NO: 263258 - DNA, 33 bp, Homo sapien
tgatgcctattgattatgaatatggttgtcctt

SEQ ID NO: 263259 - DNA, 33 bp, Homo sapien
gttcaggacaaaaacaatatattcaaaatcata

SEQ ID NO: 263260 - DNA, 33 bp, Homo sapien
gttcaggacaaaaacattatattcaaaatcata

SEQ ID NO: 263261 - DNA, 33 bp, Homo sapien
aaccactgtagatagacgggggttcattcttta

SEQ ID NO: 263262 - DNA, 33 bp, Homo sapien
aaccactgtagatagatgggggttcattcttta

SEQ ID NO: 263263 - DNA, 33 bp, Homo sapien
ttctgatctgaccaacaaagaaggcagctttgt

SEQ ID NO: 263264 - DNA, 33 bp, Homo sapien
ttctgatctgaccaaccaagaaggcagctttgt

SEQ ID NO: 263265 - DNA, 33 bp, Homo sapien
gaacaggtctcagctgcaaattaaacagacgca

SEQ ID NO: 263266 - DNA, 33 bp, Homo sapien
gaacaggtctcagctggaaattaaacagacgca

SEQ ID NO: 263267 - DNA, 33 bp, Homo sapien
gccacagaactgagaccgaatggaaatcaccta

SEQ ID NO: 263268 - DNA, 33 bp, Homo sapien
gccacagaactgagactgaatggaaatcaccta

SEQ ID NO: 263269 - DNA, 33 bp, Homo sapien
agttatttttagccagaaacatatgggctgctt

SEQ ID NO: 263270 - DNA, 33 bp, Homo sapien
agttatttttagccagcaacatatgggctgctt

SEQ ID NO: 263271 - DNA, 33 bp, Homo sapien
tggatactattgaatcaaattttcaaacattta

SEQ ID NO: 263272 - DNA, 33 bp, Homo sapien
tggatactattgaatcgaattttcaaacattta

SEQ ID NO: 263273 - DNA, 33 bp, Homo sapien
aataccaagtggtatacatgaaaggagttgtgt

SEQ ID NO: 263274 - DNA, 33 bp, Homo sapien
aataccaagtggtatagatgaaaggagttgtgt

SEQ ID NO: 263275 - DNA, 33 bp, Homo sapien
acattctgtattcagcaaaataacaaaggaaga

SEQ ID NO: 263276 - DNA, 33 bp, Homo sapien
acattctgtattcagcgaaataacaaaggaaga

SEQ ID NO: 263277 - DNA, 33 bp, Homo sapien
ttctgtgtgaatgacaatggtttaaaaaaaatt

SEQ ID NO: 263278 - DNA, 33 bp, Homo sapien
ttctgtgtgaatgacagtggtttaaaaaaaatt

SEQ ID NO: 263279 - DNA, 33 bp, Homo sapien
attccattccatgtcaaaacaatttgaaattct

SEQ ID NO: 263280 - DNA, 33 bp, Homo sapien
attccattccatgtcagaacaatttgaaattct

SEQ ID NO: 263281 - DNA, 33 bp, Homo sapien
tctccccgtttctgtacatcttcctaactgcag

SEQ ID NO: 263282 - DNA, 33 bp, Homo sapien
tctccccgtttctgtatatcttcctaactgcag

SEQ ID NO: 263283 - DNA, 33 bp, Homo sapien
ttattcatgagaaaaactcctggcaaaactaca

SEQ ID NO: 263284 - DNA, 33 bp, Homo sapien
ttattcatgagaaaaagtcctggcaaaactaca

SEQ ID NO: 263285 - DNA, 33 bp, Homo sapien
aaaaaacaccctatgaacaccatatttaatata

SEQ ID NO: 263286 - DNA, 33 bp, Homo sapien
aaaaaacaccctatgagcaccatatttaatata

SEQ ID NO: 263287 - DNA, 33 bp, Homo sapien
agaatcttgccttttccacctggtttcaactga

SEQ ID NO: 263288 - DNA, 33 bp, Homo sapien
agaatcttgccttttctacctggtttcaactga

SEQ ID NO: 263289 - DNA, 33 bp, Homo sapien
tatacttgtgtatcaacgtctattcctactaca

SEQ ID NO: 263290 - DNA, 33 bp, Homo sapien
tatacttgtgtatcaatgtctattcctactaca

SEQ ID NO: 263291 - DNA, 33 bp, Homo sapien
taattatgcaaaaatgacaaatcctcttttcta

SEQ ID NO: 263292 - DNA, 33 bp, Homo sapien
taattatgcaaaaatggcaaatcctcttttcta

SEQ ID NO: 263293 - DNA, 33 bp, Homo sapien
cctatcaataaacagcaattaggtaatcaacta

SEQ ID NO: 263294 - DNA, 33 bp, Homo sapien
cctatcaataaacagctattaggtaatcaacta

SEQ ID NO: 263295 - DNA, 33 bp, Homo sapien
cacatgacaagagggcaagtgacacgctgtaga

SEQ ID NO: 263296 - DNA, 33 bp, Homo sapien
cacatgacaagagggcgagtgacacgctgtaga

SEQ ID NO: 263297 - DNA, 33 bp, Homo sapien
gttaaataatttgctcaagaccatatagctagg

SEQ ID NO: 263298 - DNA, 33 bp, Homo sapien
gttaaataatttgctcgagaccatatagctagg

SEQ ID NO: 263299 - DNA, 33 bp, Homo sapien
gaacttttatgtaatacctggatgagctcacag

SEQ ID NO: 263300 - DNA, 33 bp, Homo sapien
gaacttttatgtaatatctggatgagctcacag

SEQ ID NO: 263301 - DNA, 33 bp, Homo sapien
agatctatcatctttccacctcaaataaaattc

SEQ ID NO: 263302 - DNA, 33 bp, Homo sapien
agatctatcatctttctacctcaaataaaattc

SEQ ID NO: 263303 - DNA, 33 bp, Homo sapien
acagttggtgtcttaactcctgactaaggaaaa

SEQ ID NO: 263304 - DNA, 33 bp, Homo sapien
acagttggtgtcttaattcctgactaaggaaaa

SEQ ID NO: 263305 - DNA, 33 bp, Homo sapien
tcacagtgatgatgacaataacaacaataataa

SEQ ID NO: 263306 - DNA, 33 bp, Homo sapien
tcacagtgatgatgacgataacaacaataataa

SEQ ID NO: 263307 - DNA, 33 bp, Homo sapien
agcagtctagaacaccaaaggatgagaacacac

SEQ ID NO: 263308 - DNA, 33 bp, Homo sapien
agcagtctagaacaccgaaggatgagaacacac

SEQ ID NO: 263309 - DNA, 33 bp, Homo sapien
cagctggcgccaatgcaatgtgtaaaatgaata

SEQ ID NO: 263310 - DNA, 33 bp, Homo sapien
cagctggcgccaatgcgatgtgtaaaatgaata

SEQ ID NO: 263311 - DNA, 33 bp, Homo sapien
attagatgtgttttgactatgctgataaggttt

SEQ ID NO: 263312 - DNA, 33 bp, Homo sapien
attagatgtgttttgagtatgctgataaggttt

SEQ ID NO: 263313 - DNA, 33 bp, Homo sapien
ttatcttacattttcaatcccatctgatcaaat

SEQ ID NO: 263314 - DNA, 33 bp, Homo sapien
ttatcttacattttcattcccatctgatcaaat

SEQ ID NO: 263315 - DNA, 33 bp, Homo sapien
aggctcttagacatagaaaaataaatttgtatg

SEQ ID NO: 263316 - DNA, 33 bp, Homo sapien
aggctcttagacataggaaaataaatttgtatg

SEQ ID NO: 263317 - DNA, 33 bp, Homo sapien
cagcttaaacatgatcgaacacaaaatctatga

SEQ ID NO: 263318 - DNA, 33 bp, Homo sapien
cagcttaaacatgatctaacacaaaatctatga

SEQ ID NO: 263319 - DNA, 33 bp, Homo sapien
tatttaataggcacacactatatggaagttaag

SEQ ID NO: 263320 - DNA, 33 bp, Homo sapien
tatttaataggcacacgctatatggaagttaag

SEQ ID NO: 263321 - DNA, 33 bp, Homo sapien
ttatcacataatatcaaatgactctacatttcc

SEQ ID NO: 263322 - DNA, 33 bp, Homo sapien
ttatcacataatatcacatgactctacatttcc

SEQ ID NO: 263323 - DNA, 33 bp, Homo sapien
atgaggccaaacaacaaatccttagttctccca

SEQ ID NO: 263324 - DNA, 33 bp, Homo sapien
atgaggccaaacaacacatccttagttctccca

SEQ ID NO: 263325 - DNA, 33 bp, Homo sapien
aatagcacttaacgtacagacagaatgaaatgt

SEQ ID NO: 263326 - DNA, 33 bp, Homo sapien
aatagcacttaacgtatagacagaatgaaatgt

SEQ ID NO: 263327 - DNA, 33 bp, Homo sapien
atctagtcactacacaaagatagagatagcctt

SEQ ID NO: 263328 - DNA, 33 bp, Homo sapien
atctagtcactacacagagatagagatagcctt

SEQ ID NO: 263329 - DNA, 33 bp, Homo sapien
cagaaagatgcatagaagagttaatgggaagca

SEQ ID NO: 263330 - DNA, 33 bp, Homo sapien
cagaaagatgcatagaggagttaatgggaagca

SEQ ID NO: 263331 - DNA, 33 bp, Homo sapien
atacagtgctgctcacaacactgaaggtatctt

SEQ ID NO: 263332 - DNA, 33 bp, Homo sapien
atacagtgctgctcactacactgaaggtatctt

SEQ ID NO: 263333 - DNA, 33 bp, Homo sapien
cgcatggttagagttccatgtgtaaagccatga

SEQ ID NO: 263334 - DNA, 33 bp, Homo sapien
cgcatggttagagttcgatgtgtaaagccatga

SEQ ID NO: 263335 - DNA, 33 bp, Homo sapien
ctgtcagaaagagaggaaaagacataggtaaat

SEQ ID NO: 263336 - DNA, 33 bp, Homo sapien
ctgtcagaaagagagggaaagacataggtaaat

SEQ ID NO: 263337 - DNA, 33 bp, Homo sapien
cttatcctatttcccaaacattccaactttaaa

SEQ ID NO: 263338 - DNA, 33 bp, Homo sapien
cttatcctatttcccagacattccaactttaaa

SEQ ID NO: 263339 - DNA, 33 bp, Homo sapien
ttacacacaaaaggtaagccttgaggaggaatg

SEQ ID NO: 263340 - DNA, 33 bp, Homo sapien
ttacacacaaaaggtaggccttgaggaggaatg

SEQ ID NO: 263341 - DNA, 33 bp, Homo sapien
cagaagacagagaacccgattacacaggagtgt

SEQ ID NO: 263342 - DNA, 33 bp, Homo sapien
cagaagacagagaacctgattacacaggagtgt

SEQ ID NO: 263343 - DNA, 33 bp, Homo sapien
gaaagtgagttcagcaaacaggtgcttgcatat

SEQ ID NO: 263344 - DNA, 33 bp, Homo sapien
gaaagtgagttcagcagacaggtgcttgcatat

SEQ ID NO: 263345 - DNA, 33 bp, Homo sapien
aaattccttagcaccaagctggagtcgaaaagt

SEQ ID NO: 263346 - DNA, 33 bp, Homo sapien
aaattccttagcaccacgctggagtcgaaaagt

SEQ ID NO: 263347 - DNA, 33 bp, Homo sapien
ttttttttcctctttgcaatgcaagttgatgat

SEQ ID NO: 263348 - DNA, 33 bp, Homo sapien
ttttttttcctctttgtaatgcaagttgatgat

SEQ ID NO: 263349 - DNA, 33 bp, Homo sapien
catcagcttctctaaacgattccctttaatatg

SEQ ID NO: 263350 - DNA, 33 bp, Homo sapien
catcagcttctctaaatgattccctttaatatg

SEQ ID NO: 263351 - DNA, 33 bp, Homo sapien
aggtgttatttggttacgtgagtcagttaatta

SEQ ID NO: 263352 - DNA, 33 bp, Homo sapien
aggtgttatttggttatgtgagtcagttaatta

SEQ ID NO: 263353 - DNA, 33 bp, Homo sapien
gctcccttcatcctgcaagtctcaatctcatgt

SEQ ID NO: 263354 - DNA, 33 bp, Homo sapien
gctcccttcatcctgcgagtctcaatctcatgt

SEQ ID NO: 263355 - DNA, 33 bp, Homo sapien
atttttataagtcggacgttctaagcactggtt

SEQ ID NO: 263356 - DNA, 33 bp, Homo sapien
atttttataagtcggatgttctaagcactggtt

SEQ ID NO: 263357 - DNA, 33 bp, Homo sapien
aagtaagcagatttacaaaggggaaagagaaga

SEQ ID NO: 263358 - DNA, 33 bp, Homo sapien
aagtaagcagatttacgaaggggaaagagaaga

SEQ ID NO: 263359 - DNA, 33 bp, Homo sapien
tttttcagtatttcccagcttacactttaaatt

SEQ ID NO: 263360 - DNA, 33 bp, Homo sapien
tttttcagtatttcccggcttacactttaaatt

SEQ ID NO: 263361 - DNA, 33 bp, Homo sapien
gaaaggtaattatgtgaacagatggatatgtta

SEQ ID NO: 263362 - DNA, 33 bp, Homo sapien
gaaaggtaattatgtgcacagatggatatgtta

SEQ ID NO: 263363 - DNA, 33 bp, Homo sapien
ttcactagaagctcaacgagggcagacaggaag

SEQ ID NO: 263364 - DNA, 33 bp, Homo sapien
ttcactagaagctcaatgagggcagacaggaag

SEQ ID NO: 263365 - DNA, 33 bp, Homo sapien
tccttccttggttataaatcaattctagcaggt

SEQ ID NO: 263366 - DNA, 33 bp, Homo sapien
tccttccttggttatagatcaattctagcaggt

SEQ ID NO: 263367 - DNA, 33 bp, Homo sapien
attccaacaatttatacgaatgagaatcttctt

SEQ ID NO: 263368 - DNA, 33 bp, Homo sapien
attccaacaatttatatgaatgagaatcttctt

SEQ ID NO: 263369 - DNA, 33 bp, Homo sapien
ctgtatgaaaacccaacagagtaggttctttga

SEQ ID NO: 263370 - DNA, 33 bp, Homo sapien
ctgtatgaaaacccaatagagtaggttctttga

SEQ ID NO: 263371 - DNA, 33 bp, Homo sapien
tccagttacatactgaaaatgaacaatatctaa

SEQ ID NO: 263372 - DNA, 33 bp, Homo sapien
tccagttacatactgagaatgaacaatatctaa

SEQ ID NO: 263373 - DNA, 33 bp, Homo sapien
tttcagtgaatgtaacagatgctcaataaatgt

SEQ ID NO: 263374 - DNA, 33 bp, Homo sapien
tttcagtgaatgtaacggatgctcaataaatgt

SEQ ID NO: 263375 - DNA, 33 bp, Homo sapien
ttaaggaaattgctccaaatcagttaacaaaaa

SEQ ID NO: 263376 - DNA, 33 bp, Homo sapien
ttaaggaaattgctccgaatcagttaacaaaaa

SEQ ID NO: 263377 - DNA, 33 bp, Homo sapien
tggctatactgtttcacctgagtatcctcaact

SEQ ID NO: 263378 - DNA, 33 bp, Homo sapien
tggctatactgtttcatctgagtatcctcaact

SEQ ID NO: 263379 - DNA, 33 bp, Homo sapien
tgaagttttcatagtcaatttcctctaggttcc

SEQ ID NO: 263380 - DNA, 33 bp, Homo sapien
tgaagttttcatagtcgatttcctctaggttcc

SEQ ID NO: 263381 - DNA, 33 bp, Homo sapien
agccaccgtacccggcaagtattgcttcttaaa

SEQ ID NO: 263382 - DNA, 33 bp, Homo sapien
agccaccgtacccggcgagtattgcttcttaaa

SEQ ID NO: 263383 - DNA, 33 bp, Homo sapien
taagaacatagaaaaagtatcagctaatcacat

SEQ ID NO: 263384 - DNA, 33 bp, Homo sapien
taagaacatagaaaaattatcagctaatcacat

SEQ ID NO: 263385 - DNA, 33 bp, Homo sapien
tggttttacctcttcccgattcctcaaaaaaag

SEQ ID NO: 263386 - DNA, 33 bp, Homo sapien
tggttttacctcttcctgattcctcaaaaaaag

SEQ ID NO: 263387 - DNA, 33 bp, Homo sapien
ggaaccaatggagaaactttaacatattgggca

SEQ ID NO: 263388 - DNA, 33 bp, Homo sapien
ggaaccaatggagaaattttaacatattgggca

SEQ ID NO: 263389 - DNA, 33 bp, Homo sapien
caattttaagggcccacaactctcagaggcttg

SEQ ID NO: 263390 - DNA, 33 bp, Homo sapien
caattttaagggcccataactctcagaggcttg

SEQ ID NO: 263391 - DNA, 33 bp, Homo sapien
agtagagcaaatcacacgaatattttggtttcc

SEQ ID NO: 263392 - DNA, 33 bp, Homo sapien
agtagagcaaatcacatgaatattttggtttcc

SEQ ID NO: 263393 - DNA, 33 bp, Homo sapien
cattgttttttttagacacaatgctactacaca

SEQ ID NO: 263394 - DNA, 33 bp, Homo sapien
cattgttttttttagatacaatgctactacaca

SEQ ID NO: 263395 - DNA, 33 bp, Homo sapien
tcactgaaacaataaaagacttagcaatttata

SEQ ID NO: 263396 - DNA, 33 bp, Homo sapien
tcactgaaacaataaaggacttagcaatttata

SEQ ID NO: 263397 - DNA, 33 bp, Homo sapien
ctgtttctacgccacaataataaacacatcgga

SEQ ID NO: 263398 - DNA, 33 bp, Homo sapien
ctgtttctacgccacagtaataaacacatcgga

SEQ ID NO: 263399 - DNA, 33 bp, Homo sapien
ttttttctctgatagaatacatgttccatgaag

SEQ ID NO: 263400 - DNA, 33 bp, Homo sapien
ttttttctctgatagactacatgttccatgaag

SEQ ID NO: 263401 - DNA, 33 bp, Homo sapien
gggagatgctcagtaaatatctgtgaatgtatt

SEQ ID NO: 263402 - DNA, 33 bp, Homo sapien
gggagatgctcagtaagtatctgtgaatgtatt

SEQ ID NO: 263403 - DNA, 33 bp, Homo sapien
tcctgggcttacttcaccaatacacttactaca

SEQ ID NO: 263404 - DNA, 33 bp, Homo sapien
tcctgggcttacttcatcaatacacttactaca

SEQ ID NO: 263405 - DNA, 33 bp, Homo sapien
tgaagccttcacttcaatcaagcccgggagcac

SEQ ID NO: 263406 - DNA, 33 bp, Homo sapien
tgaagccttcacttcagtcaagcccgggagcac

SEQ ID NO: 263407 - DNA, 33 bp, Homo sapien
gactactaaaaggctactagattataggattta

SEQ ID NO: 263408 - DNA, 33 bp, Homo sapien
gactactaaaaggctagtagattataggattta

SEQ ID NO: 263409 - DNA, 33 bp, Homo sapien
acacatttcaatagaccctctctggctcgctgg

SEQ ID NO: 263410 - DNA, 33 bp, Homo sapien
acacatttcaatagacgctctctggctcgctgg

SEQ ID NO: 263411 - DNA, 33 bp, Homo sapien
gccgcttacgcaattcacaagtgaacgaatttg

SEQ ID NO: 263412 - DNA, 33 bp, Homo sapien
gccgcttacgcaattcgcaagtgaacgaatttg

SEQ ID NO: 263413 - DNA, 33 bp, Homo sapien
tcatttctcctgtagaaacacatacagactgaa

SEQ ID NO: 263414 - DNA, 33 bp, Homo sapien
tcatttctcctgtagagacacatacagactgaa

SEQ ID NO: 263415 - DNA, 33 bp, Homo sapien
ttatatgtgttgggaaagtttcaagacctgtct

SEQ ID NO: 263416 - DNA, 33 bp, Homo sapien
ttatatgtgttgggaatgtttcaagacctgtct

SEQ ID NO: 263417 - DNA, 33 bp, Homo sapien
aaagacaacatcgtaaagagcggattaataaaa

SEQ ID NO: 263418 - DNA, 33 bp, Homo sapien
aaagacaacatcgtaatgagcggattaataaaa

SEQ ID NO: 263419 - DNA, 33 bp, Homo sapien
ctacagtcagtttagaagtatctttataaatag

SEQ ID NO: 263420 - DNA, 33 bp, Homo sapien
ctacagtcagtttagatgtatctttataaatag

SEQ ID NO: 263421 - DNA, 33 bp, Homo sapien
ggagctttgactatgcactctcttcaaccacaa

SEQ ID NO: 263422 - DNA, 33 bp, Homo sapien
ggagctttgactatgccctctcttcaaccacaa

SEQ ID NO: 263423 - DNA, 33 bp, Homo sapien
ctccaccccaagctgactaccagtattcactta

SEQ ID NO: 263424 - DNA, 33 bp, Homo sapien
ctccaccccaagctgattaccagtattcactta

SEQ ID NO: 263425 - DNA, 33 bp, Homo sapien
ttttgaaagtagtccaagattcaaaaaaggggt

SEQ ID NO: 263426 - DNA, 33 bp, Homo sapien
ttttgaaagtagtccatgattcaaaaaaggggt

SEQ ID NO: 263427 - DNA, 33 bp, Homo sapien
attcaacattacaccacaggcgattaggcaaga

SEQ ID NO: 263428 - DNA, 33 bp, Homo sapien
attcaacattacaccagaggcgattaggcaaga

SEQ ID NO: 263429 - DNA, 33 bp, Homo sapien
agcccatattacagtacgtagggttaggtggaa

SEQ ID NO: 263430 - DNA, 33 bp, Homo sapien
agcccatattacagtaggtagggttaggtggaa

SEQ ID NO: 263431 - DNA, 33 bp, Homo sapien
aaaacacgtacacaagaaaagactatgaaagaa

SEQ ID NO: 263432 - DNA, 33 bp, Homo sapien
aaaacacgtacacaaggaaagactatgaaagaa

SEQ ID NO: 263433 - DNA, 33 bp, Homo sapien
aggaaagttaacagaaaagacacgttaagagaa

SEQ ID NO: 263434 - DNA, 33 bp, Homo sapien
aggaaagttaacagaagagacacgttaagagaa

SEQ ID NO: 263435 - DNA, 33 bp, Homo sapien
ctgaagggtgcattcactgaaaacaggcttcac

SEQ ID NO: 263436 - DNA, 33 bp, Homo sapien
ctgaagggtgcattcattgaaaacaggcttcac

SEQ ID NO: 263437 - DNA, 33 bp, Homo sapien
cccaactactatcaaaaaagaccagagaacaat

SEQ ID NO: 263438 - DNA, 33 bp, Homo sapien
cccaactactatcaaagaagaccagagaacaat

SEQ ID NO: 263439 - DNA, 33 bp, Homo sapien
tggcttctttacaacacgaattgagcacctgaa

SEQ ID NO: 263440 - DNA, 33 bp, Homo sapien
tggcttctttacaacatgaattgagcacctgaa

SEQ ID NO: 263441 - DNA, 33 bp, Homo sapien
ccaacctacaaattcaataagccaaacagggtt

SEQ ID NO: 263442 - DNA, 33 bp, Homo sapien
ccaacctacaaattcagtaagccaaacagggtt

SEQ ID NO: 263443 - DNA, 33 bp, Homo sapien
tctcatttataagtggaaacaaaactataggta

SEQ ID NO: 263444 - DNA, 33 bp, Homo sapien
tctcatttataagtgggaacaaaactataggta

SEQ ID NO: 263445 - DNA, 33 bp, Homo sapien
acaagcttatttccagaaagaacactgaaaaca

SEQ ID NO: 263446 - DNA, 33 bp, Homo sapien
acaagcttatttccaggaagaacactgaaaaca

SEQ ID NO: 263447 - DNA, 33 bp, Homo sapien
tggttgcccattaaaaactcctgaaaggctttt

SEQ ID NO: 263448 - DNA, 33 bp, Homo sapien
tggttgcccattaaaatctcctgaaaggctttt

SEQ ID NO: 263449 - DNA, 33 bp, Homo sapien
ttaaaatttccttcaaatacgttgtctcctttc

SEQ ID NO: 263450 - DNA, 33 bp, Homo sapien
ttaaaatttccttcaagtacgttgtctcctttc

SEQ ID NO: 263451 - DNA, 33 bp, Homo sapien
aacataaattcttagaataacaccaggcacatt

SEQ ID NO: 263452 - DNA, 33 bp, Homo sapien
aacataaattcttagagtaacaccaggcacatt

SEQ ID NO: 263453 - DNA, 33 bp, Homo sapien
ataaaggaaacattaaacacttccaaaccattt

SEQ ID NO: 263454 - DNA, 33 bp, Homo sapien
ataaaggaaacattaagcacttccaaaccattt

SEQ ID NO: 263455 - DNA, 33 bp, Homo sapien
ttattcgctaataaaaccaccagtgtagctctc

SEQ ID NO: 263456 - DNA, 33 bp, Homo sapien
ttattcgctaataaaagcaccagtgtagctctc

SEQ ID NO: 263457 - DNA, 33 bp, Homo sapien
aaatgacaaaatatgaacagagaagacaggata

SEQ ID NO: 263458 - DNA, 33 bp, Homo sapien
aaatgacaaaatatgagcagagaagacaggata

SEQ ID NO: 263459 - DNA, 33 bp, Homo sapien
gaaatttcaagtaaggaactgatgtgatctaat

SEQ ID NO: 263460 - DNA, 33 bp, Homo sapien
gaaatttcaagtaagggactgatgtgatctaat

SEQ ID NO: 263461 - DNA, 33 bp, Homo sapien
gcctcctgtttccagaaaaacaaacaatgaaca

SEQ ID NO: 263462 - DNA, 33 bp, Homo sapien
gcctcctgtttccagacaaacaaacaatgaaca

SEQ ID NO: 263463 - DNA, 33 bp, Homo sapien
gggtatattgcatccacatagtgagtatagtac

SEQ ID NO: 263464 - DNA, 33 bp, Homo sapien
gggtatattgcatccagatagtgagtatagtac

SEQ ID NO: 263465 - DNA, 33 bp, Homo sapien
tttggtattcatttataaagatttgcctgcacc

SEQ ID NO: 263466 - DNA, 33 bp, Homo sapien
tttggtattcatttatgaagatttgcctgcacc

SEQ ID NO: 263467 - DNA, 33 bp, Homo sapien
taagtctgaagagtcaataacgattgatgtctt

SEQ ID NO: 263468 - DNA, 33 bp, Homo sapien
taagtctgaagagtcagtaacgattgatgtctt

SEQ ID NO: 263469 - DNA, 33 bp, Homo sapien
agaacacagcagttagaaatttttccaggttac

SEQ ID NO: 263470 - DNA, 33 bp, Homo sapien
agaacacagcagttaggaatttttccaggttac

SEQ ID NO: 263471 - DNA, 33 bp, Homo sapien
gtgtggccctttgcaaaattaacagagtgttag

SEQ ID NO: 263472 - DNA, 33 bp, Homo sapien
gtgtggccctttgcaagattaacagagtgttag

SEQ ID NO: 263473 - DNA, 33 bp, Homo sapien
atagccaacaggtatacaaaaaggtcctcaaca

SEQ ID NO: 263474 - DNA, 33 bp, Homo sapien
atagccaacaggtatataaaaaggtcctcaaca

SEQ ID NO: 263475 - DNA, 33 bp, Homo sapien
atctcatctaccactaacaaccctagcaattct

SEQ ID NO: 263476 - DNA, 33 bp, Homo sapien
atctcatctaccactagcaaccctagcaattct

SEQ ID NO: 263477 - DNA, 33 bp, Homo sapien
atatcatttttcatccacagggttgaagagcag

SEQ ID NO: 263478 - DNA, 33 bp, Homo sapien
atatcatttttcatccgcagggttgaagagcag

SEQ ID NO: 263479 - DNA, 33 bp, Homo sapien
ttctgtaatgcatgacagcgtgatacagcccaa

SEQ ID NO: 263480 - DNA, 33 bp, Homo sapien
ttctgtaatgcatgacggcgtgatacagcccaa

SEQ ID NO: 263481 - DNA, 33 bp, Homo sapien
tgcacttggaatccaaaaacctggctttttgtc

SEQ ID NO: 263482 - DNA, 33 bp, Homo sapien
tgcacttggaatccaataacctggctttttgtc

SEQ ID NO: 263483 - DNA, 33 bp, Homo sapien
gagcacacctagaacagctgacatccagcacag

SEQ ID NO: 263484 - DNA, 33 bp, Homo sapien
gagcacacctagaacatctgacatccagcacag

SEQ ID NO: 263485 - DNA, 33 bp, Homo sapien
caatactcagtgaagcgatgatgtacggcagcc

SEQ ID NO: 263486 - DNA, 33 bp, Homo sapien
caatactcagtgaagctatgatgtacggcagcc

SEQ ID NO: 263487 - DNA, 33 bp, Homo sapien
atgagaaggacagagcagattataataaaaagg

SEQ ID NO: 263488 - DNA, 33 bp, Homo sapien
atgagaaggacagagcggattataataaaaagg

SEQ ID NO: 263489 - DNA, 33 bp, Homo sapien
gccagctgcgggcggacgtccaaatacacagaa

SEQ ID NO: 263490 - DNA, 33 bp, Homo sapien
gccagctgcgggcggatgtccaaatacacagaa

SEQ ID NO: 263491 - DNA, 33 bp, Homo sapien
tccttgtgtaatgtgcccatcatgtaatcattg

SEQ ID NO: 263492 - DNA, 33 bp, Homo sapien
tccttgtgtaatgtgcgcatcatgtaatcattg

SEQ ID NO: 263493 - DNA, 33 bp, Homo sapien
catttgtcaaagttaaacaatgattacatgatg

SEQ ID NO: 263494 - DNA, 33 bp, Homo sapien
catttgtcaaagttaagcaatgattacatgatg

SEQ ID NO: 263495 - DNA, 33 bp, Homo sapien
cagaccttttgctactaagcaccttgagtgtcc

SEQ ID NO: 263496 - DNA, 33 bp, Homo sapien
cagaccttttgctactgagcaccttgagtgtcc

SEQ ID NO: 263497 - DNA, 33 bp, Homo sapien
actgcaactctttgaaggcatggaacactgtat

SEQ ID NO: 263498 - DNA, 33 bp, Homo sapien
actgcaactctttgaatgcatggaacactgtat

SEQ ID NO: 263499 - DNA, 33 bp, Homo sapien
taagttgtagatatcacgatggtttacccttaa

SEQ ID NO: 263500 - DNA, 33 bp, Homo sapien
taagttgtagatatcatgatggtttacccttaa

SEQ ID NO: 263501 - DNA, 33 bp, Homo sapien
cagccaccttgttgtacgctcacatggccaaga

SEQ ID NO: 263502 - DNA, 33 bp, Homo sapien
cagccaccttgttgtatgctcacatggccaaga

SEQ ID NO: 263503 - DNA, 33 bp, Homo sapien
catgtcagggtgctaaatccttatccctagaga

SEQ ID NO: 263504 - DNA, 33 bp, Homo sapien
catgtcagggtgctaagtccttatccctagaga

SEQ ID NO: 263505 - DNA, 33 bp, Homo sapien
tgcttatttaaagctactagaatccagctgggc

SEQ ID NO: 263506 - DNA, 33 bp, Homo sapien
tgcttatttaaagctattagaatccagctgggc

SEQ ID NO: 263507 - DNA, 33 bp, Homo sapien
ggtgatttagaagactaaaaagagaggagttac

SEQ ID NO: 263508 - DNA, 33 bp, Homo sapien
ggtgatttagaagactgaaaagagaggagttac

SEQ ID NO: 263509 - DNA, 33 bp, Homo sapien
cgagcagagttaactacggagctatcattatgg

SEQ ID NO: 263510 - DNA, 33 bp, Homo sapien
cgagcagagttaactatggagctatcattatgg

SEQ ID NO: 263511 - DNA, 33 bp, Homo sapien
tgtgtgcattattatgcataccttagacctgac

SEQ ID NO: 263512 - DNA, 33 bp, Homo sapien
tgtgtgcattattatgtataccttagacctgac

SEQ ID NO: 263513 - DNA, 33 bp, Homo sapien
gatactccaataagagacattggtaaaccgagg

SEQ ID NO: 263514 - DNA, 33 bp, Homo sapien
gatactccaataagaggcattggtaaaccgagg

SEQ ID NO: 263515 - DNA, 33 bp, Homo sapien
ggtatgggagaaaaatgatagcattgaataaac

SEQ ID NO: 263516 - DNA, 33 bp, Homo sapien
ggtatgggagaaaaattatagcattgaataaac

SEQ ID NO: 263517 - DNA, 33 bp, Homo sapien
tggagttgatttcaaccggactaagccaatttc

SEQ ID NO: 263518 - DNA, 33 bp, Homo sapien
tggagttgatttcaactggactaagccaatttc

SEQ ID NO: 263519 - DNA, 33 bp, Homo sapien
tggtgcttctgcagcacaactttcaaatcctgg

SEQ ID NO: 263520 - DNA, 33 bp, Homo sapien
tggtgcttctgcagcataactttcaaatcctgg

SEQ ID NO: 263521 - DNA, 33 bp, Homo sapien
gatcagaacagccagaagcagaaacaagattgg

SEQ ID NO: 263522 - DNA, 33 bp, Homo sapien
gatcagaacagccagaggcagaaacaagattgg

SEQ ID NO: 263523 - DNA, 33 bp, Homo sapien
tcaataatttaagagacaggccagaacaaaggc

SEQ ID NO: 263524 - DNA, 33 bp, Homo sapien
tcaataatttaagagataggccagaacaaaggc

SEQ ID NO: 263525 - DNA, 33 bp, Homo sapien
ttaagctgctacatgaaatgcaaaatcattaag

SEQ ID NO: 263526 - DNA, 33 bp, Homo sapien
ttaagctgctacatgacatgcaaaatcattaag

SEQ ID NO: 263527 - DNA, 33 bp, Homo sapien
atttaatctttacaaaatactcagaacaatggc

SEQ ID NO: 263528 - DNA, 33 bp, Homo sapien
atttaatctttacaaagtactcagaacaatggc

SEQ ID NO: 263529 - DNA, 33 bp, Homo sapien
caggtctcagtttggaacacaggtagtacgtaa

SEQ ID NO: 263530 - DNA, 33 bp, Homo sapien
caggtctcagtttggatcacaggtagtacgtaa

SEQ ID NO: 263531 - DNA, 33 bp, Homo sapien
cagagggctgagaaaaaatcaagaaacaagaaa

SEQ ID NO: 263532 - DNA, 33 bp, Homo sapien
cagagggctgagaaaagatcaagaaacaagaaa

SEQ ID NO: 263533 - DNA, 33 bp, Homo sapien
ctcccttttcctaactgaaggcagaatatgaat

SEQ ID NO: 263534 - DNA, 33 bp, Homo sapien
ctcccttttcctaacttaaggcagaatatgaat

SEQ ID NO: 263535 - DNA, 33 bp, Homo sapien
cagcatctccagcttaccaaaaatgcaggtgat

SEQ ID NO: 263536 - DNA, 33 bp, Homo sapien
cagcatctccagcttagcaaaaatgcaggtgat

SEQ ID NO: 263537 - DNA, 33 bp, Homo sapien
aatgctgtggacttcaaccagccctttactggt

SEQ ID NO: 263538 - DNA, 33 bp, Homo sapien
aatgctgtggacttcagccagccctttactggt

SEQ ID NO: 263539 - DNA, 33 bp, Homo sapien
gctcatttattaagacaatctgggttgcactgt

SEQ ID NO: 263540 - DNA, 33 bp, Homo sapien
gctcatttattaagactatctgggttgcactgt

SEQ ID NO: 263541 - DNA, 33 bp, Homo sapien
ttgcactcggttgtcagtcattgcactgtggaa

SEQ ID NO: 263542 - DNA, 33 bp, Homo sapien
ttgcactcggttgtcattcattgcactgtggaa

SEQ ID NO: 263543 - DNA, 33 bp, Homo sapien
tgtactttcttaaagaccagagttgatcagctg

SEQ ID NO: 263544 - DNA, 33 bp, Homo sapien
tgtactttcttaaagagcagagttgatcagctg

SEQ ID NO: 263545 - DNA, 33 bp, Homo sapien
gaacatagctaatacaataggataaagagattg

SEQ ID NO: 263546 - DNA, 33 bp, Homo sapien
gaacatagctaatacagtaggataaagagattg

SEQ ID NO: 263547 - DNA, 33 bp, Homo sapien
gaggtttactcttgcaacctgctgaaccaggat

SEQ ID NO: 263548 - DNA, 33 bp, Homo sapien
gaggtttactcttgcatcctgctgaaccaggat

SEQ ID NO: 263549 - DNA, 33 bp, Homo sapien
catctcccaaaaagcccgacaactccttcagat

SEQ ID NO: 263550 - DNA, 33 bp, Homo sapien
catctcccaaaaagcctgacaactccttcagat

SEQ ID NO: 263551 - DNA, 33 bp, Homo sapien
aaataaacatttcataaaacaatgccttatcct

SEQ ID NO: 263552 - DNA, 33 bp, Homo sapien
aaataaacatttcatacaacaatgccttatcct

SEQ ID NO: 263553 - DNA, 33 bp, Homo sapien
gctttgaaaacttctcacatcttccttgctgga

SEQ ID NO: 263554 - DNA, 33 bp, Homo sapien
gctttgaaaacttctctcatcttccttgctgga

SEQ ID NO: 263555 - DNA, 33 bp, Homo sapien
ttgataaacacagtgcaagatcctaattgtatg

SEQ ID NO: 263556 - DNA, 33 bp, Homo sapien
ttgataaacacagtgcgagatcctaattgtatg

SEQ ID NO: 263557 - DNA, 33 bp, Homo sapien
acatcacagcctagaactgctgacttcaagaga

SEQ ID NO: 263558 - DNA, 33 bp, Homo sapien
acatcacagcctagaattgctgacttcaagaga

SEQ ID NO: 263559 - DNA, 33 bp, Homo sapien
cagttgcagagggaaactgcacaaaaagatacc

SEQ ID NO: 263560 - DNA, 33 bp, Homo sapien
cagttgcagagggaaattgcacaaaaagatacc

SEQ ID NO: 263561 - DNA, 33 bp, Homo sapien
ggcatatggagatcagcaaagaaggaggaatca

SEQ ID NO: 263562 - DNA, 33 bp, Homo sapien
ggcatatggagatcaggaaagaaggaggaatca

SEQ ID NO: 263563 - DNA, 33 bp, Homo sapien
cttgaccaaatgataaaataaaaagtcaaagaa

SEQ ID NO: 263564 - DNA, 33 bp, Homo sapien
cttgaccaaatgataacataaaaagtcaaagaa

SEQ ID NO: 263565 - DNA, 33 bp, Homo sapien
ttatgccttaatgccacgttctggtttgctatc

SEQ ID NO: 263566 - DNA, 33 bp, Homo sapien
ttatgccttaatgccatgttctggtttgctatc

SEQ ID NO: 263567 - DNA, 33 bp, Homo sapien
tgtgcggcaactttccactcttggccatgacat

SEQ ID NO: 263568 - DNA, 33 bp, Homo sapien
tgtgcggcaactttccgctcttggccatgacat

SEQ ID NO: 263569 - DNA, 33 bp, Homo sapien
tatagccatgtggaaaatgaacaaaaacctctc

SEQ ID NO: 263570 - DNA, 33 bp, Homo sapien
tatagccatgtggaaactgaacaaaaacctctc

SEQ ID NO: 263571 - DNA, 33 bp, Homo sapien
gaacaaaaacctctctcaagtgattttgaagga

SEQ ID NO: 263572 - DNA, 33 bp, Homo sapien
gaacaaaaacctctctgaagtgattttgaagga

SEQ ID NO: 263573 - DNA, 33 bp, Homo sapien
tagcaacgcctgcgggaagagcttcctctgggt

SEQ ID NO: 263574 - DNA, 33 bp, Homo sapien
tagcaacgcctgcgggtagagcttcctctgggt

SEQ ID NO: 263575 - DNA, 33 bp, Homo sapien
tcactttcatgttaagcaagctcacaggtgatg

SEQ ID NO: 263576 - DNA, 33 bp, Homo sapien
tcactttcatgttaaggaagctcacaggtgatg

SEQ ID NO: 263577 - DNA, 33 bp, Homo sapien
tatagcaacatggatcaaccttaaaattacagt

SEQ ID NO: 263578 - DNA, 33 bp, Homo sapien
tatagcaacatggatcgaccttaaaattacagt

SEQ ID NO: 263579 - DNA, 33 bp, Homo sapien
ttgaatgtctgactcacccattggtcggtaggt

SEQ ID NO: 263580 - DNA, 33 bp, Homo sapien
ttgaatgtctgactcatccattggtcggtaggt

SEQ ID NO: 263581 - DNA, 33 bp, Homo sapien
tgatttattaacactgaactgacagtcaacagt

SEQ ID NO: 263582 - DNA, 33 bp, Homo sapien
tgatttattaacactgcactgacagtcaacagt

SEQ ID NO: 263583 - DNA, 33 bp, Homo sapien
aggagcaaagctggaacgaccttgacccagggc

SEQ ID NO: 263584 - DNA, 33 bp, Homo sapien
aggagcaaagctggaatgaccttgacccagggc

SEQ ID NO: 263585 - DNA, 33 bp, Homo sapien
gtattgataagtgcaacggataaaaataaggca

SEQ ID NO: 263586 - DNA, 33 bp, Homo sapien
gtattgataagtgcaatggataaaaataaggca

SEQ ID NO: 263587 - DNA, 33 bp, Homo sapien
tatgaaatacctgttacgtgtctggcaactgag

SEQ ID NO: 263588 - DNA, 33 bp, Homo sapien
tatgaaatacctgttatgtgtctggcaactgag

SEQ ID NO: 263589 - DNA, 33 bp, Homo sapien
ttttacagaaagagaacgaaaagttgtaacaca

SEQ ID NO: 263590 - DNA, 33 bp, Homo sapien
ttttacagaaagagaatgaaaagttgtaacaca

SEQ ID NO: 263591 - DNA, 33 bp, Homo sapien
ctctgagggccgtgtgaaatcaacttgtgaaac

SEQ ID NO: 263592 - DNA, 33 bp, Homo sapien
ctctgagggccgtgtggaatcaacttgtgaaac

SEQ ID NO: 263593 - DNA, 33 bp, Homo sapien
gtgggaaatagaagaacgggatggccttgttcc

SEQ ID NO: 263594 - DNA, 33 bp, Homo sapien
gtgggaaatagaagaatgggatggccttgttcc

SEQ ID NO: 263595 - DNA, 33 bp, Homo sapien
actgagtagtcatcagaatatttggttgtgttg

SEQ ID NO: 263596 - DNA, 33 bp, Homo sapien
actgagtagtcatcaggatatttggttgtgttg

SEQ ID NO: 263597 - DNA, 33 bp, Homo sapien
aaggccttttcaagcaagatcacaaacaaggtt

SEQ ID NO: 263598 - DNA, 33 bp, Homo sapien
aaggccttttcaagcaggatcacaaacaaggtt

SEQ ID NO: 263599 - DNA, 33 bp, Homo sapien
atttagtccccagcagaccttaaatcagcaaag

SEQ ID NO: 263600 - DNA, 33 bp, Homo sapien
atttagtccccagcaggccttaaatcagcaaag

SEQ ID NO: 263601 - DNA, 33 bp, Homo sapien
ctctgtctggtgtataccttaatggttcactct

SEQ ID NO: 263602 - DNA, 33 bp, Homo sapien
ctctgtctggtgtatatcttaatggttcactct

SEQ ID NO: 263603 - DNA, 33 bp, Homo sapien
atggccttttctttgcaatatctccagtaccta

SEQ ID NO: 263604 - DNA, 33 bp, Homo sapien
atggccttttctttgcgatatctccagtaccta

SEQ ID NO: 263605 - DNA, 33 bp, Homo sapien
tcaccttctacggacagatttttatttcactga

SEQ ID NO: 263606 - DNA, 33 bp, Homo sapien
tcaccttctacggacatatttttatttcactga

SEQ ID NO: 263607 - DNA, 33 bp, Homo sapien
gagcactgtggaaatacagatgtggtagaacaa

SEQ ID NO: 263608 - DNA, 33 bp, Homo sapien
gagcactgtggaaatatagatgtggtagaacaa

SEQ ID NO: 263609 - DNA, 33 bp, Homo sapien
ggtacccaattctgatcacttgtgggcctactg

SEQ ID NO: 263610 - DNA, 33 bp, Homo sapien
ggtacccaattctgatgacttgtgggcctactg

SEQ ID NO: 263611 - DNA, 33 bp, Homo sapien
tatggatctgaaaaaccctaaagaccaccagtg

SEQ ID NO: 263612 - DNA, 33 bp, Homo sapien
tatggatctgaaaaactctaaagaccaccagtg

SEQ ID NO: 263613 - DNA, 33 bp, Homo sapien
catgagtgggcaaaaagatctaaaacatgttga

SEQ ID NO: 263614 - DNA, 33 bp, Homo sapien
catgagtgggcaaaaatatctaaaacatgttga

SEQ ID NO: 263615 - DNA, 33 bp, Homo sapien
aatcttaccttatcccccttttctgacagtgca

SEQ ID NO: 263616 - DNA, 33 bp, Homo sapien
aatcttaccttatccctcttttctgacagtgca

SEQ ID NO: 263617 - DNA, 33 bp, Homo sapien
tacttattcatacagaagagacataccatgggc

SEQ ID NO: 263618 - DNA, 33 bp, Homo sapien
tacttattcatacagaggagacataccatgggc

SEQ ID NO: 263619 - DNA, 33 bp, Homo sapien
tgtaaagattactgtacagttcatgggtgggac

SEQ ID NO: 263620 - DNA, 33 bp, Homo sapien
tgtaaagattactgtatagttcatgggtgggac

SEQ ID NO: 263621 - DNA, 33 bp, Homo sapien
atgaaaatgcatgtccaccagctataggaaatt

SEQ ID NO: 263622 - DNA, 33 bp, Homo sapien
atgaaaatgcatgtcctccagctataggaaatt

SEQ ID NO: 263623 - DNA, 33 bp, Homo sapien
tggccatacagttaataacttcactgagtcctt

SEQ ID NO: 263624 - DNA, 33 bp, Homo sapien
tggccatacagttaatgacttcactgagtcctt

SEQ ID NO: 263625 - DNA, 33 bp, Homo sapien
taggatgttgcaacaaataaggatgattaacag

SEQ ID NO: 263626 - DNA, 33 bp, Homo sapien
taggatgttgcaacaactaaggatgattaacag

SEQ ID NO: 263627 - DNA, 33 bp, Homo sapien
agttcactccctttgcagatggtacatttgaca

SEQ ID NO: 263628 - DNA, 33 bp, Homo sapien
agttcactccctttgcggatggtacatttgaca

SEQ ID NO: 263629 - DNA, 33 bp, Homo sapien
actgggagttttcaaaatgactcaggtcgttgg

SEQ ID NO: 263630 - DNA, 33 bp, Homo sapien
actgggagttttcaaagtgactcaggtcgttgg

SEQ ID NO: 263631 - DNA, 33 bp, Homo sapien
tccactgactgctaaaaaccaatggaaataact

SEQ ID NO: 263632 - DNA, 33 bp, Homo sapien
tccactgactgctaaagaccaatggaaataact

SEQ ID NO: 263633 - DNA, 33 bp, Homo sapien
aatcagctagaaccaacacattatttcaaaggt

SEQ ID NO: 263634 - DNA, 33 bp, Homo sapien
aatcagctagaaccaatacattatttcaaaggt

SEQ ID NO: 263635 - DNA, 33 bp, Homo sapien
tctctagttgtgaggacaaatgcaatataatac

SEQ ID NO: 263636 - DNA, 33 bp, Homo sapien
tctctagttgtgaggagaaatgcaatataatac

SEQ ID NO: 263637 - DNA, 33 bp, Homo sapien
aggacaaagaggtggccgagagagttttggaat

SEQ ID NO: 263638 - DNA, 33 bp, Homo sapien
aggacaaagaggtggctgagagagttttggaat

SEQ ID NO: 263639 - DNA, 33 bp, Homo sapien
tgtacataatatccaacggaatcgatgacgggc

SEQ ID NO: 263640 - DNA, 33 bp, Homo sapien
tgtacataatatccaatggaatcgatgacgggc

SEQ ID NO: 263641 - DNA, 33 bp, Homo sapien
gagccctagctgcggcaatctcctgaaggttat

SEQ ID NO: 263642 - DNA, 33 bp, Homo sapien
gagccctagctgcggctatctcctgaaggttat

SEQ ID NO: 263643 - DNA, 33 bp, Homo sapien
tctacctagtaagacaagttatcattccttcct

SEQ ID NO: 263644 - DNA, 33 bp, Homo sapien
tctacctagtaagacaggttatcattccttcct

SEQ ID NO: 263645 - DNA, 33 bp, Homo sapien
agaactcagcctgagacagaaagattactgact

SEQ ID NO: 263646 - DNA, 33 bp, Homo sapien
agaactcagcctgagagagaaagattactgact

SEQ ID NO: 263647 - DNA, 33 bp, Homo sapien
caccaaaacaaacacaatgtggggttactacga

SEQ ID NO: 263648 - DNA, 33 bp, Homo sapien
caccaaaacaaacacagtgtggggttactacga

SEQ ID NO: 263649 - DNA, 33 bp, Homo sapien
caagaggactgatgaaagagaagccagccgttg

SEQ ID NO: 263650 - DNA, 33 bp, Homo sapien
caagaggactgatgaaggagaagccagccgttg

SEQ ID NO: 263651 - DNA, 33 bp, Homo sapien
aggaagggaggaaagcaaaggatagaggagaac

SEQ ID NO: 263652 - DNA, 33 bp, Homo sapien
aggaagggaggaaagcgaaggatagaggagaac

SEQ ID NO: 263653 - DNA, 33 bp, Homo sapien
catgatgtcctaacaaacaaattatcactttaa

SEQ ID NO: 263654 - DNA, 33 bp, Homo sapien
catgatgtcctaacaagcaaattatcactttaa

SEQ ID NO: 263655 - DNA, 33 bp, Homo sapien
agatagagaaaaaagaagaatcaaatgctatca

SEQ ID NO: 263656 - DNA, 33 bp, Homo sapien
agatagagaaaaaagatgaatcaaatgctatca

SEQ ID NO: 263657 - DNA, 33 bp, Homo sapien
aaaatattttggaatacgagtgacacgagtgtt

SEQ ID NO: 263658 - DNA, 33 bp, Homo sapien
aaaatattttggaatatgagtgacacgagtgtt

SEQ ID NO: 263659 - DNA, 33 bp, Homo sapien
aagatttatctctgtacgaatcagttttatgta

SEQ ID NO: 263660 - DNA, 33 bp, Homo sapien
aagatttatctctgtatgaatcagttttatgta

SEQ ID NO: 263661 - DNA, 33 bp, Homo sapien
gaaaaattgttctgcaagaatctagatataaca

SEQ ID NO: 263662 - DNA, 33 bp, Homo sapien
gaaaaattgttctgcaggaatctagatataaca

SEQ ID NO: 263663 - DNA, 33 bp, Homo sapien
aaatcaagataccacactaatagaatacaatca

SEQ ID NO: 263664 - DNA, 33 bp, Homo sapien
aaatcaagataccacattaatagaatacaatca

SEQ ID NO: 263665 - DNA, 33 bp, Homo sapien
aagactttcttctgcacgagttttgagctaaaa

SEQ ID NO: 263666 - DNA, 33 bp, Homo sapien
aagactttcttctgcatgagttttgagctaaaa

SEQ ID NO: 263667 - DNA, 33 bp, Homo sapien
aactcaaacaaatggaacagcatactaagttct

SEQ ID NO: 263668 - DNA, 33 bp, Homo sapien
aactcaaacaaatggagcagcatactaagttct

SEQ ID NO: 263669 - DNA, 33 bp, Homo sapien
gataaatcattcttccccagtaaaatagtttat

SEQ ID NO: 263670 - DNA, 33 bp, Homo sapien
gataaatcattcttccgcagtaaaatagtttat

SEQ ID NO: 263671 - DNA, 33 bp, Homo sapien
tatagagcttacctggacaattatttatttagg

SEQ ID NO: 263672 - DNA, 33 bp, Homo sapien
tatagagcttacctggtcaattatttatttagg

SEQ ID NO: 263673 - DNA, 33 bp, Homo sapien
ctcttttcatgaacgaagatgtgataaatcgtg

SEQ ID NO: 263674 - DNA, 33 bp, Homo sapien
ctcttttcatgaacgacgatgtgataaatcgtg

SEQ ID NO: 263675 - DNA, 33 bp, Homo sapien
gatattcttcaaattgaatcaagtccatgtcaa

SEQ ID NO: 263676 - DNA, 33 bp, Homo sapien
gatattcttcaaattggatcaagtccatgtcaa

SEQ ID NO: 263677 - DNA, 33 bp, Homo sapien
gtgagaccctgtgtgacggcccaggctgcccgt

SEQ ID NO: 263678 - DNA, 33 bp, Homo sapien
gtgagaccctgtgtgatggcccaggctgcccgt

SEQ ID NO: 263679 - DNA, 33 bp, Homo sapien
gggacactcatcactcaccttttatcttcaaaa

SEQ ID NO: 263680 - DNA, 33 bp, Homo sapien
gggacactcatcactcgccttttatcttcaaaa

SEQ ID NO: 263681 - DNA, 33 bp, Homo sapien
tatagagttgattcaacgctgaagctaaacaaa

SEQ ID NO: 263682 - DNA, 33 bp, Homo sapien
tatagagttgattcaatgctgaagctaaacaaa

SEQ ID NO: 263683 - DNA, 33 bp, Homo sapien
aggaacaaactgttaacgtcaactttccccagt

SEQ ID NO: 263684 - DNA, 33 bp, Homo sapien
aggaacaaactgttaatgtcaactttccccagt

SEQ ID NO: 263685 - DNA, 33 bp, Homo sapien
caattacaaagtacataaaagctgacctacaaa

SEQ ID NO: 263686 - DNA, 33 bp, Homo sapien
caattacaaagtacatcaaagctgacctacaaa

SEQ ID NO: 263687 - DNA, 33 bp, Homo sapien
taagcacaaataaataagagttcacatggattc

SEQ ID NO: 263688 - DNA, 33 bp, Homo sapien
taagcacaaataaatatgagttcacatggattc

SEQ ID NO: 263689 - DNA, 33 bp, Homo sapien
tctcttgggagtgaaactcatgcatacggcttt

SEQ ID NO: 263690 - DNA, 33 bp, Homo sapien
tctcttgggagtgaaattcatgcatacggcttt

SEQ ID NO: 263691 - DNA, 33 bp, Homo sapien
cttctcaacttgccaaactttcttccttcccat

SEQ ID NO: 263692 - DNA, 33 bp, Homo sapien
cttctcaacttgccaagctttcttccttcccat

SEQ ID NO: 263693 - DNA, 33 bp, Homo sapien
gtaacttgaatgggccagaactcctgtttttaa

SEQ ID NO: 263694 - DNA, 33 bp, Homo sapien
gtaacttgaatgggccggaactcctgtttttaa

SEQ ID NO: 263695 - DNA, 33 bp, Homo sapien
tgatttatcaacagaaccaaatgggactatatg

SEQ ID NO: 263696 - DNA, 33 bp, Homo sapien
tgatttatcaacagaatcaaatgggactatatg

SEQ ID NO: 263697 - DNA, 33 bp, Homo sapien
ataaagttttatgtcacgattgtggtgatagtt

SEQ ID NO: 263698 - DNA, 33 bp, Homo sapien
ataaagttttatgtcatgattgtggtgatagtt

SEQ ID NO: 263699 - DNA, 33 bp, Homo sapien
aacaaaagtactggcaaatattgtcaaaatcaa

SEQ ID NO: 263700 - DNA, 33 bp, Homo sapien
aacaaaagtactggcagatattgtcaaaatcaa

SEQ ID NO: 263701 - DNA, 33 bp, Homo sapien
gttacttagtttgttgaaagcccatatcaattt

SEQ ID NO: 263702 - DNA, 33 bp, Homo sapien
gttacttagtttgttggaagcccatatcaattt

SEQ ID NO: 263703 - DNA, 33 bp, Homo sapien
tcatctgaaaataaaaacatcagtccaagtggt

SEQ ID NO: 263704 - DNA, 33 bp, Homo sapien
tcatctgaaaataaaagcatcagtccaagtggt

SEQ ID NO: 263705 - DNA, 33 bp, Homo sapien
catgccttaaccactggaattctccagagttct

SEQ ID NO: 263706 - DNA, 33 bp, Homo sapien
catgccttaaccactgtaattctccagagttct

SEQ ID NO: 263707 - DNA, 33 bp, Homo sapien
ctatacctgctaaccccgaggcttcagtcatac

SEQ ID NO: 263708 - DNA, 33 bp, Homo sapien
ctatacctgctaaccctgaggcttcagtcatac

SEQ ID NO: 263709 - DNA, 33 bp, Homo sapien
ctcacttgaagctggaccagttctcactagaaa

SEQ ID NO: 263710 - DNA, 33 bp, Homo sapien
ctcacttgaagctggagcagttctcactagaaa

SEQ ID NO: 263711 - DNA, 33 bp, Homo sapien
gcaatgaactattaaaacacatagcaacataaa

SEQ ID NO: 263712 - DNA, 33 bp, Homo sapien
gcaatgaactattaaatcacatagcaacataaa

SEQ ID NO: 263713 - DNA, 33 bp, Homo sapien
atcaccctgggcctgcaattgtacctcaacatt

SEQ ID NO: 263714 - DNA, 33 bp, Homo sapien
atcaccctgggcctgcgattgtacctcaacatt

SEQ ID NO: 263715 - DNA, 33 bp, Homo sapien
acttccagccttctccaccgtcagtctacactg

SEQ ID NO: 263716 - DNA, 33 bp, Homo sapien
acttccagccttctccgccgtcagtctacactg

SEQ ID NO: 263717 - DNA, 33 bp, Homo sapien
ctctcagctctgtttacgtggacttctttccca

SEQ ID NO: 263718 - DNA, 33 bp, Homo sapien
ctctcagctctgtttatgtggacttctttccca

SEQ ID NO: 263719 - DNA, 33 bp, Homo sapien
ctgaaaagatacaggaagagtttgcatccctaa

SEQ ID NO: 263720 - DNA, 33 bp, Homo sapien
ctgaaaagatacaggaggagtttgcatccctaa

SEQ ID NO: 263721 - DNA, 33 bp, Homo sapien
ctgtgctccttctttcacctacatggcaaggtt

SEQ ID NO: 263722 - DNA, 33 bp, Homo sapien
ctgtgctccttctttcgcctacatggcaaggtt

SEQ ID NO: 263723 - DNA, 33 bp, Homo sapien
aactagttttgattgacccagatatgacagttg

SEQ ID NO: 263724 - DNA, 33 bp, Homo sapien
aactagttttgattgatccagatatgacagttg

SEQ ID NO: 263725 - DNA, 33 bp, Homo sapien
tgcccttgagatccccacatatcaggcatgtga

SEQ ID NO: 263726 - DNA, 33 bp, Homo sapien
tgcccttgagatccccgcatatcaggcatgtga

SEQ ID NO: 263727 - DNA, 33 bp, Homo sapien
atgactgcttgaattaaacctagtgccaaatgg

SEQ ID NO: 263728 - DNA, 33 bp, Homo sapien
atgactgcttgaattatacctagtgccaaatgg

SEQ ID NO: 263729 - DNA, 33 bp, Homo sapien
cttcttcttgggctaaaggagagcaccttagag

SEQ ID NO: 263730 - DNA, 33 bp, Homo sapien
cttcttcttgggctaagggagagcaccttagag

SEQ ID NO: 263731 - DNA, 33 bp, Homo sapien
tgttaaaccaagtccaagagacagaggtgggga

SEQ ID NO: 263732 - DNA, 33 bp, Homo sapien
tgttaaaccaagtccaggagacagaggtgggga

SEQ ID NO: 263733 - DNA, 33 bp, Homo sapien
aaccaagctcgtccagcccacggccccaggccg

SEQ ID NO: 263734 - DNA, 33 bp, Homo sapien
aaccaagctcgtccaggccacggccccaggccg

SEQ ID NO: 263735 - DNA, 33 bp, Homo sapien
cgagcttggtttagaccctcattttgtctaaac

SEQ ID NO: 263736 - DNA, 33 bp, Homo sapien
cgagcttggtttagactctcattttgtctaaac

SEQ ID NO: 263737 - DNA, 33 bp, Homo sapien
ttacatttcaagggaaaggaggcattactgaac

SEQ ID NO: 263738 - DNA, 33 bp, Homo sapien
ttacatttcaagggaagggaggcattactgaac

SEQ ID NO: 263739 - DNA, 33 bp, Homo sapien
gtactaaggttcgtgacctcttttaagctttat

SEQ ID NO: 263740 - DNA, 33 bp, Homo sapien
gtactaaggttcgtgatctcttttaagctttat

SEQ ID NO: 263741 - DNA, 33 bp, Homo sapien
ccacaaggttagaggaaaggaagtgactcaatg

SEQ ID NO: 263742 - DNA, 33 bp, Homo sapien
ccacaaggttagaggacaggaagtgactcaatg

SEQ ID NO: 263743 - DNA, 33 bp, Homo sapien
cagatcatgactgtgacagcaatgattatctca

SEQ ID NO: 263744 - DNA, 33 bp, Homo sapien
cagatcatgactgtgatagcaatgattatctca

SEQ ID NO: 263745 - DNA, 33 bp, Homo sapien
tttctagaagtgacgaacagtgaaacaaaccta

SEQ ID NO: 263746 - DNA, 33 bp, Homo sapien
tttctagaagtgacgagcagtgaaacaaaccta

SEQ ID NO: 263747 - DNA, 33 bp, Homo sapien
gggatgctataactcaaaccacagcttttgctc

SEQ ID NO: 263748 - DNA, 33 bp, Homo sapien
gggatgctataactcataccacagcttttgctc

SEQ ID NO: 263749 - DNA, 33 bp, Homo sapien
agcaactagaagcttaaaacacaaccagcgaca

SEQ ID NO: 263750 - DNA, 33 bp, Homo sapien
agcaactagaagcttagaacacaaccagcgaca

SEQ ID NO: 263751 - DNA, 33 bp, Homo sapien
aatcaccagcagattaactattaacctactagt

SEQ ID NO: 263752 - DNA, 33 bp, Homo sapien
aatcaccagcagattagctattaacctactagt

SEQ ID NO: 263753 - DNA, 33 bp, Homo sapien
acagaaccctggtaccaatttttgtgtctggaa

SEQ ID NO: 263754 - DNA, 33 bp, Homo sapien
acagaaccctggtacccatttttgtgtctggaa

SEQ ID NO: 263755 - DNA, 33 bp, Homo sapien
tccaaagctaccttaaacatcacttgcctttga

SEQ ID NO: 263756 - DNA, 33 bp, Homo sapien
tccaaagctaccttaagcatcacttgcctttga

SEQ ID NO: 263757 - DNA, 33 bp, Homo sapien
agaagcctttgaatgacgggcagaatttattaa

SEQ ID NO: 263758 - DNA, 33 bp, Homo sapien
agaagcctttgaatgatgggcagaatttattaa

SEQ ID NO: 263759 - DNA, 33 bp, Homo sapien
cgaggtggttgggaggcccatatgacataatgt

SEQ ID NO: 263760 - DNA, 33 bp, Homo sapien
cgaggtggttgggaggtccatatgacataatgt

SEQ ID NO: 263761 - DNA, 33 bp, Homo sapien
gttaattggcttcttaggccctggaatttggaa

SEQ ID NO: 263762 - DNA, 33 bp, Homo sapien
gttaattggcttcttatgccctggaatttggaa

SEQ ID NO: 263763 - DNA, 33 bp, Homo sapien
ttgcactgtaaagggaacacactcttatccatg

SEQ ID NO: 263764 - DNA, 33 bp, Homo sapien
ttgcactgtaaagggagcacactcttatccatg

SEQ ID NO: 263765 - DNA, 33 bp, Homo sapien
ttatatatttgtgaaactcagcattaagatttt

SEQ ID NO: 263766 - DNA, 33 bp, Homo sapien
ttatatatttgtgaaagtcagcattaagatttt

SEQ ID NO: 263767 - DNA, 33 bp, Homo sapien
cattatcaagtgtaacggctctcttttctccct

SEQ ID NO: 263768 - DNA, 33 bp, Homo sapien
cattatcaagtgtaactgctctcttttctccct

SEQ ID NO: 263769 - DNA, 33 bp, Homo sapien
cgttgtttcgttttacaatcgcacattcaatct

SEQ ID NO: 263770 - DNA, 33 bp, Homo sapien
cgttgtttcgttttacgatcgcacattcaatct

SEQ ID NO: 263771 - DNA, 33 bp, Homo sapien
ttatgggaatgccccgaacctgcagtcagaaac

SEQ ID NO: 263772 - DNA, 33 bp, Homo sapien
ttatgggaatgccccggacctgcagtcagaaac

SEQ ID NO: 263773 - DNA, 33 bp, Homo sapien
attccttgacatggacaagattgtagagggctg

SEQ ID NO: 263774 - DNA, 33 bp, Homo sapien
attccttgacatggacgagattgtagagggctg

SEQ ID NO: 263775 - DNA, 33 bp, Homo sapien
ggaaagcaggaaccaacggctaagagtgagatg

SEQ ID NO: 263776 - DNA, 33 bp, Homo sapien
ggaaagcaggaaccaatggctaagagtgagatg

SEQ ID NO: 263777 - DNA, 33 bp, Homo sapien
tcctatctcttgagacgaattcctcatccacag

SEQ ID NO: 263778 - DNA, 33 bp, Homo sapien
tcctatctcttgagactaattcctcatccacag

SEQ ID NO: 263779 - DNA, 33 bp, Homo sapien
acatccaaatacaacacattaagctgtctctga

SEQ ID NO: 263780 - DNA, 33 bp, Homo sapien
acatccaaatacaacatattaagctgtctctga

SEQ ID NO: 263781 - DNA, 33 bp, Homo sapien
aagagaacacactaacgcacgatgactcagttg

SEQ ID NO: 263782 - DNA, 33 bp, Homo sapien
aagagaacacactaactcacgatgactcagttg

SEQ ID NO: 263783 - DNA, 33 bp, Homo sapien
gggagggacctgaatacggcccatagagtgaaa

SEQ ID NO: 263784 - DNA, 33 bp, Homo sapien
gggagggacctgaatatggcccatagagtgaaa

SEQ ID NO: 263785 - DNA, 33 bp, Homo sapien
gctgcaattgaatatacgcactattgggatgca

SEQ ID NO: 263786 - DNA, 33 bp, Homo sapien
gctgcaattgaatatatgcactattgggatgca

SEQ ID NO: 263787 - DNA, 33 bp, Homo sapien
ctggatttcgattcaacttagaaatagtttaat

SEQ ID NO: 263788 - DNA, 33 bp, Homo sapien
ctggatttcgattcaatttagaaatagtttaat

SEQ ID NO: 263789 - DNA, 33 bp, Homo sapien
taacagggatcagtgcaatggaattctgcaatg

SEQ ID NO: 263790 - DNA, 33 bp, Homo sapien
taacagggatcagtgcgatggaattctgcaatg

SEQ ID NO: 263791 - DNA, 33 bp, Homo sapien
aacctggttttccaccaaaagttctctcatttc

SEQ ID NO: 263792 - DNA, 33 bp, Homo sapien
aacctggttttccacccaaagttctctcatttc

SEQ ID NO: 263793 - DNA, 33 bp, Homo sapien
ctgccttcaaggagatgataagtaagtgtgata

SEQ ID NO: 263794 - DNA, 33 bp, Homo sapien
ctgccttcaaggagattataagtaagtgtgata

SEQ ID NO: 263795 - DNA, 33 bp, Homo sapien
ttgaagactttcacataagtatcagcttagtaa

SEQ ID NO: 263796 - DNA, 33 bp, Homo sapien
ttgaagactttcacatgagtatcagcttagtaa

SEQ ID NO: 263797 - DNA, 33 bp, Homo sapien
tacttggaagcctccagctagacacccacacca

SEQ ID NO: 263798 - DNA, 33 bp, Homo sapien
tacttggaagcctccatctagacacccacacca

SEQ ID NO: 263799 - DNA, 33 bp, Homo sapien
agttggaaggtctaagacagacaaagctgctta

SEQ ID NO: 263800 - DNA, 33 bp, Homo sapien
agttggaaggtctaaggcagacaaagctgctta

SEQ ID NO: 263801 - DNA, 33 bp, Homo sapien
atttatattcaccaaacgacacactggatacaa

SEQ ID NO: 263802 - DNA, 33 bp, Homo sapien
atttatattcaccaaatgacacactggatacaa

SEQ ID NO: 263803 - DNA, 33 bp, Homo sapien
gatttctgaatcacaacactgttggaaatcttt

SEQ ID NO: 263804 - DNA, 33 bp, Homo sapien
gatttctgaatcacaagactgttggaaatcttt

SEQ ID NO: 263805 - DNA, 33 bp, Homo sapien
tgagcctggggctgaaagaataaagttctttga

SEQ ID NO: 263806 - DNA, 33 bp, Homo sapien
tgagcctggggctgaatgaataaagttctttga

SEQ ID NO: 263807 - DNA, 33 bp, Homo sapien
tctacatttggctgacagaaacatagcctggct

SEQ ID NO: 263808 - DNA, 33 bp, Homo sapien
tctacatttggctgacggaaacatagcctggct

SEQ ID NO: 263809 - DNA, 33 bp, Homo sapien
tttttatagctttggagagcacttaaagataga

SEQ ID NO: 263810 - DNA, 33 bp, Homo sapien
tttttatagctttggatagcacttaaagataga

SEQ ID NO: 263811 - DNA, 33 bp, Homo sapien
tttgatggtcaaagcaaatacttttgtcactag

SEQ ID NO: 263812 - DNA, 33 bp, Homo sapien
tttgatggtcaaagcatatacttttgtcactag

SEQ ID NO: 263813 - DNA, 33 bp, Homo sapien
cattgaagattgtgaggagcttttgttacaaaa

SEQ ID NO: 263814 - DNA, 33 bp, Homo sapien
cattgaagattgtgagtagcttttgttacaaaa

SEQ ID NO: 263815 - DNA, 33 bp, Homo sapien
cacgcaccacctttaccgcttactatgtaagtc

SEQ ID NO: 263816 - DNA, 33 bp, Homo sapien
cacgcaccacctttacggcttactatgtaagtc

SEQ ID NO: 263817 - DNA, 33 bp, Homo sapien
tttctcagaattatagcccttccttcatatact

SEQ ID NO: 263818 - DNA, 33 bp, Homo sapien
tttctcagaattatagtccttccttcatatact

SEQ ID NO: 263819 - DNA, 33 bp, Homo sapien
gagcctacattttaacaagatttgcagatgact

SEQ ID NO: 263820 - DNA, 33 bp, Homo sapien
gagcctacattttaacgagatttgcagatgact

SEQ ID NO: 263821 - DNA, 33 bp, Homo sapien
ttctttatccattgtaaccttgatggacatttg

SEQ ID NO: 263822 - DNA, 33 bp, Homo sapien
ttctttatccattgtatccttgatggacatttg

SEQ ID NO: 263823 - DNA, 33 bp, Homo sapien
gactagtaaggaaaccacaattgctcttttagc

SEQ ID NO: 263824 - DNA, 33 bp, Homo sapien
gactagtaaggaaaccgcaattgctcttttagc

SEQ ID NO: 263825 - DNA, 33 bp, Homo sapien
tccccaacaatctacaatctttcatatccaaca

SEQ ID NO: 263826 - DNA, 33 bp, Homo sapien
tccccaacaatctacagtctttcatatccaaca

SEQ ID NO: 263827 - DNA, 33 bp, Homo sapien
agccaccaatcccattaaatatttccatttgta

SEQ ID NO: 263828 - DNA, 33 bp, Homo sapien
agccaccaatcccattgaatatttccatttgta

SEQ ID NO: 263829 - DNA, 33 bp, Homo sapien
aatcctcttttctggaaagcatcccacaatcca

SEQ ID NO: 263830 - DNA, 33 bp, Homo sapien
aatcctcttttctggagagcatcccacaatcca

SEQ ID NO: 263831 - DNA, 33 bp, Homo sapien
ctagaaatgaccaagaacataatgataataaat

SEQ ID NO: 263832 - DNA, 33 bp, Homo sapien
ctagaaatgaccaagatcataatgataataaat

SEQ ID NO: 263833 - DNA, 33 bp, Homo sapien
ttgattaggagtagagaaatttgaacctgttgc

SEQ ID NO: 263834 - DNA, 33 bp, Homo sapien
ttgattaggagtagaggaatttgaacctgttgc

SEQ ID NO: 263835 - DNA, 33 bp, Homo sapien
ctcctccagactgtaccggaaatgtcatttcta

SEQ ID NO: 263836 - DNA, 33 bp, Homo sapien
ctcctccagactgtactggaaatgtcatttcta

SEQ ID NO: 263837 - DNA, 33 bp, Homo sapien
acacttgtgattgaaaataatacataaaacagt

SEQ ID NO: 263838 - DNA, 33 bp, Homo sapien
acacttgtgattgaaattaatacataaaacagt

SEQ ID NO: 263839 - DNA, 33 bp, Homo sapien
tgagggacttttgttacaatctgttgattttaa

SEQ ID NO: 263840 - DNA, 33 bp, Homo sapien
tgagggacttttgttataatctgttgattttaa

SEQ ID NO: 263841 - DNA, 33 bp, Homo sapien
atccccatcattatcactgagactctgggatgc

SEQ ID NO: 263842 - DNA, 33 bp, Homo sapien
atccccatcattatcattgagactctgggatgc

SEQ ID NO: 263843 - DNA, 33 bp, Homo sapien
actaatggatcgatacaagatgctgccagccat

SEQ ID NO: 263844 - DNA, 33 bp, Homo sapien
actaatggatcgatacgagatgctgccagccat

SEQ ID NO: 263845 - DNA, 33 bp, Homo sapien
gactatgaggacaacaccttgtggccaggaaag

SEQ ID NO: 263846 - DNA, 33 bp, Homo sapien
gactatgaggacaacatcttgtggccaggaaag

SEQ ID NO: 263847 - DNA, 33 bp, Homo sapien
gtgcctcaccaagatacagccatggtactgaat

SEQ ID NO: 263848 - DNA, 33 bp, Homo sapien
gtgcctcaccaagatagagccatggtactgaat

SEQ ID NO: 263849 - DNA, 33 bp, Homo sapien
ttgtaaagttgatgaccatgatatgacattgag

SEQ ID NO: 263850 - DNA, 33 bp, Homo sapien
ttgtaaagttgatgactatgatatgacattgag

SEQ ID NO: 263851 - DNA, 33 bp, Homo sapien
gtctttagagatgccaaaggtttgttgaacaca

SEQ ID NO: 263852 - DNA, 33 bp, Homo sapien
gtctttagagatgccacaggtttgttgaacaca

SEQ ID NO: 263853 - DNA, 33 bp, Homo sapien
gaaagcagaaacagaccggcttaatgcaaatct

SEQ ID NO: 263854 - DNA, 33 bp, Homo sapien
gaaagcagaaacagactggcttaatgcaaatct

SEQ ID NO: 263855 - DNA, 33 bp, Homo sapien
tccttaaagcccccaccaactctttgcaatgtg

SEQ ID NO: 263856 - DNA, 33 bp, Homo sapien
tccttaaagcccccactaactctttgcaatgtg

SEQ ID NO: 263857 - DNA, 33 bp, Homo sapien
gctacaatgcaatatcaagcagaatcagggtcc

SEQ ID NO: 263858 - DNA, 33 bp, Homo sapien
gctacaatgcaatatcgagcagaatcagggtcc

SEQ ID NO: 263859 - DNA, 33 bp, Homo sapien
cataaacagatccaaccgcaaaaaccatatgat

SEQ ID NO: 263860 - DNA, 33 bp, Homo sapien
cataaacagatccaactgcaaaaaccatatgat

SEQ ID NO: 263861 - DNA, 33 bp, Homo sapien; identical to SEQ ID NO: 263859

SEQ ID NO: 263862 - DNA, 33 bp, Homo sapien; identical to SEQ ID NO: 263860

SEQ ID NO: 263863 - DNA, 33 bp, Homo sapien
gattgtaaaattagaaccaaatggcctccagaa

SEQ ID NO: 263864 - DNA, 33 bp, Homo sapien
gattgtaaaattagaatcaaatggcctccagaa

SEQ ID NO: 263865 - DNA, 33 bp, Homo sapien
tctagtccgggccctacgtttcacctagtcata

SEQ ID NO: 263866 - DNA, 33 bp, Homo sapien
tctagtccgggccctatgtttcacctagtcata

SEQ ID NO: 263867 - DNA, 33 bp, Homo sapien
agtccttttctattaacctattcctgctgatta

SEQ ID NO: 263868 - DNA, 33 bp, Homo sapien
agtccttttctattaagctattcctgctgatta

SEQ ID NO: 263869 - DNA, 33 bp, Homo sapien
tctagccagtggaacacgaaggagaaggcagag

SEQ ID NO: 263870 - DNA, 33 bp, Homo sapien
tctagccagtggaacatgaaggagaaggcagag

SEQ ID NO: 263871 - DNA, 33 bp, Homo sapien
ggtgaacaagaaaaccacactgagctccatagc

SEQ ID NO: 263872 - DNA, 33 bp, Homo sapien
ggtgaacaagaaaaccgcactgagctccatagc

SEQ ID NO: 263873 - DNA, 33 bp, Homo sapien
ctgggcccacaaaagaacctcacccatttgatg

SEQ ID NO: 263874 - DNA, 33 bp, Homo sapien
ctgggcccacaaaagaccctcacccatttgatg

SEQ ID NO: 263875 - DNA, 33 bp, Homo sapien
tgtttgcaggttaaacaagctcaaccaactgag

SEQ ID NO: 263876 - DNA, 33 bp, Homo sapien
tgtttgcaggttaaacgagctcaaccaactgag

SEQ ID NO: 263877 - DNA, 33 bp, Homo sapien
gagatagcaatataaactcagcagcttgcagac

SEQ ID NO: 263878 - DNA, 33 bp, Homo sapien
gagatagcaatataaagtcagcagcttgcagac

SEQ ID NO: 263879 - DNA, 33 bp, Homo sapien
ccccatgactgagaaacgaggagaaggtactga

SEQ ID NO: 263880 - DNA, 33 bp, Homo sapien
ccccatgactgagaaatgaggagaaggtactga

SEQ ID NO: 263881 - DNA, 33 bp, Homo sapien
gtcactgcatccagacagtaagacttcagaccc

SEQ ID NO: 263882 - DNA, 33 bp, Homo sapien
gtcactgcatccagacggtaagacttcagaccc

SEQ ID NO: 263883 - DNA, 33 bp, Homo sapien
caggacctagcccaaacccttggtgtttcagta

SEQ ID NO: 263884 - DNA, 33 bp, Homo sapien
caggacctagcccaaatccttggtgtttcagta

SEQ ID NO: 263885 - DNA, 33 bp, Homo sapien
aatactgcgcacccccacagttttctctcttat

SEQ ID NO: 263886 - DNA, 33 bp, Homo sapien
aatactgcgcacccccccagttttctctcttat

SEQ ID NO: 263887 - DNA, 33 bp, Homo sapien
aaaaagagctgtcataccaagaactgatttcaa

SEQ ID NO: 263888 - DNA, 33 bp, Homo sapien
aaaaagagctgtcatatcaagaactgatttcaa

SEQ ID NO: 263889 - DNA, 33 bp, Homo sapien
gcatagctgtgcaggacaataggaaagggagtt

SEQ ID NO: 263890 - DNA, 33 bp, Homo sapien
gcatagctgtgcaggataataggaaagggagtt

SEQ ID NO: 263891 - DNA, 33 bp, Homo sapien
agatgcaactggtaaccagataactaggtaaca

SEQ ID NO: 263892 - DNA, 33 bp, Homo sapien
agatgcaactggtaactagataactaggtaaca

SEQ ID NO: 263893 - DNA, 33 bp, Homo sapien
acaatagcggccagtcgaacttcatctgctgga

SEQ ID NO: 263894 - DNA, 33 bp, Homo sapien
acaatagcggccagtctaacttcatctgctgga

SEQ ID NO: 263895 - DNA, 33 bp, Homo sapien
caggctagcctgcataaccctatttcagccata

SEQ ID NO: 263896 - DNA, 33 bp, Homo sapien
caggctagcctgcatacccctatttcagccata

SEQ ID NO: 263897 - DNA, 33 bp, Homo sapien
ctcggggagttcttgcaaagtttgacttcttga

SEQ ID NO: 263898 - DNA, 33 bp, Homo sapien
ctcggggagttcttgcgaagtttgacttcttga

SEQ ID NO: 263899 - DNA, 33 bp, Homo sapien
aaactaagtttcctctcaaattttgtaactgag

SEQ ID NO: 263900 - DNA, 33 bp, Homo sapien
aaactaagtttcctctgaaattttgtaactgag

SEQ ID NO: 263901 - DNA, 33 bp, Homo sapien
agtagttggaatcatacggtctgtagatctgaa

SEQ ID NO: 263902 - DNA, 33 bp, Homo sapien
agtagttggaatcatatggtctgtagatctgaa

SEQ ID NO: 263903 - DNA, 33 bp, Homo sapien
gcaaagactgggaagaggctgaagtccccaggg

SEQ ID NO: 263904 - DNA, 33 bp, Homo sapien
gcaaagactgggaagatgctgaagtccccaggg

SEQ ID NO: 263905 - DNA, 33 bp, Homo sapien
aaaatgaaatgaatgcaaaattccaaatgttat

SEQ ID NO: 263906 - DNA, 33 bp, Homo sapien
aaaatgaaatgaatgcgaaattccaaatgttat

SEQ ID NO: 263907 - DNA, 33 bp, Homo sapien
tgccaactaaatgccaccagaggtcttgttcag

SEQ ID NO: 263908 - DNA, 33 bp, Homo sapien
tgccaactaaatgccatcagaggtcttgttcag

SEQ ID NO: 263909 - DNA, 33 bp, Homo sapien
ttatgaagatgtcttcactcatattttccataa

SEQ ID NO: 263910 - DNA, 33 bp, Homo sapien
ttatgaagatgtcttcgctcatattttccataa

SEQ ID NO: 263911 - DNA, 33 bp, Homo sapien
ctgaacgaaatgcccaaggttttcagagatgct

SEQ ID NO: 263912 - DNA, 33 bp, Homo sapien
ctgaacgaaatgcccacggttttcagagatgct

SEQ ID NO: 263913 - DNA, 33 bp, Homo sapien
tcagcaataaaaacaaatgaactactgatgcat

SEQ ID NO: 263914 - DNA, 33 bp, Homo sapien
tcagcaataaaaacaagtgaactactgatgcat

SEQ ID NO: 263915 - DNA, 33 bp, Homo sapien
tcagtgcttgaatcccacctgtgctcatcacca

SEQ ID NO: 263916 - DNA, 33 bp, Homo sapien
tcagtgcttgaatccctcctgtgctcatcacca

SEQ ID NO: 263917 - DNA, 33 bp, Homo sapien
agaatctgtacaaggaagatgtcatcctgtttg

SEQ ID NO: 263918 - DNA, 33 bp, Homo sapien
agaatctgtacaaggaggatgtcatcctgtttg

SEQ ID NO: 263919 - DNA, 33 bp, Homo sapien
ccagatttgttattctcaatttgggatgtgtgc

SEQ ID NO: 263920 - DNA, 33 bp, Homo sapien
ccagatttgttattctgaatttgggatgtgtgc

SEQ ID NO: 263921 - DNA, 33 bp, Homo sapien
aataaacctgcttcaaacttcatcaatcattgt

SEQ ID NO: 263922 - DNA, 33 bp, Homo sapien
aataaacctgcttcaaccttcatcaatcattgt

SEQ ID NO: 263923 - DNA, 33 bp, Homo sapien
tttctgcttaaatctacacagtgttagcttggc

SEQ ID NO: 263924 - DNA, 33 bp, Homo sapien
tttctgcttaaatctagacagtgttagcttggc

SEQ ID NO: 263925 - DNA, 33 bp, Homo sapien
ttttctagatgagtaacacaagctcaatatcat

SEQ ID NO: 263926 - DNA, 33 bp, Homo sapien
ttttctagatgagtaatacaagctcaatatcat

SEQ ID NO: 263927 - DNA, 33 bp, Homo sapien
agtttttgccatttaagggaatcattactttgc

SEQ ID NO: 263928 - DNA, 33 bp, Homo sapien
agtttttgccatttaatggaatcattactttgc

SEQ ID NO: 263929 - DNA, 33 bp, Homo sapien
taggctagaatgtaccagaacattttccatagg

SEQ ID NO: 263930 - DNA, 33 bp, Homo sapien
taggctagaatgtaccggaacattttccatagg

SEQ ID NO: 263931 - DNA, 33 bp, Homo sapien
tacatttccaccaccacattacaggaaacaaaa

SEQ ID NO: 263932 - DNA, 33 bp, Homo sapien
tacatttccaccaccatattacaggaaacaaaa

SEQ ID NO: 263933 - DNA, 33 bp, Homo sapien
tttttgtttgtttgaacctttctatcagtggtc

SEQ ID NO: 263934 - DNA, 33 bp, Homo sapien
tttttgtttgtttgaatctttctatcagtggtc

SEQ ID NO: 263935 - DNA, 33 bp, Homo sapien
gaaatgttacatgcaaattcttttaaaaagtgg

SEQ ID NO: 263936 - DNA, 33 bp, Homo sapien
gaaatgttacatgcaagttcttttaaaaagtgg

SEQ ID NO: 263937 - DNA, 33 bp, Homo sapien
tccctgtcgttacagaacttacagaatcatcag

SEQ ID NO: 263938 - DNA, 33 bp, Homo sapien
tccctgtcgttacagaccttacagaatcatcag

SEQ ID NO: 263939 - DNA, 33 bp, Homo sapien
agtaggaaagttgccaaatcttacattttgtct

SEQ ID NO: 263940 - DNA, 33 bp, Homo sapien
agtaggaaagttgccagatcttacattttgtct

SEQ ID NO: 263941 - DNA, 33 bp, Homo sapien
cccaaatgttactatcaaaggaaacaactgtac

SEQ ID NO: 263942 - DNA, 33 bp, Homo sapien
cccaaatgttactatcgaaggaaacaactgtac

SEQ ID NO: 263943 - DNA, 33 bp, Homo sapien
agcagttaaatgacagcaatattttctttcacc

SEQ ID NO: 263944 - DNA, 33 bp, Homo sapien
agcagttaaatgacaggaatattttctttcacc

SEQ ID NO: 263945 - DNA, 33 bp, Homo sapien
agttttcaggccaagaatccactactgctgcac

SEQ ID NO: 263946 - DNA, 33 bp, Homo sapien
agttttcaggccaagactccactactgctgcac

SEQ ID NO: 263947 - DNA, 33 bp, Homo sapien
agtgatgccctcttaggaacagatcaatgagct

SEQ ID NO: 263948 - DNA, 33 bp, Homo sapien
agtgatgccctcttagtaacagatcaatgagct

SEQ ID NO: 263949 - DNA, 33 bp, Homo sapien
taagcaagcaggaagcaacattcaggataaagt

SEQ ID NO: 263950 - DNA, 33 bp, Homo sapien
taagcaagcaggaagcgacattcaggataaagt

SEQ ID NO: 263951 - DNA, 33 bp, Homo sapien
gtacaacaaatctacaagaccgtttcattatgg

SEQ ID NO: 263952 - DNA, 33 bp, Homo sapien
gtacaacaaatctacatgaccgtttcattatgg

SEQ ID NO: 263953 - DNA, 33 bp, Homo sapien
aagacctctttggacccgaaattgtaaggtaag

SEQ ID NO: 263954 - DNA, 33 bp, Homo sapien
aagacctctttggacctgaaattgtaaggtaag

SEQ ID NO: 263955 - DNA, 33 bp, Homo sapien
gtttagggatggaaaactgattacctgcaaggg

SEQ ID NO: 263956 - DNA, 33 bp, Homo sapien
gtttagggatggaaaattgattacctgcaaggg

SEQ ID NO: 263957 - DNA, 33 bp, Homo sapien
gttatgaagcagtagacggtcagatacctggaa

SEQ ID NO: 263958 - DNA, 33 bp, Homo sapien
gttatgaagcagtagatggtcagatacctggaa

SEQ ID NO: 263959 - DNA, 33 bp, Homo sapien
agtgtttgtcaatagaaaggaatgtctgcatta

SEQ ID NO: 263960 - DNA, 33 bp, Homo sapien
agtgtttgtcaatagagaggaatgtctgcatta

SEQ ID NO: 263961 - DNA, 33 bp, Homo sapien
acatacttttatgcacaaaaactgtatacttgc

SEQ ID NO: 263962 - DNA, 33 bp, Homo sapien
acatacttttatgcacgaaaactgtatacttgc

SEQ ID NO: 263963 - DNA, 33 bp, Homo sapien
ggttcagggctattgacaaggcctagtgagctg

SEQ ID NO: 263964 - DNA, 33 bp, Homo sapien
ggttcagggctattgagaaggcctagtgagctg

SEQ ID NO: 263965 - DNA, 33 bp, Homo sapien
acaaaaatcctcaacagtacactagcaaataga

SEQ ID NO: 263966 - DNA, 33 bp, Homo sapien
acaaaaatcctcaacattacactagcaaataga

SEQ ID NO: 263967 - DNA, 33 bp, Homo sapien
cagaaagctacatcaaccttggagcccctgtga

SEQ ID NO: 263968 - DNA, 33 bp, Homo sapien
cagaaagctacatcaatcttggagcccctgtga

SEQ ID NO: 263969 - DNA, 33 bp, Homo sapien
gaaaatgtccttgctacatgactcagcaatagc

SEQ ID NO: 263970 - DNA, 33 bp, Homo sapien
gaaaatgtccttgctatatgactcagcaatagc

SEQ ID NO: 263971 - DNA, 33 bp, Homo sapien
gcttttctttattgtacagtccccacttctttg

SEQ ID NO: 263972 - DNA, 33 bp, Homo sapien
gcttttctttattgtatagtccccacttctttg

SEQ ID NO: 263973 - DNA, 33 bp, Homo sapien
caaatgatagtgattcaatgacagacattcttt

SEQ ID NO: 263974 - DNA, 33 bp, Homo sapien
caaatgatagtgattcgatgacagacattcttt

SEQ ID NO: 263975 - DNA, 33 bp, Homo sapien
agaccatgtaaggacacagcaagatggtgacca

SEQ ID NO: 263976 - DNA, 33 bp, Homo sapien
agaccatgtaaggacatagcaagatggtgacca

SEQ ID NO: 263977 - DNA, 33 bp, Homo sapien
attgcagtgctttcaactaaatgttttccttca

SEQ ID NO: 263978 - DNA, 33 bp, Homo sapien
attgcagtgctttcaagtaaatgttttccttca

SEQ ID NO: 263979 - DNA, 33 bp, Homo sapien
ttcaaaagtccttagagccatggcaagtttcca

SEQ ID NO: 263980 - DNA, 33 bp, Homo sapien
ttcaaaagtccttagatccatggcaagtttcca

SEQ ID NO: 263981 - DNA, 33 bp, Homo sapien
aaagctggattttttccaggaatagcttcagtc

SEQ ID NO: 263982 - DNA, 33 bp, Homo sapien
aaagctggattttttctaggaatagcttcagtc

SEQ ID NO: 263983 - DNA, 33 bp, Homo sapien
aagaacttcctctgtcacaaagggtgtgagata

SEQ ID NO: 263984 - DNA, 33 bp, Homo sapien
aagaacttcctctgtcccaaagggtgtgagata

SEQ ID NO: 263985 - DNA, 33 bp, Homo sapien
gtctagagatattcacacaaccactcttgtctt

SEQ ID NO: 263986 - DNA, 33 bp, Homo sapien
gtctagagatattcacgcaaccactcttgtctt

SEQ ID NO: 263987 - DNA, 33 bp, Homo sapien
aacacatgaatttggaaagggcatataattcaa

SEQ ID NO: 263988 - DNA, 33 bp, Homo sapien
aacacatgaatttggagagggcatataattcaa

SEQ ID NO: 263989 - DNA, 33 bp, Homo sapien
aaacacagtagattccaaaagtgattcagagat

SEQ ID NO: 263990 - DNA, 33 bp, Homo sapien
aaacacagtagattccgaaagtgattcagagat

SEQ ID NO: 263991 - DNA, 33 bp, Homo sapien
tttctgcataaaggaaaaatggaacagcaattt

SEQ ID NO: 263992 - DNA, 33 bp, Homo sapien
tttctgcataaaggaacaatggaacagcaattt

SEQ ID NO: 263993 - DNA, 33 bp, Homo sapien
tggagtgcagtaggtcaagtgagtagagtttgc

SEQ ID NO: 263994 - DNA, 33 bp, Homo sapien
tggagtgcagtaggtcgagtgagtagagtttgc

SEQ ID NO: 263995 - DNA, 33 bp, Homo sapien
aggaatgaactgaagacggcaaacacaggagaa

SEQ ID NO: 263996 - DNA, 33 bp, Homo sapien
aggaatgaactgaagatggcaaacacaggagaa

SEQ ID NO: 263997 - DNA, 33 bp, Homo sapien
gatgacatagaaataacgcgaaagataaaagca

SEQ ID NO: 263998 - DNA, 33 bp, Homo sapien
gatgacatagaaataatgcgaaagataaaagca

SEQ ID NO: 263999 - DNA, 33 bp, Homo sapien
cagaatgtgtgcttaaaattatctcagaaaaag

SEQ ID NO: 264000 - DNA, 33 bp, Homo sapien
cagaatgtgtgcttaagattatctcagaaaaag

SEQ ID NO: 264001 - DNA, 33 bp, Homo sapien
acaattgtagaatgataaaatggtgtgataggc

SEQ ID NO: 264002 - DNA, 33 bp, Homo sapien
acaattgtagaatgatcaaatggtgtgataggc

SEQ ID NO: 264003 - DNA, 33 bp, Homo sapien
cagacctagatcttgacaaaactgaaaacaatt

SEQ ID NO: 264004 - DNA, 33 bp, Homo sapien
cagacctagatcttgataaaactgaaaacaatt

SEQ ID NO: 264005 - DNA, 33 bp, Homo sapien
ggattaagacaattcccagtataatggctgaaa

SEQ ID NO: 264006 - DNA, 33 bp, Homo sapien
ggattaagacaattccgagtataatggctgaaa

SEQ ID NO: 264007 - DNA, 33 bp, Homo sapien
ctttatcagcactgaaacttcccatatttcctt

SEQ ID NO: 264008 - DNA, 33 bp, Homo sapien
ctttatcagcactgaaccttcccatatttcctt

SEQ ID NO: 264009 - DNA, 33 bp, Homo sapien
ccctaagaccacactacggattaatgggctaag

SEQ ID NO: 264010 - DNA, 33 bp, Homo sapien
ccctaagaccacactatggattaatgggctaag

SEQ ID NO: 264011 - DNA, 33 bp, Homo sapien
cagattaagtgaaatcacctcagtataatgacc

SEQ ID NO: 264012 - DNA, 33 bp, Homo sapien
cagattaagtgaaatctcctcagtataatgacc

SEQ ID NO: 264013 - DNA, 33 bp, Homo sapien
acaaggataagataacaacagtagaggttgaca

SEQ ID NO: 264014 - DNA, 33 bp, Homo sapien
acaaggataagataaccacagtagaggttgaca

SEQ ID NO: 264015 - DNA, 33 bp, Homo sapien
aaaggttaaggtaatgaatatggtgctgagtgc

SEQ ID NO: 264016 - DNA, 33 bp, Homo sapien
aaaggttaaggtaatggatatggtgctgagtgc

SEQ ID NO: 264017 - DNA, 33 bp, Homo sapien
gagtcttctggtataccacagaaacagatttaa

SEQ ID NO: 264018 - DNA, 33 bp, Homo sapien
gagtcttctggtatactacagaaacagatttaa

SEQ ID NO: 264019 - DNA, 33 bp, Homo sapien
tttctaaagagataaacgtcatttggggcagaa

SEQ ID NO: 264020 - DNA, 33 bp, Homo sapien
tttctaaagagataaaggtcatttggggcagaa

SEQ ID NO: 264021 - DNA, 33 bp, Homo sapien
gctgatgggctaataaacatttacatttgctga

SEQ ID NO: 264022 - DNA, 33 bp, Homo sapien
gctgatgggctaataagcatttacatttgctga

SEQ ID NO: 264023 - DNA, 33 bp, Homo sapien
agtgacaagcaggttggatatcagcaagcaagc

SEQ ID NO: 264024 - DNA, 33 bp, Homo sapien
agtgacaagcaggttgtatatcagcaagcaagc

SEQ ID NO: 264025 - DNA, 33 bp, Homo sapien
actgccaataaaaataataacagcaggctgggc

SEQ ID NO: 264026 - DNA, 33 bp, Homo sapien
actgccaataaaaatagtaacagcaggctgggc

SEQ ID NO: 264027 - DNA, 33 bp, Homo sapien
catgaagatgaacacccgcaacctgaatatatc

SEQ ID NO: 264028 - DNA, 33 bp, Homo sapien
catgaagatgaacacctgcaacctgaatatatc

SEQ ID NO: 264029 - DNA, 33 bp, Homo sapien
tcaaacgattccctacagctcggatgaggatga

SEQ ID NO: 264030 - DNA, 33 bp, Homo sapien
tcaaacgattccctacggctcggatgaggatga

SEQ ID NO: 264031 - DNA, 33 bp, Homo sapien
agaattctttgttattaaacatggctctctggt

SEQ ID NO: 264032 - DNA, 33 bp, Homo sapien
agaattctttgttatttaacatggctctctggt

SEQ ID NO: 264033 - DNA, 33 bp, Homo sapien
aaattatacttaaatgaagcttagaaaatgccc

SEQ ID NO: 264034 - DNA, 33 bp, Homo sapien
aaattatacttaaatgtagcttagaaaatgccc

SEQ ID NO: 264035 - DNA, 33 bp, Homo sapien
gaatcacatctggcaaaattttattacagatgg

SEQ ID NO: 264036 - DNA, 33 bp, Homo sapien
gaatcacatctggcaagattttattacagatgg

SEQ ID NO: 264037 - DNA, 33 bp, Homo sapien
gtcaatgggacaactgaactgcagatattgagt

SEQ ID NO: 264038 - DNA, 33 bp, Homo sapien
gtcaatgggacaactggactgcagatattgagt

SEQ ID NO: 264039 - DNA, 33 bp, Homo sapien
cgtgatgtgaccttgaactactcaatatctgca

SEQ ID NO: 264040 - DNA, 33 bp, Homo sapien
cgtgatgtgaccttgagctactcaatatctgca

SEQ ID NO: 264041 - DNA, 33 bp, Homo sapien
gttggaaatttgcatacgtttacaccacacagg

SEQ ID NO: 264042 - DNA, 33 bp, Homo sapien
gttggaaatttgcatatgtttacaccacacagg

SEQ ID NO: 264043 - DNA, 33 bp, Homo sapien
ttaaatcattaaagtaaaggccatgaaccaact

SEQ ID NO: 264044 - DNA, 33 bp, Homo sapien
ttaaatcattaaagtagaggccatgaaccaact

SEQ ID NO: 264045 - DNA, 33 bp, Homo sapien
ttgaaaaataatttacaaagtctctgtttccaa

SEQ ID NO: 264046 - DNA, 33 bp, Homo sapien
ttgaaaaataatttacgaagtctctgtttccaa

SEQ ID NO: 264047 - DNA, 33 bp, Homo sapien
aagaagcaagtggataaattgcggtacatctat

SEQ ID NO: 264048 - DNA, 33 bp, Homo sapien
aagaagcaagtggatatattgcggtacatctat

SEQ ID NO: 264049 - DNA, 33 bp, Homo sapien
aaattcatctactgtcacatgaagcataagcag

SEQ ID NO: 264050 - DNA, 33 bp, Homo sapien
aaattcatctactgtcgcatgaagcataagcag

SEQ ID NO: 264051 - DNA, 33 bp, Homo sapien
acaatacagacaataaatatgcagcaggataat

SEQ ID NO: 264052 - DNA, 33 bp, Homo sapien
acaatacagacaataactatgcagcaggataat

SEQ ID NO: 264053 - DNA, 33 bp, Homo sapien
ggtggggagttctacgccagcttgaccaccatg

SEQ ID NO: 264054 - DNA, 33 bp, Homo sapien
ggtggggagttctacgtcagcttgaccaccatg

SEQ ID NO: 264055 - DNA, 33 bp, Homo sapien
gtaacttttgtctataccgctctcattagtagc

SEQ ID NO: 264056 - DNA, 33 bp, Homo sapien
gtaacttttgtctatagcgctctcattagtagc

SEQ ID NO: 264057 - DNA, 33 bp, Homo sapien
aggcagaaaagttgagaaagtctgctcaaagga

SEQ ID NO: 264058 - DNA, 33 bp, Homo sapien
aggcagaaaagttgaggaagtctgctcaaagga

SEQ ID NO: 264059 - DNA, 33 bp, Homo sapien
aacactaggtgatggccataccaaaagttgcct

SEQ ID NO: 264060 - DNA, 33 bp, Homo sapien
aacactaggtgatggctataccaaaagttgcct

SEQ ID NO: 264061 - DNA, 33 bp, Homo sapien
caaaattcaaatcatgcagtattacggcttatt

SEQ ID NO: 264062 - DNA, 33 bp, Homo sapien
caaaattcaaatcatgtagtattacggcttatt

SEQ ID NO: 264063 - DNA, 33 bp, Homo sapien
tgtttgttttattgtcactatcacctgccctct

SEQ ID NO: 264064 - DNA, 33 bp, Homo sapien
tgtttgttttattgtcgctatcacctgccctct

SEQ ID NO: 264065 - DNA, 33 bp, Homo sapien
tctaaattgcaaatcagaatgtagaaatcttaa

SEQ ID NO: 264066 - DNA, 33 bp, Homo sapien
tctaaattgcaaatcataatgtagaaatcttaa

SEQ ID NO: 264067 - DNA, 33 bp, Homo sapien
gatattactggggtagaagattgtaatgagcaa

SEQ ID NO: 264068 - DNA, 33 bp, Homo sapien
gatattactggggtaggagattgtaatgagcaa

SEQ ID NO: 264069 - DNA, 33 bp, Homo sapien
ggaatcaattcctcatgaacacggaggaacaac

SEQ ID NO: 264070 - DNA, 33 bp, Homo sapien
ggaatcaattcctcattaacacggaggaacaac

SEQ ID NO: 264071 - DNA, 33 bp, Homo sapien
tttctagctggcttaaaatttctcgatgtcatt

SEQ ID NO: 264072 - DNA, 33 bp, Homo sapien
tttctagctggcttaagatttctcgatgtcatt

SEQ ID NO: 264073 - DNA, 33 bp, Homo sapien
aatcgtatcagtaattcaagaacacctacagac

SEQ ID NO: 264074 - DNA, 33 bp, Homo sapien
aatcgtatcagtaatttaagaacacctacagac

SEQ ID NO: 264075 - DNA, 33 bp, Homo sapien
cctagacccttataacagtattactctcaaaat

SEQ ID NO: 264076 - DNA, 33 bp, Homo sapien
cctagacccttataactgtattactctcaaaat

SEQ ID NO: 264077 - DNA, 33 bp, Homo sapien
gttttcaaaccattaacaactcttttgctcttc

SEQ ID NO: 264078 - DNA, 33 bp, Homo sapien
gttttcaaaccattaataactcttttgctcttc

SEQ ID NO: 264079 - DNA, 33 bp, Homo sapien
agaatggtcaacctacaaataatagacctacag

SEQ ID NO: 264080 - DNA, 33 bp, Homo sapien
agaatggtcaacctacgaataatagacctacag

SEQ ID NO: 264081 - DNA, 33 bp, Homo sapien
taaaatgatcaactaccctctgtaaggtccaaa

SEQ ID NO: 264082 - DNA, 33 bp, Homo sapien
taaaatgatcaactacgctctgtaaggtccaaa

SEQ ID NO: 264083 - DNA, 33 bp, Homo sapien
gtggaggtggatagtgaatcatacatagtgggt

SEQ ID NO: 264084 - DNA, 33 bp, Homo sapien
gtggaggtggatagtggatcatacatagtgggt

SEQ ID NO: 264085 - DNA, 33 bp, Homo sapien
tgaataagctcaacccacgctcttcatgaagtc

SEQ ID NO: 264086 - DNA, 33 bp, Homo sapien
tgaataagctcaacccgcgctcttcatgaagtc

SEQ ID NO: 264087 - DNA, 33 bp, Homo sapien
acttacaacactctgaaattctcttctttattt

SEQ ID NO: 264088 - DNA, 33 bp, Homo sapien
acttacaacactctgacattctcttctttattt

SEQ ID NO: 264089 - DNA, 33 bp, Homo sapien
atgtttctgctcagtcacttttattttagcctg

SEQ ID NO: 264090 - DNA, 33 bp, Homo sapien
atgtttctgctcagtcgcttttattttagcctg

SEQ ID NO: 264091 - DNA, 33 bp, Homo sapien
gcagcatagtatgtacggtaattttatgcagtt

SEQ ID NO: 264092 - DNA, 33 bp, Homo sapien
gcagcatagtatgtactgtaattttatgcagtt

SEQ ID NO: 264093 - DNA, 33 bp, Homo sapien
tttctttattcaatgaccagcttaatatctgtc

SEQ ID NO: 264094 - DNA, 33 bp, Homo sapien
tttctttattcaatgatcagcttaatatctgtc

SEQ ID NO: 264095 - DNA, 33 bp, Homo sapien
ttggtttgttgttttacgtagactgtgttacac

SEQ ID NO: 264096 - DNA, 33 bp, Homo sapien
ttggtttgttgttttaggtagactgtgttacac

SEQ ID NO: 264097 - DNA, 33 bp, Homo sapien
cccatctgctaggaaagacttcttcattcataa

SEQ ID NO: 264098 - DNA, 33 bp, Homo sapien
cccatctgctaggaaatacttcttcattcataa

SEQ ID NO: 264099 - DNA, 33 bp, Homo sapien
tgcggaatctctgacacgctacattagacagta

SEQ ID NO: 264100 - DNA, 33 bp, Homo sapien
tgcggaatctctgacatgctacattagacagta

SEQ ID NO: 264101 - DNA, 33 bp, Homo sapien
ttctatattcctagtacccagaacagaaatata

SEQ ID NO: 264102 - DNA, 33 bp, Homo sapien
ttctatattcctagtatccagaacagaaatata

SEQ ID NO: 264103 - DNA, 33 bp, Homo sapien
acatatttgaacagatcacataacattttaaaa

SEQ ID NO: 264104 - DNA, 33 bp, Homo sapien
acatatttgaacagattacataacattttaaaa

SEQ ID NO: 264105 - DNA, 33 bp, Homo sapien
tacctggccacactgaatattttctgacagata

SEQ ID NO: 264106 - DNA, 33 bp, Homo sapien
tacctggccacactgagtattttctgacagata

SEQ ID NO: 264107 - DNA, 33 bp, Homo sapien
ctcctccaccccattgcatataagcctggaggt

SEQ ID NO: 264108 - DNA, 33 bp, Homo sapien
ctcctccaccccattgtatataagcctggaggt

SEQ ID NO: 264109 - DNA, 33 bp, Homo sapien
aagatagaggttcataaaagaaaatcgacttcc

SEQ ID NO: 264110 - DNA, 33 bp, Homo sapien
aagatagaggttcatagaagaaaatcgacttcc

SEQ ID NO: 264111 - DNA, 33 bp, Homo sapien
ccccgagaggagacaactggccggatcctactg

SEQ ID NO: 264112 - DNA, 33 bp, Homo sapien
ccccgagaggagacaagtggccggatcctactg

SEQ ID NO: 264113 - DNA, 33 bp, Homo sapien
gactaccaaaaagttacgaaagtagaacagata

SEQ ID NO: 264114 - DNA, 33 bp, Homo sapien
gactaccaaaaagttatgaaagtagaacagata

SEQ ID NO: 264115 - DNA, 33 bp, Homo sapien
gttttacagaactatacaaccccctcccaaaca

SEQ ID NO: 264116 - DNA, 33 bp, Homo sapien
gttttacagaactatataaccccctcccaaaca

SEQ ID NO: 264117 - DNA, 33 bp, Homo sapien
gtccttctaggtcatcactacttaaaataactg

SEQ ID NO: 264118 - DNA, 33 bp, Homo sapien
gtccttctaggtcatcgctacttaaaataactg

SEQ ID NO: 264119 - DNA, 33 bp, Homo sapien
agacaaaatgagataccgagtttctgtttcagt

SEQ ID NO: 264120 - DNA, 33 bp, Homo sapien
agacaaaatgagatactgagtttctgtttcagt

SEQ ID NO: 264121 - DNA, 33 bp, Homo sapien
tcttcttccatgcccaaaactatatagtttcta

SEQ ID NO: 264122 - DNA, 33 bp, Homo sapien
tcttcttccatgcccagaactatatagtttcta

SEQ ID NO: 264123 - DNA, 33 bp, Homo sapien
atcagaatatccactaccaatgaagaaggaaaa

SEQ ID NO: 264124 - DNA, 33 bp, Homo sapien
atcagaatatccactagcaatgaagaaggaaaa

SEQ ID NO: 264125 - DNA, 33 bp, Homo sapien
gtaggcctttggtgacagaaacagatgtctcaa

SEQ ID NO: 264126 - DNA, 33 bp, Homo sapien
gtaggcctttggtgacggaaacagatgtctcaa

SEQ ID NO: 264127 - DNA, 33 bp, Homo sapien
caacccaggttaagtacgcacaattaataaatg

SEQ ID NO: 264128 - DNA, 33 bp, Homo sapien
caacccaggttaagtatgcacaattaataaatg

SEQ ID NO: 264129 - DNA, 33 bp, Homo sapien
atggtcatgtaccttacacacaacttctaaggc

SEQ ID NO: 264130 - DNA, 33 bp, Homo sapien
atggtcatgtaccttatacacaacttctaaggc

SEQ ID NO: 264131 - DNA, 33 bp, Homo sapien
cgtatctgaaacattacatggtacatgactgta

SEQ ID NO: 264132 - DNA, 33 bp, Homo sapien
cgtatctgaaacattagatggtacatgactgta

SEQ ID NO: 264133 - DNA, 33 bp, Homo sapien
ctgaaggtgtttcctaggcctcactccattcac

SEQ ID NO: 264134 - DNA, 33 bp, Homo sapien
ctgaaggtgtttcctatgcctcactccattcac

SEQ ID NO: 264135 - DNA, 33 bp, Homo sapien
acaaaaagctcaccgacatggtttcagatttca

SEQ ID NO: 264136 - DNA, 33 bp, Homo sapien
acaaaaagctcaccgatatggtttcagatttca

SEQ ID NO: 264137 - DNA, 33 bp, Homo sapien
ctgacagtagaaggaaagtaggttaacactggc

SEQ ID NO: 264138 - DNA, 33 bp, Homo sapien
ctgacagtagaaggaaggtaggttaacactggc

SEQ ID NO: 264139 - DNA, 33 bp, Homo sapien
tcttatcagatagaaactatcttcagcatttaa

SEQ ID NO: 264140 - DNA, 33 bp, Homo sapien
tcttatcagatagaaattatcttcagcatttaa

SEQ ID NO: 264141 - DNA, 33 bp, Homo sapien
aatattttttctatgcacattggtttgtcaggg

SEQ ID NO: 264142 - DNA, 33 bp, Homo sapien
aatattttttctatgcgcattggtttgtcaggg

SEQ ID NO: 264143 - DNA, 33 bp, Homo sapien
aagtgtacaccaagccccttccaactcccagga

SEQ ID NO: 264144 - DNA, 33 bp, Homo sapien
aagtgtacaccaagcctcttccaactcccagga

SEQ ID NO: 264145 - DNA, 33 bp, Homo sapien
cccctcttgattcccacctgtctccagcaacca

SEQ ID NO: 264146 - DNA, 33 bp, Homo sapien
cccctcttgattcccagctgtctccagcaacca

SEQ ID NO: 264147 - DNA, 33 bp, Homo sapien
tactttcttttgtgtacgatccactggtgggca

SEQ ID NO: 264148 - DNA, 33 bp, Homo sapien
tactttcttttgtgtatgatccactggtgggca

SEQ ID NO: 264149 - DNA, 33 bp, Homo sapien
tttctgggatatacacactcagtcacttcagat

SEQ ID NO: 264150 - DNA, 33 bp, Homo sapien
tttctgggatatacacgctcagtcacttcagat

SEQ ID NO: 264151 - DNA, 33 bp, Homo sapien
ggaaatcatgaggaggaaggcacattcttgttt

SEQ ID NO: 264152 - DNA, 33 bp, Homo sapien
ggaaatcatgaggagggaggcacattcttgttt

SEQ ID NO: 264153 - DNA, 33 bp, Homo sapien
agggggaaaagctgcaaggattttggctcatga

SEQ ID NO: 264154 - DNA, 33 bp, Homo sapien
agggggaaaagctgcagggattttggctcatga

SEQ ID NO: 264155 - DNA, 33 bp, Homo sapien
ctcatattcaaagacaactttttggtcctttaa

SEQ ID NO: 264156 - DNA, 33 bp, Homo sapien
ctcatattcaaagacagctttttggtcctttaa

SEQ ID NO: 264157 - DNA, 33 bp, Homo sapien
atgggaagtgagaaaaaaaatctatagagaaag

SEQ ID NO: 264158 - DNA, 33 bp, Homo sapien
atgggaagtgagaaaagaaatctatagagaaag

SEQ ID NO: 264159 - DNA, 33 bp, Homo sapien
tcacttttctgttccacgtaacattcacccaaa

SEQ ID NO: 264160 - DNA, 33 bp, Homo sapien
tcacttttctgttccatgtaacattcacccaaa

SEQ ID NO: 264161 - DNA, 33 bp, Homo sapien
cttcagtggtatatgaaagatgtcactgttcca

SEQ ID NO: 264162 - DNA, 33 bp, Homo sapien
cttcagtggtatatgagagatgtcactgttcca

SEQ ID NO: 264163 - DNA, 33 bp, Homo sapien
attgagtgatgatttaaacttccagaggatcaa

SEQ ID NO: 264164 - DNA, 33 bp, Homo sapien
attgagtgatgatttacacttccagaggatcaa

SEQ ID NO: 264165 - DNA, 33 bp, Homo sapien
taggaatattgggtgcgaaatgattgcatatta

SEQ ID NO: 264166 - DNA, 33 bp, Homo sapien
taggaatattgggtgctaaatgattgcatatta

SEQ ID NO: 264167 - DNA, 33 bp, Homo sapien
gatgcaatgagagtagacaattatatccctagt

SEQ ID NO: 264168 - DNA, 33 bp, Homo sapien
gatgcaatgagagtaggcaattatatccctagt

SEQ ID NO: 264169 - DNA, 33 bp, Homo sapien
tttcattttttgtctacgtcatttgtccaaaac

SEQ ID NO: 264170 - DNA, 33 bp, Homo sapien
tttcattttttgtctatgtcatttgtccaaaac

SEQ ID NO: 264171 - DNA, 33 bp, Homo sapien
ttcctacttgaactgaactcaggagcctcaagt

SEQ ID NO: 264172 - DNA, 33 bp, Homo sapien
ttcctacttgaactgatctcaggagcctcaagt

SEQ ID NO: 264173 - DNA, 33 bp, Homo sapien
gaacagtacaaacatacagaagggctcaacaaa

SEQ ID NO: 264174 - DNA, 33 bp, Homo sapien
gaacagtacaaacatatagaagggctcaacaaa

SEQ ID NO: 264175 - DNA, 33 bp, Homo sapien
atacagcaagtgctgacctatttatcaggtttg

SEQ ID NO: 264176 - DNA, 33 bp, Homo sapien
atacagcaagtgctgatctatttatcaggtttg

SEQ ID NO: 264177 - DNA, 33 bp, Homo sapien
aaaacttcagcccataatatataggaccaggta

SEQ ID NO: 264178 - DNA, 33 bp, Homo sapien
aaaacttcagcccatagtatataggaccaggta

SEQ ID NO: 264179 - DNA, 33 bp, Homo sapien
cataagagaaagctctaaagtttaagacttcaa

SEQ ID NO: 264180 - DNA, 33 bp, Homo sapien
cataagagaaagctctgaagtttaagacttcaa

SEQ ID NO: 264181 - DNA, 33 bp, Homo sapien
agttaaaagggaacaacggatgggagaacatgt

SEQ ID NO: 264182 - DNA, 33 bp, Homo sapien
agttaaaagggaacaatggatgggagaacatgt

SEQ ID NO: 264183 - DNA, 33 bp, Homo sapien
taggattctagagtggcacgatctcttcacaaa

SEQ ID NO: 264184 - DNA, 33 bp, Homo sapien
taggattctagagtggtacgatctcttcacaaa

SEQ ID NO: 264185 - DNA, 33 bp, Homo sapien
ccttctgccatggagtaacacaacacaaaggcc

SEQ ID NO: 264186 - DNA, 33 bp, Homo sapien
ccttctgccatggagtgacacaacacaaaggcc

SEQ ID NO: 264187 - DNA, 33 bp, Homo sapien
cagctctagcaaacgaacacagtattcaattcc

SEQ ID NO: 264188 - DNA, 33 bp, Homo sapien
cagctctagcaaacgagcacagtattcaattcc

SEQ ID NO: 264189 - DNA, 33 bp, Homo sapien
gtgacatttctactaacatccgttacccatttt

SEQ ID NO: 264190 - DNA, 33 bp, Homo sapien
gtgacatttctactaatatccgttacccatttt

SEQ ID NO: 264191 - DNA, 33 bp, Homo sapien
tttgttgcagtaaatacaaagagaggatgtaag

SEQ ID NO: 264192 - DNA, 33 bp, Homo sapien
tttgttgcagtaaatagaaagagaggatgtaag

SEQ ID NO: 264193 - DNA, 33 bp, Homo sapien
tgactatggcatcctacggagaacttcaatatt

SEQ ID NO: 264194 - DNA, 33 bp, Homo sapien
tgactatggcatcctatggagaacttcaatatt

SEQ ID NO: 264195 - DNA, 33 bp, Homo sapien
ttggcatttatgtgacacagtagttggaaagca

SEQ ID NO: 264196 - DNA, 33 bp, Homo sapien
ttggcatttatgtgacgcagtagttggaaagca

SEQ ID NO: 264197 - DNA, 33 bp, Homo sapien
gttaacttatggagaagggacagaaatgacttg

SEQ ID NO: 264198 - DNA, 33 bp, Homo sapien
gttaacttatggagaatggacagaaatgacttg

SEQ ID NO: 264199 - DNA, 33 bp, Homo sapien
cttgcaatgtagctaaatgtcaaggtctgggaa

SEQ ID NO: 264200 - DNA, 33 bp, Homo sapien
cttgcaatgtagctaagtgtcaaggtctgggaa

SEQ ID NO: 264201 - DNA, 33 bp, Homo sapien
tggggaatctacctacgcatctacatttcctag

SEQ ID NO: 264202 - DNA, 33 bp, Homo sapien
tggggaatctacctactcatctacatttcctag

SEQ ID NO: 264203 - DNA, 33 bp, Homo sapien
gagtgagagagtggacaatagtgcaatccatca

SEQ ID NO: 264204 - DNA, 33 bp, Homo sapien
gagtgagagagtggacgatagtgcaatccatca

SEQ ID NO: 264205 - DNA, 33 bp, Homo sapien
ggcataacttttatccaaaaccataaagaagtg

SEQ ID NO: 264206 - DNA, 33 bp, Homo sapien
ggcataacttttatcccaaaccataaagaagtg

SEQ ID NO: 264207 - DNA, 33 bp, Homo sapien
agtttgagaaggtcctaaaagcaatgagcaagc

SEQ ID NO: 264208 - DNA, 33 bp, Homo sapien
agtttgagaaggtcctgaaagcaatgagcaagc

SEQ ID NO: 264209 - DNA, 33 bp, Homo sapien
tgtctctctgaaaatactaactagaattgtttc

SEQ ID NO: 264210 - DNA, 33 bp, Homo sapien
tgtctctctgaaaatagtaactagaattgtttc

SEQ ID NO: 264211 - DNA, 33 bp, Homo sapien
ctattcctcttctctcaagttgttccttctcaa

SEQ ID NO: 264212 - DNA, 33 bp, Homo sapien
ctattcctcttctctcgagttgttccttctcaa

SEQ ID NO: 264213 - DNA, 33 bp, Homo sapien
acaagaaacaattatacgtaagtcttaagcctt

SEQ ID NO: 264214 - DNA, 33 bp, Homo sapien
acaagaaacaattatatgtaagtcttaagcctt

SEQ ID NO: 264215 - DNA, 33 bp, Homo sapien
tccctacagctaggataagaacgggctactgtg

SEQ ID NO: 264216 - DNA, 33 bp, Homo sapien
tccctacagctaggatgagaacgggctactgtg

SEQ ID NO: 264217 - DNA, 33 bp, Homo sapien
ctctttctccacagtacacaaacctagagtatt

SEQ ID NO: 264218 - DNA, 33 bp, Homo sapien
ctctttctccacagtatacaaacctagagtatt

SEQ ID NO: 264219 - DNA, 33 bp, Homo sapien
tctagggaatctccgacgtaaattgtgtctgca

SEQ ID NO: 264220 - DNA, 33 bp, Homo sapien
tctagggaatctccgatgtaaattgtgtctgca

SEQ ID NO: 264221 - DNA, 33 bp, Homo sapien
ttcaggtttcagaagacactaactccaaaatct

SEQ ID NO: 264222 - DNA, 33 bp, Homo sapien
ttcaggtttcagaagatactaactccaaaatct

SEQ ID NO: 264223 - DNA, 33 bp, Homo sapien
cagccagtgggagacaaattttggaagaagtga

SEQ ID NO: 264224 - DNA, 33 bp, Homo sapien
cagccagtgggagacatattttggaagaagtga

SEQ ID NO: 264225 - DNA, 33 bp, Homo sapien
cctagtgatgtcaataatacctgtccctcctac

SEQ ID NO: 264226 - DNA, 33 bp, Homo sapien
cctagtgatgtcaatagtacctgtccctcctac

SEQ ID NO: 264227 - DNA, 33 bp, Homo sapien
tttcaacaactgctgccgaactttgacttgcat

SEQ ID NO: 264228 - DNA, 33 bp, Homo sapien
tttcaacaactgctgctgaactttgacttgcat

SEQ ID NO: 264229 - DNA, 33 bp, Homo sapien
ttcccccaggtgttgaacatggtgacaactggt

SEQ ID NO: 264230 - DNA, 33 bp, Homo sapien
ttcccccaggtgttgatcatggtgacaactggt

SEQ ID NO: 264231 - DNA, 33 bp, Homo sapien
cctgtgttgaccgacgaagaaaggtagaaccac

SEQ ID NO: 264232 - DNA, 33 bp, Homo sapien
cctgtgttgaccgacggagaaaggtagaaccac

SEQ ID NO: 264233 - DNA, 33 bp, Homo sapien
taagatcagtatagccacatgtagtagtagcag

SEQ ID NO: 264234 - DNA, 33 bp, Homo sapien
taagatcagtatagccgcatgtagtagtagcag

SEQ ID NO: 264235 - DNA, 33 bp, Homo sapien
aaatccatttgacaaaaacggtctaaatttcct

SEQ ID NO: 264236 - DNA, 33 bp, Homo sapien
aaatccatttgacaaagacggtctaaatttcct

SEQ ID NO: 264237 - DNA, 33 bp, Homo sapien
tttggaaacttggccaatagtcaattttgatag

SEQ ID NO: 264238 - DNA, 33 bp, Homo sapien
tttggaaacttggccagtagtcaattttgatag

SEQ ID NO: 264239 - DNA, 33 bp, Homo sapien
agttggctatggctaaatatttactgaaggctg

SEQ ID NO: 264240 - DNA, 33 bp, Homo sapien
agttggctatggctaagtatttactgaaggctg

SEQ ID NO: 264241 - DNA, 33 bp, Homo sapien
actgatcaaaagttacaaaggactattataact

SEQ ID NO: 264242 - DNA, 33 bp, Homo sapien
actgatcaaaagttacgaaggactattataact

SEQ ID NO: 264243 - DNA, 33 bp, Homo sapien
ctaaattataccagcaagggcctagcagcattc

SEQ ID NO: 264244 - DNA, 33 bp, Homo sapien
ctaaattataccagcaggggcctagcagcattc

SEQ ID NO: 264245 - DNA, 33 bp, Homo sapien
tctggacatatactgaaggcttaaccttgaata

SEQ ID NO: 264246 - DNA, 33 bp, Homo sapien
tctggacatatactgagggcttaaccttgaata

SEQ ID NO: 264247 - DNA, 33 bp, Homo sapien
tacaagaacacatataactctggatgagaaaga

SEQ ID NO: 264248 - DNA, 33 bp, Homo sapien
tacaagaacacatatatctctggatgagaaaga

SEQ ID NO: 264249 - DNA, 33 bp, Homo sapien
agtgtaaagggtatagacaaactgtcatcagca

SEQ ID NO: 264250 - DNA, 33 bp, Homo sapien
agtgtaaagggtataggcaaactgtcatcagca

SEQ ID NO: 264251 - DNA, 33 bp, Homo sapien
aaagtcacagagcatcacttccagcacattctg

SEQ ID NO: 264252 - DNA, 33 bp, Homo sapien
aaagtcacagagcatctcttccagcacattctg

SEQ ID NO: 264253 - DNA, 33 bp, Homo sapien
tgtaaaataatccaacaacagaaagtcaagcct

SEQ ID NO: 264254 - DNA, 33 bp, Homo sapien
tgtaaaataatccaacgacagaaagtcaagcct

SEQ ID NO: 264255 - DNA, 33 bp, Homo sapien
accttgcatacaacagaaaaatattatgtggtc

SEQ ID NO: 264256 - DNA, 33 bp, Homo sapien
accttgcatacaacaggaaaatattatgtggtc

SEQ ID NO: 264257 - DNA, 33 bp, Homo sapien
gtttgatcaacatagaaaatcctgtgagataat

SEQ ID NO: 264258 - DNA, 33 bp, Homo sapien
gtttgatcaacatagacaatcctgtgagataat

SEQ ID NO: 264259 - DNA, 33 bp, Homo sapien
ataaataaatacaatcacaaaaggttcgtgcat

SEQ ID NO: 264260 - DNA, 33 bp, Homo sapien
ataaataaatacaatcgcaaaaggttcgtgcat

SEQ ID NO: 264261 - DNA, 33 bp, Homo sapien
tgtgagaatagcacaaagtatctctggatgtcc

SEQ ID NO: 264262 - DNA, 33 bp, Homo sapien
tgtgagaatagcacaacgtatctctggatgtcc

SEQ ID NO: 264263 - DNA, 33 bp, Homo sapien
ccctgtattctagtaaacttacccacctattct

SEQ ID NO: 264264 - DNA, 33 bp, Homo sapien
ccctgtattctagtaaccttacccacctattct

SEQ ID NO: 264265 - DNA, 33 bp, Homo sapien
tgctctatctggatgaagccaaagaccatccat

SEQ ID NO: 264266 - DNA, 33 bp, Homo sapien
tgctctatctggatgaggccaaagaccatccat

SEQ ID NO: 264267 - DNA, 33 bp, Homo sapien
aagtggattctggttacggctattctctcatag

SEQ ID NO: 264268 - DNA, 33 bp, Homo sapien
aagtggattctggttatggctattctctcatag

SEQ ID NO: 264269 - DNA, 33 bp, Homo sapien
gatgcatctttttagcaactaactggacagata

SEQ ID NO: 264270 - DNA, 33 bp, Homo sapien
gatgcatctttttagcgactaactggacagata

SEQ ID NO: 264271 - DNA, 33 bp, Homo sapien
tcaccatgttggctaaactgcttttaaactcct

SEQ ID NO: 264272 - DNA, 33 bp, Homo sapien
tcaccatgttggctaagctgcttttaaactcct

SEQ ID NO: 264273 - DNA, 33 bp, Homo sapien
agagttctgctactaaaatatgttagaattgtg

SEQ ID NO: 264274 - DNA, 33 bp, Homo sapien
agagttctgctactaatatatgttagaattgtg

SEQ ID NO: 264275 - DNA, 33 bp, Homo sapien
ggcaggacagcataaaacaatttcctactggct

SEQ ID NO: 264276 - DNA, 33 bp, Homo sapien
ggcaggacagcataaagcaatttcctactggct

SEQ ID NO: 264277 - DNA, 33 bp, Homo sapien
ctgcaaagtgagtgcaataggagagttgggaaa

SEQ ID NO: 264278 - DNA, 33 bp, Homo sapien
ctgcaaagtgagtgcagtaggagagttgggaaa

SEQ ID NO: 264279 - DNA, 33 bp, Homo sapien
tgctgctgagagagagaattgaaggctcttgct

SEQ ID NO: 264280 - DNA, 33 bp, Homo sapien
tgctgctgagagagaggattgaaggctcttgct

SEQ ID NO: 264281 - DNA, 33 bp, Homo sapien
gatgccatttcacacacgaacaaaattatcgat

SEQ ID NO: 264282 - DNA, 33 bp, Homo sapien
gatgccatttcacacatgaacaaaattatcgat

SEQ ID NO: 264283 - DNA, 33 bp, Homo sapien
aatgtatctgatatgcaagagatagactttaaa

SEQ ID NO: 264284 - DNA, 33 bp, Homo sapien
aatgtatctgatatgctagagatagactttaaa

SEQ ID NO: 264285 - DNA, 33 bp, Homo sapien
tgaagtccaaaactaggaggttgacatgtccct

SEQ ID NO: 264286 - DNA, 33 bp, Homo sapien
tgaagtccaaaactagtaggttgacatgtccct

SEQ ID NO: 264287 - DNA, 33 bp, Homo sapien
gaattctcccagattacgtcaagaccataaggc

SEQ ID NO: 264288 - DNA, 33 bp, Homo sapien
gaattctcccagattatgtcaagaccataaggc

SEQ ID NO: 264289 - DNA, 33 bp, Homo sapien
gagaagtctgggttacagaaagcagacggggca

SEQ ID NO: 264290 - DNA, 33 bp, Homo sapien
gagaagtctgggttacggaaagcagacggggca

SEQ ID NO: 264291 - DNA, 33 bp, Homo sapien
tgcaggaaggacgaataaaacaactgcagaagt

SEQ ID NO: 264292 - DNA, 33 bp, Homo sapien
tgcaggaaggacgaatgaaacaactgcagaagt

SEQ ID NO: 264293 - DNA, 33 bp, Homo sapien
ctgctgttatgatttccccttttgaagccccaa

SEQ ID NO: 264294 - DNA, 33 bp, Homo sapien
ctgctgttatgatttctccttttgaagccccaa

SEQ ID NO: 264295 - DNA, 33 bp, Homo sapien
tagaacacaaaggactgacttggggcttcaaaa

SEQ ID NO: 264296 - DNA, 33 bp, Homo sapien
tagaacacaaaggacttacttggggcttcaaaa

SEQ ID NO: 264297 - DNA, 33 bp, Homo sapien
ggaattcaaatcaaataaaaataaaggccatca

SEQ ID NO: 264298 - DNA, 33 bp, Homo sapien
ggaattcaaatcaaatgaaaataaaggccatca

SEQ ID NO: 264299 - DNA, 33 bp, Homo sapien
ccatctctgcctcgtgaactacatcatccttaa

SEQ ID NO: 264300 - DNA, 33 bp, Homo sapien
ccatctctgcctcgtggactacatcatccttaa

SEQ ID NO: 264301 - DNA, 33 bp, Homo sapien
tatcaacattggttaactagttgttcacaggta

SEQ ID NO: 264302 - DNA, 33 bp, Homo sapien
tatcaacattggttaattagttgttcacaggta

SEQ ID NO: 264303 - DNA, 33 bp, Homo sapien
actcaccagaatacagaatgacagtttgtccag

SEQ ID NO: 264304 - DNA, 33 bp, Homo sapien
actcaccagaatacagcatgacagtttgtccag

SEQ ID NO: 264305 - DNA, 33 bp, Homo sapien
ttgtttatttccttgacgctacataccttgttt

SEQ ID NO: 264306 - DNA, 33 bp, Homo sapien
ttgtttatttccttgatgctacataccttgttt

SEQ ID NO: 264307 - DNA, 33 bp, Homo sapien
caaacctgactgttcaacatataggagcaaagc

SEQ ID NO: 264308 - DNA, 33 bp, Homo sapien
caaacctgactgttcagcatataggagcaaagc

SEQ ID NO: 264309 - DNA, 33 bp, Homo sapien
caatatcatctctgtaacttttcagctataata

SEQ ID NO: 264310 - DNA, 33 bp, Homo sapien
caatatcatctctgtatcttttcagctataata

SEQ ID NO: 264311 - DNA, 33 bp, Homo sapien
atcagagacatcttggcagaaaattgggacaag

SEQ ID NO: 264312 - DNA, 33 bp, Homo sapien
atcagagacatcttggtagaaaattgggacaag

SEQ ID NO: 264313 - DNA, 33 bp, Homo sapien
gccaaaactgtccagcagatttgattcctttgg

SEQ ID NO: 264314 - DNA, 33 bp, Homo sapien
gccaaaactgtccagctgatttgattcctttgg

SEQ ID NO: 264315 - DNA, 33 bp, Homo sapien
tcacatgtgcttaaaacaatttgtggcccaaag

SEQ ID NO: 264316 - DNA, 33 bp, Homo sapien
tcacatgtgcttaaaagaatttgtggcccaaag

SEQ ID NO: 264317 - DNA, 33 bp, Homo sapien
tgtattttttcttctacactgcaatgatttttt

SEQ ID NO: 264318 - DNA, 33 bp, Homo sapien
tgtattttttcttctatactgcaatgatttttt

SEQ ID NO: 264319 - DNA, 33 bp, Homo sapien
catgtgaaatcgcctcgccaagtgcctttacat

SEQ ID NO: 264320 - DNA, 33 bp, Homo sapien
catgtgaaatcgcctctccaagtgcctttacat

SEQ ID NO: 264321 - DNA, 33 bp, Homo sapien
tactgtgcttctcatgcaaaccactgtgctcag

SEQ ID NO: 264322 - DNA, 33 bp, Homo sapien
tactgtgcttctcatgtaaaccactgtgctcag

SEQ ID NO: 264323 - DNA, 33 bp, Homo sapien
caaacaagtcatcatgaatcatacattttagga

SEQ ID NO: 264324 - DNA, 33 bp, Homo sapien
caaacaagtcatcatgcatcatacattttagga

SEQ ID NO: 264325 - DNA, 33 bp, Homo sapien
tctttgctccattaaaaaaaataaggaggaaga

SEQ ID NO: 264326 - DNA, 33 bp, Homo sapien
tctttgctccattaaacaaaataaggaggaaga

SEQ ID NO: 264327 - DNA, 33 bp, Homo sapien
acaaagaggcaagttacgaaatataaggtacct

SEQ ID NO: 264328 - DNA, 33 bp, Homo sapien
acaaagaggcaagttatgaaatataaggtacct

SEQ ID NO: 264329 - DNA, 33 bp, Homo sapien
aaacgtttgtaggaaacttcttttgataaacta

SEQ ID NO: 264330 - DNA, 33 bp, Homo sapien
aaacgtttgtaggaaatttcttttgataaacta

SEQ ID NO: 264331 - DNA, 33 bp, Homo sapien
gaagaagccatcatctcacattcctcttggcca

SEQ ID NO: 264332 - DNA, 33 bp, Homo sapien
gaagaagccatcatcttacattcctcttggcca

SEQ ID NO: 264333 - DNA, 33 bp, Homo sapien
cttccctcttcctgaaacactcacctctctttc

SEQ ID NO: 264334 - DNA, 33 bp, Homo sapien
cttccctcttcctgaagcactcacctctctttc

SEQ ID NO: 264335 - DNA, 33 bp, Homo sapien
accgtcagagaaacaacaagggttcaaatcata

SEQ ID NO: 264336 - DNA, 33 bp, Homo sapien
accgtcagagaaacaagaagggttcaaatcata

SEQ ID NO: 264337 - DNA, 33 bp, Homo sapien
gagtgtttcagaaagaaggaagaatgtatacaa

SEQ ID NO: 264338 - DNA, 33 bp, Homo sapien
gagtgtttcagaaagagggaagaatgtatacaa

SEQ ID NO: 264339 - DNA, 33 bp, Homo sapien
taggctttgacagatagtatattggccagatac

SEQ ID NO: 264340 - DNA, 33 bp, Homo sapien
taggctttgacagatattatattggccagatac

SEQ ID NO: 264341 - DNA, 33 bp, Homo sapien
ttgtatccccaacaaccaacaaaattcctgcag

SEQ ID NO: 264342 - DNA, 33 bp, Homo sapien
ttgtatccccaacaactaacaaaattcctgcag

SEQ ID NO: 264343 - DNA, 33 bp, Homo sapien
gagacacaaaagtatacggttatttgggaatag

SEQ ID NO: 264344 - DNA, 33 bp, Homo sapien
gagacacaaaagtatatggttatttgggaatag

SEQ ID NO: 264345 - DNA, 33 bp, Homo sapien
agggaaataggcaaacaagtgatgaagactgca

SEQ ID NO: 264346 - DNA, 33 bp, Homo sapien
agggaaataggcaaacgagtgatgaagactgca

SEQ ID NO: 264347 - DNA, 33 bp, Homo sapien
ttcgtcttgtagctgcaatctttcccactagaa

SEQ ID NO: 264348 - DNA, 33 bp, Homo sapien
ttcgtcttgtagctgcgatctttcccactagaa

SEQ ID NO: 264349 - DNA, 33 bp, Homo sapien
ttatgacagtgactcaatgaggaatttctaatt

SEQ ID NO: 264350 - DNA, 33 bp, Homo sapien
ttatgacagtgactcactgaggaatttctaatt

SEQ ID NO: 264351 - DNA, 33 bp, Homo sapien
tttggaattcctaaaaccagttgaggacatgat

SEQ ID NO: 264352 - DNA, 33 bp, Homo sapien
tttggaattcctaaaagcagttgaggacatgat

SEQ ID NO: 264353 - DNA, 33 bp, Homo sapien
gaaatgtaatagaatcacgttctcgcaggggaa

SEQ ID NO: 264354 - DNA, 33 bp, Homo sapien
gaaatgtaatagaatctcgttctcgcaggggaa

SEQ ID NO: 264355 - DNA, 33 bp, Homo sapien
gactgtctccattctgaagattatcatccacac

SEQ ID NO: 264356 - DNA, 33 bp, Homo sapien
gactgtctccattctgcagattatcatccacac

SEQ ID NO: 264357 - DNA, 33 bp, Homo sapien
ttttgaaaatcatgaacgtgaatttttctttta

SEQ ID NO: 264358 - DNA, 33 bp, Homo sapien
ttttgaaaatcatgaatgtgaatttttctttta

SEQ ID NO: 264359 - DNA, 33 bp, Homo sapien
ttggaagcatagatgacccagtgaagctaaaaa

SEQ ID NO: 264360 - DNA, 33 bp, Homo sapien
ttggaagcatagatgatccagtgaagctaaaaa

SEQ ID NO: 264361 - DNA, 33 bp, Homo sapien
ttagcaaatagcatccacatgttggaggagatt

SEQ ID NO: 264362 - DNA, 33 bp, Homo sapien
ttagcaaatagcatccgcatgttggaggagatt

SEQ ID NO: 264363 - DNA, 33 bp, Homo sapien
aggagcggacaatatcaagaattgcattagatc

SEQ ID NO: 264364 - DNA, 33 bp, Homo sapien
aggagcggacaatatcgagaattgcattagatc

SEQ ID NO: 264365 - DNA, 33 bp, Homo sapien
aattgcattagatctgcagccaggaagtagttt

SEQ ID NO: 264366 - DNA, 33 bp, Homo sapien
aattgcattagatctgtagccaggaagtagttt

SEQ ID NO: 264367 - DNA, 33 bp, Homo sapien
aacatcttttccttgaaatcccttctgtcagca

SEQ ID NO: 264368 - DNA, 33 bp, Homo sapien
aacatcttttccttgagatcccttctgtcagca

SEQ ID NO: 264369 - DNA, 33 bp, Homo sapien
aattccttgcccttcaataattcaacaataaca

SEQ ID NO: 264370 - DNA, 33 bp, Homo sapien
aattccttgcccttcagtaattcaacaataaca

SEQ ID NO: 264371 - DNA, 33 bp, Homo sapien
tgtgaattctctgagaaccagggctatgtttta

SEQ ID NO: 264372 - DNA, 33 bp, Homo sapien
tgtgaattctctgagagccagggctatgtttta

SEQ ID NO: 264373 - DNA, 33 bp, Homo sapien
tatcaaggagctatacgaggagaaaagtaccta

SEQ ID NO: 264374 - DNA, 33 bp, Homo sapien
tatcaaggagctatactaggagaaaagtaccta

SEQ ID NO: 264375 - DNA, 33 bp, Homo sapien
ttgaaacagggcctcactctctcaccccagctg

SEQ ID NO: 264376 - DNA, 33 bp, Homo sapien
ttgaaacagggcctcattctctcaccccagctg

SEQ ID NO: 264377 - DNA, 33 bp, Homo sapien
ccttacccctctcagacacgttattgctttttc

SEQ ID NO: 264378 - DNA, 33 bp, Homo sapien
ccttacccctctcagatacgttattgctttttc

SEQ ID NO: 264379 - DNA, 33 bp, Homo sapien
atataaagggacataaggcactcactttcaggt

SEQ ID NO: 264380 - DNA, 33 bp, Homo sapien
atataaagggacataatgcactcactttcaggt

SEQ ID NO: 264381 - DNA, 33 bp, Homo sapien
acatggtttggtaggacggtgcactggatcagt

SEQ ID NO: 264382 - DNA, 33 bp, Homo sapien
acatggtttggtaggatggtgcactggatcagt

SEQ ID NO: 264383 - DNA, 33 bp, Homo sapien
tcagtcacagtagcccaggaagtccttccacca

SEQ ID NO: 264384 - DNA, 33 bp, Homo sapien
tcagtcacagtagcccgggaagtccttccacca

SEQ ID NO: 264385 - DNA, 33 bp, Homo sapien
caagcaacaaagggaaacagatcagagccctgc

SEQ ID NO: 264386 - DNA, 33 bp, Homo sapien
caagcaacaaagggaagcagatcagagccctgc

SEQ ID NO: 264387 - DNA, 33 bp, Homo sapien
aaagaggaatggataccaaaaatccttaagaca

SEQ ID NO: 264388 - DNA, 33 bp, Homo sapien
aaagaggaatggatactaaaaatccttaagaca

SEQ ID NO: 264389 - DNA, 33 bp, Homo sapien
agcctgcagaagtacaagacgatgatcagctgc

SEQ ID NO: 264390 - DNA, 33 bp, Homo sapien
agcctgcagaagtacaggacgatgatcagctgc

SEQ ID NO: 264391 - DNA, 33 bp, Homo sapien
cacagagttaatgagacgctaagctatgtagga

SEQ ID NO: 264392 - DNA, 33 bp, Homo sapien
cacagagttaatgagatgctaagctatgtagga

SEQ ID NO: 264393 - DNA, 33 bp, Homo sapien
gtgataagaaaggaaacgtttagtgtatcaaag

SEQ ID NO: 264394 - DNA, 33 bp, Homo sapien
gtgataagaaaggaaatgtttagtgtatcaaag

SEQ ID NO: 264395 - DNA, 33 bp, Homo sapien
gtgtaatacattttgacaaaagcaagagtaaaa

SEQ ID NO: 264396 - DNA, 33 bp, Homo sapien
gtgtaatacattttgataaaagcaagagtaaaa

SEQ ID NO: 264397 - DNA, 33 bp, Homo sapien
ggagaaagggccaccacattaaataacagtgta

SEQ ID NO: 264398 - DNA, 33 bp, Homo sapien
ggagaaagggccaccagattaaataacagtgta

SEQ ID NO: 264399 - DNA, 33 bp, Homo sapien
atatattcctttgagacgtatcttagatagctg

SEQ ID NO: 264400 - DNA, 33 bp, Homo sapien
atatattcctttgagatgtatcttagatagctg

SEQ ID NO: 264401 - DNA, 33 bp, Homo sapien
acaaaaatattatacacggcatctgtctacaga

SEQ ID NO: 264402 - DNA, 33 bp, Homo sapien
acaaaaatattatacatggcatctgtctacaga

SEQ ID NO: 264403 - DNA, 33 bp, Homo sapien
atcaaaggaacaatacaacatgtgtcttctact

SEQ ID NO: 264404 - DNA, 33 bp, Homo sapien
atcaaaggaacaataccacatgtgtcttctact

SEQ ID NO: 264405 - DNA, 33 bp, Homo sapien
tgctaaaaagagccaaagggattaaggcaaaaa

SEQ ID NO: 264406 - DNA, 33 bp, Homo sapien
tgctaaaaagagccaaggggattaaggcaaaaa

SEQ ID NO: 264407 - DNA, 33 bp, Homo sapien
aattggatatgactatcaacaatcactatttct

SEQ ID NO: 264408 - DNA, 33 bp, Homo sapien
aattggatatgactatgaacaatcactatttct

SEQ ID NO: 264409 - DNA, 33 bp, Homo sapien
aacagaatattccactcaagtttctgctttatc

SEQ ID NO: 264410 - DNA, 33 bp, Homo sapien
aacagaatattccacttaagtttctgctttatc

SEQ ID NO: 264411 - DNA, 33 bp, Homo sapien
ttattttgaagtgcagaactcatctgttttctg

SEQ ID NO: 264412 - DNA, 33 bp, Homo sapien
ttattttgaagtgcaggactcatctgttttctg

SEQ ID NO: 264413 - DNA, 33 bp, Homo sapien
aagagcacagtttccacgcatcttgcagcaggc

SEQ ID NO: 264414 - DNA, 33 bp, Homo sapien
aagagcacagtttccatgcatcttgcagcaggc

SEQ ID NO: 264415 - DNA, 33 bp, Homo sapien
acttttccaagatcacacactgctgggcaattg

SEQ ID NO: 264416 - DNA, 33 bp, Homo sapien
acttttccaagatcactcactgctgggcaattg

SEQ ID NO: 264417 - DNA, 33 bp, Homo sapien
ccacgtcttgtattaacgtgacatggagtcaaa

SEQ ID NO: 264418 - DNA, 33 bp, Homo sapien
ccacgtcttgtattaatgtgacatggagtcaaa

SEQ ID NO: 264419 - DNA, 33 bp, Homo sapien
gattcccctgaagtcacaggagacaaagtttta

SEQ ID NO: 264420 - DNA, 33 bp, Homo sapien
gattcccctgaagtcataggagacaaagtttta

SEQ ID NO: 264421 - DNA, 33 bp, Homo sapien
ttttatctgtggagaaattactgtaaagcaatg

SEQ ID NO: 264422 - DNA, 33 bp, Homo sapien
ttttatctgtggagaagttactgtaaagcaatg

SEQ ID NO: 264423 - DNA, 33 bp, Homo sapien
tatcccctccccgtgacgctacccggactccgg

SEQ ID NO: 264424 - DNA, 33 bp, Homo sapien
tatcccctccccgtgatgctacccggactccgg

SEQ ID NO: 264425 - DNA, 33 bp, Homo sapien
aaccagcattccactccatacttcaatgagatc

SEQ ID NO: 264426 - DNA, 33 bp, Homo sapien
aaccagcattccactctatacttcaatgagatc

SEQ ID NO: 264427 - DNA, 33 bp, Homo sapien
ctaatcattaaggggaagtatgaaattgaggaa

SEQ ID NO: 264428 - DNA, 33 bp, Homo sapien
ctaatcattaaggggaggtatgaaattgaggaa

SEQ ID NO: 264429 - DNA, 33 bp, Homo sapien
ttgatttttagggtccggctaatcattaagggg

SEQ ID NO: 264430 - DNA, 33 bp, Homo sapien
ttgatttttagggtcctgctaatcattaagggg

SEQ ID NO: 264431 - DNA, 33 bp, Homo sapien
acacacattgaaaaccaacatttcaaaagccca

SEQ ID NO: 264432 - DNA, 33 bp, Homo sapien
acacacattgaaaaccgacatttcaaaagccca

SEQ ID NO: 264433 - DNA, 33 bp, Homo sapien
tgttcaatatggaaaaattggaaatcacataaa

SEQ ID NO: 264434 - DNA, 33 bp, Homo sapien
tgttcaatatggaaaatttggaaatcacataaa

SEQ ID NO: 264435 - DNA, 33 bp, Homo sapien
agaactggtttgaaaacgttgggaatcatgaaa

SEQ ID NO: 264436 - DNA, 33 bp, Homo sapien
agaactggtttgaaaatgttgggaatcatgaaa

SEQ ID NO: 264437 - DNA, 33 bp, Homo sapien
tccttacctctctgaccggctgtcaccctcatg

SEQ ID NO: 264438 - DNA, 33 bp, Homo sapien
tccttacctctctgactggctgtcaccctcatg

SEQ ID NO: 264439 - DNA, 33 bp, Homo sapien
aagaaccacgtgaagaagaaggtgatttggcta

SEQ ID NO: 264440 - DNA, 33 bp, Homo sapien
aagaaccacgtgaagacgaaggtgatttggcta

SEQ ID NO: 264441 - DNA, 33 bp, Homo sapien
aaagtcttccaggcaaagcattgtgttgggcac

SEQ ID NO: 264442 - DNA, 33 bp, Homo sapien
aaagtcttccaggcaacgcattgtgttgggcac

SEQ ID NO: 264443 - DNA, 33 bp, Homo sapien
tacaaccttcataaccaacagacctcgaattag

SEQ ID NO: 264444 - DNA, 33 bp, Homo sapien
tacaaccttcataaccgacagacctcgaattag

SEQ ID NO: 264445 - DNA, 33 bp, Homo sapien
taaaactgagatagtcaaaggttattgcagatc

SEQ ID NO: 264446 - DNA, 33 bp, Homo sapien
taaaactgagatagtctaaggttattgcagatc

SEQ ID NO: 264447 - DNA, 33 bp, Homo sapien
cttactgggaaaatcaataccagtgttaagaag

SEQ ID NO: 264448 - DNA, 33 bp, Homo sapien
cttactgggaaaatcagtaccagtgttaagaag

SEQ ID NO: 264449 - DNA, 33 bp, Homo sapien
aattttgtttgtagaaatgcaagaatttgaagg

SEQ ID NO: 264450 - DNA, 33 bp, Homo sapien
aattttgtttgtagaactgcaagaatttgaagg

SEQ ID NO: 264451 - DNA, 33 bp, Homo sapien
accatgatgtatctgacgcttagctgtgggagt

SEQ ID NO: 264452 - DNA, 33 bp, Homo sapien
accatgatgtatctgatgcttagctgtgggagt

SEQ ID NO: 264453 - DNA, 33 bp, Homo sapien
atttaatgtccagtccaagctattattcaagat

SEQ ID NO: 264454 - DNA, 33 bp, Homo sapien
atttaatgtccagtccgagctattattcaagat

SEQ ID NO: 264455 - DNA, 33 bp, Homo sapien
tctaagaccaaggcaaagatatcattcctctgg

SEQ ID NO: 264456 - DNA, 33 bp, Homo sapien
tctaagaccaaggcaaggatatcattcctctgg

SEQ ID NO: 264457 - DNA, 33 bp, Homo sapien
acacacacagaaaacacagatttaccaaatgtg

SEQ ID NO: 264458 - DNA, 33 bp, Homo sapien
acacacacagaaaacatagatttaccaaatgtg

SEQ ID NO: 264459 - DNA, 33 bp, Homo sapien
ataagcacctcctttaagcactggggtataact

SEQ ID NO: 264460 - DNA, 33 bp, Homo sapien
ataagcacctcctttaggcactggggtataact

SEQ ID NO: 264461 - DNA, 33 bp, Homo sapien
tcttgacacagactggccagacatagcaagtca

SEQ ID NO: 264462 - DNA, 33 bp, Homo sapien
tcttgacacagactggtcagacatagcaagtca

SEQ ID NO: 264463 - DNA, 33 bp, Homo sapien
ccatcgcatcttgctaatagatgagcccaagtc

SEQ ID NO: 264464 - DNA, 33 bp, Homo sapien
ccatcgcatcttgctattagatgagcccaagtc

SEQ ID NO: 264465 - DNA, 33 bp, Homo sapien
ggacccctttgagagtcaagttttggtcagatt

SEQ ID NO: 264466 - DNA, 33 bp, Homo sapien
ggacccctttgagagtgaagttttggtcagatt

SEQ ID NO: 264467 - DNA, 33 bp, Homo sapien
tcaattctcttacctacgggctggatgagatga

SEQ ID NO: 264468 - DNA, 33 bp, Homo sapien
tcaattctcttacctatgggctggatgagatga

SEQ ID NO: 264469 - DNA, 33 bp, Homo sapien
atgccaggagctcacgcaaaatgcttgaagaaa

SEQ ID NO: 264470 - DNA, 33 bp, Homo sapien
atgccaggagctcacgtaaaatgcttgaagaaa

SEQ ID NO: 264471 - DNA, 33 bp, Homo sapien
tcctgtaacatcttagcattcagtttcaggtaa

SEQ ID NO: 264472 - DNA, 33 bp, Homo sapien
tcctgtaacatcttagtattcagtttcaggtaa

SEQ ID NO: 264473 - DNA, 33 bp, Homo sapien
ggattattttcagagagaaggttaagggaacca

SEQ ID NO: 264474 - DNA, 33 bp, Homo sapien
ggattattttcagagataaggttaagggaacca

SEQ ID NO: 264475 - DNA, 33 bp, Homo sapien
atactgacttttctacgaataaatccaccctgt

SEQ ID NO: 264476 - DNA, 33 bp, Homo sapien
atactgacttttctactaataaatccaccctgt

SEQ ID NO: 264477 - DNA, 33 bp, Homo sapien
tagcaataaccttaaccggcaatgggacaagat

SEQ ID NO: 264478 - DNA, 33 bp, Homo sapien
tagcaataaccttaactggcaatgggacaagat

SEQ ID NO: 264479 - DNA, 33 bp, Homo sapien
agtcaaagaaaactacaaagtgatcaactgtat

SEQ ID NO: 264480 - DNA, 33 bp, Homo sapien
agtcaaagaaaactacgaagtgatcaactgtat

SEQ ID NO: 264481 - DNA, 33 bp, Homo sapien
actattgggagaggtaaatttctcatctcccgt

SEQ ID NO: 264482 - DNA, 33 bp, Homo sapien
actattgggagaggtagatttctcatctcccgt

SEQ ID NO: 264483 - DNA, 33 bp, Homo sapien
ttgagctcctgataaccgcttctggatcccatt

SEQ ID NO: 264484 - DNA, 33 bp, Homo sapien
ttgagctcctgataactgcttctggatcccatt

SEQ ID NO: 264485 - DNA, 33 bp, Homo sapien
gcaacctaaattacaagatattctcagcattat

SEQ ID NO: 264486 - DNA, 33 bp, Homo sapien
gcaacctaaattacaatatattctcagcattat

SEQ ID NO: 264487 - DNA, 33 bp, Homo sapien
ttctacttaatgctcaccagttaagatctttcc

SEQ ID NO: 264488 - DNA, 33 bp, Homo sapien
ttctacttaatgctcatcagttaagatctttcc

SEQ ID NO: 264489 - DNA, 33 bp, Homo sapien
cagagttagagataaaagtcacataatgcttag

SEQ ID NO: 264490 - DNA, 33 bp, Homo sapien
cagagttagagataaacgtcacataatgcttag

SEQ ID NO: 264491 - DNA, 33 bp, Homo sapien
gtaactaaatagggtagcaatcatttatcatca

SEQ ID NO: 264492 - DNA, 33 bp, Homo sapien
gtaactaaatagggtatcaatcatttatcatca

SEQ ID NO: 264493 - DNA, 33 bp, Homo sapien
gtcatgactgataaaaatgtcaaataatctcat

SEQ ID NO: 264494 - DNA, 33 bp, Homo sapien
gtcatgactgataaaagtgtcaaataatctcat

SEQ ID NO: 264495 - DNA, 33 bp, Homo sapien
tacaatgctttaaatcaaacatcgaaatgccag

SEQ ID NO: 264496 - DNA, 33 bp, Homo sapien
tacaatgctttaaatcgaacatcgaaatgccag

SEQ ID NO: 264497 - DNA, 33 bp, Homo sapien
actagtttgccaggaccgtagtgagatatagat

SEQ ID NO: 264498 - DNA, 33 bp, Homo sapien
actagtttgccaggactgtagtgagatatagat

SEQ ID NO: 264499 - DNA, 33 bp, Homo sapien
catgcctctaattaaacaccttgatggttaata

SEQ ID NO: 264500 - DNA, 33 bp, Homo sapien
catgcctctaattaaataccttgatggttaata

SEQ ID NO: 264501 - DNA, 33 bp, Homo sapien
ttcttttaacaaaggacggccttatttcttatc

SEQ ID NO: 264502 - DNA, 33 bp, Homo sapien
ttcttttaacaaaggatggccttatttcttatc

SEQ ID NO: 264503 - DNA, 33 bp, Homo sapien
ctgcctgtgtagaacaaactttagctgacaaaa

SEQ ID NO: 264504 - DNA, 33 bp, Homo sapien
ctgcctgtgtagaacagactttagctgacaaaa

SEQ ID NO: 264505 - DNA, 33 bp, Homo sapien
aaataaaatgttgaaacgtgcttataaggcata

SEQ ID NO: 264506 - DNA, 33 bp, Homo sapien
aaataaaatgttgaaatgtgcttataaggcata

SEQ ID NO: 264507 - DNA, 33 bp, Homo sapien
cctaagctttggcatccagtgtctttcaaatag

SEQ ID NO: 264508 - DNA, 33 bp, Homo sapien
cctaagctttggcatctagtgtctttcaaatag

SEQ ID NO: 264509 - DNA, 33 bp, Homo sapien
actgagatttctgatcactaactgcaagttctg

SEQ ID NO: 264510 - DNA, 33 bp, Homo sapien
actgagatttctgatccctaactgcaagttctg

SEQ ID NO: 264511 - DNA, 33 bp, Homo sapien
agagtcacatggaaaactctggggtggcattct

SEQ ID NO: 264512 - DNA, 33 bp, Homo sapien
agagtcacatggaaaagtctggggtggcattct

SEQ ID NO: 264513 - DNA, 33 bp, Homo sapien
acaataatgactagcaagtataatgtgtgttat

SEQ ID NO: 264514 - DNA, 33 bp, Homo sapien
acaataatgactagcaggtataatgtgtgttat

SEQ ID NO: 264515 - DNA, 33 bp, Homo sapien
actcacactgtggacactctagcattttaattt

SEQ ID NO: 264516 - DNA, 33 bp, Homo sapien
actcacactgtggacattctagcattttaattt

SEQ ID NO: 264517 - DNA, 33 bp, Homo sapien
tgtttttgaagtatctcagaattgaagagggct

SEQ ID NO: 264518 - DNA, 33 bp, Homo sapien
tgtttttgaagtatctgagaattgaagagggct

SEQ ID NO: 264519 - DNA, 33 bp, Homo sapien
aacaaaagttacaggacggtgagaaagtagtgc

SEQ ID NO: 264520 - DNA, 33 bp, Homo sapien
aacaaaagttacaggatggtgagaaagtagtgc

SEQ ID NO: 264521 - DNA, 33 bp, Homo sapien
attccaagtaaaatgcaaatcaacataaactga

SEQ ID NO: 264522 - DNA, 33 bp, Homo sapien
attccaagtaaaatgcgaatcaacataaactga

SEQ ID NO: 264523 - DNA, 33 bp, Homo sapien
actcaagccattaagaagtgataaagactatgg

SEQ ID NO: 264524 - DNA, 33 bp, Homo sapien
actcaagccattaagacgtgataaagactatgg

SEQ ID NO: 264525 - DNA, 33 bp, Homo sapien
ttcaatatttatctcacactactcgataggcag

SEQ ID NO: 264526 - DNA, 33 bp, Homo sapien
ttcaatatttatctcatactactcgataggcag

SEQ ID NO: 264527 - DNA, 33 bp, Homo sapien
tgaaagcaattgagaaaaaacagatacaagaaa

SEQ ID NO: 264528 - DNA, 33 bp, Homo sapien
tgaaagcaattgagaagaaacagatacaagaaa

SEQ ID NO: 264529 - DNA, 33 bp, Homo sapien
tggaggggaatgagaagcgaagtgacatcttac

SEQ ID NO: 264530 - DNA, 33 bp, Homo sapien
tggaggggaatgagaatcgaagtgacatcttac

SEQ ID NO: 264531 - DNA, 33 bp, Homo sapien
ataaagctgttgatcccatgtcagagcacagct

SEQ ID NO: 264532 - DNA, 33 bp, Homo sapien
ataaagctgttgatcctatgtcagagcacagct

SEQ ID NO: 264533 - DNA, 33 bp, Homo sapien
actccacggtgaagtaagcaacttgcagtctaa

SEQ ID NO: 264534 - DNA, 33 bp, Homo sapien
actccacggtgaagtaggcaacttgcagtctaa

SEQ ID NO: 264535 - DNA, 33 bp, Homo sapien
ttatggagtgatgcaacggtatagtacgttcag

SEQ ID NO: 264536 - DNA, 33 bp, Homo sapien
ttatggagtgatgcaatggtatagtacgttcag

SEQ ID NO: 264537 - DNA, 33 bp, Homo sapien
ggaatgaatatgagtgaatcttaaagtgctagg

SEQ ID NO: 264538 - DNA, 33 bp, Homo sapien
ggaatgaatatgagtggatcttaaagtgctagg

SEQ ID NO: 264539 - DNA, 33 bp, Homo sapien
tgacctttgctttccactgaggtcatgtgcagc

SEQ ID NO: 264540 - DNA, 33 bp, Homo sapien
tgacctttgctttccattgaggtcatgtgcagc

SEQ ID NO: 264541 - DNA, 33 bp, Homo sapien
cggttgcttatagataaatgttcagatttcaga

SEQ ID NO: 264542 - DNA, 33 bp, Homo sapien
cggttgcttatagatagatgttcagatttcaga

SEQ ID NO: 264543 - DNA, 33 bp, Homo sapien
gactgctgtaagaaaaatagatcataaccgggc

SEQ ID NO: 264544 - DNA, 33 bp, Homo sapien
gactgctgtaagaaaagtagatcataaccgggc

SEQ ID NO: 264545 - DNA, 33 bp, Homo sapien
tttattttgagatatccattagacttccaagta

SEQ ID NO: 264546 - DNA, 33 bp, Homo sapien
tttattttgagatatctattagacttccaagta

SEQ ID NO: 264547 - DNA, 33 bp, Homo sapien
tccatagataaggccaagcgtaattttgtaata

SEQ ID NO: 264548 - DNA, 33 bp, Homo sapien
tccatagataaggccatgcgtaattttgtaata

SEQ ID NO: 264549 - DNA, 33 bp, Homo sapien
gcttgtgtaagtattacgtgatagaggaaatat

SEQ ID NO: 264550 - DNA, 33 bp, Homo sapien
gcttgtgtaagtattatgtgatagaggaaatat

SEQ ID NO: 264551 - DNA, 33 bp, Homo sapien
actggcattcaaaaaacgtgacccagaactgac

SEQ ID NO: 264552 - DNA, 33 bp, Homo sapien
actggcattcaaaaaatgtgacccagaactgac

SEQ ID NO: 264553 - DNA, 33 bp, Homo sapien
tggaatctgaaaagttaaactcatatgagcaga

SEQ ID NO: 264554 - DNA, 33 bp, Homo sapien
tggaatctgaaaagtttaactcatatgagcaga

SEQ ID NO: 264555 - DNA, 33 bp, Homo sapien
gtccagagagaaaaaaaattatattgtggtagc

SEQ ID NO: 264556 - DNA, 33 bp, Homo sapien
gtccagagagaaaaaatattatattgtggtagc

SEQ ID NO: 264557 - DNA, 33 bp, Homo sapien
ctgagtgttttgaatgcacttactgcctgtatg

SEQ ID NO: 264558 - DNA, 33 bp, Homo sapien
ctgagtgttttgaatggacttactgcctgtatg

SEQ ID NO: 264559 - DNA, 33 bp, Homo sapien
atacctcaatcccaagaaaagtttgtgaaatag

SEQ ID NO: 264560 - DNA, 33 bp, Homo sapien
atacctcaatcccaaggaaagtttgtgaaatag

SEQ ID NO: 264561 - DNA, 33 bp, Homo sapien
cagccaggccttgtcaagaaagtctatgcagtg

SEQ ID NO: 264562 - DNA, 33 bp, Homo sapien
cagccaggccttgtcaggaaagtctatgcagtg

SEQ ID NO: 264563 - DNA, 33 bp, Homo sapien
gttcacttagggcttaccaccaaatagctccac

SEQ ID NO: 264564 - DNA, 33 bp, Homo sapien
gttcacttagggcttatcaccaaatagctccac

SEQ ID NO: 264565 - DNA, 33 bp, Homo sapien
attagagaagttcctcaattctggaacagattc

SEQ ID NO: 264566 - DNA, 33 bp, Homo sapien
attagagaagttcctctattctggaacagattc

SEQ ID NO: 264567 - DNA, 33 bp, Homo sapien
atctaccaccaatcaccggcatataataaaata

SEQ ID NO: 264568 - DNA, 33 bp, Homo sapien
atctaccaccaatcactggcatataataaaata

SEQ ID NO: 264569 - DNA, 33 bp, Homo sapien
catcgaggaactgggacctttctgttgttatgc

SEQ ID NO: 264570 - DNA, 33 bp, Homo sapien
catcgaggaactgggatctttctgttgttatgc

SEQ ID NO: 264571 - DNA, 33 bp, Homo sapien
acatacatagcaaataacactctgacctctgta

SEQ ID NO: 264572 - DNA, 33 bp, Homo sapien
acatacatagcaaataccactctgacctctgta

SEQ ID NO: 264573 - DNA, 33 bp, Homo sapien
ctttattccgtcaataacaccaaacgaggagca

SEQ ID NO: 264574 - DNA, 33 bp, Homo sapien
ctttattccgtcaatagcaccaaacgaggagca

SEQ ID NO: 264575 - DNA, 33 bp, Homo sapien
gagccatgttttaaaacctcgagaatctggcct

SEQ ID NO: 264576 - DNA, 33 bp, Homo sapien
gagccatgttttaaaatctcgagaatctggcct

SEQ ID NO: 264577 - DNA, 33 bp, Homo sapien
catgccagccaagcaagggttaaatccctaccc

SEQ ID NO: 264578 - DNA, 33 bp, Homo sapien
catgccagccaagcaatggttaaatccctaccc

SEQ ID NO: 264579 - DNA, 33 bp, Homo sapien
aactactatttactgaactagagagaaaaggac

SEQ ID NO: 264580 - DNA, 33 bp, Homo sapien
aactactatttactgacctagagagaaaaggac

SEQ ID NO: 264581 - DNA, 33 bp, Homo sapien
aaatggatgataactaagaatgtaataaaatgt

SEQ ID NO: 264582 - DNA, 33 bp, Homo sapien
aaatggatgataactaggaatgtaataaaatgt

SEQ ID NO: 264583 - DNA, 33 bp, Homo sapien
atgatgattgctgcacagtatagtaaaatagat

SEQ ID NO: 264584 - DNA, 33 bp, Homo sapien
atgatgattgctgcacggtatagtaaaatagat

SEQ ID NO: 264585 - DNA, 33 bp, Homo sapien
aaacaccctgcactaaccagcaggacggaatgg

SEQ ID NO: 264586 - DNA, 33 bp, Homo sapien
aaacaccctgcactaagcagcaggacggaatgg

SEQ ID NO: 264587 - DNA, 33 bp, Homo sapien
accagaccactccaaagagctggtagtgataaa

SEQ ID NO: 264588 - DNA, 33 bp, Homo sapien
accagaccactccaaatagctggtagtgataaa

SEQ ID NO: 264589 - DNA, 33 bp, Homo sapien
ctatttttcttttatccaatcagtaaggcatgg

SEQ ID NO: 264590 - DNA, 33 bp, Homo sapien
ctatttttcttttatcgaatcagtaaggcatgg

SEQ ID NO: 264591 - DNA, 33 bp, Homo sapien; identical to SEQ ID NO: 264589

SEQ ID NO: 264592 - DNA, 33 bp, Homo sapien; identical to SEQ ID NO: 264590

SEQ ID NO: 264593 - DNA, 33 bp, Homo sapien
accaatttatcgtcacaagatatctgaacatga

SEQ ID NO: 264594 - DNA, 33 bp, Homo sapien
accaatttatcgtcacgagatatctgaacatga

SEQ ID NO: 264595 - DNA, 33 bp, Homo sapien; identical to SEQ ID NO: 264593

SEQ ID NO: 264596 - DNA, 33 bp, Homo sapien; identical to SEQ ID NO: 264594

SEQ ID NO: 264597 - DNA, 33 bp, Homo sapien
tttagatcagccagacagaaatgaagttttata

SEQ ID NO: 264598 - DNA, 33 bp, Homo sapien
tttagatcagccagacggaaatgaagttttata

SEQ ID NO: 264599 - DNA, 33 bp, Homo sapien
tggtgatccaaggcaaatagtaactccctctgg

SEQ ID NO: 264600 - DNA, 33 bp, Homo sapien
tggtgatccaaggcaactagtaactccctctgg

SEQ ID NO: 264601 - DNA, 33 bp, Homo sapien
atataaaatgcataccaatccaaaactacaacc

SEQ ID NO: 264602 - DNA, 33 bp, Homo sapien
atataaaatgcataccgatccaaaactacaacc

SEQ ID NO: 264603 - DNA, 33 bp, Homo sapien
tgtcctggttttctgtaaataacttggcctttg

SEQ ID NO: 264604 - DNA, 33 bp, Homo sapien
tgtcctggttttctgtgaataacttggcctttg

SEQ ID NO: 264605 - DNA, 33 bp, Homo sapien
tttcgtggctttgtgaccttcaactatgttaca

SEQ ID NO: 264606 - DNA, 33 bp, Homo sapien
tttcgtggctttgtgatcttcaactatgttaca

SEQ ID NO: 264607 - DNA, 33 bp, Homo sapien
aaagactcatacttacacatcattcaactttct

SEQ ID NO: 264608 - DNA, 33 bp, Homo sapien
aaagactcatacttacgcatcattcaactttct

SEQ ID NO: 264609 - DNA, 33 bp, Homo sapien
tttattcttcactgacaataaaggtaatgttgt

SEQ ID NO: 264610 - DNA, 33 bp, Homo sapien
tttattcttcactgactataaaggtaatgttgt

SEQ ID NO: 264611 - DNA, 33 bp, Homo sapien
gtcttctccactagagaagaaatgctctaatac

SEQ ID NO: 264612 - DNA, 33 bp, Homo sapien
gtcttctccactagaggagaaatgctctaatac

SEQ ID NO: 264613 - DNA, 33 bp, Homo sapien
tgttaaaatgaggataacttgtaaagcgactta

SEQ ID NO: 264614 - DNA, 33 bp, Homo sapien
tgttaaaatgaggatatcttgtaaagcgactta

SEQ ID NO: 264615 - DNA, 33 bp, Homo sapien
tgaattggcttacagtaaaagatagcagtatac

SEQ ID NO: 264616 - DNA, 33 bp, Homo sapien
tgaattggcttacagtgaaagatagcagtatac

SEQ ID NO: 264617 - DNA, 33 bp, Homo sapien
tccctatgcatgatacagggttccctctcaaac

SEQ ID NO: 264618 - DNA, 33 bp, Homo sapien
tccctatgcatgataccgggttccctctcaaac

SEQ ID NO: 264619 - DNA, 33 bp, Homo sapien
agagcactgaggtttacaaatactagcaattta

SEQ ID NO: 264620 - DNA, 33 bp, Homo sapien
agagcactgaggtttataaatactagcaattta

SEQ ID NO: 264621 - DNA, 33 bp, Homo sapien
gagtttaaaaagtaaacatcgggtaatcatatt

SEQ ID NO: 264622 - DNA, 33 bp, Homo sapien
gagtttaaaaagtaaagatcgggtaatcatatt

SEQ ID NO: 264623 - DNA, 33 bp, Homo sapien
atcttcttcaatctataaggacagttgtaatat

SEQ ID NO: 264624 - DNA, 33 bp, Homo sapien
atcttcttcaatctatcaggacagttgtaatat

SEQ ID NO: 264625 - DNA, 33 bp, Homo sapien
tggaaattcagagttacgggtttctcatcatga

SEQ ID NO: 264626 - DNA, 33 bp, Homo sapien
tggaaattcagagttatgggtttctcatcatga

SEQ ID NO: 264627 - DNA, 33 bp, Homo sapien
atatatagtcaaattaaaaatgttctctgacag

SEQ ID NO: 264628 - DNA, 33 bp, Homo sapien
atatatagtcaaattacaaatgttctctgacag

SEQ ID NO: 264629 - DNA, 33 bp, Homo sapien
ctacagaaactgataaaagctattgaaaactta

SEQ ID NO: 264630 - DNA, 33 bp, Homo sapien
ctacagaaactgataagagctattgaaaactta

SEQ ID NO: 264631 - DNA, 33 bp, Homo sapien
aaaagttatcatcaaaatggtataagccaggac

SEQ ID NO: 264632 - DNA, 33 bp, Homo sapien
aaaagttatcatcaaagtggtataagccaggac

SEQ ID NO: 264633 - DNA, 33 bp, Homo sapien
gatcatatattagatgcagtgtaaatgttaaaa

SEQ ID NO: 264634 - DNA, 33 bp, Homo sapien
gatcatatattagatggagtgtaaatgttaaaa

SEQ ID NO: 264635 - DNA, 33 bp, Homo sapien
tttttaagaatgtcaaatagtgcttatgtatgg

SEQ ID NO: 264636 - DNA, 33 bp, Homo sapien
tttttaagaatgtcaagtagtgcttatgtatgg

SEQ ID NO: 264637 - DNA, 33 bp, Homo sapien
tgttctgtggtaagaactcctggtattgatcag

SEQ ID NO: 264638 - DNA, 33 bp, Homo sapien
tgttctgtggtaagaattcctggtattgatcag

SEQ ID NO: 264639 - DNA, 33 bp, Homo sapien
caaaaaactcttattaacaagagacaaatagct

SEQ ID NO: 264640 - DNA, 33 bp, Homo sapien
caaaaaactcttattagcaagagacaaatagct

SEQ ID NO: 264641 - DNA, 33 bp, Homo sapien
gtcactgttaagtgaactagctatttgtctctt

SEQ ID NO: 264642 - DNA, 33 bp, Homo sapien
gtcactgttaagtgaattagctatttgtctctt

SEQ ID NO: 264643 - DNA, 33 bp, Homo sapien
gcattatccaacttaaatgtcacattccccata

SEQ ID NO: 264644 - DNA, 33 bp, Homo sapien
gcattatccaacttaactgtcacattccccata

SEQ ID NO: 264645 - DNA, 33 bp, Homo sapien
tgattatattcttttacactgatgcacatttct

SEQ ID NO: 264646 - DNA, 33 bp, Homo sapien
tgattatattcttttatactgatgcacatttct

SEQ ID NO: 264647 - DNA, 33 bp, Homo sapien
atggaaaggggcaataagaagcataaattcttg

SEQ ID NO: 264648 - DNA, 33 bp, Homo sapien
atggaaaggggcaataggaagcataaattcttg

SEQ ID NO: 264649 - DNA, 33 bp, Homo sapien
taataatttgtgaatgacagttgtaaaagtggc

SEQ ID NO: 264650 - DNA, 33 bp, Homo sapien
taataatttgtgaatgtcagttgtaaaagtggc

SEQ ID NO: 264651 - DNA, 33 bp, Homo sapien
ctccagactaggtaaagtattctgtggtacgat

SEQ ID NO: 264652 - DNA, 33 bp, Homo sapien
ctccagactaggtaaattattctgtggtacgat

SEQ ID NO: 264653 - DNA, 33 bp, Homo sapien
atgaaactgtgcaaagaatactggagaataact

SEQ ID NO: 264654 - DNA, 33 bp, Homo sapien
atgaaactgtgcaaaggatactggagaataact

SEQ ID NO: 264655 - DNA, 33 bp, Homo sapien
gccacaaatgcaaaggccaactctaggctcctc

SEQ ID NO: 264656 - DNA, 33 bp, Homo sapien
gccacaaatgcaaaggtcaactctaggctcctc

SEQ ID NO: 264657 - DNA, 33 bp, Homo sapien
ctgctgaacaacagaacgtagatacaaactagt

SEQ ID NO: 264658 - DNA, 33 bp, Homo sapien
ctgctgaacaacagaatgtagatacaaactagt

SEQ ID NO: 264659 - DNA, 33 bp, Homo sapien
taataaatgttagaggccatgggttattgctat

SEQ ID NO: 264660 - DNA, 33 bp, Homo sapien
taataaatgttagaggtcatgggttattgctat

SEQ ID NO: 264661 - DNA, 33 bp, Homo sapien
tggataaaagagcaaaaaatctattacattatg

SEQ ID NO: 264662 - DNA, 33 bp, Homo sapien
tggataaaagagcaaagaatctattacattatg

SEQ ID NO: 264663 - DNA, 33 bp, Homo sapien
gtaggtctgtttctggacaaaatgctacattag

SEQ ID NO: 264664 - DNA, 33 bp, Homo sapien
gtaggtctgtttctggccaaaatgctacattag

SEQ ID NO: 264665 - DNA, 33 bp, Homo sapien
gaatccaaatggatcacagaaataagcaaaatt

SEQ ID NO: 264666 - DNA, 33 bp, Homo sapien
gaatccaaatggatcagagaaataagcaaaatt

SEQ ID NO: 264667 - DNA, 33 bp, Homo sapien
tgtgataaccttctcaaacatatccaaaacata

SEQ ID NO: 264668 - DNA, 33 bp, Homo sapien
tgtgataaccttctcagacatatccaaaacata

SEQ ID NO: 264669 - DNA, 33 bp, Homo sapien
agaggagttgaaaatacattacggaataacaga

SEQ ID NO: 264670 - DNA, 33 bp, Homo sapien
agaggagttgaaaatatattacggaataacaga

SEQ ID NO: 264671 - DNA, 33 bp, Homo sapien
tcattattgatctacaacactaagtgcttttaa

SEQ ID NO: 264672 - DNA, 33 bp, Homo sapien
tcattattgatctacatcactaagtgcttttaa

SEQ ID NO: 264673 - DNA, 33 bp, Homo sapien
attaatacttggaaccaatattcacataactct

SEQ ID NO: 264674 - DNA, 33 bp, Homo sapien
attaatacttggaaccgatattcacataactct

SEQ ID NO: 264675 - DNA, 33 bp, Homo sapien
cagcatcagttgtatccatgatttcctcagcag

SEQ ID NO: 264676 - DNA, 33 bp, Homo sapien
cagcatcagttgtatctatgatttcctcagcag

SEQ ID NO: 264677 - DNA, 33 bp, Homo sapien
aaggaggctacaataactaagatattcaagtag

SEQ ID NO: 264678 - DNA, 33 bp, Homo sapien
aaggaggctacaataagtaagatattcaagtag

SEQ ID NO: 264679 - DNA, 33 bp, Homo sapien
ataaaactgtgtcagaacattgttcatttgtaa

SEQ ID NO: 264680 - DNA, 33 bp, Homo sapien
ataaaactgtgtcagagcattgttcatttgtaa

SEQ ID NO: 264681 - DNA, 33 bp, Homo sapien
ctctttactgagctcccataacatttttaatat

SEQ ID NO: 264682 - DNA, 33 bp, Homo sapien
ctctttactgagctcctataacatttttaatat

SEQ ID NO: 264683 - DNA, 33 bp, Homo sapien
gcttttgtggagttaaataagcaagcagttaca

SEQ ID NO: 264684 - DNA, 33 bp, Homo sapien
gcttttgtggagttaagtaagcaagcagttaca

SEQ ID NO: 264685 - DNA, 33 bp, Homo sapien
gttgtaacaatgctcaatcacatgaatgttaaa

SEQ ID NO: 264686 - DNA, 33 bp, Homo sapien
gttgtaacaatgctcagtcacatgaatgttaaa

SEQ ID NO: 264687 - DNA, 33 bp, Homo sapien
tatcagaattgcaatgcacagagttaggcttaa

SEQ ID NO: 264688 - DNA, 33 bp, Homo sapien
tatcagaattgcaatgtacagagttaggcttaa

SEQ ID NO: 264689 - DNA, 33 bp, Homo sapien
acaccagtgtttaagacagcaaaagattgaatt

SEQ ID NO: 264690 - DNA, 33 bp, Homo sapien
acaccagtgtttaagatagcaaaagattgaatt

SEQ ID NO: 264691 - DNA, 33 bp, Homo sapien
agatgaatacggaaaaggtatagaggccaattc

SEQ ID NO: 264692 - DNA, 33 bp, Homo sapien
agatgaatacggaaaatgtatagaggccaattc

SEQ ID NO: 264693 - DNA, 33 bp, Homo sapien
tttacaaaatccatagaccaatctctattctat

SEQ ID NO: 264694 - DNA, 33 bp, Homo sapien
tttacaaaatccataggccaatctctattctat

SEQ ID NO: 264695 - DNA, 33 bp, Homo sapien
aaggtccaagaactgaactttgggacactccaa

SEQ ID NO: 264696 - DNA, 33 bp, Homo sapien
aaggtccaagaactgagctttgggacactccaa

SEQ ID NO: 264697 - DNA, 33 bp, Homo sapien
gcatatgtaggtgctcaacaagtgatagtcact

SEQ ID NO: 264698 - DNA, 33 bp, Homo sapien
gcatatgtaggtgctccacaagtgatagtcact

SEQ ID NO: 264699 - DNA, 33 bp, Homo sapien
gaatgaatgttatcaaccactcagccagaaacc

SEQ ID NO: 264700 - DNA, 33 bp, Homo sapien
gaatgaatgttatcaatcactcagccagaaacc

SEQ ID NO: 264701 - DNA, 33 bp, Homo sapien
tacccaggtaattttacagtaaatgatgcttct

SEQ ID NO: 264702 - DNA, 33 bp, Homo sapien
tacccaggtaattttatagtaaatgatgcttct

SEQ ID NO: 264703 - DNA, 33 bp, Homo sapien
tcacaacgaagcatcaaatttgcttaatgcaaa

SEQ ID NO: 264704 - DNA, 33 bp, Homo sapien
tcacaacgaagcatcagatttgcttaatgcaaa

SEQ ID NO: 264705 - DNA, 33 bp, Homo sapien
agtttctgtggcatgacgtccttggcaccatgc

SEQ ID NO: 264706 - DNA, 33 bp, Homo sapien
agtttctgtggcatgatgtccttggcaccatgc

SEQ ID NO: 264707 - DNA, 33 bp, Homo sapien
ctcatcagtaaagatacgtccgaaaaaagtttc

SEQ ID NO: 264708 - DNA, 33 bp, Homo sapien
ctcatcagtaaagatatgtccgaaaaaagtttc

SEQ ID NO: 264709 - DNA, 33 bp, Homo sapien
catgtttctggcactaaaaaaactcttaacctt

SEQ ID NO: 264710 - DNA, 33 bp, Homo sapien
catgtttctggcactataaaaactcttaacctt

SEQ ID NO: 264711 - DNA, 33 bp, Homo sapien
tgttaccaataaaaacaattaacctatctacac

SEQ ID NO: 264712 - DNA, 33 bp, Homo sapien
tgttaccaataaaaacgattaacctatctacac

SEQ ID NO: 264713 - DNA, 33 bp, Homo sapien
atattattagcatacaatcatacaacagcataa

SEQ ID NO: 264714 - DNA, 33 bp, Homo sapien
atattattagcatacagtcatacaacagcataa

SEQ ID NO: 264715 - DNA, 33 bp, Homo sapien
acagatgtcacctggaatatggcatgattaggt

SEQ ID NO: 264716 - DNA, 33 bp, Homo sapien
acagatgtcacctggattatggcatgattaggt

SEQ ID NO: 264717 - DNA, 33 bp, Homo sapien
atacagacctctattacacctgatatacattgc

SEQ ID NO: 264718 - DNA, 33 bp, Homo sapien
atacagacctctattatacctgatatacattgc

SEQ ID NO: 264719 - DNA, 33 bp, Homo sapien
tctgtaattgcaagcaccaaaccaaattaatta

SEQ ID NO: 264720 - DNA, 33 bp, Homo sapien
tctgtaattgcaagcatcaaaccaaattaatta

SEQ ID NO: 264721 - DNA, 33 bp, Homo sapien
ctttccagctgaaacaaaatattaagcagttag

SEQ ID NO: 264722 - DNA, 33 bp, Homo sapien
ctttccagctgaaacagaatattaagcagttag

SEQ ID NO: 264723 - DNA, 33 bp, Homo sapien
actttaatactgtgcaactgtttcctacaaagc

SEQ ID NO: 264724 - DNA, 33 bp, Homo sapien
actttaatactgtgcagctgtttcctacaaagc

SEQ ID NO: 264725 - DNA, 33 bp, Homo sapien
caattccctggaccataaggataaatacttagt

SEQ ID NO: 264726 - DNA, 33 bp, Homo sapien
caattccctggaccattaggataaatacttagt

SEQ ID NO: 264727 - DNA, 33 bp, Homo sapien
gtgggttctgaagataaaactttttggtcaaac

SEQ ID NO: 264728 - DNA, 33 bp, Homo sapien
gtgggttctgaagatacaactttttggtcaaac

SEQ ID NO: 264729 - DNA, 33 bp, Homo sapien
tatcacttaaaatcctaaacagcaatatggact

SEQ ID NO: 264730 - DNA, 33 bp, Homo sapien
tatcacttaaaatcctgaacagcaatatggact

SEQ ID NO: 264731 - DNA, 33 bp, Homo sapien
aaatagtggcaacatactacaagtttacaaaat

SEQ ID NO: 264732 - DNA, 33 bp, Homo sapien
aaatagtggcaacatattacaagtttacaaaat

SEQ ID NO: 264733 - DNA, 33 bp, Homo sapien
gaggctgaatgatctgcaacctgcttaactctt

SEQ ID NO: 264734 - DNA, 33 bp, Homo sapien
gaggctgaatgatctggaacctgcttaactctt

SEQ ID NO: 264735 - DNA, 33 bp, Homo sapien
taatatgaaaggttcacgagtggtggtaagaga

SEQ ID NO: 264736 - DNA, 33 bp, Homo sapien
taatatgaaaggttcatgagtggtggtaagaga

SEQ ID NO: 264737 - DNA, 33 bp, Homo sapien
ggggcttatgtagacaacaagataccagatttt

SEQ ID NO: 264738 - DNA, 33 bp, Homo sapien
ggggcttatgtagacatcaagataccagatttt

SEQ ID NO: 264739 - DNA, 33 bp, Homo sapien
ggagacctgggagctaaaaagacaaattatctg

SEQ ID NO: 264740 - DNA, 33 bp, Homo sapien
ggagacctgggagctagaaagacaaattatctg

SEQ ID NO: 264741 - DNA, 33 bp, Homo sapien
tattcccaagttggtacagcagctttaaaactg

SEQ ID NO: 264742 - DNA, 33 bp, Homo sapien
tattcccaagttggtagagcagctttaaaactg

SEQ ID NO: 264743 - DNA, 33 bp, Homo sapien
acttgaacctatgttacggggtgaccattctca

SEQ ID NO: 264744 - DNA, 33 bp, Homo sapien
acttgaacctatgttatggggtgaccattctca

SEQ ID NO: 264745 - DNA, 33 bp, Homo sapien
tcatgccctatctctacaacgaggctacagaag

SEQ ID NO: 264746 - DNA, 33 bp, Homo sapien
tcatgccctatctctataacgaggctacagaag

SEQ ID NO: 264747 - DNA, 33 bp, Homo sapien
gagcacaaataactgacgaaaggcagtaaggga

SEQ ID NO: 264748 - DNA, 33 bp, Homo sapien
gagcacaaataactgatgaaaggcagtaaggga

SEQ ID NO: 264749 - DNA, 33 bp, Homo sapien
ctaaagggcacttcagcagtgactattctatca

SEQ ID NO: 264750 - DNA, 33 bp, Homo sapien
ctaaagggcacttcagtagtgactattctatca

SEQ ID NO: 264751 - DNA, 33 bp, Homo sapien
tctattaagtccaaaccagtcaaactgaatgaa

SEQ ID NO: 264752 - DNA, 33 bp, Homo sapien
tctattaagtccaaactagtcaaactgaatgaa

SEQ ID NO: 264753 - DNA, 33 bp, Homo sapien
ttcacccatgttgtagcatgtattggtactttg

SEQ ID NO: 264754 - DNA, 33 bp, Homo sapien
ttcacccatgttgtagtatgtattggtactttg

SEQ ID NO: 264755 - DNA, 33 bp, Homo sapien
attaatttactaaggacggttttgtcacttcat

SEQ ID NO: 264756 - DNA, 33 bp, Homo sapien
attaatttactaaggatggttttgtcacttcat

SEQ ID NO: 264757 - DNA, 33 bp, Homo sapien
tcattccaagacttaactgctgacaactgctgc

SEQ ID NO: 264758 - DNA, 33 bp, Homo sapien
tcattccaagacttaattgctgacaactgctgc

SEQ ID NO: 264759 - DNA, 33 bp, Homo sapien
caagaggagccgtggaagagaggagaaaggaga

SEQ ID NO: 264760 - DNA, 33 bp, Homo sapien
caagaggagccgtggaggagaggagaaaggaga

SEQ ID NO: 264761 - DNA, 33 bp, Homo sapien
ttatgatggatgaaccaagcattagggtaatgt

SEQ ID NO: 264762 - DNA, 33 bp, Homo sapien
ttatgatggatgaacccagcattagggtaatgt

SEQ ID NO: 264763 - DNA, 33 bp, Homo sapien
acagaatactcaaaaaaatgcatgaatgaaata

SEQ ID NO: 264764 - DNA, 33 bp, Homo sapien
acagaatactcaaaaacatgcatgaatgaaata

SEQ ID NO: 264765 - DNA, 33 bp, Homo sapien
cctttctctggctctcaaggtagattctattac

SEQ ID NO: 264766 - DNA, 33 bp, Homo sapien
cctttctctggctctccaggtagattctattac

SEQ ID NO: 264767 - DNA, 33 bp, Homo sapien
ataatggagcttctaaaaatggataacatagat

SEQ ID NO: 264768 - DNA, 33 bp, Homo sapien
ataatggagcttctaataatggataacatagat

SEQ ID NO: 264769 - DNA, 33 bp, Homo sapien
cagatacacaaagcaactgatatcttgtaatac

SEQ ID NO: 264770 - DNA, 33 bp, Homo sapien
cagatacacaaagcaattgatatcttgtaatac

SEQ ID NO: 264771 - DNA, 33 bp, Homo sapien
ggtgattcaacttgcccaagttcatacagctaa

SEQ ID NO: 264772 - DNA, 33 bp, Homo sapien
ggtgattcaacttgcctaagttcatacagctaa

SEQ ID NO: 264773 - DNA, 33 bp, Homo sapien
atcaaaagtgaagcaacactttatgtagacaga

SEQ ID NO: 264774 - DNA, 33 bp, Homo sapien
atcaaaagtgaagcaatactttatgtagacaga

SEQ ID NO: 264775 - DNA, 33 bp, Homo sapien
atcataaaagatgaaacgccttaggctaagaat

SEQ ID NO: 264776 - DNA, 33 bp, Homo sapien
atcataaaagatgaaatgccttaggctaagaat

SEQ ID NO: 264777 - DNA, 33 bp, Homo sapien
aactgatgagggagccaacaagttattctcaga

SEQ ID NO: 264778 - DNA, 33 bp, Homo sapien
aactgatgagggagccgacaagttattctcaga

SEQ ID NO: 264779 - DNA, 33 bp, Homo sapien
tttcctgataataataaacagggtcaggagaga

SEQ ID NO: 264780 - DNA, 33 bp, Homo sapien
tttcctgataataatacacagggtcaggagaga

SEQ ID NO: 264781 - DNA, 33 bp, Homo sapien
ctctcacctgaactacagggaacctggggatgg

SEQ ID NO: 264782 - DNA, 33 bp, Homo sapien
ctctcacctgaactacggggaacctggggatgg

SEQ ID NO: 264783 - DNA, 33 bp, Homo sapien
tcctgttggtcatcaccacattccagaattcct

SEQ ID NO: 264784 - DNA, 33 bp, Homo sapien
tcctgttggtcatcactacattccagaattcct

SEQ ID NO: 264785 - DNA, 33 bp, Homo sapien
aacctgtgttgctaaacggaccttcagaactcc

SEQ ID NO: 264786 - DNA, 33 bp, Homo sapien
aacctgtgttgctaaatggaccttcagaactcc

SEQ ID NO: 264787 - DNA, 33 bp, Homo sapien
ctgcttctcgatgtcaactacagaccgtctcag

SEQ ID NO: 264788 - DNA, 33 bp, Homo sapien
ctgcttctcgatgtcagctacagaccgtctcag

SEQ ID NO: 264789 - DNA, 33 bp, Homo sapien
aacacctactcaagaactcctataaacttcctt

SEQ ID NO: 264790 - DNA, 33 bp, Homo sapien
aacacctactcaagaattcctataaacttcctt

SEQ ID NO: 264791 - DNA, 33 bp, Homo sapien
gaagaggaagaatggcaagtcagaaaaggcaga

SEQ ID NO: 264792 - DNA, 33 bp, Homo sapien
gaagaggaagaatggcgagtcagaaaaggcaga

SEQ ID NO: 264793 - DNA, 33 bp, Homo sapien
catcacttctgtggcactcttttttatttttta

SEQ ID NO: 264794 - DNA, 33 bp, Homo sapien
catcacttctgtggcattcttttttatttttta

SEQ ID NO: 264795 - DNA, 33 bp, Homo sapien
atgatgaataattatacagtcaagtcaaaatgg

SEQ ID NO: 264796 - DNA, 33 bp, Homo sapien
atgatgaataattatagagtcaagtcaaaatgg

SEQ ID NO: 264797 - DNA, 33 bp, Homo sapien
ggaaagaggaggtagagaatcaacagagaaagt

SEQ ID NO: 264798 - DNA, 33 bp, Homo sapien
ggaaagaggaggtagataatcaacagagaaagt

SEQ ID NO: 264799 - DNA, 33 bp, Homo sapien
ctgctagttgtcctacccatctgttctcttctc

SEQ ID NO: 264800 - DNA, 33 bp, Homo sapien
ctgctagttgtcctacgcatctgttctcttctc

SEQ ID NO: 264801 - DNA, 33 bp, Homo sapien
ctgtgaccctttgcaacgaaccttccaccctgc

SEQ ID NO: 264802 - DNA, 33 bp, Homo sapien
ctgtgaccctttgcaatgaaccttccaccctgc

SEQ ID NO: 264803 - DNA, 33 bp, Homo sapien
ccttcagaacatccccaatctttctatcttgtt

SEQ ID NO: 264804 - DNA, 33 bp, Homo sapien
ccttcagaacatcccccatctttctatcttgtt

SEQ ID NO: 264805 - DNA, 33 bp, Homo sapien
ggtgataattcaacacagatacaggacaagatt

SEQ ID NO: 264806 - DNA, 33 bp, Homo sapien
ggtgataattcaacacggatacaggacaagatt

SEQ ID NO: 264807 - DNA, 33 bp, Homo sapien
cctcaaacagcttacaacatgggcgaaaaggac

SEQ ID NO: 264808 - DNA, 33 bp, Homo sapien
cctcaaacagcttacagcatgggcgaaaaggac

SEQ ID NO: 264809 - DNA, 33 bp, Homo sapien
atccacaatatttaaacggctgttttagtcact

SEQ ID NO: 264810 - DNA, 33 bp, Homo sapien
atccacaatatttaaatggctgttttagtcact

SEQ ID NO: 264811 - DNA, 33 bp, Homo sapien
gaggagaaggggagccgacgaaattcaatattc

SEQ ID NO: 264812 - DNA, 33 bp, Homo sapien
gaggagaaggggagcctacgaaattcaatattc

SEQ ID NO: 264813 - DNA, 33 bp, Homo sapien
acactttcttcttagcgccctgaactgctaatt

SEQ ID NO: 264814 - DNA, 33 bp, Homo sapien
acactttcttcttagctccctgaactgctaatt

SEQ ID NO: 264815 - DNA, 33 bp, Homo sapien
gacaatatcaggatacaaactgtggatcccacg

SEQ ID NO: 264816 - DNA, 33 bp, Homo sapien
gacaatatcaggatacgaactgtggatcccacg

SEQ ID NO: 264817 - DNA, 33 bp, Homo sapien
aaataattgatctgcacgaagattttgctatga

SEQ ID NO: 264818 - DNA, 33 bp, Homo sapien
aaataattgatctgcatgaagattttgctatga

SEQ ID NO: 264819 - DNA, 33 bp, Homo sapien
ccttctgtgaaatgtacgtggattctccagtgg

SEQ ID NO: 264820 - DNA, 33 bp, Homo sapien
ccttctgtgaaatgtatgtggattctccagtgg

SEQ ID NO: 264821 - DNA, 33 bp, Homo sapien
gtggctctgtgtcaaaaattagggccaaagatc

SEQ ID NO: 264822 - DNA, 33 bp, Homo sapien
gtggctctgtgtcaaacattagggccaaagatc

SEQ ID NO: 264823 - DNA, 33 bp, Homo sapien
caccaaacatgctctacctgtagccactacctg

SEQ ID NO: 264824 - DNA, 33 bp, Homo sapien
caccaaacatgctctatctgtagccactacctg

SEQ ID NO: 264825 - DNA, 33 bp, Homo sapien
cctgaaccagtgtataccttccgtgtattgatt

SEQ ID NO: 264826 - DNA, 33 bp, Homo sapien
cctgaaccagtgtatatcttccgtgtattgatt

SEQ ID NO: 264827 - DNA, 33 bp, Homo sapien
tgtggataaccaaactaacatgtggaatctgac

SEQ ID NO: 264828 - DNA, 33 bp, Homo sapien
tgtggataaccaaactgacatgtggaatctgac

SEQ ID NO: 264829 - DNA, 33 bp, Homo sapien
tttctagtaacaaaagaaaccagtcagaaaggc

SEQ ID NO: 264830 - DNA, 33 bp, Homo sapien
tttctagtaacaaaaggaaccagtcagaaaggc

SEQ ID NO: 264831 - DNA, 33 bp, Homo sapien
ggaatgagtataaaaaggcataaagactcaaca

SEQ ID NO: 264832 - DNA, 33 bp, Homo sapien
ggaatgagtataaaaatgcataaagactcaaca

SEQ ID NO: 264833 - DNA, 33 bp, Homo sapien
gaacttgtagtgattaagcagaggaaaaaaaag

SEQ ID NO: 264834 - DNA, 33 bp, Homo sapien
gaacttgtagtgattaggcagaggaaaaaaaag

SEQ ID NO: 264835 - DNA, 33 bp, Homo sapien
ttgtgcacaggaaagtcaatcagctgtgatctc

SEQ ID NO: 264836 - DNA, 33 bp, Homo sapien
ttgtgcacaggaaagtgaatcagctgtgatctc

SEQ ID NO: 264837 - DNA, 33 bp, Homo sapien
ttcaagtcctgttaagaatagctctttaatatt

SEQ ID NO: 264838 - DNA, 33 bp, Homo sapien
ttcaagtcctgttaaggatagctctttaatatt

SEQ ID NO: 264839 - DNA, 33 bp, Homo sapien
aatagagtttaattcactcagacccagctgtac

SEQ ID NO: 264840 - DNA, 33 bp, Homo sapien
aatagagtttaattcagtcagacccagctgtac

SEQ ID NO: 264841 - DNA, 33 bp, Homo sapien
ttactacagcaaactcagaagaaatagcctttg

SEQ ID NO: 264842 - DNA, 33 bp, Homo sapien
ttactacagcaaactcggaagaaatagcctttg

SEQ ID NO: 264843 - DNA, 33 bp, Homo sapien
gggtgactgatttatcactcacagatgacagaa

SEQ ID NO: 264844 - DNA, 33 bp, Homo sapien
gggtgactgatttatcgctcacagatgacagaa

SEQ ID NO: 264845 - DNA, 33 bp, Homo sapien
ttaaaaggacctacgacgggtgatgtactgtgg

SEQ ID NO: 264846 - DNA, 33 bp, Homo sapien
ttaaaaggacctacgatgggtgatgtactgtgg

SEQ ID NO: 264847 - DNA, 33 bp, Homo sapien
gagaggactcaggaaaaccttccagctcagatc

SEQ ID NO: 264848 - DNA, 33 bp, Homo sapien
gagaggactcaggaaagccttccagctcagatc

SEQ ID NO: 264849 - DNA, 33 bp, Homo sapien
caaaattctgaaatcactattaaggagggacca

SEQ ID NO: 264850 - DNA, 33 bp, Homo sapien
caaaattctgaaatcattattaaggagggacca

SEQ ID NO: 264851 - DNA, 33 bp, Homo sapien
ccgtctttcttttactaacacatgaccaatcat

SEQ ID NO: 264852 - DNA, 33 bp, Homo sapien
ccgtctttcttttactgacacatgaccaatcat

SEQ ID NO: 264853 - DNA, 33 bp, Homo sapien
ccattgcattcttcacacttttagagttgaggc

SEQ ID NO: 264854 - DNA, 33 bp, Homo sapien
ccattgcattcttcacgcttttagagttgaggc

SEQ ID NO: 264855 - DNA, 33 bp, Homo sapien
atattaatgtagaccacagtttcagggttgaag

SEQ ID NO: 264856 - DNA, 33 bp, Homo sapien
atattaatgtagaccatagtttcagggttgaag

SEQ ID NO: 264857 - DNA, 33 bp, Homo sapien
agttgactcttgaggactcccctgcctaaaaaa

SEQ ID NO: 264858 - DNA, 33 bp, Homo sapien
agttgactcttgaggattcccctgcctaaaaaa

SEQ ID NO: 264859 - DNA, 33 bp, Homo sapien
aagtaactaggttagaactgcatccttggttac

SEQ ID NO: 264860 - DNA, 33 bp, Homo sapien
aagtaactaggttagagctgcatccttggttac

SEQ ID NO: 264861 - DNA, 33 bp, Homo sapien
gtctacaatcaccaaaaagccagttaagagaga

SEQ ID NO: 264862 - DNA, 33 bp, Homo sapien
gtctacaatcaccaaacagccagttaagagaga

SEQ ID NO: 264863 - DNA, 33 bp, Homo sapien
gaaatttatgctgaaaccagtttttgtaaatct

SEQ ID NO: 264864 - DNA, 33 bp, Homo sapien
gaaatttatgctgaaatcagtttttgtaaatct

SEQ ID NO: 264865 - DNA, 33 bp, Homo sapien
gaattgatataatacaatgatgacttctctttg

SEQ ID NO: 264866 - DNA, 33 bp, Homo sapien
gaattgatataatacagtgatgacttctctttg

SEQ ID NO: 264867 - DNA, 33 bp, Homo sapien
ttattcctcggcccaacttaatctttgcctaga

SEQ ID NO: 264868 - DNA, 33 bp, Homo sapien
ttattcctcggcccaatttaatctttgcctaga

SEQ ID NO: 264869 - DNA, 33 bp, Homo sapien
agattctatagtgagcaaaacacagtctctgcc

SEQ ID NO: 264870 - DNA, 33 bp, Homo sapien
agattctatagtgagccaaacacagtctctgcc

SEQ ID NO: 264871 - DNA, 33 bp, Homo sapien
gatataatgaaaaagcactgggggtttccagta

SEQ ID NO: 264872 - DNA, 33 bp, Homo sapien
gatataatgaaaaagcgctgggggtttccagta

SEQ ID NO: 264873 - DNA, 33 bp, Homo sapien
tgaatcatcttttccacgatgaaagtggcacag

SEQ ID NO: 264874 - DNA, 33 bp, Homo sapien
tgaatcatcttttccatgatgaaagtggcacag

SEQ ID NO: 264875 - DNA, 33 bp, Homo sapien
ttttccaatgaaataaagtgtctcagctggagt

SEQ ID NO: 264876 - DNA, 33 bp, Homo sapien
ttttccaatgaaataaggtgtctcagctggagt

SEQ ID NO: 264877 - DNA, 33 bp, Homo sapien
gttttaacatgatagacgtaatgcgttgtgtag

SEQ ID NO: 264878 - DNA, 33 bp, Homo sapien
gttttaacatgatagatgtaatgcgttgtgtag

SEQ ID NO: 264879 - DNA, 33 bp, Homo sapien
catcactaagtctaatagttcctactgccagaa

SEQ ID NO: 264880 - DNA, 33 bp, Homo sapien
catcactaagtctaatggttcctactgccagaa

SEQ ID NO: 264881 - DNA, 33 bp, Homo sapien
tctggcagactctagaagttaagcattctatca

SEQ ID NO: 264882 - DNA, 33 bp, Homo sapien
tctggcagactctagaggttaagcattctatca

SEQ ID NO: 264883 - DNA, 33 bp, Homo sapien
tttgtccgagcctgaccctcctaactctaacat

SEQ ID NO: 264884 - DNA, 33 bp, Homo sapien
tttgtccgagcctgactctcctaactctaacat

SEQ ID NO: 264885 - DNA, 33 bp, Homo sapien
tcattgcagatggctacagtcggagaagttgtt

SEQ ID NO: 264886 - DNA, 33 bp, Homo sapien
tcattgcagatggctatagtcggagaagttgtt

SEQ ID NO: 264887 - DNA, 33 bp, Homo sapien
cgcattaggtaacagacgatcacagttggttac

SEQ ID NO: 264888 - DNA, 33 bp, Homo sapien
cgcattaggtaacagatgatcacagttggttac

SEQ ID NO: 264889 - DNA, 33 bp, Homo sapien
ggaagctgatgaagataacttttcctttggaca

SEQ ID NO: 264890 - DNA, 33 bp, Homo sapien
ggaagctgatgaagatgacttttcctttggaca

SEQ ID NO: 264891 - DNA, 33 bp, Homo sapien
acaacattcttagctcgctttttattttcttgg

SEQ ID NO: 264892 - DNA, 33 bp, Homo sapien
acaacattcttagctctctttttattttcttgg

SEQ ID NO: 264893 - DNA, 33 bp, Homo sapien
ccactttactccactaataaggagcctcccata

SEQ ID NO: 264894 - DNA, 33 bp, Homo sapien
ccactttactccactagtaaggagcctcccata

SEQ ID NO: 264895 - DNA, 33 bp, Homo sapien
tactaagtgtacactacgtgtgctgataggttg

SEQ ID NO: 264896 - DNA, 33 bp, Homo sapien
tactaagtgtacactatgtgtgctgataggttg

SEQ ID NO: 264897 - DNA, 33 bp, Homo sapien
agtgccatgaaagatcacagttgagttttggaa

SEQ ID NO: 264898 - DNA, 33 bp, Homo sapien
agtgccatgaaagatcgcagttgagttttggaa

SEQ ID NO: 264899 - DNA, 33 bp, Homo sapien
cagggtcgtggaagtacgtttgtgctgtagatt

SEQ ID NO: 264900 - DNA, 33 bp, Homo sapien
cagggtcgtggaagtatgtttgtgctgtagatt

SEQ ID NO: 264901 - DNA, 33 bp, Homo sapien
gtgctgtgatgacctacaggaaacaggttagat

SEQ ID NO: 264902 - DNA, 33 bp, Homo sapien
gtgctgtgatgacctagaggaaacaggttagat

SEQ ID NO: 264903 - DNA, 33 bp, Homo sapien
atcctagcaattgtaaccaatgataagcatttg

SEQ ID NO: 264904 - DNA, 33 bp, Homo sapien
atcctagcaattgtaagcaatgataagcatttg

SEQ ID NO: 264905 - DNA, 33 bp, Homo sapien
atcaagaaaatcgagacgttggtgattcatccc

SEQ ID NO: 264906 - DNA, 33 bp, Homo sapien
atcaagaaaatcgagaggttggtgattcatccc

SEQ ID NO: 264907 - DNA, 33 bp, Homo sapien
cttcttgtcttcatgaaatcaggtaacaatcac

SEQ ID NO: 264908 - DNA, 33 bp, Homo sapien
cttcttgtcttcatgacatcaggtaacaatcac

SEQ ID NO: 264909 - DNA, 33 bp, Homo sapien
tcctttcatggctctgaagctaaaggtagtgag

SEQ ID NO: 264910 - DNA, 33 bp, Homo sapien
tcctttcatggctctggagctaaaggtagtgag

SEQ ID NO: 264911 - DNA, 33 bp, Homo sapien
gtgctttctaccataccctgattacaaaggcaa

SEQ ID NO: 264912 - DNA, 33 bp, Homo sapien
gtgctttctaccatactctgattacaaaggcaa

SEQ ID NO: 264913 - DNA, 33 bp, Homo sapien
attctccaattctccaataagttgcccctacat

SEQ ID NO: 264914 - DNA, 33 bp, Homo sapien
attctccaattctccagtaagttgcccctacat

SEQ ID NO: 264915 - DNA, 33 bp, Homo sapien
gagagttgactcattaaccattgacagccttga

SEQ ID NO: 264916 - DNA, 33 bp, Homo sapien
gagagttgactcattagccattgacagccttga

SEQ ID NO: 264917 - DNA, 33 bp, Homo sapien
cctgcatctagtaagaactgaggcccatctggt

SEQ ID NO: 264918 - DNA, 33 bp, Homo sapien
cctgcatctagtaagacctgaggcccatctggt

SEQ ID NO: 264919 - DNA, 33 bp, Homo sapien
agcaggtggttggtgacggtttcattaacagcg

SEQ ID NO: 264920 - DNA, 33 bp, Homo sapien
agcaggtggttggtgatggtttcattaacagcg

SEQ ID NO: 264921 - DNA, 33 bp, Homo sapien
gacaaactggtcttgaaaaaaacagcaaatatc

SEQ ID NO: 264922 - DNA, 33 bp, Homo sapien
gacaaactggtcttgagaaaaacagcaaatatc

SEQ ID NO: 264923 - DNA, 33 bp, Homo sapien
ggtggtccaatactcaacctactctagcacatg

SEQ ID NO: 264924 - DNA, 33 bp, Homo sapien
ggtggtccaatactcagcctactctagcacatg

SEQ ID NO: 264925 - DNA, 33 bp, Homo sapien
cattttgccaaaaatagaagcaacgcagaacta

SEQ ID NO: 264926 - DNA, 33 bp, Homo sapien
cattttgccaaaaatataagcaacgcagaacta

SEQ ID NO: 264927 - DNA, 33 bp, Homo sapien
tgattaaattatgctcacaagatcagttcctag

SEQ ID NO: 264928 - DNA, 33 bp, Homo sapien
tgattaaattatgctcccaagatcagttcctag

SEQ ID NO: 264929 - DNA, 33 bp, Homo sapien
aagccagacactgtggcatgcgcctatagtctc

SEQ ID NO: 264930 - DNA, 33 bp, Homo sapien
aagccagacactgtggtatgcgcctatagtctc

SEQ ID NO: 264931 - DNA, 33 bp, Homo sapien
cagaggaagaaagaggcatcgctgaaatatacc

SEQ ID NO: 264932 - DNA, 33 bp, Homo sapien
cagaggaagaaagaggtatcgctgaaatatacc

SEQ ID NO: 264933 - DNA, 33 bp, Homo sapien
gagactttgcttagacagtatatagaacaacaa

SEQ ID NO: 264934 - DNA, 33 bp, Homo sapien
gagactttgcttagactgtatatagaacaacaa

SEQ ID NO: 264935 - DNA, 33 bp, Homo sapien
cagttttcttctggcacagtgtagaggtagaca

SEQ ID NO: 264936 - DNA, 33 bp, Homo sapien
cagttttcttctggcatagtgtagaggtagaca

SEQ ID NO: 264937 - DNA, 33 bp, Homo sapien
tttaccatccatcaaaatctagcacaaatgcaa

SEQ ID NO: 264938 - DNA, 33 bp, Homo sapien
tttaccatccatcaaagtctagcacaaatgcaa

SEQ ID NO: 264939 - DNA, 33 bp, Homo sapien
tttatgagattttgtacgcaatgagaaatggcc

SEQ ID NO: 264940 - DNA, 33 bp, Homo sapien
tttatgagattttgtatgcaatgagaaatggcc

SEQ ID NO: 264941 - DNA, 33 bp, Homo sapien
cagattcaggggacaaagaggcattttcaacga

SEQ ID NO: 264942 - DNA, 33 bp, Homo sapien
cagattcaggggacaaggaggcattttcaacga

SEQ ID NO: 264943 - DNA, 33 bp, Homo sapien
cagctcctctaagttgaatttatcaaggagaca

SEQ ID NO: 264944 - DNA, 33 bp, Homo sapien
cagctcctctaagttgtatttatcaaggagaca

SEQ ID NO: 264945 - DNA, 33 bp, Homo sapien
attttaccaccaacaacgaccttttcagagata

SEQ ID NO: 264946 - DNA, 33 bp, Homo sapien
attttaccaccaacaatgaccttttcagagata

SEQ ID NO: 264947 - DNA, 33 bp, Homo sapien
tacttcaaaacacaaaaggcagcttaaattgag

SEQ ID NO: 264948 - DNA, 33 bp, Homo sapien
tacttcaaaacacaaagggcagcttaaattgag

SEQ ID NO: 264949 - DNA, 33 bp, Homo sapien
ttgcattgacctgagactcacctttgactccca

SEQ ID NO: 264950 - DNA, 33 bp, Homo sapien
ttgcattgacctgagattcacctttgactccca

SEQ ID NO: 264951 - DNA, 33 bp, Homo sapien
taaagatagggatagacagatattcaccatcac

SEQ ID NO: 264952 - DNA, 33 bp, Homo sapien
taaagatagggatagatagatattcaccatcac

SEQ ID NO: 264953 - DNA, 33 bp, Homo sapien
ggtttagaaaactttcaatgaaccagtgtgtgt

SEQ ID NO: 264954 - DNA, 33 bp, Homo sapien
ggtttagaaaactttcgatgaaccagtgtgtgt

SEQ ID NO: 264955 - DNA, 33 bp, Homo sapien
gagaggaatgaagagcactaaagaatctcccac

SEQ ID NO: 264956 - DNA, 33 bp, Homo sapien
gagaggaatgaagagcgctaaagaatctcccac

SEQ ID NO: 264957 - DNA, 33 bp, Homo sapien
tgttatgtattgggcacaaatcctggttgaaga

SEQ ID NO: 264958 - DNA, 33 bp, Homo sapien
tgttatgtattgggcataaatcctggttgaaga

SEQ ID NO: 264959 - DNA, 33 bp, Homo sapien
agatgaggcagctgcacacatcaaggggcttta

SEQ ID NO: 264960 - DNA, 33 bp, Homo sapien
agatgaggcagctgcatacatcaaggggcttta

SEQ ID NO: 264961 - DNA, 33 bp, Homo sapien
agtctgattaaagtccagagtttctgatgtgag

SEQ ID NO: 264962 - DNA, 33 bp, Homo sapien
agtctgattaaagtccggagtttctgatgtgag

SEQ ID NO: 264963 - DNA, 33 bp, Homo sapien
gcaggaggctcactcaactgctagcgtccagag

SEQ ID NO: 264964 - DNA, 33 bp, Homo sapien
gcaggaggctcactcagctgctagcgtccagag

SEQ ID NO: 264965 - DNA, 33 bp, Homo sapien
actgttcctactattccattaggttggtgcaaa

SEQ ID NO: 264966 - DNA, 33 bp, Homo sapien
actgttcctactattctattaggttggtgcaaa

SEQ ID NO: 264967 - DNA, 33 bp, Homo sapien
ttcgaacagaaagcacagaaaacatcagagttt

SEQ ID NO: 264968 - DNA, 33 bp, Homo sapien
ttcgaacagaaagcacggaaaacatcagagttt

SEQ ID NO: 264969 - DNA, 33 bp, Homo sapien
gtcaactaccatggaacagagagcaaaataaat

SEQ ID NO: 264970 - DNA, 33 bp, Homo sapien
gtcaactaccatggaagagagagcaaaataaat

SEQ ID NO: 264971 - DNA, 33 bp, Homo sapien
aggcatagttattcaacgcaaatctcaaaatta

SEQ ID NO: 264972 - DNA, 33 bp, Homo sapien
aggcatagttattcaatgcaaatctcaaaatta

SEQ ID NO: 264973 - DNA, 33 bp, Homo sapien
ctactgcatgaagttaaacttggagaggactat

SEQ ID NO: 264974 - DNA, 33 bp, Homo sapien
ctactgcatgaagttagacttggagaggactat

SEQ ID NO: 264975 - DNA, 33 bp, Homo sapien
atttcagtgcccatgaataaagtcttaggaaca

SEQ ID NO: 264976 - DNA, 33 bp, Homo sapien
atttcagtgcccatgagtaaagtcttaggaaca

SEQ ID NO: 264977 - DNA, 33 bp, Homo sapien
actgtctacaagtctacggcagaaagtcaaatt

SEQ ID NO: 264978 - DNA, 33 bp, Homo sapien
actgtctacaagtctatggcagaaagtcaaatt

SEQ ID NO: 264979 - DNA, 33 bp, Homo sapien
tctcaatactattacaacgggggttaggattca

SEQ ID NO: 264980 - DNA, 33 bp, Homo sapien
tctcaatactattacatcgggggttaggattca

SEQ ID NO: 264981 - DNA, 33 bp, Homo sapien
gtgctgactcaggcaagtgggttattagtgatg

SEQ ID NO: 264982 - DNA, 33 bp, Homo sapien
gtgctgactcaggcaattgggttattagtgatg

SEQ ID NO: 264983 - DNA, 33 bp, Homo sapien
gcgcccggccttctcccaggttttaagtgaggc

SEQ ID NO: 264984 - DNA, 33 bp, Homo sapien
gcgcccggccttctccgaggttttaagtgaggc

SEQ ID NO: 264985 - DNA, 33 bp, Homo sapien
gccaagcgactttccaatgactattaaaagtaa

SEQ ID NO: 264986 - DNA, 33 bp, Homo sapien
gccaagcgactttccactgactattaaaagtaa

SEQ ID NO: 264987 - DNA, 33 bp, Homo sapien
aattttgaatactatacatcatggtccccagcc

SEQ ID NO: 264988 - DNA, 33 bp, Homo sapien
aattttgaatactatagatcatggtccccagcc

SEQ ID NO: 264989 - DNA, 33 bp, Homo sapien
gagatcagaggcgcaagagccaattgggactga

SEQ ID NO: 264990 - DNA, 33 bp, Homo sapien
gagatcagaggcgcaatagccaattgggactga

SEQ ID NO: 264991 - DNA, 33 bp, Homo sapien
tctgtcaacctgttaaaaattgagattttcaga

SEQ ID NO: 264992 - DNA, 33 bp, Homo sapien
tctgtcaacctgttaacaattgagattttcaga

SEQ ID NO: 264993 - DNA, 33 bp, Homo sapien
gaaaggcacagatgacagcaataagaaatggcc

SEQ ID NO: 264994 - DNA, 33 bp, Homo sapien
gaaaggcacagatgacggcaataagaaatggcc

SEQ ID NO: 264995 - DNA, 33 bp, Homo sapien
tcagggtgcagccatagctttccttagagttga

SEQ ID NO: 264996 - DNA, 33 bp, Homo sapien
tcagggtgcagccatatctttccttagagttga

SEQ ID NO: 264997 - DNA, 33 bp, Homo sapien
ttactttaaatgtacacaacaatctggctaagt

SEQ ID NO: 264998 - DNA, 33 bp, Homo sapien
ttactttaaatgtacagaacaatctggctaagt

SEQ ID NO: 264999 - DNA, 33 bp, Homo sapien
tttgtatacgacacacaaaataatgatccctaa

SEQ ID NO: 265000 - DNA, 33 bp, Homo sapien
tttgtatacgacacaccaaataatgatccctaa

SEQ ID NO: 265001 - DNA, 33 bp, Homo sapien
agtaaattgtccatgcactagccttctggttgc

SEQ ID NO: 265002 - DNA, 33 bp, Homo sapien
agtaaattgtccatgcgctagccttctggttgc

SEQ ID NO: 265003 - DNA, 33 bp, Homo sapien
attttaaaagtgtatccctttctcattcaaatg

SEQ ID NO: 265004 - DNA, 33 bp, Homo sapien
attttaaaagtgtatctctttctcattcaaatg

SEQ ID NO: 265005 - DNA, 33 bp, Homo sapien
gatggttcggtcttccagagtgcttcctggtta

SEQ ID NO: 265006 - DNA, 33 bp, Homo sapien
gatggttcggtcttcccgagtgcttcctggtta

SEQ ID NO: 265007 - DNA, 33 bp, Homo sapien
actgatcagcctgaagaatcttatagtgccaaa

SEQ ID NO: 265008 - DNA, 33 bp, Homo sapien
actgatcagcctgaagtatcttatagtgccaaa

SEQ ID NO: 265009 - DNA, 33 bp, Homo sapien
taagcaaaggaggagaataaaatgatgcaagtt

SEQ ID NO: 265010 - DNA, 33 bp, Homo sapien
taagcaaaggaggagactaaaatgatgcaagtt

SEQ ID NO: 265011 - DNA, 33 bp, Homo sapien
atttgttactaaaagaaaggattcatctggaga

SEQ ID NO: 265012 - DNA, 33 bp, Homo sapien
atttgttactaaaagacaggattcatctggaga

SEQ ID NO: 265013 - DNA, 33 bp, Homo sapien
gaggtattcccttctcccctaggagctgacaca

SEQ ID NO: 265014 - DNA, 33 bp, Homo sapien
gaggtattcccttctctcctaggagctgacaca

SEQ ID NO: 265015 - DNA, 33 bp, Homo sapien
gccccccacagaacacaaatctgctttgttttc

SEQ ID NO: 265016 - DNA, 33 bp, Homo sapien
gccccccacagaacactaatctgctttgttttc

SEQ ID NO: 265017 - DNA, 33 bp, Homo sapien
ggcctgatatgtggagactcagggtgaaaaaca

SEQ ID NO: 265018 - DNA, 33 bp, Homo sapien
ggcctgatatgtggagcctcagggtgaaaaaca

SEQ ID NO: 265019 - DNA, 33 bp, Homo sapien
taacagctggtaaaaaacaaaagtgaaggagaa

SEQ ID NO: 265020 - DNA, 33 bp, Homo sapien
taacagctggtaaaaaccaaaagtgaaggagaa

SEQ ID NO: 265021 - DNA, 33 bp, Homo sapien
taaaatcacatagaaagtgccacacaaatgtta

SEQ ID NO: 265022 - DNA, 33 bp, Homo sapien
taaaatcacatagaaattgccacacaaatgtta

SEQ ID NO: 265023 - DNA, 33 bp, Homo sapien
ttcaaacacaacagaactcgaattttgttgtaa

SEQ ID NO: 265024 - DNA, 33 bp, Homo sapien
ttcaaacacaacagaagtcgaattttgttgtaa

SEQ ID NO: 265025 - DNA, 33 bp, Homo sapien
ttggcatgcctctctcaatcaatatatctttac

SEQ ID NO: 265026 - DNA, 33 bp, Homo sapien
ttggcatgcctctctcgatcaatatatctttac

SEQ ID NO: 265027 - DNA, 33 bp, Homo sapien
aaagaaagggcacccgcataaagaactgaaaag

SEQ ID NO: 265028 - DNA, 33 bp, Homo sapien
aaagaaagggcacccgtataaagaactgaaaag

SEQ ID NO: 265029 - DNA, 33 bp, Homo sapien
actcgcttatccagaacagcctacgagaagcaa

SEQ ID NO: 265030 - DNA, 33 bp, Homo sapien
actcgcttatccagaatagcctacgagaagcaa

SEQ ID NO: 265031 - DNA, 33 bp, Homo sapien
agacagatccgcacctgaattactatgcctaaa

SEQ ID NO: 265032 - DNA, 33 bp, Homo sapien
agacagatccgcaccttaattactatgcctaaa

SEQ ID NO: 265033 - DNA, 33 bp, Homo sapien
atgctccatcaatagcggaagatatccaaaagg

SEQ ID NO: 265034 - DNA, 33 bp, Homo sapien
atgctccatcaatagctgaagatatccaaaagg

SEQ ID NO: 265035 - DNA, 33 bp, Homo sapien
acagctactacttctacgtgcagcatcacaagt

SEQ ID NO: 265036 - DNA, 33 bp, Homo sapien
acagctactacttctatgtgcagcatcacaagt

SEQ ID NO: 265037 - DNA, 33 bp, Homo sapien
ctgcaaattgctttagcagagataaaaattact

SEQ ID NO: 265038 - DNA, 33 bp, Homo sapien
ctgcaaattgctttagtagagataaaaattact

SEQ ID NO: 265039 - DNA, 33 bp, Homo sapien
aaagcttcaaccatgaggttcccatgactgctc

SEQ ID NO: 265040 - DNA, 33 bp, Homo sapien
aaagcttcaaccatgatgttcccatgactgctc

SEQ ID NO: 265041 - DNA, 33 bp, Homo sapien
tagctatttcctcagtcacaaagaatagtgtgt

SEQ ID NO: 265042 - DNA, 33 bp, Homo sapien
tagctatttcctcagttacaaagaatagtgtgt

SEQ ID NO: 265043 - DNA, 33 bp, Homo sapien
gtggccaacagtcttacgtactgcagacttgac

SEQ ID NO: 265044 - DNA, 33 bp, Homo sapien
gtggccaacagtcttatgtactgcagacttgac

SEQ ID NO: 265045 - DNA, 33 bp, Homo sapien
aagttaaaattacccacagtcgcattgagaaga

SEQ ID NO: 265046 - DNA, 33 bp, Homo sapien
aagttaaaattacccatagtcgcattgagaaga

SEQ ID NO: 265047 - DNA, 33 bp, Homo sapien
gctttctcatggcttaacatcgaaatcagttta

SEQ ID NO: 265048 - DNA, 33 bp, Homo sapien
gctttctcatggcttaccatcgaaatcagttta

SEQ ID NO: 265049 - DNA, 33 bp, Homo sapien
ggcttatcaagcctcagtctctgccagggttgt

SEQ ID NO: 265050 - DNA, 33 bp, Homo sapien
ggcttatcaagcctcattctctgccagggttgt

SEQ ID NO: 265051 - DNA, 33 bp, Homo sapien
gaagacctttccataccggtacatccaaaacta

SEQ ID NO: 265052 - DNA, 33 bp, Homo sapien
gaagacctttccatactggtacatccaaaacta

SEQ ID NO: 265053 - DNA, 33 bp, Homo sapien
tgttcatcagatctgcactattagagatgagtc

SEQ ID NO: 265054 - DNA, 33 bp, Homo sapien
tgttcatcagatctgcgctattagagatgagtc

SEQ ID NO: 265055 - DNA, 33 bp, Homo sapien
gcttaaaccacacttaagcataataatccatag

SEQ ID NO: 265056 - DNA, 33 bp, Homo sapien
gcttaaaccacacttaggcataataatccatag

SEQ ID NO: 265057 - DNA, 33 bp, Homo sapien
aataataagtagtcaaacacataactgggatca

SEQ ID NO: 265058 - DNA, 33 bp, Homo sapien
aataataagtagtcaagcacataactgggatca

SEQ ID NO: 265059 - DNA, 33 bp, Homo sapien
cagttgaagggctgaggattcctagttaatgag

SEQ ID NO: 265060 - DNA, 33 bp, Homo sapien
cagttgaagggctgagtattcctagttaatgag

SEQ ID NO: 265061 - DNA, 33 bp, Homo sapien
aatatatgtagcctaactcgtatgttattaata

SEQ ID NO: 265062 - DNA, 33 bp, Homo sapien
aatatatgtagcctaagtcgtatgttattaata

SEQ ID NO: 265063 - DNA, 33 bp, Homo sapien
cagatttgatatagccaaagaaagatttagtaa

SEQ ID NO: 265064 - DNA, 33 bp, Homo sapien
cagatttgatatagccgaagaaagatttagtaa

SEQ ID NO: 265065 - DNA, 33 bp, Homo sapien
tacttccgcttactcacaatgttactagattca

SEQ ID NO: 265066 - DNA, 33 bp, Homo sapien
tacttccgcttactcagaatgttactagattca

SEQ ID NO: 265067 - DNA, 33 bp, Homo sapien
aagcattaaaacagaacataatctcaggccttt

SEQ ID NO: 265068 - DNA, 33 bp, Homo sapien
aagcattaaaacagaatataatctcaggccttt

SEQ ID NO: 265069 - DNA, 33 bp, Homo sapien
caaagcaataataaaccgagttcactgttggac

SEQ ID NO: 265070 - DNA, 33 bp, Homo sapien
caaagcaataataaactgagttcactgttggac

SEQ ID NO: 265071 - DNA, 33 bp, Homo sapien
agagagtgtaggtcaccgaggccatttgttctt

SEQ ID NO: 265072 - DNA, 33 bp, Homo sapien
agagagtgtaggtcactgaggccatttgttctt

SEQ ID NO: 265073 - DNA, 33 bp, Homo sapien
aagtcaccccttcctacgatgcaactgctgtaa

SEQ ID NO: 265074 - DNA, 33 bp, Homo sapien
aagtcaccccttcctatgatgcaactgctgtaa

SEQ ID NO: 265075 - DNA, 33 bp, Homo sapien
tcatttcctcacattacaaatctgtactacctg

SEQ ID NO: 265076 - DNA, 33 bp, Homo sapien
tcatttcctcacattataaatctgtactacctg

SEQ ID NO: 265077 - DNA, 33 bp, Homo sapien
ctcgctgccacgaaaagaatgtttcagagtttc

SEQ ID NO: 265078 - DNA, 33 bp, Homo sapien
ctcgctgccacgaaaataatgtttcagagtttc

SEQ ID NO: 265079 - DNA, 33 bp, Homo sapien
aatgaaggttatgcagcatagtgtctaaagtca

SEQ ID NO: 265080 - DNA, 33 bp, Homo sapien
aatgaaggttatgcaggatagtgtctaaagtca

SEQ ID NO: 265081 - DNA, 33 bp, Homo sapien
gtcttgactaccagcaggtgttatctgccttgc

SEQ ID NO: 265082 - DNA, 33 bp, Homo sapien
gtcttgactaccagcatgtgttatctgccttgc

SEQ ID NO: 265083 - DNA, 33 bp, Homo sapien
gctcactatcagagccaccttttgaacaagata

SEQ ID NO: 265084 - DNA, 33 bp, Homo sapien
gctcactatcagagccgccttttgaacaagata

SEQ ID NO: 265085 - DNA, 33 bp, Homo sapien
ccttgtaaatcttctaagagatgctggatgtct

SEQ ID NO: 265086 - DNA, 33 bp, Homo sapien
ccttgtaaatcttctatgagatgctggatgtct

SEQ ID NO: 265087 - DNA, 33 bp, Homo sapien
ggcactgattttgtaaagcagagaaagaagcat

SEQ ID NO: 265088 - DNA, 33 bp, Homo sapien
ggcactgattttgtaaggcagagaaagaagcat

SEQ ID NO: 265089 - DNA, 33 bp, Homo sapien
gtgaagaaacagaaaactagtcaaaaatatatg

SEQ ID NO: 265090 - DNA, 33 bp, Homo sapien
gtgaagaaacagaaaattagtcaaaaatatatg

SEQ ID NO: 265091 - DNA, 33 bp, Homo sapien
tctcaaggggctcctacgcagatttctggaatt

SEQ ID NO: 265092 - DNA, 33 bp, Homo sapien
tctcaaggggctcctatgcagatttctggaatt

SEQ ID NO: 265093 - DNA, 33 bp, Homo sapien
attcttttgcaaggccaacatccagaatggtgt

SEQ ID NO: 265094 - DNA, 33 bp, Homo sapien
attcttttgcaaggccgacatccagaatggtgt

SEQ ID NO: 265095 - DNA, 33 bp, Homo sapien
gtcttatcctcattagacagaactttccacatt

SEQ ID NO: 265096 - DNA, 33 bp, Homo sapien
gtcttatcctcattagtcagaactttccacatt

SEQ ID NO: 265097 - DNA, 33 bp, Homo sapien
cttgagagagttaaagaccacttcaatttccta

SEQ ID NO: 265098 - DNA, 33 bp, Homo sapien
cttgagagagttaaaggccacttcaatttccta

SEQ ID NO: 265099 - DNA, 33 bp, Homo sapien
ctaggtttttgtaagcacactctgatgtttgca

SEQ ID NO: 265100 - DNA, 33 bp, Homo sapien
ctaggtttttgtaagcgcactctgatgtttgca

SEQ ID NO: 265101 - DNA, 33 bp, Homo sapien
tcagtcatggtcaacaaagtttggaaaccattc

SEQ ID NO: 265102 - DNA, 33 bp, Homo sapien
tcagtcatggtcaacacagtttggaaaccattc

SEQ ID NO: 265103 - DNA, 33 bp, Homo sapien
atactgatgtaaccacaacttaggtcaagcact

SEQ ID NO: 265104 - DNA, 33 bp, Homo sapien
atactgatgtaaccaccacttaggtcaagcact

SEQ ID NO: 265105 - DNA, 33 bp, Homo sapien
gctaaaatgtatttgacatggtttggccctttg

SEQ ID NO: 265106 - DNA, 33 bp, Homo sapien
gctaaaatgtatttgatatggtttggccctttg

SEQ ID NO: 265107 - DNA, 33 bp, Homo sapien
gcagtttggttttccactgaatattactgggag

SEQ ID NO: 265108 - DNA, 33 bp, Homo sapien
gcagtttggttttccattgaatattactgggag

SEQ ID NO: 265109 - DNA, 33 bp, Homo sapien
ttggctgagaaaaagaaagctaaggtggtagtt

SEQ ID NO: 265110 - DNA, 33 bp, Homo sapien
ttggctgagaaaaagagagctaaggtggtagtt

SEQ ID NO: 265111 - DNA, 33 bp, Homo sapien
ggccacaagttcctctaaagactgtggatgaca

SEQ ID NO: 265112 - DNA, 33 bp, Homo sapien
ggccacaagttcctctgaagactgtggatgaca

SEQ ID NO: 265113 - DNA, 33 bp, Homo sapien
gaggcctgttttttcacgcttttctcagctcac

SEQ ID NO: 265114 - DNA, 33 bp, Homo sapien
gaggcctgttttttcatgcttttctcagctcac

SEQ ID NO: 265115 - DNA, 33 bp, Homo sapien
ttattcctctatatgaacttcctgaaaaagttt

SEQ ID NO: 265116 - DNA, 33 bp, Homo sapien
ttattcctctatatgatcttcctgaaaaagttt

SEQ ID NO: 265117 - DNA, 33 bp, Homo sapien
gagtccaagactaccaagacagggccagtagga

SEQ ID NO: 265118 - DNA, 33 bp, Homo sapien
gagtccaagactaccaggacagggccagtagga

SEQ ID NO: 265119 - DNA, 33 bp, Homo sapien
tgctgaaagaaatcaccgatgaaacacacaaaa

SEQ ID NO: 265120 - DNA, 33 bp, Homo sapien
tgctgaaagaaatcactgatgaaacacacaaaa

SEQ ID NO: 265121 - DNA, 33 bp, Homo sapien
taacaagcgtgcaaaaagacttatttctcctca

SEQ ID NO: 265122 - DNA, 33 bp, Homo sapien
taacaagcgtgcaaaaggacttatttctcctca

SEQ ID NO: 265123 - DNA, 33 bp, Homo sapien
tagcgcaaggtccaaagaaactgttttgttcaa

SEQ ID NO: 265124 - DNA, 33 bp, Homo sapien
tagcgcaaggtccaaataaactgttttgttcaa

SEQ ID NO: 265125 - DNA, 33 bp, Homo sapien
gagtctaattcttgcaatctggaaaatcttact

SEQ ID NO: 265126 - DNA, 33 bp, Homo sapien
gagtctaattcttgcagtctggaaaatcttact

SEQ ID NO: 265127 - DNA, 33 bp, Homo sapien
gtttatcagatgttagcattttctggatgaaac

SEQ ID NO: 265128 - DNA, 33 bp, Homo sapien
gtttatcagatgttaggattttctggatgaaac

SEQ ID NO: 265129 - DNA, 33 bp, Homo sapien
tagaaaaactgagaccaaaaaggctgaaagttg

SEQ ID NO: 265130 - DNA, 33 bp, Homo sapien
tagaaaaactgagacctaaaaggctgaaagttg

SEQ ID NO: 265131 - DNA, 33 bp, Homo sapien
ttatgtttcacttactaacaaagtctctcagaa

SEQ ID NO: 265132 - DNA, 33 bp, Homo sapien
ttatgtttcacttactgacaaagtctctcagaa

SEQ ID NO: 265133 - DNA, 33 bp, Homo sapien
ctctggtcaaagctaactgtttaaagtttatgt

SEQ ID NO: 265134 - DNA, 33 bp, Homo sapien
ctctggtcaaagctaattgtttaaagtttatgt

SEQ ID NO: 265135 - DNA, 33 bp, Homo sapien
ctatggttgtagcagcaagtagtgttcaaggta

SEQ ID NO: 265136 - DNA, 33 bp, Homo sapien
ctatggttgtagcagcgagtagtgttcaaggta

SEQ ID NO: 265137 - DNA, 33 bp, Homo sapien
atacaggtccagttaacgtaggggtgaagggag

SEQ ID NO: 265138 - DNA, 33 bp, Homo sapien
atacaggtccagttaatgtaggggtgaagggag

SEQ ID NO: 265139 - DNA, 33 bp, Homo sapien
catacaacattgctgaaagaacttaaagaccta

SEQ ID NO: 265140 - DNA, 33 bp, Homo sapien
catacaacattgctgacagaacttaaagaccta

SEQ ID NO: 265141 - DNA, 33 bp, Homo sapien
aacagtgcagggtctaagcaatcaaggtctgct

SEQ ID NO: 265142 - DNA, 33 bp, Homo sapien
aacagtgcagggtctaggcaatcaaggtctgct

SEQ ID NO: 265143 - DNA, 33 bp, Homo sapien
ttaagcacccatagtagatcaaaagttagtctt

SEQ ID NO: 265144 - DNA, 33 bp, Homo sapien
ttaagcacccatagtatatcaaaagttagtctt

SEQ ID NO: 265145 - DNA, 33 bp, Homo sapien
ggggtttttattgaccagaggcagattttggca

SEQ ID NO: 265146 - DNA, 33 bp, Homo sapien
ggggtttttattgaccggaggcagattttggca

SEQ ID NO: 265147 - DNA, 33 bp, Homo sapien
aatgtgaccaactgcacaagctaaaataactgg

SEQ ID NO: 265148 - DNA, 33 bp, Homo sapien
aatgtgaccaactgcataagctaaaataactgg

SEQ ID NO: 265149 - DNA, 33 bp, Homo sapien
ccattagcaccacatcacttacctggtatacct

SEQ ID NO: 265150 - DNA, 33 bp, Homo sapien
ccattagcaccacatcgcttacctggtatacct

SEQ ID NO: 265151 - DNA, 33 bp, Homo sapien
gagtgcatctgagttccgaaaaattattagttt

SEQ ID NO: 265152 - DNA, 33 bp, Homo sapien
gagtgcatctgagttctgaaaaattattagttt

SEQ ID NO: 265153 - DNA, 33 bp, Homo sapien
aacagaagatctgaagcaaacagggaggtagat

SEQ ID NO: 265154 - DNA, 33 bp, Homo sapien
aacagaagatctgaagtaaacagggaggtagat

SEQ ID NO: 265155 - DNA, 33 bp, Homo sapien
tgactttaacataattcaatgcccactgactgc

SEQ ID NO: 265156 - DNA, 33 bp, Homo sapien
tgactttaacataatttaatgcccactgactgc

SEQ ID NO: 265157 - DNA, 33 bp, Homo sapien
agcagaggttccgaagactccttccagatgaaa

SEQ ID NO: 265158 - DNA, 33 bp, Homo sapien
agcagaggttccgaaggctccttccagatgaaa

SEQ ID NO: 265159 - DNA, 33 bp, Homo sapien
acagaacatacatacacagagaaggtacacaca

SEQ ID NO: 265160 - DNA, 33 bp, Homo sapien
acagaacatacatacatagagaaggtacacaca

SEQ ID NO: 265161 - DNA, 33 bp, Homo sapien
acactaaacagagggaaaatgtcacgctagatg

SEQ ID NO: 265162 - DNA, 33 bp, Homo sapien
acactaaacagagggagaatgtcacgctagatg

SEQ ID NO: 265163 - DNA, 33 bp, Homo sapien
aaaacaaaaccaagaaacagatcagttcacaaa

SEQ ID NO: 265164 - DNA, 33 bp, Homo sapien
aaaacaaaaccaagaaccagatcagttcacaaa

SEQ ID NO: 265165 - DNA, 33 bp, Homo sapien
aaaatgttattagccacgaagatgattttaccc

SEQ ID NO: 265166 - DNA, 33 bp, Homo sapien
aaaatgttattagccatgaagatgattttaccc

SEQ ID NO: 265167 - DNA, 33 bp, Homo sapien
ttacagggttaaagaaatgtgggtggttattag

SEQ ID NO: 265168 - DNA, 33 bp, Homo sapien
ttacagggttaaagaactgtgggtggttattag

SEQ ID NO: 265169 - DNA, 33 bp, Homo sapien
aatccacaaaataggaagagaggatgcaatagt

SEQ ID NO: 265170 - DNA, 33 bp, Homo sapien
aatccacaaaataggaggagaggatgcaatagt

SEQ ID NO: 265171 - DNA, 33 bp, Homo sapien
acttttcaaagtcagaactgatttccctgtttc

SEQ ID NO: 265172 - DNA, 33 bp, Homo sapien
acttttcaaagtcagacctgatttccctgtttc

SEQ ID NO: 265173 - DNA, 33 bp, Homo sapien
caaataggtccttcaaatatctaagaaaacaac

SEQ ID NO: 265174 - DNA, 33 bp, Homo sapien
caaataggtccttcaactatctaagaaaacaac

SEQ ID NO: 265175 - DNA, 33 bp, Homo sapien
attggttgatctcatcagaattttgggaatttt

SEQ ID NO: 265176 - DNA, 33 bp, Homo sapien
attggttgatctcatccgaattttgggaatttt

SEQ ID NO: 265177 - DNA, 33 bp, Homo sapien
gtcctgacagcattcaccacctgctagctgaag

SEQ ID NO: 265178 - DNA, 33 bp, Homo sapien
gtcctgacagcattcatcacctgctagctgaag

SEQ ID NO: 265179 - DNA, 33 bp, Homo sapien
caaaacacacagatcacaggactacagaacagt

SEQ ID NO: 265180 - DNA, 33 bp, Homo sapien
caaaacacacagatcataggactacagaacagt

SEQ ID NO: 265181 - DNA, 33 bp, Homo sapien
gcaatttaatacatcacatttcctccctcatac

SEQ ID NO: 265182 - DNA, 33 bp, Homo sapien
gcaatttaatacatcagatttcctccctcatac

SEQ ID NO: 265183 - DNA, 33 bp, Homo sapien
tttcactgttgatcagacaacgtgttcagtaat

SEQ ID NO: 265184 - DNA, 33 bp, Homo sapien
tttcactgttgatcaggcaacgtgttcagtaat

SEQ ID NO: 265185 - DNA, 33 bp, Homo sapien
cgtactaagcacaagacaagaaaacacattgga

SEQ ID NO: 265186 - DNA, 33 bp, Homo sapien
cgtactaagcacaagagaagaaaacacattgga

SEQ ID NO: 265187 - DNA, 33 bp, Homo sapien
tgtagaataccagaatgatactgctgtagagga

SEQ ID NO: 265188 - DNA, 33 bp, Homo sapien
tgtagaataccagaattatactgctgtagagga

SEQ ID NO: 265189 - DNA, 33 bp, Homo sapien
acatggatgaatctggaatcaacattaagtgaa

SEQ ID NO: 265190 - DNA, 33 bp, Homo sapien
acatggatgaatctgggatcaacattaagtgaa

SEQ ID NO: 265191 - DNA, 33 bp, Homo sapien
acatctggcagtaacagtctgaggtcaatcctt

SEQ ID NO: 265192 - DNA, 33 bp, Homo sapien
acatctggcagtaacattctgaggtcaatcctt

SEQ ID NO: 265193 - DNA, 33 bp, Homo sapien
tacttgacctaatgaaagcactcattgaaggtt

SEQ ID NO: 265194 - DNA, 33 bp, Homo sapien
tacttgacctaatgaaggcactcattgaaggtt

SEQ ID NO: 265195 - DNA, 33 bp, Homo sapien
taaaaaaaaattcccaatggagtgtgagcttct

SEQ ID NO: 265196 - DNA, 33 bp, Homo sapien
taaaaaaaaattcccagtggagtgtgagcttct

SEQ ID NO: 265197 - DNA, 33 bp, Homo sapien
atagctgactaaagaacccaaccagtgaaggcg

SEQ ID NO: 265198 - DNA, 33 bp, Homo sapien
atagctgactaaagaatccaaccagtgaaggcg

SEQ ID NO: 265199 - DNA, 33 bp, Homo sapien
agagatgactatctggcccaatgagtcaagagg

SEQ ID NO: 265200 - DNA, 33 bp, Homo sapien
agagatgactatctggtccaatgagtcaagagg

SEQ ID NO: 265201 - DNA, 33 bp, Homo sapien
atcttgggaacaacccagcacctaggcagctgt

SEQ ID NO: 265202 - DNA, 33 bp, Homo sapien
atcttgggaacaacccggcacctaggcagctgt

SEQ ID NO: 265203 - DNA, 33 bp, Homo sapien
aagtttaatttttaaaataggcagcataagtga

SEQ ID NO: 265204 - DNA, 33 bp, Homo sapien
aagtttaatttttaaattaggcagcataagtga

SEQ ID NO: 265205 - DNA, 33 bp, Homo sapien
ctttcagaaaacttgacctgaacacattctatg

SEQ ID NO: 265206 - DNA, 33 bp, Homo sapien
ctttcagaaaacttgatctgaacacattctatg

SEQ ID NO: 265207 - DNA, 33 bp, Homo sapien
aagattctcaatgtcaccagatactgaggaaat

SEQ ID NO: 265208 - DNA, 33 bp, Homo sapien
aagattctcaatgtcatcagatactgaggaaat

SEQ ID NO: 265209 - DNA, 33 bp, Homo sapien
ccaggtaaattttcacaatgctaaatttccttc

SEQ ID NO: 265210 - DNA, 33 bp, Homo sapien
ccaggtaaattttcacgatgctaaatttccttc

SEQ ID NO: 265211 - DNA, 33 bp, Homo sapien
atgaaatatgaaggaaagcaattaagcaaagaa

SEQ ID NO: 265212 - DNA, 33 bp, Homo sapien
atgaaatatgaaggaaggcaattaagcaaagaa

SEQ ID NO: 265213 - DNA, 33 bp, Homo sapien
aagtaaaatctgataagcaaggaatcttcattt

SEQ ID NO: 265214 - DNA, 33 bp, Homo sapien
aagtaaaatctgataatcaaggaatcttcattt

SEQ ID NO: 265215 - DNA, 33 bp, Homo sapien
ctagtgtgcatcagtcaccagcagagcttgtta

SEQ ID NO: 265216 - DNA, 33 bp, Homo sapien
ctagtgtgcatcagtcgccagcagagcttgtta

SEQ ID NO: 265217 - DNA, 33 bp, Homo sapien
actatttcctgagtatcaaccctatgccagcac

SEQ ID NO: 265218 - DNA, 33 bp, Homo sapien
actatttcctgagtattaaccctatgccagcac

SEQ ID NO: 265219 - DNA, 33 bp, Homo sapien
tgtcgtggctagattcaacagcatagaacagtg

SEQ ID NO: 265220 - DNA, 33 bp, Homo sapien
tgtcgtggctagattccacagcatagaacagtg

SEQ ID NO: 265221 - DNA, 33 bp, Homo sapien
gttgaataagtttataatacagtatccacgccc

SEQ ID NO: 265222 - DNA, 33 bp, Homo sapien
gttgaataagtttatattacagtatccacgccc

SEQ ID NO: 265223 - DNA, 33 bp, Homo sapien
agaatgtagtaaaacccaagcagaatcttaaag

SEQ ID NO: 265224 - DNA, 33 bp, Homo sapien
agaatgtagtaaaacctaagcagaatcttaaag

SEQ ID NO: 265225 - DNA, 33 bp, Homo sapien
atctctacatggattcaaatttctaaccacata

SEQ ID NO: 265226 - DNA, 33 bp, Homo sapien
atctctacatggattccaatttctaaccacata

SEQ ID NO: 265227 - DNA, 33 bp, Homo sapien
tttgattacagccccactgatgtttgcagtttt

SEQ ID NO: 265228 - DNA, 33 bp, Homo sapien
tttgattacagccccattgatgtttgcagtttt

SEQ ID NO: 265229 - DNA, 33 bp, Homo sapien
tactgaatggagagaaggtagcacttgtagaaa

SEQ ID NO: 265230 - DNA, 33 bp, Homo sapien
tactgaatggagagaatgtagcacttgtagaaa

SEQ ID NO: 265231 - DNA, 33 bp, Homo sapien
gttattgctctgttgcagaatcttaacttgcat

SEQ ID NO: 265232 - DNA, 33 bp, Homo sapien
gttattgctctgttgccgaatcttaacttgcat

SEQ ID NO: 265233 - DNA, 33 bp, Homo sapien
tatccctacagttaccagattttcagtgttatt

SEQ ID NO: 265234 - DNA, 33 bp, Homo sapien
tatccctacagttacctgattttcagtgttatt

SEQ ID NO: 265235 - DNA, 33 bp, Homo sapien
gggagagatgcagaagaaggcaggaagtgggct

SEQ ID NO: 265236 - DNA, 33 bp, Homo sapien
gggagagatgcagaaggaggcaggaagtgggct

SEQ ID NO: 265237 - DNA, 33 bp, Homo sapien
tgtctacctatcatcaactatcatctaatcgat

SEQ ID NO: 265238 - DNA, 33 bp, Homo sapien
tgtctacctatcatcatctatcatctaatcgat

SEQ ID NO: 265239 - DNA, 33 bp, Homo sapien
ttcttggagttaccggaccccatttgcaccgca

SEQ ID NO: 265240 - DNA, 33 bp, Homo sapien
ttcttggagttaccgggccccatttgcaccgca

SEQ ID NO: 265241 - DNA, 33 bp, Homo sapien
actgaagtccagagaacggagaccatccagagc

SEQ ID NO: 265242 - DNA, 33 bp, Homo sapien
actgaagtccagagaatggagaccatccagagc

SEQ ID NO: 265243 - DNA, 33 bp, Homo sapien
acatcacatgtctagaaaataagaaaccattca

SEQ ID NO: 265244 - DNA, 33 bp, Homo sapien
acatcacatgtctagagaataagaaaccattca

SEQ ID NO: 265245 - DNA, 33 bp, Homo sapien
gctctactggaagaaaacctaattatcaaaacc

SEQ ID NO: 265246 - DNA, 33 bp, Homo sapien
gctctactggaagaaagcctaattatcaaaacc

SEQ ID NO: 265247 - DNA, 33 bp, Homo sapien
tccttgaccttgagacacttaattctctggctt

SEQ ID NO: 265248 - DNA, 33 bp, Homo sapien
tccttgaccttgagacccttaattctctggctt

SEQ ID NO: 265249 - DNA, 33 bp, Homo sapien
aactaactattgcgtaccatgttcagtacttgg

SEQ ID NO: 265250 - DNA, 33 bp, Homo sapien
aactaactattgcgtatcatgttcagtacttgg

SEQ ID NO: 265251 - DNA, 33 bp, Homo sapien
ttgaccaagaaacacgaaaaattgtctacatca

SEQ ID NO: 265252 - DNA, 33 bp, Homo sapien
ttgaccaagaaacacgcaaaattgtctacatca

SEQ ID NO: 265253 - DNA, 33 bp, Homo sapien
attttctaattacataactgaaaatggacttgt

SEQ ID NO: 265254 - DNA, 33 bp, Homo sapien
attttctaattacatatctgaaaatggacttgt

SEQ ID NO: 265255 - DNA, 33 bp, Homo sapien
gctgtttgcccattaaactcctcattcctccct

SEQ ID NO: 265256 - DNA, 33 bp, Homo sapien
gctgtttgcccattaagctcctcattcctccct

SEQ ID NO: 265257 - DNA, 33 bp, Homo sapien
atacaatgcaacttacacagaagtaggtcagcc

SEQ ID NO: 265258 - DNA, 33 bp, Homo sapien
atacaatgcaacttacccagaagtaggtcagcc

SEQ ID NO: 265259 - DNA, 33 bp, Homo sapien
cagccaagtggtgccaaagtgtgctttaaccca

SEQ ID NO: 265260 - DNA, 33 bp, Homo sapien
cagccaagtggtgccagagtgtgctttaaccca

SEQ ID NO: 265261 - DNA, 33 bp, Homo sapien
agtttgttactggtataagatcacacagccaag

SEQ ID NO: 265262 - DNA, 33 bp, Homo sapien
agtttgttactggtatgagatcacacagccaag

SEQ ID NO: 265263 - DNA, 33 bp, Homo sapien
tatgaagtaatggaaaaacatcaaagtttcata

SEQ ID NO: 265264 - DNA, 33 bp, Homo sapien
tatgaagtaatggaaagacatcaaagtttcata

SEQ ID NO: 265265 - DNA, 33 bp, Homo sapien
gtgtcctaagactagcaataaatttctgctgtg

SEQ ID NO: 265266 - DNA, 33 bp, Homo sapien
gtgtcctaagactagcgataaatttctgctgtg

SEQ ID NO: 265267 - DNA, 33 bp, Homo sapien
ttttttgcttctaggaaaaaaaaatgaagatgg

SEQ ID NO: 265268 - DNA, 33 bp, Homo sapien
ttttttgcttctaggacaaaaaaatgaagatgg

SEQ ID NO: 265269 - DNA, 33 bp, Homo sapien
ctttcctttcaatgaaccattcaggcattgata

SEQ ID NO: 265270 - DNA, 33 bp, Homo sapien
ctttcctttcaatgaatcattcaggcattgata

SEQ ID NO: 265271 - DNA, 33 bp, Homo sapien
aggtctcttttatgaactgacttctacatgatt

SEQ ID NO: 265272 - DNA, 33 bp, Homo sapien
aggtctcttttatgaattgacttctacatgatt

SEQ ID NO: 265273 - DNA, 33 bp, Homo sapien
ggcagttttagcatgaacacagggtagaggttt

SEQ ID NO: 265274 - DNA, 33 bp, Homo sapien
ggcagttttagcatgatcacagggtagaggttt

SEQ ID NO: 265275 - DNA, 33 bp, Homo sapien
gggatgagtacctctaaggagcatcagtggccc

SEQ ID NO: 265276 - DNA, 33 bp, Homo sapien
gggatgagtacctctacggagcatcagtggccc

SEQ ID NO: 265277 - DNA, 33 bp, Homo sapien
cttcaggtaaggttgaagcagtgccgagcagtg

SEQ ID NO: 265278 - DNA, 33 bp, Homo sapien
cttcaggtaaggttgaggcagtgccgagcagtg

SEQ ID NO: 265279 - DNA, 33 bp, Homo sapien
agcagttgcagatggtcaccagagagagaggcc

SEQ ID NO: 265280 - DNA, 33 bp, Homo sapien
agcagttgcagatggtgaccagagagagaggcc

SEQ ID NO: 265281 - DNA, 33 bp, Homo sapien
ttacttttccagtgagacattaaaccaacagcc

SEQ ID NO: 265282 - DNA, 33 bp, Homo sapien
ttacttttccagtgaggcattaaaccaacagcc

SEQ ID NO: 265283 - DNA, 33 bp, Homo sapien
gtagttagtttctagggactttaacatctttta

SEQ ID NO: 265284 - DNA, 33 bp, Homo sapien
gtagttagtttctaggtactttaacatctttta

SEQ ID NO: 265285 - DNA, 33 bp, Homo sapien
taaaaatctggcttctgacagcaaggaggaagt

SEQ ID NO: 265286 - DNA, 33 bp, Homo sapien
taaaaatctggcttcttacagcaaggaggaagt

SEQ ID NO: 265287 - DNA, 33 bp, Homo sapien
tgaggcattgtgacaacgtgtgtgttcgtctct

SEQ ID NO: 265288 - DNA, 33 bp, Homo sapien
tgaggcattgtgacaatgtgtgtgttcgtctct

SEQ ID NO: 265289 - DNA, 33 bp, Homo sapien
agacaaggccatatctcaaagcctgccagagag

SEQ ID NO: 265290 - DNA, 33 bp, Homo sapien
agacaaggccatatctgaaagcctgccagagag

SEQ ID NO: 265291 - DNA, 33 bp, Homo sapien
gtttgagaaaaaaaatcaaaggattgcagggac

SEQ ID NO: 265292 - DNA, 33 bp, Homo sapien
gtttgagaaaaaaaatgaaaggattgcagggac

SEQ ID NO: 265293 - DNA, 33 bp, Homo sapien
atcagaaccaggtctacgttaaagttgtgaaac

SEQ ID NO: 265294 - DNA, 33 bp, Homo sapien
atcagaaccaggtctatgttaaagttgtgaaac

SEQ ID NO: 265295 - DNA, 33 bp, Homo sapien
gctttgaagtattgataaaaatgtattggctgg

SEQ ID NO: 265296 - DNA, 33 bp, Homo sapien
gctttgaagtattgatgaaaatgtattggctgg

SEQ ID NO: 265297 - DNA, 33 bp, Homo sapien
taatgcacaatgaaataaaggcataagtcttcc

SEQ ID NO: 265298 - DNA, 33 bp, Homo sapien
taatgcacaatgaaatgaaggcataagtcttcc

SEQ ID NO: 265299 - DNA, 33 bp, Homo sapien
attgaagctactaaaacgtccatgagtcaaaga

SEQ ID NO: 265300 - DNA, 33 bp, Homo sapien
attgaagctactaaaatgtccatgagtcaaaga

SEQ ID NO: 265301 - DNA, 33 bp, Homo sapien
tcactgtggtcactcaaggatgcagactgatag

SEQ ID NO: 265302 - DNA, 33 bp, Homo sapien
tcactgtggtcactcagggatgcagactgatag

SEQ ID NO: 265303 - DNA, 33 bp, Homo sapien
aatttggagacggagagatgtagtttgaattcc

SEQ ID NO: 265304 - DNA, 33 bp, Homo sapien
aatttggagacggagatatgtagtttgaattcc

SEQ ID NO: 265305 - DNA, 33 bp, Homo sapien
ggaaacgcttggattccacaacagactagcttt

SEQ ID NO: 265306 - DNA, 33 bp, Homo sapien
ggaaacgcttggattctacaacagactagcttt

SEQ ID NO: 265307 - DNA, 33 bp, Homo sapien
caccttcaaagtgccccacctttcactcctagt

SEQ ID NO: 265308 - DNA, 33 bp, Homo sapien
caccttcaaagtgccctacctttcactcctagt

SEQ ID NO: 265309 - DNA, 33 bp, Homo sapien
attatacaaaaaagacaactgtgcttgtatgtt

SEQ ID NO: 265310 - DNA, 33 bp, Homo sapien
attatacaaaaaagactactgtgcttgtatgtt

SEQ ID NO: 265311 - DNA, 33 bp, Homo sapien
agccctccactgacagaaatacaaagccagcca

SEQ ID NO: 265312 - DNA, 33 bp, Homo sapien
agccctccactgacaggaatacaaagccagcca

SEQ ID NO: 265313 - DNA, 33 bp, Homo sapien
ccacattgctgtctcccatatgtgatccatgct

SEQ ID NO: 265314 - DNA, 33 bp, Homo sapien
ccacattgctgtctcctatatgtgatccatgct

SEQ ID NO: 265315 - DNA, 33 bp, Homo sapien
tagaaaaatcagtatcagaccagggaaattcaa

SEQ ID NO: 265316 - DNA, 33 bp, Homo sapien
tagaaaaatcagtatcggaccagggaaattcaa

SEQ ID NO: 265317 - DNA, 33 bp, Homo sapien
cagaaaaatttcttacacatcttatacgggttg

SEQ ID NO: 265318 - DNA, 33 bp, Homo sapien
cagaaaaatttcttacgcatcttatacgggttg

SEQ ID NO: 265319 - DNA, 33 bp, Homo sapien
gaggaccatgtagttgaaaacaatgaagggatc

SEQ ID NO: 265320 - DNA, 33 bp, Homo sapien
gaggaccatgtagttgcaaacaatgaagggatc

SEQ ID NO: 265321 - DNA, 33 bp, Homo sapien
ctcatgcctcaaggaaaataagaaggccataca

SEQ ID NO: 265322 - DNA, 33 bp, Homo sapien
ctcatgcctcaaggaatataagaaggccataca

SEQ ID NO: 265323 - DNA, 33 bp, Homo sapien
ggtcagctatgttaaacggaaactgaaaataat

SEQ ID NO: 265324 - DNA, 33 bp, Homo sapien
ggtcagctatgttaaatggaaactgaaaataat

SEQ ID NO: 265325 - DNA, 33 bp, Homo sapien
ttatcttatagaaccaaaattacatagcttaca

SEQ ID NO: 265326 - DNA, 33 bp, Homo sapien
ttatcttatagaaccagaattacatagcttaca

SEQ ID NO: 265327 - DNA, 33 bp, Homo sapien
tgctctgtctcagccactagcacttcaaacatc

SEQ ID NO: 265328 - DNA, 33 bp, Homo sapien
tgctctgtctcagccattagcacttcaaacatc

SEQ ID NO: 265329 - DNA, 33 bp, Homo sapien
ttccattgatattaagaccctgccttcctcatc

SEQ ID NO: 265330 - DNA, 33 bp, Homo sapien
ttccattgatattaagcccctgccttcctcatc

SEQ ID NO: 265331 - DNA, 33 bp, Homo sapien
tcctaaatcctgaatgcagaatacccatttgga

SEQ ID NO: 265332 - DNA, 33 bp, Homo sapien
tcctaaatcctgaatgtagaatacccatttgga

SEQ ID NO: 265333 - DNA, 33 bp, Homo sapien
gctagaggaggcaagcaagaattcttccctaag

SEQ ID NO: 265334 - DNA, 33 bp, Homo sapien
gctagaggaggcaagcgagaattcttccctaag

SEQ ID NO: 265335 - DNA, 33 bp, Homo sapien
aacctgaggcaaaccaaagtattcctcactgaa

SEQ ID NO: 265336 - DNA, 33 bp, Homo sapien
aacctgaggcaaaccatagtattcctcactgaa

SEQ ID NO: 265337 - DNA, 33 bp, Homo sapien
tttggcttctgatgaggcgatagctaaacatta

SEQ ID NO: 265338 - DNA, 33 bp, Homo sapien
tttggcttctgatgagtcgatagctaaacatta

SEQ ID NO: 265339 - DNA, 33 bp, Homo sapien
agtacattagacaaaagtaggagtcctttgatc

SEQ ID NO: 265340 - DNA, 33 bp, Homo sapien
agtacattagacaaaattaggagtcctttgatc

SEQ ID NO: 265341 - DNA, 33 bp, Homo sapien
tcagttagagcacaaacgagatgaattttttcc

SEQ ID NO: 265342 - DNA, 33 bp, Homo sapien
tcagttagagcacaaatgagatgaattttttcc

SEQ ID NO: 265343 - DNA, 33 bp, Homo sapien
ctgtgctctttctcatcaagcctatttcttcca

SEQ ID NO: 265344 - DNA, 33 bp, Homo sapien
ctgtgctctttctcattaagcctatttcttcca

SEQ ID NO: 265345 - DNA, 33 bp, Homo sapien
aacctcttacagccaaatgtatgaagaataaat

SEQ ID NO: 265346 - DNA, 33 bp, Homo sapien
aacctcttacagccaagtgtatgaagaataaat

SEQ ID NO: 265347 - DNA, 33 bp, Homo sapien
ttcaattaatgtgagcaaaataacagtaagatg

SEQ ID NO: 265348 - DNA, 33 bp, Homo sapien
ttcaattaatgtgagcgaaataacagtaagatg

SEQ ID NO: 265349 - DNA, 33 bp, Homo sapien
ggaagccattactacccgggtatgaaggagcag

SEQ ID NO: 265350 - DNA, 33 bp, Homo sapien
ggaagccattactacctgggtatgaaggagcag

SEQ ID NO: 265351 - DNA, 33 bp, Homo sapien
gaacataaaggaattcacagcttccattttcca

SEQ ID NO: 265352 - DNA, 33 bp, Homo sapien
gaacataaaggaattcgcagcttccattttcca

SEQ ID NO: 265353 - DNA, 33 bp, Homo sapien
cttccaacattgtgcactaagtcatttggaatc

SEQ ID NO: 265354 - DNA, 33 bp, Homo sapien
cttccaacattgtgcagtaagtcatttggaatc

SEQ ID NO: 265355 - DNA, 33 bp, Homo sapien
tagtttttactttagcaacaacatactaatctg

SEQ ID NO: 265356 - DNA, 33 bp, Homo sapien
tagtttttactttagcgacaacatactaatctg

SEQ ID NO: 265357 - DNA, 33 bp, Homo sapien
gcataaaaaagcaatacactgacagcgtgtata

SEQ ID NO: 265358 - DNA, 33 bp, Homo sapien
gcataaaaaagcaatatactgacagcgtgtata

SEQ ID NO: 265359 - DNA, 33 bp, Homo sapien
caatccttttcagaaaatgaaggaaaccagcca

SEQ ID NO: 265360 - DNA, 33 bp, Homo sapien
caatccttttcagaaactgaaggaaaccagcca

SEQ ID NO: 265361 - DNA, 33 bp, Homo sapien
aaatatcatctagctaaaacaaacttttcacaa

SEQ ID NO: 265362 - DNA, 33 bp, Homo sapien
aaatatcatctagctacaacaaacttttcacaa

SEQ ID NO: 265363 - DNA, 33 bp, Homo sapien
gttagcagaataaaagacagctttagtcagccg

SEQ ID NO: 265364 - DNA, 33 bp, Homo sapien
gttagcagaataaaaggcagctttagtcagccg

SEQ ID NO: 265365 - DNA, 33 bp, Homo sapien
tagtagctttaaacgccagtgtcagattcaaga

SEQ ID NO: 265366 - DNA, 33 bp, Homo sapien
tagtagctttaaacgctagtgtcagattcaaga

SEQ ID NO: 265367 - DNA, 33 bp, Homo sapien
atcttgtgccaacctacctcatcctatgactta

SEQ ID NO: 265368 - DNA, 33 bp, Homo sapien
atcttgtgccaacctatctcatcctatgactta

SEQ ID NO: 265369 - DNA, 33 bp, Homo sapien
tgatgttaccatgttcaccatggcatttgtaaa

SEQ ID NO: 265370 - DNA, 33 bp, Homo sapien
tgatgttaccatgttcgccatggcatttgtaaa

SEQ ID NO: 265371 - DNA, 33 bp, Homo sapien
agtcagtgttcgtggaccctgaaccagtctgtc

SEQ ID NO: 265372 - DNA, 33 bp, Homo sapien
agtcagtgttcgtggagcctgaaccagtctgtc

SEQ ID NO: 265373 - DNA, 33 bp, Homo sapien
tgcaacagtggaagaaagaccatgagcaggctt

SEQ ID NO: 265374 - DNA, 33 bp, Homo sapien
tgcaacagtggaagaaggaccatgagcaggctt

SEQ ID NO: 265375 - DNA, 33 bp, Homo sapien
tatgcattcatctcacaagtacttactgagcat

SEQ ID NO: 265376 - DNA, 33 bp, Homo sapien
tatgcattcatctcacgagtacttactgagcat

SEQ ID NO: 265377 - DNA, 33 bp, Homo sapien
gcaagggtactcactggcacatggtccgaagac

SEQ ID NO: 265378 - DNA, 33 bp, Homo sapien
gcaagggtactcactgtcacatggtccgaagac

SEQ ID NO: 265379 - DNA, 33 bp, Homo sapien
accatggagtcatagaggtgaagaaccttcagt

SEQ ID NO: 265380 - DNA, 33 bp, Homo sapien
accatggagtcatagatgtgaagaaccttcagt

SEQ ID NO: 265381 - DNA, 33 bp, Homo sapien
aactacctagctgctaagtctccaaagggaact

SEQ ID NO: 265382 - DNA, 33 bp, Homo sapien
aactacctagctgctaggtctccaaagggaact

SEQ ID NO: 265383 - DNA, 33 bp, Homo sapien
cctgttcttcagaaatgatcctagtttgtaagt

SEQ ID NO: 265384 - DNA, 33 bp, Homo sapien
cctgttcttcagaaattatcctagtttgtaagt

SEQ ID NO: 265385 - DNA, 33 bp, Homo sapien
tagttcatgattccacaaggaaacttagttaat

SEQ ID NO: 265386 - DNA, 33 bp, Homo sapien
tagttcatgattccaccaggaaacttagttaat

SEQ ID NO: 265387 - DNA, 33 bp, Homo sapien
tcagcacaaaacaaccaattccttcagtatgca

SEQ ID NO: 265388 - DNA, 33 bp, Homo sapien
tcagcacaaaacaaccgattccttcagtatgca

SEQ ID NO: 265389 - DNA, 33 bp, Homo sapien
tagaaagatactttcccatacaatcatgcactg

SEQ ID NO: 265390 - DNA, 33 bp, Homo sapien
tagaaagatactttcctatacaatcatgcactg

SEQ ID NO: 265391 - DNA, 33 bp, Homo sapien
ttcaattagcttaatcagagtaacattcagaaa

SEQ ID NO: 265392 - DNA, 33 bp, Homo sapien
ttcaattagcttaatcggagtaacattcagaaa

SEQ ID NO: 265393 - DNA, 33 bp, Homo sapien
aaatcttggaaaattaccctaatccaccacagt

SEQ ID NO: 265394 - DNA, 33 bp, Homo sapien
aaatcttggaaaattatcctaatccaccacagt

SEQ ID NO: 265395 - DNA, 33 bp, Homo sapien
acaacaactctgacaccgctatcaaactggccc

SEQ ID NO: 265396 - DNA, 33 bp, Homo sapien
acaacaactctgacacggctatcaaactggccc

SEQ ID NO: 265397 - DNA, 33 bp, Homo sapien
tcgccttgtcaggggacgcacccatgtggcttt

SEQ ID NO: 265398 - DNA, 33 bp, Homo sapien
tcgccttgtcaggggatgcacccatgtggcttt

SEQ ID NO: 265399 - DNA, 33 bp, Homo sapien
gatatgtgagagagaaaccctccaagatctcct

SEQ ID NO: 265400 - DNA, 33 bp, Homo sapien
gatatgtgagagagaagccctccaagatctcct

SEQ ID NO: 265401 - DNA, 33 bp, Homo sapien
taaaggaaaggacaaacccgagctgagctgcat

SEQ ID NO: 265402 - DNA, 33 bp, Homo sapien
taaaggaaaggacaaatccgagctgagctgcat

SEQ ID NO: 265403 - DNA, 33 bp, Homo sapien
aaaactccaaggttgcagagaagttagtgagac

SEQ ID NO: 265404 - DNA, 33 bp, Homo sapien
aaaactccaaggttgcggagaagttagtgagac

SEQ ID NO: 265405 - DNA, 33 bp, Homo sapien
tcctcaaatctgtcacccctcctgctgcctgtc

SEQ ID NO: 265406 - DNA, 33 bp, Homo sapien
tcctcaaatctgtcactcctcctgctgcctgtc

SEQ ID NO: 265407 - DNA, 33 bp, Homo sapien
gagaactcgaaaatgacagctgcaaaacactgc

SEQ ID NO: 265408 - DNA, 33 bp, Homo sapien
gagaactcgaaaatgatagctgcaaaacactgc

SEQ ID NO: 265409 - DNA, 33 bp, Homo sapien
taacatcaatttcaaacaaggctgttcgcaatc

SEQ ID NO: 265410 - DNA, 33 bp, Homo sapien
taacatcaatttcaaataaggctgttcgcaatc

SEQ ID NO: 265411 - DNA, 33 bp, Homo sapien
ataacaagaccctttacacatccaacgtgaaca

SEQ ID NO: 265412 - DNA, 33 bp, Homo sapien
ataacaagaccctttatacatccaacgtgaaca

SEQ ID NO: 265413 - DNA, 33 bp, Homo sapien
attattaaatgcctcaagacttaacggtcagcc

SEQ ID NO: 265414 - DNA, 33 bp, Homo sapien
attattaaatgcctcacgacttaacggtcagcc

SEQ ID NO: 265415 - DNA, 33 bp, Homo sapien
ttggcctttcttccaccgtcagacttcacaagg

SEQ ID NO: 265416 - DNA, 33 bp, Homo sapien
ttggcctttcttccactgtcagacttcacaagg

SEQ ID NO: 265417 - DNA, 33 bp, Homo sapien
aaagtcacatactcgccaatcagtatctatccc

SEQ ID NO: 265418 - DNA, 33 bp, Homo sapien
aaagtcacatactcgcgaatcagtatctatccc

SEQ ID NO: 265419 - DNA, 33 bp, Homo sapien
tggaaagaatttaggtcaagtacagctctgaag

SEQ ID NO: 265420 - DNA, 33 bp, Homo sapien
tggaaagaatttaggtgaagtacagctctgaag

SEQ ID NO: 265421 - DNA, 33 bp, Homo sapien
tttattttctcaccacaatactaacaaggacct

SEQ ID NO: 265422 - DNA, 33 bp, Homo sapien
tttattttctcaccactatactaacaaggacct

SEQ ID NO: 265423 - DNA, 33 bp, Homo sapien
atacacaaaactcttaaaagctcttggggactt

SEQ ID NO: 265424 - DNA, 33 bp, Homo sapien
atacacaaaactcttagaagctcttggggactt

SEQ ID NO: 265425 - DNA, 33 bp, Homo sapien
ataatcccaaagtatacgatgatcacttgttca

SEQ ID NO: 265426 - DNA, 33 bp, Homo sapien
ataatcccaaagtatatgatgatcacttgttca

SEQ ID NO: 265427 - DNA, 33 bp, Homo sapien
gcaaattatggctccacgagtgcatatttcata

SEQ ID NO: 265428 - DNA, 33 bp, Homo sapien
gcaaattatggctccatgagtgcatatttcata

SEQ ID NO: 265429 - DNA, 33 bp, Homo sapien
aggaaatcttaaggcagtgaggcacatgagaaa

SEQ ID NO: 265430 - DNA, 33 bp, Homo sapien
aggaaatcttaaggcattgaggcacatgagaaa

SEQ ID NO: 265431 - DNA, 33 bp, Homo sapien
atggcgtgctgttttcccaagtcttttctctat

SEQ ID NO: 265432 - DNA, 33 bp, Homo sapien
atggcgtgctgttttctcaagtcttttctctat

SEQ ID NO: 265433 - DNA, 33 bp, Homo sapien
ggtattttgaaagataccaggaaaactcgtaaa

SEQ ID NO: 265434 - DNA, 33 bp, Homo sapien
ggtattttgaaagatatcaggaaaactcgtaaa

SEQ ID NO: 265435 - DNA, 33 bp, Homo sapien
tctaatgagaatttcccgatttgttaatcctga

SEQ ID NO: 265436 - DNA, 33 bp, Homo sapien
tctaatgagaatttcctgatttgttaatcctga

SEQ ID NO: 265437 - DNA, 33 bp, Homo sapien
ttgcattagtgtttctcaagacagcttttttca

SEQ ID NO: 265438 - DNA, 33 bp, Homo sapien
ttgcattagtgtttcttaagacagcttttttca

SEQ ID NO: 265439 - DNA, 33 bp, Homo sapien
aaacacttcatgttcaaaggttaaagtcctaag

SEQ ID NO: 265440 - DNA, 33 bp, Homo sapien
aaacacttcatgttcacaggttaaagtcctaag

SEQ ID NO: 265441 - DNA, 33 bp, Homo sapien
atcagaactaccaatacgcaaaccaaaagtaaa

SEQ ID NO: 265442 - DNA, 33 bp, Homo sapien
atcagaactaccaatatgcaaaccaaaagtaaa

SEQ ID NO: 265443 - DNA, 33 bp, Homo sapien
taaccaggagatttcacgttactggactgcctg

SEQ ID NO: 265444 - DNA, 33 bp, Homo sapien
taaccaggagatttcatgttactggactgcctg

SEQ ID NO: 265445 - DNA, 33 bp, Homo sapien
gaggaagtgctataaactcataaatcacttctc

SEQ ID NO: 265446 - DNA, 33 bp, Homo sapien
gaggaagtgctataaattcataaatcacttctc

SEQ ID NO: 265447 - DNA, 33 bp, Homo sapien
aggtccctcttcttccacaaccaaaaaaggtat

SEQ ID NO: 265448 - DNA, 33 bp, Homo sapien
aggtccctcttcttccgcaaccaaaaaaggtat

SEQ ID NO: 265449 - DNA, 33 bp, Homo sapien
ttataatttattcacccgacaactacttagacg

SEQ ID NO: 265450 - DNA, 33 bp, Homo sapien
ttataatttattcacctgacaactacttagacg

SEQ ID NO: 265451 - DNA, 33 bp, Homo sapien
agaacaccgtgctacacatcaggcaataaagag

SEQ ID NO: 265452 - DNA, 33 bp, Homo sapien
agaacaccgtgctacatatcaggcaataaagag

SEQ ID NO: 265453 - DNA, 33 bp, Homo sapien
tccagaactctgggagccaaattgttttggaat

SEQ ID NO: 265454 - DNA, 33 bp, Homo sapien
tccagaactctgggagtcaaattgttttggaat

SEQ ID NO: 265455 - DNA, 33 bp, Homo sapien
cacagtttctgtgcaaatgtaaagtatataatg

SEQ ID NO: 265456 - DNA, 33 bp, Homo sapien
cacagtttctgtgcaagtgtaaagtatataatg

SEQ ID NO: 265457 - DNA, 33 bp, Homo sapien
tacctggcttttattacggttcaaaaggaccgg

SEQ ID NO: 265458 - DNA, 33 bp, Homo sapien
tacctggcttttattagggttcaaaaggaccgg

SEQ ID NO: 265459 - DNA, 33 bp, Homo sapien
cattgaagggtttgaccacaaaacattgttgtt

SEQ ID NO: 265460 - DNA, 33 bp, Homo sapien
cattgaagggtttgactacaaaacattgttgtt

SEQ ID NO: 265461 - DNA, 33 bp, Homo sapien
gagacaacaggaccagccaacacataccgtaca

SEQ ID NO: 265462 - DNA, 33 bp, Homo sapien
gagacaacaggaccaggcaacacataccgtaca

SEQ ID NO: 265463 - DNA, 33 bp, Homo sapien
ctttgtagttatgaaaaccaagtgtactttgtt

SEQ ID NO: 265464 - DNA, 33 bp, Homo sapien
ctttgtagttatgaaatccaagtgtactttgtt

SEQ ID NO: 265465 - DNA, 33 bp, Homo sapien
atagtctttaatggaaaggctaatatggtctgg

SEQ ID NO: 265466 - DNA, 33 bp, Homo sapien
atagtctttaatggaagggctaatatggtctgg

SEQ ID NO: 265467 - DNA, 33 bp, Homo sapien
tatgtccttcaacacaatagtataatccaaatt

SEQ ID NO: 265468 - DNA, 33 bp, Homo sapien
tatgtccttcaacacagtagtataatccaaatt

SEQ ID NO: 265469 - DNA, 33 bp, Homo sapien
gaagagcttggtttaaccacaagatccattatt

SEQ ID NO: 265470 - DNA, 33 bp, Homo sapien
gaagagcttggtttaagcacaagatccattatt

SEQ ID NO: 265471 - DNA, 33 bp, Homo sapien
cagacctcttaggcacaaaggtctgtgctatct

SEQ ID NO: 265472 - DNA, 33 bp, Homo sapien
cagacctcttaggcacgaaggtctgtgctatct

SEQ ID NO: 265473 - DNA, 33 bp, Homo sapien
ccttgccaggaatgtcacctctagtgctaagtg

SEQ ID NO: 265474 - DNA, 33 bp, Homo sapien
ccttgccaggaatgtcgcctctagtgctaagtg

SEQ ID NO: 265475 - DNA, 33 bp, Homo sapien
acttcagcatcacgcaatatacccagataacaa

SEQ ID NO: 265476 - DNA, 33 bp, Homo sapien
acttcagcatcacgcactatacccagataacaa

SEQ ID NO: 265477 - DNA, 33 bp, Homo sapien
ttttttttgctatatcacaatttaagtcgacaa

SEQ ID NO: 265478 - DNA, 33 bp, Homo sapien
ttttttttgctatatcgcaatttaagtcgacaa

SEQ ID NO: 265479 - DNA, 33 bp, Homo sapien
cttgcttgcttttgaaacttactcttgttttag

SEQ ID NO: 265480 - DNA, 33 bp, Homo sapien
cttgcttgcttttgaagcttactcttgttttag

SEQ ID NO: 265481 - DNA, 33 bp, Homo sapien
gcctgcacttcttccaactttccaccatctaaa

SEQ ID NO: 265482 - DNA, 33 bp, Homo sapien
gcctgcacttcttccacctttccaccatctaaa

SEQ ID NO: 265483 - DNA, 33 bp, Homo sapien
gctcttaaccgctaaactgcaatgtcttttgtg

SEQ ID NO: 265484 - DNA, 33 bp, Homo sapien
gctcttaaccgctaaattgcaatgtcttttgtg

SEQ ID NO: 265485 - DNA, 33 bp, Homo sapien
catgcgcctattgttcacatttgggtcgtttcc

SEQ ID NO: 265486 - DNA, 33 bp, Homo sapien
catgcgcctattgttcgcatttgggtcgtttcc

SEQ ID NO: 265487 - DNA, 33 bp, Homo sapien
agctgggaaaggtgaagtgatgcatatacttaa

SEQ ID NO: 265488 - DNA, 33 bp, Homo sapien
agctgggaaaggtgaattgatgcatatacttaa

SEQ ID NO: 265489 - DNA, 33 bp, Homo sapien
gtaaagaaattggaacactcattcattgttgtt

SEQ ID NO: 265490 - DNA, 33 bp, Homo sapien
gtaaagaaattggaacgctcattcattgttgtt

SEQ ID NO: 265491 - DNA, 33 bp, Homo sapien
acagaaaaaggattaacaaattcagacaggtta

SEQ ID NO: 265492 - DNA, 33 bp, Homo sapien
acagaaaaaggattaataaattcagacaggtta

SEQ ID NO: 265493 - DNA, 33 bp, Homo sapien
gatgtccagccagtgcaaaccaaagaagaaaga

SEQ ID NO: 265494 - DNA, 33 bp, Homo sapien
gatgtccagccagtgcgaaccaaagaagaaaga

SEQ ID NO: 265495 - DNA, 33 bp, Homo sapien
accaactaagtcatcactccaaatggaaaatct

SEQ ID NO: 265496 - DNA, 33 bp, Homo sapien
accaactaagtcatcattccaaatggaaaatct

SEQ ID NO: 265497 - DNA, 33 bp, Homo sapien
tgtgggtaccagataaaatacaccttcaacaat

SEQ ID NO: 265498 - DNA, 33 bp, Homo sapien
tgtgggtaccagataagatacaccttcaacaat

SEQ ID NO: 265499 - DNA, 33 bp, Homo sapien
caataaaatcaataaaattctagccaccataag

SEQ ID NO: 265500 - DNA, 33 bp, Homo sapien
caataaaatcaataaagttctagccaccataag

SEQ ID NO: 265501 - DNA, 33 bp, Homo sapien
gaacaccaagcagagtaaatgacctccaccccc

SEQ ID NO: 265502 - DNA, 33 bp, Homo sapien
gaacaccaagcagagtcaatgacctccaccccc

SEQ ID NO: 265503 - DNA, 33 bp, Homo sapien
gaatggtgggacaactaaaaaaggcataacata

SEQ ID NO: 265504 - DNA, 33 bp, Homo sapien
gaatggtgggacaactgaaaaaggcataacata

SEQ ID NO: 265505 - DNA, 33 bp, Homo sapien
taagccacaaaggatacagctgaatagtgcccc

SEQ ID NO: 265506 - DNA, 33 bp, Homo sapien
taagccacaaaggatatagctgaatagtgcccc

SEQ ID NO: 265507 - DNA, 33 bp, Homo sapien
tgacctagatggtccagaaattaagatcactca

SEQ ID NO: 265508 - DNA, 33 bp, Homo sapien
tgacctagatggtccataaattaagatcactca

SEQ ID NO: 265509 - DNA, 33 bp, Homo sapien
attcgagcttcaaaacactactgcatttcacat

SEQ ID NO: 265510 - DNA, 33 bp, Homo sapien
attcgagcttcaaaactctactgcatttcacat

SEQ ID NO: 265511 - DNA, 33 bp, Homo sapien
tttattacagcagcccaaatgaattaagacata

SEQ ID NO: 265512 - DNA, 33 bp, Homo sapien
tttattacagcagcccgaatgaattaagacata

SEQ ID NO: 265513 - DNA, 33 bp, Homo sapien
ttatgttaagccaatccatctattgaatctaga

SEQ ID NO: 265514 - DNA, 33 bp, Homo sapien
ttatgttaagccaatctatctattgaatctaga

SEQ ID NO: 265515 - DNA, 33 bp, Homo sapien
aaggtagaatgaaaacactatgcagaagataga

SEQ ID NO: 265516 - DNA, 33 bp, Homo sapien
aaggtagaatgaaaacgctatgcagaagataga

SEQ ID NO: 265517 - DNA, 33 bp, Homo sapien
ccttgaaccacaagtaacagaagtggcaaagga

SEQ ID NO: 265518 - DNA, 33 bp, Homo sapien
ccttgaaccacaagtaccagaagtggcaaagga

SEQ ID NO: 265519 - DNA, 33 bp, Homo sapien
ttagaacaatatcctaagtagccatggaaaagt

SEQ ID NO: 265520 - DNA, 33 bp, Homo sapien
ttagaacaatatcctaggtagccatggaaaagt

SEQ ID NO: 265521 - DNA, 33 bp, Homo sapien
ggttttgaagtatcaggactaccagagaaaaag

SEQ ID NO: 265522 - DNA, 33 bp, Homo sapien
ggttttgaagtatcagtactaccagagaaaaag

SEQ ID NO: 265523 - DNA, 33 bp, Homo sapien
tttgttttctcaaatgaacttcagaaatatttt

SEQ ID NO: 265524 - DNA, 33 bp, Homo sapien
tttgttttctcaaatggacttcagaaatatttt

SEQ ID NO: 265525 - DNA, 33 bp, Homo sapien
gtcacgtgtctcttagcacattttctgtctttc

SEQ ID NO: 265526 - DNA, 33 bp, Homo sapien
gtcacgtgtctcttagtacattttctgtctttc

SEQ ID NO: 265527 - DNA, 33 bp, Homo sapien
aggagattctcagaaaccaggttaaaaataatc

SEQ ID NO: 265528 - DNA, 33 bp, Homo sapien
aggagattctcagaaagcaggttaaaaataatc

SEQ ID NO: 265529 - DNA, 33 bp, Homo sapien
cctgaaactaactccaaatacaaagagtctggc

SEQ ID NO: 265530 - DNA, 33 bp, Homo sapien
cctgaaactaactccagatacaaagagtctggc

SEQ ID NO: 265531 - DNA, 33 bp, Homo sapien
tcctaacaggccaaacacttaaatccgctggtc

SEQ ID NO: 265532 - DNA, 33 bp, Homo sapien
tcctaacaggccaaacgcttaaatccgctggtc

SEQ ID NO: 265533 - DNA, 33 bp, Homo sapien
gatggaataatgatggaaaaataatggtgttca

SEQ ID NO: 265534 - DNA, 33 bp, Homo sapien
gatggaataatgatgggaaaataatggtgttca

SEQ ID NO: 265535 - DNA, 33 bp, Homo sapien
actaaagggttcaaagcaatcatgtgggagacc

SEQ ID NO: 265536 - DNA, 33 bp, Homo sapien
actaaagggttcaaagtaatcatgtgggagacc

SEQ ID NO: 265537 - DNA, 33 bp, Homo sapien
gtattcagttggcttcccacagatacaaactca

SEQ ID NO: 265538 - DNA, 33 bp, Homo sapien
gtattcagttggcttcgcacagatacaaactca

SEQ ID NO: 265539 - DNA, 33 bp, Homo sapien
gtgtgggtgaagcagacgatgctgtctggtttt

SEQ ID NO: 265540 - DNA, 33 bp, Homo sapien
gtgtgggtgaagcagatgatgctgtctggtttt

SEQ ID NO: 265541 - DNA, 33 bp, Homo sapien
tacttttggtagtggacgccataacaatggagg

SEQ ID NO: 265542 - DNA, 33 bp, Homo sapien
tacttttggtagtggaggccataacaatggagg

SEQ ID NO: 265543 - DNA, 33 bp, Homo sapien
attgctgtgccacaaacggatgtttccctaacc

SEQ ID NO: 265544 - DNA, 33 bp, Homo sapien
attgctgtgccacaaatggatgtttccctaacc

SEQ ID NO: 265545 - DNA, 33 bp, Homo sapien
aagctcctgggaacaaacaaagcaggctatgcc

SEQ ID NO: 265546 - DNA, 33 bp, Homo sapien
aagctcctgggaacaatcaaagcaggctatgcc

SEQ ID NO: 265547 - DNA, 33 bp, Homo sapien
gaccatattccaattcaaagtaactattatcaa

SEQ ID NO: 265548 - DNA, 33 bp, Homo sapien
gaccatattccaattcgaagtaactattatcaa

SEQ ID NO: 265549 - DNA, 33 bp, Homo sapien
gaatattgtcatttccacaggataattttcatg

SEQ ID NO: 265550 - DNA, 33 bp, Homo sapien
gaatattgtcatttccgcaggataattttcatg

SEQ ID NO: 265551 - DNA, 33 bp, Homo sapien
tcctcatctgtacacacagtcgaccttaaaatg

SEQ ID NO: 265552 - DNA, 33 bp, Homo sapien
tcctcatctgtacacatagtcgaccttaaaatg

SEQ ID NO: 265553 - DNA, 33 bp, Homo sapien
ggaaataggctgcatacaaagcattgtttttta

SEQ ID NO: 265554 - DNA, 33 bp, Homo sapien
ggaaataggctgcatataaagcattgtttttta

SEQ ID NO: 265555 - DNA, 33 bp, Homo sapien
tgccttctggtagaaacagagaaaaattcatga

SEQ ID NO: 265556 - DNA, 33 bp, Homo sapien
tgccttctggtagaaagagagaaaaattcatga

SEQ ID NO: 265557 - DNA, 33 bp, Homo sapien
taggtatgtagatcagccctgttgtggtggctt

SEQ ID NO: 265558 - DNA, 33 bp, Homo sapien
taggtatgtagatcagtcctgttgtggtggctt

SEQ ID NO: 265559 - DNA, 33 bp, Homo sapien
tataattaaccattacaggctccagagcacaac

SEQ ID NO: 265560 - DNA, 33 bp, Homo sapien
tataattaaccattacgggctccagagcacaac

SEQ ID NO: 265561 - DNA, 33 bp, Homo sapien
tatgcacacaaactagaaaaccttaaagaaata

SEQ ID NO: 265562 - DNA, 33 bp, Homo sapien
tatgcacacaaactaggaaaccttaaagaaata

SEQ ID NO: 265563 - DNA, 33 bp, Homo sapien
aaaaggaattataaagccttcaagcatttttgg

SEQ ID NO: 265564 - DNA, 33 bp, Homo sapien
aaaaggaattataaaggcttcaagcatttttgg

SEQ ID NO: 265565 - DNA, 33 bp, Homo sapien
ctcagctctgattcaacggctttttcctctgct

SEQ ID NO: 265566 - DNA, 33 bp, Homo sapien
ctcagctctgattcaatggctttttcctctgct

SEQ ID NO: 265567 - DNA, 33 bp, Homo sapien
agggagaagaaagccaatagattatctccctag

SEQ ID NO: 265568 - DNA, 33 bp, Homo sapien
agggagaagaaagccagtagattatctccctag

SEQ ID NO: 265569 - DNA, 33 bp, Homo sapien
tcagggacttgagcacacttacattttggtatc

SEQ ID NO: 265570 - DNA, 33 bp, Homo sapien
tcagggacttgagcacccttacattttggtatc

SEQ ID NO: 265571 - DNA, 33 bp, Homo sapien
gctgggcactgggctgccaattctgtggatcag

SEQ ID NO: 265572 - DNA, 33 bp, Homo sapien
gctgggcactgggctgtcaattctgtggatcag

SEQ ID NO: 265573 - DNA, 33 bp, Homo sapien
cattaaaagttctctacaactaccatggtgtaa

SEQ ID NO: 265574 - DNA, 33 bp, Homo sapien
cattaaaagttctctataactaccatggtgtaa

SEQ ID NO: 265575 - DNA, 33 bp, Homo sapien
ttcatttactctgcacacttcccctagagctac

SEQ ID NO: 265576 - DNA, 33 bp, Homo sapien
ttcatttactctgcacgcttcccctagagctac

SEQ ID NO: 265577 - DNA, 33 bp, Homo sapien
aaaaggtcatttccataaccctgtgaggcagat

SEQ ID NO: 265578 - DNA, 33 bp, Homo sapien
aaaaggtcatttccattaccctgtgaggcagat

SEQ ID NO: 265579 - DNA, 33 bp, Homo sapien
aggatggcatattagaaaaaaatttcttttcca

SEQ ID NO: 265580 - DNA, 33 bp, Homo sapien
aggatggcatattagagaaaaatttcttttcca

SEQ ID NO: 265581 - DNA, 33 bp, Homo sapien
agcaaaacaaatattgaaactatggctctgttt

SEQ ID NO: 265582 - DNA, 33 bp, Homo sapien
agcaaaacaaatattggaactatggctctgttt

SEQ ID NO: 265583 - DNA, 33 bp, Homo sapien
aagaattcgagatccaatctttataattcatac

SEQ ID NO: 265584 - DNA, 33 bp, Homo sapien
aagaattcgagatccagtctttataattcatac

SEQ ID NO: 265585 - DNA, 33 bp, Homo sapien
aagctggctaaaaaccaaaggcaatgcatgatt

SEQ ID NO: 265586 - DNA, 33 bp, Homo sapien
aagctggctaaaaaccgaaggcaatgcatgatt

SEQ ID NO: 265587 - DNA, 33 bp, Homo sapien
aaataccagtcaaaacagtcaaaaacgactcac

SEQ ID NO: 265588 - DNA, 33 bp, Homo sapien
aaataccagtcaaaacggtcaaaaacgactcac

SEQ ID NO: 265589 - DNA, 33 bp, Homo sapien
cttttttctgtattcacgtctacatctatatct

SEQ ID NO: 265590 - DNA, 33 bp, Homo sapien
cttttttctgtattcatgtctacatctatatct

SEQ ID NO: 265591 - DNA, 33 bp, Homo sapien
tctattctctgacttacagctttttttgtatga

SEQ ID NO: 265592 - DNA, 33 bp, Homo sapien
tctattctctgacttatagctttttttgtatga

SEQ ID NO: 265593 - DNA, 33 bp, Homo sapien
gaattggaactaccgcaaagcaacctgcattag

SEQ ID NO: 265594 - DNA, 33 bp, Homo sapien
gaattggaactaccgcgaagcaacctgcattag

SEQ ID NO: 265595 - DNA, 33 bp, Homo sapien
caaagctggagaaggacacagattagctatgtg

SEQ ID NO: 265596 - DNA, 33 bp, Homo sapien
caaagctggagaaggatacagattagctatgtg

SEQ ID NO: 265597 - DNA, 33 bp, Homo sapien
aactagtaggtcataaaatccaaatccacatag

SEQ ID NO: 265598 - DNA, 33 bp, Homo sapien
aactagtaggtcataagatccaaatccacatag

SEQ ID NO: 265599 - DNA, 33 bp, Homo sapien
tttctgagatgagaaaaactggaagaggaacag

SEQ ID NO: 265600 - DNA, 33 bp, Homo sapien
tttctgagatgagaaacactggaagaggaacag

SEQ ID NO: 265601 - DNA, 33 bp, Homo sapien
gtagataatgtaaagcaactaaaacattccacc

SEQ ID NO: 265602 - DNA, 33 bp, Homo sapien
gtagataatgtaaagcgactaaaacattccacc

SEQ ID NO: 265603 - DNA, 33 bp, Homo sapien
cagcatttattgattacgttcaccgtcctatat

SEQ ID NO: 265604 - DNA, 33 bp, Homo sapien
cagcatttattgattatgttcaccgtcctatat

SEQ ID NO: 265605 - DNA, 33 bp, Homo sapien
gacttcctcagcaatacgtcctactggataggt

SEQ ID NO: 265606 - DNA, 33 bp, Homo sapien
gacttcctcagcaataggtcctactggataggt

SEQ ID NO: 265607 - DNA, 33 bp, Homo sapien
caagtgaatgtcaataagtactcaaataaatca

SEQ ID NO: 265608 - DNA, 33 bp, Homo sapien
caagtgaatgtcaatatgtactcaaataaatca

SEQ ID NO: 265609 - DNA, 33 bp, Homo sapien
tcaaccagaacaactaccctagcatttgtcaaa

SEQ ID NO: 265610 - DNA, 33 bp, Homo sapien
tcaaccagaacaactatcctagcatttgtcaaa

SEQ ID NO: 265611 - DNA, 33 bp, Homo sapien
gctcattactctatagacagcaccaaacacaat

SEQ ID NO: 265612 - DNA, 33 bp, Homo sapien
gctcattactctataggcagcaccaaacacaat

SEQ ID NO: 265613 - DNA, 33 bp, Homo sapien
acagcagattggtatccaagggctatggagttt

SEQ ID NO: 265614 - DNA, 33 bp, Homo sapien
acagcagattggtatctaagggctatggagttt

SEQ ID NO: 265615 - DNA, 33 bp, Homo sapien
acaggataccactaaaaacagctctccaggtta

SEQ ID NO: 265616 - DNA, 33 bp, Homo sapien
acaggataccactaaagacagctctccaggtta

SEQ ID NO: 265617 - DNA, 33 bp, Homo sapien
tgggcaacagtgcagacgtataaaagtgaatta

SEQ ID NO: 265618 - DNA, 33 bp, Homo sapien
tgggcaacagtgcagatgtataaaagtgaatta

SEQ ID NO: 265619 - DNA, 33 bp, Homo sapien
gtaggaaaacaacaaaagacaatggggtgataa

SEQ ID NO: 265620 - DNA, 33 bp, Homo sapien
gtaggaaaacaacaaaggacaatggggtgataa

SEQ ID NO: 265621 - DNA, 33 bp, Homo sapien
tccatccagaactttacagaacagtgtaatcta

SEQ ID NO: 265622 - DNA, 33 bp, Homo sapien
tccatccagaactttagagaacagtgtaatcta

SEQ ID NO: 265623 - DNA, 33 bp, Homo sapien
agcccacttggtatcccattgtggtcgagttgg

SEQ ID NO: 265624 - DNA, 33 bp, Homo sapien
agcccacttggtatcctattgtggtcgagttgg

SEQ ID NO: 265625 - DNA, 33 bp, Homo sapien
agttctgctgcatgagactagagcaccaggtag

SEQ ID NO: 265626 - DNA, 33 bp, Homo sapien
agttctgctgcatgagtctagagcaccaggtag

SEQ ID NO: 265627 - DNA, 33 bp, Homo sapien
tttctcattaatttaccggtcattcaggagcat

SEQ ID NO: 265628 - DNA, 33 bp, Homo sapien
tttctcattaatttactggtcattcaggagcat

SEQ ID NO: 265629 - DNA, 33 bp, Homo sapien
agggaaaggagggaaactatcacatttttatta

SEQ ID NO: 265630 - DNA, 33 bp, Homo sapien
agggaaaggagggaaagtatcacatttttatta

SEQ ID NO: 265631 - DNA, 33 bp, Homo sapien
cctggcatatactaaacactaaatattggttca

SEQ ID NO: 265632 - DNA, 33 bp, Homo sapien
cctggcatatactaaagactaaatattggttca

SEQ ID NO: 265633 - DNA, 33 bp, Homo sapien
ctcacaccatacatccaatctcagaaaatacta

SEQ ID NO: 265634 - DNA, 33 bp, Homo sapien
ctcacaccatacatccgatctcagaaaatacta

SEQ ID NO: 265635 - DNA, 33 bp, Homo sapien
gtatttgataactgagaagtcattagcaatctg

SEQ ID NO: 265636 - DNA, 33 bp, Homo sapien
gtatttgataactgagtagtcattagcaatctg

SEQ ID NO: 265637 - DNA, 33 bp, Homo sapien
aggagcagtcacagtacagcagtgggtttgaat

SEQ ID NO: 265638 - DNA, 33 bp, Homo sapien
aggagcagtcacagtagagcagtgggtttgaat

SEQ ID NO: 265639 - DNA, 33 bp, Homo sapien
aactagcctacaaaaaagtctgtgtaactagcc

SEQ ID NO: 265640 - DNA, 33 bp, Homo sapien
aactagcctacaaaaatgtctgtgtaactagcc

SEQ ID NO: 265641 - DNA, 33 bp, Homo sapien
catgagtgcataggaacataaaattgttaattg

SEQ ID NO: 265642 - DNA, 33 bp, Homo sapien
catgagtgcataggaatataaaattgttaattg

SEQ ID NO: 265643 - DNA, 33 bp, Homo sapien
ggctcaaacatagacaaaaactgtcgagtcctg

SEQ ID NO: 265644 - DNA, 33 bp, Homo sapien
ggctcaaacatagacacaaactgtcgagtcctg

SEQ ID NO: 265645 - DNA, 33 bp, Homo sapien
attcaacagaaagacactctcagatatggatgg

SEQ ID NO: 265646 - DNA, 33 bp, Homo sapien
attcaacagaaagacagtctcagatatggatgg

SEQ ID NO: 265647 - DNA, 33 bp, Homo sapien
gtactgtgagaataaaacatgactacttccatt

SEQ ID NO: 265648 - DNA, 33 bp, Homo sapien
gtactgtgagaataaaccatgactacttccatt

SEQ ID NO: 265649 - DNA, 33 bp, Homo sapien
taagaagcagtcaagaacttttttaggcagggc

SEQ ID NO: 265650 - DNA, 33 bp, Homo sapien
taagaagcagtcaagagcttttttaggcagggc

SEQ ID NO: 265651 - DNA, 33 bp, Homo sapien
tcataagaatcttccacagttcctcatatcttc

SEQ ID NO: 265652 - DNA, 33 bp, Homo sapien
tcataagaatcttccatagttcctcatatcttc

SEQ ID NO: 265653 - DNA, 33 bp, Homo sapien
aaaacactagtcctacaggattaggagcccatc

SEQ ID NO: 265654 - DNA, 33 bp, Homo sapien
aaaacactagtcctactggattaggagcccatc

SEQ ID NO: 265655 - DNA, 33 bp, Homo sapien
tttttggaggaaacggcatagcaagctaagctt

SEQ ID NO: 265656 - DNA, 33 bp, Homo sapien
tttttggaggaaacggtatagcaagctaagctt

SEQ ID NO: 265657 - DNA, 33 bp, Homo sapien
aatagttaacatggtgaattttaagttatgtga

SEQ ID NO: 265658 - DNA, 33 bp, Homo sapien
aatagttaacatggtgcattttaagttatgtga

SEQ ID NO: 265659 - DNA, 33 bp, Homo sapien
atcgccagtgtattacaataagtgaaataaggc

SEQ ID NO: 265660 - DNA, 33 bp, Homo sapien
atcgccagtgtattacgataagtgaaataaggc

SEQ ID NO: 265661 - DNA, 33 bp, Homo sapien
acaaaacagaaaatcaaaagttgtggtaaggat

SEQ ID NO: 265662 - DNA, 33 bp, Homo sapien
acaaaacagaaaatcagaagttgtggtaaggat

SEQ ID NO: 265663 - DNA, 33 bp, Homo sapien
ggggaaagcttcaagacactggttttggcaata

SEQ ID NO: 265664 - DNA, 33 bp, Homo sapien
ggggaaagcttcaagatactggttttggcaata

SEQ ID NO: 265665 - DNA, 33 bp, Homo sapien
ttagttctaacatttcacgtgcgcgcgcacacg

SEQ ID NO: 265666 - DNA, 33 bp, Homo sapien
ttagttctaacatttcgcgtgcgcgcgcacacg

SEQ ID NO: 265667 - DNA, 33 bp, Homo sapien
tccaacatagtgatggcaatcctagccaaagaa

SEQ ID NO: 265668 - DNA, 33 bp, Homo sapien
tccaacatagtgatggtaatcctagccaaagaa

SEQ ID NO: 265669 - DNA, 33 bp, Homo sapien
atgaggttagttttcacatatggccctttgtta

SEQ ID NO: 265670 - DNA, 33 bp, Homo sapien
atgaggttagttttcatatatggccctttgtta

SEQ ID NO: 265671 - DNA, 33 bp, Homo sapien
cagaaaatgttctcaacataacaaagggccata

SEQ ID NO: 265672 - DNA, 33 bp, Homo sapien
cagaaaatgttctcaatataacaaagggccata

SEQ ID NO: 265673 - DNA, 33 bp, Homo sapien
cttatgattctgtttacatatgtggcatcaatt

SEQ ID NO: 265674 - DNA, 33 bp, Homo sapien
cttatgattctgtttatatatgtggcatcaatt

SEQ ID NO: 265675 - DNA, 33 bp, Homo sapien
acatggcaaggaacatcagtggttatgactgat

SEQ ID NO: 265676 - DNA, 33 bp, Homo sapien
acatggcaaggaacattagtggttatgactgat

SEQ ID NO: 265677 - DNA, 33 bp, Homo sapien
tttagtcatttcacaccccttttgtagccttct

SEQ ID NO: 265678 - DNA, 33 bp, Homo sapien
tttagtcatttcacactccttttgtagccttct

SEQ ID NO: 265679 - DNA, 33 bp, Homo sapien
tgagcccagggttaaacgatttgaatatgtcat

SEQ ID NO: 265680 - DNA, 33 bp, Homo sapien
tgagcccagggttaaaggatttgaatatgtcat

SEQ ID NO: 265681 - DNA, 33 bp, Homo sapien
gtaactcatttggtgaagaaatctaacctatat

SEQ ID NO: 265682 - DNA, 33 bp, Homo sapien
gtaactcatttggtgaggaaatctaacctatat

SEQ ID NO: 265683 - DNA, 33 bp, Homo sapien
gagtaacagtgggatgcagagaggaacacccta

SEQ ID NO: 265684 - DNA, 33 bp, Homo sapien
gagtaacagtgggatggagagaggaacacccta

SEQ ID NO: 265685 - DNA, 33 bp, Homo sapien
aaaaattaagcaatagaaagtgagtgtgaatac

SEQ ID NO: 265686 - DNA, 33 bp, Homo sapien
aaaaattaagcaataggaagtgagtgtgaatac

SEQ ID NO: 265687 - DNA, 33 bp, Homo sapien
ctctcactcatactcacggaatacactggttga

SEQ ID NO: 265688 - DNA, 33 bp, Homo sapien
ctctcactcatactcatggaatacactggttga

SEQ ID NO: 265689 - DNA, 33 bp, Homo sapien
ttagtacatggctacaactacttaaaacattga

SEQ ID NO: 265690 - DNA, 33 bp, Homo sapien
ttagtacatggctacagctacttaaaacattga

SEQ ID NO: 265691 - DNA, 33 bp, Homo sapien
tgaatctgtaaggcatcagttctttacttgaga

SEQ ID NO: 265692 - DNA, 33 bp, Homo sapien
tgaatctgtaaggcattagttctttacttgaga

SEQ ID NO: 265693 - DNA, 33 bp, Homo sapien
atccctaagtaaggacaagtgcttgggaattaa

SEQ ID NO: 265694 - DNA, 33 bp, Homo sapien
atccctaagtaaggaccagtgcttgggaattaa

SEQ ID NO: 265695 - DNA, 33 bp, Homo sapien
aacattctctgtacaactaattacgcagataat

SEQ ID NO: 265696 - DNA, 33 bp, Homo sapien
aacattctctgtacaattaattacgcagataat

SEQ ID NO: 265697 - DNA, 33 bp, Homo sapien
ttatttctttctaactaacatgcattaacctta

SEQ ID NO: 265698 - DNA, 33 bp, Homo sapien
ttatttctttctaactgacatgcattaacctta

SEQ ID NO: 265699 - DNA, 33 bp, Homo sapien
tcccagctgactttggacacacaatttgctcct

SEQ ID NO: 265700 - DNA, 33 bp, Homo sapien
tcccagctgactttgggcacacaatttgctcct

SEQ ID NO: 265701 - DNA, 33 bp, Homo sapien
atttgctcctctatcaatgagagtaataccatc

SEQ ID NO: 265702 - DNA, 33 bp, Homo sapien
atttgctcctctatcagtgagagtaataccatc

SEQ ID NO: 265703 - DNA, 33 bp, Homo sapien
gaaagaatatatataaaactaggctcaagcaga

SEQ ID NO: 265704 - DNA, 33 bp, Homo sapien
gaaagaatatatataagactaggctcaagcaga

SEQ ID NO: 265705 - DNA, 33 bp, Homo sapien
ggagcatccatataaccctaaggaaaggcatta

SEQ ID NO: 265706 - DNA, 33 bp, Homo sapien
ggagcatccatataactctaaggaaaggcatta

SEQ ID NO: 265707 - DNA, 33 bp, Homo sapien
tatctatattttggctcaagattctgatttgtt

SEQ ID NO: 265708 - DNA, 33 bp, Homo sapien
tatctatattttggcttaagattctgatttgtt

SEQ ID NO: 265709 - DNA, 33 bp, Homo sapien
agtgattgtggaaacactggtccattgtctttt

SEQ ID NO: 265710 - DNA, 33 bp, Homo sapien
agtgattgtggaaacattggtccattgtctttt

SEQ ID NO: 265711 - DNA, 33 bp, Homo sapien
tctaaaccagttaagcagcagaataaatgtgca

SEQ ID NO: 265712 - DNA, 33 bp, Homo sapien
tctaaaccagttaagcggcagaataaatgtgca

SEQ ID NO: 265713 - DNA, 33 bp, Homo sapien
attaacaatgagaagaatcgctcctctcaaatg

SEQ ID NO: 265714 - DNA, 33 bp, Homo sapien
attaacaatgagaagactcgctcctctcaaatg

SEQ ID NO: 265715 - DNA, 33 bp, Homo sapien
gcactggaaaagatgacgacaattgtctaattc

SEQ ID NO: 265716 - DNA, 33 bp, Homo sapien
gcactggaaaagatgatgacaattgtctaattc

SEQ ID NO: 265717 - DNA, 33 bp, Homo sapien
aagtttctcatgaagactcagtggtagttttta

SEQ ID NO: 265718 - DNA, 33 bp, Homo sapien
aagtttctcatgaagattcagtggtagttttta

SEQ ID NO: 265719 - DNA, 33 bp, Homo sapien
ttttaatggttttgaccgatgtaaggctttttt

SEQ ID NO: 265720 - DNA, 33 bp, Homo sapien
ttttaatggttttgactgatgtaaggctttttt

SEQ ID NO: 265721 - DNA, 33 bp, Homo sapien
tgactagcaataaaaaatgtagttaaattgtgt

SEQ ID NO: 265722 - DNA, 33 bp, Homo sapien
tgactagcaataaaaagtgtagttaaattgtgt

SEQ ID NO: 265723 - DNA, 33 bp, Homo sapien
gttattctcatacatacggagttcacaaaattt

SEQ ID NO: 265724 - DNA, 33 bp, Homo sapien
gttattctcatacatatggagttcacaaaattt

SEQ ID NO: 265725 - DNA, 33 bp, Homo sapien
atgaaagagatttggacgcacagtagtttttta

SEQ ID NO: 265726 - DNA, 33 bp, Homo sapien
atgaaagagatttggatgcacagtagtttttta

SEQ ID NO: 265727 - DNA, 33 bp, Homo sapien
accaaagtttttaccagggaataatgcagaaca

SEQ ID NO: 265728 - DNA, 33 bp, Homo sapien
accaaagtttttaccatggaataatgcagaaca

SEQ ID NO: 265729 - DNA, 33 bp, Homo sapien
gtattctgctttttagaccctatttcaaacaat

SEQ ID NO: 265730 - DNA, 33 bp, Homo sapien
gtattctgctttttagtccctatttcaaacaat

SEQ ID NO: 265731 - DNA, 33 bp, Homo sapien
gctaatgagaacatcccgaaagctttggaactg

SEQ ID NO: 265732 - DNA, 33 bp, Homo sapien
gctaatgagaacatcctgaaagctttggaactg

SEQ ID NO: 265733 - DNA, 33 bp, Homo sapien
ctttgttttagaaaaagaaattagcaagtagct

SEQ ID NO: 265734 - DNA, 33 bp, Homo sapien
ctttgttttagaaaaataaattagcaagtagct

SEQ ID NO: 265735 - DNA, 33 bp, Homo sapien
tcccccttaccctgaccgatcaatgaacccgat

SEQ ID NO: 265736 - DNA, 33 bp, Homo sapien
tcccccttaccctgactgatcaatgaacccgat

SEQ ID NO: 265737 - DNA, 33 bp, Homo sapien
ccagacacttcctcaactggtattggctttctt

SEQ ID NO: 265738 - DNA, 33 bp, Homo sapien
ccagacacttcctcaattggtattggctttctt

SEQ ID NO: 265739 - DNA, 33 bp, Homo sapien
ctgaagaactgctacaactatattaagtcacaa

SEQ ID NO: 265740 - DNA, 33 bp, Homo sapien
ctgaagaactgctacatctatattaagtcacaa

SEQ ID NO: 265741 - DNA, 33 bp, Homo sapien
tcaagtgggttaataagagttcagatattctct

SEQ ID NO: 265742 - DNA, 33 bp, Homo sapien
tcaagtgggttaataatagttcagatattctct

SEQ ID NO: 265743 - DNA, 33 bp, Homo sapien
gatatgtaaggtgaaacgttttctccaagcatg

SEQ ID NO: 265744 - DNA, 33 bp, Homo sapien
gatatgtaaggtgaaatgttttctccaagcatg

SEQ ID NO: 265745 - DNA, 33 bp, Homo sapien
taaaggtcctcaaatgccagtgtgaatcttggt

SEQ ID NO: 265746 - DNA, 33 bp, Homo sapien
taaaggtcctcaaatgtcagtgtgaatcttggt

SEQ ID NO: 265747 - DNA, 33 bp, Homo sapien
tgctaaagaagtgctgcatagctttggtttttg

SEQ ID NO: 265748 - DNA, 33 bp, Homo sapien
tgctaaagaagtgctggatagctttggtttttg

SEQ ID NO: 265749 - DNA, 33 bp, Homo sapien
aaaacctaggaaggccaaactgaagataacagg

SEQ ID NO: 265750 - DNA, 33 bp, Homo sapien
aaaacctaggaaggccgaactgaagataacagg

SEQ ID NO: 265751 - DNA, 33 bp, Homo sapien
ataaagaatcattagacggccgggtacagtggc

SEQ ID NO: 265752 - DNA, 33 bp, Homo sapien
ataaagaatcattagatggccgggtacagtggc

SEQ ID NO: 265753 - DNA, 33 bp, Homo sapien
gaaacgactcaagcaaataaaggagaataacag

SEQ ID NO: 265754 - DNA, 33 bp, Homo sapien
gaaacgactcaagcaattaaaggagaataacag

SEQ ID NO: 265755 - DNA, 33 bp, Homo sapien
attattcctacgaagccgagctgtttctatttt

SEQ ID NO: 265756 - DNA, 33 bp, Homo sapien
attattcctacgaagctgagctgtttctatttt

SEQ ID NO: 265757 - DNA, 33 bp, Homo sapien
aatgaattaggtaaagaagtctaatcagtccta

SEQ ID NO: 265758 - DNA, 33 bp, Homo sapien
aatgaattaggtaaaggagtctaatcagtccta

SEQ ID NO: 265759 - DNA, 33 bp, Homo sapien
ttacaagaacttcctaaaaattgtttcttcatt

SEQ ID NO: 265760 - DNA, 33 bp, Homo sapien
ttacaagaacttcctacaaattgtttcttcatt

SEQ ID NO: 265761 - DNA, 33 bp, Homo sapien
tgtgggaaactgccaacagggtcataggacttt

SEQ ID NO: 265762 - DNA, 33 bp, Homo sapien
tgtgggaaactgccaatagggtcataggacttt

SEQ ID NO: 265763 - DNA, 33 bp, Homo sapien
aaggcattgtaaattaaactgtgcacaaaagtc

SEQ ID NO: 265764 - DNA, 33 bp, Homo sapien
aaggcattgtaaattagactgtgcacaaaagtc

SEQ ID NO: 265765 - DNA, 33 bp, Homo sapien
acggactccaatgggtcaatgtattttcttatg

SEQ ID NO: 265766 - DNA, 33 bp, Homo sapien
acggactccaatgggtgaatgtattttcttatg

SEQ ID NO: 265767 - DNA, 33 bp, Homo sapien
attaataatcctaccaacaattcaaaccaaata

SEQ ID NO: 265768 - DNA, 33 bp, Homo sapien
attaataatcctaccatcaattcaaaccaaata

SEQ ID NO: 265769 - DNA, 33 bp, Homo sapien
aagtattatcaatctagggactaagcacatttg

SEQ ID NO: 265770 - DNA, 33 bp, Homo sapien
aagtattatcaatctatggactaagcacatttg

SEQ ID NO: 265771 - DNA, 33 bp, Homo sapien
ttttcctctgaatacaatgtatctttattccta

SEQ ID NO: 265772 - DNA, 33 bp, Homo sapien
ttttcctctgaatacagtgtatctttattccta

SEQ ID NO: 265773 - DNA, 33 bp, Homo sapien
gtcaagctatttcccaatgatctcacagctgat

SEQ ID NO: 265774 - DNA, 33 bp, Homo sapien
gtcaagctatttcccagtgatctcacagctgat

SEQ ID NO: 265775 - DNA, 33 bp, Homo sapien
gtaaacttcagaattggatataagcttacttga

SEQ ID NO: 265776 - DNA, 33 bp, Homo sapien
gtaaacttcagaattgtatataagcttacttga

SEQ ID NO: 265777 - DNA, 33 bp, Homo sapien
aacttggctgtaatcacgtttaatgagtgaaac

SEQ ID NO: 265778 - DNA, 33 bp, Homo sapien
aacttggctgtaatcatgtttaatgagtgaaac

SEQ ID NO: 265779 - DNA, 33 bp, Homo sapien
gctcatgtcatttgtaaattttctaattagact

SEQ ID NO: 265780 - DNA, 33 bp, Homo sapien
gctcatgtcatttgtacattttctaattagact

SEQ ID NO: 265781 - DNA, 33 bp, Homo sapien
gctttgttgtaccatcaattgagcataggcaga

SEQ ID NO: 265782 - DNA, 33 bp, Homo sapien
gctttgttgtaccatcgattgagcataggcaga

SEQ ID NO: 265783 - DNA, 33 bp, Homo sapien
acttagtatagtttcacgtttttgagatacata

SEQ ID NO: 265784 - DNA, 33 bp, Homo sapien
acttagtatagtttcatgtttttgagatacata

SEQ ID NO: 265785 - DNA, 33 bp, Homo sapien
cagtcactccacagcacctatgaaaaaaaatat

SEQ ID NO: 265786 - DNA, 33 bp, Homo sapien
cagtcactccacagcagctatgaaaaaaaatat

SEQ ID NO: 265787 - DNA, 33 bp, Homo sapien
ccagcatcgcttctcaacttcattctctcacac

SEQ ID NO: 265788 - DNA, 33 bp, Homo sapien
ccagcatcgcttctcagcttcattctctcacac

SEQ ID NO: 265789 - DNA, 33 bp, Homo sapien
agcccaaaccctaagactatggagaaccaaaga

SEQ ID NO: 265790 - DNA, 33 bp, Homo sapien
agcccaaaccctaagattatggagaaccaaaga

SEQ ID NO: 265791 - DNA, 33 bp, Homo sapien
aattgacttggttctgcaacaccattccaatct

SEQ ID NO: 265792 - DNA, 33 bp, Homo sapien
aattgacttggttctgtaacaccattccaatct

SEQ ID NO: 265793 - DNA, 33 bp, Homo sapien
gcactacgtcaactccagctcttcccaaagctg

SEQ ID NO: 265794 - DNA, 33 bp, Homo sapien
gcactacgtcaactccggctcttcccaaagctg

SEQ ID NO: 265795 - DNA, 33 bp, Homo sapien
tgttaatgggggattgaaagatgagacaagaaa

SEQ ID NO: 265796 - DNA, 33 bp, Homo sapien
tgttaatgggggattggaagatgagacaagaaa

SEQ ID NO: 265797 - DNA, 33 bp, Homo sapien
agtgtcatcctaggagcaattagtgagttctca

SEQ ID NO: 265798 - DNA, 33 bp, Homo sapien
agtgtcatcctaggagtaattagtgagttctca

SEQ ID NO: 265799 - DNA, 33 bp, Homo sapien
ataattcaggaagcaaaatggaagacataagaa

SEQ ID NO: 265800 - DNA, 33 bp, Homo sapien
ataattcaggaagcaagatggaagacataagaa

SEQ ID NO: 265801 - DNA, 33 bp, Homo sapien
tctattgtcatgaaaaacaacatataattacat

SEQ ID NO: 265802 - DNA, 33 bp, Homo sapien
tctattgtcatgaaaagcaacatataattacat

SEQ ID NO: 265803 - DNA, 33 bp, Homo sapien
cactggtagagacaaacgaaagtaatacataat

SEQ ID NO: 265804 - DNA, 33 bp, Homo sapien
cactggtagagacaaatgaaagtaatacataat

SEQ ID NO: 265805 - DNA, 33 bp, Homo sapien
tcaagactgagtgaaccggtcaggccaagaaac

SEQ ID NO: 265806 - DNA, 33 bp, Homo sapien
tcaagactgagtgaactggtcaggccaagaaac

SEQ ID NO: 265807 - DNA, 33 bp, Homo sapien
gggacagatatatagaagaatagcctatgagag

SEQ ID NO: 265808 - DNA, 33 bp, Homo sapien
gggacagatatatagaggaatagcctatgagag

SEQ ID NO: 265809 - DNA, 33 bp, Homo sapien
tcagttattctcataacgggctttgctaacagc

SEQ ID NO: 265810 - DNA, 33 bp, Homo sapien
tcagttattctcataatgggctttgctaacagc

SEQ ID NO: 265811 - DNA, 33 bp, Homo sapien
actcatagtacatgagaaagaaagcaaagacaa

SEQ ID NO: 265812 - DNA, 33 bp, Homo sapien
actcatagtacatgaggaagaaagcaaagacaa

SEQ ID NO: 265813 - DNA, 33 bp, Homo sapien
cttaaatctggtgatgaagaaaatgaacctgag

SEQ ID NO: 265814 - DNA, 33 bp, Homo sapien
cttaaatctggtgatggagaaaatgaacctgag

SEQ ID NO: 265815 - DNA, 33 bp, Homo sapien
caaacctctacactaacttagaagagaagaggc

SEQ ID NO: 265816 - DNA, 33 bp, Homo sapien
caaacctctacactaatttagaagagaagaggc

SEQ ID NO: 265817 - DNA, 33 bp, Homo sapien
ggacctctaagaggcactcagttaaggggcagc

SEQ ID NO: 265818 - DNA, 33 bp, Homo sapien
ggacctctaagaggcattcagttaaggggcagc

SEQ ID NO: 265819 - DNA, 33 bp, Homo sapien
ctgtgaataaagccaaagtattgaatatttatt

SEQ ID NO: 265820 - DNA, 33 bp, Homo sapien
ctgtgaataaagccaatgtattgaatatttatt

SEQ ID NO: 265821 - DNA, 33 bp, Homo sapien
gcctttctcattttcaactttccattactgctc

SEQ ID NO: 265822 - DNA, 33 bp, Homo sapien
gcctttctcattttcagctttccattactgctc

SEQ ID NO: 265823 - DNA, 33 bp, Homo sapien
gttcaaagaaactcaaactgcaacccaaagaat

SEQ ID NO: 265824 - DNA, 33 bp, Homo sapien
gttcaaagaaactcaacctgcaacccaaagaat

SEQ ID NO: 265825 - DNA, 33 bp, Homo sapien
acagatcattgcacaagaaattactgaagatga

SEQ ID NO: 265826 - DNA, 33 bp, Homo sapien
acagatcattgcacaataaattactgaagatga

SEQ ID NO: 265827 - DNA, 33 bp, Homo sapien
tgaagtcagtaacctcaacaacaaggacgcttt

SEQ ID NO: 265828 - DNA, 33 bp, Homo sapien
tgaagtcagtaacctcgacaacaaggacgcttt

SEQ ID NO: 265829 - DNA, 33 bp, Homo sapien
cttgaccctctagaataaaaactaaactgcaaa

SEQ ID NO: 265830 - DNA, 33 bp, Homo sapien
cttgaccctctagaatgaaaactaaactgcaaa

SEQ ID NO: 265831 - DNA, 33 bp, Homo sapien
gctttcaaagaggctaccttagggtttatacta

SEQ ID NO: 265832 - DNA, 33 bp, Homo sapien
gctttcaaagaggctatcttagggtttatacta

SEQ ID NO: 265833 - DNA, 33 bp, Homo sapien
tatgtatccatgaacactataaagcagtttaga

SEQ ID NO: 265834 - DNA, 33 bp, Homo sapien
tatgtatccatgaacattataaagcagtttaga

SEQ ID NO: 265835 - DNA, 33 bp, Homo sapien
ttgtcttttctgaaaacggatggccaagattct

SEQ ID NO: 265836 - DNA, 33 bp, Homo sapien
ttgtcttttctgaaaatggatggccaagattct

SEQ ID NO: 265837 - DNA, 33 bp, Homo sapien
ctcagatatgcagataacaggtaaatcaagaac

SEQ ID NO: 265838 - DNA, 33 bp, Homo sapien
ctcagatatgcagatatcaggtaaatcaagaac

SEQ ID NO: 265839 - DNA, 33 bp, Homo sapien
taaaactgcctagaaccctacttgtctgtatat

SEQ ID NO: 265840 - DNA, 33 bp, Homo sapien
taaaactgcctagaactctacttgtctgtatat

SEQ ID NO: 265841 - DNA, 33 bp, Homo sapien
tctcctttaacaatcccattaatgtgtaggacg

SEQ ID NO: 265842 - DNA, 33 bp, Homo sapien
tctcctttaacaatcctattaatgtgtaggacg

SEQ ID NO: 265843 - DNA, 33 bp, Homo sapien
tgtcactttagttcagcctaggccacagagtga

SEQ ID NO: 265844 - DNA, 33 bp, Homo sapien
tgtcactttagttcaggctaggccacagagtga

SEQ ID NO: 265845 - DNA, 33 bp, Homo sapien
ctaggatgaatcactaaaggaacttgagggtta

SEQ ID NO: 265846 - DNA, 33 bp, Homo sapien
ctaggatgaatcactagaggaacttgagggtta

SEQ ID NO: 265847 - DNA, 33 bp, Homo sapien
actgactgtctactcacaggactaagtgacctt

SEQ ID NO: 265848 - DNA, 33 bp, Homo sapien
actgactgtctactcataggactaagtgacctt

SEQ ID NO: 265849 - DNA, 33 bp, Homo sapien
ttgtggtatgtccaagcagtatagtccttgaga

SEQ ID NO: 265850 - DNA, 33 bp, Homo sapien
ttgtggtatgtccaagtagtatagtccttgaga

SEQ ID NO: 265851 - DNA, 33 bp, Homo sapien
ggaattaaaaaagacacgcggagagccatgtta

SEQ ID NO: 265852 - DNA, 33 bp, Homo sapien
ggaattaaaaaagacatgcggagagccatgtta

SEQ ID NO: 265853 - DNA, 33 bp, Homo sapien
ctattattcatgctcagcattcttgatatatta

SEQ ID NO: 265854 - DNA, 33 bp, Homo sapien
ctattattcatgctcatcattcttgatatatta

SEQ ID NO: 265855 - DNA, 33 bp, Homo sapien
tgggtatatgtagaagaaaaaaaggaatccaac

SEQ ID NO: 265856 - DNA, 33 bp, Homo sapien
tgggtatatgtagaaggaaaaaaggaatccaac

SEQ ID NO: 265857 - DNA, 33 bp, Homo sapien
aaatgaatctttcatacgtgggttttgtcgaaa

SEQ ID NO: 265858 - DNA, 33 bp, Homo sapien
aaatgaatctttcatatgtgggttttgtcgaaa

SEQ ID NO: 265859 - DNA, 33 bp, Homo sapien
tcatactaatagtgcaacatgatccatctttta

SEQ ID NO: 265860 - DNA, 33 bp, Homo sapien
tcatactaatagtgcagcatgatccatctttta

SEQ ID NO: 265861 - DNA, 33 bp, Homo sapien
actggactaagtcacaaaacagttcagtcatat

SEQ ID NO: 265862 - DNA, 33 bp, Homo sapien
actggactaagtcacacaacagttcagtcatat

SEQ ID NO: 265863 - DNA, 33 bp, Homo sapien
ttgttgttgagtaatgcaatcttatcttcatgg

SEQ ID NO: 265864 - DNA, 33 bp, Homo sapien
ttgttgttgagtaatgtaatcttatcttcatgg

SEQ ID NO: 265865 - DNA, 33 bp, Homo sapien
tggtgacaagcctgctaaaatgaaactggtcct

SEQ ID NO: 265866 - DNA, 33 bp, Homo sapien
tggtgacaagcctgctgaaatgaaactggtcct

SEQ ID NO: 265867 - DNA, 33 bp, Homo sapien
tacctaatctttctaacacgcaaatctcatcaa

SEQ ID NO: 265868 - DNA, 33 bp, Homo sapien
tacctaatctttctaagacgcaaatctcatcaa

SEQ ID NO: 265869 - DNA, 33 bp, Homo sapien
tttccttcccttgggcacttagcaactcctgcc

SEQ ID NO: 265870 - DNA, 33 bp, Homo sapien
tttccttcccttgggcgcttagcaactcctgcc

SEQ ID NO: 265871 - DNA, 33 bp, Homo sapien
tgcataaaaaaggctacataactgtgcattgag

SEQ ID NO: 265872 - DNA, 33 bp, Homo sapien
tgcataaaaaaggctatataactgtgcattgag

SEQ ID NO: 265873 - DNA, 33 bp, Homo sapien
tataagagattgtgaaataaacagttctgcatc

SEQ ID NO: 265874 - DNA, 33 bp, Homo sapien
tataagagattgtgaagtaaacagttctgcatc

SEQ ID NO: 265875 - DNA, 33 bp, Homo sapien
ctcatgatgggacataaaaacagaagaaattta

SEQ ID NO: 265876 - DNA, 33 bp, Homo sapien
ctcatgatgggacatagaaacagaagaaattta

SEQ ID NO: 265877 - DNA, 33 bp, Homo sapien
cctaggcacactgccacgttcttcgtctatgtt

SEQ ID NO: 265878 - DNA, 33 bp, Homo sapien
cctaggcacactgccatgttcttcgtctatgtt

SEQ ID NO: 265879 - DNA, 33 bp, Homo sapien
aaatcaaaacagggcaagaaggaagcatgtgga

SEQ ID NO: 265880 - DNA, 33 bp, Homo sapien
aaatcaaaacagggcaggaaggaagcatgtgga

SEQ ID NO: 265881 - DNA, 33 bp, Homo sapien
gcgttactgttttaaactgttttcaaatgtgtg

SEQ ID NO: 265882 - DNA, 33 bp, Homo sapien
gcgttactgttttaaagtgttttcaaatgtgtg

SEQ ID NO: 265883 - DNA, 33 bp, Homo sapien
ggaggttaaagaaagaggtcaatgtgttacctt

SEQ ID NO: 265884 - DNA, 33 bp, Homo sapien
ggaggttaaagaaagatgtcaatgtgttacctt

SEQ ID NO: 265885 - DNA, 33 bp, Homo sapien
agtcattgtgctccaaataagggaaatacaaag

SEQ ID NO: 265886 - DNA, 33 bp, Homo sapien
agtcattgtgctccaagtaagggaaatacaaag

SEQ ID NO: 265887 - DNA, 33 bp, Homo sapien
attccttaataaatacccagcatgctaacttcc

SEQ ID NO: 265888 - DNA, 33 bp, Homo sapien
attccttaataaatacgcagcatgctaacttcc

SEQ ID NO: 265889 - DNA, 33 bp, Homo sapien
acaacaacaacaactacgggataaggatataaa

SEQ ID NO: 265890 - DNA, 33 bp, Homo sapien
acaacaacaacaactatgggataaggatataaa

SEQ ID NO: 265891 - DNA, 33 bp, Homo sapien
gactgactgtgttccacagcttaataatgctct

SEQ ID NO: 265892 - DNA, 33 bp, Homo sapien
gactgactgtgttccatagcttaataatgctct

SEQ ID NO: 265893 - DNA, 33 bp, Homo sapien
attcccataaacaaacaacagtcaagctgagag

SEQ ID NO: 265894 - DNA, 33 bp, Homo sapien
attcccataaacaaaccacagtcaagctgagag

SEQ ID NO: 265895 - DNA, 33 bp, Homo sapien
tcctatttgataaatgacactaggataataggc

SEQ ID NO: 265896 - DNA, 33 bp, Homo sapien
tcctatttgataaatggcactaggataataggc

SEQ ID NO: 265897 - DNA, 33 bp, Homo sapien
tgtagcactatgtataataggaaagacatggca

SEQ ID NO: 265898 - DNA, 33 bp, Homo sapien
tgtagcactatgtatagtaggaaagacatggca

SEQ ID NO: 265899 - DNA, 33 bp, Homo sapien
catctgtgttgtagtacgaactagtgcttcaaa

SEQ ID NO: 265900 - DNA, 33 bp, Homo sapien
catctgtgttgtagtatgaactagtgcttcaaa

SEQ ID NO: 265901 - DNA, 33 bp, Homo sapien
taatggtgtcaaaccaaagagactagctgacag

SEQ ID NO: 265902 - DNA, 33 bp, Homo sapien
taatggtgtcaaaccagagagactagctgacag

SEQ ID NO: 265903 - DNA, 33 bp, Homo sapien
ctagatgatctattcacgggtactcactgacct

SEQ ID NO: 265904 - DNA, 33 bp, Homo sapien
ctagatgatctattcatgggtactcactgacct

SEQ ID NO: 265905 - DNA, 33 bp, Homo sapien
tatccttgacctttggaaattcaatattaaatg

SEQ ID NO: 265906 - DNA, 33 bp, Homo sapien
tatccttgacctttgggaattcaatattaaatg

SEQ ID NO: 265907 - DNA, 33 bp, Homo sapien
acaatcagagaccagcagctaacctcagggctt

SEQ ID NO: 265908 - DNA, 33 bp, Homo sapien
acaatcagagaccagccgctaacctcagggctt

SEQ ID NO: 265909 - DNA, 33 bp, Homo sapien
agcatctaacttggtacagatgctaaggttgca

SEQ ID NO: 265910 - DNA, 33 bp, Homo sapien
agcatctaacttggtatagatgctaaggttgca

SEQ ID NO: 265911 - DNA, 33 bp, Homo sapien
gcaggctgtattcccacggaaagaagaatttgt

SEQ ID NO: 265912 - DNA, 33 bp, Homo sapien
gcaggctgtattcccatggaaagaagaatttgt

SEQ ID NO: 265913 - DNA, 33 bp, Homo sapien
aacaagaaagcactcacgtttccaaattagcaa

SEQ ID NO: 265914 - DNA, 33 bp, Homo sapien
aacaagaaagcactcatgtttccaaattagcaa

SEQ ID NO: 265915 - DNA, 33 bp, Homo sapien
agtgcagaacaaagtacaatagagatctgcaat

SEQ ID NO: 265916 - DNA, 33 bp, Homo sapien
agtgcagaacaaagtagaatagagatctgcaat

SEQ ID NO: 265917 - DNA, 33 bp, Homo sapien
ttaaaacactacatgagaaataactagtaaaag

SEQ ID NO: 265918 - DNA, 33 bp, Homo sapien
ttaaaacactacatgataaataactagtaaaag

SEQ ID NO: 265919 - DNA, 33 bp, Homo sapien
ctggtcatggattagacggtcaaaattgataag

SEQ ID NO: 265920 - DNA, 33 bp, Homo sapien
ctggtcatggattagagggtcaaaattgataag

SEQ ID NO: 265921 - DNA, 33 bp, Homo sapien
aaatgtctttgccaaaatgcccttaagctttat

SEQ ID NO: 265922 - DNA, 33 bp, Homo sapien
aaatgtctttgccaaagtgcccttaagctttat

SEQ ID NO: 265923 - DNA, 33 bp, Homo sapien
cacaatttaaacagaacacgaatacttctctta

SEQ ID NO: 265924 - DNA, 33 bp, Homo sapien
cacaatttaaacagaatacgaatacttctctta

SEQ ID NO: 265925 - DNA, 33 bp, Homo sapien
aatatcgttaataaaaatttctctgtataagag

SEQ ID NO: 265926 - DNA, 33 bp, Homo sapien
aatatcgttaataaaattttctctgtataagag

SEQ ID NO: 265927 - DNA, 33 bp, Homo sapien
actgtaacctggctccaaaccacacagctggca

SEQ ID NO: 265928 - DNA, 33 bp, Homo sapien
actgtaacctggctccgaaccacacagctggca

SEQ ID NO: 265929 - DNA, 33 bp, Homo sapien
tgaggctatttccccactagtcaatgaaactgc

SEQ ID NO: 265930 - DNA, 33 bp, Homo sapien
tgaggctatttccccattagtcaatgaaactgc

SEQ ID NO: 265931 - DNA, 33 bp, Homo sapien
agataaagactgaaaacgactgttggatatagc

SEQ ID NO: 265932 - DNA, 33 bp, Homo sapien
agataaagactgaaaatgactgttggatatagc

SEQ ID NO: 265933 - DNA, 33 bp, Homo sapien
agctcactgagtttacaaattctgactttcatg

SEQ ID NO: 265934 - DNA, 33 bp, Homo sapien
agctcactgagtttacgaattctgactttcatg

SEQ ID NO: 265935 - DNA, 33 bp, Homo sapien
aaactcttccactagcagacattttaagaacat

SEQ ID NO: 265936 - DNA, 33 bp, Homo sapien
aaactcttccactagctgacattttaagaacat

SEQ ID NO: 265937 - DNA, 33 bp, Homo sapien
tttacagatgaagcaactgaagccaaaagtagt

SEQ ID NO: 265938 - DNA, 33 bp, Homo sapien
tttacagatgaagcaattgaagccaaaagtagt

SEQ ID NO: 265939 - DNA, 33 bp, Homo sapien
aatttataattcatctcaaaatggtagtttccc

SEQ ID NO: 265940 - DNA, 33 bp, Homo sapien
aatttataattcatcttaaaatggtagtttccc

SEQ ID NO: 265941 - DNA, 33 bp, Homo sapien
ttttaagggcagagacaatttgttatttggttt

SEQ ID NO: 265942 - DNA, 33 bp, Homo sapien
ttttaagggcagagacgatttgttatttggttt

SEQ ID NO: 265943 - DNA, 33 bp, Homo sapien
taaactcaaggactaacaggcagaaaaaagggt

SEQ ID NO: 265944 - DNA, 33 bp, Homo sapien
taaactcaaggactaataggcagaaaaaagggt

SEQ ID NO: 265945 - DNA, 33 bp, Homo sapien
agcttgttagcttgtcactttgtttctactcct

SEQ ID NO: 265946 - DNA, 33 bp, Homo sapien
agcttgttagcttgtcgctttgtttctactcct

SEQ ID NO: 265947 - DNA, 33 bp, Homo sapien
agtttactttttctaaactttgcatcagagtaa

SEQ ID NO: 265948 - DNA, 33 bp, Homo sapien
agtttactttttctaatctttgcatcagagtaa

SEQ ID NO: 265949 - DNA, 33 bp, Homo sapien
agttgtttctcatggacataagtgttaactctt

SEQ ID NO: 265950 - DNA, 33 bp, Homo sapien
agttgtttctcatggagataagtgttaactctt

SEQ ID NO: 265951 - DNA, 33 bp, Homo sapien
attggcctaatcagtgaagaataaaaaacacta

SEQ ID NO: 265952 - DNA, 33 bp, Homo sapien
attggcctaatcagtgcagaataaaaaacacta

SEQ ID NO: 265953 - DNA, 33 bp, Homo sapien
ggtccacaggaaggtgcattgccctaatcataa

SEQ ID NO: 265954 - DNA, 33 bp, Homo sapien
ggtccacaggaaggtgtattgccctaatcataa

SEQ ID NO: 265955 - DNA, 33 bp, Homo sapien
gcgagaggtcatttgcaatggcagtaatgggtt

SEQ ID NO: 265956 - DNA, 33 bp, Homo sapien
gcgagaggtcatttgcgatggcagtaatgggtt

SEQ ID NO: 265957 - DNA, 33 bp, Homo sapien
ctcttccctttgaccccattgtaatggctacag

SEQ ID NO: 265958 - DNA, 33 bp, Homo sapien
ctcttccctttgacccgattgtaatggctacag

SEQ ID NO: 265959 - DNA, 33 bp, Homo sapien
ttgctaaaaacaattcaccacagcttatataga

SEQ ID NO: 265960 - DNA, 33 bp, Homo sapien
ttgctaaaaacaattcgccacagcttatataga

SEQ ID NO: 265961 - DNA, 33 bp, Homo sapien
gtcttatatggcagtaccaggagaaagagagag

SEQ ID NO: 265962 - DNA, 33 bp, Homo sapien
gtcttatatggcagtatcaggagaaagagagag

SEQ ID NO: 265963 - DNA, 33 bp, Homo sapien
caacatagatacctcagtcaaatctgatccgca

SEQ ID NO: 265964 - DNA, 33 bp, Homo sapien
caacatagatacctcattcaaatctgatccgca

SEQ ID NO: 265965 - DNA, 33 bp, Homo sapien
gtccatgtgttctgaacggttagcttccattta

SEQ ID NO: 265966 - DNA, 33 bp, Homo sapien
gtccatgtgttctgaatggttagcttccattta

SEQ ID NO: 265967 - DNA, 33 bp, Homo sapien
aaagtgttactggtccaaaatgttaatagtgcc

SEQ ID NO: 265968 - DNA, 33 bp, Homo sapien
aaagtgttactggtccgaaatgttaatagtgcc

SEQ ID NO: 265969 - DNA, 33 bp, Homo sapien
gctggacttgaaatgcaatagaacaacaaagct

SEQ ID NO: 265970 - DNA, 33 bp, Homo sapien
gctggacttgaaatgcgatagaacaacaaagct

SEQ ID NO: 265971 - DNA, 33 bp, Homo sapien
aaatcaattgcatagacgggaaaatgaagcctt

SEQ ID NO: 265972 - DNA, 33 bp, Homo sapien
aaatcaattgcatagatgggaaaatgaagcctt

SEQ ID NO: 265973 - DNA, 33 bp, Homo sapien
ccagcagaaggcaggaaggctgtactgttacag

SEQ ID NO: 265974 - DNA, 33 bp, Homo sapien
ccagcagaaggcaggagggctgtactgttacag

SEQ ID NO: 265975 - DNA, 33 bp, Homo sapien
acaataatttggataaccatctttctaaaaact

SEQ ID NO: 265976 - DNA, 33 bp, Homo sapien
acaataatttggataatcatctttctaaaaact

SEQ ID NO: 265977 - DNA, 33 bp, Homo sapien
acagccttttagagcaaaaaaagatataaaata

SEQ ID NO: 265978 - DNA, 33 bp, Homo sapien
acagccttttagagcagaaaaagatataaaata

SEQ ID NO: 265979 - DNA, 33 bp, Homo sapien
agtgaagagatgagccagcaagtttgttggagt

SEQ ID NO: 265980 - DNA, 33 bp, Homo sapien
agtgaagagatgagccggcaagtttgttggagt

SEQ ID NO: 265981 - DNA, 33 bp, Homo sapien
cccgtgttgaaatgcaatcgccaatgttggaag

SEQ ID NO: 265982 - DNA, 33 bp, Homo sapien
cccgtgttgaaatgcagtcgccaatgttggaag

SEQ ID NO: 265983 - DNA, 33 bp, Homo sapien
ttagaaaagaacaataactaacaataccctaac

SEQ ID NO: 265984 - DNA, 33 bp, Homo sapien
ttagaaaagaacaatacctaacaataccctaac

SEQ ID NO: 265985 - DNA, 33 bp, Homo sapien
agactttaaatcaacaatgcttttctttttgaa

SEQ ID NO: 265986 - DNA, 33 bp, Homo sapien
agactttaaatcaacagtgcttttctttttgaa

SEQ ID NO: 265987 - DNA, 33 bp, Homo sapien
ctgggagagacaaagaaagaccatggctgatat

SEQ ID NO: 265988 - DNA, 33 bp, Homo sapien
ctgggagagacaaagacagaccatggctgatat

SEQ ID NO: 265989 - DNA, 33 bp, Homo sapien
tagtgttctgagttcaactttcttcttctcttc

SEQ ID NO: 265990 - DNA, 33 bp, Homo sapien
tagtgttctgagttcacctttcttcttctcttc

SEQ ID NO: 265991 - DNA, 33 bp, Homo sapien
ttatctagatgattaacagggagactgaaaatt

SEQ ID NO: 265992 - DNA, 33 bp, Homo sapien
ttatctagatgattaatagggagactgaaaatt

SEQ ID NO: 265993 - DNA, 33 bp, Homo sapien
aaggaccttgttttgacagctatttggactgtt

SEQ ID NO: 265994 - DNA, 33 bp, Homo sapien
aaggaccttgttttgatagctatttggactgtt

SEQ ID NO: 265995 - DNA, 33 bp, Homo sapien
taggtgtgttactcagaaggatttacggtggtc

SEQ ID NO: 265996 - DNA, 33 bp, Homo sapien
taggtgtgttactcaggaggatttacggtggtc

SEQ ID NO: 265997 - DNA, 33 bp, Homo sapien
gtaatgtcaaatgataacaatgtttgactatgt

SEQ ID NO: 265998 - DNA, 33 bp, Homo sapien
gtaatgtcaaatgatagcaatgtttgactatgt

SEQ ID NO: 265999 - DNA, 33 bp, Homo sapien
aactaaaaagtccccagtcctgagtctcatctg

SEQ ID NO: 266000 - DNA, 33 bp, Homo sapien
aactaaaaagtccccattcctgagtctcatctg

SEQ ID NO: 266001 - DNA, 33 bp, Homo sapien; identical to SEQ ID NO: 265999

SEQ ID NO: 266002 - DNA, 33 bp, Homo sapien; identical to SEQ ID NO: 266000

SEQ ID NO: 266003 - DNA, 33 bp, Homo sapien
ttaaaaagttatcccactcatgatcccattgct

SEQ ID NO: 266004 - DNA, 33 bp, Homo sapien
ttaaaaagttatcccattcatgatcccattgct

SEQ ID NO: 266005 - DNA, 33 bp, Homo sapien
caataccaaaatacaaatgagtacaggtatctt

SEQ ID NO: 266006 - DNA, 33 bp, Homo sapien
caataccaaaatacaagtgagtacaggtatctt

SEQ ID NO: 266007 - DNA, 33 bp, Homo sapien
tctgaaattgtataccaaccagataagcatatc

SEQ ID NO: 266008 - DNA, 33 bp, Homo sapien
tctgaaattgtataccgaccagataagcatatc

SEQ ID NO: 266009 - DNA, 33 bp, Homo sapien
ctgagtgagggaaccaaatgggaaaaagatcaa

SEQ ID NO: 266010 - DNA, 33 bp, Homo sapien
ctgagtgagggaaccagatgggaaaaagatcaa

SEQ ID NO: 266011 - DNA, 33 bp, Homo sapien
aatttcaatacgcaaaatgaaaatcatggaagc

SEQ ID NO: 266012 - DNA, 33 bp, Homo sapien
aatttcaatacgcaaagtgaaaatcatggaagc

SEQ ID NO: 266013 - DNA, 33 bp, Homo sapien
ttccctatgattttatcaccaatccaaccaatc

SEQ ID NO: 266014 - DNA, 33 bp, Homo sapien
ttccctatgattttattaccaatccaaccaatc

SEQ ID NO: 266015 - DNA, 33 bp, Homo sapien
gtcactagtaggaatacaagcttcacagtctat

SEQ ID NO: 266016 - DNA, 33 bp, Homo sapien
gtcactagtaggaatataagcttcacagtctat

SEQ ID NO: 266017 - DNA, 33 bp, Homo sapien
acaatagacaattaataagctggagagttcatc

SEQ ID NO: 266018 - DNA, 33 bp, Homo sapien
acaatagacaattaatcagctggagagttcatc

SEQ ID NO: 266019 - DNA, 33 bp, Homo sapien
tgcggatttctagaggacaatgtgagcagggct

SEQ ID NO: 266020 - DNA, 33 bp, Homo sapien
tgcggatttctagagggcaatgtgagcagggct

SEQ ID NO: 266021 - DNA, 33 bp, Homo sapien
tctgaagttgcttagaccagtacctcctttctt

SEQ ID NO: 266022 - DNA, 33 bp, Homo sapien
tctgaagttgcttagatcagtacctcctttctt

SEQ ID NO: 266023 - DNA, 33 bp, Homo sapien
gaaccaattaaagccaaacagatgttaagtgaa

SEQ ID NO: 266024 - DNA, 33 bp, Homo sapien
gaaccaattaaagccagacagatgttaagtgaa

SEQ ID NO: 266025 - DNA, 33 bp, Homo sapien
atttttcattttaagcaccgtaaaatcttaacc

SEQ ID NO: 266026 - DNA, 33 bp, Homo sapien
atttttcattttaagcgccgtaaaatcttaacc

SEQ ID NO: 266027 - DNA, 33 bp, Homo sapien
ctgtgttctgccataacaaggaagtcaattact

SEQ ID NO: 266028 - DNA, 33 bp, Homo sapien
ctgtgttctgccataataaggaagtcaattact

SEQ ID NO: 266029 - DNA, 33 bp, Homo sapien
catttccaacctagagaactatactaagctaat

SEQ ID NO: 266030 - DNA, 33 bp, Homo sapien
catttccaacctagagtactatactaagctaat

SEQ ID NO: 266031 - DNA, 33 bp, Homo sapien
tggctacttttaatagaagcactgagagcttga

SEQ ID NO: 266032 - DNA, 33 bp, Homo sapien
tggctacttttaatagcagcactgagagcttga

SEQ ID NO: 266033 - DNA, 33 bp, Homo sapien
aaactacaatgggcaccgtattacctaaaagta

SEQ ID NO: 266034 - DNA, 33 bp, Homo sapien
aaactacaatgggcactgtattacctaaaagta

SEQ ID NO: 266035 - DNA, 33 bp, Homo sapien
aagtttgagatgacacaggggaagggttttaat

SEQ ID NO: 266036 - DNA, 33 bp, Homo sapien
aagtttgagatgacaccggggaagggttttaat

SEQ ID NO: 266037 - DNA, 33 bp, Homo sapien
atcagtggaataataacggctagaaattttctt

SEQ ID NO: 266038 - DNA, 33 bp, Homo sapien
atcagtggaataataatggctagaaattttctt

SEQ ID NO: 266039 - DNA, 33 bp, Homo sapien
gttgttcatctggtacaaaatttcacactgtaa

SEQ ID NO: 266040 - DNA, 33 bp, Homo sapien
gttgttcatctggtaccaaatttcacactgtaa

SEQ ID NO: 266041 - DNA, 33 bp, Homo sapien
tgtccatcaacccaacagtaaatgacagctagg

SEQ ID NO: 266042 - DNA, 33 bp, Homo sapien
tgtccatcaacccaacggtaaatgacagctagg

SEQ ID NO: 266043 - DNA, 33 bp, Homo sapien
atctttgagataacatcaaacttgccaacacat

SEQ ID NO: 266044 - DNA, 33 bp, Homo sapien
atctttgagataacattaaacttgccaacacat

SEQ ID NO: 266045 - DNA, 33 bp, Homo sapien
gcctaaaaggggggaaagcatgaaagttgtttg

SEQ ID NO: 266046 - DNA, 33 bp, Homo sapien
gcctaaaaggggggaaggcatgaaagttgtttg

SEQ ID NO: 266047 - DNA, 33 bp, Homo sapien
aaatcttattcgattcagaaaaatatgtcaaaa

SEQ ID NO: 266048 - DNA, 33 bp, Homo sapien
aaatcttattcgattcggaaaaatatgtcaaaa

SEQ ID NO: 266049 - DNA, 33 bp, Homo sapien
ccagggtggtactgacacattgccagcctgaac

SEQ ID NO: 266050 - DNA, 33 bp, Homo sapien
ccagggtggtactgactcattgccagcctgaac

SEQ ID NO: 266051 - DNA, 33 bp, Homo sapien
cacagcagccctactgaagagtgtcctgactgt

SEQ ID NO: 266052 - DNA, 33 bp, Homo sapien
cacagcagccctactggagagtgtcctgactgt

SEQ ID NO: 266053 - DNA, 33 bp, Homo sapien
gattaataaagcaaaaatctttgtattgttaat

SEQ ID NO: 266054 - DNA, 33 bp, Homo sapien
gattaataaagcaaaagtctttgtattgttaat

SEQ ID NO: 266055 - DNA, 33 bp, Homo sapien
tgctcttgtttgtatcaactcattttcagcttt

SEQ ID NO: 266056 - DNA, 33 bp, Homo sapien
tgctcttgtttgtatccactcattttcagcttt

SEQ ID NO: 266057 - DNA, 33 bp, Homo sapien
acagatcttccttttacgtcttgtccatgctct

SEQ ID NO: 266058 - DNA, 33 bp, Homo sapien
acagatcttccttttatgtcttgtccatgctct

SEQ ID NO: 266059 - DNA, 33 bp, Homo sapien
tctggaacactagaaacatgtcagaacttttca

SEQ ID NO: 266060 - DNA, 33 bp, Homo sapien
tctggaacactagaaatatgtcagaacttttca

SEQ ID NO: 266061 - DNA, 33 bp, Homo sapien
aggagaaatataacaacgatgtctcaccaagca

SEQ ID NO: 266062 - DNA, 33 bp, Homo sapien
aggagaaatataacaatgatgtctcaccaagca

SEQ ID NO: 266063 - DNA, 33 bp, Homo sapien
agcatcccaatgtacacattacatgagtccaaa

SEQ ID NO: 266064 - DNA, 33 bp, Homo sapien
agcatcccaatgtacatattacatgagtccaaa

SEQ ID NO: 266065 - DNA, 33 bp, Homo sapien
agtttttcttttgagaacttgtgtcattttgaa

SEQ ID NO: 266066 - DNA, 33 bp, Homo sapien
agtttttcttttgagatcttgtgtcattttgaa

SEQ ID NO: 266067 - DNA, 33 bp, Homo sapien
accttgctgtatccaaatatgttctagtgatgg

SEQ ID NO: 266068 - DNA, 33 bp, Homo sapien
accttgctgtatccaagtatgttctagtgatgg

SEQ ID NO: 266069 - DNA, 33 bp, Homo sapien
ttcccaacatagatggacaagctgactaaatta

SEQ ID NO: 266070 - DNA, 33 bp, Homo sapien
ttcccaacatagatgggcaagctgactaaatta

SEQ ID NO: 266071 - DNA, 33 bp, Homo sapien
tgttgacagggtatgagctatgcaaccttgtgt

SEQ ID NO: 266072 - DNA, 33 bp, Homo sapien
tgttgacagggtatgatctatgcaaccttgtgt

SEQ ID NO: 266073 - DNA, 33 bp, Homo sapien
tgaatttgtggcttaaaacaggctaaacagcta

SEQ ID NO: 266074 - DNA, 33 bp, Homo sapien
tgaatttgtggcttaatacaggctaaacagcta

SEQ ID NO: 266075 - DNA, 33 bp, Homo sapien
cttatatagaaaaatgccaaaattcagttaagc

SEQ ID NO: 266076 - DNA, 33 bp, Homo sapien
cttatatagaaaaatgtcaaaattcagttaagc

SEQ ID NO: 266077 - DNA, 33 bp, Homo sapien
gtatgacccacgttggaagtctgctctcaaggg

SEQ ID NO: 266078 - DNA, 33 bp, Homo sapien
gtatgacccacgttggcagtctgctctcaaggg

SEQ ID NO: 266079 - DNA, 33 bp, Homo sapien
tgagaaggtgaggtcacgtagaaattttgcatt

SEQ ID NO: 266080 - DNA, 33 bp, Homo sapien
tgagaaggtgaggtcatgtagaaattttgcatt

SEQ ID NO: 266081 - DNA, 33 bp, Homo sapien
cacattctatgtactaagcttggtgttacggag

SEQ ID NO: 266082 - DNA, 33 bp, Homo sapien
cacattctatgtactaggcttggtgttacggag

SEQ ID NO: 266083 - DNA, 33 bp, Homo sapien
ttggtgttacggagacacttgcacagacagtct

SEQ ID NO: 266084 - DNA, 33 bp, Homo sapien
ttggtgttacggagacgcttgcacagacagtct

SEQ ID NO: 266085 - DNA, 33 bp, Homo sapien
atcataatcatccacaaacatctactagagcta

SEQ ID NO: 266086 - DNA, 33 bp, Homo sapien
atcataatcatccacagacatctactagagcta

SEQ ID NO: 266087 - DNA, 33 bp, Homo sapien
caaatgattttgcccaactttaggctcctgcac

SEQ ID NO: 266088 - DNA, 33 bp, Homo sapien
caaatgattttgcccagctttaggctcctgcac

SEQ ID NO: 266089 - DNA, 33 bp, Homo sapien
aactctcaataaactaactactgatggagcata

SEQ ID NO: 266090 - DNA, 33 bp, Homo sapien
aactctcaataaactacctactgatggagcata

SEQ ID NO: 266091 - DNA, 33 bp, Homo sapien
atctctgactatagcaaaattaacctagaagtc

SEQ ID NO: 266092 - DNA, 33 bp, Homo sapien
atctctgactatagcagaattaacctagaagtc

SEQ ID NO: 266093 - DNA, 33 bp, Homo sapien
ttttgccaatgtttcaaattgtgtttatgccgt

SEQ ID NO: 266094 - DNA, 33 bp, Homo sapien
ttttgccaatgtttcatattgtgtttatgccgt

SEQ ID NO: 266095 - DNA, 33 bp, Homo sapien
aagatcctctagctagaaaagtgactatttgga

SEQ ID NO: 266096 - DNA, 33 bp, Homo sapien
aagatcctctagctagcaaagtgactatttgga

SEQ ID NO: 266097 - DNA, 33 bp, Homo sapien
gagacactgtcgtggacacatagcagaggacag

SEQ ID NO: 266098 - DNA, 33 bp, Homo sapien
gagacactgtcgtggatacatagcagaggacag

SEQ ID NO: 266099 - DNA, 33 bp, Homo sapien
attcacaaggactccactctattgatctaatta

SEQ ID NO: 266100 - DNA, 33 bp, Homo sapien
attcacaaggactccagtctattgatctaatta

SEQ ID NO: 266101 - DNA, 33 bp, Homo sapien
ctctgcactaacaaggaacttgatgagacacaa

SEQ ID NO: 266102 - DNA, 33 bp, Homo sapien
ctctgcactaacaagggacttgatgagacacaa

SEQ ID NO: 266103 - DNA, 33 bp, Homo sapien
tgtgtgtgatctgcagaaggaaaaaaatctctg

SEQ ID NO: 266104 - DNA, 33 bp, Homo sapien
tgtgtgtgatctgcaggaggaaaaaaatctctg

SEQ ID NO: 266105 - DNA, 33 bp, Homo sapien
cccagctgtaaaaagggataggctgttacattt

SEQ ID NO: 266106 - DNA, 33 bp, Homo sapien
cccagctgtaaaaaggtataggctgttacattt

SEQ ID NO: 266107 - DNA, 33 bp, Homo sapien
gctcggaaagtactaaagaattcttgcttctag

SEQ ID NO: 266108 - DNA, 33 bp, Homo sapien
gctcggaaagtactaaggaattcttgcttctag

SEQ ID NO: 266109 - DNA, 33 bp, Homo sapien
tatattccttgaagacagaggttggatggggat

SEQ ID NO: 266110 - DNA, 33 bp, Homo sapien
tatattccttgaagacggaggttggatggggat

SEQ ID NO: 266111 - DNA, 33 bp, Homo sapien
ttcttgcctaaaggagcagtgtatacctgaaaa

SEQ ID NO: 266112 - DNA, 33 bp, Homo sapien
ttcttgcctaaaggagtagtgtatacctgaaaa

SEQ ID NO: 266113 - DNA, 33 bp, Homo sapien
ataaatgctatgaagactcaaagacctgccatt

SEQ ID NO: 266114 - DNA, 33 bp, Homo sapien
ataaatgctatgaagattcaaagacctgccatt

SEQ ID NO: 266115 - DNA, 33 bp, Homo sapien
aaaaagctattttaaaagtcgtgtggaactaaa

SEQ ID NO: 266116 - DNA, 33 bp, Homo sapien
aaaaagctattttaaacgtcgtgtggaactaaa

SEQ ID NO: 266117 - DNA, 33 bp, Homo sapien
acaaggaaggttgatggcaataagcaatccttc

SEQ ID NO: 266118 - DNA, 33 bp, Homo sapien
acaaggaaggttgatgtcaataagcaatccttc

SEQ ID NO: 266119 - DNA, 33 bp, Homo sapien
aatataatctactgcactaagagcatttatgac

SEQ ID NO: 266120 - DNA, 33 bp, Homo sapien
aatataatctactgcattaagagcatttatgac

SEQ ID NO: 266121 - DNA, 33 bp, Homo sapien
tgagaggctatgaatacatagggataggaagta

SEQ ID NO: 266122 - DNA, 33 bp, Homo sapien
tgagaggctatgaatatatagggataggaagta

SEQ ID NO: 266123 - DNA, 33 bp, Homo sapien
attttgaacatgattagtaagagtacacagaag

SEQ ID NO: 266124 - DNA, 33 bp, Homo sapien
attttgaacatgattattaagagtacacagaag

SEQ ID NO: 266125 - DNA, 33 bp, Homo sapien
acagtgcactttccaaagcttggtaagtagcct

SEQ ID NO: 266126 - DNA, 33 bp, Homo sapien
acagtgcactttccaatgcttggtaagtagcct

SEQ ID NO: 266127 - DNA, 33 bp, Homo sapien
aaagggcaatcttagcagaattaaaatcctaaa

SEQ ID NO: 266128 - DNA, 33 bp, Homo sapien
aaagggcaatcttagcggaattaaaatcctaaa

SEQ ID NO: 266129 - DNA, 33 bp, Homo sapien
ctacacctttatctataagcaatttatggatgt

SEQ ID NO: 266130 - DNA, 33 bp, Homo sapien
ctacacctttatctattagcaatttatggatgt

SEQ ID NO: 266131 - DNA, 33 bp, Homo sapien
aatacttcttatccaaatgattaaatcaattta

SEQ ID NO: 266132 - DNA, 33 bp, Homo sapien
aatacttcttatccaactgattaaatcaattta

SEQ ID NO: 266133 - DNA, 33 bp, Homo sapien
ttcgccttggttgggaacacattaagtttaggt

SEQ ID NO: 266134 - DNA, 33 bp, Homo sapien
ttcgccttggttgggagcacattaagtttaggt

SEQ ID NO: 266135 - DNA, 33 bp, Homo sapien
cacattgaaccctgacacatatctcttagttgc

SEQ ID NO: 266136 - DNA, 33 bp, Homo sapien
cacattgaaccctgacgcatatctcttagttgc

SEQ ID NO: 266137 - DNA, 33 bp, Homo sapien
ctttggatctactggaacatgaggcctacgtag

SEQ ID NO: 266138 - DNA, 33 bp, Homo sapien
ctttggatctactggatcatgaggcctacgtag

SEQ ID NO: 266139 - DNA, 33 bp, Homo sapien
acccaaaataataagcacctacaccaagttctt

SEQ ID NO: 266140 - DNA, 33 bp, Homo sapien
acccaaaataataagcgcctacaccaagttctt

SEQ ID NO: 266141 - DNA, 33 bp, Homo sapien
tatgttttactttttgcaggctaatgcccagaa

SEQ ID NO: 266142 - DNA, 33 bp, Homo sapien
tatgttttactttttgtaggctaatgcccagaa

SEQ ID NO: 266143 - DNA, 33 bp, Homo sapien
ttctactctctggaaacgctaccctaacctttc

SEQ ID NO: 266144 - DNA, 33 bp, Homo sapien
ttctactctctggaaatgctaccctaacctttc

SEQ ID NO: 266145 - DNA, 33 bp, Homo sapien
ggccccatacatttgacattagcgttaaataat

SEQ ID NO: 266146 - DNA, 33 bp, Homo sapien
ggccccatacatttgatattagcgttaaataat

SEQ ID NO: 266147 - DNA, 33 bp, Homo sapien
ttgtttaatggctataacttctgtttgagatga

SEQ ID NO: 266148 - DNA, 33 bp, Homo sapien
ttgtttaatggctatagcttctgtttgagatga

SEQ ID NO: 266149 - DNA, 33 bp, Homo sapien
ctattgcttttagagaaaaaacatttagacagc

SEQ ID NO: 266150 - DNA, 33 bp, Homo sapien
ctattgcttttagagagaaaacatttagacagc

SEQ ID NO: 266151 - DNA, 33 bp, Homo sapien
tgttcatgtccttccaaaattcatctgttagac

SEQ ID NO: 266152 - DNA, 33 bp, Homo sapien
tgttcatgtccttccagaattcatctgttagac

SEQ ID NO: 266153 - DNA, 33 bp, Homo sapien
ttcctcatatcatacaaaacaattaattcaaaa

SEQ ID NO: 266154 - DNA, 33 bp, Homo sapien
ttcctcatatcatacagaacaattaattcaaaa

SEQ ID NO: 266155 - DNA, 33 bp, Homo sapien
tactcatataatgaaaacagctttacttctttt

SEQ ID NO: 266156 - DNA, 33 bp, Homo sapien
tactcatataatgaaagcagctttacttctttt

SEQ ID NO: 266157 - DNA, 33 bp, Homo sapien
aatgatggcaggcaaactagataacagattttt

SEQ ID NO: 266158 - DNA, 33 bp, Homo sapien
aatgatggcaggcaaagtagataacagattttt

SEQ ID NO: 266159 - DNA, 33 bp, Homo sapien
acagaatgtgaagagaagaattgaggcttacag

SEQ ID NO: 266160 - DNA, 33 bp, Homo sapien
acagaatgtgaagagaggaattgaggcttacag

SEQ ID NO: 266161 - DNA, 33 bp, Homo sapien
gatatcatattttccaactctacattttctatt

SEQ ID NO: 266162 - DNA, 33 bp, Homo sapien
gatatcatattttccatctctacattttctatt

SEQ ID NO: 266163 - DNA, 33 bp, Homo sapien
gagttgaggaagaagacggaatatgcattaaag

SEQ ID NO: 266164 - DNA, 33 bp, Homo sapien
gagttgaggaagaagatggaatatgcattaaag

SEQ ID NO: 266165 - DNA, 33 bp, Homo sapien
ataatgtaacctacttaaaaaagtgacagccaa

SEQ ID NO: 266166 - DNA, 33 bp, Homo sapien
ataatgtaacctactttaaaaagtgacagccaa

SEQ ID NO: 266167 - DNA, 33 bp, Homo sapien
agaaaggctaattatacctaaaacaagcaaaag

SEQ ID NO: 266168 - DNA, 33 bp, Homo sapien
agaaaggctaattatatctaaaacaagcaaaag

SEQ ID NO: 266169 - DNA, 33 bp, Homo sapien
gtctttctttcttagcaatgagcaagccttaac

SEQ ID NO: 266170 - DNA, 33 bp, Homo sapien
gtctttctttcttagccatgagcaagccttaac

SEQ ID NO: 266171 - DNA, 33 bp, Homo sapien
tcaaaaagctgatgacagacttaagtttgttta

SEQ ID NO: 266172 - DNA, 33 bp, Homo sapien
tcaaaaagctgatgactgacttaagtttgttta

SEQ ID NO: 266173 - DNA, 33 bp, Homo sapien
gttcagtttctcctgacgtgcttgttttttggt

SEQ ID NO: 266174 - DNA, 33 bp, Homo sapien
gttcagtttctcctgatgtgcttgttttttggt

SEQ ID NO: 266175 - DNA, 33 bp, Homo sapien
tgcatatcaatccacaccctttgtgcccttatt

SEQ ID NO: 266176 - DNA, 33 bp, Homo sapien
tgcatatcaatccacatcctttgtgcccttatt

SEQ ID NO: 266177 - DNA, 33 bp, Homo sapien
cgagtgctagtttgaaaaaacagatcaagcact

SEQ ID NO: 266178 - DNA, 33 bp, Homo sapien
cgagtgctagtttgaagaaacagatcaagcact

SEQ ID NO: 266179 - DNA, 33 bp, Homo sapien
taggtcaaggaaaaagacactaaggatttgtag

SEQ ID NO: 266180 - DNA, 33 bp, Homo sapien
taggtcaaggaaaaagtcactaaggatttgtag

SEQ ID NO: 266181 - DNA, 33 bp, Homo sapien
atgtattcatctcagagaatgttgtctaaacta

SEQ ID NO: 266182 - DNA, 33 bp, Homo sapien
atgtattcatctcagataatgttgtctaaacta

SEQ ID NO: 266183 - DNA, 33 bp, Homo sapien
gtgcccagcctcaactcacctcttcaacttttt

SEQ ID NO: 266184 - DNA, 33 bp, Homo sapien
gtgcccagcctcaactgacctcttcaacttttt

SEQ ID NO: 266185 - DNA, 33 bp, Homo sapien
attggggctgcagcagactcggggaattcatag

SEQ ID NO: 266186 - DNA, 33 bp, Homo sapien
attggggctgcagcagtctcggggaattcatag

SEQ ID NO: 266187 - DNA, 33 bp, Homo sapien
tatctactctgtattacgcagtgtgctaaagcc

SEQ ID NO: 266188 - DNA, 33 bp, Homo sapien
tatctactctgtattatgcagtgtgctaaagcc

SEQ ID NO: 266189 - DNA, 33 bp, Homo sapien
aattaagaggtttatgaaagtctagtgataggg

SEQ ID NO: 266190 - DNA, 33 bp, Homo sapien
aattaagaggtttatggaagtctagtgataggg

SEQ ID NO: 266191 - DNA, 33 bp, Homo sapien
gtgaatgcagtctttgaaaaaataatagaaaaa

SEQ ID NO: 266192 - DNA, 33 bp, Homo sapien
gtgaatgcagtctttggaaaaataatagaaaaa

SEQ ID NO: 266193 - DNA, 33 bp, Homo sapien
tattgatttaaaaaaactacataaacaattgaa

SEQ ID NO: 266194 - DNA, 33 bp, Homo sapien
tattgatttaaaaaaagtacataaacaattgaa

SEQ ID NO: 266195 - DNA, 33 bp, Homo sapien
cccctggcttctaaaaactaggtgccattagca

SEQ ID NO: 266196 - DNA, 33 bp, Homo sapien
cccctggcttctaaaagctaggtgccattagca

SEQ ID NO: 266197 - DNA, 33 bp, Homo sapien
gacggtccgcaacaacaaagagatctccagtcc

SEQ ID NO: 266198 - DNA, 33 bp, Homo sapien
gacggtccgcaacaacgaagagatctccagtcc

SEQ ID NO: 266199 - DNA, 33 bp, Homo sapien
ctcttcacctgaaacaacaaagaacacgtcaca

SEQ ID NO: 266200 - DNA, 33 bp, Homo sapien
ctcttcacctgaaacagcaaagaacacgtcaca

SEQ ID NO: 266201 - DNA, 33 bp, Homo sapien
aactacacattgccaacattatatgggtttaca

SEQ ID NO: 266202 - DNA, 33 bp, Homo sapien
aactacacattgccaagattatatgggtttaca

SEQ ID NO: 266203 - DNA, 33 bp, Homo sapien
ctgtctttaagatacacctcagtctgttttttt

SEQ ID NO: 266204 - DNA, 33 bp, Homo sapien
ctgtctttaagatacatctcagtctgttttttt

SEQ ID NO: 266205 - DNA, 33 bp, Homo sapien
actaaacttaagagagaaattgtttaatggctg

SEQ ID NO: 266206 - DNA, 33 bp, Homo sapien
actaaacttaagagagcaattgtttaatggctg

SEQ ID NO: 266207 - DNA, 33 bp, Homo sapien
agtcaataacatgaagccaacctacactagagt

SEQ ID NO: 266208 - DNA, 33 bp, Homo sapien
agtcaataacatgaagtcaacctacactagagt

SEQ ID NO: 266209 - DNA, 33 bp, Homo sapien
atgtgagcgttagatacgaagctgccaaatgtt

SEQ ID NO: 266210 - DNA, 33 bp, Homo sapien
atgtgagcgttagatatgaagctgccaaatgtt

SEQ ID NO: 266211 - DNA, 33 bp, Homo sapien
ggcatgactactaaacccaggtggtctagaaat

SEQ ID NO: 266212 - DNA, 33 bp, Homo sapien
ggcatgactactaaactcaggtggtctagaaat

SEQ ID NO: 266213 - DNA, 33 bp, Homo sapien
aatctgtgataatttaaaaatgtgttcaattga

SEQ ID NO: 266214 - DNA, 33 bp, Homo sapien
aatctgtgataatttagaaatgtgttcaattga

SEQ ID NO: 266215 - DNA, 33 bp, Homo sapien
ttgtcactttttatctcaactttctctttactg

SEQ ID NO: 266216 - DNA, 33 bp, Homo sapien
ttgtcactttttatctgaactttctctttactg

SEQ ID NO: 266217 - DNA, 33 bp, Homo sapien
gaaaaataattagaccagcaatgagaaaatacg

SEQ ID NO: 266218 - DNA, 33 bp, Homo sapien
gaaaaataattagacccgcaatgagaaaatacg

SEQ ID NO: 266219 - DNA, 33 bp, Homo sapien
ctacttcacaccttggaaacatcgtgaacatca

SEQ ID NO: 266220 - DNA, 33 bp, Homo sapien
ctacttcacaccttgggaacatcgtgaacatca

SEQ ID NO: 266221 - DNA, 33 bp, Homo sapien
gtggaggacaacacaaagatatttctggcagaa

SEQ ID NO: 266222 - DNA, 33 bp, Homo sapien
gtggaggacaacacaaggatatttctggcagaa

SEQ ID NO: 266223 - DNA, 33 bp, Homo sapien
catttatagtcagaaactatctttataccatat

SEQ ID NO: 266224 - DNA, 33 bp, Homo sapien
catttatagtcagaaagtatctttataccatat

SEQ ID NO: 266225 - DNA, 33 bp, Homo sapien
ttccagtcttgctgtgcactaaatttagagaaa

SEQ ID NO: 266226 - DNA, 33 bp, Homo sapien
ttccagtcttgctgtgtactaaatttagagaaa

SEQ ID NO: 266227 - DNA, 33 bp, Homo sapien
ctgggattgcttctaacgtacgatatcaggtct

SEQ ID NO: 266228 - DNA, 33 bp, Homo sapien
ctgggattgcttctaatgtacgatatcaggtct

SEQ ID NO: 266229 - DNA, 33 bp, Homo sapien
tcagcatacttcaaacaattcctttaaactatg

SEQ ID NO: 266230 - DNA, 33 bp, Homo sapien
tcagcatacttcaaaccattcctttaaactatg

SEQ ID NO: 266231 - DNA, 33 bp, Homo sapien
ggctaggctagctagaaacaaaagagaaactta

SEQ ID NO: 266232 - DNA, 33 bp, Homo sapien
ggctaggctagctagagacaaaagagaaactta

SEQ ID NO: 266233 - DNA, 33 bp, Homo sapien
agaaggagacatgcagcagtagagagacaataa

SEQ ID NO: 266234 - DNA, 33 bp, Homo sapien
agaaggagacatgcaggagtagagagacaataa

SEQ ID NO: 266235 - DNA, 33 bp, Homo sapien
ttactgcatcatatagaagttgtattttcagtt

SEQ ID NO: 266236 - DNA, 33 bp, Homo sapien
ttactgcatcatatagtagttgtattttcagtt

SEQ ID NO: 266237 - DNA, 33 bp, Homo sapien
tcctcgttatgcaggacatatcctgtgtattga

SEQ ID NO: 266238 - DNA, 33 bp, Homo sapien
tcctcgttatgcaggagatatcctgtgtattga

SEQ ID NO: 266239 - DNA, 33 bp, Homo sapien
gttcttgctgcaaaaggataaagttacttaact

SEQ ID NO: 266240 - DNA, 33 bp, Homo sapien
gttcttgctgcaaaagtataaagttacttaact

SEQ ID NO: 266241 - DNA, 33 bp, Homo sapien
ctttactacatagtcaactgtgaattctttctt

SEQ ID NO: 266242 - DNA, 33 bp, Homo sapien
ctttactacatagtcatctgtgaattctttctt

SEQ ID NO: 266243 - DNA, 33 bp, Homo sapien
tatctgattcatagcaagtattcagtgaaggtt

SEQ ID NO: 266244 - DNA, 33 bp, Homo sapien
tatctgattcatagcaggtattcagtgaaggtt

SEQ ID NO: 266245 - DNA, 33 bp, Homo sapien
caactgttcacctacaaagatttctggggcctg

SEQ ID NO: 266246 - DNA, 33 bp, Homo sapien
caactgttcacctacagagatttctggggcctg

SEQ ID NO: 266247 - DNA, 33 bp, Homo sapien
cttatccctatcctgaataagtgtggaagttat

SEQ ID NO: 266248 - DNA, 33 bp, Homo sapien
cttatccctatcctgagtaagtgtggaagttat

SEQ ID NO: 266249 - DNA, 33 bp, Homo sapien
atgtaaaattctaatcagactgcatccagcttt

SEQ ID NO: 266250 - DNA, 33 bp, Homo sapien
atgtaaaattctaatcggactgcatccagcttt

SEQ ID NO: 266251 - DNA, 33 bp, Homo sapien
aattctaagttcccacaattcaagcttcacttg

SEQ ID NO: 266252 - DNA, 33 bp, Homo sapien
aattctaagttcccacgattcaagcttcacttg

SEQ ID NO: 266253 - DNA, 33 bp, Homo sapien
ctcttcggcttccagacgaacacagccctgact

SEQ ID NO: 266254 - DNA, 33 bp, Homo sapien
ctcttcggcttccagatgaacacagccctgact

SEQ ID NO: 266255 - DNA, 33 bp, Homo sapien
gttgagacagtactaactgattttctttaaact

SEQ ID NO: 266256 - DNA, 33 bp, Homo sapien
gttgagacagtactaagtgattttctttaaact

SEQ ID NO: 266257 - DNA, 33 bp, Homo sapien
ggcaggattcctgaaaacctaaagctagaccag

SEQ ID NO: 266258 - DNA, 33 bp, Homo sapien
ggcaggattcctgaaagcctaaagctagaccag

SEQ ID NO: 266259 - DNA, 33 bp, Homo sapien
accactcagttggaccaaggagtttaactttct

SEQ ID NO: 266260 - DNA, 33 bp, Homo sapien
accactcagttggaccgaggagtttaactttct

SEQ ID NO: 266261 - DNA, 33 bp, Homo sapien
ttagaacttgttgtaccgaactccaaccctctg

SEQ ID NO: 266262 - DNA, 33 bp, Homo sapien
ttagaacttgttgtactgaactccaaccctctg

SEQ ID NO: 266263 - DNA, 33 bp, Homo sapien
gagccaaacaaagaaacagaaaggccccaggtt

SEQ ID NO: 266264 - DNA, 33 bp, Homo sapien
gagccaaacaaagaaagagaaaggccccaggtt

SEQ ID NO: 266265 - DNA, 33 bp, Homo sapien
gcacatattccaaaccacctcctctatctggct

SEQ ID NO: 266266 - DNA, 33 bp, Homo sapien
gcacatattccaaaccgcctcctctatctggct

SEQ ID NO: 266267 - DNA, 33 bp, Homo sapien
tgagactctccagcaaaccaacattccttcctc

SEQ ID NO: 266268 - DNA, 33 bp, Homo sapien
tgagactctccagcaatccaacattccttcctc

SEQ ID NO: 266269 - DNA, 33 bp, Homo sapien
ctgtgaacacgtatctcaaaacacataggtgca

SEQ ID NO: 266270 - DNA, 33 bp, Homo sapien
ctgtgaacacgtatcttaaaacacataggtgca

SEQ ID NO: 266271 - DNA, 33 bp, Homo sapien
tttctcactatttaccaagccagtgagaccatg

SEQ ID NO: 266272 - DNA, 33 bp, Homo sapien
tttctcactatttacccagccagtgagaccatg

SEQ ID NO: 266273 - DNA, 33 bp, Homo sapien
aaggaaaggaatttgaactgcttgctgtaaata

SEQ ID NO: 266274 - DNA, 33 bp, Homo sapien
aaggaaaggaatttgatctgcttgctgtaaata

SEQ ID NO: 266275 - DNA, 33 bp, Homo sapien
aatataataacagcaaacctatgacatattaaa

SEQ ID NO: 266276 - DNA, 33 bp, Homo sapien
aatataataacagcaatcctatgacatattaaa

SEQ ID NO: 266277 - DNA, 33 bp, Homo sapien
ggttaggatacactgaagccctttcgcacagcc

SEQ ID NO: 266278 - DNA, 33 bp, Homo sapien
ggttaggatacactgaggccctttcgcacagcc

SEQ ID NO: 266279 - DNA, 33 bp, Homo sapien
gagacctactggcataccaataaagtgtaaagg

SEQ ID NO: 266280 - DNA, 33 bp, Homo sapien
gagacctactggcatatcaataaagtgtaaagg

SEQ ID NO: 266281 - DNA, 33 bp, Homo sapien
ggacaaaggaagccaaccataggtgtaatgatt

SEQ ID NO: 266282 - DNA, 33 bp, Homo sapien
ggacaaaggaagccaatcataggtgtaatgatt

SEQ ID NO: 266283 - DNA, 33 bp, Homo sapien
gttttactgataatgacaaagtagttggaacac

SEQ ID NO: 266284 - DNA, 33 bp, Homo sapien
gttttactgataatgataaagtagttggaacac

SEQ ID NO: 266285 - DNA, 33 bp, Homo sapien
ggaatggctcaatagcaaagtctgaaccagaat

SEQ ID NO: 266286 - DNA, 33 bp, Homo sapien
ggaatggctcaatagcgaagtctgaaccagaat

SEQ ID NO: 266287 - DNA, 33 bp, Homo sapien
tagccataaatgttgacagtaggaaaattactg

SEQ ID NO: 266288 - DNA, 33 bp, Homo sapien
tagccataaatgttgagagtaggaaaattactg

SEQ ID NO: 266289 - DNA, 33 bp, Homo sapien
aattctcagccactcacatcacagtgttaaaat

SEQ ID NO: 266290 - DNA, 33 bp, Homo sapien
aattctcagccactcatatcacagtgttaaaat

SEQ ID NO: 266291 - DNA, 33 bp, Homo sapien
gcaggctattctagctcaattctaatttgctta

SEQ ID NO: 266292 - DNA, 33 bp, Homo sapien
gcaggctattctagcttaattctaatttgctta

SEQ ID NO: 266293 - DNA, 33 bp, Homo sapien
caagaattagagatgaaaaaacttacactacac

SEQ ID NO: 266294 - DNA, 33 bp, Homo sapien
caagaattagagatgagaaaacttacactacac

SEQ ID NO: 266295 - DNA, 33 bp, Homo sapien
tctgtccctggccatgacaatattagtatgtag

SEQ ID NO: 266296 - DNA, 33 bp, Homo sapien
tctgtccctggccatgtcaatattagtatgtag

SEQ ID NO: 266297 - DNA, 33 bp, Homo sapien
acaagttttacaatgaatacgttgcttataact

SEQ ID NO: 266298 - DNA, 33 bp, Homo sapien
acaagttttacaatgagtacgttgcttataact

SEQ ID NO: 266299 - DNA, 33 bp, Homo sapien
tcctacaagttatacaatcttaaaactcttcac

SEQ ID NO: 266300 - DNA, 33 bp, Homo sapien
tcctacaagttatacagtcttaaaactcttcac

SEQ ID NO: 266301 - DNA, 33 bp, Homo sapien
taatccaaatgtagctgaaagcatatatagcaa

SEQ ID NO: 266302 - DNA, 33 bp, Homo sapien
taatccaaatgtagcttaaagcatatatagcaa

SEQ ID NO: 266303 - DNA, 33 bp, Homo sapien
aaacacaacgaaacaaagaaacacttatctggg

SEQ ID NO: 266304 - DNA, 33 bp, Homo sapien
aaacacaacgaaacaaggaaacacttatctggg

SEQ ID NO: 266305 - DNA, 33 bp, Homo sapien
aatgaaacgatagtacactgcagatgatgatac

SEQ ID NO: 266306 - DNA, 33 bp, Homo sapien
aatgaaacgatagtacgctgcagatgatgatac

SEQ ID NO: 266307 - DNA, 33 bp, Homo sapien
tcacttgggcaggtcacatactgaaattggagt

SEQ ID NO: 266308 - DNA, 33 bp, Homo sapien
tcacttgggcaggtcatatactgaaattggagt

SEQ ID NO: 266309 - DNA, 33 bp, Homo sapien
aaaggactgtgtcttaccctggagctgatgctg

SEQ ID NO: 266310 - DNA, 33 bp, Homo sapien
aaaggactgtgtcttatcctggagctgatgctg

SEQ ID NO: 266311 - DNA, 33 bp, Homo sapien
atgatatagcagtgtaagtgaaaagaaatgtag

SEQ ID NO: 266312 - DNA, 33 bp, Homo sapien
atgatatagcagtgtacgtgaaaagaaatgtag

SEQ ID NO: 266313 - DNA, 33 bp, Homo sapien
ggcatatagttgtttaaagcagcctctcatcat

SEQ ID NO: 266314 - DNA, 33 bp, Homo sapien
ggcatatagttgtttatagcagcctctcatcat

SEQ ID NO: 266315 - DNA, 33 bp, Homo sapien
gcttcagattttacaccaagatccttaatccat

SEQ ID NO: 266316 - DNA, 33 bp, Homo sapien
gcttcagattttacactaagatccttaatccat

SEQ ID NO: 266317 - DNA, 33 bp, Homo sapien
cagcccaatgctctgacgtgtttctcctatgtt

SEQ ID NO: 266318 - DNA, 33 bp, Homo sapien
cagcccaatgctctgatgtgtttctcctatgtt

SEQ ID NO: 266319 - DNA, 33 bp, Homo sapien
agtaccagattgagaccgcactaataagctttg

SEQ ID NO: 266320 - DNA, 33 bp, Homo sapien
agtaccagattgagactgcactaataagctttg

SEQ ID NO: 266321 - DNA, 33 bp, Homo sapien
tcttggttactctttaaacacaaaccatcttaa

SEQ ID NO: 266322 - DNA, 33 bp, Homo sapien
tcttggttactctttacacacaaaccatcttaa

SEQ ID NO: 266323 - DNA, 33 bp, Homo sapien
tttttctaatcacataagtgctgtagtacatat

SEQ ID NO: 266324 - DNA, 33 bp, Homo sapien
tttttctaatcacatacgtgctgtagtacatat

SEQ ID NO: 266325 - DNA, 33 bp, Homo sapien
caaaggtggtcacagaactatactgcaagtacc

SEQ ID NO: 266326 - DNA, 33 bp, Homo sapien
caaaggtggtcacagatctatactgcaagtacc

SEQ ID NO: 266327 - DNA, 33 bp, Homo sapien
gcctctgtgatagttacggaagccttttaaaag

SEQ ID NO: 266328 - DNA, 33 bp, Homo sapien
gcctctgtgatagttatggaagccttttaaaag

SEQ ID NO: 266329 - DNA, 33 bp, Homo sapien
aacctcagtcaaagccaacctcaattacaagcc

SEQ ID NO: 266330 - DNA, 33 bp, Homo sapien
aacctcagtcaaagccgacctcaattacaagcc

SEQ ID NO: 266331 - DNA, 33 bp, Homo sapien
accctttgacttgacacattctagtcacctggc

SEQ ID NO: 266332 - DNA, 33 bp, Homo sapien
accctttgacttgacagattctagtcacctggc

SEQ ID NO: 266333 - DNA, 33 bp, Homo sapien
gactcaaactgtgaccaatggtttaccttgtga

SEQ ID NO: 266334 - DNA, 33 bp, Homo sapien
gactcaaactgtgaccgatggtttaccttgtga

SEQ ID NO: 266335 - DNA, 33 bp, Homo sapien
caatactggtgataaacttgaattgatctaatc

SEQ ID NO: 266336 - DNA, 33 bp, Homo sapien
caatactggtgataaatttgaattgatctaatc

SEQ ID NO: 266337 - DNA, 33 bp, Homo sapien
atttcagctttaaataaatttgtgccatggtca

SEQ ID NO: 266338 - DNA, 33 bp, Homo sapien
atttcagctttaaatacatttgtgccatggtca

SEQ ID NO: 266339 - DNA, 33 bp, Homo sapien
tgcaacattttgatcacgaggctgtggacatca

SEQ ID NO: 266340 - DNA, 33 bp, Homo sapien
tgcaacattttgatcatgaggctgtggacatca

SEQ ID NO: 266341 - DNA, 33 bp, Homo sapien
ttaacgaatgcttacactgccatagttataaaa

SEQ ID NO: 266342 - DNA, 33 bp, Homo sapien
ttaacgaatgcttacattgccatagttataaaa

SEQ ID NO: 266343 - DNA, 33 bp, Homo sapien
gaccctttatggaacaaattttcagtccttagc

SEQ ID NO: 266344 - DNA, 33 bp, Homo sapien
gaccctttatggaacagattttcagtccttagc

SEQ ID NO: 266345 - DNA, 33 bp, Homo sapien
ctttgagataagtacaagttttgaagcaaagag

SEQ ID NO: 266346 - DNA, 33 bp, Homo sapien
ctttgagataagtacacgttttgaagcaaagag

SEQ ID NO: 266347 - DNA, 33 bp, Homo sapien
ttctgcttagaaaagaaaatgaagatacttctg

SEQ ID NO: 266348 - DNA, 33 bp, Homo sapien
ttctgcttagaaaagagaatgaagatacttctg

SEQ ID NO: 266349 - DNA, 33 bp, Homo sapien
aagaattctgaataacagaggcagaagtatctt

SEQ ID NO: 266350 - DNA, 33 bp, Homo sapien
aagaattctgaataacggaggcagaagtatctt

SEQ ID NO: 266351 - DNA, 33 bp, Homo sapien
agtggtgattgctgtaaataatgccacggcttt

SEQ ID NO: 266352 - DNA, 33 bp, Homo sapien
agtggtgattgctgtagataatgccacggcttt

SEQ ID NO: 266353 - DNA, 33 bp, Homo sapien
attttcattcaacctaaggaaggatcttaagaa

SEQ ID NO: 266354 - DNA, 33 bp, Homo sapien
attttcattcaacctagggaaggatcttaagaa

SEQ ID NO: 266355 - DNA, 33 bp, Homo sapien
cagtaatagctccttaaacactcagtatctttc

SEQ ID NO: 266356 - DNA, 33 bp, Homo sapien
cagtaatagctccttagacactcagtatctttc

SEQ ID NO: 266357 - DNA, 33 bp, Homo sapien
gagagcattattggaaaaatgaaaaatacatct

SEQ ID NO: 266358 - DNA, 33 bp, Homo sapien
gagagcattattggaagaatgaaaaatacatct

SEQ ID NO: 266359 - DNA, 33 bp, Homo sapien
tccctagcagcttggacatttcttcaccacacc

SEQ ID NO: 266360 - DNA, 33 bp, Homo sapien
tccctagcagcttggatatttcttcaccacacc

SEQ ID NO: 266361 - DNA, 33 bp, Homo sapien
gggaaaccatgggtaaacctttcattgtggtgt

SEQ ID NO: 266362 - DNA, 33 bp, Homo sapien
gggaaaccatgggtaaccctttcattgtggtgt

SEQ ID NO: 266363 - DNA, 33 bp, Homo sapien
gctgcctgtacttataacacataatcttgcaat

SEQ ID NO: 266364 - DNA, 33 bp, Homo sapien
gctgcctgtacttatatcacataatcttgcaat

SEQ ID NO: 266365 - DNA, 33 bp, Homo sapien
tctctgctttagtcacaaatcaatattccagtg

SEQ ID NO: 266366 - DNA, 33 bp, Homo sapien
tctctgctttagtcacgaatcaatattccagtg

SEQ ID NO: 266367 - DNA, 33 bp, Homo sapien
tctaaagcctaattcccaaagaactggcattaa

SEQ ID NO: 266368 - DNA, 33 bp, Homo sapien
tctaaagcctaattcctaaagaactggcattaa

SEQ ID NO: 266369 - DNA, 33 bp, Homo sapien
tacgtaactttacttagcgctcatgcagtacca

SEQ ID NO: 266370 - DNA, 33 bp, Homo sapien
tacgtaactttacttatcgctcatgcagtacca

SEQ ID NO: 266371 - DNA, 33 bp, Homo sapien
gctaagaaattgcccacgttgtgtattgactgc

SEQ ID NO: 266372 - DNA, 33 bp, Homo sapien
gctaagaaattgcccatgttgtgtattgactgc

SEQ ID NO: 266373 - DNA, 33 bp, Homo sapien
gctgtatggagaaagacaggatcagagttcacg

SEQ ID NO: 266374 - DNA, 33 bp, Homo sapien
gctgtatggagaaagataggatcagagttcacg

SEQ ID NO: 266375 - DNA, 33 bp, Homo sapien
tccccctaaattcatacagtcatgagtcactga

SEQ ID NO: 266376 - DNA, 33 bp, Homo sapien
tccccctaaattcatatagtcatgagtcactga

SEQ ID NO: 266377 - DNA, 33 bp, Homo sapien
aacgtgttactctaccaaatactatatgcaagt

SEQ ID NO: 266378 - DNA, 33 bp, Homo sapien
aacgtgttactctaccgaatactatatgcaagt

SEQ ID NO: 266379 - DNA, 33 bp, Homo sapien
cctccccagccttttggaagtgagtgaaagagg

SEQ ID NO: 266380 - DNA, 33 bp, Homo sapien
cctccccagccttttgtaagtgagtgaaagagg

SEQ ID NO: 266381 - DNA, 33 bp, Homo sapien
ctgcgttcagaacctggaaggcgttctccccag

SEQ ID NO: 266382 - DNA, 33 bp, Homo sapien
ctgcgttcagaacctgtaaggcgttctccccag

SEQ ID NO: 266383 - DNA, 33 bp, Homo sapien
tgagaatatgtgctaaatacccttaggttccac

SEQ ID NO: 266384 - DNA, 33 bp, Homo sapien
tgagaatatgtgctaactacccttaggttccac

SEQ ID NO: 266385 - DNA, 33 bp, Homo sapien
ctcactggatactaataataagaaaagtgatat

SEQ ID NO: 266386 - DNA, 33 bp, Homo sapien
ctcactggatactaatgataagaaaagtgatat

SEQ ID NO: 266387 - DNA, 33 bp, Homo sapien
ggtgtttcattgtgataaaatttacatcatact

SEQ ID NO: 266388 - DNA, 33 bp, Homo sapien
ggtgtttcattgtgattaaatttacatcatact

SEQ ID NO: 266389 - DNA, 33 bp, Homo sapien
aatgtagaatgttcgtaaattgggtgtttctgg

SEQ ID NO: 266390 - DNA, 33 bp, Homo sapien
aatgtagaatgttcgtcaattgggtgtttctgg

SEQ ID NO: 266391 - DNA, 33 bp, Homo sapien
aaccagggaggactcccctcgcaccaggatctc

SEQ ID NO: 266392 - DNA, 33 bp, Homo sapien
aaccagggaggactcctctcgcaccaggatctc

SEQ ID NO: 266393 - DNA, 33 bp, Homo sapien
caggagaaactgcagaaccctcttcatcccaaa

SEQ ID NO: 266394 - DNA, 33 bp, Homo sapien
caggagaaactgcagagccctcttcatcccaaa

SEQ ID NO: 266395 - DNA, 33 bp, Homo sapien
ttcctgctttgcagtgcatttactcactttatc

SEQ ID NO: 266396 - DNA, 33 bp, Homo sapien
ttcctgctttgcagtgtatttactcactttatc

SEQ ID NO: 266397 - DNA, 33 bp, Homo sapien
atggcacagaaattaaaaaactgaggtgcagtc

SEQ ID NO: 266398 - DNA, 33 bp, Homo sapien
atggcacagaaattaacaaactgaggtgcagtc

SEQ ID NO: 266399 - DNA, 33 bp, Homo sapien
tctatattagccgctcaaagttttctcacaatt

SEQ ID NO: 266400 - DNA, 33 bp, Homo sapien
tctatattagccgctcgaagttttctcacaatt

SEQ ID NO: 266401 - DNA, 33 bp, Homo sapien
aagagctatagctcacaagtcaaaaaagagata

SEQ ID NO: 266402 - DNA, 33 bp, Homo sapien
aagagctatagctcacgagtcaaaaaagagata

SEQ ID NO: 266403 - DNA, 33 bp, Homo sapien
ataataacaaaaacataacagttctaaatgttt

SEQ ID NO: 266404 - DNA, 33 bp, Homo sapien
ataataacaaaaacatgacagttctaaatgttt

SEQ ID NO: 266405 - DNA, 33 bp, Homo sapien
acctcacatcatcacaagaagggagattacagc

SEQ ID NO: 266406 - DNA, 33 bp, Homo sapien
acctcacatcatcacaggaagggagattacagc

SEQ ID NO: 266407 - DNA, 33 bp, Homo sapien
gctcaagagagatcaaagtacttactctcatga

SEQ ID NO: 266408 - DNA, 33 bp, Homo sapien
gctcaagagagatcaacgtacttactctcatga

SEQ ID NO: 266409 - DNA, 33 bp, Homo sapien
gtctgaattagtggtaaggttcagagaagagaa

SEQ ID NO: 266410 - DNA, 33 bp, Homo sapien
gtctgaattagtggtacggttcagagaagagaa

SEQ ID NO: 266411 - DNA, 33 bp, Homo sapien
gctgctcctcattctcacaaactctgtggatag

SEQ ID NO: 266412 - DNA, 33 bp, Homo sapien
gctgctcctcattctcgcaaactctgtggatag

SEQ ID NO: 266413 - DNA, 33 bp, Homo sapien
tctctctttacttccaactgagaaggacgatct

SEQ ID NO: 266414 - DNA, 33 bp, Homo sapien
tctctctttacttccagctgagaaggacgatct

SEQ ID NO: 266415 - DNA, 33 bp, Homo sapien
tgattagctttgatggaaatttagggaagggaa

SEQ ID NO: 266416 - DNA, 33 bp, Homo sapien
tgattagctttgatggtaatttagggaagggaa

SEQ ID NO: 266417 - DNA, 33 bp, Homo sapien
aacaaatttgccagaagattagaaattatggtt

SEQ ID NO: 266418 - DNA, 33 bp, Homo sapien
aacaaatttgccagaatattagaaattatggtt

SEQ ID NO: 266419 - DNA, 33 bp, Homo sapien
tattgtttataatctaaccagtctgtgatattc

SEQ ID NO: 266420 - DNA, 33 bp, Homo sapien
tattgtttataatctatccagtctgtgatattc

SEQ ID NO: 266421 - DNA, 33 bp, Homo sapien
tgtcaatatgatgtggcagtcgaaaaggtgaaa

SEQ ID NO: 266422 - DNA, 33 bp, Homo sapien
tgtcaatatgatgtgggagtcgaaaaggtgaaa

SEQ ID NO: 266423 - DNA, 33 bp, Homo sapien
gattctctgccttagacgagtgttcaggagagc

SEQ ID NO: 266424 - DNA, 33 bp, Homo sapien
gattctctgccttagatgagtgttcaggagagc

SEQ ID NO: 266425 - DNA, 33 bp, Homo sapien
ggaatgactttgttgaagacttattattaacta

SEQ ID NO: 266426 - DNA, 33 bp, Homo sapien
ggaatgactttgttgatgacttattattaacta

SEQ ID NO: 266427 - DNA, 33 bp, Homo sapien
ttatgcaggttacagacgtatttgaaactcaat

SEQ ID NO: 266428 - DNA, 33 bp, Homo sapien
ttatgcaggttacagatgtatttgaaactcaat

SEQ ID NO: 266429 - DNA, 33 bp, Homo sapien
atttggtactagccacaatttcaggaatccact

SEQ ID NO: 266430 - DNA, 33 bp, Homo sapien
atttggtactagccacgatttcaggaatccact

SEQ ID NO: 266431 - DNA, 33 bp, Homo sapien
tgatttggaccactgaagaagattgttttcttt

SEQ ID NO: 266432 - DNA, 33 bp, Homo sapien
tgatttggaccactgaggaagattgttttcttt

SEQ ID NO: 266433 - DNA, 33 bp, Homo sapien
tttttaaaactgccagaatagaaatttctctgc

SEQ ID NO: 266434 - DNA, 33 bp, Homo sapien
tttttaaaactgccaggatagaaatttctctgc

SEQ ID NO: 266435 - DNA, 33 bp, Homo sapien
ctgagtttaatttggaagtcacgtgtttgcctt

SEQ ID NO: 266436 - DNA, 33 bp, Homo sapien
ctgagtttaatttggatgtcacgtgtttgcctt

SEQ ID NO: 266437 - DNA, 33 bp, Homo sapien
agatattaagattgaccgatgaatttagtaagg

SEQ ID NO: 266438 - DNA, 33 bp, Homo sapien
agatattaagattgactgatgaatttagtaagg

SEQ ID NO: 266439 - DNA, 33 bp, Homo sapien
ttaactcaagggaatactaagcttgtctgtgta

SEQ ID NO: 266440 - DNA, 33 bp, Homo sapien
ttaactcaagggaatagtaagcttgtctgtgta

SEQ ID NO: 266441 - DNA, 33 bp, Homo sapien
ggatattatgaccttccactcccaggctggaca

SEQ ID NO: 266442 - DNA, 33 bp, Homo sapien
ggatattatgaccttctactcccaggctggaca

SEQ ID NO: 266443 - DNA, 33 bp, Homo sapien
aagtgcatctgacattcaaaaaacaggatttta

SEQ ID NO: 266444 - DNA, 33 bp, Homo sapien
aagtgcatctgacattgaaaaaacaggatttta

SEQ ID NO: 266445 - DNA, 33 bp, Homo sapien
aagccaggcaattatcactgtaaaggactatat

SEQ ID NO: 266446 - DNA, 33 bp, Homo sapien
aagccaggcaattatcgctgtaaaggactatat

SEQ ID NO: 266447 - DNA, 33 bp, Homo sapien
aaatacacttagtgaaatgtgtgcatgatgcca

SEQ ID NO: 266448 - DNA, 33 bp, Homo sapien
aaatacacttagtgaactgtgtgcatgatgcca

SEQ ID NO: 266449 - DNA, 33 bp, Homo sapien
cgtttcctacttcacactgaatgttgggtcaat

SEQ ID NO: 266450 - DNA, 33 bp, Homo sapien
cgtttcctacttcacattgaatgttgggtcaat

SEQ ID NO: 266451 - DNA, 33 bp, Homo sapien
cagtgtaacacaaagacgatccataaataataa

SEQ ID NO: 266452 - DNA, 33 bp, Homo sapien
cagtgtaacacaaagatgatccataaataataa

SEQ ID NO: 266453 - DNA, 33 bp, Homo sapien
ttctagcccatttctcaaaactgattccaaaaa

SEQ ID NO: 266454 - DNA, 33 bp, Homo sapien
ttctagcccatttctctaaactgattccaaaaa

SEQ ID NO: 266455 - DNA, 33 bp, Homo sapien
attctatccaagccagaacaggttttaggtgac

SEQ ID NO: 266456 - DNA, 33 bp, Homo sapien
attctatccaagccaggacaggttttaggtgac

SEQ ID NO: 266457 - DNA, 33 bp, Homo sapien
gatgcttagtgacctacagtagggacttttcta

SEQ ID NO: 266458 - DNA, 33 bp, Homo sapien
gatgcttagtgacctatagtagggacttttcta

SEQ ID NO: 266459 - DNA, 33 bp, Homo sapien
gttgatggatttgggcaaacttcatatcttggc

SEQ ID NO: 266460 - DNA, 33 bp, Homo sapien
gttgatggatttgggcgaacttcatatcttggc

SEQ ID NO: 266461 - DNA, 33 bp, Homo sapien
atagtctacattaagcaccactttcacttacct

SEQ ID NO: 266462 - DNA, 33 bp, Homo sapien
atagtctacattaagctccactttcacttacct

SEQ ID NO: 266463 - DNA, 33 bp, Homo sapien
tcctgaaagaagacaaacaaaatttgcaaattt

SEQ ID NO: 266464 - DNA, 33 bp, Homo sapien
tcctgaaagaagacaagcaaaatttgcaaattt

SEQ ID NO: 266465 - DNA, 33 bp, Homo sapien
aaatgtacacttggaacggacagttgtttggca

SEQ ID NO: 266466 - DNA, 33 bp, Homo sapien
aaatgtacacttggaatggacagttgtttggca

SEQ ID NO: 266467 - DNA, 33 bp, Homo sapien
gcctggaagtcagatgccatcctttctgcaatg

SEQ ID NO: 266468 - DNA, 33 bp, Homo sapien
gcctggaagtcagatgtcatcctttctgcaatg

SEQ ID NO: 266469 - DNA, 33 bp, Homo sapien
gttggttaagcaaatacccattttcagtgttct

SEQ ID NO: 266470 - DNA, 33 bp, Homo sapien
gttggttaagcaaatatccattttcagtgttct

SEQ ID NO: 266471 - DNA, 33 bp, Homo sapien
aaaaactgagtgctgacagaagggtgatacaga

SEQ ID NO: 266472 - DNA, 33 bp, Homo sapien
aaaaactgagtgctgatagaagggtgatacaga

SEQ ID NO: 266473 - DNA, 33 bp, Homo sapien
tccttcgaatcaacccactcaaacaaaaatatg

SEQ ID NO: 266474 - DNA, 33 bp, Homo sapien
tccttcgaatcaaccccctcaaacaaaaatatg

SEQ ID NO: 266475 - DNA, 33 bp, Homo sapien
gtttgtaagacagtaaaaagtaattaatatggg

SEQ ID NO: 266476 - DNA, 33 bp, Homo sapien
gtttgtaagacagtaagaagtaattaatatggg

SEQ ID NO: 266477 - DNA, 33 bp, Homo sapien
cacatgatctccttcaacgcagctacatctatg

SEQ ID NO: 266478 - DNA, 33 bp, Homo sapien
cacatgatctccttcagcgcagctacatctatg

SEQ ID NO: 266479 - DNA, 33 bp, Homo sapien
tggccatactctgatacctgactcatctgaatt

SEQ ID NO: 266480 - DNA, 33 bp, Homo sapien
tggccatactctgatatctgactcatctgaatt

SEQ ID NO: 266481 - DNA, 33 bp, Homo sapien
aagccaagggatactaacacattgtggtactgg

SEQ ID NO: 266482 - DNA, 33 bp, Homo sapien
aagccaagggatactagcacattgtggtactgg

SEQ ID NO: 266483 - DNA, 33 bp, Homo sapien
aggcctaagagtgctgcaggaggtagaactgac

SEQ ID NO: 266484 - DNA, 33 bp, Homo sapien
aggcctaagagtgctgtaggaggtagaactgac

SEQ ID NO: 266485 - DNA, 33 bp, Homo sapien
cagaaattgtcattccccttgtcactcagaaga

SEQ ID NO: 266486 - DNA, 33 bp, Homo sapien
cagaaattgtcattcctcttgtcactcagaaga

SEQ ID NO: 266487 - DNA, 33 bp, Homo sapien
tcctgagagaaggctggatgggggcttattcca

SEQ ID NO: 266488 - DNA, 33 bp, Homo sapien
tcctgagagaaggctgtatgggggcttattcca

SEQ ID NO: 266489 - DNA, 33 bp, Homo sapien
atctccaagaacaatcaattctactttccctat

SEQ ID NO: 266490 - DNA, 33 bp, Homo sapien
atctccaagaacaatcgattctactttccctat

SEQ ID NO: 266491 - DNA, 33 bp, Homo sapien
tgaatgcacacatacaacctttggcttgaagat

SEQ ID NO: 266492 - DNA, 33 bp, Homo sapien
tgaatgcacacatacaccctttggcttgaagat

SEQ ID NO: 266493 - DNA, 33 bp, Homo sapien
ttttgaattctctaataaagactctacatttca

SEQ ID NO: 266494 - DNA, 33 bp, Homo sapien
ttttgaattctctaatcaagactctacatttca

SEQ ID NO: 266495 - DNA, 33 bp, Homo sapien
aatgagaatgaatttgcacccggttattactct

SEQ ID NO: 266496 - DNA, 33 bp, Homo sapien
aatgagaatgaatttgtacccggttattactct

SEQ ID NO: 266497 - DNA, 33 bp, Homo sapien
tttattttctgggcacacttagatgcaattatg

SEQ ID NO: 266498 - DNA, 33 bp, Homo sapien
tttattttctgggcacgcttagatgcaattatg

SEQ ID NO: 266499 - DNA, 33 bp, Homo sapien
ctgccgtagatcaaaacttgcaaggctctttga

SEQ ID NO: 266500 - DNA, 33 bp, Homo sapien
ctgccgtagatcaaaagttgcaaggctctttga

SEQ ID NO: 266501 - DNA, 33 bp, Homo sapien
taaacactgtactgcaagcttcatacttaatct

SEQ ID NO: 266502 - DNA, 33 bp, Homo sapien
taaacactgtactgcatgcttcatacttaatct

SEQ ID NO: 266503 - DNA, 33 bp, Homo sapien
gattgtcttatataagcatgaatttttctgctc

SEQ ID NO: 266504 - DNA, 33 bp, Homo sapien
gattgtcttatataaggatgaatttttctgctc

SEQ ID NO: 266505 - DNA, 33 bp, Homo sapien
agacacacaggctttgaatggcatataggtttc

SEQ ID NO: 266506 - DNA, 33 bp, Homo sapien
agacacacaggctttgcatggcatataggtttc

SEQ ID NO: 266507 - DNA, 33 bp, Homo sapien
cctgagattgtgatgacaggagagttcaggtga

SEQ ID NO: 266508 - DNA, 33 bp, Homo sapien
cctgagattgtgatgataggagagttcaggtga

SEQ ID NO: 266509 - DNA, 33 bp, Homo sapien
atgttgacaagatcacacttgtagcaacgtgga

SEQ ID NO: 266510 - DNA, 33 bp, Homo sapien
atgttgacaagatcacgcttgtagcaacgtgga

SEQ ID NO: 266511 - DNA, 33 bp, Homo sapien
acgtttgagagatttaaggaggaaaaagcaaca

SEQ ID NO: 266512 - DNA, 33 bp, Homo sapien
acgtttgagagatttagggaggaaaaagcaaca

SEQ ID NO: 266513 - DNA, 33 bp, Homo sapien
aggaaaacgtccttgaaaacactgtgtagattt

SEQ ID NO: 266514 - DNA, 33 bp, Homo sapien
aggaaaacgtccttgagaacactgtgtagattt

SEQ ID NO: 266515 - DNA, 33 bp, Homo sapien
gtagaaaagtaagacgaaaggaacagcaacaga

SEQ ID NO: 266516 - DNA, 33 bp, Homo sapien
gtagaaaagtaagacggaaggaacagcaacaga

SEQ ID NO: 266517 - DNA, 33 bp, Homo sapien
tttaaaataagtgcgaaatgatgctgagaagaa

SEQ ID NO: 266518 - DNA, 33 bp, Homo sapien
tttaaaataagtgcgatatgatgctgagaagaa

SEQ ID NO: 266519 - DNA, 33 bp, Homo sapien
gacctactgaatccaagttacctagtgatcaac

SEQ ID NO: 266520 - DNA, 33 bp, Homo sapien
gacctactgaatccaatttacctagtgatcaac

SEQ ID NO: 266521 - DNA, 33 bp, Homo sapien
tgtgattctgatgtgactataacttcactcaca

SEQ ID NO: 266522 - DNA, 33 bp, Homo sapien
tgtgattctgatgtgattataacttcactcaca

SEQ ID NO: 266523 - DNA, 33 bp, Homo sapien
tgttattttccaagaacgatttagttgcacaaa

SEQ ID NO: 266524 - DNA, 33 bp, Homo sapien
tgttattttccaagaatgatttagttgcacaaa

SEQ ID NO: 266525 - DNA, 33 bp, Homo sapien
tgagataaaaacacccaatgctaaaaggagtgc

SEQ ID NO: 266526 - DNA, 33 bp, Homo sapien
tgagataaaaacaccccatgctaaaaggagtgc

SEQ ID NO: 266527 - DNA, 33 bp, Homo sapien
gatgccatctgggaacagggctatatgagagca

SEQ ID NO: 266528 - DNA, 33 bp, Homo sapien
gatgccatctgggaacggggctatatgagagca

SEQ ID NO: 266529 - DNA, 33 bp, Homo sapien
gtatctgggtgcaaggccaaaataaaccgctgc

SEQ ID NO: 266530 - DNA, 33 bp, Homo sapien
gtatctgggtgcaaggtcaaaataaaccgctgc

SEQ ID NO: 266531 - DNA, 33 bp, Homo sapien
ctaaaaattcagctaccgaggtgtgataaattg

SEQ ID NO: 266532 - DNA, 33 bp, Homo sapien
ctaaaaattcagctactgaggtgtgataaattg

SEQ ID NO: 266533 - DNA, 33 bp, Homo sapien
gaagctatggaaagataagtagaaatgtgttaa

SEQ ID NO: 266534 - DNA, 33 bp, Homo sapien
gaagctatggaaagatgagtagaaatgtgttaa

SEQ ID NO: 266535 - DNA, 33 bp, Homo sapien
caatatgtgacgtataatagacttcaataagca

SEQ ID NO: 266536 - DNA, 33 bp, Homo sapien
caatatgtgacgtatagtagacttcaataagca

SEQ ID NO: 266537 - DNA, 33 bp, Homo sapien
catgtatcgtgctctacccttttgcagctacat

SEQ ID NO: 266538 - DNA, 33 bp, Homo sapien
catgtatcgtgctctagccttttgcagctacat

SEQ ID NO: 266539 - DNA, 33 bp, Homo sapien
gtcctgttttgcatcacctaaggtaatcccaca

SEQ ID NO: 266540 - DNA, 33 bp, Homo sapien
gtcctgttttgcatcatctaaggtaatcccaca

SEQ ID NO: 266541 - DNA, 33 bp, Homo sapien
catcacttaacgagaaagatacattttgagaaa

SEQ ID NO: 266542 - DNA, 33 bp, Homo sapien
catcacttaacgagaaggatacattttgagaaa

SEQ ID NO: 266543 - DNA, 33 bp, Homo sapien
ggtaatcagaaagtaaaaaggagtcaccaagca

SEQ ID NO: 266544 - DNA, 33 bp, Homo sapien
ggtaatcagaaagtaagaaggagtcaccaagca

SEQ ID NO: 266545 - DNA, 33 bp, Homo sapien
acatgagctgcttaaacttgtaatggggctgag

SEQ ID NO: 266546 - DNA, 33 bp, Homo sapien
acatgagctgcttaaatttgtaatggggctgag

SEQ ID NO: 266547 - DNA, 33 bp, Homo sapien
gaagcaattaactcaaaactagctatatatgct

SEQ ID NO: 266548 - DNA, 33 bp, Homo sapien
gaagcaattaactcaacactagctatatatgct

SEQ ID NO: 266549 - DNA, 33 bp, Homo sapien
actataacctgtttgaacatcacatctcaggta

SEQ ID NO: 266550 - DNA, 33 bp, Homo sapien
actataacctgtttgagcatcacatctcaggta

SEQ ID NO: 266551 - DNA, 33 bp, Homo sapien
gatctttgggttcaccagaattggaaacagaaa

SEQ ID NO: 266552 - DNA, 33 bp, Homo sapien
gatctttgggttcaccggaattggaaacagaaa

SEQ ID NO: 266553 - DNA, 33 bp, Homo sapien
actgagttgactgagaatagatactgtgagcaa

SEQ ID NO: 266554 - DNA, 33 bp, Homo sapien
actgagttgactgagactagatactgtgagcaa

SEQ ID NO: 266555 - DNA, 33 bp, Homo sapien
ggctttgatcctttgcccaagatggcagtgacc

SEQ ID NO: 266556 - DNA, 33 bp, Homo sapien
ggctttgatcctttgctcaagatggcagtgacc

SEQ ID NO: 266557 - DNA, 33 bp, Homo sapien
cataagttgacttttccatggcaaagttaccga

SEQ ID NO: 266558 - DNA, 33 bp, Homo sapien
cataagttgacttttctatggcaaagttaccga

SEQ ID NO: 266559 - DNA, 33 bp, Homo sapien
aaattgacttgctgatgaggacttagcagctat

SEQ ID NO: 266560 - DNA, 33 bp, Homo sapien
aaattgacttgctgattaggacttagcagctat

SEQ ID NO: 266561 - DNA, 33 bp, Homo sapien
tctctgtgggagtacaatcttttctctctattt

SEQ ID NO: 266562 - DNA, 33 bp, Homo sapien
tctctgtgggagtacagtcttttctctctattt

SEQ ID NO: 266563 - DNA, 33 bp, Homo sapien
ctaactccttgtaccacgctctcagtatctctt

SEQ ID NO: 266564 - DNA, 33 bp, Homo sapien
ctaactccttgtaccatgctctcagtatctctt

SEQ ID NO: 266565 - DNA, 33 bp, Homo sapien
aagttaagtttctgaacgtgtaaagctgagggt

SEQ ID NO: 266566 - DNA, 33 bp, Homo sapien
aagttaagtttctgaatgtgtaaagctgagggt

SEQ ID NO: 266567 - DNA, 33 bp, Homo sapien
gggcagcttgtcctgcaatgactgctccaaata

SEQ ID NO: 266568 - DNA, 33 bp, Homo sapien
gggcagcttgtcctgcgatgactgctccaaata

SEQ ID NO: 266569 - DNA, 33 bp, Homo sapien
caaattccttctagccaaaactgcagtctagat

SEQ ID NO: 266570 - DNA, 33 bp, Homo sapien
caaattccttctagccgaaactgcagtctagat

SEQ ID NO: 266571 - DNA, 33 bp, Homo sapien
actaaagacataaaccaggtagatgatatccaa

SEQ ID NO: 266572 - DNA, 33 bp, Homo sapien
actaaagacataaaccgggtagatgatatccaa

SEQ ID NO: 266573 - DNA, 33 bp, Homo sapien
aacagaagccctctaactgcacctcgtgagtag

SEQ ID NO: 266574 - DNA, 33 bp, Homo sapien
aacagaagccctctaattgcacctcgtgagtag

SEQ ID NO: 266575 - DNA, 33 bp, Homo sapien
aggcaggtcctgctaaacaagtgatcccatgaa

SEQ ID NO: 266576 - DNA, 33 bp, Homo sapien
aggcaggtcctgctaatcaagtgatcccatgaa

SEQ ID NO: 266577 - DNA, 33 bp, Homo sapien
cctgtttgggatattgcattaccagtgagcagt

SEQ ID NO: 266578 - DNA, 33 bp, Homo sapien
cctgtttgggatattgtattaccagtgagcagt

SEQ ID NO: 266579 - DNA, 33 bp, Homo sapien
ctccctgggacttctaactctggtctggctgag

SEQ ID NO: 266580 - DNA, 33 bp, Homo sapien
ctccctgggacttctatctctggtctggctgag

SEQ ID NO: 266581 - DNA, 33 bp, Homo sapien
aggcctgttgtattctaactttgatatcttgat

SEQ ID NO: 266582 - DNA, 33 bp, Homo sapien
aggcctgttgtattctgactttgatatcttgat

SEQ ID NO: 266583 - DNA, 33 bp, Homo sapien
ctttcaagctcactcaagttgttgctggaaaga

SEQ ID NO: 266584 - DNA, 33 bp, Homo sapien
ctttcaagctcactcacgttgttgctggaaaga

SEQ ID NO: 266585 - DNA, 33 bp, Homo sapien
catttcctccaattatcactaaatgcttgtttg

SEQ ID NO: 266586 - DNA, 33 bp, Homo sapien
catttcctccaattattactaaatgcttgtttg

SEQ ID NO: 266587 - DNA, 33 bp, Homo sapien
agggttgccttaactgaatcctttattttctgt

SEQ ID NO: 266588 - DNA, 33 bp, Homo sapien
agggttgccttaactgcatcctttattttctgt

SEQ ID NO: 266589 - DNA, 33 bp, Homo sapien
cagtacatactcggcaatacttattaaataaat

SEQ ID NO: 266590 - DNA, 33 bp, Homo sapien
cagtacatactcggcagtacttattaaataaat

SEQ ID NO: 266591 - DNA, 33 bp, Homo sapien
tctttttaacttagcaacatatgtgtaaaattc

SEQ ID NO: 266592 - DNA, 33 bp, Homo sapien
tctttttaacttagcatcatatgtgtaaaattc

SEQ ID NO: 266593 - DNA, 33 bp, Homo sapien
gcatttacaaaagatacggcagtccataaagtt

SEQ ID NO: 266594 - DNA, 33 bp, Homo sapien
gcatttacaaaagatatggcagtccataaagtt

SEQ ID NO: 266595 - DNA, 33 bp, Homo sapien
ccatctcctgcttgggaagtataggcctgctgt

SEQ ID NO: 266596 - DNA, 33 bp, Homo sapien
ccatctcctgcttggggagtataggcctgctgt

SEQ ID NO: 266597 - DNA, 33 bp, Homo sapien
caaaggcgatggggcaagggaggtctctctctc

SEQ ID NO: 266598 - DNA, 33 bp, Homo sapien
caaaggcgatggggcatgggaggtctctctctc

SEQ ID NO: 266599 - DNA, 33 bp, Homo sapien
taactgtccagtaaaaggaacccaaataacaga

SEQ ID NO: 266600 - DNA, 33 bp, Homo sapien
taactgtccagtaaaatgaacccaaataacaga

SEQ ID NO: 266601 - DNA, 33 bp, Homo sapien
agatgaaaagggatcacgatgaaaaagtatttt

SEQ ID NO: 266602 - DNA, 33 bp, Homo sapien
agatgaaaagggatcatgatgaaaaagtatttt

SEQ ID NO: 266603 - DNA, 33 bp, Homo sapien
tgcataactagtgggccatacttgacataataa

SEQ ID NO: 266604 - DNA, 33 bp, Homo sapien
tgcataactagtgggctatacttgacataataa

SEQ ID NO: 266605 - DNA, 33 bp, Homo sapien
gctacttctattcttacagatgacagtatactt

SEQ ID NO: 266606 - DNA, 33 bp, Homo sapien
gctacttctattcttagagatgacagtatactt

SEQ ID NO: 266607 - DNA, 33 bp, Homo sapien
agttggagatggaaacgagcatgaaaataaatc

SEQ ID NO: 266608 - DNA, 33 bp, Homo sapien
agttggagatggaaactagcatgaaaataaatc

SEQ ID NO: 266609 - DNA, 33 bp, Homo sapien
ttatttcaacttcaaactcgggattgggaatca

SEQ ID NO: 266610 - DNA, 33 bp, Homo sapien
ttatttcaacttcaaagtcgggattgggaatca

SEQ ID NO: 266611 - DNA, 33 bp, Homo sapien
catcatgctacagacaaactgcctacaccagac

SEQ ID NO: 266612 - DNA, 33 bp, Homo sapien
catcatgctacagacacactgcctacaccagac

SEQ ID NO: 266613 - DNA, 33 bp, Homo sapien
aagactcagcagaatacgtgtaagtcaatggaa

SEQ ID NO: 266614 - DNA, 33 bp, Homo sapien
aagactcagcagaatatgtgtaagtcaatggaa

SEQ ID NO: 266615 - DNA, 33 bp, Homo sapien
cctaaactcataacagaatgcttatcagagaat

SEQ ID NO: 266616 - DNA, 33 bp, Homo sapien
cctaaactcataacaggatgcttatcagagaat

SEQ ID NO: 266617 - DNA, 33 bp, Homo sapien
attcaattgactttcagccttactgaggtagtg

SEQ ID NO: 266618 - DNA, 33 bp, Homo sapien
attcaattgactttcatccttactgaggtagtg

SEQ ID NO: 266619 - DNA, 33 bp, Homo sapien
ggagacatcttcatacacttaaaaaaaaatagg

SEQ ID NO: 266620 - DNA, 33 bp, Homo sapien
ggagacatcttcatactcttaaaaaaaaatagg

SEQ ID NO: 266621 - DNA, 33 bp, Homo sapien
gttaatgagatctctacgcaaaaacttcactct

SEQ ID NO: 266622 - DNA, 33 bp, Homo sapien
gttaatgagatctctaggcaaaaacttcactct

SEQ ID NO: 266623 - DNA, 33 bp, Homo sapien
gtgaagaggtctccaacgtaaataaagagtttg

SEQ ID NO: 266624 - DNA, 33 bp, Homo sapien
gtgaagaggtctccaatgtaaataaagagtttg

SEQ ID NO: 266625 - DNA, 33 bp, Homo sapien
gaggaacatagtaggaagtggtcattttattta

SEQ ID NO: 266626 - DNA, 33 bp, Homo sapien
gaggaacatagtaggacgtggtcattttattta

SEQ ID NO: 266627 - DNA, 33 bp, Homo sapien
agtaaatacatataccagaaagggtcatttatc

SEQ ID NO: 266628 - DNA, 33 bp, Homo sapien
agtaaatacatataccggaaagggtcatttatc

SEQ ID NO: 266629 - DNA, 33 bp, Homo sapien
tcttttcttctctgccagaaaccacagagtgga

SEQ ID NO: 266630 - DNA, 33 bp, Homo sapien
tcttttcttctctgccggaaaccacagagtgga

SEQ ID NO: 266631 - DNA, 33 bp, Homo sapien
tctcatcctggaatgaataaaagtaccagaagc

SEQ ID NO: 266632 - DNA, 33 bp, Homo sapien
tctcatcctggaatgattaaaagtaccagaagc

SEQ ID NO: 266633 - DNA, 33 bp, Homo sapien
caactgtattacgaaactcgtgcagtgaatttt

SEQ ID NO: 266634 - DNA, 33 bp, Homo sapien
caactgtattacgaaattcgtgcagtgaatttt

SEQ ID NO: 266635 - DNA, 33 bp, Homo sapien
aacacagttgaggatacagtctatgaaaatttc

SEQ ID NO: 266636 - DNA, 33 bp, Homo sapien
aacacagttgaggatatagtctatgaaaatttc

SEQ ID NO: 266637 - DNA, 33 bp, Homo sapien
tgcataacacttcttgaaagcagaggtgcgttt

SEQ ID NO: 266638 - DNA, 33 bp, Homo sapien
tgcataacacttcttgtaagcagaggtgcgttt

SEQ ID NO: 266639 - DNA, 33 bp, Homo sapien
acaccaagctaggcaccgaagttgaaaaatcct

SEQ ID NO: 266640 - DNA, 33 bp, Homo sapien
acaccaagctaggcactgaagttgaaaaatcct

SEQ ID NO: 266641 - DNA, 33 bp, Homo sapien
tgacatagaatgggaacgcgtagcctcatttgg

SEQ ID NO: 266642 - DNA, 33 bp, Homo sapien
tgacatagaatgggaatgcgtagcctcatttgg

SEQ ID NO: 266643 - DNA, 33 bp, Homo sapien
cgcagggatcaataaacgagcacagctgaaatg

SEQ ID NO: 266644 - DNA, 33 bp, Homo sapien
cgcagggatcaataaatgagcacagctgaaatg

SEQ ID NO: 266645 - DNA, 33 bp, Homo sapien
atataactcacaaagcggaagatattatctgac

SEQ ID NO: 266646 - DNA, 33 bp, Homo sapien
atataactcacaaagctgaagatattatctgac

SEQ ID NO: 266647 - DNA, 33 bp, Homo sapien
tctggagcatcctgaaagaaataattgctttta

SEQ ID NO: 266648 - DNA, 33 bp, Homo sapien
tctggagcatcctgaaggaaataattgctttta

SEQ ID NO: 266649 - DNA, 33 bp, Homo sapien
agagtaacaacatatcaaaaacagcacgtcaac

SEQ ID NO: 266650 - DNA, 33 bp, Homo sapien
agagtaacaacatatcgaaaacagcacgtcaac

SEQ ID NO: 266651 - DNA, 33 bp, Homo sapien
aaatgcagcaccttgacatttgagaaagcagca

SEQ ID NO: 266652 - DNA, 33 bp, Homo sapien
aaatgcagcaccttgatatttgagaaagcagca

SEQ ID NO: 266653 - DNA, 33 bp, Homo sapien
gcctaagtgttccatacgtaagctcctttctat

SEQ ID NO: 266654 - DNA, 33 bp, Homo sapien
gcctaagtgttccatatgtaagctcctttctat

SEQ ID NO: 266655 - DNA, 33 bp, Homo sapien
gggttcaccctgttcaaggacaattaaaatatt

SEQ ID NO: 266656 - DNA, 33 bp, Homo sapien
gggttcaccctgttcagggacaattaaaatatt

SEQ ID NO: 266657 - DNA, 33 bp, Homo sapien
tggtcatcccagcagcaagctataggttttgcc

SEQ ID NO: 266658 - DNA, 33 bp, Homo sapien
tggtcatcccagcagcgagctataggttttgcc

SEQ ID NO: 266659 - DNA, 33 bp, Homo sapien
aaattttcattgtttgaaacaactttatttttt

SEQ ID NO: 266660 - DNA, 33 bp, Homo sapien
aaattttcattgtttggaacaactttatttttt

SEQ ID NO: 266661 - DNA, 33 bp, Homo sapien
gtctgaatggagacaacgatggaaccaagttgc

SEQ ID NO: 266662 - DNA, 33 bp, Homo sapien
gtctgaatggagacaatgatggaaccaagttgc

SEQ ID NO: 266663 - DNA, 33 bp, Homo sapien
tggaaccaagttgcccaattctgtgcagatcat

SEQ ID NO: 266664 - DNA, 33 bp, Homo sapien
tggaaccaagttgcccgattctgtgcagatcat

SEQ ID NO: 266665 - DNA, 33 bp, Homo sapien
ttgattcctgggtatacaactggtattcaggtt

SEQ ID NO: 266666 - DNA, 33 bp, Homo sapien
ttgattcctgggtatataactggtattcaggtt

SEQ ID NO: 266667 - DNA, 33 bp, Homo sapien
gtgttattggctaaaccgcatcgccctatctcc

SEQ ID NO: 266668 - DNA, 33 bp, Homo sapien
gtgttattggctaaactgcatcgccctatctcc

SEQ ID NO: 266669 - DNA, 33 bp, Homo sapien
ttcataattcttgtcccgatttgccaattctgc

SEQ ID NO: 266670 - DNA, 33 bp, Homo sapien
ttcataattcttgtcctgatttgccaattctgc

SEQ ID NO: 266671 - DNA, 33 bp, Homo sapien
tgagactttgtggagcacaaggaacacagtgtg

SEQ ID NO: 266672 - DNA, 33 bp, Homo sapien
tgagactttgtggagctcaaggaacacagtgtg

SEQ ID NO: 266673 - DNA, 33 bp, Homo sapien
gtaatcacagtgttcaatgaaaatactcataca

SEQ ID NO: 266674 - DNA, 33 bp, Homo sapien
gtaatcacagtgttcagtgaaaatactcataca

SEQ ID NO: 266675 - DNA, 33 bp, Homo sapien
ggtcatgtgccacagacgggttagaaagggaaa

SEQ ID NO: 266676 - DNA, 33 bp, Homo sapien
ggtcatgtgccacagatgggttagaaagggaaa

SEQ ID NO: 266677 - DNA, 33 bp, Homo sapien
aatgtccaagaaatgaaattatgcagtctcctt

SEQ ID NO: 266678 - DNA, 33 bp, Homo sapien
aatgtccaagaaatgagattatgcagtctcctt

SEQ ID NO: 266679 - DNA, 33 bp, Homo sapien
ttctagggcttgatcactgagtcaatagaacct

SEQ ID NO: 266680 - DNA, 33 bp, Homo sapien
ttctagggcttgatcattgagtcaatagaacct

SEQ ID NO: 266681 - DNA, 33 bp, Homo sapien
tgttctcaacccttggaatacattaatgaacaa

SEQ ID NO: 266682 - DNA, 33 bp, Homo sapien
tgttctcaacccttgggatacattaatgaacaa

SEQ ID NO: 266683 - DNA, 33 bp, Homo sapien
ctgtgagaagctgacactcctcaaagcatgaat

SEQ ID NO: 266684 - DNA, 33 bp, Homo sapien
ctgtgagaagctgacattcctcaaagcatgaat

SEQ ID NO: 266685 - DNA, 33 bp, Homo sapien
caaattgtgatatacccatgcaatggactgtta

SEQ ID NO: 266686 - DNA, 33 bp, Homo sapien
caaattgtgatatacctatgcaatggactgtta

SEQ ID NO: 266687 - DNA, 33 bp, Homo sapien
tgtttgcaatagtcaaacactggaaagaacaca

SEQ ID NO: 266688 - DNA, 33 bp, Homo sapien
tgtttgcaatagtcaagcactggaaagaacaca

SEQ ID NO: 266689 - DNA, 33 bp, Homo sapien
tgttgattttagcatcagaaggcaagatctagt

SEQ ID NO: 266690 - DNA, 33 bp, Homo sapien
tgttgattttagcatcggaaggcaagatctagt

SEQ ID NO: 266691 - DNA, 33 bp, Homo sapien
gttaaaaactcttgacaggacaggggctatgga

SEQ ID NO: 266692 - DNA, 33 bp, Homo sapien
gttaaaaactcttgacgggacaggggctatgga

SEQ ID NO: 266693 - DNA, 33 bp, Homo sapien
gaggatagaatggtcaatagttgtttctcctta

SEQ ID NO: 266694 - DNA, 33 bp, Homo sapien
gaggatagaatggtcagtagttgtttctcctta

SEQ ID NO: 266695 - DNA, 33 bp, Homo sapien
atctgttaggagttcaagtcattaaggagcatg

SEQ ID NO: 266696 - DNA, 33 bp, Homo sapien
atctgttaggagttcaggtcattaaggagcatg

SEQ ID NO: 266697 - DNA, 33 bp, Homo sapien
tttattgccatagcaactaagtctgtttttact

SEQ ID NO: 266698 - DNA, 33 bp, Homo sapien
tttattgccatagcaagtaagtctgtttttact

SEQ ID NO: 266699 - DNA, 33 bp, Homo sapien
atctctcaggtgatcaaatcttcaattttttct

SEQ ID NO: 266700 - DNA, 33 bp, Homo sapien
atctctcaggtgatcagatcttcaattttttct

SEQ ID NO: 266701 - DNA, 33 bp, Homo sapien
aaaattagactcccaccgtcttcagatcatatc

SEQ ID NO: 266702 - DNA, 33 bp, Homo sapien
aaaattagactcccactgtcttcagatcatatc

SEQ ID NO: 266703 - DNA, 33 bp, Homo sapien
aaggtgtatgtctggaagatttccttgcaccac

SEQ ID NO: 266704 - DNA, 33 bp, Homo sapien
aaggtgtatgtctggaggatttccttgcaccac

SEQ ID NO: 266705 - DNA, 33 bp, Homo sapien
aaagatgggaatcataagtgaataagggcagtt

SEQ ID NO: 266706 - DNA, 33 bp, Homo sapien
aaagatgggaatcataggtgaataagggcagtt

SEQ ID NO: 266707 - DNA, 33 bp, Homo sapien
ttagataatgcttttcaatttatctaatgttat

SEQ ID NO: 266708 - DNA, 33 bp, Homo sapien
ttagataatgcttttcgatttatctaatgttat

SEQ ID NO: 266709 - DNA, 33 bp, Homo sapien
aagactgaaagccaacagtagttcaggtgaagg

SEQ ID NO: 266710 - DNA, 33 bp, Homo sapien
aagactgaaagccaacggtagttcaggtgaagg

SEQ ID NO: 266711 - DNA, 33 bp, Homo sapien
gggtgtgctgtgatcacggcatcctgttactgc

SEQ ID NO: 266712 - DNA, 33 bp, Homo sapien
gggtgtgctgtgatcatggcatcctgttactgc

SEQ ID NO: 266713 - DNA, 33 bp, Homo sapien
caccatctgcaaggaaataaccttcactagaca

SEQ ID NO: 266714 - DNA, 33 bp, Homo sapien
caccatctgcaaggaactaaccttcactagaca

SEQ ID NO: 266715 - DNA, 33 bp, Homo sapien
tgataggagagaaggacgtgattcagtggagag

SEQ ID NO: 266716 - DNA, 33 bp, Homo sapien
tgataggagagaaggatgtgattcagtggagag

SEQ ID NO: 266717 - DNA, 33 bp, Homo sapien
tgccccaatagaaaaccgtctgctttatgtggc

SEQ ID NO: 266718 - DNA, 33 bp, Homo sapien
tgccccaatagaaaactgtctgctttatgtggc

SEQ ID NO: 266719 - DNA, 33 bp, Homo sapien
aaaaaaaaacaggaaaagtcacagaattaagaa

SEQ ID NO: 266720 - DNA, 33 bp, Homo sapien
aaaaaaaaacaggaaacgtcacagaattaagaa

SEQ ID NO: 266721 - DNA, 33 bp, Homo sapien
ctccctcttggtttgcacttgtattgtggctct

SEQ ID NO: 266722 - DNA, 33 bp, Homo sapien
ctccctcttggtttgcgcttgtattgtggctct

SEQ ID NO: 266723 - DNA, 33 bp, Homo sapien
gtctttaggaaaaagacagggctacagtaagtc

SEQ ID NO: 266724 - DNA, 33 bp, Homo sapien
gtctttaggaaaaagatagggctacagtaagtc

SEQ ID NO: 266725 - DNA, 33 bp, Homo sapien
attttatccatatttcacttgactctagacaaa

SEQ ID NO: 266726 - DNA, 33 bp, Homo sapien
attttatccatatttcccttgactctagacaaa

SEQ ID NO: 266727 - DNA, 33 bp, Homo sapien
atacgtaaccttactacgtctgtacactgatat

SEQ ID NO: 266728 - DNA, 33 bp, Homo sapien
atacgtaaccttactatgtctgtacactgatat

SEQ ID NO: 266729 - DNA, 33 bp, Homo sapien
aattgttagactcttcaagaacttttggaggaa

SEQ ID NO: 266730 - DNA, 33 bp, Homo sapien
aattgttagactcttcgagaacttttggaggaa

SEQ ID NO: 266731 - DNA, 33 bp, Homo sapien
aaaaaaaaacttcagcgcataccttaaaccaac

SEQ ID NO: 266732 - DNA, 33 bp, Homo sapien
aaaaaaaaacttcagctcataccttaaaccaac

SEQ ID NO: 266733 - DNA, 33 bp, Homo sapien
tcttcttcctgcttaacactgatttcctgttct

SEQ ID NO: 266734 - DNA, 33 bp, Homo sapien
tcttcttcctgcttaagactgatttcctgttct

SEQ ID NO: 266735 - DNA, 33 bp, Homo sapien
tggatgttaattaccacactgatgaatatataa

SEQ ID NO: 266736 - DNA, 33 bp, Homo sapien
tggatgttaattaccagactgatgaatatataa

SEQ ID NO: 266737 - DNA, 33 bp, Homo sapien
cctcttcttctgaaaccatatagcacattctgc

SEQ ID NO: 266738 - DNA, 33 bp, Homo sapien
cctcttcttctgaaactatatagcacattctgc

SEQ ID NO: 266739 - DNA, 33 bp, Homo sapien
accagccctcctatcaaggacacccaacccaaa

SEQ ID NO: 266740 - DNA, 33 bp, Homo sapien
accagccctcctatcagggacacccaacccaaa

SEQ ID NO: 266741 - DNA, 33 bp, Homo sapien
gtcttccagactgtgacgaactgggcaaattaa

SEQ ID NO: 266742 - DNA, 33 bp, Homo sapien
gtcttccagactgtgatgaactgggcaaattaa

SEQ ID NO: 266743 - DNA, 33 bp, Homo sapien
acccaccattcaaatacgggttcttcactggca

SEQ ID NO: 266744 - DNA, 33 bp, Homo sapien
acccaccattcaaatatgggttcttcactggca

SEQ ID NO: 266745 - DNA, 33 bp, Homo sapien
aatgatagctagtaaaacagaatgtgtacactg

SEQ ID NO: 266746 - DNA, 33 bp, Homo sapien
aatgatagctagtaaagcagaatgtgtacactg

SEQ ID NO: 266747 - DNA, 33 bp, Homo sapien
acacattcctgcctgaaaataatggaaccggtt

SEQ ID NO: 266748 - DNA, 33 bp, Homo sapien
acacattcctgcctgagaataatggaaccggtt

SEQ ID NO: 266749 - DNA, 33 bp, Homo sapien
ttaggatccctttgcacgatttcttgccaacca

SEQ ID NO: 266750 - DNA, 33 bp, Homo sapien
ttaggatccctttgcatgatttcttgccaacca

SEQ ID NO: 266751 - DNA, 33 bp, Homo sapien
ttttacttcgtcatagcccttacttttgacctg

SEQ ID NO: 266752 - DNA, 33 bp, Homo sapien
ttttacttcgtcatagtccttacttttgacctg

SEQ ID NO: 266753 - DNA, 33 bp, Homo sapien
actcccaatccagcaccatttgtacttataatt

SEQ ID NO: 266754 - DNA, 33 bp, Homo sapien
actcccaatccagcactatttgtacttataatt

SEQ ID NO: 266755 - DNA, 33 bp, Homo sapien
ctgaaatagcattgtaagagctagaaaggtgtc

SEQ ID NO: 266756 - DNA, 33 bp, Homo sapien
ctgaaatagcattgtacgagctagaaaggtgtc

SEQ ID NO: 266757 - DNA, 33 bp, Homo sapien
ttcttttaggaacacaatggatttatgtacctt

SEQ ID NO: 266758 - DNA, 33 bp, Homo sapien
ttcttttaggaacacagtggatttatgtacctt

SEQ ID NO: 266759 - DNA, 33 bp, Homo sapien
tccctggaaaatcaacaaaatttaaaggtcgta

SEQ ID NO: 266760 - DNA, 33 bp, Homo sapien
tccctggaaaatcaacgaaatttaaaggtcgta

SEQ ID NO: 266761 - DNA, 33 bp, Homo sapien
gggcaaagcaccagggaccagattcactttata

SEQ ID NO: 266762 - DNA, 33 bp, Homo sapien
gggcaaagcaccaggggccagattcactttata

SEQ ID NO: 266763 - DNA, 33 bp, Homo sapien
acaggagagggagaagacaaagtagattgctta

SEQ ID NO: 266764 - DNA, 33 bp, Homo sapien
acaggagagggagaagtcaaagtagattgctta

SEQ ID NO: 266765 - DNA, 33 bp, Homo sapien
tgaggagcaacacctgccagagagattactatg

SEQ ID NO: 266766 - DNA, 33 bp, Homo sapien
tgaggagcaacacctgtcagagagattactatg

SEQ ID NO: 266767 - DNA, 33 bp, Homo sapien
accttgattaactgaacggtgtgatagtgtgtt

SEQ ID NO: 266768 - DNA, 33 bp, Homo sapien
accttgattaactgaatggtgtgatagtgtgtt

SEQ ID NO: 266769 - DNA, 33 bp, Homo sapien
tggactttgacgagaaactctctcagtgtctga

SEQ ID NO: 266770 - DNA, 33 bp, Homo sapien
tggactttgacgagaacctctctcagtgtctga

SEQ ID NO: 266771 - DNA, 33 bp, Homo sapien
ccataataagtatacacggtttttcaagttcct

SEQ ID NO: 266772 - DNA, 33 bp, Homo sapien
ccataataagtatacatggtttttcaagttcct

SEQ ID NO: 266773 - DNA, 33 bp, Homo sapien
gtaagtgatgccacaacggacaatgtatactga

SEQ ID NO: 266774 - DNA, 33 bp, Homo sapien
gtaagtgatgccacaatggacaatgtatactga

SEQ ID NO: 266775 - DNA, 33 bp, Homo sapien
aagaggaaagcgcatcaaacaggaagacaagtt

SEQ ID NO: 266776 - DNA, 33 bp, Homo sapien
aagaggaaagcgcatcgaacaggaagacaagtt

SEQ ID NO: 266777 - DNA, 33 bp, Homo sapien
aatctgttccttcccactataatatgccccttc

SEQ ID NO: 266778 - DNA, 33 bp, Homo sapien
aatctgttccttcccattataatatgccccttc

SEQ ID NO: 266779 - DNA, 33 bp, Homo sapien
atcaccagtcctgcatgagatatatgaacatta

SEQ ID NO: 266780 - DNA, 33 bp, Homo sapien
atcaccagtcctgcattagatatatgaacatta

SEQ ID NO: 266781 - DNA, 33 bp, Homo sapien
acaccctaagtgagaaagcagtgttcctccaag

SEQ ID NO: 266782 - DNA, 33 bp, Homo sapien
acaccctaagtgagaaggcagtgttcctccaag

SEQ ID NO: 266783 - DNA, 33 bp, Homo sapien
aaaaaactgtttcctcaagtctgtaagtaaaat

SEQ ID NO: 266784 - DNA, 33 bp, Homo sapien
aaaaaactgtttcctcgagtctgtaagtaaaat

SEQ ID NO: 266785 - DNA, 33 bp, Homo sapien
gggtggatgagataaacgaactgactttcttcc

SEQ ID NO: 266786 - DNA, 33 bp, Homo sapien
gggtggatgagataaatgaactgactttcttcc

SEQ ID NO: 266787 - DNA, 33 bp, Homo sapien
taatagtttgctctccacctgagacttaatata

SEQ ID NO: 266788 - DNA, 33 bp, Homo sapien
taatagtttgctctccgcctgagacttaatata

SEQ ID NO: 266789 - DNA, 33 bp, Homo sapien
aatcctagacattaagcctgttcctttatagac

SEQ ID NO: 266790 - DNA, 33 bp, Homo sapien
aatcctagacattaaggctgttcctttatagac

SEQ ID NO: 266791 - DNA, 33 bp, Homo sapien
cattgtaacactgtataataaaccacatctaca

SEQ ID NO: 266792 - DNA, 33 bp, Homo sapien
cattgtaacactgtatgataaaccacatctaca

SEQ ID NO: 266793 - DNA, 33 bp, Homo sapien
tatatttttattctaacgctgcagtgactagaa

SEQ ID NO: 266794 - DNA, 33 bp, Homo sapien
tatatttttattctaatgctgcagtgactagaa

SEQ ID NO: 266795 - DNA, 33 bp, Homo sapien
cactctaagcttaacaatggtgtaagtctacat

SEQ ID NO: 266796 - DNA, 33 bp, Homo sapien
cactctaagcttaacagtggtgtaagtctacat

SEQ ID NO: 266797 - DNA, 33 bp, Homo sapien
cactgtcagccgcctgcagtgtatcttcctttc

SEQ ID NO: 266798 - DNA, 33 bp, Homo sapien
cactgtcagccgcctgtagtgtatcttcctttc

SEQ ID NO: 266799 - DNA, 33 bp, Homo sapien
ttcttcatagcagttcacccaaaatggaatact

SEQ ID NO: 266800 - DNA, 33 bp, Homo sapien
ttcttcatagcagttcgcccaaaatggaatact

SEQ ID NO: 266801 - DNA, 33 bp, Homo sapien
ttgccttaaagagatacgttgagccaaaatgtt

SEQ ID NO: 266802 - DNA, 33 bp, Homo sapien
ttgccttaaagagatatgttgagccaaaatgtt

SEQ ID NO: 266803 - DNA, 33 bp, Homo sapien
gaccagccctctctcagatttcttgagctcaga

SEQ ID NO: 266804 - DNA, 33 bp, Homo sapien
gaccagccctctctcatatttcttgagctcaga

SEQ ID NO: 266805 - DNA, 33 bp, Homo sapien
aacacggagaacaaaaagtagccagaattgtca

SEQ ID NO: 266806 - DNA, 33 bp, Homo sapien
aacacggagaacaaaaggtagccagaattgtca

SEQ ID NO: 266807 - DNA, 33 bp, Homo sapien
atgggaaacgtaagcaaaaagagttcaacagaa

SEQ ID NO: 266808 - DNA, 33 bp, Homo sapien
atgggaaacgtaagcagaaagagttcaacagaa

SEQ ID NO: 266809 - DNA, 33 bp, Homo sapien
tcttgatttcctgactcacagaagttatgattt

SEQ ID NO: 266810 - DNA, 33 bp, Homo sapien
tcttgatttcctgactgacagaagttatgattt

SEQ ID NO: 266811 - DNA, 33 bp, Homo sapien
gtattttcatctccccaaaaattaacctgtacc

SEQ ID NO: 266812 - DNA, 33 bp, Homo sapien
gtattttcatctcccccaaaattaacctgtacc

SEQ ID NO: 266813 - DNA, 33 bp, Homo sapien
caatttacctagcgacccacagagacagaagag

SEQ ID NO: 266814 - DNA, 33 bp, Homo sapien
caatttacctagcgactcacagagacagaagag

SEQ ID NO: 266815 - DNA, 33 bp, Homo sapien
aagatttactgagtcactaatcaaaaaaacaca

SEQ ID NO: 266816 - DNA, 33 bp, Homo sapien
aagatttactgagtcattaatcaaaaaaacaca

SEQ ID NO: 266817 - DNA, 33 bp, Homo sapien
tcatagtacagttagaccacattttctattttc

SEQ ID NO: 266818 - DNA, 33 bp, Homo sapien
tcatagtacagttagatcacattttctattttc

SEQ ID NO: 266819 - DNA, 33 bp, Homo sapien
ttcctttctggaaaaactgaatgtcttcaagga

SEQ ID NO: 266820 - DNA, 33 bp, Homo sapien
ttcctttctggaaaaattgaatgtcttcaagga

SEQ ID NO: 266821 - DNA, 33 bp, Homo sapien
taaagcagaggcagcactaataagggataaagc

SEQ ID NO: 266822 - DNA, 33 bp, Homo sapien
taaagcagaggcagcagtaataagggataaagc

SEQ ID NO: 266823 - DNA, 33 bp, Homo sapien
ttaaagctcctttagacattcggtcaagcaaca

SEQ ID NO: 266824 - DNA, 33 bp, Homo sapien
ttaaagctcctttagatattcggtcaagcaaca

SEQ ID NO: 266825 - DNA, 33 bp, Homo sapien
taaagtgtcatgcagaagatttgagaaaatgta

SEQ ID NO: 266826 - DNA, 33 bp, Homo sapien
taaagtgtcatgcagaggatttgagaaaatgta

SEQ ID NO: 266827 - DNA, 33 bp, Homo sapien
tgttcaataaacgttaataaattctagatctga

SEQ ID NO: 266828 - DNA, 33 bp, Homo sapien
tgttcaataaacgttagtaaattctagatctga

SEQ ID NO: 266829 - DNA, 33 bp, Homo sapien
taatgaaaaatttggaaagaactcaacatacat

SEQ ID NO: 266830 - DNA, 33 bp, Homo sapien
taatgaaaaatttggagagaactcaacatacat

SEQ ID NO: 266831 - DNA, 33 bp, Homo sapien
agatacaagcaacatacgagttgtaaagagaat

SEQ ID NO: 266832 - DNA, 33 bp, Homo sapien
agatacaagcaacatatgagttgtaaagagaat

SEQ ID NO: 266833 - DNA, 33 bp, Homo sapien
taaccccggtgtaaaccgctgtctgactactgt

SEQ ID NO: 266834 - DNA, 33 bp, Homo sapien
taaccccggtgtaaactgctgtctgactactgt

SEQ ID NO: 266835 - DNA, 33 bp, Homo sapien
cacattctctccagtacgtgatgttgttagtct

SEQ ID NO: 266836 - DNA, 33 bp, Homo sapien
cacattctctccagtatgtgatgttgttagtct

SEQ ID NO: 266837 - DNA, 33 bp, Homo sapien
ggccacatgacacttcactgagtatctacagca

SEQ ID NO: 266838 - DNA, 33 bp, Homo sapien
ggccacatgacacttcgctgagtatctacagca

SEQ ID NO: 266839 - DNA, 33 bp, Homo sapien
cccttactttcccccaagcaaatagagtctccc

SEQ ID NO: 266840 - DNA, 33 bp, Homo sapien
cccttactttcccccaggcaaatagagtctccc

SEQ ID NO: 266841 - DNA, 33 bp, Homo sapien
atatgccagacgtctacgagcattctttaaaaa

SEQ ID NO: 266842 - DNA, 33 bp, Homo sapien
atatgccagacgtctatgagcattctttaaaaa

SEQ ID NO: 266843 - DNA, 33 bp, Homo sapien
tgatgacttcatgacactgacctgtgtgacaac

SEQ ID NO: 266844 - DNA, 33 bp, Homo sapien
tgatgacttcatgacattgacctgtgtgacaac

SEQ ID NO: 266845 - DNA, 33 bp, Homo sapien
agaataatcctacagaaaggccagttgttgctg

SEQ ID NO: 266846 - DNA, 33 bp, Homo sapien
agaataatcctacagagaggccagttgttgctg

SEQ ID NO: 266847 - DNA, 33 bp, Homo sapien
tataccaaggacatccagctgaattataaagga

SEQ ID NO: 266848 - DNA, 33 bp, Homo sapien
tataccaaggacatccggctgaattataaagga

SEQ ID NO: 266849 - DNA, 33 bp, Homo sapien
ttcacctctgagagaacgtgctttggaagatag

SEQ ID NO: 266850 - DNA, 33 bp, Homo sapien
ttcacctctgagagaatgtgctttggaagatag

SEQ ID NO: 266851 - DNA, 33 bp, Homo sapien
tgtgttatggtactcaatcacattaacaagttt

SEQ ID NO: 266852 - DNA, 33 bp, Homo sapien
tgtgttatggtactcagtcacattaacaagttt

SEQ ID NO: 266853 - DNA, 33 bp, Homo sapien
aggaaactgagacaaaataggttatgttacttt

SEQ ID NO: 266854 - DNA, 33 bp, Homo sapien
aggaaactgagacaaactaggttatgttacttt

SEQ ID NO: 266855 - DNA, 33 bp, Homo sapien
agattcaactttacaaaggtggcatttcagaca

SEQ ID NO: 266856 - DNA, 33 bp, Homo sapien
agattcaactttacaacggtggcatttcagaca

SEQ ID NO: 266857 - DNA, 33 bp, Homo sapien
catggaattttctcgaaatgccatgcttagagc

SEQ ID NO: 266858 - DNA, 33 bp, Homo sapien
catggaattttctcgacatgccatgcttagagc

SEQ ID NO: 266859 - DNA, 33 bp, Homo sapien
atcagtgactgatactcaccaattgttttccta

SEQ ID NO: 266860 - DNA, 33 bp, Homo sapien
atcagtgactgatacttaccaattgttttccta

SEQ ID NO: 266861 - DNA, 33 bp, Homo sapien
atgacattggagatgaaaactagctaaagactt

SEQ ID NO: 266862 - DNA, 33 bp, Homo sapien
atgacattggagatgagaactagctaaagactt

SEQ ID NO: 266863 - DNA, 33 bp, Homo sapien
tggggatgaagccttcccaaccaattgaaagcc

SEQ ID NO: 266864 - DNA, 33 bp, Homo sapien
tggggatgaagccttctcaaccaattgaaagcc

SEQ ID NO: 266865 - DNA, 33 bp, Homo sapien
tctcaagatgaggaaaataaagcctaaggaggt

SEQ ID NO: 266866 - DNA, 33 bp, Homo sapien
tctcaagatgaggaaagtaaagcctaaggaggt

SEQ ID NO: 266867 - DNA, 33 bp, Homo sapien
agtataaataagttcacgtccttgaaacctctg

SEQ ID NO: 266868 - DNA, 33 bp, Homo sapien
agtataaataagttcatgtccttgaaacctctg

SEQ ID NO: 266869 - DNA, 33 bp, Homo sapien
tctactacaatgtttcacaggcttaacacttac

SEQ ID NO: 266870 - DNA, 33 bp, Homo sapien
tctactacaatgtttcgcaggcttaacacttac

SEQ ID NO: 266871 - DNA, 33 bp, Homo sapien
ctgtggatatccattcaacttctgttccttctc

SEQ ID NO: 266872 - DNA, 33 bp, Homo sapien
ctgtggatatccattcgacttctgttccttctc

SEQ ID NO: 266873 - DNA, 33 bp, Homo sapien
tggtaaagcctggcataaaagaacaagctgttg

SEQ ID NO: 266874 - DNA, 33 bp, Homo sapien
tggtaaagcctggcatgaaagaacaagctgttg

SEQ ID NO: 266875 - DNA, 33 bp, Homo sapien
ttggagctcacatataaaggatgagaaggagcc

SEQ ID NO: 266876 - DNA, 33 bp, Homo sapien
ttggagctcacatatagaggatgagaaggagcc

SEQ ID NO: 266877 - DNA, 33 bp, Homo sapien
tagaatctttattttcccttccaggttacattt

SEQ ID NO: 266878 - DNA, 33 bp, Homo sapien
tagaatctttattttctcttccaggttacattt

SEQ ID NO: 266879 - DNA, 33 bp, Homo sapien
ctgaatgtaatgaaaaccttcagaagtctagaa

SEQ ID NO: 266880 - DNA, 33 bp, Homo sapien
ctgaatgtaatgaaaatcttcagaagtctagaa

SEQ ID NO: 266881 - DNA, 33 bp, Homo sapien
aaaattgggagaatgacaataatttgtgatttg

SEQ ID NO: 266882 - DNA, 33 bp, Homo sapien
aaaattgggagaatgataataatttgtgatttg

SEQ ID NO: 266883 - DNA, 33 bp, Homo sapien
cagctcacatgttgagcatttgtcatcctggtc

SEQ ID NO: 266884 - DNA, 33 bp, Homo sapien
cagctcacatgttgagtatttgtcatcctggtc

SEQ ID NO: 266885 - DNA, 33 bp, Homo sapien
cttttttaagcacaaacgaagccactcctttgc

SEQ ID NO: 266886 - DNA, 33 bp, Homo sapien
cttttttaagcacaaatgaagccactcctttgc

SEQ ID NO: 266887 - DNA, 33 bp, Homo sapien
cgcacatgaagggagaacaatcttgccctgtag

SEQ ID NO: 266888 - DNA, 33 bp, Homo sapien
cgcacatgaagggagagcaatcttgccctgtag

SEQ ID NO: 266889 - DNA, 33 bp, Homo sapien
ggagcttcctagtccacaattttgctaatgtcc

SEQ ID NO: 266890 - DNA, 33 bp, Homo sapien
ggagcttcctagtccataattttgctaatgtcc

SEQ ID NO: 266891 - DNA, 33 bp, Homo sapien
atatgtgcattatggacgtcacagaaagagaaa

SEQ ID NO: 266892 - DNA, 33 bp, Homo sapien
atatgtgcattatggatgtcacagaaagagaaa

SEQ ID NO: 266893 - DNA, 33 bp, Homo sapien
atagacctgccaatgacaagaggagcacttaac

SEQ ID NO: 266894 - DNA, 33 bp, Homo sapien
atagacctgccaatgataagaggagcacttaac

SEQ ID NO: 266895 - DNA, 33 bp, Homo sapien
ctgatatttatgaagacctttaggttgctttca

SEQ ID NO: 266896 - DNA, 33 bp, Homo sapien
ctgatatttatgaagatctttaggttgctttca

SEQ ID NO: 266897 - DNA, 33 bp, Homo sapien
ttgtaattgactcccaatgatactgacgttcaa

SEQ ID NO: 266898 - DNA, 33 bp, Homo sapien
ttgtaattgactcccagtgatactgacgttcaa

SEQ ID NO: 266899 - DNA, 33 bp, Homo sapien
aaatatctacattgtaagcctcaaaacctgtgc

SEQ ID NO: 266900 - DNA, 33 bp, Homo sapien
aaatatctacattgtaggcctcaaaacctgtgc

SEQ ID NO: 266901 - DNA, 33 bp, Homo sapien
tgaatatgaatgattgaaaggtattttggaaat

SEQ ID NO: 266902 - DNA, 33 bp, Homo sapien
tgaatatgaatgattgcaaggtattttggaaat

SEQ ID NO: 266903 - DNA, 33 bp, Homo sapien
gtgggagccatgtcgacgcaaagactgccttat

SEQ ID NO: 266904 - DNA, 33 bp, Homo sapien
gtgggagccatgtcgatgcaaagactgccttat

SEQ ID NO: 266905 - DNA, 33 bp, Homo sapien
ttgggcagataattaacgttttgatgacttctt

SEQ ID NO: 266906 - DNA, 33 bp, Homo sapien
ttgggcagataattaatgttttgatgacttctt

SEQ ID NO: 266907 - DNA, 33 bp, Homo sapien
ttacttggtaattgaaactcattgaaaattaca

SEQ ID NO: 266908 - DNA, 33 bp, Homo sapien
ttacttggtaattgaagctcattgaaaattaca

SEQ ID NO: 266909 - DNA, 33 bp, Homo sapien
agccatctctgtggcactccactctgtctttca

SEQ ID NO: 266910 - DNA, 33 bp, Homo sapien
agccatctctgtggcattccactctgtctttca

SEQ ID NO: 266911 - DNA, 33 bp, Homo sapien
tcacactcatacaataagcagcaatgccacatc

SEQ ID NO: 266912 - DNA, 33 bp, Homo sapien
tcacactcatacaataggcagcaatgccacatc

SEQ ID NO: 266913 - DNA, 33 bp, Homo sapien
cctctaagaaaacacacagtaggaagcgtgtat

SEQ ID NO: 266914 - DNA, 33 bp, Homo sapien
cctctaagaaaacacatagtaggaagcgtgtat

SEQ ID NO: 266915 - DNA, 33 bp, Homo sapien
gattgagtacttcatagatacagtcccggagct

SEQ ID NO: 266916 - DNA, 33 bp, Homo sapien
gattgagtacttcatatatacagtcccggagct

SEQ ID NO: 266917 - DNA, 33 bp, Homo sapien
caaggttgcacggccaataagacacagagccag

SEQ ID NO: 266918 - DNA, 33 bp, Homo sapien
caaggttgcacggccagtaagacacagagccag

SEQ ID NO: 266919 - DNA, 33 bp, Homo sapien
acactactgatttgtaaacactgattttgtacc

SEQ ID NO: 266920 - DNA, 33 bp, Homo sapien
acactactgatttgtatacactgattttgtacc

SEQ ID NO: 266921 - DNA, 33 bp, Homo sapien
tagaaagacagtagcaaggttttaaaaggggca

SEQ ID NO: 266922 - DNA, 33 bp, Homo sapien
tagaaagacagtagcagggttttaaaaggggca

SEQ ID NO: 266923 - DNA, 33 bp, Homo sapien
tcttttcaatctagaacgacctcctctatgtag

SEQ ID NO: 266924 - DNA, 33 bp, Homo sapien
tcttttcaatctagaatgacctcctctatgtag

SEQ ID NO: 266925 - DNA, 33 bp, Homo sapien
ctaggcttagaagtaaacatcttcagatttcat

SEQ ID NO: 266926 - DNA, 33 bp, Homo sapien
ctaggcttagaagtaatcatcttcagatttcat

SEQ ID NO: 266927 - DNA, 33 bp, Homo sapien
gctggttttaacagaaatcccaaggagaattct

SEQ ID NO: 266928 - DNA, 33 bp, Homo sapien
gctggttttaacagaagtcccaaggagaattct

SEQ ID NO: 266929 - DNA, 33 bp, Homo sapien
tttgttatgttaacacaagaattaaaaactcca

SEQ ID NO: 266930 - DNA, 33 bp, Homo sapien
tttgttatgttaacacgagaattaaaaactcca

SEQ ID NO: 266931 - DNA, 33 bp, Homo sapien
atttgtggtagtttaaagtcctgatgtttaagg

SEQ ID NO: 266932 - DNA, 33 bp, Homo sapien
atttgtggtagtttaacgtcctgatgtttaagg

SEQ ID NO: 266933 - DNA, 33 bp, Homo sapien
gttacactagattgtacagccatgcagtaaaat

SEQ ID NO: 266934 - DNA, 33 bp, Homo sapien
gttacactagattgtagagccatgcagtaaaat

SEQ ID NO: 266935 - DNA, 33 bp, Homo sapien
gcctcttagcttcatgcaccatcgatttgctga

SEQ ID NO: 266936 - DNA, 33 bp, Homo sapien
gcctcttagcttcatggaccatcgatttgctga

SEQ ID NO: 266937 - DNA, 33 bp, Homo sapien
acagtttatagctatgaaaggaaaacagcaaag

SEQ ID NO: 266938 - DNA, 33 bp, Homo sapien
acagtttatagctatggaaggaaaacagcaaag

SEQ ID NO: 266939 - DNA, 33 bp, Homo sapien
agtcccagtactgataaaataagcagatcatta

SEQ ID NO: 266940 - DNA, 33 bp, Homo sapien
agtcccagtactgatacaataagcagatcatta

SEQ ID NO: 266941 - DNA, 33 bp, Homo sapien
tgttcttggaggccaccaccattacagattcat

SEQ ID NO: 266942 - DNA, 33 bp, Homo sapien
tgttcttggaggccacgaccattacagattcat

SEQ ID NO: 266943 - DNA, 33 bp, Homo sapien
ctttttaaagtctatgcatcacacaaagagtca

SEQ ID NO: 266944 - DNA, 33 bp, Homo sapien
ctttttaaagtctatgtatcacacaaagagtca

SEQ ID NO: 266945 - DNA, 33 bp, Homo sapien
tctgaactaaggtaacaactccgcatctggagg

SEQ ID NO: 266946 - DNA, 33 bp, Homo sapien
tctgaactaaggtaacgactccgcatctggagg

SEQ ID NO: 266947 - DNA, 33 bp, Homo sapien
gcatggtgttccttccacatgatgcattgttac

SEQ ID NO: 266948 - DNA, 33 bp, Homo sapien
gcatggtgttccttccgcatgatgcattgttac

SEQ ID NO: 266949 - DNA, 33 bp, Homo sapien
gctgttcttgaactcccagtctgaagttatccg

SEQ ID NO: 266950 - DNA, 33 bp, Homo sapien
gctgttcttgaactcctagtctgaagttatccg

SEQ ID NO: 266951 - DNA, 33 bp, Homo sapien
tgattttcaagtgaaaaaaaactgcaaaatgtt

SEQ ID NO: 266952 - DNA, 33 bp, Homo sapien
tgattttcaagtgaaagaaaactgcaaaatgtt

SEQ ID NO: 266953 - DNA, 33 bp, Homo sapien
ccttggagaattatgtaaaatgagagtttccaa

SEQ ID NO: 266954 - DNA, 33 bp, Homo sapien
ccttggagaattatgtgaaatgagagtttccaa

SEQ ID NO: 266955 - DNA, 33 bp, Homo sapien
gagcttacctgcaaagcatatcacagtgcagaa

SEQ ID NO: 266956 - DNA, 33 bp, Homo sapien
gagcttacctgcaaaggatatcacagtgcagaa

SEQ ID NO: 266957 - DNA, 33 bp, Homo sapien
agaaatctctaaggtgcacactgattactctta

SEQ ID NO: 266958 - DNA, 33 bp, Homo sapien
agaaatctctaaggtggacactgattactctta

SEQ ID NO: 266959 - DNA, 33 bp, Homo sapien
caagaacactgggcaaactgttgagatgacttc

SEQ ID NO: 266960 - DNA, 33 bp, Homo sapien
caagaacactgggcaagctgttgagatgacttc

SEQ ID NO: 266961 - DNA, 33 bp, Homo sapien
aaaaccatctcttgaaactcattcactatattt

SEQ ID NO: 266962 - DNA, 33 bp, Homo sapien
aaaaccatctcttgaagctcattcactatattt

SEQ ID NO: 266963 - DNA, 33 bp, Homo sapien
tctgacataaaataaccggcattcacttaccta

SEQ ID NO: 266964 - DNA, 33 bp, Homo sapien
tctgacataaaataactggcattcacttaccta

SEQ ID NO: 266965 - DNA, 33 bp, Homo sapien
aagtattactgaaaatcatggtgtcatttaaga

SEQ ID NO: 266966 - DNA, 33 bp, Homo sapien
aagtattactgaaaattatggtgtcatttaaga

SEQ ID NO: 266967 - DNA, 33 bp, Homo sapien
cacccaagacacttccagaggtagtccagggca

SEQ ID NO: 266968 - DNA, 33 bp, Homo sapien
cacccaagacacttccggaggtagtccagggca

SEQ ID NO: 266969 - DNA, 33 bp, Homo sapien
tattgatatttatttacacagcggctattcatt

SEQ ID NO: 266970 - DNA, 33 bp, Homo sapien
tattgatatttatttatacagcggctattcatt

SEQ ID NO: 266971 - DNA, 33 bp, Homo sapien
accaggatttagtcctcaatggatttgagcttc

SEQ ID NO: 266972 - DNA, 33 bp, Homo sapien
accaggatttagtccttaatggatttgagcttc

SEQ ID NO: 266973 - DNA, 33 bp, Homo sapien
gatccggacggccacaaaggtcatcagtggagg

SEQ ID NO: 266974 - DNA, 33 bp, Homo sapien
gatccggacggccacagaggtcatcagtggagg

SEQ ID NO: 266975 - DNA, 33 bp, Homo sapien
tatctcctttgggtcccattcatgcctgtccca

SEQ ID NO: 266976 - DNA, 33 bp, Homo sapien
tatctcctttgggtcctattcatgcctgtccca

SEQ ID NO: 266977 - DNA, 33 bp, Homo sapien
ggatggtgagggcaccacatcgctttctgctca

SEQ ID NO: 266978 - DNA, 33 bp, Homo sapien
ggatggtgagggcaccgcatcgctttctgctca

SEQ ID NO: 266979 - DNA, 33 bp, Homo sapien
agtgcctctcctgccacacacctgtgaatcatt

SEQ ID NO: 266980 - DNA, 33 bp, Homo sapien
agtgcctctcctgccatacacctgtgaatcatt

SEQ ID NO: 266981 - DNA, 33 bp, Homo sapien
cctctttttcccctcccataaggcactgcattt

SEQ ID NO: 266982 - DNA, 33 bp, Homo sapien
cctctttttcccctcctataaggcactgcattt

SEQ ID NO: 266983 - DNA, 33 bp, Homo sapien
tttgaaagccataagccaggcagtaatgtttgc

SEQ ID NO: 266984 - DNA, 33 bp, Homo sapien
tttgaaagccataagcgaggcagtaatgtttgc

SEQ ID NO: 266985 - DNA, 33 bp, Homo sapien
tatctgctgagacatacaacctcttatatggaa

SEQ ID NO: 266986 - DNA, 33 bp, Homo sapien
tatctgctgagacatagaacctcttatatggaa

SEQ ID NO: 266987 - DNA, 33 bp, Homo sapien
aagcaggtgatttaaccgacaaggtttgggttt

SEQ ID NO: 266988 - DNA, 33 bp, Homo sapien
aagcaggtgatttaactgacaaggtttgggttt

SEQ ID NO: 266989 - DNA, 33 bp, Homo sapien
ctcattactcagctaactgaagggggtctatgg

SEQ ID NO: 266990 - DNA, 33 bp, Homo sapien
ctcattactcagctaattgaagggggtctatgg

SEQ ID NO: 266991 - DNA, 33 bp, Homo sapien
ctatagagtaaaagtcaatgctgcaaacctcta

SEQ ID NO: 266992 - DNA, 33 bp, Homo sapien
ctatagagtaaaagtccatgctgcaaacctcta

SEQ ID NO: 266993 - DNA, 33 bp, Homo sapien
ggttgcaaacagaatccctcaggcttggctgca

SEQ ID NO: 266994 - DNA, 33 bp, Homo sapien
ggttgcaaacagaatctctcaggcttggctgca

SEQ ID NO: 266995 - DNA, 33 bp, Homo sapien
gaagtaggagaaagaaatgggcaataaaaaata

SEQ ID NO: 266996 - DNA, 33 bp, Homo sapien
gaagtaggagaaagaagtgggcaataaaaaata

SEQ ID NO: 266997 - DNA, 33 bp, Homo sapien
aattgggattcagacaacctggtttgattccac

SEQ ID NO: 266998 - DNA, 33 bp, Homo sapien
aattgggattcagacaccctggtttgattccac

SEQ ID NO: 266999 - DNA, 33 bp, Homo sapien
tggcctccaggaaaaaacactttgaccttgccc

SEQ ID NO: 267000 - DNA, 33 bp, Homo sapien
tggcctccaggaaaaagcactttgaccttgccc

SEQ ID NO: 267001 - DNA, 33 bp, Homo sapien
tagtgccttacaattcactcacttcagtctatg

SEQ ID NO: 267002 - DNA, 33 bp, Homo sapien
tagtgccttacaattcgctcacttcagtctatg

SEQ ID NO: 267003 - DNA, 33 bp, Homo sapien
ggggaaaatcaagaataagaaagtaactaccta

SEQ ID NO: 267004 - DNA, 33 bp, Homo sapien
ggggaaaatcaagaattagaaagtaactaccta

SEQ ID NO: 267005 - DNA, 33 bp, Homo sapien
cttggatgactgataaaatgccatttcaccttt

SEQ ID NO: 267006 - DNA, 33 bp, Homo sapien
cttggatgactgataagatgccatttcaccttt

SEQ ID NO: 267007 - DNA, 33 bp, Homo sapien
tccgtggagaaaggaaaagcagattcatgccat

SEQ ID NO: 267008 - DNA, 33 bp, Homo sapien
tccgtggagaaaggaacagcagattcatgccat

SEQ ID NO: 267009 - DNA, 33 bp, Homo sapien
ataagaccaactttctgaactctagtttgcttt

SEQ ID NO: 267010 - DNA, 33 bp, Homo sapien
ataagaccaactttcttaactctagtttgcttt

SEQ ID NO: 267011 - DNA, 33 bp, Homo sapien
tttatgcatttatttccctcagtcctctgatca

SEQ ID NO: 267012 - DNA, 33 bp, Homo sapien
tttatgcatttatttctctcagtcctctgatca

SEQ ID NO: 267013 - DNA, 33 bp, Homo sapien
agggtcagatgttaaacggagacagctggagcc

SEQ ID NO: 267014 - DNA, 33 bp, Homo sapien
agggtcagatgttaaatggagacagctggagcc

SEQ ID NO: 267015 - DNA, 33 bp, Homo sapien
aaggacagggtcaccacaatttctttcataaga

SEQ ID NO: 267016 - DNA, 33 bp, Homo sapien
aaggacagggtcaccataatttctttcataaga

SEQ ID NO: 267017 - DNA, 33 bp, Homo sapien
gtgcctctactttatagcttctaaatcaaatcc

SEQ ID NO: 267018 - DNA, 33 bp, Homo sapien
gtgcctctactttatatcttctaaatcaaatcc

SEQ ID NO: 267019 - DNA, 33 bp, Homo sapien
tcacacatctaagacaagtcagggctggctgtg

SEQ ID NO: 267020 - DNA, 33 bp, Homo sapien
tcacacatctaagacacgtcagggctggctgtg

SEQ ID NO: 267021 - DNA, 33 bp, Homo sapien
attggagttagatggacgaggtcacaaagactg

SEQ ID NO: 267022 - DNA, 33 bp, Homo sapien
attggagttagatggatgaggtcacaaagactg

SEQ ID NO: 267023 - DNA, 33 bp, Homo sapien
tggaagatagtaaaaccgctgggtgaagtgtgt

SEQ ID NO: 267024 - DNA, 33 bp, Homo sapien
tggaagatagtaaaactgctgggtgaagtgtgt

SEQ ID NO: 267025 - DNA, 33 bp, Homo sapien
ttccagtggacacagaccacttcagctatgggc

SEQ ID NO: 267026 - DNA, 33 bp, Homo sapien
ttccagtggacacagagcacttcagctatgggc

SEQ ID NO: 267027 - DNA, 33 bp, Homo sapien
gcaagggggattcatacctgacaactaggggca

SEQ ID NO: 267028 - DNA, 33 bp, Homo sapien
gcaagggggattcatatctgacaactaggggca

SEQ ID NO: 267029 - DNA, 33 bp, Homo sapien
agcagaaaatgctcagcctacattgctactgct

SEQ ID NO: 267030 - DNA, 33 bp, Homo sapien
agcagaaaatgctcaggctacattgctactgct

SEQ ID NO: 267031 - DNA, 33 bp, Homo sapien
tggatattctagtgcacggacatataccttgaa

SEQ ID NO: 267032 - DNA, 33 bp, Homo sapien
tggatattctagtgcatggacatataccttgaa

SEQ ID NO: 267033 - DNA, 33 bp, Homo sapien
gagcaggataatctcacgtttgctgatccaatg

SEQ ID NO: 267034 - DNA, 33 bp, Homo sapien
gagcaggataatctcatgtttgctgatccaatg

SEQ ID NO: 267035 - DNA, 33 bp, Homo sapien
ctgataaagaagaggccaaggcgaggaagagtc

SEQ ID NO: 267036 - DNA, 33 bp, Homo sapien
ctgataaagaagaggcgaaggcgaggaagagtc

SEQ ID NO: 267037 - DNA, 33 bp, Homo sapien
aagagggataaacagcacattgaattatatatt

SEQ ID NO: 267038 - DNA, 33 bp, Homo sapien
aagagggataaacagcgcattgaattatatatt

SEQ ID NO: 267039 - DNA, 33 bp, Homo sapien
gcagttgcagaaggtacgctcaaactcaagtca

SEQ ID NO: 267040 - DNA, 33 bp, Homo sapien
gcagttgcagaaggtatgctcaaactcaagtca

SEQ ID NO: 267041 - DNA, 33 bp, Homo sapien
tgtgaaagaggaatcaagaggaaggaggaggag

SEQ ID NO: 267042 - DNA, 33 bp, Homo sapien
tgtgaaagaggaatcaggaggaaggaggaggag

SEQ ID NO: 267043 - DNA, 33 bp, Homo sapien
ctgtgctatgtaacatcacccaatcacctatgc

SEQ ID NO: 267044 - DNA, 33 bp, Homo sapien
ctgtgctatgtaacattacccaatcacctatgc

SEQ ID NO: 267045 - DNA, 33 bp, Homo sapien
tatagggtgcttctcaagttttgaatgtctttt

SEQ ID NO: 267046 - DNA, 33 bp, Homo sapien
tatagggtgcttctcatgttttgaatgtctttt

SEQ ID NO: 267047 - DNA, 33 bp, Homo sapien
ccaaattttcaacctacgtttcctgagtgtgca

SEQ ID NO: 267048 - DNA, 33 bp, Homo sapien
ccaaattttcaacctatgtttcctgagtgtgca

SEQ ID NO: 267049 - DNA, 33 bp, Homo sapien
tcaaaccatcaatccacggcaaatgccttatcc

SEQ ID NO: 267050 - DNA, 33 bp, Homo sapien
tcaaaccatcaatccatggcaaatgccttatcc

SEQ ID NO: 267051 - DNA, 33 bp, Homo sapien
aaatgccttatcctaaaaactaagagaaagttc

SEQ ID NO: 267052 - DNA, 33 bp, Homo sapien
aaatgccttatcctaagaactaagagaaagttc

SEQ ID NO: 267053 - DNA, 33 bp, Homo sapien
cagtattcacttcatcactacttgtcctcttta

SEQ ID NO: 267054 - DNA, 33 bp, Homo sapien
cagtattcacttcatcgctacttgtcctcttta

SEQ ID NO: 267055 - DNA, 33 bp, Homo sapien
ttgaggagaagcaaacctgccatcttagaattt

SEQ ID NO: 267056 - DNA, 33 bp, Homo sapien
ttgaggagaagcaaacgtgccatcttagaattt

SEQ ID NO: 267057 - DNA, 33 bp, Homo sapien
agaagatagtgttagaaactgggaatctgtctt

SEQ ID NO: 267058 - DNA, 33 bp, Homo sapien
agaagatagtgttagagactgggaatctgtctt

SEQ ID NO: 267059 - DNA, 33 bp, Homo sapien
ttacacttccttaagcgccaattttcacaccaa

SEQ ID NO: 267060 - DNA, 33 bp, Homo sapien
ttacacttccttaagctccaattttcacaccaa

SEQ ID NO: 267061 - DNA, 33 bp, Homo sapien
gggcaccaagtgcaatgagattcttttcccact

SEQ ID NO: 267062 - DNA, 33 bp, Homo sapien
gggcaccaagtgcaattagattcttttcccact

SEQ ID NO: 267063 - DNA, 33 bp, Homo sapien
caagaaaaagtatgatgaccagcaaataaatga

SEQ ID NO: 267064 - DNA, 33 bp, Homo sapien
caagaaaaagtatgattaccagcaaataaatga

SEQ ID NO: 267065 - DNA, 33 bp, Homo sapien
gaaagatctgggtctaaagagattggacttgac

SEQ ID NO: 267066 - DNA, 33 bp, Homo sapien
gaaagatctgggtctagagagattggacttgac

SEQ ID NO: 267067 - DNA, 33 bp, Homo sapien
tgtaatggactggaaaaagtctcaaggatgatt

SEQ ID NO: 267068 - DNA, 33 bp, Homo sapien
tgtaatggactggaaagagtctcaaggatgatt

SEQ ID NO: 267069 - DNA, 33 bp, Homo sapien
gtccaaatatctatcacgtgccaaagtgaagga

SEQ ID NO: 267070 - DNA, 33 bp, Homo sapien
gtccaaatatctatcatgtgccaaagtgaagga

SEQ ID NO: 267071 - DNA, 33 bp, Homo sapien
cactttcacattaccacaagacagcaatatgaa

SEQ ID NO: 267072 - DNA, 33 bp, Homo sapien
cactttcacattaccataagacagcaatatgaa

SEQ ID NO: 267073 - DNA, 33 bp, Homo sapien
gggagaaaatttaggaccaggttcaattgtcta

SEQ ID NO: 267074 - DNA, 33 bp, Homo sapien
gggagaaaatttaggatcaggttcaattgtcta

SEQ ID NO: 267075 - DNA, 33 bp, Homo sapien
aagtgaaagggagctgaagaggagaacaaagca

SEQ ID NO: 267076 - DNA, 33 bp, Homo sapien
aagtgaaagggagctggagaggagaacaaagca

SEQ ID NO: 267077 - DNA, 33 bp, Homo sapien
acaaattactgatatccgagaaccttgaggcca

SEQ ID NO: 267078 - DNA, 33 bp, Homo sapien
acaaattactgatatctgagaaccttgaggcca

SEQ ID NO: 267079 - DNA, 33 bp, Homo sapien
atggggtctgaaagcacgttgctgggtgtggtc

SEQ ID NO: 267080 - DNA, 33 bp, Homo sapien
atggggtctgaaagcatgttgctgggtgtggtc

SEQ ID NO: 267081 - DNA, 33 bp, Homo sapien
ttcgctattaggaaaacgatggtaagacagcag

SEQ ID NO: 267082 - DNA, 33 bp, Homo sapien
ttcgctattaggaaaatgatggtaagacagcag

SEQ ID NO: 267083 - DNA, 33 bp, Homo sapien
gtaggctgtagatagacgctcaataaatgttta

SEQ ID NO: 267084 - DNA, 33 bp, Homo sapien
gtaggctgtagatagatgctcaataaatgttta

SEQ ID NO: 267085 - DNA, 33 bp, Homo sapien
aatgtggcttcttgcactgagctaattaaaaca

SEQ ID NO: 267086 - DNA, 33 bp, Homo sapien
aatgtggcttcttgcattgagctaattaaaaca

SEQ ID NO: 267087 - DNA, 33 bp, Homo sapien
cccagcagtttcttagaagttcaaagagttaca

SEQ ID NO: 267088 - DNA, 33 bp, Homo sapien
cccagcagtttcttaggagttcaaagagttaca

SEQ ID NO: 267089 - DNA, 33 bp, Homo sapien
acagttctgtaaaatgcataggaaagcatcgtc

SEQ ID NO: 267090 - DNA, 33 bp, Homo sapien
acagttctgtaaaatgtataggaaagcatcgtc

SEQ ID NO: 267091 - DNA, 33 bp, Homo sapien
agaagacagttttccaagaaccaggaagcagcc

SEQ ID NO: 267092 - DNA, 33 bp, Homo sapien
agaagacagttttccatgaaccaggaagcagcc

SEQ ID NO: 267093 - DNA, 33 bp, Homo sapien
tgagtaaagcaagttgcagaatgataagtgcag

SEQ ID NO: 267094 - DNA, 33 bp, Homo sapien
tgagtaaagcaagttgtagaatgataagtgcag

SEQ ID NO: 267095 - DNA, 33 bp, Homo sapien
aaataatgatagagacagcactaaaaagagaga

SEQ ID NO: 267096 - DNA, 33 bp, Homo sapien
aaataatgatagagaccgcactaaaaagagaga

SEQ ID NO: 267097 - DNA, 33 bp, Homo sapien
catataggtaaaactaggtatgtgtgcatgcat

SEQ ID NO: 267098 - DNA, 33 bp, Homo sapien
catataggtaaaactatgtatgtgtgcatgcat

SEQ ID NO: 267099 - DNA, 33 bp, Homo sapien
ctgagcaaaaaattcacgcagacaaattctcct

SEQ ID NO: 267100 - DNA, 33 bp, Homo sapien
ctgagcaaaaaattcaggcagacaaattctcct

SEQ ID NO: 267101 - DNA, 33 bp, Homo sapien
aaaagttagctttgtcgacacccaggaattacc

SEQ ID NO: 267102 - DNA, 33 bp, Homo sapien
aaaagttagctttgtctacacccaggaattacc

SEQ ID NO: 267103 - DNA, 33 bp, Homo sapien
agctatcattatccgcaccagctccagcagcct

SEQ ID NO: 267104 - DNA, 33 bp, Homo sapien
agctatcattatccgcgccagctccagcagcct

SEQ ID NO: 267105 - DNA, 33 bp, Homo sapien
ggctgtctggctgcaaatgatcctcacaagccc

SEQ ID NO: 267106 - DNA, 33 bp, Homo sapien
ggctgtctggctgcaagtgatcctcacaagccc

SEQ ID NO: 267107 - DNA, 33 bp, Homo sapien
atgctcatcaactgtcaatgttcacatattaca

SEQ ID NO: 267108 - DNA, 33 bp, Homo sapien
atgctcatcaactgtctatgttcacatattaca

SEQ ID NO: 267109 - DNA, 33 bp, Homo sapien
ggttcaatgccctgaacactgttggtttagtag

SEQ ID NO: 267110 - DNA, 33 bp, Homo sapien
ggttcaatgccctgaatactgttggtttagtag

SEQ ID NO: 267111 - DNA, 33 bp, Homo sapien
gatggcagatattcaactcctgctcagctgctt

SEQ ID NO: 267112 - DNA, 33 bp, Homo sapien
gatggcagatattcaagtcctgctcagctgctt

SEQ ID NO: 267113 - DNA, 33 bp, Homo sapien
tcaaagccacattttcaccagacaaaaggacaa

SEQ ID NO: 267114 - DNA, 33 bp, Homo sapien
tcaaagccacattttcgccagacaaaaggacaa

SEQ ID NO: 267115 - DNA, 33 bp, Homo sapien
tactttctgtccaaccgctgatgtgcttctgcc

SEQ ID NO: 267116 - DNA, 33 bp, Homo sapien
tactttctgtccaacctctgatgtgcttctgcc

SEQ ID NO: 267117 - DNA, 33 bp, Homo sapien
gtggcagggacttcacagagcttggcacctaat

SEQ ID NO: 267118 - DNA, 33 bp, Homo sapien
gtggcagggacttcacggagcttggcacctaat

SEQ ID NO: 267119 - DNA, 33 bp, Homo sapien
taaaagttctgaaatacgaacacgcctgcttta

SEQ ID NO: 267120 - DNA, 33 bp, Homo sapien
taaaagttctgaaataggaacacgcctgcttta

SEQ ID NO: 267121 - DNA, 33 bp, Homo sapien
taaaagcaaccgtttaaggagcattggctctgt

SEQ ID NO: 267122 - DNA, 33 bp, Homo sapien
taaaagcaaccgtttagggagcattggctctgt

SEQ ID NO: 267123 - DNA, 33 bp, Homo sapien
cacaagtgtctttcaaagagaagtgaaaaccct

SEQ ID NO: 267124 - DNA, 33 bp, Homo sapien
cacaagtgtctttcaaggagaagtgaaaaccct

SEQ ID NO: 267125 - DNA, 33 bp, Homo sapien
ccatcatcatccttgacagaacctttatgccag

SEQ ID NO: 267126 - DNA, 33 bp, Homo sapien
ccatcatcatccttgagagaacctttatgccag

SEQ ID NO: 267127 - DNA, 33 bp, Homo sapien
tgttgaagatactttaagatctctgtcttattc

SEQ ID NO: 267128 - DNA, 33 bp, Homo sapien
tgttgaagatactttaggatctctgtcttattc

SEQ ID NO: 267129 - DNA, 33 bp, Homo sapien
tggagttgtgacatcaacactattctgcctctg

SEQ ID NO: 267130 - DNA, 33 bp, Homo sapien
tggagttgtgacatcagcactattctgcctctg

SEQ ID NO: 267131 - DNA, 33 bp, Homo sapien
tccatcaatcccagcacagaatacccagtgcca

SEQ ID NO: 267132 - DNA, 33 bp, Homo sapien
tccatcaatcccagcagagaatacccagtgcca

SEQ ID NO: 267133 - DNA, 33 bp, Homo sapien
gtgcctggcctcttccacaatcttgatgcctta

SEQ ID NO: 267134 - DNA, 33 bp, Homo sapien
gtgcctggcctcttccgcaatcttgatgcctta

SEQ ID NO: 267135 - DNA, 33 bp, Homo sapien
ttctaaacatgacttacagagttttcttctggg

SEQ ID NO: 267136 - DNA, 33 bp, Homo sapien
ttctaaacatgacttatagagttttcttctggg

SEQ ID NO: 267137 - DNA, 33 bp, Homo sapien
agacacatggtaaacaaccagaaattactgata

SEQ ID NO: 267138 - DNA, 33 bp, Homo sapien
agacacatggtaaacatccagaaattactgata

SEQ ID NO: 267139 - DNA, 33 bp, Homo sapien
gggtgttagttatcacacagcagcaagaagccc

SEQ ID NO: 267140 - DNA, 33 bp, Homo sapien
gggtgttagttatcacgcagcagcaagaagccc

SEQ ID NO: 267141 - DNA, 33 bp, Homo sapien
tggaattccatgattcacagtccatttgtttga

SEQ ID NO: 267142 - DNA, 33 bp, Homo sapien
tggaattccatgattctcagtccatttgtttga

SEQ ID NO: 267143 - DNA, 33 bp, Homo sapien
tgagacaaagatgtgaggactagggatgtctgg

SEQ ID NO: 267144 - DNA, 33 bp, Homo sapien
tgagacaaagatgtgatgactagggatgtctgg

SEQ ID NO: 267145 - DNA, 33 bp, Homo sapien
tcaggccccgactggaaaactgtgcaaaggtct

SEQ ID NO: 267146 - DNA, 33 bp, Homo sapien
tcaggccccgactggagaactgtgcaaaggtct

SEQ ID NO: 267147 - DNA, 33 bp, Homo sapien
ttcctttgccatttcactattttcctcctttgt

SEQ ID NO: 267148 - DNA, 33 bp, Homo sapien
ttcctttgccatttcagtattttcctcctttgt

SEQ ID NO: 267149 - DNA, 33 bp, Homo sapien
cagcagtctttttcgaactattccaaaagcttg

SEQ ID NO: 267150 - DNA, 33 bp, Homo sapien
cagcagtctttttcgatctattccaaaagcttg

SEQ ID NO: 267151 - DNA, 33 bp, Homo sapien
gagatggatcattggaagacatggcctgggtct

SEQ ID NO: 267152 - DNA, 33 bp, Homo sapien
gagatggatcattggaggacatggcctgggtct

SEQ ID NO: 267153 - DNA, 33 bp, Homo sapien
cggatgcagcaagaaacgaagtcaggatgggag

SEQ ID NO: 267154 - DNA, 33 bp, Homo sapien
cggatgcagcaagaaaggaagtcaggatgggag

SEQ ID NO: 267155 - DNA, 33 bp, Homo sapien
cactgcagtccaggaaaacctggctgacccaca

SEQ ID NO: 267156 - DNA, 33 bp, Homo sapien
cactgcagtccaggaagacctggctgacccaca

SEQ ID NO: 267157 - DNA, 33 bp, Homo sapien
tctgtttcctttattaccatgtaagctttatga

SEQ ID NO: 267158 - DNA, 33 bp, Homo sapien
tctgtttcctttattatcatgtaagctttatga

SEQ ID NO: 267159 - DNA, 33 bp, Homo sapien
ttctaagacctttgaaatccacaagttaaggct

SEQ ID NO: 267160 - DNA, 33 bp, Homo sapien
ttctaagacctttgaactccacaagttaaggct

SEQ ID NO: 267161 - DNA, 33 bp, Homo sapien
ttggacaatgaaaaataaatatagaggttggca

SEQ ID NO: 267162 - DNA, 33 bp, Homo sapien
ttggacaatgaaaaatcaatatagaggttggca

SEQ ID NO: 267163 - DNA, 33 bp, Homo sapien
ggtatgtgattggccaaataaaagattgtccag

SEQ ID NO: 267164 - DNA, 33 bp, Homo sapien
ggtatgtgattggccagataaaagattgtccag

SEQ ID NO: 267165 - DNA, 33 bp, Homo sapien
gaagtaccaatgaacacccctaataatagactg

SEQ ID NO: 267166 - DNA, 33 bp, Homo sapien
gaagtaccaatgaacagccctaataatagactg

SEQ ID NO: 267167 - DNA, 33 bp, Homo sapien
ggacgccatttgcccaatgaggaaatcagctca

SEQ ID NO: 267168 - DNA, 33 bp, Homo sapien
ggacgccatttgcccagtgaggaaatcagctca

SEQ ID NO: 267169 - DNA, 33 bp, Homo sapien
ggaacttggtgtttgggatatgagaacctaact

SEQ ID NO: 267170 - DNA, 33 bp, Homo sapien
ggaacttggtgtttggtatatgagaacctaact

SEQ ID NO: 267171 - DNA, 33 bp, Homo sapien
aacttgccattagttcaaaggagagaaggtcct

SEQ ID NO: 267172 - DNA, 33 bp, Homo sapien
aacttgccattagttcgaaggagagaaggtcct

SEQ ID NO: 267173 - DNA, 33 bp, Homo sapien
tggtggcttttctccaataataacatagagtaa

SEQ ID NO: 267174 - DNA, 33 bp, Homo sapien
tggtggcttttctccagtaataacatagagtaa

SEQ ID NO: 267175 - DNA, 33 bp, Homo sapien
tgttcctcggtcttggacagacagcattcatgg

SEQ ID NO: 267176 - DNA, 33 bp, Homo sapien
tgttcctcggtcttgggcagacagcattcatgg

SEQ ID NO: 267177 - DNA, 33 bp, Homo sapien
ttctcgccattgtctacgcttccccgttgttag

SEQ ID NO: 267178 - DNA, 33 bp, Homo sapien
ttctcgccattgtctatgcttccccgttgttag

SEQ ID NO: 267179 - DNA, 33 bp, Homo sapien
taaaggaatcaccttacggcttccctttggcag

SEQ ID NO: 267180 - DNA, 33 bp, Homo sapien
taaaggaatcaccttatggcttccctttggcag

SEQ ID NO: 267181 - DNA, 33 bp, Homo sapien
tgaaattgatttcagacgctacaggatgtaacc

SEQ ID NO: 267182 - DNA, 33 bp, Homo sapien
tgaaattgatttcagatgctacaggatgtaacc

SEQ ID NO: 267183 - DNA, 33 bp, Homo sapien
catagataagcaccaaactaccatattgaaaga

SEQ ID NO: 267184 - DNA, 33 bp, Homo sapien
catagataagcaccaagctaccatattgaaaga

SEQ ID NO: 267185 - DNA, 33 bp, Homo sapien
aactctggtgcaagaaccaaacaggaccccctc

SEQ ID NO: 267186 - DNA, 33 bp, Homo sapien
aactctggtgcaagaagcaaacaggaccccctc

SEQ ID NO: 267187 - DNA, 33 bp, Homo sapien
atggtcatcaacaagtaaatggatgaaccgact

SEQ ID NO: 267188 - DNA, 33 bp, Homo sapien
atggtcatcaacaagtgaatggatgaaccgact

SEQ ID NO: 267189 - DNA, 33 bp, Homo sapien
gcggccctgggaatgtaacacagacggatgcac

SEQ ID NO: 267190 - DNA, 33 bp, Homo sapien
gcggccctgggaatgtgacacagacggatgcac

SEQ ID NO: 267191 - DNA, 33 bp, Homo sapien
acaaatacccctgtcaccccataagcaggcaga

SEQ ID NO: 267192 - DNA, 33 bp, Homo sapien
acaaatacccctgtcatcccataagcaggcaga

SEQ ID NO: 267193 - DNA, 33 bp, Homo sapien
aaagtgcttcgggcaaagtgagcagatttcctt

SEQ ID NO: 267194 - DNA, 33 bp, Homo sapien
aaagtgcttcgggcaatgtgagcagatttcctt

SEQ ID NO: 267195 - DNA, 33 bp, Homo sapien
caaagacacggacctcaccattctgggggactc

SEQ ID NO: 267196 - DNA, 33 bp, Homo sapien
caaagacacggacctcgccattctgggggactc

SEQ ID NO: 267197 - DNA, 33 bp, Homo sapien
ttatcttcttaatttcacagcaaacaatggact

SEQ ID NO: 267198 - DNA, 33 bp, Homo sapien
ttatcttcttaatttcgcagcaaacaatggact

SEQ ID NO: 267199 - DNA, 33 bp, Homo sapien
gtagaagaacttagtccaaaatgctaagagagc

SEQ ID NO: 267200 - DNA, 33 bp, Homo sapien
gtagaagaacttagtctaaaatgctaagagagc

SEQ ID NO: 267201 - DNA, 33 bp, Homo sapien
ttaagtgacttgctcaaggacccacagaactaa

SEQ ID NO: 267202 - DNA, 33 bp, Homo sapien
ttaagtgacttgctcagggacccacagaactaa

SEQ ID NO: 267203 - DNA, 33 bp, Homo sapien
ggccaaagccaggctcaaagatacaaggacaaa

SEQ ID NO: 267204 - DNA, 33 bp, Homo sapien
ggccaaagccaggctcgaagatacaaggacaaa

SEQ ID NO: 267205 - DNA, 33 bp, Homo sapien
tattattatcatcaaccctagtttataggtaaa

SEQ ID NO: 267206 - DNA, 33 bp, Homo sapien
tattattatcatcaactctagtttataggtaaa

SEQ ID NO: 267207 - DNA, 33 bp, Homo sapien
caaaacaacttgaaacaacttagagtgagaacc

SEQ ID NO: 267208 - DNA, 33 bp, Homo sapien
caaaacaacttgaaacgacttagagtgagaacc

SEQ ID NO: 267209 - DNA, 33 bp, Homo sapien
cccttttctggcctgcaatcacctcgctctgtc

SEQ ID NO: 267210 - DNA, 33 bp, Homo sapien
cccttttctggcctgcgatcacctcgctctgtc

SEQ ID NO: 267211 - DNA, 33 bp, Homo sapien
ataaaccactgacaagccttctgaggttactgt

SEQ ID NO: 267212 - DNA, 33 bp, Homo sapien
ataaaccactgacaaggcttctgaggttactgt

SEQ ID NO: 267213 - DNA, 33 bp, Homo sapien
taatgtctaaaaatctaaaatactggcttctat

SEQ ID NO: 267214 - DNA, 33 bp, Homo sapien
taatgtctaaaaatctgaaatactggcttctat

SEQ ID NO: 267215 - DNA, 33 bp, Homo sapien
gtcttgtccatttagaatcacagatggggttga

SEQ ID NO: 267216 - DNA, 33 bp, Homo sapien
gtcttgtccatttagactcacagatggggttga

SEQ ID NO: 267217 - DNA, 33 bp, Homo sapien
tcaggaaattaatgaacggaagggctgctctta

SEQ ID NO: 267218 - DNA, 33 bp, Homo sapien
tcaggaaattaatgaatggaagggctgctctta

SEQ ID NO: 267219 - DNA, 33 bp, Homo sapien
tgctcttagcagagtcgccagaactgaatatgc

SEQ ID NO: 267220 - DNA, 33 bp, Homo sapien
tgctcttagcagagtctccagaactgaatatgc

SEQ ID NO: 267221 - DNA, 33 bp, Homo sapien
taaacatatctaaacacagcatagaaaaggtac

SEQ ID NO: 267222 - DNA, 33 bp, Homo sapien
taaacatatctaaacatagcatagaaaaggtac

SEQ ID NO: 267223 - DNA, 33 bp, Homo sapien
caattttagtactttacaagccaagtatgtttg

SEQ ID NO: 267224 - DNA, 33 bp, Homo sapien
caattttagtactttataagccaagtatgtttg

SEQ ID NO: 267225 - DNA, 33 bp, Homo sapien
caccagtggcttccaacaaaacaagagtcactt

SEQ ID NO: 267226 - DNA, 33 bp, Homo sapien
caccagtggcttccaagaaaacaagagtcactt

SEQ ID NO: 267227 - DNA, 33 bp, Homo sapien
aggaagttttgcaagcagagaagtattgtactt

SEQ ID NO: 267228 - DNA, 33 bp, Homo sapien
aggaagttttgcaagcggagaagtattgtactt

SEQ ID NO: 267229 - DNA, 33 bp, Homo sapien
tagtatgcgtggaaagacttaccttaatctcta

SEQ ID NO: 267230 - DNA, 33 bp, Homo sapien
tagtatgcgtggaaaggcttaccttaatctcta

SEQ ID NO: 267231 - DNA, 33 bp, Homo sapien
ccagtaattaacatataaaaaagcctcatgtta

SEQ ID NO: 267232 - DNA, 33 bp, Homo sapien
ccagtaattaacatattaaaaagcctcatgtta

SEQ ID NO: 267233 - DNA, 33 bp, Homo sapien
ggattttaatctgtcaaagtttcagtgttcttg

SEQ ID NO: 267234 - DNA, 33 bp, Homo sapien
ggattttaatctgtcagagtttcagtgttcttg

SEQ ID NO: 267235 - DNA, 33 bp, Homo sapien
acctaaaaagcctccacgactcctcctggccct

SEQ ID NO: 267236 - DNA, 33 bp, Homo sapien
acctaaaaagcctccatgactcctcctggccct

SEQ ID NO: 267237 - DNA, 33 bp, Homo sapien
tgcagaacctagagcaaagcgccaaacctgtct

SEQ ID NO: 267238 - DNA, 33 bp, Homo sapien
tgcagaacctagagcacagcgccaaacctgtct

SEQ ID NO: 267239 - DNA, 33 bp, Homo sapien
tcatcttcagaaatacacaggcagagttatgac

SEQ ID NO: 267240 - DNA, 33 bp, Homo sapien
tcatcttcagaaatacgcaggcagagttatgac

SEQ ID NO: 267241 - DNA, 33 bp, Homo sapien
attatattggtctctacgcctttcttcatgtat

SEQ ID NO: 267242 - DNA, 33 bp, Homo sapien
attatattggtctctatgcctttcttcatgtat

SEQ ID NO: 267243 - DNA, 33 bp, Homo sapien
tctatacctaaagcacagctcaagtgcttggag

SEQ ID NO: 267244 - DNA, 33 bp, Homo sapien
tctatacctaaagcacggctcaagtgcttggag

SEQ ID NO: 267245 - DNA, 33 bp, Homo sapien
gttgctgtcaaaaactcaaaatattgtttattc

SEQ ID NO: 267246 - DNA, 33 bp, Homo sapien
gttgctgtcaaaaactgaaaatattgtttattc

SEQ ID NO: 267247 - DNA, 33 bp, Homo sapien
gtagtgaagacaaagacgactttatcctggtcc

SEQ ID NO: 267248 - DNA, 33 bp, Homo sapien
gtagtgaagacaaagatgactttatcctggtcc

SEQ ID NO: 267249 - DNA, 33 bp, Homo sapien
ctaaagctatgaacaaatacccaagggtgactt

SEQ ID NO: 267250 - DNA, 33 bp, Homo sapien
ctaaagctatgaacaagtacccaagggtgactt

SEQ ID NO: 267251 - DNA, 33 bp, Homo sapien
aaggagattattaggaaactgacaaaactggaa

SEQ ID NO: 267252 - DNA, 33 bp, Homo sapien
aaggagattattaggagactgacaaaactggaa

SEQ ID NO: 267253 - DNA, 33 bp, Homo sapien
tatttagttgccttgaaccttctcaactgtagc

SEQ ID NO: 267254 - DNA, 33 bp, Homo sapien
tatttagttgccttgagccttctcaactgtagc

SEQ ID NO: 267255 - DNA, 33 bp, Homo sapien
aaggcacacatcagtacaaatgcatgctattcc

SEQ ID NO: 267256 - DNA, 33 bp, Homo sapien
aaggcacacatcagtagaaatgcatgctattcc

SEQ ID NO: 267257 - DNA, 33 bp, Homo sapien
gtcttcacttttgcaccggcaactatactccaa

SEQ ID NO: 267258 - DNA, 33 bp, Homo sapien
gtcttcacttttgcactggcaactatactccaa

SEQ ID NO: 267259 - DNA, 33 bp, Homo sapien
tatcagatgacagatacaagcttggcaaactta

SEQ ID NO: 267260 - DNA, 33 bp, Homo sapien
tatcagatgacagatataagcttggcaaactta

SEQ ID NO: 267261 - DNA, 33 bp, Homo sapien
ggcattgtggcacatcagaaggcacagttgtag

SEQ ID NO: 267262 - DNA, 33 bp, Homo sapien
ggcattgtggcacatcggaaggcacagttgtag

SEQ ID NO: 267263 - DNA, 33 bp, Homo sapien
acagggagaagacggaatagagtaaactgggat

SEQ ID NO: 267264 - DNA, 33 bp, Homo sapien
acagggagaagacggagtagagtaaactgggat

SEQ ID NO: 267265 - DNA, 33 bp, Homo sapien
cccacccatatgcaaaatctattctggcagaga

SEQ ID NO: 267266 - DNA, 33 bp, Homo sapien
cccacccatatgcaaagtctattctggcagaga

SEQ ID NO: 267267 - DNA, 33 bp, Homo sapien
tgttttacagttcagacggtgggccttattccg

SEQ ID NO: 267268 - DNA, 33 bp, Homo sapien
tgttttacagttcagatggtgggccttattccg

SEQ ID NO: 267269 - DNA, 33 bp, Homo sapien
aatcaccttgtggggaaagcagtcaatgtgttg

SEQ ID NO: 267270 - DNA, 33 bp, Homo sapien
aatcaccttgtggggagagcagtcaatgtgttg

SEQ ID NO: 267271 - DNA, 33 bp, Homo sapien
cttatatatgaggaacaaagtagagttttgtct

SEQ ID NO: 267272 - DNA, 33 bp, Homo sapien
cttatatatgaggaacgaagtagagttttgtct

SEQ ID NO: 267273 - DNA, 33 bp, Homo sapien
ggaaggaaaattatcaactgacatatagtctga

SEQ ID NO: 267274 - DNA, 33 bp, Homo sapien
ggaaggaaaattatcagctgacatatagtctga

SEQ ID NO: 267275 - DNA, 33 bp, Homo sapien; identical to SEQ ID NO: 267273

SEQ ID NO: 267276 - DNA, 33 bp, Homo sapien; identical to SEQ ID NO: 267274

SEQ ID NO: 267277 - DNA, 33 bp, Homo sapien
acacctcaaggtcaacaagtacttcagtatact

SEQ ID NO: 267278 - DNA, 33 bp, Homo sapien
acacctcaaggtcaacgagtacttcagtatact

SEQ ID NO: 267279 - DNA, 33 bp, Homo sapien
cttcctctgtgacttacgtttttacatcctttg

SEQ ID NO: 267280 - DNA, 33 bp, Homo sapien
cttcctctgtgacttaggtttttacatcctttg

SEQ ID NO: 267281 - DNA, 33 bp, Homo sapien
aagtatataacttgacaaattttgacaaatata

SEQ ID NO: 267282 - DNA, 33 bp, Homo sapien
aagtatataacttgactaattttgacaaatata

SEQ ID NO: 267283 - DNA, 33 bp, Homo sapien
tttagtgcccaaaaccaaaggacaaagtaaggg

SEQ ID NO: 267284 - DNA, 33 bp, Homo sapien
tttagtgcccaaaaccgaaggacaaagtaaggg

SEQ ID NO: 267285 - DNA, 33 bp, Homo sapien
aaatgcagaagtgaaaaagtcaacggctagctt

SEQ ID NO: 267286 - DNA, 33 bp, Homo sapien
aaatgcagaagtgaaagagtcaacggctagctt

SEQ ID NO: 267287 - DNA, 33 bp, Homo sapien
ggtacaggtcagggaacgtctgcatcttcactt

SEQ ID NO: 267288 - DNA, 33 bp, Homo sapien
ggtacaggtcagggaatgtctgcatcttcactt

SEQ ID NO: 267289 - DNA, 33 bp, Homo sapien
ccagagtgattcttcacgagagagacactgtga

SEQ ID NO: 267290 - DNA, 33 bp, Homo sapien
ccagagtgattcttcatgagagagacactgtga

SEQ ID NO: 267291 - DNA, 33 bp, Homo sapien
ttgaaattgtgtcctccgagctcctgcccagtc

SEQ ID NO: 267292 - DNA, 33 bp, Homo sapien
ttgaaattgtgtcctctgagctcctgcccagtc

SEQ ID NO: 267293 - DNA, 33 bp, Homo sapien
tttcccagcagatttacaggctttgagttaacc

SEQ ID NO: 267294 - DNA, 33 bp, Homo sapien
tttcccagcagatttataggctttgagttaacc

SEQ ID NO: 267295 - DNA, 33 bp, Homo sapien
tgtcactatttatagaactgcatactgtgactt

SEQ ID NO: 267296 - DNA, 33 bp, Homo sapien
tgtcactatttatagagctgcatactgtgactt

SEQ ID NO: 267297 - DNA, 33 bp, Homo sapien
ttcctaaatagactaacggaaacaaggacaagt

SEQ ID NO: 267298 - DNA, 33 bp, Homo sapien
ttcctaaatagactaatggaaacaaggacaagt

SEQ ID NO: 267299 - DNA, 33 bp, Homo sapien; identical to SEQ ID NO: 267297

SEQ ID NO: 267300 - DNA, 33 bp, Homo sapien; identical to SEQ ID NO: 267298

SEQ ID NO: 267301 - DNA, 33 bp, Homo sapien
atacatatggcatagtgaagtacaattgctttt

SEQ ID NO: 267302 - DNA, 33 bp, Homo sapien
atacatatggcatagttaagtacaattgctttt

SEQ ID NO: 267303 - DNA, 33 bp, Homo sapien
gagtgcaagcaggctaacaattttaataatagt

SEQ ID NO: 267304 - DNA, 33 bp, Homo sapien
gagtgcaagcaggctatcaattttaataatagt

SEQ ID NO: 267305 - DNA, 33 bp, Homo sapien
agtaatggtcggtagacagatcttagccacttt

SEQ ID NO: 267306 - DNA, 33 bp, Homo sapien
agtaatggtcggtagatagatcttagccacttt

SEQ ID NO: 267307 - DNA, 33 bp, Homo sapien
gagaaagaaaaggtaacgagaccattgtagaaa

SEQ ID NO: 267308 - DNA, 33 bp, Homo sapien
gagaaagaaaaggtaaggagaccattgtagaaa

SEQ ID NO: 267309 - DNA, 33 bp, Homo sapien
ttgctacttcaaggcagcatctgacatttctcc

SEQ ID NO: 267310 - DNA, 33 bp, Homo sapien
ttgctacttcaaggcatcatctgacatttctcc

SEQ ID NO: 267311 - DNA, 33 bp, Homo sapien
tagccaagtgtagtgacgcctggttgcagaccc

SEQ ID NO: 267312 - DNA, 33 bp, Homo sapien
tagccaagtgtagtgatgcctggttgcagaccc

SEQ ID NO: 267313 - DNA, 33 bp, Homo sapien
gttggaggacttatacacaagttttcaagactc

SEQ ID NO: 267314 - DNA, 33 bp, Homo sapien
gttggaggacttatacccaagttttcaagactc

SEQ ID NO: 267315 - DNA, 33 bp, Homo sapien
gacctctatattggtcaatgactgatctccaat

SEQ ID NO: 267316 - DNA, 33 bp, Homo sapien
gacctctatattggtctatgactgatctccaat

SEQ ID NO: 267317 - DNA, 33 bp, Homo sapien
aatataaactttgctaacagtgaaaattaggtt

SEQ ID NO: 267318 - DNA, 33 bp, Homo sapien
aatataaactttgctatcagtgaaaattaggtt

SEQ ID NO: 267319 - DNA, 33 bp, Homo sapien
cccttagaactgtaagcccttaaaaggggcagg

SEQ ID NO: 267320 - DNA, 33 bp, Homo sapien
cccttagaactgtaaggccttaaaaggggcagg

SEQ ID NO: 267321 - DNA, 33 bp, Homo sapien
tatactggtctgtaaaacttggttcctggattg

SEQ ID NO: 267322 - DNA, 33 bp, Homo sapien
tatactggtctgtaaaccttggttcctggattg

SEQ ID NO: 267323 - DNA, 33 bp, Homo sapien
acagctctttaccgctaaagttacctggaatgg

SEQ ID NO: 267324 - DNA, 33 bp, Homo sapien
acagctctttaccgctgaagttacctggaatgg

SEQ ID NO: 267325 - DNA, 33 bp, Homo sapien
cattgagtttcctgtcaatacttatcctgaaca

SEQ ID NO: 267326 - DNA, 33 bp, Homo sapien
cattgagtttcctgtcgatacttatcctgaaca

SEQ ID NO: 267327 - DNA, 33 bp, Homo sapien
agctttattcggccagaagcatcagcagacttg

SEQ ID NO: 267328 - DNA, 33 bp, Homo sapien
agctttattcggccaggagcatcagcagacttg

SEQ ID NO: 267329 - DNA, 33 bp, Homo sapien
ttcagttatctggtgaaggtctggtctttttgc

SEQ ID NO: 267330 - DNA, 33 bp, Homo sapien
ttcagttatctggtgagggtctggtctttttgc

SEQ ID NO: 267331 - DNA, 33 bp, Homo sapien
caagttttttggctgactatactgatgaagata

SEQ ID NO: 267332 - DNA, 33 bp, Homo sapien
caagttttttggctgattatactgatgaagata

SEQ ID NO: 267333 - DNA, 33 bp, Homo sapien
tgtgtggaagagcccaatgacatgattactgag

SEQ ID NO: 267334 - DNA, 33 bp, Homo sapien
tgtgtggaagagcccagtgacatgattactgag

SEQ ID NO: 267335 - DNA, 33 bp, Homo sapien
tgaccagtaactggctaaagtatgagtcatcaa

SEQ ID NO: 267336 - DNA, 33 bp, Homo sapien
tgaccagtaactggctgaagtatgagtcatcaa

SEQ ID NO: 267337 - DNA, 33 bp, Homo sapien
tttaggatatatgttgaaagcaaaatttcagca

SEQ ID NO: 267338 - DNA, 33 bp, Homo sapien
tttaggatatatgttgtaagcaaaatttcagca

SEQ ID NO: 267339 - DNA, 33 bp, Homo sapien
ggtcagtcaatttcaacacaagtggcactttac

SEQ ID NO: 267340 - DNA, 33 bp, Homo sapien
ggtcagtcaatttcaatacaagtggcactttac

SEQ ID NO: 267341 - DNA, 33 bp, Homo sapien
actattattatctcccaagtttactatatcata

SEQ ID NO: 267342 - DNA, 33 bp, Homo sapien
actattattatctcccgagtttactatatcata

SEQ ID NO: 267343 - DNA, 33 bp, Homo sapien
cctcttatgacaatgaataagactaagatattt

SEQ ID NO: 267344 - DNA, 33 bp, Homo sapien
cctcttatgacaatgagtaagactaagatattt

SEQ ID NO: 267345 - DNA, 33 bp, Homo sapien
gtgaatcttttctacaagttgcctttatggttt

SEQ ID NO: 267346 - DNA, 33 bp, Homo sapien
gtgaatcttttctacaggttgcctttatggttt

SEQ ID NO: 267347 - DNA, 33 bp, Homo sapien
aaatgttacttcaggaccctactaccatgctta

SEQ ID NO: 267348 - DNA, 33 bp, Homo sapien
aaatgttacttcaggagcctactaccatgctta

SEQ ID NO: 267349 - DNA, 33 bp, Homo sapien
aaaagctgacttgaaagaatgtggcaataaact

SEQ ID NO: 267350 - DNA, 33 bp, Homo sapien
aaaagctgacttgaaataatgtggcaataaact

SEQ ID NO: 267351 - DNA, 33 bp, Homo sapien
cctgtgctgtgatttacctatagagagaggcct

SEQ ID NO: 267352 - DNA, 33 bp, Homo sapien
cctgtgctgtgatttagctatagagagaggcct

SEQ ID NO: 267353 - DNA, 33 bp, Homo sapien
gtagcagtggcatgtgaaaaattcttgttttaa

SEQ ID NO: 267354 - DNA, 33 bp, Homo sapien
gtagcagtggcatgtgcaaaattcttgttttaa

SEQ ID NO: 267355 - DNA, 33 bp, Homo sapien
actgtgtccatatggtcaaaattatgagtcttg

SEQ ID NO: 267356 - DNA, 33 bp, Homo sapien
actgtgtccatatggtgaaaattatgagtcttg

SEQ ID NO: 267357 - DNA, 33 bp, Homo sapien
atattctgtaggtaccgcatattcaacgtatct

SEQ ID NO: 267358 - DNA, 33 bp, Homo sapien
atattctgtaggtacctcatattcaacgtatct

SEQ ID NO: 267359 - DNA, 33 bp, Homo sapien
tctcaaaaggtgtgtacatttggcatttggaat

SEQ ID NO: 267360 - DNA, 33 bp, Homo sapien
tctcaaaaggtgtgtatatttggcatttggaat

SEQ ID NO: 267361 - DNA, 33 bp, Homo sapien
tgtcattctgggtgtcaacaagtagagccagac

SEQ ID NO: 267362 - DNA, 33 bp, Homo sapien
tgtcattctgggtgtcgacaagtagagccagac

SEQ ID NO: 267363 - DNA, 33 bp, Homo sapien
atgtaagcaataagccacaataatattagcact

SEQ ID NO: 267364 - DNA, 33 bp, Homo sapien
atgtaagcaataagccgcaataatattagcact

SEQ ID NO: 267365 - DNA, 33 bp, Homo sapien
gagatacagacagctaaagtggtgacagtccta

SEQ ID NO: 267366 - DNA, 33 bp, Homo sapien
gagatacagacagctagagtggtgacagtccta

SEQ ID NO: 267367 - DNA, 33 bp, Homo sapien
tgtttgctccaaaccaatggtctcacatatatc

SEQ ID NO: 267368 - DNA, 33 bp, Homo sapien
tgtttgctccaaaccagtggtctcacatatatc

SEQ ID NO: 267369 - DNA, 33 bp, Homo sapien
actgctggttactatgaaaaagcaagctgggaa

SEQ ID NO: 267370 - DNA, 33 bp, Homo sapien
actgctggttactatggaaaagcaagctgggaa

SEQ ID NO: 267371 - DNA, 33 bp, Homo sapien
atagtaacctgacaaccggatttgtgacatcat

SEQ ID NO: 267372 - DNA, 33 bp, Homo sapien
atagtaacctgacaactggatttgtgacatcat

SEQ ID NO: 267373 - DNA, 33 bp, Homo sapien
tcagggatcaccagtaactagctaattgatatg

SEQ ID NO: 267374 - DNA, 33 bp, Homo sapien
tcagggatcaccagtatctagctaattgatatg

SEQ ID NO: 267375 - DNA, 33 bp, Homo sapien
tactctgaaataggtcaaattaaaagaagtcct

SEQ ID NO: 267376 - DNA, 33 bp, Homo sapien
tactctgaaataggtcgaattaaaagaagtcct

SEQ ID NO: 267377 - DNA, 33 bp, Homo sapien
gcttattacagaatcactcatgcctatacttgt

SEQ ID NO: 267378 - DNA, 33 bp, Homo sapien
gcttattacagaatcattcatgcctatacttgt

SEQ ID NO: 267379 - DNA, 33 bp, Homo sapien
aatgaccatgataacaataatgcctgcatgaca

SEQ ID NO: 267380 - DNA, 33 bp, Homo sapien
aatgaccatgataacagtaatgcctgcatgaca

SEQ ID NO: 267381 - DNA, 33 bp, Homo sapien
atcgcttgtaagagataaagttgggaaatgttg

SEQ ID NO: 267382 - DNA, 33 bp, Homo sapien
atcgcttgtaagagatgaagttgggaaatgttg

SEQ ID NO: 267383 - DNA, 33 bp, Homo sapien
agctacaaagttatctcagacccaggcttgttg

SEQ ID NO: 267384 - DNA, 33 bp, Homo sapien
agctacaaagttatctgagacccaggcttgttg

SEQ ID NO: 267385 - DNA, 33 bp, Homo sapien
aatatatagtatagtcaatgctttacaaagtct

SEQ ID NO: 267386 - DNA, 33 bp, Homo sapien
aatatatagtatagtctatgctttacaaagtct

SEQ ID NO: 267387 - DNA, 33 bp, Homo sapien
atatccctgtgaatgaagaaaaccgaaggtcct

SEQ ID NO: 267388 - DNA, 33 bp, Homo sapien
atatccctgtgaatgaggaaaaccgaaggtcct

SEQ ID NO: 267389 - DNA, 33 bp, Homo sapien
aacacacaggtgacgactcatctcagcatctga

SEQ ID NO: 267390 - DNA, 33 bp, Homo sapien
aacacacaggtgacgattcatctcagcatctga

SEQ ID NO: 267391 - DNA, 33 bp, Homo sapien
aatgactttatgaaccaccttaagtttgtatgt

SEQ ID NO: 267392 - DNA, 33 bp, Homo sapien
aatgactttatgaaccgccttaagtttgtatgt

SEQ ID NO: 267393 - DNA, 33 bp, Homo sapien
tactgatagattttagaatactgcatcacatta

SEQ ID NO: 267394 - DNA, 33 bp, Homo sapien
tactgatagattttaggatactgcatcacatta

SEQ ID NO: 267395 - DNA, 33 bp, Homo sapien
ccccgtatttcaagcacgttagagaaagtgtat

SEQ ID NO: 267396 - DNA, 33 bp, Homo sapien
ccccgtatttcaagcatgttagagaaagtgtat

SEQ ID NO: 267397 - DNA, 33 bp, Homo sapien
ggaaaacagtgctttacgggcttctaatacata

SEQ ID NO: 267398 - DNA, 33 bp, Homo sapien
ggaaaacagtgctttaggggcttctaatacata

SEQ ID NO: 267399 - DNA, 33 bp, Homo sapien
tgaagaatgaaaactcaagttaataaacaattg

SEQ ID NO: 267400 - DNA, 33 bp, Homo sapien
tgaagaatgaaaactccagttaataaacaattg

SEQ ID NO: 267401 - DNA, 33 bp, Homo sapien
tctctccagaggtctaagatctccgagagggct

SEQ ID NO: 267402 - DNA, 33 bp, Homo sapien
tctctccagaggtctatgatctccgagagggct

SEQ ID NO: 267403 - DNA, 33 bp, Homo sapien
ttgagatcaacttgagaagaaaaaggaatagag

SEQ ID NO: 267404 - DNA, 33 bp, Homo sapien
ttgagatcaacttgaggagaaaaaggaatagag

SEQ ID NO: 267405 - DNA, 33 bp, Homo sapien
tgcgaagaacaccccactgctttccactcttcc

SEQ ID NO: 267406 - DNA, 33 bp, Homo sapien
tgcgaagaacaccccattgctttccactcttcc

SEQ ID NO: 267407 - DNA, 33 bp, Homo sapien
aatttgttggaataaacttgctatcaaaaatga

SEQ ID NO: 267408 - DNA, 33 bp, Homo sapien
aatttgttggaataaatttgctatcaaaaatga

SEQ ID NO: 267409 - DNA, 33 bp, Homo sapien
aataccctatttgcaacatcaagtcaataattc

SEQ ID NO: 267410 - DNA, 33 bp, Homo sapien
aataccctatttgcaatatcaagtcaataattc

SEQ ID NO: 267411 - DNA, 33 bp, Homo sapien
ctggcatttctaataaaatagcattcctgttgc

SEQ ID NO: 267412 - DNA, 33 bp, Homo sapien
ctggcatttctaataatatagcattcctgttgc

SEQ ID NO: 267413 - DNA, 33 bp, Homo sapien
aggaggtgaagtatgacaaacagctattgtttg

SEQ ID NO: 267414 - DNA, 33 bp, Homo sapien
aggaggtgaagtatgataaacagctattgtttg

SEQ ID NO: 267415 - DNA, 33 bp, Homo sapien
aataataacttgaaaaaccaaacaatggaggga

SEQ ID NO: 267416 - DNA, 33 bp, Homo sapien
aataataacttgaaaagccaaacaatggaggga

SEQ ID NO: 267417 - DNA, 33 bp, Homo sapien
atataagaggaacagaatagaagcttaactcat

SEQ ID NO: 267418 - DNA, 33 bp, Homo sapien
atataagaggaacagagtagaagcttaactcat

SEQ ID NO: 267419 - DNA, 33 bp, Homo sapien
ttcctagcatagctgaccaaatgacatgcaaac

SEQ ID NO: 267420 - DNA, 33 bp, Homo sapien
ttcctagcatagctgatcaaatgacatgcaaac

SEQ ID NO: 267421 - DNA, 33 bp, Homo sapien
gtcacatatatacactcacctgagttctatcct

SEQ ID NO: 267422 - DNA, 33 bp, Homo sapien
gtcacatatatacacttacctgagttctatcct

SEQ ID NO: 267423 - DNA, 33 bp, Homo sapien
ttgtcacagtttagaagagacatttaaaatata

SEQ ID NO: 267424 - DNA, 33 bp, Homo sapien
ttgtcacagtttagaatagacatttaaaatata

SEQ ID NO: 267425 - DNA, 33 bp, Homo sapien
ggaatcttcgttaggaaaaggaaggcagggtgt

SEQ ID NO: 267426 - DNA, 33 bp, Homo sapien
ggaatcttcgttaggataaggaaggcagggtgt

SEQ ID NO: 267427 - DNA, 33 bp, Homo sapien
tgtaatccttatcatacagaaacgtacctggca

SEQ ID NO: 267428 - DNA, 33 bp, Homo sapien
tgtaatccttatcatatagaaacgtacctggca

SEQ ID NO: 267429 - DNA, 33 bp, Homo sapien
tttattctagttcataacggccttgtgttgcca

SEQ ID NO: 267430 - DNA, 33 bp, Homo sapien
tttattctagttcatatcggccttgtgttgcca

SEQ ID NO: 267431 - DNA, 33 bp, Homo sapien
ggcactgttctagacccccccagaagaaaaaac

SEQ ID NO: 267432 - DNA, 33 bp, Homo sapien
ggcactgttctagacctccccagaagaaaaaac

SEQ ID NO: 267433 - DNA, 33 bp, Homo sapien
ataagagtggctaagaactcaccgaatgagtta

SEQ ID NO: 267434 - DNA, 33 bp, Homo sapien
ataagagtggctaagatctcaccgaatgagtta

SEQ ID NO: 267435 - DNA, 33 bp, Homo sapien
tcactaaatgatttcaggtgaattagggccagg

SEQ ID NO: 267436 - DNA, 33 bp, Homo sapien
tcactaaatgatttcatgtgaattagggccagg

SEQ ID NO: 267437 - DNA, 33 bp, Homo sapien
atcatgccatatataaccttctgggactttttc

SEQ ID NO: 267438 - DNA, 33 bp, Homo sapien
atcatgccatatataatcttctgggactttttc

SEQ ID NO: 267439 - DNA, 33 bp, Homo sapien
tctccatcgtgggcctcaagttcaaaagcatgg

SEQ ID NO: 267440 - DNA, 33 bp, Homo sapien
tctccatcgtgggccttaagttcaaaagcatgg

SEQ ID NO: 267441 - DNA, 33 bp, Homo sapien
gcttttgtgcaagcgaagaccactctcttctat

SEQ ID NO: 267442 - DNA, 33 bp, Homo sapien
gcttttgtgcaagcgaggaccactctcttctat

SEQ ID NO: 267443 - DNA, 33 bp, Homo sapien
tggactatgcattggaactaggtggtctttatc

SEQ ID NO: 267444 - DNA, 33 bp, Homo sapien
tggactatgcattggagctaggtggtctttatc

SEQ ID NO: 267445 - DNA, 33 bp, Homo sapien
atttgctcttccttaactcatgaacaacacagc

SEQ ID NO: 267446 - DNA, 33 bp, Homo sapien
atttgctcttccttaagtcatgaacaacacagc

SEQ ID NO: 267447 - DNA, 33 bp, Homo sapien
taatttacatttgttgaacggatgaatgagtga

SEQ ID NO: 267448 - DNA, 33 bp, Homo sapien
taatttacatttgttggacggatgaatgagtga

SEQ ID NO: 267449 - DNA, 33 bp, Homo sapien
aactgattaaccacaaatgcattattccaacaa

SEQ ID NO: 267450 - DNA, 33 bp, Homo sapien
aactgattaaccacaagtgcattattccaacaa

SEQ ID NO: 267451 - DNA, 33 bp, Homo sapien
caagactcctgcttgacacagtggagcaaaaag

SEQ ID NO: 267452 - DNA, 33 bp, Homo sapien
caagactcctgcttgagacagtggagcaaaaag

SEQ ID NO: 267453 - DNA, 33 bp, Homo sapien
gtttcctctgtgggcaggtgtcagcttagtttg

SEQ ID NO: 267454 - DNA, 33 bp, Homo sapien
gtttcctctgtgggcatgtgtcagcttagtttg

SEQ ID NO: 267455 - DNA, 33 bp, Homo sapien
ccagagatgattagtacaaggctgagtaggtgg

SEQ ID NO: 267456 - DNA, 33 bp, Homo sapien
ccagagatgattagtagaaggctgagtaggtgg

SEQ ID NO: 267457 - DNA, 33 bp, Homo sapien
aactgaggctggggccaaaggattaagtgatga

SEQ ID NO: 267458 - DNA, 33 bp, Homo sapien
aactgaggctggggccgaaggattaagtgatga

SEQ ID NO: 267459 - DNA, 33 bp, Homo sapien
tgcacacaattggacaagaagcaggcctggcac

SEQ ID NO: 267460 - DNA, 33 bp, Homo sapien
tgcacacaattggacaggaagcaggcctggcac

SEQ ID NO: 267461 - DNA, 33 bp, Homo sapien
ggaatggttttaagcaagtgatggtgaggccat

SEQ ID NO: 267462 - DNA, 33 bp, Homo sapien
ggaatggttttaagcaggtgatggtgaggccat

SEQ ID NO: 267463 - DNA, 33 bp, Homo sapien
ggcatagcaacaccatcaaatgccaattagcca

SEQ ID NO: 267464 - DNA, 33 bp, Homo sapien
ggcatagcaacaccatgaaatgccaattagcca

SEQ ID NO: 267465 - DNA, 33 bp, Homo sapien
ttgttttgtgtaactaactaggagtggagtttc

SEQ ID NO: 267466 - DNA, 33 bp, Homo sapien
ttgttttgtgtaactatctaggagtggagtttc

SEQ ID NO: 267467 - DNA, 33 bp, Homo sapien
caatctatcacaaccaataaggaaggaaaaaca

SEQ ID NO: 267468 - DNA, 33 bp, Homo sapien
caatctatcacaaccagtaaggaaggaaaaaca

SEQ ID NO: 267469 - DNA, 33 bp, Homo sapien
cctcctggacttaggaacatctagattccagca

SEQ ID NO: 267470 - DNA, 33 bp, Homo sapien
cctcctggacttaggagcatctagattccagca

SEQ ID NO: 267471 - DNA, 33 bp, Homo sapien
ttaggtcaaaactgtacaatgttcagctctgat

SEQ ID NO: 267472 - DNA, 33 bp, Homo sapien
ttaggtcaaaactgtagaatgttcagctctgat

SEQ ID NO: 267473 - DNA, 33 bp, Homo sapien
gattttgctccacgaggattgctcattctacgt

SEQ ID NO: 267474 - DNA, 33 bp, Homo sapien
gattttgctccacgagtattgctcattctacgt

SEQ ID NO: 267475 - DNA, 33 bp, Homo sapien
aggtgatggttagtccgcttgacatctacaagt

SEQ ID NO: 267476 - DNA, 33 bp, Homo sapien
aggtgatggttagtcctcttgacatctacaagt

SEQ ID NO: 267477 - DNA, 33 bp, Homo sapien
agatgggattgtgttacggatcttgagataaga

SEQ ID NO: 267478 - DNA, 33 bp, Homo sapien
agatgggattgtgttatggatcttgagataaga

SEQ ID NO: 267479 - DNA, 33 bp, Homo sapien
cccaaagcagtgagtacataaggacacactgaa

SEQ ID NO: 267480 - DNA, 33 bp, Homo sapien
cccaaagcagtgagtatataaggacacactgaa

SEQ ID NO: 267481 - DNA, 33 bp, Homo sapien
aaaataattctgcatgacaatcagacaaaaatc

SEQ ID NO: 267482 - DNA, 33 bp, Homo sapien
aaaataattctgcatggcaatcagacaaaaatc

SEQ ID NO: 267483 - DNA, 33 bp, Homo sapien
caagaaaaggaagtacaaatggttcttaaacat

SEQ ID NO: 267484 - DNA, 33 bp, Homo sapien
caagaaaaggaagtacgaatggttcttaaacat

SEQ ID NO: 267485 - DNA, 33 bp, Homo sapien
agaaatagccaaaagaatcagaagaggggcttt

SEQ ID NO: 267486 - DNA, 33 bp, Homo sapien
agaaatagccaaaagagtcagaagaggggcttt

SEQ ID NO: 267487 - DNA, 33 bp, Homo sapien
ctgcatttccaactgacgtaccaggccatctta

SEQ ID NO: 267488 - DNA, 33 bp, Homo sapien
ctgcatttccaactgaggtaccaggccatctta

SEQ ID NO: 267489 - DNA, 33 bp, Homo sapien
agtgcattcaatacaaatacacttggcctgtca

SEQ ID NO: 267490 - DNA, 33 bp, Homo sapien
agtgcattcaatacaagtacacttggcctgtca

SEQ ID NO: 267491 - DNA, 33 bp, Homo sapien
ttattactgtttttaacgatgctacacacaagg

SEQ ID NO: 267492 - DNA, 33 bp, Homo sapien
ttattactgtttttaatgatgctacacacaagg

SEQ ID NO: 267493 - DNA, 33 bp, Homo sapien
acatcaatcatggtcaacagctgaaaaaagatg

SEQ ID NO: 267494 - DNA, 33 bp, Homo sapien
acatcaatcatggtcagcagctgaaaaaagatg

SEQ ID NO: 267495 - DNA, 33 bp, Homo sapien
gagtgtggagcctggcaaacagaggcagggaac

SEQ ID NO: 267496 - DNA, 33 bp, Homo sapien
gagtgtggagcctggcgaacagaggcagggaac

SEQ ID NO: 267497 - DNA, 33 bp, Homo sapien
ggagactttctgggcaaggctttaccagattgc

SEQ ID NO: 267498 - DNA, 33 bp, Homo sapien
ggagactttctgggcagggctttaccagattgc

SEQ ID NO: 267499 - DNA, 33 bp, Homo sapien
ggaggcaaaaatacaaatggaaaactgggtgtc

SEQ ID NO: 267500 - DNA, 33 bp, Homo sapien
ggaggcaaaaatacaagtggaaaactgggtgtc

SEQ ID NO: 267501 - DNA, 33 bp, Homo sapien
caagactaaggagaaccaaggcactgccatcca

SEQ ID NO: 267502 - DNA, 33 bp, Homo sapien
caagactaaggagaacgaaggcactgccatcca

SEQ ID NO: 267503 - DNA, 33 bp, Homo sapien
ttcagatgctgcggggaacggcgccaggccagc

SEQ ID NO: 267504 - DNA, 33 bp, Homo sapien
ttcagatgctgcggggcacggcgccaggccagc

SEQ ID NO: 267505 - DNA, 33 bp, Homo sapien
gtttgtttactccagcactaattaagtctttca

SEQ ID NO: 267506 - DNA, 33 bp, Homo sapien
gtttgtttactccagcgctaattaagtctttca

SEQ ID NO: 267507 - DNA, 33 bp, Homo sapien
gtgtgaataaattcagactccaaagatggtgag

SEQ ID NO: 267508 - DNA, 33 bp, Homo sapien
gtgtgaataaattcagcctccaaagatggtgag

SEQ ID NO: 267509 - DNA, 33 bp, Homo sapien
aacagatgcggtctctcaaggcaaaagccccag

SEQ ID NO: 267510 - DNA, 33 bp, Homo sapien
aacagatgcggtctctgaaggcaaaagccccag

SEQ ID NO: 267511 - DNA, 33 bp, Homo sapien
aagtgattcattccaaacatctgatgggttccc

SEQ ID NO: 267512 - DNA, 33 bp, Homo sapien
aagtgattcattccaagcatctgatgggttccc

SEQ ID NO: 267513 - DNA, 33 bp, Homo sapien
aggtaaagactaaaagaattcattgaagcagca

SEQ ID NO: 267514 - DNA, 33 bp, Homo sapien
aggtaaagactaaaaggattcattgaagcagca

SEQ ID NO: 267515 - DNA, 33 bp, Homo sapien
aacagcttatttgtagaagaatgtagcccacat

SEQ ID NO: 267516 - DNA, 33 bp, Homo sapien
aacagcttatttgtaggagaatgtagcccacat

SEQ ID NO: 267517 - DNA, 33 bp, Homo sapien
gaaaaagaagcatacaatccacctttctttgtc

SEQ ID NO: 267518 - DNA, 33 bp, Homo sapien
gaaaaagaagcatacagtccacctttctttgtc

SEQ ID NO: 267519 - DNA, 33 bp, Homo sapien
acaggatggagcttataaaatagtttgcaggcc

SEQ ID NO: 267520 - DNA, 33 bp, Homo sapien
acaggatggagcttattaaatagtttgcaggcc

SEQ ID NO: 267521 - DNA, 33 bp, Homo sapien
ttcttctgtcaagggaaagtgagtcatctattt

SEQ ID NO: 267522 - DNA, 33 bp, Homo sapien
ttcttctgtcaagggagagtgagtcatctattt

SEQ ID NO: 267523 - DNA, 33 bp, Homo sapien
caaatacactataagcaaagcaagattctttgc

SEQ ID NO: 267524 - DNA, 33 bp, Homo sapien
caaatacactataagcgaagcaagattctttgc

SEQ ID NO: 267525 - DNA, 33 bp, Homo sapien
attgtttgttcatggacataccatgctagccaa

SEQ ID NO: 267526 - DNA, 33 bp, Homo sapien
attgtttgttcatggagataccatgctagccaa

SEQ ID NO: 267527 - DNA, 33 bp, Homo sapien
attttagcctctggataaaatgaggtacccatt

SEQ ID NO: 267528 - DNA, 33 bp, Homo sapien
attttagcctctggatcaaatgaggtacccatt

SEQ ID NO: 267529 - DNA, 33 bp, Homo sapien
atgtggtagacagccactagccattcagaaagt

SEQ ID NO: 267530 - DNA, 33 bp, Homo sapien
atgtggtagacagccagtagccattcagaaagt

SEQ ID NO: 267531 - DNA, 33 bp, Homo sapien
tcaaacactcataaatcaaagtaatggcaacaa

SEQ ID NO: 267532 - DNA, 33 bp, Homo sapien
tcaaacactcataaattaaagtaatggcaacaa

SEQ ID NO: 267533 - DNA, 33 bp, Homo sapien
taacttttcttcatccacttgatttacataggg

SEQ ID NO: 267534 - DNA, 33 bp, Homo sapien
taacttttcttcatccgcttgatttacataggg

SEQ ID NO: 267535 - DNA, 33 bp, Homo sapien
tcatgccatgttgtaacagtacatgatgcagct

SEQ ID NO: 267536 - DNA, 33 bp, Homo sapien
tcatgccatgttgtaatagtacatgatgcagct

SEQ ID NO: 267537 - DNA, 33 bp, Homo sapien
gcatcatatgtttgaacgctagtttacattttt

SEQ ID NO: 267538 - DNA, 33 bp, Homo sapien
gcatcatatgtttgaatgctagtttacattttt

SEQ ID NO: 267539 - DNA, 33 bp, Homo sapien
agtagaaaaatagaataagttctccatttcttc

SEQ ID NO: 267540 - DNA, 33 bp, Homo sapien
agtagaaaaatagaatgagttctccatttcttc

SEQ ID NO: 267541 - DNA, 33 bp, Homo sapien
ctggctcctccaattaataactatgtgataatg

SEQ ID NO: 267542 - DNA, 33 bp, Homo sapien
ctggctcctccaattagtaactatgtgataatg

SEQ ID NO: 267543 - DNA, 33 bp, Homo sapien
tctgtaaaatagaactaactatagcagctacct

SEQ ID NO: 267544 - DNA, 33 bp, Homo sapien
tctgtaaaatagaactgactatagcagctacct

SEQ ID NO: 267545 - DNA, 33 bp, Homo sapien
gccacctgatggagaacgactgtgtgagaatga

SEQ ID NO: 267546 - DNA, 33 bp, Homo sapien
gccacctgatggagaatgactgtgtgagaatga

SEQ ID NO: 267547 - DNA, 33 bp, Homo sapien
attaggtatcccatcaccacccctaaacaacgt

SEQ ID NO: 267548 - DNA, 33 bp, Homo sapien
attaggtatcccatcatcacccctaaacaacgt

SEQ ID NO: 267549 - DNA, 33 bp, Homo sapien
ctcattttactgtgaacgcctcaaagtcagaga

SEQ ID NO: 267550 - DNA, 33 bp, Homo sapien
ctcattttactgtgaatgcctcaaagtcagaga

SEQ ID NO: 267551 - DNA, 33 bp, Homo sapien
aatttgttaaaaataccatattcaaatagtttt

SEQ ID NO: 267552 - DNA, 33 bp, Homo sapien
aatttgttaaaaatacgatattcaaatagtttt

SEQ ID NO: 267553 - DNA, 33 bp, Homo sapien
ttttttgttgtaatgcacaagagaatttcctgt

SEQ ID NO: 267554 - DNA, 33 bp, Homo sapien
ttttttgttgtaatgcgcaagagaatttcctgt

SEQ ID NO: 267555 - DNA, 33 bp, Homo sapien
attcttgttctcaaaaacttacattctgatcca

SEQ ID NO: 267556 - DNA, 33 bp, Homo sapien
attcttgttctcaaaagcttacattctgatcca

SEQ ID NO: 267557 - DNA, 33 bp, Homo sapien
agatgattctttgttacgaagcttacactcatt

SEQ ID NO: 267558 - DNA, 33 bp, Homo sapien
agatgattctttgttatgaagcttacactcatt

SEQ ID NO: 267559 - DNA, 33 bp, Homo sapien
tactacaccaaatccaataactcttcaaatgta

SEQ ID NO: 267560 - DNA, 33 bp, Homo sapien
tactacaccaaatccagtaactcttcaaatgta

SEQ ID NO: 267561 - DNA, 33 bp, Homo sapien
catggctagtttctacaactgacacttctgtaa

SEQ ID NO: 267562 - DNA, 33 bp, Homo sapien
catggctagtttctacgactgacacttctgtaa

SEQ ID NO: 267563 - DNA, 33 bp, Homo sapien
tatacacatatgtgacccttcccactctctggc

SEQ ID NO: 267564 - DNA, 33 bp, Homo sapien
tatacacatatgtgacgcttcccactctctggc

SEQ ID NO: 267565 - DNA, 33 bp, Homo sapien
ggaggtggatggaagacggagacagaacaggga

SEQ ID NO: 267566 - DNA, 33 bp, Homo sapien
ggaggtggatggaagatggagacagaacaggga

SEQ ID NO: 267567 - DNA, 33 bp, Homo sapien
ttattatgtgcagataataccttaaaagttact

SEQ ID NO: 267568 - DNA, 33 bp, Homo sapien
ttattatgtgcagatactaccttaaaagttact

SEQ ID NO: 267569 - DNA, 33 bp, Homo sapien
cacaagaatctgataacgcattgtttgcaatgg

SEQ ID NO: 267570 - DNA, 33 bp, Homo sapien
cacaagaatctgataaggcattgtttgcaatgg

SEQ ID NO: 267571 - DNA, 33 bp, Homo sapien
aaacaactgcatagcactctattgtgtggatac

SEQ ID NO: 267572 - DNA, 33 bp, Homo sapien
aaacaactgcatagcattctattgtgtggatac

SEQ ID NO: 267573 - DNA, 33 bp, Homo sapien
accaaacactgataaaacatatactaaattgta

SEQ ID NO: 267574 - DNA, 33 bp, Homo sapien
accaaacactgataaagcatatactaaattgta

SEQ ID NO: 267575 - DNA, 33 bp, Homo sapien
gtttttggaggatggaactctcatggattacgt

SEQ ID NO: 267576 - DNA, 33 bp, Homo sapien
gtttttggaggatggatctctcatggattacgt

SEQ ID NO: 267577 - DNA, 33 bp, Homo sapien
atcacaagtaatgctaactatttgacatgatgg

SEQ ID NO: 267578 - DNA, 33 bp, Homo sapien
atcacaagtaatgctagctatttgacatgatgg

SEQ ID NO: 267579 - DNA, 33 bp, Homo sapien
taatatatgggtcaaactagaaaaaaacaggca

SEQ ID NO: 267580 - DNA, 33 bp, Homo sapien
taatatatgggtcaaattagaaaaaaacaggca

SEQ ID NO: 267581 - DNA, 33 bp, Homo sapien
gaaactatgacagaggaaaagtaagtgttttaa

SEQ ID NO: 267582 - DNA, 33 bp, Homo sapien
gaaactatgacagagggaaagtaagtgttttaa

SEQ ID NO: 267583 - DNA, 33 bp, Homo sapien
aggaatcttttcagtacctaattggatttcacc

SEQ ID NO: 267584 - DNA, 33 bp, Homo sapien
aggaatcttttcagtatctaattggatttcacc

SEQ ID NO: 267585 - DNA, 33 bp, Homo sapien
attattgctatgaacaatcatgtagaagttttt

SEQ ID NO: 267586 - DNA, 33 bp, Homo sapien
attattgctatgaacattcatgtagaagttttt

SEQ ID NO: 267587 - DNA, 33 bp, Homo sapien
attttatttcaagacactatggagaaaatatgt

SEQ ID NO: 267588 - DNA, 33 bp, Homo sapien
attttatttcaagacattatggagaaaatatgt

SEQ ID NO: 267589 - DNA, 33 bp, Homo sapien
ccatctttattcatttaaaacccctcagaatct

SEQ ID NO: 267590 - DNA, 33 bp, Homo sapien
ccatctttattcattttaaacccctcagaatct

SEQ ID NO: 267591 - DNA, 33 bp, Homo sapien
ctagccctttccaagaccaagacagatttaaga

SEQ ID NO: 267592 - DNA, 33 bp, Homo sapien
ctagccctttccaagatcaagacagatttaaga

SEQ ID NO: 267593 - DNA, 33 bp, Homo sapien
catcagtctatagataagatcatctgggtacta

SEQ ID NO: 267594 - DNA, 33 bp, Homo sapien
catcagtctatagataggatcatctgggtacta

SEQ ID NO: 267595 - DNA, 33 bp, Homo sapien
ccgactgctattaaccaaagttatgatatgcga

SEQ ID NO: 267596 - DNA, 33 bp, Homo sapien
ccgactgctattaaccgaagttatgatatgcga

SEQ ID NO: 267597 - DNA, 33 bp, Homo sapien
aatgttaagttcagacagaggtgactctataaa

SEQ ID NO: 267598 - DNA, 33 bp, Homo sapien
aatgttaagttcagacggaggtgactctataaa

SEQ ID NO: 267599 - DNA, 33 bp, Homo sapien
ttatcttagtttaccactgagaggcatctgttc

SEQ ID NO: 267600 - DNA, 33 bp, Homo sapien
ttatcttagtttaccagtgagaggcatctgttc

SEQ ID NO: 267601 - DNA, 33 bp, Homo sapien
aaagtagagaagatgacggaaaaccatgtgtcc

SEQ ID NO: 267602 - DNA, 33 bp, Homo sapien
aaagtagagaagatgatggaaaaccatgtgtcc

SEQ ID NO: 267603 - DNA, 33 bp, Homo sapien
acttatccattgataacgtaatctgagccatag

SEQ ID NO: 267604 - DNA, 33 bp, Homo sapien
acttatccattgataatgtaatctgagccatag

SEQ ID NO: 267605 - DNA, 33 bp, Homo sapien
cattccatatgcttaaagttgtcaaatcctggc

SEQ ID NO: 267606 - DNA, 33 bp, Homo sapien
cattccatatgcttaacgttgtcaaatcctggc

SEQ ID NO: 267607 - DNA, 33 bp, Homo sapien
cttccttgacagtatgaatttgagagtgttctc

SEQ ID NO: 267608 - DNA, 33 bp, Homo sapien
cttccttgacagtatggatttgagagtgttctc

SEQ ID NO: 267609 - DNA, 33 bp, Homo sapien
ggaattcaggatatgcaagtcaaaagaggttta

SEQ ID NO: 267610 - DNA, 33 bp, Homo sapien
ggaattcaggatatgcgagtcaaaagaggttta

SEQ ID NO: 267611 - DNA, 33 bp, Homo sapien
ggattcttagctctacaaaggatgagaaccctg

SEQ ID NO: 267612 - DNA, 33 bp, Homo sapien
ggattcttagctctacgaaggatgagaaccctg

SEQ ID NO: 267613 - DNA, 33 bp, Homo sapien
tgtagcaaatattccacacgtgctaaactttgt

SEQ ID NO: 267614 - DNA, 33 bp, Homo sapien
tgtagcaaatattccatacgtgctaaactttgt

SEQ ID NO: 267615 - DNA, 33 bp, Homo sapien
gacaggatgaaaaatcacagtaggtctgtctgg

SEQ ID NO: 267616 - DNA, 33 bp, Homo sapien
gacaggatgaaaaatcgcagtaggtctgtctgg

SEQ ID NO: 267617 - DNA, 33 bp, Homo sapien
tgtagattctttctgacctattttgtggggtga

SEQ ID NO: 267618 - DNA, 33 bp, Homo sapien
tgtagattctttctgagctattttgtggggtga

SEQ ID NO: 267619 - DNA, 33 bp, Homo sapien
aattctcatgtccagcacattgtcataagtgat

SEQ ID NO: 267620 - DNA, 33 bp, Homo sapien
aattctcatgtccagcgcattgtcataagtgat

SEQ ID NO: 267621 - DNA, 33 bp, Homo sapien
caatgtatgaaaatgccatttccctgaaactat

SEQ ID NO: 267622 - DNA, 33 bp, Homo sapien
caatgtatgaaaatgctatttccctgaaactat

SEQ ID NO: 267623 - DNA, 33 bp, Homo sapien
acaaagaagcctacatcaactaaattctagaaa

SEQ ID NO: 267624 - DNA, 33 bp, Homo sapien
acaaagaagcctacatgaactaaattctagaaa

SEQ ID NO: 267625 - DNA, 33 bp, Homo sapien
gatacacatgaaacgaagtcataatatattgtg

SEQ ID NO: 267626 - DNA, 33 bp, Homo sapien
gatacacatgaaacgatgtcataatatattgtg

SEQ ID NO: 267627 - DNA, 33 bp, Homo sapien
ttatagcctcacataactccagaactgtcaggg

SEQ ID NO: 267628 - DNA, 33 bp, Homo sapien
ttatagcctcacataagtccagaactgtcaggg

SEQ ID NO: 267629 - DNA, 33 bp, Homo sapien
agggggatgggtctcaaaataattcactaaaat

SEQ ID NO: 267630 - DNA, 33 bp, Homo sapien
agggggatgggtctcacaataattcactaaaat

SEQ ID NO: 267631 - DNA, 33 bp, Homo sapien
cttgataattattccaaaatggctcttgaattt

SEQ ID NO: 267632 - DNA, 33 bp, Homo sapien
cttgataattattccacaatggctcttgaattt

SEQ ID NO: 267633 - DNA, 33 bp, Homo sapien
tggggaggagattagacggtgacaatattggag

SEQ ID NO: 267634 - DNA, 33 bp, Homo sapien
tggggaggagattagatggtgacaatattggag

SEQ ID NO: 267635 - DNA, 33 bp, Homo sapien
gacctgcagaactgaacagttggaggttgtcag

SEQ ID NO: 267636 - DNA, 33 bp, Homo sapien
gacctgcagaactgaatagttggaggttgtcag

SEQ ID NO: 267637 - DNA, 33 bp, Homo sapien
gctcctctcaagacaaactttgatctggagttc

SEQ ID NO: 267638 - DNA, 33 bp, Homo sapien
gctcctctcaagacaagctttgatctggagttc

SEQ ID NO: 267639 - DNA, 33 bp, Homo sapien
atatggccagcctcacaataatgttggagaagc

SEQ ID NO: 267640 - DNA, 33 bp, Homo sapien
atatggccagcctcacgataatgttggagaagc

SEQ ID NO: 267641 - DNA, 33 bp, Homo sapien
ttttgcaattaaccacaatatcatacttcactc

SEQ ID NO: 267642 - DNA, 33 bp, Homo sapien
ttttgcaattaaccacgatatcatacttcactc

SEQ ID NO: 267643 - DNA, 33 bp, Homo sapien
gaagaatgaaacctcaaatactatgctcacatg

SEQ ID NO: 267644 - DNA, 33 bp, Homo sapien
gaagaatgaaacctcagatactatgctcacatg

SEQ ID NO: 267645 - DNA, 33 bp, Homo sapien
agaatgtcaaattccacctacctccatgttcat

SEQ ID NO: 267646 - DNA, 33 bp, Homo sapien
agaatgtcaaattccatctacctccatgttcat

SEQ ID NO: 267647 - DNA, 33 bp, Homo sapien
aacagtaggaaacctgaaagattctaaaacctg

SEQ ID NO: 267648 - DNA, 33 bp, Homo sapien
aacagtaggaaacctgcaagattctaaaacctg

SEQ ID NO: 267649 - DNA, 33 bp, Homo sapien
tccaggtaagagatcacggtgacttgcactaag

SEQ ID NO: 267650 - DNA, 33 bp, Homo sapien
tccaggtaagagatcatggtgacttgcactaag

SEQ ID NO: 267651 - DNA, 33 bp, Homo sapien
ttggcttctgtgtttaaaaagagccatgctatt

SEQ ID NO: 267652 - DNA, 33 bp, Homo sapien
ttggcttctgtgtttacaaagagccatgctatt

SEQ ID NO: 267653 - DNA, 33 bp, Homo sapien
aggcaatgtgaaggacgcggaggaagcaataga

SEQ ID NO: 267654 - DNA, 33 bp, Homo sapien
aggcaatgtgaaggactcggaggaagcaataga

SEQ ID NO: 267655 - DNA, 33 bp, Homo sapien
tcttgtgaccagagacaccaagcttatgaggac

SEQ ID NO: 267656 - DNA, 33 bp, Homo sapien
tcttgtgaccagagactccaagcttatgaggac

SEQ ID NO: 267657 - DNA, 33 bp, Homo sapien
ccaattgttggccttcaacaccaggggcaggga

SEQ ID NO: 267658 - DNA, 33 bp, Homo sapien
ccaattgttggccttcgacaccaggggcaggga

SEQ ID NO: 267659 - DNA, 33 bp, Homo sapien
gcagaaaaggaatcgggagtcaaggaggctgga

SEQ ID NO: 267660 - DNA, 33 bp, Homo sapien
gcagaaaaggaatcggtagtcaaggaggctgga

SEQ ID NO: 267661 - DNA, 33 bp, Homo sapien
cttggtgatatctgtacgaccacagggtttaga

SEQ ID NO: 267662 - DNA, 33 bp, Homo sapien
cttggtgatatctgtatgaccacagggtttaga

SEQ ID NO: 267663 - DNA, 33 bp, Homo sapien
gtcaatcccttctatacgaggcaatttattcta

SEQ ID NO: 267664 - DNA, 33 bp, Homo sapien
gtcaatcccttctatatgaggcaatttattcta

SEQ ID NO: 267665 - DNA, 33 bp, Homo sapien
caataaagtcactacaactctagattaacagat

SEQ ID NO: 267666 - DNA, 33 bp, Homo sapien
caataaagtcactacatctctagattaacagat

SEQ ID NO: 267667 - DNA, 33 bp, Homo sapien
atgcactaagacaagtaaagaccatcctctcat

SEQ ID NO: 267668 - DNA, 33 bp, Homo sapien
atgcactaagacaagtgaagaccatcctctcat

SEQ ID NO: 267669 - DNA, 33 bp, Homo sapien; identical to SEQ ID NO: 267667

SEQ ID NO: 267670 - DNA, 33 bp, Homo sapien; identical to SEQ ID NO: 267668

SEQ ID NO: 267671 - DNA, 33 bp, Homo sapien
gagtgcctttctcttaataaatttagacagcat

SEQ ID NO: 267672 - DNA, 33 bp, Homo sapien
gagtgcctttctcttagtaaatttagacagcat

SEQ ID NO: 267673 - DNA, 33 bp, Homo sapien
gagtatcagtatgtagcaaatatctttggaaaa

SEQ ID NO: 267674 - DNA, 33 bp, Homo sapien
gagtatcagtatgtagtaaatatctttggaaaa

SEQ ID NO: 267675 - DNA, 33 bp, Homo sapien
gataaaatcaggttaactgggacatccatcacc

SEQ ID NO: 267676 - DNA, 33 bp, Homo sapien
gataaaatcaggttaattgggacatccatcacc

SEQ ID NO: 267677 - DNA, 33 bp, Homo sapien
gaagggaattctgacaagttctacagcatggat

SEQ ID NO: 267678 - DNA, 33 bp, Homo sapien
gaagggaattctgacatgttctacagcatggat

SEQ ID NO: 267679 - DNA, 33 bp, Homo sapien
tttttctcacctgagaataattcggaagtgctg

SEQ ID NO: 267680 - DNA, 33 bp, Homo sapien
tttttctcacctgagagtaattcggaagtgctg

SEQ ID NO: 267681 - DNA, 33 bp, Homo sapien
agaaacacaagcaggaaaggatgaaatcagccg

SEQ ID NO: 267682 - DNA, 33 bp, Homo sapien
agaaacacaagcaggacaggatgaaatcagccg

SEQ ID NO: 267683 - DNA, 33 bp, Homo sapien
tgtttagaaaagctctcagagatgtgttgagaa

SEQ ID NO: 267684 - DNA, 33 bp, Homo sapien
tgtttagaaaagctctgagagatgtgttgagaa

SEQ ID NO: 267685 - DNA, 33 bp, Homo sapien
gtgtttaattactaccaccctaataacatcaaa

SEQ ID NO: 267686 - DNA, 33 bp, Homo sapien
gtgtttaattactaccgccctaataacatcaaa

SEQ ID NO: 267687 - DNA, 33 bp, Homo sapien
accaaattcagccaaacaatgatgaggaattac

SEQ ID NO: 267688 - DNA, 33 bp, Homo sapien
accaaattcagccaaataatgatgaggaattac

SEQ ID NO: 267689 - DNA, 33 bp, Homo sapien
tgtgggagatacattcaaaccatagcagtgacc

SEQ ID NO: 267690 - DNA, 33 bp, Homo sapien
tgtgggagatacattccaaccatagcagtgacc

SEQ ID NO: 267691 - DNA, 33 bp, Homo sapien
tacttataaagcttaccagtttgtaggcatgac

SEQ ID NO: 267692 - DNA, 33 bp, Homo sapien
tacttataaagcttactagtttgtaggcatgac

SEQ ID NO: 267693 - DNA, 33 bp, Homo sapien
acaaaagggggcatacagcagctggagccattc

SEQ ID NO: 267694 - DNA, 33 bp, Homo sapien
acaaaagggggcatacggcagctggagccattc

SEQ ID NO: 267695 - DNA, 33 bp, Homo sapien
aagactcttttgtccacaagtgccccaccttcc

SEQ ID NO: 267696 - DNA, 33 bp, Homo sapien
aagactcttttgtccataagtgccccaccttcc

SEQ ID NO: 267697 - DNA, 33 bp, Homo sapien
attagaggagcccaaactaaggcaatagcaaga

SEQ ID NO: 267698 - DNA, 33 bp, Homo sapien
attagaggagcccaaattaaggcaatagcaaga

SEQ ID NO: 267699 - DNA, 33 bp, Homo sapien
caggggagatttcaacactctacattttatttg

SEQ ID NO: 267700 - DNA, 33 bp, Homo sapien
caggggagatttcaaccctctacattttatttg

SEQ ID NO: 267701 - DNA, 33 bp, Homo sapien
gaatgtgacatggttccccgccctcaaagaatt

SEQ ID NO: 267702 - DNA, 33 bp, Homo sapien
gaatgtgacatggttctccgccctcaaagaatt

SEQ ID NO: 267703 - DNA, 33 bp, Homo sapien
gactcaaaggtaactcacgagaatactagtttc

SEQ ID NO: 267704 - DNA, 33 bp, Homo sapien
gactcaaaggtaactcgcgagaatactagtttc

SEQ ID NO: 267705 - DNA, 33 bp, Homo sapien
ccatccatagcctcaaatgcttgaaactagtat

SEQ ID NO: 267706 - DNA, 33 bp, Homo sapien
ccatccatagcctcaattgcttgaaactagtat

SEQ ID NO: 267707 - DNA, 33 bp, Homo sapien
taagagcataatgctacagtgcgcttccaagac

SEQ ID NO: 267708 - DNA, 33 bp, Homo sapien
taagagcataatgctatagtgcgcttccaagac

SEQ ID NO: 267709 - DNA, 33 bp, Homo sapien
gtatgttttttttcatcaacagtctctgatatt

SEQ ID NO: 267710 - DNA, 33 bp, Homo sapien
gtatgttttttttcattaacagtctctgatatt

SEQ ID NO: 267711 - DNA, 33 bp, Homo sapien
atggcaactgcctgaacgatggcaactggggtg

SEQ ID NO: 267712 - DNA, 33 bp, Homo sapien
atggcaactgcctgaatgatggcaactggggtg

SEQ ID NO: 267713 - DNA, 33 bp, Homo sapien
aaaacaaatctggggagagacatatcatgatta

SEQ ID NO: 267714 - DNA, 33 bp, Homo sapien
aaaacaaatctggggatagacatatcatgatta

SEQ ID NO: 267715 - DNA, 33 bp, Homo sapien
actgagaggaagctaaaggaaaagcagaataaa

SEQ ID NO: 267716 - DNA, 33 bp, Homo sapien
actgagaggaagctaagggaaaagcagaataaa

SEQ ID NO: 267717 - DNA, 33 bp, Homo sapien
cactgcaatgattaataaaaggcaagaatcatg

SEQ ID NO: 267718 - DNA, 33 bp, Homo sapien
cactgcaatgattaatgaaaggcaagaatcatg

SEQ ID NO: 267719 - DNA, 33 bp, Homo sapien
tcatgtgttcctatacaaggccttttacagact

SEQ ID NO: 267720 - DNA, 33 bp, Homo sapien
tcatgtgttcctatacgaggccttttacagact

SEQ ID NO: 267721 - DNA, 33 bp, Homo sapien
actagccagcactttcacatttcctttcttgct

SEQ ID NO: 267722 - DNA, 33 bp, Homo sapien
actagccagcactttcgcatttcctttcttgct

SEQ ID NO: 267723 - DNA, 33 bp, Homo sapien
tgaacctggtagcatacgcatctcatgatgaca

SEQ ID NO: 267724 - DNA, 33 bp, Homo sapien
tgaacctggtagcataggcatctcatgatgaca

SEQ ID NO: 267725 - DNA, 33 bp, Homo sapien
agtttgccacgaaaaaagagagaaaaggcatcc

SEQ ID NO: 267726 - DNA, 33 bp, Homo sapien
agtttgccacgaaaaacgagagaaaaggcatcc

SEQ ID NO: 267727 - DNA, 33 bp, Homo sapien
aagtgaggctacaaagacatgggagttaaatga

SEQ ID NO: 267728 - DNA, 33 bp, Homo sapien
aagtgaggctacaaagtcatgggagttaaatga

SEQ ID NO: 267729 - DNA, 33 bp, Homo sapien
gctttaagagacactaccaaatcgtttgtgaga

SEQ ID NO: 267730 - DNA, 33 bp, Homo sapien
gctttaagagacactatcaaatcgtttgtgaga

SEQ ID NO: 267731 - DNA, 33 bp, Homo sapien
ttgaacactagaaaaaacgctgaatggaagcac

SEQ ID NO: 267732 - DNA, 33 bp, Homo sapien
ttgaacactagaaaaagcgctgaatggaagcac

SEQ ID NO: 267733 - DNA, 33 bp, Homo sapien
gattgcaaagtcctaccaaccagaaacgtgcaa

SEQ ID NO: 267734 - DNA, 33 bp, Homo sapien
gattgcaaagtcctactaaccagaaacgtgcaa

SEQ ID NO: 267735 - DNA, 33 bp, Homo sapien
catcaatgctcctctcccttaaagtagcgcatt

SEQ ID NO: 267736 - DNA, 33 bp, Homo sapien
catcaatgctcctctctcttaaagtagcgcatt

SEQ ID NO: 267737 - DNA, 33 bp, Homo sapien
aaatttgagtttaaaaagccaacaaagaaggtt

SEQ ID NO: 267738 - DNA, 33 bp, Homo sapien
aaatttgagtttaaaacgccaacaaagaaggtt

SEQ ID NO: 267739 - DNA, 33 bp, Homo sapien
agcagcagcagtagtaacaataaaaataacaac

SEQ ID NO: 267740 - DNA, 33 bp, Homo sapien
agcagcagcagtagtagcaataaaaataacaac

SEQ ID NO: 267741 - DNA, 33 bp, Homo sapien
ttcaaagtttttaagaatctcaagtacaatgaa

SEQ ID NO: 267742 - DNA, 33 bp, Homo sapien
ttcaaagtttttaagagtctcaagtacaatgaa

SEQ ID NO: 267743 - DNA, 33 bp, Homo sapien
ggaaacacgaggaaatcagaaaaacaagttctt

SEQ ID NO: 267744 - DNA, 33 bp, Homo sapien
ggaaacacgaggaaattagaaaaacaagttctt

SEQ ID NO: 267745 - DNA, 33 bp, Homo sapien
atttgagaatatggaactgataactccatgaca

SEQ ID NO: 267746 - DNA, 33 bp, Homo sapien
atttgagaatatggaagtgataactccatgaca

SEQ ID NO: 267747 - DNA, 33 bp, Homo sapien
tattgtaaattccttacagacttaataccatct

SEQ ID NO: 267748 - DNA, 33 bp, Homo sapien
tattgtaaattccttatagacttaataccatct

SEQ ID NO: 267749 - DNA, 33 bp, Homo sapien
gtgatttcatcatcaaccgaaatgagacatttt

SEQ ID NO: 267750 - DNA, 33 bp, Homo sapien
gtgatttcatcatcaatcgaaatgagacatttt

SEQ ID NO: 267751 - DNA, 33 bp, Homo sapien
atttataattgagggcaatgctaaacttcagag

SEQ ID NO: 267752 - DNA, 33 bp, Homo sapien
atttataattgagggcgatgctaaacttcagag

SEQ ID NO: 267753 - DNA, 33 bp, Homo sapien
atttacatgggttaagcagactgttctatttat

SEQ ID NO: 267754 - DNA, 33 bp, Homo sapien
atttacatgggttaaggagactgttctatttat

SEQ ID NO: 267755 - DNA, 33 bp, Homo sapien
tcaaagagtaatggaaactatggactttagtta

SEQ ID NO: 267756 - DNA, 33 bp, Homo sapien
tcaaagagtaatggaacctatggactttagtta

SEQ ID NO: 267757 - DNA, 33 bp, Homo sapien
aaaaaaaaaaaaaatcaatgattgccaggagta

SEQ ID NO: 267758 - DNA, 33 bp, Homo sapien
aaaaaaaaaaaaaatcgatgattgccaggagta

SEQ ID NO: 267759 - DNA, 33 bp, Homo sapien
tagcatttgaatatgactggtatggtcctccag

SEQ ID NO: 267760 - DNA, 33 bp, Homo sapien
tagcatttgaatatgagtggtatggtcctccag

SEQ ID NO: 267761 - DNA, 33 bp, Homo sapien
gggaataagccacaaccgaactctaggtggcgg

SEQ ID NO: 267762 - DNA, 33 bp, Homo sapien
gggaataagccacaactgaactctaggtggcgg

SEQ ID NO: 267763 - DNA, 33 bp, Homo sapien
ctgcatgaaagccatcactcttacctacctcca

SEQ ID NO: 267764 - DNA, 33 bp, Homo sapien
ctgcatgaaagccatcgctcttacctacctcca

SEQ ID NO: 267765 - DNA, 33 bp, Homo sapien
ctcacgtagaataaataattgtactttgacagt

SEQ ID NO: 267766 - DNA, 33 bp, Homo sapien
ctcacgtagaataaatcattgtactttgacagt

SEQ ID NO: 267767 - DNA, 33 bp, Homo sapien
ccaagcttgaaatgagcccacaaaaaagtaaat

SEQ ID NO: 267768 - DNA, 33 bp, Homo sapien
ccaagcttgaaatgagtccacaaaaaagtaaat

SEQ ID NO: 267769 - DNA, 33 bp, Homo sapien
atggactgtgaagacacagtggcagcggaaaga

SEQ ID NO: 267770 - DNA, 33 bp, Homo sapien
atggactgtgaagacagagtggcagcggaaaga

SEQ ID NO: 267771 - DNA, 33 bp, Homo sapien
aatgtacatgcgtttacagtcacatttagattt

SEQ ID NO: 267772 - DNA, 33 bp, Homo sapien
aatgtacatgcgtttatagtcacatttagattt

SEQ ID NO: 267773 - DNA, 33 bp, Homo sapien
aagtgcagtgcccttaaccaacaaaaatgtact

SEQ ID NO: 267774 - DNA, 33 bp, Homo sapien
aagtgcagtgcccttagccaacaaaaatgtact

SEQ ID NO: 267775 - DNA, 33 bp, Homo sapien
ggctcatctagaaccaaaattaggaataaggat

SEQ ID NO: 267776 - DNA, 33 bp, Homo sapien
ggctcatctagaaccagaattaggaataaggat

SEQ ID NO: 267777 - DNA, 33 bp, Homo sapien
ggtagggcttcacagaaagttaaatttgaactg

SEQ ID NO: 267778 - DNA, 33 bp, Homo sapien
ggtagggcttcacagagagttaaatttgaactg

SEQ ID NO: 267779 - DNA, 33 bp, Homo sapien
aggtaatagaaaacccaaacttctctatatttg

SEQ ID NO: 267780 - DNA, 33 bp, Homo sapien
aggtaatagaaaacccgaacttctctatatttg

SEQ ID NO: 267781 - DNA, 33 bp, Homo sapien
ggtctacttctggcaacgacattttggatgaat

SEQ ID NO: 267782 - DNA, 33 bp, Homo sapien
ggtctacttctggcaatgacattttggatgaat

SEQ ID NO: 267783 - DNA, 33 bp, Homo sapien
gtaattgtgtgtgttagatggtactttaatatg

SEQ ID NO: 267784 - DNA, 33 bp, Homo sapien
gtaattgtgtgtgttatatggtactttaatatg

SEQ ID NO: 267785 - DNA, 33 bp, Homo sapien
ataaaaggttgttcagactaaaggcataaatgt

SEQ ID NO: 267786 - DNA, 33 bp, Homo sapien
ataaaaggttgttcagcctaaaggcataaatgt

SEQ ID NO: 267787 - DNA, 33 bp, Homo sapien
agtgaaaaatttattgcaaagctctgtgaattt

SEQ ID NO: 267788 - DNA, 33 bp, Homo sapien
agtgaaaaatttattgtaaagctctgtgaattt

SEQ ID NO: 267789 - DNA, 33 bp, Homo sapien
tatatcccaagcgaataaattggtacttaggaa

SEQ ID NO: 267790 - DNA, 33 bp, Homo sapien
tatatcccaagcgaatgaattggtacttaggaa

SEQ ID NO: 267791 - DNA, 33 bp, Homo sapien
ttagatctttaaaggaagtaatagtcatgcata

SEQ ID NO: 267792 - DNA, 33 bp, Homo sapien
ttagatctttaaaggaggtaatagtcatgcata

SEQ ID NO: 267793 - DNA, 33 bp, Homo sapien
ggacattttagtgggccaatttccagcaatcaa

SEQ ID NO: 267794 - DNA, 33 bp, Homo sapien
ggacattttagtgggctaatttccagcaatcaa

SEQ ID NO: 267795 - DNA, 33 bp, Homo sapien
aatgtactgcaaataactgtagctagcacaaga

SEQ ID NO: 267796 - DNA, 33 bp, Homo sapien
aatgtactgcaaataattgtagctagcacaaga

SEQ ID NO: 267797 - DNA, 33 bp, Homo sapien
agaattaactatgccagtctgtgaagcgcctgt

SEQ ID NO: 267798 - DNA, 33 bp, Homo sapien
agaattaactatgccattctgtgaagcgcctgt

SEQ ID NO: 267799 - DNA, 33 bp, Homo sapien
tctaaagaatacctaacgcatgaagaactgtca

SEQ ID NO: 267800 - DNA, 33 bp, Homo sapien
tctaaagaatacctaatgcatgaagaactgtca

SEQ ID NO: 267801 - DNA, 33 bp, Homo sapien
ttaaaacttacgaatcacttatttctggaattt

SEQ ID NO: 267802 - DNA, 33 bp, Homo sapien
ttaaaacttacgaatcgcttatttctggaattt

SEQ ID NO: 267803 - DNA, 33 bp, Homo sapien
ctgctacagcttgcagaccattctagaccacta

SEQ ID NO: 267804 - DNA, 33 bp, Homo sapien
ctgctacagcttgcaggccattctagaccacta

SEQ ID NO: 267805 - DNA, 33 bp, Homo sapien
aagagctgtttgactacagagcaaccaaataga

SEQ ID NO: 267806 - DNA, 33 bp, Homo sapien
aagagctgtttgactatagagcaaccaaataga

SEQ ID NO: 267807 - DNA, 33 bp, Homo sapien
ccccaagaagtaaaccactgagcattcaaagcc

SEQ ID NO: 267808 - DNA, 33 bp, Homo sapien
ccccaagaagtaaaccgctgagcattcaaagcc

SEQ ID NO: 267809 - DNA, 33 bp, Homo sapien
ggtgtaacaccttccaatgatctctgagtatta

SEQ ID NO: 267810 - DNA, 33 bp, Homo sapien
ggtgtaacaccttccagtgatctctgagtatta

SEQ ID NO: 267811 - DNA, 33 bp, Homo sapien
cactttcatgaagttccacccatatcccaggat

SEQ ID NO: 267812 - DNA, 33 bp, Homo sapien
cactttcatgaagttcgacccatatcccaggat

SEQ ID NO: 267813 - DNA, 33 bp, Homo sapien
tatctacctctccctcaaaatgtaggtcccagg

SEQ ID NO: 267814 - DNA, 33 bp, Homo sapien
tatctacctctccctcgaaatgtaggtcccagg

SEQ ID NO: 267815 - DNA, 33 bp, Homo sapien
ccataaaatcaatgcaatctacattttttccct

SEQ ID NO: 267816 - DNA, 33 bp, Homo sapien
ccataaaatcaatgcagtctacattttttccct

SEQ ID NO: 267817 - DNA, 33 bp, Homo sapien
ttattagccagaaaggaactatgatgtcagttt

SEQ ID NO: 267818 - DNA, 33 bp, Homo sapien
ttattagccagaaagggactatgatgtcagttt

SEQ ID NO: 267819 - DNA, 33 bp, Homo sapien
tcctagaagtttgcagaaaagggtcaagagata

SEQ ID NO: 267820 - DNA, 33 bp, Homo sapien
tcctagaagtttgcaggaaagggtcaagagata

SEQ ID NO: 267821 - DNA, 33 bp, Homo sapien
agaattgttttatgtacgattatccgcatagtt

SEQ ID NO: 267822 - DNA, 33 bp, Homo sapien
agaattgttttatgtatgattatccgcatagtt

SEQ ID NO: 267823 - DNA, 33 bp, Homo sapien
ccagaggaatgaacataagctgactgctggtga

SEQ ID NO: 267824 - DNA, 33 bp, Homo sapien
ccagaggaatgaacatgagctgactgctggtga

SEQ ID NO: 267825 - DNA, 33 bp, Homo sapien
atgtttcttctgccacagtaaagatattgagaa

SEQ ID NO: 267826 - DNA, 33 bp, Homo sapien
atgtttcttctgccacggtaaagatattgagaa

SEQ ID NO: 267827 - DNA, 33 bp, Homo sapien
gactaggacacctcaaatactttgaagtggggg

SEQ ID NO: 267828 - DNA, 33 bp, Homo sapien
gactaggacacctcaagtactttgaagtggggg

SEQ ID NO: 267829 - DNA, 33 bp, Homo sapien
gttactatatctgctacgaagctttgcatcaga

SEQ ID NO: 267830 - DNA, 33 bp, Homo sapien
gttactatatctgctatgaagctttgcatcaga

SEQ ID NO: 267831 - DNA, 33 bp, Homo sapien
aaagctgttaccaaaaaatcaagagttcccaat

SEQ ID NO: 267832 - DNA, 33 bp, Homo sapien
aaagctgttaccaaaacatcaagagttcccaat

SEQ ID NO: 267833 - DNA, 33 bp, Homo sapien
gtgtcagattgaatcccagaaacctgatcccat

SEQ ID NO: 267834 - DNA, 33 bp, Homo sapien
gtgtcagattgaatcctagaaacctgatcccat

SEQ ID NO: 267835 - DNA, 33 bp, Homo sapien
agtaataaatagtgtcaaaaccatgggcctctt

SEQ ID NO: 267836 - DNA, 33 bp, Homo sapien
agtaataaatagtgtcgaaaccatgggcctctt

SEQ ID NO: 267837 - DNA, 33 bp, Homo sapien
gagtttttggattaaaagccagcgatggctgag

SEQ ID NO: 267838 - DNA, 33 bp, Homo sapien
gagtttttggattaaaggccagcgatggctgag

SEQ ID NO: 267839 - DNA, 33 bp, Homo sapien
catccattccatctgaacaatggatacgtccat

SEQ ID NO: 267840 - DNA, 33 bp, Homo sapien
catccattccatctgaccaatggatacgtccat

SEQ ID NO: 267841 - DNA, 33 bp, Homo sapien
gctacaaacttcattcacccaattatttctcct

SEQ ID NO: 267842 - DNA, 33 bp, Homo sapien
gctacaaacttcattcgcccaattatttctcct

SEQ ID NO: 267843 - DNA, 33 bp, Homo sapien
gtcacacagttactggaacttaacctcaatctt

SEQ ID NO: 267844 - DNA, 33 bp, Homo sapien
gtcacacagttactgggacttaacctcaatctt

SEQ ID NO: 267845 - DNA, 33 bp, Homo sapien
ctacgtgacacccccacgtggtaccttcctctc

SEQ ID NO: 267846 - DNA, 33 bp, Homo sapien
ctacgtgacacccccatgtggtaccttcctctc

SEQ ID NO: 267847 - DNA, 33 bp, Homo sapien
tattaggtcaatgtaacggttaatactaggtgt

SEQ ID NO: 267848 - DNA, 33 bp, Homo sapien
tattaggtcaatgtaatggttaatactaggtgt

SEQ ID NO: 267849 - DNA, 33 bp, Homo sapien
tgcaaaagttgagctacgattgttatgaacctc

SEQ ID NO: 267850 - DNA, 33 bp, Homo sapien
tgcaaaagttgagctatgattgttatgaacctc

SEQ ID NO: 267851 - DNA, 33 bp, Homo sapien
tgccattccttgaaggccagttgtcacattcac

SEQ ID NO: 267852 - DNA, 33 bp, Homo sapien
tgccattccttgaaggtcagttgtcacattcac

SEQ ID NO: 267853 - DNA, 33 bp, Homo sapien
cagtgtatgatgaggaagggcttggttattgag

SEQ ID NO: 267854 - DNA, 33 bp, Homo sapien
cagtgtatgatgaggaggggcttggttattgag

SEQ ID NO: 267855 - DNA, 33 bp, Homo sapien
aaccccagacattaggccaacttttatcttgag

SEQ ID NO: 267856 - DNA, 33 bp, Homo sapien
aaccccagacattaggtcaacttttatcttgag

SEQ ID NO: 267857 - DNA, 33 bp, Homo sapien
aaatatgtacaaaatgcacaaggaccactcctc

SEQ ID NO: 267858 - DNA, 33 bp, Homo sapien
aaatatgtacaaaatggacaaggaccactcctc

SEQ ID NO: 267859 - DNA, 33 bp, Homo sapien
ctaatgagatggcatacatcaagtttccagcat

SEQ ID NO: 267860 - DNA, 33 bp, Homo sapien
ctaatgagatggcatatatcaagtttccagcat

SEQ ID NO: 267861 - DNA, 33 bp, Homo sapien
tgctgacaagggtgaaaacatctagtgtgttag

SEQ ID NO: 267862 - DNA, 33 bp, Homo sapien
tgctgacaagggtgaatacatctagtgtgttag

SEQ ID NO: 267863 - DNA, 33 bp, Homo sapien
ggctctgtacttccaaacaaaatatatcttcaa

SEQ ID NO: 267864 - DNA, 33 bp, Homo sapien
ggctctgtacttccaagcaaaatatatcttcaa

SEQ ID NO: 267865 - DNA, 33 bp, Homo sapien
tcttcgcaataagccacgtatttttttgtccaa

SEQ ID NO: 267866 - DNA, 33 bp, Homo sapien
tcttcgcaataagccatgtatttttttgtccaa

SEQ ID NO: 267867 - DNA, 33 bp, Homo sapien
ttagctcagccatgtaaaaaacagtttgaagat

SEQ ID NO: 267868 - DNA, 33 bp, Homo sapien
ttagctcagccatgtagaaaacagtttgaagat

SEQ ID NO: 267869 - DNA, 33 bp, Homo sapien
aatattcactttgcaaaatcaggaatagaggtg

SEQ ID NO: 267870 - DNA, 33 bp, Homo sapien
aatattcactttgcaagatcaggaatagaggtg

SEQ ID NO: 267871 - DNA, 33 bp, Homo sapien
gggactgatcctggaaatggcctggcagtgtac

SEQ ID NO: 267872 - DNA, 33 bp, Homo sapien
gggactgatcctggaattggcctggcagtgtac

SEQ ID NO: 267873 - DNA, 33 bp, Homo sapien
aactgctactgatatccgaggggtagaagccag

SEQ ID NO: 267874 - DNA, 33 bp, Homo sapien
aactgctactgatatctgaggggtagaagccag

SEQ ID NO: 267875 - DNA, 33 bp, Homo sapien
gcattaatagtcctcaaagtttcacaccagatt

SEQ ID NO: 267876 - DNA, 33 bp, Homo sapien
gcattaatagtcctcagagtttcacaccagatt

SEQ ID NO: 267877 - DNA, 33 bp, Homo sapien
aaaagaaataatgttacgcatatcgtgtattaa

SEQ ID NO: 267878 - DNA, 33 bp, Homo sapien
aaaagaaataatgttatgcatatcgtgtattaa

SEQ ID NO: 267879 - DNA, 33 bp, Homo sapien
atttctcttcagcaaaaaggttagagtccttgc

SEQ ID NO: 267880 - DNA, 33 bp, Homo sapien
atttctcttcagcaaacaggttagagtccttgc

SEQ ID NO: 267881 - DNA, 33 bp, Homo sapien
tgattgagtagatctacgcagtactatcaaaag

SEQ ID NO: 267882 - DNA, 33 bp, Homo sapien
tgattgagtagatctatgcagtactatcaaaag

SEQ ID NO: 267883 - DNA, 33 bp, Homo sapien
cctactgaagcctggcactagaccagtgactga

SEQ ID NO: 267884 - DNA, 33 bp, Homo sapien
cctactgaagcctggcgctagaccagtgactga

SEQ ID NO: 267885 - DNA, 33 bp, Homo sapien
acatggtaatagttgacaatgtttgcaatgatc

SEQ ID NO: 267886 - DNA, 33 bp, Homo sapien
acatggtaatagttgataatgtttgcaatgatc

SEQ ID NO: 267887 - DNA, 33 bp, Homo sapien
cctcttcatcacaacaacatagtgcagtgtgaa

SEQ ID NO: 267888 - DNA, 33 bp, Homo sapien
cctcttcatcacaacagcatagtgcagtgtgaa

SEQ ID NO: 267889 - DNA, 33 bp, Homo sapien
tggtgggttttatttaagcctcgagtgttgctg

SEQ ID NO: 267890 - DNA, 33 bp, Homo sapien
tggtgggttttatttacgcctcgagtgttgctg

SEQ ID NO: 267891 - DNA, 33 bp, Homo sapien
tgtcacaggagtaacaaagactacaaatattgg

SEQ ID NO: 267892 - DNA, 33 bp, Homo sapien
tgtcacaggagtaacagagactacaaatattgg

SEQ ID NO: 267893 - DNA, 33 bp, Homo sapien
ccccaccttcacatcacccttaggagtaactga

SEQ ID NO: 267894 - DNA, 33 bp, Homo sapien
ccccaccttcacatcatccttaggagtaactga

SEQ ID NO: 267895 - DNA, 33 bp, Homo sapien
ttctcatgggaactaaaaagaatgagagctcac

SEQ ID NO: 267896 - DNA, 33 bp, Homo sapien
ttctcatgggaactaagaagaatgagagctcac

SEQ ID NO: 267897 - DNA, 33 bp, Homo sapien
atctattgaatgaggcacatttttactgacacg

SEQ ID NO: 267898 - DNA, 33 bp, Homo sapien
atctattgaatgaggcgcatttttactgacacg

SEQ ID NO: 267899 - DNA, 33 bp, Homo sapien
gtttgtttaaagtggaactgttggcggaaatag

SEQ ID NO: 267900 - DNA, 33 bp, Homo sapien
gtttgtttaaagtggagctgttggcggaaatag

SEQ ID NO: 267901 - DNA, 33 bp, Homo sapien
aggtgtgagaaatacacggtgaatcttggacta

SEQ ID NO: 267902 - DNA, 33 bp, Homo sapien
aggtgtgagaaatacatggtgaatcttggacta

SEQ ID NO: 267903 - DNA, 33 bp, Homo sapien
atgaagaaggccatgccaaatactgtgcaggac

SEQ ID NO: 267904 - DNA, 33 bp, Homo sapien
atgaagaaggccatgctaaatactgtgcaggac

SEQ ID NO: 267905 - DNA, 33 bp, Homo sapien
gaagggaatgtaataaaaccaagttgcttgtaa

SEQ ID NO: 267906 - DNA, 33 bp, Homo sapien
gaagggaatgtaataagaccaagttgcttgtaa

SEQ ID NO: 267907 - DNA, 33 bp, Homo sapien
acttataaattagttgcaactggcttcagattt

SEQ ID NO: 267908 - DNA, 33 bp, Homo sapien
acttataaattagttgtaactggcttcagattt

SEQ ID NO: 267909 - DNA, 33 bp, Homo sapien
ttataaagatgaaaacagtgcagagaaaagggt

SEQ ID NO: 267910 - DNA, 33 bp, Homo sapien
ttataaagatgaaaacggtgcagagaaaagggt

SEQ ID NO: 267911 - DNA, 33 bp, Homo sapien
ccaagagatgggttaaagaagacgcagaggaca

SEQ ID NO: 267912 - DNA, 33 bp, Homo sapien
ccaagagatgggttaaggaagacgcagaggaca

SEQ ID NO: 267913 - DNA, 33 bp, Homo sapien
agatgatgttgatttcacctgttttatataggt

SEQ ID NO: 267914 - DNA, 33 bp, Homo sapien
agatgatgttgatttcgcctgttttatataggt

SEQ ID NO: 267915 - DNA, 33 bp, Homo sapien
tcatcctgacaaccacagcgatctactgaagga

SEQ ID NO: 267916 - DNA, 33 bp, Homo sapien
tcatcctgacaaccaccgcgatctactgaagga

SEQ ID NO: 267917 - DNA, 33 bp, Homo sapien
ccacggcctcaccacactatggtgctgaactct

SEQ ID NO: 267918 - DNA, 33 bp, Homo sapien
ccacggcctcaccacagtatggtgctgaactct

SEQ ID NO: 267919 - DNA, 33 bp, Homo sapien
aaggaacgtggacttgaacctgaagtctggaag

SEQ ID NO: 267920 - DNA, 33 bp, Homo sapien
aaggaacgtggacttgtacctgaagtctggaag

SEQ ID NO: 267921 - DNA, 33 bp, Homo sapien
tgttaattgccattacgcctgaaccaacagaat

SEQ ID NO: 267922 - DNA, 33 bp, Homo sapien
tgttaattgccattactcctgaaccaacagaat

SEQ ID NO: 267923 - DNA, 33 bp, Homo sapien
caaatctctgtcttagacccacctctccatgaa

SEQ ID NO: 267924 - DNA, 33 bp, Homo sapien
caaatctctgtcttagccccacctctccatgaa

SEQ ID NO: 267925 - DNA, 33 bp, Homo sapien
gatcacacataaagagcaagaaggtgccagctc

SEQ ID NO: 267926 - DNA, 33 bp, Homo sapien
gatcacacataaagagtaagaaggtgccagctc

SEQ ID NO: 267927 - DNA, 33 bp, Homo sapien
tttgaggaggagactgaaaatttccatgtaagg

SEQ ID NO: 267928 - DNA, 33 bp, Homo sapien
tttgaggaggagactgcaaatttccatgtaagg

SEQ ID NO: 267929 - DNA, 33 bp, Homo sapien
ttcaggccgggttaaccgaaaccacagataagg

SEQ ID NO: 267930 - DNA, 33 bp, Homo sapien
ttcaggccgggttaactgaaaccacagataagg

SEQ ID NO: 267931 - DNA, 33 bp, Homo sapien
ctgaatgtaaatgaagactagtagttactacca

SEQ ID NO: 267932 - DNA, 33 bp, Homo sapien
ctgaatgtaaatgaagcctagtagttactacca

SEQ ID NO: 267933 - DNA, 33 bp, Homo sapien
gcacaaataactgcagaaattggtcattaagat

SEQ ID NO: 267934 - DNA, 33 bp, Homo sapien
gcacaaataactgcaggaattggtcattaagat

SEQ ID NO: 267935 - DNA, 33 bp, Homo sapien
aacgaattggatgatgaaaatctcctttaaaaa

SEQ ID NO: 267936 - DNA, 33 bp, Homo sapien
aacgaattggatgatgtaaatctcctttaaaaa

SEQ ID NO: 267937 - DNA, 33 bp, Homo sapien
agcaagcttgaataaggcatctaggctggtacc

SEQ ID NO: 267938 - DNA, 33 bp, Homo sapien
agcaagcttgaataagtcatctaggctggtacc

SEQ ID NO: 267939 - DNA, 33 bp, Homo sapien
cctggcaccttcctcaaacttaatggttcaata

SEQ ID NO: 267940 - DNA, 33 bp, Homo sapien
cctggcaccttcctcatacttaatggttcaata

SEQ ID NO: 267941 - DNA, 33 bp, Homo sapien
taagttttggcaaatgaaagtggtccaaaaaga

SEQ ID NO: 267942 - DNA, 33 bp, Homo sapien
taagttttggcaaatggaagtggtccaaaaaga

SEQ ID NO: 267943 - DNA, 33 bp, Homo sapien
gagtgtagagcaagacagtatagacctgggtct

SEQ ID NO: 267944 - DNA, 33 bp, Homo sapien
gagtgtagagcaagacggtatagacctgggtct

SEQ ID NO: 267945 - DNA, 33 bp, Homo sapien
gctcctgcattagcccagagacccaggtctata

SEQ ID NO: 267946 - DNA, 33 bp, Homo sapien
gctcctgcattagcccggagacccaggtctata

SEQ ID NO: 267947 - DNA, 33 bp, Homo sapien
tctaggacattgggacagtatgcttggaggtcc

SEQ ID NO: 267948 - DNA, 33 bp, Homo sapien
tctaggacattgggacggtatgcttggaggtcc

SEQ ID NO: 267949 - DNA, 33 bp, Homo sapien
ttgttgcacaatttgcagaccatagcgctcttc

SEQ ID NO: 267950 - DNA, 33 bp, Homo sapien
ttgttgcacaatttgcggaccatagcgctcttc

SEQ ID NO: 267951 - DNA, 33 bp, Homo sapien
caaacagctctggttgaaatacaaatgaccaat

SEQ ID NO: 267952 - DNA, 33 bp, Homo sapien
caaacagctctggttgtaatacaaatgaccaat

SEQ ID NO: 267953 - DNA, 33 bp, Homo sapien
ggggttcctatgaaaagcaaatgagataatacc

SEQ ID NO: 267954 - DNA, 33 bp, Homo sapien
ggggttcctatgaaaatcaaatgagataatacc

SEQ ID NO: 267955 - DNA, 33 bp, Homo sapien
aagctctggtaactgaaggaagctccatgtaat

SEQ ID NO: 267956 - DNA, 33 bp, Homo sapien
aagctctggtaactgagggaagctccatgtaat

SEQ ID NO: 267957 - DNA, 33 bp, Homo sapien
atagttagtcagcaacaacttactaaagaatct

SEQ ID NO: 267958 - DNA, 33 bp, Homo sapien
atagttagtcagcaaccacttactaaagaatct

SEQ ID NO: 267959 - DNA, 33 bp, Homo sapien
catattaatgaactaaattaagacagagcagag

SEQ ID NO: 267960 - DNA, 33 bp, Homo sapien
catattaatgaactaatttaagacagagcagag

SEQ ID NO: 267961 - DNA, 33 bp, Homo sapien
tcctccacacaaatcaaactgctactttattat

SEQ ID NO: 267962 - DNA, 33 bp, Homo sapien
tcctccacacaaatcagactgctactttattat

SEQ ID NO: 267963 - DNA, 33 bp, Homo sapien
gtttcttgcaagactaaacatactcttaccatg

SEQ ID NO: 267964 - DNA, 33 bp, Homo sapien
gtttcttgcaagactatacatactcttaccatg

SEQ ID NO: 267965 - DNA, 33 bp, Homo sapien
tacaaacagaggcatcactatccatgtgtcaat

SEQ ID NO: 267966 - DNA, 33 bp, Homo sapien
tacaaacagaggcatcgctatccatgtgtcaat

SEQ ID NO: 267967 - DNA, 33 bp, Homo sapien
cttgtcagcaaaatctaagaactagttatcttg

SEQ ID NO: 267968 - DNA, 33 bp, Homo sapien
cttgtcagcaaaatctgagaactagttatcttg

SEQ ID NO: 267969 - DNA, 33 bp, Homo sapien
gttaatttctcaataaacttcatttctatgttt

SEQ ID NO: 267970 - DNA, 33 bp, Homo sapien
gttaatttctcaataaccttcatttctatgttt

SEQ ID NO: 267971 - DNA, 33 bp, Homo sapien
catttgttccaaggcacagtttaaatccattgt

SEQ ID NO: 267972 - DNA, 33 bp, Homo sapien
catttgttccaaggcatagtttaaatccattgt

SEQ ID NO: 267973 - DNA, 33 bp, Homo sapien
ttttcagcaataatcaagttatgtttagatata

SEQ ID NO: 267974 - DNA, 33 bp, Homo sapien
ttttcagcaataatcaggttatgtttagatata

SEQ ID NO: 267975 - DNA, 33 bp, Homo sapien
ctaatagaagactccacacagacaaccccttca

SEQ ID NO: 267976 - DNA, 33 bp, Homo sapien
ctaatagaagactccatacagacaaccccttca

SEQ ID NO: 267977 - DNA, 33 bp, Homo sapien
gtctcttcaacttggcccatctggtgtgaattc

SEQ ID NO: 267978 - DNA, 33 bp, Homo sapien
gtctcttcaacttggctcatctggtgtgaattc

SEQ ID NO: 267979 - DNA, 33 bp, Homo sapien
aataataaaggcatcacagggtgaaccccaaaa

SEQ ID NO: 267980 - DNA, 33 bp, Homo sapien
aataataaaggcatcagagggtgaaccccaaaa

SEQ ID NO: 267981 - DNA, 33 bp, Homo sapien
ctatcaaggtcacttcaagaactttcagctggg

SEQ ID NO: 267982 - DNA, 33 bp, Homo sapien
ctatcaaggtcacttcgagaactttcagctggg

SEQ ID NO: 267983 - DNA, 33 bp, Homo sapien
gtcttgcaggactgtcacaggaattaagtgaca

SEQ ID NO: 267984 - DNA, 33 bp, Homo sapien
gtcttgcaggactgtcgcaggaattaagtgaca

SEQ ID NO: 267985 - DNA, 33 bp, Homo sapien
aaagagtactcacttcactttattgctcacaga

SEQ ID NO: 267986 - DNA, 33 bp, Homo sapien
aaagagtactcacttcgctttattgctcacaga

SEQ ID NO: 267987 - DNA, 33 bp, Homo sapien
tagagcgggtataagacgaactgaccagcctgg

SEQ ID NO: 267988 - DNA, 33 bp, Homo sapien
tagagcgggtataagatgaactgaccagcctgg

SEQ ID NO: 267989 - DNA, 33 bp, Homo sapien
ggggaggcaggataagaataaggggtttaattt

SEQ ID NO: 267990 - DNA, 33 bp, Homo sapien
ggggaggcaggataagtataaggggtttaattt

SEQ ID NO: 267991 - DNA, 33 bp, Homo sapien
tgaaatgaatgaatgacggtgctatgtacataa

SEQ ID NO: 267992 - DNA, 33 bp, Homo sapien
tgaaatgaatgaatgatggtgctatgtacataa

SEQ ID NO: 267993 - DNA, 33 bp, Homo sapien
gaatgtgatatggttaaagggtcaagttttatg

SEQ ID NO: 267994 - DNA, 33 bp, Homo sapien
gaatgtgatatggttagagggtcaagttttatg

SEQ ID NO: 267995 - DNA, 33 bp, Homo sapien
gtgtttagttcaattacaccaagttttgggtgc

SEQ ID NO: 267996 - DNA, 33 bp, Homo sapien
gtgtttagttcaattataccaagttttgggtgc

SEQ ID NO: 267997 - DNA, 33 bp, Homo sapien
ttaattgctggttgaactgaatacttgcttcat

SEQ ID NO: 267998 - DNA, 33 bp, Homo sapien
ttaattgctggttgaattgaatacttgcttcat

SEQ ID NO: 267999 - DNA, 33 bp, Homo sapien
accgacaatcacccacaaattgctcttgactac

SEQ ID NO: 268000 - DNA, 33 bp, Homo sapien
accgacaatcacccacgaattgctcttgactac

SEQ ID NO: 268001 - DNA, 33 bp, Homo sapien
tttttacacacctccccgctatgagagaagtgt

SEQ ID NO: 268002 - DNA, 33 bp, Homo sapien
tttttacacacctccctgctatgagagaagtgt

SEQ ID NO: 268003 - DNA, 33 bp, Homo sapien
caacaagcatttgtaaagagaaccagttagcaa

SEQ ID NO: 268004 - DNA, 33 bp, Homo sapien
caacaagcatttgtaaggagaaccagttagcaa

SEQ ID NO: 268005 - DNA, 33 bp, Homo sapien
ttacttctggagttataagactctctgctgtct

SEQ ID NO: 268006 - DNA, 33 bp, Homo sapien
ttacttctggagttatgagactctctgctgtct

SEQ ID NO: 268007 - DNA, 33 bp, Homo sapien
aatcggcctcaatccaatccttttgtggcagaa

SEQ ID NO: 268008 - DNA, 33 bp, Homo sapien
aatcggcctcaatccagtccttttgtggcagaa

SEQ ID NO: 268009 - DNA, 33 bp, Homo sapien
tcattctcaacaaacacgggaacaggaaaccaa

SEQ ID NO: 268010 - DNA, 33 bp, Homo sapien
tcattctcaacaaacatgggaacaggaaaccaa

SEQ ID NO: 268011 - DNA, 33 bp, Homo sapien; identical to SEQ ID NO: 268009

SEQ ID NO: 268012 - DNA, 33 bp, Homo sapien; identical to SEQ ID NO: 268010

SEQ ID NO: 268013 - DNA, 33 bp, Homo sapien
gtgggctctagtcttacgccacaggttaattat

SEQ ID NO: 268014 - DNA, 33 bp, Homo sapien
gtgggctctagtcttatgccacaggttaattat

SEQ ID NO: 268015 - DNA, 33 bp, Homo sapien
gaagaatggaaccttcaatgtgtgaactcaaat

SEQ ID NO: 268016 - DNA, 33 bp, Homo sapien
gaagaatggaaccttcgatgtgtgaactcaaat

SEQ ID NO: 268017 - DNA, 33 bp, Homo sapien
gtccagcactacttccaagctcctatctgactt

SEQ ID NO: 268018 - DNA, 33 bp, Homo sapien
gtccagcactacttccgagctcctatctgactt

SEQ ID NO: 268019 - DNA, 33 bp, Homo sapien
tcagagtcttagagatagtatcccaggtgactt

SEQ ID NO: 268020 - DNA, 33 bp, Homo sapien
tcagagtcttagagatggtatcccaggtgactt

SEQ ID NO: 268021 - DNA, 33 bp, Homo sapien
agtaagttaagccatcacgggtaggagcctggt

SEQ ID NO: 268022 - DNA, 33 bp, Homo sapien
agtaagttaagccatcgcgggtaggagcctggt

SEQ ID NO: 268023 - DNA, 33 bp, Homo sapien
ttaatcctcacccttcacagtccagaggctgcc

SEQ ID NO: 268024 - DNA, 33 bp, Homo sapien
ttaatcctcacccttcgcagtccagaggctgcc

SEQ ID NO: 268025 - DNA, 33 bp, Homo sapien
atggtgttgtgtgctacgatgcattcattttca

SEQ ID NO: 268026 - DNA, 33 bp, Homo sapien
atggtgttgtgtgctatgatgcattcattttca

SEQ ID NO: 268027 - DNA, 33 bp, Homo sapien
ttaaattgttcattgacgtcccaaacctgaagc

SEQ ID NO: 268028 - DNA, 33 bp, Homo sapien
ttaaattgttcattgatgtcccaaacctgaagc

SEQ ID NO: 268029 - DNA, 33 bp, Homo sapien
accttaactccactgaagatcatgaacaatgct

SEQ ID NO: 268030 - DNA, 33 bp, Homo sapien
accttaactccactgaggatcatgaacaatgct

SEQ ID NO: 268031 - DNA, 33 bp, Homo sapien
aacagatcgtcctatacggggtagccaacgcta

SEQ ID NO: 268032 - DNA, 33 bp, Homo sapien
aacagatcgtcctatatggggtagccaacgcta

SEQ ID NO: 268033 - DNA, 33 bp, Homo sapien
tttgaccaatacgtacccttaatcggccatctg

SEQ ID NO: 268034 - DNA, 33 bp, Homo sapien
tttgaccaatacgtactcttaatcggccatctg

SEQ ID NO: 268035 - DNA, 33 bp, Homo sapien
tggccactaaacatgcagaaaattttcaatctt

SEQ ID NO: 268036 - DNA, 33 bp, Homo sapien
tggccactaaacatgcggaaaattttcaatctt

SEQ ID NO: 268037 - DNA, 33 bp, Homo sapien
ttgaagcttgtctccaatcaatactgactccta

SEQ ID NO: 268038 - DNA, 33 bp, Homo sapien
ttgaagcttgtctccagtcaatactgactccta

SEQ ID NO: 268039 - DNA, 33 bp, Homo sapien
ttgataagtaagtccaatcagagaccttctgta

SEQ ID NO: 268040 - DNA, 33 bp, Homo sapien
ttgataagtaagtccagtcagagaccttctgta

SEQ ID NO: 268041 - DNA, 33 bp, Homo sapien
ttctaatgtctcattaccaacttaatgtcagaa

SEQ ID NO: 268042 - DNA, 33 bp, Homo sapien
ttctaatgtctcattatcaacttaatgtcagaa

SEQ ID NO: 268043 - DNA, 33 bp, Homo sapien
agcttgtcacatgtcaataaataatttcactcc

SEQ ID NO: 268044 - DNA, 33 bp, Homo sapien
agcttgtcacatgtcagtaaataatttcactcc

SEQ ID NO: 268045 - DNA, 33 bp, Homo sapien
ctcaaagaccttttccaaaccacttcaaagaat

SEQ ID NO: 268046 - DNA, 33 bp, Homo sapien
ctcaaagaccttttccgaaccacttcaaagaat

SEQ ID NO: 268047 - DNA, 33 bp, Homo sapien
cagaaaccttgccatcagagaagcgtttgcaaa

SEQ ID NO: 268048 - DNA, 33 bp, Homo sapien
cagaaaccttgccatcggagaagcgtttgcaaa

SEQ ID NO: 268049 - DNA, 33 bp, Homo sapien
tgataatcaagtagaacgcttgttaaagtgcag

SEQ ID NO: 268050 - DNA, 33 bp, Homo sapien
tgataatcaagtagaatgcttgttaaagtgcag

SEQ ID NO: 268051 - DNA, 33 bp, Homo sapien
ttatccaagttcatacaactggttcttcctgcc

SEQ ID NO: 268052 - DNA, 33 bp, Homo sapien
ttatccaagttcatacgactggttcttcctgcc

SEQ ID NO: 268053 - DNA, 33 bp, Homo sapien
tcccaagagagatgtcactagtcaggaaggtat

SEQ ID NO: 268054 - DNA, 33 bp, Homo sapien
tcccaagagagatgtcgctagtcaggaaggtat

SEQ ID NO: 268055 - DNA, 33 bp, Homo sapien
tggttgctcaaattgtgaaaactacaaaataaa

SEQ ID NO: 268056 - DNA, 33 bp, Homo sapien
tggttgctcaaattgttaaaactacaaaataaa

SEQ ID NO: 268057 - DNA, 33 bp, Homo sapien
gtctgtagtttaagccactcaatctataatatt

SEQ ID NO: 268058 - DNA, 33 bp, Homo sapien
gtctgtagtttaagcctctcaatctataatatt

SEQ ID NO: 268059 - DNA, 33 bp, Homo sapien
tatccaaacaagtccaaataaaatcctcccacc

SEQ ID NO: 268060 - DNA, 33 bp, Homo sapien
tatccaaacaagtccatataaaatcctcccacc

SEQ ID NO: 268061 - DNA, 33 bp, Homo sapien
acacgaatctgctaaactattagtatctactct

SEQ ID NO: 268062 - DNA, 33 bp, Homo sapien
acacgaatctgctaaagtattagtatctactct

SEQ ID NO: 268063 - DNA, 33 bp, Homo sapien
aagaaagtaaggataacggagggctcttaaatt

SEQ ID NO: 268064 - DNA, 33 bp, Homo sapien
aagaaagtaaggataatggagggctcttaaatt

SEQ ID NO: 268065 - DNA, 33 bp, Homo sapien
gtaacagatcagaaggaccaaagaccagagtga

SEQ ID NO: 268066 - DNA, 33 bp, Homo sapien
gtaacagatcagaagggccaaagaccagagtga

SEQ ID NO: 268067 - DNA, 33 bp, Homo sapien
tactcattttagctcaactatggtttctaaaac

SEQ ID NO: 268068 - DNA, 33 bp, Homo sapien
tactcattttagctcacctatggtttctaaaac

SEQ ID NO: 268069 - DNA, 33 bp, Homo sapien
cagcctgtgttggaaacatcaccaaactgattg

SEQ ID NO: 268070 - DNA, 33 bp, Homo sapien
cagcctgtgttggaaatatcaccaaactgattg

SEQ ID NO: 268071 - DNA, 33 bp, Homo sapien
tgggccaagagacataactgaggggttcgcaga

SEQ ID NO: 268072 - DNA, 33 bp, Homo sapien
tgggccaagagacatatctgaggggttcgcaga

SEQ ID NO: 268073 - DNA, 33 bp, Homo sapien
ctgaactcatatttaaactctactgccagggaa

SEQ ID NO: 268074 - DNA, 33 bp, Homo sapien
ctgaactcatatttaatctctactgccagggaa

SEQ ID NO: 268075 - DNA, 33 bp, Homo sapien
tatttcctctgatacaataggtgaggctctttg

SEQ ID NO: 268076 - DNA, 33 bp, Homo sapien
tatttcctctgatacagtaggtgaggctctttg

SEQ ID NO: 268077 - DNA, 33 bp, Homo sapien
cattagttctggagtacgacacaaagacaaaaa

SEQ ID NO: 268078 - DNA, 33 bp, Homo sapien
cattagttctggagtatgacacaaagacaaaaa

SEQ ID NO: 268079 - DNA, 33 bp, Homo sapien
ctctccttagtaaatacgctttgctagttatag

SEQ ID NO: 268080 - DNA, 33 bp, Homo sapien
ctctccttagtaaatatgctttgctagttatag

SEQ ID NO: 268081 - DNA, 33 bp, Homo sapien
ataaatcacagtataacgaggcagacacaccca

SEQ ID NO: 268082 - DNA, 33 bp, Homo sapien
ataaatcacagtataatgaggcagacacaccca

SEQ ID NO: 268083 - DNA, 33 bp, Homo sapien
ggaaggaatgcaaacaagagaagggtgttcaac

SEQ ID NO: 268084 - DNA, 33 bp, Homo sapien
ggaaggaatgcaaacaggagaagggtgttcaac

SEQ ID NO: 268085 - DNA, 33 bp, Homo sapien
caacactgcaaatagcaccactgcctgtggcca

SEQ ID NO: 268086 - DNA, 33 bp, Homo sapien
caacactgcaaatagcgccactgcctgtggcca

SEQ ID NO: 268087 - DNA, 33 bp, Homo sapien
atcttgtctgattctaataattcctctaccagt

SEQ ID NO: 268088 - DNA, 33 bp, Homo sapien
atcttgtctgattctagtaattcctctaccagt

SEQ ID NO: 268089 - DNA, 33 bp, Homo sapien
agtaggatggatacttaaagaaaaatcagagct

SEQ ID NO: 268090 - DNA, 33 bp, Homo sapien
agtaggatggatacttgaagaaaaatcagagct

SEQ ID NO: 268091 - DNA, 33 bp, Homo sapien
cttaattatagcttcagcaacttgcacaaggct

SEQ ID NO: 268092 - DNA, 33 bp, Homo sapien
cttaattatagcttcatcaacttgcacaaggct

SEQ ID NO: 268093 - DNA, 33 bp, Homo sapien
aatggaaatcagtgaaatgaatgcagagccttc

SEQ ID NO: 268094 - DNA, 33 bp, Homo sapien
aatggaaatcagtgaagtgaatgcagagccttc

SEQ ID NO: 268095 - DNA, 33 bp, Homo sapien
agctgcctactataggcccggtgctaataactc

SEQ ID NO: 268096 - DNA, 33 bp, Homo sapien
agctgcctactataggtccggtgctaataactc

SEQ ID NO: 268097 - DNA, 33 bp, Homo sapien
gataggtgatatgatacaggaagccaaaaagaa

SEQ ID NO: 268098 - DNA, 33 bp, Homo sapien
gataggtgatatgatagaggaagccaaaaagaa

SEQ ID NO: 268099 - DNA, 33 bp, Homo sapien
aggaatcagactatacagggagaagagcatcac

SEQ ID NO: 268100 - DNA, 33 bp, Homo sapien
aggaatcagactataccgggagaagagcatcac

SEQ ID NO: 268101 - DNA, 33 bp, Homo sapien
aatgaggcccagaaatcagagaacccaacatgg

SEQ ID NO: 268102 - DNA, 33 bp, Homo sapien
aatgaggcccagaaatgagagaacccaacatgg

SEQ ID NO: 268103 - DNA, 33 bp, Homo sapien
tatagtcataatagggaaagctcaaattactga

SEQ ID NO: 268104 - DNA, 33 bp, Homo sapien
tatagtcataataggggaagctcaaattactga

SEQ ID NO: 268105 - DNA, 33 bp, Homo sapien
ctacagaccttattcacattccatcagtttccc

SEQ ID NO: 268106 - DNA, 33 bp, Homo sapien
ctacagaccttattcatattccatcagtttccc

SEQ ID NO: 268107 - DNA, 33 bp, Homo sapien
acatgttatagagtgaccttgtttttgttatga

SEQ ID NO: 268108 - DNA, 33 bp, Homo sapien
acatgttatagagtgatcttgtttttgttatga

SEQ ID NO: 268109 - DNA, 33 bp, Homo sapien
ttgctttctaattgtacgcattaatctgcccgt

SEQ ID NO: 268110 - DNA, 33 bp, Homo sapien
ttgctttctaattgtaggcattaatctgcccgt

SEQ ID NO: 268111 - DNA, 33 bp, Homo sapien
aactaaagaataaaaacgcaaaatgctggttct

SEQ ID NO: 268112 - DNA, 33 bp, Homo sapien
aactaaagaataaaaatgcaaaatgctggttct

SEQ ID NO: 268113 - DNA, 33 bp, Homo sapien
ttagttctttcatcagcacaactcattgcctct

SEQ ID NO: 268114 - DNA, 33 bp, Homo sapien
ttagttctttcatcagtacaactcattgcctct

SEQ ID NO: 268115 - DNA, 33 bp, Homo sapien
tgtgggattacctccacctgaaagaagcagcac

SEQ ID NO: 268116 - DNA, 33 bp, Homo sapien
tgtgggattacctccatctgaaagaagcagcac

SEQ ID NO: 268117 - DNA, 33 bp, Homo sapien
tgaaagtcccctgcaaatctgacccttagaaat

SEQ ID NO: 268118 - DNA, 33 bp, Homo sapien
tgaaagtcccctgcaattctgacccttagaaat

SEQ ID NO: 268119 - DNA, 33 bp, Homo sapien
ttcaggattgcagaaaatagacactaaatagtg

SEQ ID NO: 268120 - DNA, 33 bp, Homo sapien
ttcaggattgcagaaagtagacactaaatagtg

SEQ ID NO: 268121 - DNA, 33 bp, Homo sapien
tgatgaactgctcttaccaaaccatcatttatt

SEQ ID NO: 268122 - DNA, 33 bp, Homo sapien
tgatgaactgctcttatcaaaccatcatttatt

SEQ ID NO: 268123 - DNA, 33 bp, Homo sapien
tccatgtgaaattcttcaaatcctaccatagaa

SEQ ID NO: 268124 - DNA, 33 bp, Homo sapien
tccatgtgaaattctttaaatcctaccatagaa

SEQ ID NO: 268125 - DNA, 33 bp, Homo sapien
cacgatatactggttaggtacttgtctgagttt

SEQ ID NO: 268126 - DNA, 33 bp, Homo sapien
cacgatatactggttatgtacttgtctgagttt

SEQ ID NO: 268127 - DNA, 33 bp, Homo sapien
ataactacagtttaaacacatggaagtttgctc

SEQ ID NO: 268128 - DNA, 33 bp, Homo sapien
ataactacagtttaaatacatggaagtttgctc

SEQ ID NO: 268129 - DNA, 33 bp, Homo sapien
tgaagtcctcagggaaaacacttgtatctgtat

SEQ ID NO: 268130 - DNA, 33 bp, Homo sapien
tgaagtcctcagggaagacacttgtatctgtat

SEQ ID NO: 268131 - DNA, 33 bp, Homo sapien
cagaaatgtcaacaaaacattcgtggaaactat

SEQ ID NO: 268132 - DNA, 33 bp, Homo sapien
cagaaatgtcaacaaatcattcgtggaaactat

SEQ ID NO: 268133 - DNA, 33 bp, Homo sapien
ttcgtggaaactattgaaaatggaacagaaaca

SEQ ID NO: 268134 - DNA, 33 bp, Homo sapien
ttcgtggaaactattgtaaatggaacagaaaca

SEQ ID NO: 268135 - DNA, 33 bp, Homo sapien
ttcctccttcttagtaactgagaagcaatatag

SEQ ID NO: 268136 - DNA, 33 bp, Homo sapien
ttcctccttcttagtagctgagaagcaatatag

SEQ ID NO: 268137 - DNA, 33 bp, Homo sapien
ttgagtcatatccccccatcctagttgactctt

SEQ ID NO: 268138 - DNA, 33 bp, Homo sapien
ttgagtcatatcccccgatcctagttgactctt

SEQ ID NO: 268139 - DNA, 33 bp, Homo sapien
acacaaaattagggtaccacatacttctactta

SEQ ID NO: 268140 - DNA, 33 bp, Homo sapien
acacaaaattagggtagcacatacttctactta

SEQ ID NO: 268141 - DNA, 33 bp, Homo sapien
tgctttaaaactaaaccgccagtaacagaatga

SEQ ID NO: 268142 - DNA, 33 bp, Homo sapien
tgctttaaaactaaactgccagtaacagaatga

SEQ ID NO: 268143 - DNA, 33 bp, Homo sapien
taaatattctttgagcacctactacatactaca

SEQ ID NO: 268144 - DNA, 33 bp, Homo sapien
taaatattctttgagcgcctactacatactaca

SEQ ID NO: 268145 - DNA, 33 bp, Homo sapien
taccatgtgttgcagacatatgttcactgtggc

SEQ ID NO: 268146 - DNA, 33 bp, Homo sapien
taccatgtgttgcagatatatgttcactgtggc

SEQ ID NO: 268147 - DNA, 33 bp, Homo sapien
atctctggtctaggtaacatcatatttaaagtt

SEQ ID NO: 268148 - DNA, 33 bp, Homo sapien
atctctggtctaggtaccatcatatttaaagtt

SEQ ID NO: 268149 - DNA, 33 bp, Homo sapien
gaatcaaggattgacaactgatagcatagggga

SEQ ID NO: 268150 - DNA, 33 bp, Homo sapien
gaatcaaggattgacagctgatagcatagggga

SEQ ID NO: 268151 - DNA, 33 bp, Homo sapien
aaagcagtactataaaccatgagagatatttaa

SEQ ID NO: 268152 - DNA, 33 bp, Homo sapien
aaagcagtactataaatcatgagagatatttaa

SEQ ID NO: 268153 - DNA, 33 bp, Homo sapien
gctctgtaattcttagaccaactgaatatggca

SEQ ID NO: 268154 - DNA, 33 bp, Homo sapien
gctctgtaattcttaggccaactgaatatggca

SEQ ID NO: 268155 - DNA, 33 bp, Homo sapien
gcagccttattctttacgctaagtataggttcc

SEQ ID NO: 268156 - DNA, 33 bp, Homo sapien
gcagccttattctttatgctaagtataggttcc

SEQ ID NO: 268157 - DNA, 33 bp, Homo sapien
aggcatccagtgaaatgaacaggaggcactttt

SEQ ID NO: 268158 - DNA, 33 bp, Homo sapien
aggcatccagtgaaattaacaggaggcactttt

SEQ ID NO: 268159 - DNA, 33 bp, Homo sapien
tccttaaggtgcagcccgatggatttccagatc

SEQ ID NO: 268160 - DNA, 33 bp, Homo sapien
tccttaaggtgcagcctgatggatttccagatc

SEQ ID NO: 268161 - DNA, 33 bp, Homo sapien
aagtaagtatatgacccggaatttaaatccaca

SEQ ID NO: 268162 - DNA, 33 bp, Homo sapien
aagtaagtatatgacctggaatttaaatccaca

SEQ ID NO: 268163 - DNA, 33 bp, Homo sapien
tcatgaacagtgtcctcaacatgtcatggacat

SEQ ID NO: 268164 - DNA, 33 bp, Homo sapien
tcatgaacagtgtccttaacatgtcatggacat

SEQ ID NO: 268165 - DNA, 33 bp, Homo sapien
ctcattcaagtctccactgaggcaagcgagaac

SEQ ID NO: 268166 - DNA, 33 bp, Homo sapien
ctcattcaagtctccattgaggcaagcgagaac

SEQ ID NO: 268167 - DNA, 33 bp, Homo sapien
gctagcctggaatccacagtctagatttatact

SEQ ID NO: 268168 - DNA, 33 bp, Homo sapien
gctagcctggaatccatagtctagatttatact

SEQ ID NO: 268169 - DNA, 33 bp, Homo sapien
acatgtgactactgacaaccatattggacagta

SEQ ID NO: 268170 - DNA, 33 bp, Homo sapien
acatgtgactactgactaccatattggacagta

SEQ ID NO: 268171 - DNA, 33 bp, Homo sapien
acgacaataatttccacgcagagtgtcttcctt

SEQ ID NO: 268172 - DNA, 33 bp, Homo sapien
acgacaataatttccatgcagagtgtcttcctt

SEQ ID NO: 268173 - DNA, 33 bp, Homo sapien
cagacagacatggtccccctttgtgaaatggga

SEQ ID NO: 268174 - DNA, 33 bp, Homo sapien
cagacagacatggtcctcctttgtgaaatggga

SEQ ID NO: 268175 - DNA, 33 bp, Homo sapien
cagaggcagtagatgaatagaaatctcactgct

SEQ ID NO: 268176 - DNA, 33 bp, Homo sapien
cagaggcagtagatgactagaaatctcactgct

SEQ ID NO: 268177 - DNA, 33 bp, Homo sapien
gagatttaaagcaaacactatttcaaaactagc

SEQ ID NO: 268178 - DNA, 33 bp, Homo sapien
gagatttaaagcaaacgctatttcaaaactagc

SEQ ID NO: 268179 - DNA, 33 bp, Homo sapien
gagctaatattggctaataattgggaggcacat

SEQ ID NO: 268180 - DNA, 33 bp, Homo sapien
gagctaatattggctagtaattgggaggcacat

SEQ ID NO: 268181 - DNA, 33 bp, Homo sapien
ataagtcctagttatgcatcatattctgtttca

SEQ ID NO: 268182 - DNA, 33 bp, Homo sapien
ataagtcctagttatgtatcatattctgtttca

SEQ ID NO: 268183 - DNA, 33 bp, Homo sapien
atccaggaaagtcccgaagaagccagttcaagt

SEQ ID NO: 268184 - DNA, 33 bp, Homo sapien
atccaggaaagtcccggagaagccagttcaagt

SEQ ID NO: 268185 - DNA, 33 bp, Homo sapien
caaataaacagttaaacttgaatgtttttgcag

SEQ ID NO: 268186 - DNA, 33 bp, Homo sapien
caaataaacagttaaatttgaatgtttttgcag

SEQ ID NO: 268187 - DNA, 33 bp, Homo sapien
caaaaggtgaaatagaagacacagaagcacaca

SEQ ID NO: 268188 - DNA, 33 bp, Homo sapien
caaaaggtgaaatagaggacacagaagcacaca

SEQ ID NO: 268189 - DNA, 33 bp, Homo sapien
tgtctcttgcattgcacgtaggtgatgaatatt

SEQ ID NO: 268190 - DNA, 33 bp, Homo sapien
tgtctcttgcattgcatgtaggtgatgaatatt

SEQ ID NO: 268191 - DNA, 33 bp, Homo sapien
agcccctccaaactgaaccttctcacagagctc

SEQ ID NO: 268192 - DNA, 33 bp, Homo sapien
agcccctccaaactgagccttctcacagagctc

SEQ ID NO: 268193 - DNA, 33 bp, Homo sapien
ctcagcccttcaaagacatggataatttagcat

SEQ ID NO: 268194 - DNA, 33 bp, Homo sapien
ctcagcccttcaaagatatggataatttagcat

SEQ ID NO: 268195 - DNA, 33 bp, Homo sapien
acttcattcttttttacggttgaaaaatattgc

SEQ ID NO: 268196 - DNA, 33 bp, Homo sapien
acttcattcttttttatggttgaaaaatattgc

SEQ ID NO: 268197 - DNA, 33 bp, Homo sapien
tctaccattagctggcaaaaactctgcttttaa

SEQ ID NO: 268198 - DNA, 33 bp, Homo sapien
tctaccattagctggcgaaaactctgcttttaa

SEQ ID NO: 268199 - DNA, 33 bp, Homo sapien
tctagtgacaagcctacggggcctgagcgtaag

SEQ ID NO: 268200 - DNA, 33 bp, Homo sapien
tctagtgacaagcctatggggcctgagcgtaag

SEQ ID NO: 268201 - DNA, 33 bp, Homo sapien
cagccttagaaaacaacggactgggaagtcact

SEQ ID NO: 268202 - DNA, 33 bp, Homo sapien
cagccttagaaaacaatggactgggaagtcact

SEQ ID NO: 268203 - DNA, 33 bp, Homo sapien
gaaaagacaacccagacggtacagaacacagcc

SEQ ID NO: 268204 - DNA, 33 bp, Homo sapien
gaaaagacaacccagatggtacagaacacagcc

SEQ ID NO: 268205 - DNA, 33 bp, Homo sapien
agatctagctctaaaactattgtaggtgttgct

SEQ ID NO: 268206 - DNA, 33 bp, Homo sapien
agatctagctctaaaagtattgtaggtgttgct

SEQ ID NO: 268207 - DNA, 33 bp, Homo sapien
taatttttcctgacaacgtctctgctggcttaa

SEQ ID NO: 268208 - DNA, 33 bp, Homo sapien
taatttttcctgacaatgtctctgctggcttaa

SEQ ID NO: 268209 - DNA, 33 bp, Homo sapien
aaagatgcaaataatacagagttgtgtcataat

SEQ ID NO: 268210 - DNA, 33 bp, Homo sapien
aaagatgcaaataatatagagttgtgtcataat

SEQ ID NO: 268211 - DNA, 33 bp, Homo sapien
gaaaccattttcatcacagtgctgcctatttta

SEQ ID NO: 268212 - DNA, 33 bp, Homo sapien
gaaaccattttcatcatagtgctgcctatttta

SEQ ID NO: 268213 - DNA, 33 bp, Homo sapien
aagagaagggctgatcaacccccataggctgct

SEQ ID NO: 268214 - DNA, 33 bp, Homo sapien
aagagaagggctgatccacccccataggctgct

SEQ ID NO: 268215 - DNA, 33 bp, Homo sapien
tctctttgagtggaataagaaatggaatattgc

SEQ ID NO: 268216 - DNA, 33 bp, Homo sapien
tctctttgagtggaatgagaaatggaatattgc

SEQ ID NO: 268217 - DNA, 33 bp, Homo sapien
tctccacaacttttaactgtaacaaagcagctt

SEQ ID NO: 268218 - DNA, 33 bp, Homo sapien
tctccacaacttttaattgtaacaaagcagctt

SEQ ID NO: 268219 - DNA, 33 bp, Homo sapien
aggccatatgtgaaataaactagttctggcata

SEQ ID NO: 268220 - DNA, 33 bp, Homo sapien
aggccatatgtgaaatgaactagttctggcata

SEQ ID NO: 268221 - DNA, 33 bp, Homo sapien
aacatgtgagatgcaaattagcgtattcttgaa

SEQ ID NO: 268222 - DNA, 33 bp, Homo sapien
aacatgtgagatgcaacttagcgtattcttgaa

SEQ ID NO: 268223 - DNA, 33 bp, Homo sapien
cggagagccgaatggacgaagaattcagaaggt

SEQ ID NO: 268224 - DNA, 33 bp, Homo sapien
cggagagccgaatggatgaagaattcagaaggt

SEQ ID NO: 268225 - DNA, 33 bp, Homo sapien
tttctgccttcaagtagctaactctttaagaag

SEQ ID NO: 268226 - DNA, 33 bp, Homo sapien
tttctgccttcaagtatctaactctttaagaag

SEQ ID NO: 268227 - DNA, 33 bp, Homo sapien
atcatagctgaacccacgagaatgaaagaaagg

SEQ ID NO: 268228 - DNA, 33 bp, Homo sapien
atcatagctgaacccatgagaatgaaagaaagg

SEQ ID NO: 268229 - DNA, 33 bp, Homo sapien
ttcacaggattgattggatatggaacaagtgtt

SEQ ID NO: 268230 - DNA, 33 bp, Homo sapien
ttcacaggattgattgtatatggaacaagtgtt

SEQ ID NO: 268231 - DNA, 33 bp, Homo sapien
gcaggcttctcagtaaagaacagacttggggtg

SEQ ID NO: 268232 - DNA, 33 bp, Homo sapien
gcaggcttctcagtaaggaacagacttggggtg

SEQ ID NO: 268233 - DNA, 33 bp, Homo sapien
tattatccatgagaacaaaaataagattttaaa

SEQ ID NO: 268234 - DNA, 33 bp, Homo sapien
tattatccatgagaactaaaataagattttaaa

SEQ ID NO: 268235 - DNA, 33 bp, Homo sapien
ttagtacagcacagcaaaaggctatcattaacc

SEQ ID NO: 268236 - DNA, 33 bp, Homo sapien
ttagtacagcacagcagaaggctatcattaacc

SEQ ID NO: 268237 - DNA, 33 bp, Homo sapien
ggcatgcattcgcagaagatcttgtgataaggg

SEQ ID NO: 268238 - DNA, 33 bp, Homo sapien
ggcatgcattcgcagatgatcttgtgataaggg

SEQ ID NO: 268239 - DNA, 33 bp, Homo sapien
actggggaaacttccaaaaggagacaaagttca

SEQ ID NO: 268240 - DNA, 33 bp, Homo sapien
actggggaaacttccagaaggagacaaagttca

SEQ ID NO: 268241 - DNA, 33 bp, Homo sapien
tgttcttcttgcttgacgttggttgaacacatg

SEQ ID NO: 268242 - DNA, 33 bp, Homo sapien
tgttcttcttgcttgatgttggttgaacacatg

SEQ ID NO: 268243 - DNA, 33 bp, Homo sapien
ttgtgtagagtaactccatgcgtaaacagtttc

SEQ ID NO: 268244 - DNA, 33 bp, Homo sapien
ttgtgtagagtaactctatgcgtaaacagtttc

SEQ ID NO: 268245 - DNA, 33 bp, Homo sapien
actctggttaccagggaaagacgtttagactgg

SEQ ID NO: 268246 - DNA, 33 bp, Homo sapien
actctggttaccaggggaagacgtttagactgg

SEQ ID NO: 268247 - DNA, 33 bp, Homo sapien
gttgtgaaggtgatgaaagggccagcgttgact

SEQ ID NO: 268248 - DNA, 33 bp, Homo sapien
gttgtgaaggtgatgagagggccagcgttgact

SEQ ID NO: 268249 - DNA, 33 bp, Homo sapien
gatggagaaaaggtcaaggaaccggcaaagagg

SEQ ID NO: 268250 - DNA, 33 bp, Homo sapien
gatggagaaaaggtcagggaaccggcaaagagg

SEQ ID NO: 268251 - DNA, 33 bp, Homo sapien
aaaagtgctctgaaaactcccaaacctcttaca

SEQ ID NO: 268252 - DNA, 33 bp, Homo sapien
aaaagtgctctgaaaagtcccaaacctcttaca

SEQ ID NO: 268253 - DNA, 33 bp, Homo sapien
tattccttccttctaactgaacatttttgaggc

SEQ ID NO: 268254 - DNA, 33 bp, Homo sapien
tattccttccttctaattgaacatttttgaggc

SEQ ID NO: 268255 - DNA, 33 bp, Homo sapien
gtgcaggggtaaactcagaaacttccagacaaa

SEQ ID NO: 268256 - DNA, 33 bp, Homo sapien
gtgcaggggtaaactcggaaacttccagacaaa

SEQ ID NO: 268257 - DNA, 33 bp, Homo sapien
atgcaaaactgtgtgacgtcagtgaacatatcc

SEQ ID NO: 268258 - DNA, 33 bp, Homo sapien
atgcaaaactgtgtgatgtcagtgaacatatcc

SEQ ID NO: 268259 - DNA, 33 bp, Homo sapien
catgatctaccttgtacgaataaatgaccacaa

SEQ ID NO: 268260 - DNA, 33 bp, Homo sapien
catgatctaccttgtatgaataaatgaccacaa

SEQ ID NO: 268261 - DNA, 33 bp, Homo sapien
cacacggctgcctttccattttcatttaataca

SEQ ID NO: 268262 - DNA, 33 bp, Homo sapien
cacacggctgcctttctattttcatttaataca

SEQ ID NO: 268263 - DNA, 33 bp, Homo sapien
acatatgaatgaagtccgaatctaaatgtggag

SEQ ID NO: 268264 - DNA, 33 bp, Homo sapien
acatatgaatgaagtctgaatctaaatgtggag

SEQ ID NO: 268265 - DNA, 33 bp, Homo sapien
ccttgaggcctttagaagctattctgtggcaga

SEQ ID NO: 268266 - DNA, 33 bp, Homo sapien
ccttgaggcctttagaggctattctgtggcaga

SEQ ID NO: 268267 - DNA, 33 bp, Homo sapien
tatcatgttttcatgagggtgaaaggatactgt

SEQ ID NO: 268268 - DNA, 33 bp, Homo sapien
tatcatgttttcatgatggtgaaaggatactgt

SEQ ID NO: 268269 - DNA, 33 bp, Homo sapien
caacctctgtctcccagaaactcacttccatca

SEQ ID NO: 268270 - DNA, 33 bp, Homo sapien
caacctctgtctcccataaactcacttccatca

SEQ ID NO: 268271 - DNA, 33 bp, Homo sapien
tctcattttctcaccaatctacagtataaaagc

SEQ ID NO: 268272 - DNA, 33 bp, Homo sapien
tctcattttctcaccagtctacagtataaaagc

SEQ ID NO: 268273 - DNA, 33 bp, Homo sapien
agtgccaaatacttgcaataatgggttgaacag

SEQ ID NO: 268274 - DNA, 33 bp, Homo sapien
agtgccaaatacttgcgataatgggttgaacag

SEQ ID NO: 268275 - DNA, 33 bp, Homo sapien
gtgtctggcaataggacagaaagtatctgcatc

SEQ ID NO: 268276 - DNA, 33 bp, Homo sapien
gtgtctggcaataggatagaaagtatctgcatc

SEQ ID NO: 268277 - DNA, 33 bp, Homo sapien
tggtacagatacctcaagatgccagctacctgt

SEQ ID NO: 268278 - DNA, 33 bp, Homo sapien
tggtacagatacctcaggatgccagctacctgt

SEQ ID NO: 268279 - DNA, 33 bp, Homo sapien
ctttcttctagtcttagatttctttcattagtt

SEQ ID NO: 268280 - DNA, 33 bp, Homo sapien
ctttcttctagtcttatatttctttcattagtt

SEQ ID NO: 268281 - DNA, 33 bp, Homo sapien
tacctcctgcctctccaggaatgacactgtgac

SEQ ID NO: 268282 - DNA, 33 bp, Homo sapien
tacctcctgcctctcctggaatgacactgtgac

SEQ ID NO: 268283 - DNA, 33 bp, Homo sapien
aaaagtaatgcacaacaacatcgagcagttgag

SEQ ID NO: 268284 - DNA, 33 bp, Homo sapien
aaaagtaatgcacaacgacatcgagcagttgag

SEQ ID NO: 268285 - DNA, 33 bp, Homo sapien
aaaatacagaaaatgacgggaagaccaagcaga

SEQ ID NO: 268286 - DNA, 33 bp, Homo sapien
aaaatacagaaaatgatgggaagaccaagcaga

SEQ ID NO: 268287 - DNA, 33 bp, Homo sapien
caatgatgagaagttacgttatttacccaagat

SEQ ID NO: 268288 - DNA, 33 bp, Homo sapien
caatgatgagaagttatgttatttacccaagat

SEQ ID NO: 268289 - DNA, 33 bp, Homo sapien
taatggaatgaaagaaagttctcaatatgttgt

SEQ ID NO: 268290 - DNA, 33 bp, Homo sapien
taatggaatgaaagaaggttctcaatatgttgt

SEQ ID NO: 268291 - DNA, 33 bp, Homo sapien
ccatctcctgaaagagaaatagaccagtggggt

SEQ ID NO: 268292 - DNA, 33 bp, Homo sapien
ccatctcctgaaagaggaatagaccagtggggt

SEQ ID NO: 268293 - DNA, 33 bp, Homo sapien
aaaaagaaacatcaccaagacaaaacaaaaagc

SEQ ID NO: 268294 - DNA, 33 bp, Homo sapien
aaaaagaaacatcaccgagacaaaacaaaaagc

SEQ ID NO: 268295 - DNA, 33 bp, Homo sapien
cagtttgtcattaatcacagggactaaacaaca

SEQ ID NO: 268296 - DNA, 33 bp, Homo sapien
cagtttgtcattaatcgcagggactaaacaaca

SEQ ID NO: 268297 - DNA, 33 bp, Homo sapien
taaattaagtcaagataatagagttagaacttc

SEQ ID NO: 268298 - DNA, 33 bp, Homo sapien
taaattaagtcaagatgatagagttagaacttc

SEQ ID NO: 268299 - DNA, 33 bp, Homo sapien
aagcaagaaatgatcaaattgttcaaataaaac

SEQ ID NO: 268300 - DNA, 33 bp, Homo sapien
aagcaagaaatgatcacattgttcaaataaaac

SEQ ID NO: 268301 - DNA, 33 bp, Homo sapien
ttgacaactctaccaagttctctttttaaaggt

SEQ ID NO: 268302 - DNA, 33 bp, Homo sapien
ttgacaactctaccaatttctctttttaaaggt

SEQ ID NO: 268303 - DNA, 33 bp, Homo sapien
acagtgcagaagaatcaaagtgtctggaaaaaa

SEQ ID NO: 268304 - DNA, 33 bp, Homo sapien
acagtgcagaagaatcgaagtgtctggaaaaaa

SEQ ID NO: 268305 - DNA, 33 bp, Homo sapien
ctgggctcatatcaaaatgacagagttttcatc

SEQ ID NO: 268306 - DNA, 33 bp, Homo sapien
ctgggctcatatcaaagtgacagagttttcatc

SEQ ID NO: 268307 - DNA, 33 bp, Homo sapien
ttgagacacaaacatacctccactagagagagg

SEQ ID NO: 268308 - DNA, 33 bp, Homo sapien
ttgagacacaaacatagctccactagagagagg

SEQ ID NO: 268309 - DNA, 33 bp, Homo sapien
ctgtaggattttcacaatctcggttgatatctg

SEQ ID NO: 268310 - DNA, 33 bp, Homo sapien
ctgtaggattttcacagtctcggttgatatctg

SEQ ID NO: 268311 - DNA, 33 bp, Homo sapien
actcaactgtaaattcaattttgtattcagtgg

SEQ ID NO: 268312 - DNA, 33 bp, Homo sapien
actcaactgtaaattctattttgtattcagtgg

SEQ ID NO: 268313 - DNA, 33 bp, Homo sapien
ctaccaagtgattcacagggaggtagtgtagac

SEQ ID NO: 268314 - DNA, 33 bp, Homo sapien
ctaccaagtgattcacggggaggtagtgtagac

SEQ ID NO: 268315 - DNA, 33 bp, Homo sapien
gctgtaaataaggataatatagcccacctaagt

SEQ ID NO: 268316 - DNA, 33 bp, Homo sapien
gctgtaaataaggatactatagcccacctaagt

SEQ ID NO: 268317 - DNA, 33 bp, Homo sapien
tctattactgaccaaaattgtgtgagctgagca

SEQ ID NO: 268318 - DNA, 33 bp, Homo sapien
tctattactgaccaaagttgtgtgagctgagca

SEQ ID NO: 268319 - DNA, 33 bp, Homo sapien
agcacttggggataaaactcagctgaaaatctc

SEQ ID NO: 268320 - DNA, 33 bp, Homo sapien
agcacttggggataaacctcagctgaaaatctc

SEQ ID NO: 268321 - DNA, 33 bp, Homo sapien
gcaggccacagtgatacacgcataacagctgag

SEQ ID NO: 268322 - DNA, 33 bp, Homo sapien
gcaggccacagtgatagacgcataacagctgag

SEQ ID NO: 268323 - DNA, 33 bp, Homo sapien
cacaactgtactgaaacgacaggaaggaagggt

SEQ ID NO: 268324 - DNA, 33 bp, Homo sapien
cacaactgtactgaaatgacaggaaggaagggt

SEQ ID NO: 268325 - DNA, 33 bp, Homo sapien
agaatttttagatgtcagaaaaggtggatttta

SEQ ID NO: 268326 - DNA, 33 bp, Homo sapien
agaatttttagatgtcggaaaaggtggatttta

SEQ ID NO: 268327 - DNA, 33 bp, Homo sapien
ttgtgacattgtggacccaacaaccaaatacta

SEQ ID NO: 268328 - DNA, 33 bp, Homo sapien
ttgtgacattgtggactcaacaaccaaatacta

SEQ ID NO: 268329 - DNA, 33 bp, Homo sapien
ccaaagaagttaggacagataataaaacatgaa

SEQ ID NO: 268330 - DNA, 33 bp, Homo sapien
ccaaagaagttaggacggataataaaacatgaa

SEQ ID NO: 268331 - DNA, 33 bp, Homo sapien
gaggaaacaggtcccaatgctgcaactctcatt

SEQ ID NO: 268332 - DNA, 33 bp, Homo sapien
gaggaaacaggtcccagtgctgcaactctcatt

SEQ ID NO: 268333 - DNA, 33 bp, Homo sapien
gttgtcctccctggcagcaacttaaaagcatca

SEQ ID NO: 268334 - DNA, 33 bp, Homo sapien
gttgtcctccctggcatcaacttaaaagcatca

SEQ ID NO: 268335 - DNA, 33 bp, Homo sapien
ctcaaattaaacaaacacagccagttatatgcc

SEQ ID NO: 268336 - DNA, 33 bp, Homo sapien
ctcaaattaaacaaacgcagccagttatatgcc

SEQ ID NO: 268337 - DNA, 33 bp, Homo sapien
attcattttagcacccagaatgatgtttctctc

SEQ ID NO: 268338 - DNA, 33 bp, Homo sapien
attcattttagcaccccgaatgatgtttctctc

SEQ ID NO: 268339 - DNA, 33 bp, Homo sapien
taaactataactgctgcaagttttcaaagccta

SEQ ID NO: 268340 - DNA, 33 bp, Homo sapien
taaactataactgctggaagttttcaaagccta

SEQ ID NO: 268341 - DNA, 33 bp, Homo sapien
ctttgaatgagtaaacaaagtattctgctttaa

SEQ ID NO: 268342 - DNA, 33 bp, Homo sapien
ctttgaatgagtaaacgaagtattctgctttaa

SEQ ID NO: 268343 - DNA, 33 bp, Homo sapien
ctgagtaaccagtaccagaggataaacacgaaa

SEQ ID NO: 268344 - DNA, 33 bp, Homo sapien
ctgagtaaccagtaccggaggataaacacgaaa

SEQ ID NO: 268345 - DNA, 33 bp, Homo sapien
aaatactctaatgtaactgactcttgaagaaca

SEQ ID NO: 268346 - DNA, 33 bp, Homo sapien
aaatactctaatgtaattgactcttgaagaaca

SEQ ID NO: 268347 - DNA, 33 bp, Homo sapien
ttgtccaagggtcagccatagtgtcacagagct

SEQ ID NO: 268348 - DNA, 33 bp, Homo sapien
ttgtccaagggtcagctatagtgtcacagagct

SEQ ID NO: 268349 - DNA, 33 bp, Homo sapien
tggtacatattataggaatcaaatgtgttagtt

SEQ ID NO: 268350 - DNA, 33 bp, Homo sapien
tggtacatattatagggatcaaatgtgttagtt

SEQ ID NO: 268351 - DNA, 33 bp, Homo sapien
aaatcttggagccctgaaatagtaggaatgtag

SEQ ID NO: 268352 - DNA, 33 bp, Homo sapien
aaatcttggagccctgcaatagtaggaatgtag

SEQ ID NO: 268353 - DNA, 33 bp, Homo sapien
tagggatggttgttgacgccctggggaccgtaa

SEQ ID NO: 268354 - DNA, 33 bp, Homo sapien
tagggatggttgttgatgccctggggaccgtaa

SEQ ID NO: 268355 - DNA, 33 bp, Homo sapien
gcagagctgtttcagagctttgcaacgtcacta

SEQ ID NO: 268356 - DNA, 33 bp, Homo sapien
gcagagctgtttcagatctttgcaacgtcacta

SEQ ID NO: 268357 - DNA, 33 bp, Homo sapien
gtaaccactaaagtgaaaactgccattggagca

SEQ ID NO: 268358 - DNA, 33 bp, Homo sapien
gtaaccactaaagtgagaactgccattggagca

SEQ ID NO: 268359 - DNA, 33 bp, Homo sapien
catcgtttctacctaacactttcatggccatct

SEQ ID NO: 268360 - DNA, 33 bp, Homo sapien
catcgtttctacctaatactttcatggccatct

SEQ ID NO: 268361 - DNA, 33 bp, Homo sapien
tccttgataatgatgacgtttataccttcttta

SEQ ID NO: 268362 - DNA, 33 bp, Homo sapien
tccttgataatgatgatgtttataccttcttta

SEQ ID NO: 268363 - DNA, 33 bp, Homo sapien
gagaagtagaacagaaaaaggttctggcagaaa

SEQ ID NO: 268364 - DNA, 33 bp, Homo sapien
gagaagtagaacagaagaaggttctggcagaaa

SEQ ID NO: 268365 - DNA, 33 bp, Homo sapien
taactaatctagttcaccttctatatccgcttt

SEQ ID NO: 268366 - DNA, 33 bp, Homo sapien
taactaatctagttcatcttctatatccgcttt

SEQ ID NO: 268367 - DNA, 33 bp, Homo sapien
aaagtatgtggcatgaaacagaaaatgagtatt

SEQ ID NO: 268368 - DNA, 33 bp, Homo sapien
aaagtatgtggcatgatacagaaaatgagtatt

SEQ ID NO: 268369 - DNA, 33 bp, Homo sapien
atatgtaggtaactcacgacatttttaaagaca

SEQ ID NO: 268370 - DNA, 33 bp, Homo sapien
atatgtaggtaactcatgacatttttaaagaca

SEQ ID NO: 268371 - DNA, 33 bp, Homo sapien
gaatcaggcaccatccactgtccctcttgttaa

SEQ ID NO: 268372 - DNA, 33 bp, Homo sapien
gaatcaggcaccatccgctgtccctcttgttaa

SEQ ID NO: 268373 - DNA, 33 bp, Homo sapien
tccacaaatattccacagaactgacctgggttc

SEQ ID NO: 268374 - DNA, 33 bp, Homo sapien
tccacaaatattccacggaactgacctgggttc

SEQ ID NO: 268375 - DNA, 33 bp, Homo sapien
tatcttctagaatgctcaaatgcctactgggct

SEQ ID NO: 268376 - DNA, 33 bp, Homo sapien
tatcttctagaatgcttaaatgcctactgggct

SEQ ID NO: 268377 - DNA, 33 bp, Homo sapien
acaaaatataacttcaaaactactagccttaca

SEQ ID NO: 268378 - DNA, 33 bp, Homo sapien
acaaaatataacttcagaactactagccttaca

SEQ ID NO: 268379 - DNA, 33 bp, Homo sapien
ttctctacatttctgacagcttcaacaataaat

SEQ ID NO: 268380 - DNA, 33 bp, Homo sapien
ttctctacatttctgatagcttcaacaataaat

SEQ ID NO: 268381 - DNA, 33 bp, Homo sapien
ataagtcattatttcacgcacatttccctaagc

SEQ ID NO: 268382 - DNA, 33 bp, Homo sapien
ataagtcattatttcatgcacatttccctaagc

SEQ ID NO: 268383 - DNA, 33 bp, Homo sapien
gcataactaggaaccgcccctataccacagagc

SEQ ID NO: 268384 - DNA, 33 bp, Homo sapien
gcataactaggaaccgtccctataccacagagc

SEQ ID NO: 268385 - DNA, 33 bp, Homo sapien
ttttctgtattttacaatgctttgacatcttgg

SEQ ID NO: 268386 - DNA, 33 bp, Homo sapien
ttttctgtattttacagtgctttgacatcttgg

SEQ ID NO: 268387 - DNA, 33 bp, Homo sapien
ccaaataaagcaaaaacaagagaggaagaagct

SEQ ID NO: 268388 - DNA, 33 bp, Homo sapien
ccaaataaagcaaaaagaagagaggaagaagct

SEQ ID NO: 268389 - DNA, 33 bp, Homo sapien
taagcaatttatgtcactgaatgttaatggtca

SEQ ID NO: 268390 - DNA, 33 bp, Homo sapien
taagcaatttatgtcattgaatgttaatggtca

SEQ ID NO: 268391 - DNA, 33 bp, Homo sapien
ggtatccaagtcataaatgtgttggtagtagga

SEQ ID NO: 268392 - DNA, 33 bp, Homo sapien
ggtatccaagtcataagtgtgttggtagtagga

SEQ ID NO: 268393 - DNA, 33 bp, Homo sapien
aaatcattataccccacggtgcctaatacagtt

SEQ ID NO: 268394 - DNA, 33 bp, Homo sapien
aaatcattataccccatggtgcctaatacagtt

SEQ ID NO: 268395 - DNA, 33 bp, Homo sapien
tacatttccttgctcaacagttggtctcataca

SEQ ID NO: 268396 - DNA, 33 bp, Homo sapien
tacatttccttgctcagcagttggtctcataca

SEQ ID NO: 268397 - DNA, 33 bp, Homo sapien
ctttaaataacaaaaacttcacatggtgcgtac

SEQ ID NO: 268398 - DNA, 33 bp, Homo sapien
ctttaaataacaaaaatttcacatggtgcgtac

SEQ ID NO: 268399 - DNA, 33 bp, Homo sapien
tgtgctattgtagaaacatttcagaaaggtgtc

SEQ ID NO: 268400 - DNA, 33 bp, Homo sapien
tgtgctattgtagaaagatttcagaaaggtgtc

SEQ ID NO: 268401 - DNA, 33 bp, Homo sapien
tcacacaaaaattgtacgtgagtgttcatagca

SEQ ID NO: 268402 - DNA, 33 bp, Homo sapien
tcacacaaaaattgtatgtgagtgttcatagca

SEQ ID NO: 268403 - DNA, 33 bp, Homo sapien
atgtggtaaatttggaaccttcatgcattttga

SEQ ID NO: 268404 - DNA, 33 bp, Homo sapien
atgtggtaaatttggagccttcatgcattttga

SEQ ID NO: 268405 - DNA, 33 bp, Homo sapien
caacaacttgaaggcaaacagattggaagagca

SEQ ID NO: 268406 - DNA, 33 bp, Homo sapien
caacaacttgaaggcagacagattggaagagca

SEQ ID NO: 268407 - DNA, 33 bp, Homo sapien
cactctaacacttcaaagcttagacctcctgta

SEQ ID NO: 268408 - DNA, 33 bp, Homo sapien
cactctaacacttcaatgcttagacctcctgta

SEQ ID NO: 268409 - DNA, 33 bp, Homo sapien
gatagctgactaaaaacgagaatggaaatccaa

SEQ ID NO: 268410 - DNA, 33 bp, Homo sapien
gatagctgactaaaaatgagaatggaaatccaa

SEQ ID NO: 268411 - DNA, 33 bp, Homo sapien
taacttgtttaacttcacaggttcatagcagga

SEQ ID NO: 268412 - DNA, 33 bp, Homo sapien
taacttgtttaacttctcaggttcatagcagga

SEQ ID NO: 268413 - DNA, 33 bp, Homo sapien
gaataggtcagttagacagcagtggaaatataa

SEQ ID NO: 268414 - DNA, 33 bp, Homo sapien
gaataggtcagttagatagcagtggaaatataa

SEQ ID NO: 268415 - DNA, 33 bp, Homo sapien
gaatttgagtgattgacagaatagaacttttaa

SEQ ID NO: 268416 - DNA, 33 bp, Homo sapien
gaatttgagtgattgagagaatagaacttttaa

SEQ ID NO: 268417 - DNA, 33 bp, Homo sapien
ctgcttcaaactgtaacaatcttccaggttcat

SEQ ID NO: 268418 - DNA, 33 bp, Homo sapien
ctgcttcaaactgtaataatcttccaggttcat

SEQ ID NO: 268419 - DNA, 33 bp, Homo sapien
atatgtgcataatctacgaatactgtatgtaga

SEQ ID NO: 268420 - DNA, 33 bp, Homo sapien
atatgtgcataatctatgaatactgtatgtaga

SEQ ID NO: 268421 - DNA, 33 bp, Homo sapien
tcttatagcaatttgcaccaagatatctgtact

SEQ ID NO: 268422 - DNA, 33 bp, Homo sapien
tcttatagcaatttgcgccaagatatctgtact

SEQ ID NO: 268423 - DNA, 33 bp, Homo sapien
ggaactctgaatccccggcgatcctctctgact

SEQ ID NO: 268424 - DNA, 33 bp, Homo sapien
ggaactctgaatcccctgcgatcctctctgact

SEQ ID NO: 268425 - DNA, 33 bp, Homo sapien
cagtgttgctggcaaccgctgagttaaaatttc

SEQ ID NO: 268426 - DNA, 33 bp, Homo sapien
cagtgttgctggcaactgctgagttaaaatttc

SEQ ID NO: 268427 - DNA, 33 bp, Homo sapien
atattatccctggaaactgatcagactctgtac

SEQ ID NO: 268428 - DNA, 33 bp, Homo sapien
atattatccctggaaattgatcagactctgtac

SEQ ID NO: 268429 - DNA, 33 bp, Homo sapien
ctgaaccagtctctcaatattcaaagactttac

SEQ ID NO: 268430 - DNA, 33 bp, Homo sapien
ctgaaccagtctctcagtattcaaagactttac

SEQ ID NO: 268431 - DNA, 33 bp, Homo sapien
tcaaagtgataaagaaaatgcaattgttatgca

SEQ ID NO: 268432 - DNA, 33 bp, Homo sapien
tcaaagtgataaagaatatgcaattgttatgca

SEQ ID NO: 268433 - DNA, 33 bp, Homo sapien
cataaagaacagcaaaagtggttctctccctac

SEQ ID NO: 268434 - DNA, 33 bp, Homo sapien
cataaagaacagcaaatgtggttctctccctac

SEQ ID NO: 268435 - DNA, 33 bp, Homo sapien
tctcaggcagattagacgacttctgaaaagaaa

SEQ ID NO: 268436 - DNA, 33 bp, Homo sapien
tctcaggcagattagatgacttctgaaaagaaa

SEQ ID NO: 268437 - DNA, 33 bp, Homo sapien
gtaattttaatgcaacacatcaatgcatagatc

SEQ ID NO: 268438 - DNA, 33 bp, Homo sapien
gtaattttaatgcaacccatcaatgcatagatc

SEQ ID NO: 268439 - DNA, 33 bp, Homo sapien
aacaaactgcagtcagacagagtgaatgagtgc

SEQ ID NO: 268440 - DNA, 33 bp, Homo sapien
aacaaactgcagtcagtcagagtgaatgagtgc

SEQ ID NO: 268441 - DNA, 33 bp, Homo sapien
cacacaatagcaaacaaacgtgtagagattgct

SEQ ID NO: 268442 - DNA, 33 bp, Homo sapien
cacacaatagcaaacagacgtgtagagattgct

SEQ ID NO: 268443 - DNA, 33 bp, Homo sapien
caaccaagaaggcactcaaaaattagaacccac

SEQ ID NO: 268444 - DNA, 33 bp, Homo sapien
caaccaagaaggcactgaaaaattagaacccac

SEQ ID NO: 268445 - DNA, 33 bp, Homo sapien
aaagtttgaggagttcacagacttatgggaaaa

SEQ ID NO: 268446 - DNA, 33 bp, Homo sapien
aaagtttgaggagttcgcagacttatgggaaaa

SEQ ID NO: 268447 - DNA, 33 bp, Homo sapien
gtgataagtgtcaagaaaaagtatacagtccta

SEQ ID NO: 268448 - DNA, 33 bp, Homo sapien
gtgataagtgtcaagagaaagtatacagtccta

SEQ ID NO: 268449 - DNA, 33 bp, Homo sapien
gattgtagaaggaggaatattgcagacagaaag

SEQ ID NO: 268450 - DNA, 33 bp, Homo sapien
gattgtagaaggaggagtattgcagacagaaag

SEQ ID NO: 268451 - DNA, 33 bp, Homo sapien
tggtcttttgccttcaaagtttccatgggaaaa

SEQ ID NO: 268452 - DNA, 33 bp, Homo sapien
tggtcttttgccttcagagtttccatgggaaaa

SEQ ID NO: 268453 - DNA, 33 bp, Homo sapien
gccaatttaacttaaccgcattgatatttgcca

SEQ ID NO: 268454 - DNA, 33 bp, Homo sapien
gccaatttaacttaactgcattgatatttgcca

SEQ ID NO: 268455 - DNA, 33 bp, Homo sapien
aaggagcttaatgtacaagattttaagaggctg

SEQ ID NO: 268456 - DNA, 33 bp, Homo sapien
aaggagcttaatgtaccagattttaagaggctg

SEQ ID NO: 268457 - DNA, 33 bp, Homo sapien
agtgagaagggaaaccaggacccaaatgaggta

SEQ ID NO: 268458 - DNA, 33 bp, Homo sapien
agtgagaagggaaaccgggacccaaatgaggta

SEQ ID NO: 268459 - DNA, 33 bp, Homo sapien
agatattgaatgaatacaagtttgtagagtaat

SEQ ID NO: 268460 - DNA, 33 bp, Homo sapien
agatattgaatgaatagaagtttgtagagtaat

SEQ ID NO: 268461 - DNA, 33 bp, Homo sapien
tttgaacacacagaaaagatgctgctttataga

SEQ ID NO: 268462 - DNA, 33 bp, Homo sapien
tttgaacacacagaaaggatgctgctttataga

SEQ ID NO: 268463 - DNA, 33 bp, Homo sapien
agcacagcacttgcccaagcataggcacttaat

SEQ ID NO: 268464 - DNA, 33 bp, Homo sapien
agcacagcacttgcccgagcataggcacttaat

SEQ ID NO: 268465 - DNA, 33 bp, Homo sapien
catggagcctaccatccatggccaagaaaggga

SEQ ID NO: 268466 - DNA, 33 bp, Homo sapien
catggagcctaccatctatggccaagaaaggga

SEQ ID NO: 268467 - DNA, 33 bp, Homo sapien
cagcaaacactacaaaataggcctttaaagaaa

SEQ ID NO: 268468 - DNA, 33 bp, Homo sapien
cagcaaacactacaaagtaggcctttaaagaaa

SEQ ID NO: 268469 - DNA, 33 bp, Homo sapien
aagtactagtatcagaactccaaaccttcattt

SEQ ID NO: 268470 - DNA, 33 bp, Homo sapien
aagtactagtatcagagctccaaaccttcattt

SEQ ID NO: 268471 - DNA, 33 bp, Homo sapien
tcaattgaattaaggcactgttaacacatttac

SEQ ID NO: 268472 - DNA, 33 bp, Homo sapien
tcaattgaattaaggccctgttaacacatttac

SEQ ID NO: 268473 - DNA, 33 bp, Homo sapien
ggtgctttttgggtgtaaatagttgtccaattt

SEQ ID NO: 268474 - DNA, 33 bp, Homo sapien
ggtgctttttgggtgtgaatagttgtccaattt

SEQ ID NO: 268475 - DNA, 33 bp, Homo sapien
aagaggcactgaagagaatataaaagacaatat

SEQ ID NO: 268476 - DNA, 33 bp, Homo sapien
aagaggcactgaagaggatataaaagacaatat

SEQ ID NO: 268477 - DNA, 33 bp, Homo sapien
caaacgtcagggataacgaaaggattctaaaag

SEQ ID NO: 268478 - DNA, 33 bp, Homo sapien
caaacgtcagggataaggaaaggattctaaaag

SEQ ID NO: 268479 - DNA, 33 bp, Homo sapien
ttatggctgaatagtacctccttgtgtagatgt

SEQ ID NO: 268480 - DNA, 33 bp, Homo sapien
ttatggctgaatagtatctccttgtgtagatgt

SEQ ID NO: 268481 - DNA, 33 bp, Homo sapien
ttaccaatggcagtaacttaacacattcatggg

SEQ ID NO: 268482 - DNA, 33 bp, Homo sapien
ttaccaatggcagtaagttaacacattcatggg

SEQ ID NO: 268483 - DNA, 33 bp, Homo sapien
ccaaacttaccttcaaaagaatcagcatcatgc

SEQ ID NO: 268484 - DNA, 33 bp, Homo sapien
ccaaacttaccttcaagagaatcagcatcatgc

SEQ ID NO: 268485 - DNA, 33 bp, Homo sapien
caaccctttcagcaggaagcctgtccaatctgt

SEQ ID NO: 268486 - DNA, 33 bp, Homo sapien
caaccctttcagcaggcagcctgtccaatctgt

SEQ ID NO: 268487 - DNA, 33 bp, Homo sapien
gtgaggttcttgcaggaatctaagagcttagaa

SEQ ID NO: 268488 - DNA, 33 bp, Homo sapien
gtgaggttcttgcaggtatctaagagcttagaa

SEQ ID NO: 268489 - DNA, 33 bp, Homo sapien
gcttacttgtgttctcactttctctgtcttcct

SEQ ID NO: 268490 - DNA, 33 bp, Homo sapien
gcttacttgtgttctcgctttctctgtcttcct

SEQ ID NO: 268491 - DNA, 33 bp, Homo sapien
aaattgcgggataaaactttggaacacaatacc

SEQ ID NO: 268492 - DNA, 33 bp, Homo sapien
aaattgcgggataaaattttggaacacaatacc

SEQ ID NO: 268493 - DNA, 33 bp, Homo sapien
caagaataagacagcaataactaggaatcccta

SEQ ID NO: 268494 - DNA, 33 bp, Homo sapien
caagaataagacagcagtaactaggaatcccta

SEQ ID NO: 268495 - DNA, 33 bp, Homo sapien
ttctactgactcaaaccggcagagtacaaacca

SEQ ID NO: 268496 - DNA, 33 bp, Homo sapien
ttctactgactcaaactggcagagtacaaacca

SEQ ID NO: 268497 - DNA, 33 bp, Homo sapien
tgaggttagagagtaaaaagagcttataacttt

SEQ ID NO: 268498 - DNA, 33 bp, Homo sapien
tgaggttagagagtaagaagagcttataacttt

SEQ ID NO: 268499 - DNA, 33 bp, Homo sapien
ttcttgccagcaaaccaaaaagtttaaatctgt

SEQ ID NO: 268500 - DNA, 33 bp, Homo sapien
ttcttgccagcaaaccgaaaagtttaaatctgt

SEQ ID NO: 268501 - DNA, 33 bp, Homo sapien
gactgtatgatcatggacacaaatattaatatt

SEQ ID NO: 268502 - DNA, 33 bp, Homo sapien
gactgtatgatcatgggcacaaatattaatatt

SEQ ID NO: 268503 - DNA, 33 bp, Homo sapien
attaattaagatgactaaaagagcaatggcagt

SEQ ID NO: 268504 - DNA, 33 bp, Homo sapien
attaattaagatgactgaaagagcaatggcagt

SEQ ID NO: 268505 - DNA, 33 bp, Homo sapien
aggttggattgagggacgtgatgaggttcctga

SEQ ID NO: 268506 - DNA, 33 bp, Homo sapien
aggttggattgagggatgtgatgaggttcctga

SEQ ID NO: 268507 - DNA, 33 bp, Homo sapien
aagctctatgtaaatccagcatgtggcttccgt

SEQ ID NO: 268508 - DNA, 33 bp, Homo sapien
aagctctatgtaaatctagcatgtggcttccgt

SEQ ID NO: 268509 - DNA, 33 bp, Homo sapien
gacttgatgacaggaccgatagagaagacagaa

SEQ ID NO: 268510 - DNA, 33 bp, Homo sapien
gacttgatgacaggactgatagagaagacagaa

SEQ ID NO: 268511 - DNA, 33 bp, Homo sapien
tttgggttcatatccacaatatcctggggcaaa

SEQ ID NO: 268512 - DNA, 33 bp, Homo sapien
tttgggttcatatccagaatatcctggggcaaa

SEQ ID NO: 268513 - DNA, 33 bp, Homo sapien
ctgtcttgacctcatccaaaagacccctatttt

SEQ ID NO: 268514 - DNA, 33 bp, Homo sapien
ctgtcttgacctcatctaaaagacccctatttt

SEQ ID NO: 268515 - DNA, 33 bp, Homo sapien
ccagcaagttttattacgcatgtgtatcagaat

SEQ ID NO: 268516 - DNA, 33 bp, Homo sapien
ccagcaagttttattatgcatgtgtatcagaat

SEQ ID NO: 268517 - DNA, 33 bp, Homo sapien
tcctaaatcattattacaaacttccccaggaac

SEQ ID NO: 268518 - DNA, 33 bp, Homo sapien
tcctaaatcattattataaacttccccaggaac

SEQ ID NO: 268519 - DNA, 33 bp, Homo sapien
tttatagaatatgaaacggtggtgaaatggctt

SEQ ID NO: 268520 - DNA, 33 bp, Homo sapien
tttatagaatatgaaatggtggtgaaatggctt

SEQ ID NO: 268521 - DNA, 33 bp, Homo sapien
aattatactgatgaacactgcaaaaactcagga

SEQ ID NO: 268522 - DNA, 33 bp, Homo sapien
aattatactgatgaaccctgcaaaaactcagga

SEQ ID NO: 268523 - DNA, 33 bp, Homo sapien
ttgcagaagaacatcaatcagtctgtgaaatta

SEQ ID NO: 268524 - DNA, 33 bp, Homo sapien
ttgcagaagaacatcagtcagtctgtgaaatta

SEQ ID NO: 268525 - DNA, 33 bp, Homo sapien
aaggtccattaggcccaatattgcctcaattac

SEQ ID NO: 268526 - DNA, 33 bp, Homo sapien
aaggtccattaggcccgatattgcctcaattac

SEQ ID NO: 268527 - DNA, 33 bp, Homo sapien
tctttatgcatccttaactcaacattattacaa

SEQ ID NO: 268528 - DNA, 33 bp, Homo sapien
tctttatgcatccttagctcaacattattacaa

SEQ ID NO: 268529 - DNA, 33 bp, Homo sapien
attcaataccgtttaaatcatacttagccaggc

SEQ ID NO: 268530 - DNA, 33 bp, Homo sapien
attcaataccgtttaagtcatacttagccaggc

SEQ ID NO: 268531 - DNA, 33 bp, Homo sapien
agaggcggcatgtaaactggcagttcaacctgc

SEQ ID NO: 268532 - DNA, 33 bp, Homo sapien
agaggcggcatgtaaattggcagttcaacctgc

SEQ ID NO: 268533 - DNA, 33 bp, Homo sapien
agtagcaacagagcagcagaagtagatggattt

SEQ ID NO: 268534 - DNA, 33 bp, Homo sapien
agtagcaacagagcagtagaagtagatggattt

SEQ ID NO: 268535 - DNA, 33 bp, Homo sapien
cttgatctctgccttaacatgaatagcaaatgt

SEQ ID NO: 268536 - DNA, 33 bp, Homo sapien
cttgatctctgccttagcatgaatagcaaatgt

SEQ ID NO: 268537 - DNA, 33 bp, Homo sapien
tgctgtgtgaccttcaaaagacctttcacctca

SEQ ID NO: 268538 - DNA, 33 bp, Homo sapien
tgctgtgtgaccttcagaagacctttcacctca

SEQ ID NO: 268539 - DNA, 33 bp, Homo sapien
tctatgccacaatataccttaatacttgatttg

SEQ ID NO: 268540 - DNA, 33 bp, Homo sapien
tctatgccacaatatatcttaatacttgatttg

SEQ ID NO: 268541 - DNA, 33 bp, Homo sapien
aagaaacactcatgcccaggaatcacaggccta

SEQ ID NO: 268542 - DNA, 33 bp, Homo sapien
aagaaacactcatgccgaggaatcacaggccta

SEQ ID NO: 268543 - DNA, 33 bp, Homo sapien
tagtatattctagaaaccacaggatcgcaagtc

SEQ ID NO: 268544 - DNA, 33 bp, Homo sapien
tagtatattctagaaagcacaggatcgcaagtc

SEQ ID NO: 268545 - DNA, 33 bp, Homo sapien
tgtagagaatagagaagtagaggacaagacaga

SEQ ID NO: 268546 - DNA, 33 bp, Homo sapien
tgtagagaatagagaattagaggacaagacaga

SEQ ID NO: 268547 - DNA, 33 bp, Homo sapien
cacctgctatgcataacaacctatctctagacc

SEQ ID NO: 268548 - DNA, 33 bp, Homo sapien
cacctgctatgcataataacctatctctagacc

SEQ ID NO: 268549 - DNA, 33 bp, Homo sapien
cttacacacatggtatcacactcattcaaatgc

SEQ ID NO: 268550 - DNA, 33 bp, Homo sapien
cttacacacatggtatgacactcattcaaatgc

SEQ ID NO: 268551 - DNA, 33 bp, Homo sapien
ggccttggcaattgaccagatgagaggttggca

SEQ ID NO: 268552 - DNA, 33 bp, Homo sapien
ggccttggcaattgactagatgagaggttggca

SEQ ID NO: 268553 - DNA, 33 bp, Homo sapien
ctcagtgcttaatgatgaaatttgtactcacat

SEQ ID NO: 268554 - DNA, 33 bp, Homo sapien
ctcagtgcttaatgattaaatttgtactcacat

SEQ ID NO: 268555 - DNA, 33 bp, Homo sapien
tctgagttattgaagacgtgggaaaatgggcac

SEQ ID NO: 268556 - DNA, 33 bp, Homo sapien
tctgagttattgaagatgtgggaaaatgggcac

SEQ ID NO: 268557 - DNA, 33 bp, Homo sapien
gttttgtgtatgagaaagattcagaaaaggaaa

SEQ ID NO: 268558 - DNA, 33 bp, Homo sapien
gttttgtgtatgagaaggattcagaaaaggaaa

SEQ ID NO: 268559 - DNA, 33 bp, Homo sapien
agcataatgtcttcaaagttcatctatgttgca

SEQ ID NO: 268560 - DNA, 33 bp, Homo sapien
agcataatgtcttcaacgttcatctatgttgca

SEQ ID NO: 268561 - DNA, 33 bp, Homo sapien
tgaaaactcacttgtacattcataaacgagttt

SEQ ID NO: 268562 - DNA, 33 bp, Homo sapien
tgaaaactcacttgtatattcataaacgagttt

SEQ ID NO: 268563 - DNA, 33 bp, Homo sapien
tgagttaaatgaacaaacttcaagaagagataa

SEQ ID NO: 268564 - DNA, 33 bp, Homo sapien
tgagttaaatgaacaagcttcaagaagagataa

SEQ ID NO: 268565 - DNA, 33 bp, Homo sapien
atgtactggacaagaaagtgtactatatgaatt

SEQ ID NO: 268566 - DNA, 33 bp, Homo sapien
atgtactggacaagaatgtgtactatatgaatt

SEQ ID NO: 268567 - DNA, 33 bp, Homo sapien
agagagaggcattgaacgggcttccgtatgaag

SEQ ID NO: 268568 - DNA, 33 bp, Homo sapien
agagagaggcattgaatgggcttccgtatgaag

SEQ ID NO: 268569 - DNA, 33 bp, Homo sapien
ctcacaatttttctaccatccatatgttaatga

SEQ ID NO: 268570 - DNA, 33 bp, Homo sapien
ctcacaatttttctactatccatatgttaatga

SEQ ID NO: 268571 - DNA, 33 bp, Homo sapien
tggagaataaggtttagggacaaagatgagaag

SEQ ID NO: 268572 - DNA, 33 bp, Homo sapien
tggagaataaggtttatggacaaagatgagaag

SEQ ID NO: 268573 - DNA, 33 bp, Homo sapien
aattcagtccagaaaacactctatgtgaaatat

SEQ ID NO: 268574 - DNA, 33 bp, Homo sapien
aattcagtccagaaaatactctatgtgaaatat

SEQ ID NO: 268575 - DNA, 33 bp, Homo sapien
ctccacttgcccattacactgctctgaatatgg

SEQ ID NO: 268576 - DNA, 33 bp, Homo sapien
ctccacttgcccattagactgctctgaatatgg

SEQ ID NO: 268577 - DNA, 33 bp, Homo sapien
gaaggtctgaaccaaacagaagcagcattctgt

SEQ ID NO: 268578 - DNA, 33 bp, Homo sapien
gaaggtctgaaccaaatagaagcagcattctgt

SEQ ID NO: 268579 - DNA, 33 bp, Homo sapien
ggctctttggcagtcacgtctagaggaatggaa

SEQ ID NO: 268580 - DNA, 33 bp, Homo sapien
ggctctttggcagtcatgtctagaggaatggaa

SEQ ID NO: 268581 - DNA, 33 bp, Homo sapien
tgttcttacaatatgactaaaggaagtttcaaa

SEQ ID NO: 268582 - DNA, 33 bp, Homo sapien
tgttcttacaatatgattaaaggaagtttcaaa

SEQ ID NO: 268583 - DNA, 33 bp, Homo sapien
taatgttgaggcaaaaacattttgaggacctag

SEQ ID NO: 268584 - DNA, 33 bp, Homo sapien
taatgttgaggcaaaatcattttgaggacctag

SEQ ID NO: 268585 - DNA, 33 bp, Homo sapien
aagtgctgtggcaaccagaagagcagtgatgca

SEQ ID NO: 268586 - DNA, 33 bp, Homo sapien
aagtgctgtggcaacctgaagagcagtgatgca

SEQ ID NO: 268587 - DNA, 33 bp, Homo sapien
agtcaggagtctaagaccagtcactcaaaatat

SEQ ID NO: 268588 - DNA, 33 bp, Homo sapien
agtcaggagtctaagatcagtcactcaaaatat

SEQ ID NO: 268589 - DNA, 33 bp, Homo sapien
aggatcaataagaacagaagcagatttagttat

SEQ ID NO: 268590 - DNA, 33 bp, Homo sapien
aggatcaataagaacataagcagatttagttat

SEQ ID NO: 268591 - DNA, 33 bp, Homo sapien
attttagaacttagaaaacaattgtggatgatt

SEQ ID NO: 268592 - DNA, 33 bp, Homo sapien
attttagaacttagaagacaattgtggatgatt

SEQ ID NO: 268593 - DNA, 33 bp, Homo sapien
accaccaagattctaactgagctgcccaaagtc

SEQ ID NO: 268594 - DNA, 33 bp, Homo sapien
accaccaagattctaagtgagctgcccaaagtc

SEQ ID NO: 268595 - DNA, 33 bp, Homo sapien
tcagtgaggcatttccacttcttctttaacaaa

SEQ ID NO: 268596 - DNA, 33 bp, Homo sapien
tcagtgaggcatttccgcttcttctttaacaaa

SEQ ID NO: 268597 - DNA, 33 bp, Homo sapien
gagcaaaggctttggccactgaagtcattacag

SEQ ID NO: 268598 - DNA, 33 bp, Homo sapien
gagcaaaggctttggctactgaagtcattacag

SEQ ID NO: 268599 - DNA, 33 bp, Homo sapien
ttaagtgccttgtccacgtcatcagggaaatcc

SEQ ID NO: 268600 - DNA, 33 bp, Homo sapien
ttaagtgccttgtccatgtcatcagggaaatcc

SEQ ID NO: 268601 - DNA, 33 bp, Homo sapien
tctttaaatgcggctgaagacagtcagtaacat

SEQ ID NO: 268602 - DNA, 33 bp, Homo sapien
tctttaaatgcggctggagacagtcagtaacat

SEQ ID NO: 268603 - DNA, 33 bp, Homo sapien
aagcgacttcacatataaaaatctagacttgca

SEQ ID NO: 268604 - DNA, 33 bp, Homo sapien
aagcgacttcacatatgaaaatctagacttgca

SEQ ID NO: 268605 - DNA, 33 bp, Homo sapien
taaacagcttattaaacctattgttagctttca

SEQ ID NO: 268606 - DNA, 33 bp, Homo sapien
taaacagcttattaaatctattgttagctttca

SEQ ID NO: 268607 - DNA, 33 bp, Homo sapien
attcatctccaggaccaagaatacccttctgtc

SEQ ID NO: 268608 - DNA, 33 bp, Homo sapien
attcatctccaggacctagaatacccttctgtc

SEQ ID NO: 268609 - DNA, 33 bp, Homo sapien
gagcacgggggtctaactatcatggagaaggaa

SEQ ID NO: 268610 - DNA, 33 bp, Homo sapien
gagcacgggggtctaattatcatggagaaggaa

SEQ ID NO: 268611 - DNA, 33 bp, Homo sapien
ctttgcgtgctggaacaaccacgaaactgagca

SEQ ID NO: 268612 - DNA, 33 bp, Homo sapien
ctttgcgtgctggaacgaccacgaaactgagca

SEQ ID NO: 268613 - DNA, 33 bp, Homo sapien
tttctatttagaacaacgtttgatatcaactta

SEQ ID NO: 268614 - DNA, 33 bp, Homo sapien
tttctatttagaacaatgtttgatatcaactta

SEQ ID NO: 268615 - DNA, 33 bp, Homo sapien
ccctgtactatctttaggtctgtgtgtatccag

SEQ ID NO: 268616 - DNA, 33 bp, Homo sapien
ccctgtactatctttatgtctgtgtgtatccag

SEQ ID NO: 268617 - DNA, 33 bp, Homo sapien
aggcccggatcaggacagatactactgagaatt

SEQ ID NO: 268618 - DNA, 33 bp, Homo sapien
aggcccggatcaggacggatactactgagaatt

SEQ ID NO: 268619 - DNA, 33 bp, Homo sapien
actcaatctgaacaaaagggagaaaatagattg

SEQ ID NO: 268620 - DNA, 33 bp, Homo sapien
actcaatctgaacaaaggggagaaaatagattg

SEQ ID NO: 268621 - DNA, 33 bp, Homo sapien
tttctgaaggtaatagaacagctatgggcattt

SEQ ID NO: 268622 - DNA, 33 bp, Homo sapien
tttctgaaggtaataggacagctatgggcattt

SEQ ID NO: 268623 - DNA, 33 bp, Homo sapien
atataaatggaataaactctatgaaactctttg

SEQ ID NO: 268624 - DNA, 33 bp, Homo sapien
atataaatggaataaagtctatgaaactctttg

SEQ ID NO: 268625 - DNA, 33 bp, Homo sapien
ggttaagtgattttggaatgaaagtagaactgc

SEQ ID NO: 268626 - DNA, 33 bp, Homo sapien
ggttaagtgattttggtatgaaagtagaactgc

SEQ ID NO: 268627 - DNA, 33 bp, Homo sapien
tttcatctgggtttcacggtcacagacttcatc

SEQ ID NO: 268628 - DNA, 33 bp, Homo sapien
tttcatctgggtttcatggtcacagacttcatc

SEQ ID NO: 268629 - DNA, 33 bp, Homo sapien
tgatagactaccaagactatgattttttatggg

SEQ ID NO: 268630 - DNA, 33 bp, Homo sapien
tgatagactaccaagattatgattttttatggg

SEQ ID NO: 268631 - DNA, 33 bp, Homo sapien
tcagtgcttcggagctcacttacacgaaaactt

SEQ ID NO: 268632 - DNA, 33 bp, Homo sapien
tcagtgcttcggagctgacttacacgaaaactt

SEQ ID NO: 268633 - DNA, 33 bp, Homo sapien
aagtgaaaaagatgagaagggaccagcaaagga

SEQ ID NO: 268634 - DNA, 33 bp, Homo sapien
aagtgaaaaagatgaggagggaccagcaaagga

SEQ ID NO: 268635 - DNA, 33 bp, Homo sapien
aaagcactattctgataacgtcaacatcacagc

SEQ ID NO: 268636 - DNA, 33 bp, Homo sapien
aaagcactattctgatcacgtcaacatcacagc

SEQ ID NO: 268637 - DNA, 33 bp, Homo sapien
ttgctaagtagaggaactgcaaatgtaaagaat

SEQ ID NO: 268638 - DNA, 33 bp, Homo sapien
ttgctaagtagaggaattgcaaatgtaaagaat

SEQ ID NO: 268639 - DNA, 33 bp, Homo sapien
gtaaagaatgaaatcaagtggcctccaaagaac

SEQ ID NO: 268640 - DNA, 33 bp, Homo sapien
gtaaagaatgaaatcatgtggcctccaaagaac

SEQ ID NO: 268641 - DNA, 33 bp, Homo sapien
cttcccataatccagacgtcattggaatgatga

SEQ ID NO: 268642 - DNA, 33 bp, Homo sapien
cttcccataatccagatgtcattggaatgatga

SEQ ID NO: 268643 - DNA, 33 bp, Homo sapien
acagcacttttcacaacaatgaagacatggaat

SEQ ID NO: 268644 - DNA, 33 bp, Homo sapien
acagcacttttcacaataatgaagacatggaat

SEQ ID NO: 268645 - DNA, 33 bp, Homo sapien
gctaggccagaccaaagaggttggttggcattc

SEQ ID NO: 268646 - DNA, 33 bp, Homo sapien
gctaggccagaccaaataggttggttggcattc

SEQ ID NO: 268647 - DNA, 33 bp, Homo sapien
ttatggtccatacttgaaatatcatagtccatt

SEQ ID NO: 268648 - DNA, 33 bp, Homo sapien
ttatggtccatacttgcaatatcatagtccatt

SEQ ID NO: 268649 - DNA, 33 bp, Homo sapien
tgagcaagtcacttcaactctctcaataccagt

SEQ ID NO: 268650 - DNA, 33 bp, Homo sapien
tgagcaagtcacttcatctctctcaataccagt

SEQ ID NO: 268651 - DNA, 33 bp, Homo sapien
cagagttcatttcagaaaagtggtaagaaatga

SEQ ID NO: 268652 - DNA, 33 bp, Homo sapien
cagagttcatttcagagaagtggtaagaaatga

SEQ ID NO: 268653 - DNA, 33 bp, Homo sapien
ctcaggtggtcctcaccagaatctgacaggcag

SEQ ID NO: 268654 - DNA, 33 bp, Homo sapien
ctcaggtggtcctcacgagaatctgacaggcag

SEQ ID NO: 268655 - DNA, 33 bp, Homo sapien
tttgtgggcacctgaaaattgaattgtctgcca

SEQ ID NO: 268656 - DNA, 33 bp, Homo sapien
tttgtgggcacctgaagattgaattgtctgcca

SEQ ID NO: 268657 - DNA, 33 bp, Homo sapien
attacacaactaataactggccaggaaacaatt

SEQ ID NO: 268658 - DNA, 33 bp, Homo sapien
attacacaactaataattggccaggaaacaatt

SEQ ID NO: 268659 - DNA, 33 bp, Homo sapien
tagtctccctccctaccgctgtcaaacagacta

SEQ ID NO: 268660 - DNA, 33 bp, Homo sapien
tagtctccctccctactgctgtcaaacagacta

SEQ ID NO: 268661 - DNA, 33 bp, Homo sapien
taattccaatggtccacataatgtaacaatttg

SEQ ID NO: 268662 - DNA, 33 bp, Homo sapien
taattccaatggtccagataatgtaacaatttg

SEQ ID NO: 268663 - DNA, 33 bp, Homo sapien
ttacctactacagggaatatccagtcaaaatta

SEQ ID NO: 268664 - DNA, 33 bp, Homo sapien
ttacctactacagggagtatccagtcaaaatta

SEQ ID NO: 268665 - DNA, 33 bp, Homo sapien
gaaactagaaaaatcccggaagagctatggggt

SEQ ID NO: 268666 - DNA, 33 bp, Homo sapien
gaaactagaaaaatcctggaagagctatggggt

SEQ ID NO: 268667 - DNA, 33 bp, Homo sapien
ttcaaataaggctgcacaattcactaagaatga

SEQ ID NO: 268668 - DNA, 33 bp, Homo sapien
ttcaaataaggctgcataattcactaagaatga

SEQ ID NO: 268669 - DNA, 33 bp, Homo sapien
cagactatccactatcaatgctaaatacatctt

SEQ ID NO: 268670 - DNA, 33 bp, Homo sapien
cagactatccactatcgatgctaaatacatctt

SEQ ID NO: 268671 - DNA, 33 bp, Homo sapien
agatgttacagaaaaaactatgatctttgaatt

SEQ ID NO: 268672 - DNA, 33 bp, Homo sapien
agatgttacagaaaaagctatgatctttgaatt

SEQ ID NO: 268673 - DNA, 33 bp, Homo sapien
cctggagaagagactaactagaggcttaaagaa

SEQ ID NO: 268674 - DNA, 33 bp, Homo sapien
cctggagaagagactagctagaggcttaaagaa

SEQ ID NO: 268675 - DNA, 33 bp, Homo sapien
tccagcagaccaacaaccttcttatcttgcagt

SEQ ID NO: 268676 - DNA, 33 bp, Homo sapien
tccagcagaccaacaagcttcttatcttgcagt

SEQ ID NO: 268677 - DNA, 33 bp, Homo sapien
tttccatgaaaaattacataggctggtttatta

SEQ ID NO: 268678 - DNA, 33 bp, Homo sapien
tttccatgaaaaattagataggctggtttatta

SEQ ID NO: 268679 - DNA, 33 bp, Homo sapien
catttgcataaggccaatagtaaacaatttggt

SEQ ID NO: 268680 - DNA, 33 bp, Homo sapien
catttgcataaggccattagtaaacaatttggt

SEQ ID NO: 268681 - DNA, 33 bp, Homo sapien
agccaaactgttgcaacaaaaaaacaccttctc

SEQ ID NO: 268682 - DNA, 33 bp, Homo sapien
agccaaactgttgcaagaaaaaaacaccttctc

SEQ ID NO: 268683 - DNA, 33 bp, Homo sapien
ctgtgtgtaagcataacgatgaaataacacttt

SEQ ID NO: 268684 - DNA, 33 bp, Homo sapien
ctgtgtgtaagcataatgatgaaataacacttt

SEQ ID NO: 268685 - DNA, 33 bp, Homo sapien
aagaattgtggtccaacaagagtaacaccatat

SEQ ID NO: 268686 - DNA, 33 bp, Homo sapien
aagaattgtggtccaagaagagtaacaccatat

SEQ ID NO: 268687 - DNA, 33 bp, Homo sapien
taagcagattgaaccaaaggagctatatttcag

SEQ ID NO: 268688 - DNA, 33 bp, Homo sapien
taagcagattgaaccagaggagctatatttcag

SEQ ID NO: 268689 - DNA, 33 bp, Homo sapien
gcctccatacaaatgccctgtgctggttctctc

SEQ ID NO: 268690 - DNA, 33 bp, Homo sapien
gcctccatacaaatgctctgtgctggttctctc

SEQ ID NO: 268691 - DNA, 33 bp, Homo sapien
gtcctgtaaaccaaaacgcctaatagtgatggc

SEQ ID NO: 268692 - DNA, 33 bp, Homo sapien
gtcctgtaaaccaaaatgcctaatagtgatggc

SEQ ID NO: 268693 - DNA, 33 bp, Homo sapien
aagaccagggtgttacaatctgactgtgtttca

SEQ ID NO: 268694 - DNA, 33 bp, Homo sapien
aagaccagggtgttacgatctgactgtgtttca

SEQ ID NO: 268695 - DNA, 33 bp, Homo sapien
ctacagctcgcctttaacaggttgtttggtgac

SEQ ID NO: 268696 - DNA, 33 bp, Homo sapien
ctacagctcgcctttagcaggttgtttggtgac

SEQ ID NO: 268697 - DNA, 33 bp, Homo sapien
ttcctacatttcatcacgtctaagtcggtgctt

SEQ ID NO: 268698 - DNA, 33 bp, Homo sapien
ttcctacatttcatcatgtctaagtcggtgctt

SEQ ID NO: 268699 - DNA, 33 bp, Homo sapien
tcttctcagtcataaagtacttgtgagcattca

SEQ ID NO: 268700 - DNA, 33 bp, Homo sapien
tcttctcagtcataaattacttgtgagcattca

SEQ ID NO: 268701 - DNA, 33 bp, Homo sapien
acggtgacctggagcggatggacagtgattgct

SEQ ID NO: 268702 - DNA, 33 bp, Homo sapien
acggtgacctggagcgtatggacagtgattgct

SEQ ID NO: 268703 - DNA, 33 bp, Homo sapien
tttatctcaaaagacaaactatgtaaatccatg

SEQ ID NO: 268704 - DNA, 33 bp, Homo sapien
tttatctcaaaagacagactatgtaaatccatg

SEQ ID NO: 268705 - DNA, 33 bp, Homo sapien
tcctctctccattgtaaaatctacccatccatc

SEQ ID NO: 268706 - DNA, 33 bp, Homo sapien
tcctctctccattgtagaatctacccatccatc

SEQ ID NO: 268707 - DNA, 33 bp, Homo sapien
aagcaagggcacagcaacccttccgacagcctg

SEQ ID NO: 268708 - DNA, 33 bp, Homo sapien
aagcaagggcacagcatcccttccgacagcctg

SEQ ID NO: 268709 - DNA, 33 bp, Homo sapien
gtggaaacaggatataaagctcccaatatttta

SEQ ID NO: 268710 - DNA, 33 bp, Homo sapien
gtggaaacaggatatagagctcccaatatttta

SEQ ID NO: 268711 - DNA, 33 bp, Homo sapien
tgctctattcagcatccagggggctaagtgggt

SEQ ID NO: 268712 - DNA, 33 bp, Homo sapien
tgctctattcagcatcgagggggctaagtgggt

SEQ ID NO: 268713 - DNA, 33 bp, Homo sapien
ggccaaaatgccatccaatagcctcatttatct

SEQ ID NO: 268714 - DNA, 33 bp, Homo sapien
ggccaaaatgccatccgatagcctcatttatct

SEQ ID NO: 268715 - DNA, 33 bp, Homo sapien
gttctttccttttctaaagccttgttttttgtt

SEQ ID NO: 268716 - DNA, 33 bp, Homo sapien
gttctttccttttctagagccttgttttttgtt

SEQ ID NO: 268717 - DNA, 33 bp, Homo sapien
tccagtactgattgtcacctgggagacagctgt

SEQ ID NO: 268718 - DNA, 33 bp, Homo sapien
tccagtactgattgtcgcctgggagacagctgt

SEQ ID NO: 268719 - DNA, 33 bp, Homo sapien
gaccaactgtgactcacctatttactgcagagc

SEQ ID NO: 268720 - DNA, 33 bp, Homo sapien
gaccaactgtgactcatctatttactgcagagc

SEQ ID NO: 268721 - DNA, 33 bp, Homo sapien
ggtgggaggaattctaataataccttggatatt

SEQ ID NO: 268722 - DNA, 33 bp, Homo sapien
ggtgggaggaattctattaataccttggatatt

SEQ ID NO: 268723 - DNA, 33 bp, Homo sapien
gaggcaatgaatccaaagctgagaccaataggc

SEQ ID NO: 268724 - DNA, 33 bp, Homo sapien
gaggcaatgaatccaaggctgagaccaataggc

SEQ ID NO: 268725 - DNA, 33 bp, Homo sapien
gggataggacagtaaccgcaggagctgtgagtg

SEQ ID NO: 268726 - DNA, 33 bp, Homo sapien
gggataggacagtaactgcaggagctgtgagtg

SEQ ID NO: 268727 - DNA, 33 bp, Homo sapien
agaaagtgcagctgaaatcgatggcttttagct

SEQ ID NO: 268728 - DNA, 33 bp, Homo sapien
agaaagtgcagctgaattcgatggcttttagct

SEQ ID NO: 268729 - DNA, 33 bp, Homo sapien
ccccagaagagctaaagaagggaaacctactaa

SEQ ID NO: 268730 - DNA, 33 bp, Homo sapien
ccccagaagagctaaataagggaaacctactaa

SEQ ID NO: 268731 - DNA, 33 bp, Homo sapien
ctagacgagcagaagaacagaaaagttacacta

SEQ ID NO: 268732 - DNA, 33 bp, Homo sapien
ctagacgagcagaagagcagaaaagttacacta

SEQ ID NO: 268733 - DNA, 33 bp, Homo sapien
tgttgggggaaaaccactggcatttattgaatg

SEQ ID NO: 268734 - DNA, 33 bp, Homo sapien
tgttgggggaaaaccattggcatttattgaatg

SEQ ID NO: 268735 - DNA, 33 bp, Homo sapien
atcctctattgtctacaggagattaagtgtatg

SEQ ID NO: 268736 - DNA, 33 bp, Homo sapien
atcctctattgtctaccggagattaagtgtatg

SEQ ID NO: 268737 - DNA, 33 bp, Homo sapien
cagactaacaggtaccaaaatctaagtcataat

SEQ ID NO: 268738 - DNA, 33 bp, Homo sapien
cagactaacaggtaccgaaatctaagtcataat

SEQ ID NO: 268739 - DNA, 33 bp, Homo sapien
tgataacatttctaagcacaccctggtccaggg

SEQ ID NO: 268740 - DNA, 33 bp, Homo sapien
tgataacatttctaagtacaccctggtccaggg

SEQ ID NO: 268741 - DNA, 33 bp, Homo sapien
tgaaagcaacctaaaaatgtattcttgctaaaa

SEQ ID NO: 268742 - DNA, 33 bp, Homo sapien
tgaaagcaacctaaaactgtattcttgctaaaa

SEQ ID NO: 268743 - DNA, 33 bp, Homo sapien
gtaaagaagctacacaatgctagaataaatgat

SEQ ID NO: 268744 - DNA, 33 bp, Homo sapien
gtaaagaagctacacagtgctagaataaatgat

SEQ ID NO: 268745 - DNA, 33 bp, Homo sapien
tgagtgtttagagaaacagttctccatattcct

SEQ ID NO: 268746 - DNA, 33 bp, Homo sapien
tgagtgtttagagaaagagttctccatattcct

SEQ ID NO: 268747 - DNA, 33 bp, Homo sapien
attacatttgacataactgaccaatctcattct

SEQ ID NO: 268748 - DNA, 33 bp, Homo sapien
attacatttgacataattgaccaatctcattct

SEQ ID NO: 268749 - DNA, 33 bp, Homo sapien
gataagagaaacatgaagagaatatgccacaat

SEQ ID NO: 268750 - DNA, 33 bp, Homo sapien
gataagagaaacatgaggagaatatgccacaat

SEQ ID NO: 268751 - DNA, 33 bp, Homo sapien
acacagaagcagacaaaagaggaggaggccatg

SEQ ID NO: 268752 - DNA, 33 bp, Homo sapien
acacagaagcagacaacagaggaggaggccatg

SEQ ID NO: 268753 - DNA, 33 bp, Homo sapien
ctgcttctgttcctgtcaagagaggaccagctc

SEQ ID NO: 268754 - DNA, 33 bp, Homo sapien
ctgcttctgttcctgttaagagaggaccagctc

SEQ ID NO: 268755 - DNA, 33 bp, Homo sapien
taaaagatttgccctacagaggttcatccacat

SEQ ID NO: 268756 - DNA, 33 bp, Homo sapien
taaaagatttgccctatagaggttcatccacat

SEQ ID NO: 268757 - DNA, 33 bp, Homo sapien
atgccaacaatgagacagagaatagtatgaggt

SEQ ID NO: 268758 - DNA, 33 bp, Homo sapien
atgccaacaatgagacggagaatagtatgaggt

SEQ ID NO: 268759 - DNA, 33 bp, Homo sapien
ctgctcaatactcccaccaatggccaagtatca

SEQ ID NO: 268760 - DNA, 33 bp, Homo sapien
ctgctcaatactcccatcaatggccaagtatca

SEQ ID NO: 268761 - DNA, 33 bp, Homo sapien
ttcacctttgaggcggaataaaaatgcaataat

SEQ ID NO: 268762 - DNA, 33 bp, Homo sapien
ttcacctttgaggcggcataaaaatgcaataat

SEQ ID NO: 268763 - DNA, 33 bp, Homo sapien
caatctggtatctgtacgtgattcctttgtgga

SEQ ID NO: 268764 - DNA, 33 bp, Homo sapien
caatctggtatctgtatgtgattcctttgtgga

SEQ ID NO: 268765 - DNA, 33 bp, Homo sapien
acagattaagacatcaatagtcatgcaatgtgt

SEQ ID NO: 268766 - DNA, 33 bp, Homo sapien
acagattaagacatcagtagtcatgcaatgtgt

SEQ ID NO: 268767 - DNA, 33 bp, Homo sapien
attgttgaggtaggaactgagaaggaagtgcag

SEQ ID NO: 268768 - DNA, 33 bp, Homo sapien
attgttgaggtaggaagtgagaaggaagtgcag

SEQ ID NO: 268769 - DNA, 33 bp, Homo sapien
ggacagtgtggtcatcgctcaagggtgttggtg

SEQ ID NO: 268770 - DNA, 33 bp, Homo sapien
ggacagtgtggtcatctctcaagggtgttggtg

SEQ ID NO: 268771 - DNA, 33 bp, Homo sapien
agcttctgcaatgccaacctgctaaatggtacc

SEQ ID NO: 268772 - DNA, 33 bp, Homo sapien
agcttctgcaatgccagcctgctaaatggtacc

SEQ ID NO: 268773 - DNA, 33 bp, Homo sapien
acacacagttagtatacggtgttagtatatagt

SEQ ID NO: 268774 - DNA, 33 bp, Homo sapien
acacacagttagtatatggtgttagtatatagt

SEQ ID NO: 268775 - DNA, 33 bp, Homo sapien
actcagcaggtatttacgtatccttgcttgaca

SEQ ID NO: 268776 - DNA, 33 bp, Homo sapien
actcagcaggtatttatgtatccttgcttgaca

SEQ ID NO: 268777 - DNA, 33 bp, Homo sapien
ggctacagttgtaaaaacaagtggtgataaata

SEQ ID NO: 268778 - DNA, 33 bp, Homo sapien
ggctacagttgtaaaaccaagtggtgataaata

SEQ ID NO: 268779 - DNA, 33 bp, Homo sapien
agctccattgcttctaagaagtccagttgttgc

SEQ ID NO: 268780 - DNA, 33 bp, Homo sapien
agctccattgcttctaggaagtccagttgttgc

SEQ ID NO: 268781 - DNA, 33 bp, Homo sapien
taagatttgaaggccaacctccagctccattgc

SEQ ID NO: 268782 - DNA, 33 bp, Homo sapien
taagatttgaaggccatcctccagctccattgc

SEQ ID NO: 268783 - DNA, 33 bp, Homo sapien
atggtacctatacggaagcatccttattgtaag

SEQ ID NO: 268784 - DNA, 33 bp, Homo sapien
atggtacctatacggaggcatccttattgtaag

SEQ ID NO: 268785 - DNA, 33 bp, Homo sapien
aaagaaatgctcttacaaagccttgaagctaac

SEQ ID NO: 268786 - DNA, 33 bp, Homo sapien
aaagaaatgctcttacgaagccttgaagctaac

SEQ ID NO: 268787 - DNA, 33 bp, Homo sapien
tcactatcattcatcaaaaaactgtctcgcctt

SEQ ID NO: 268788 - DNA, 33 bp, Homo sapien
tcactatcattcatcacaaaactgtctcgcctt

SEQ ID NO: 268789 - DNA, 33 bp, Homo sapien
agatggtagaatggaaaatcatcactatcattc

SEQ ID NO: 268790 - DNA, 33 bp, Homo sapien
agatggtagaatggaacatcatcactatcattc

SEQ ID NO: 268791 - DNA, 33 bp, Homo sapien
ttcagttgtttagcaacacttcctagctctacc

SEQ ID NO: 268792 - DNA, 33 bp, Homo sapien
ttcagttgtttagcaagacttcctagctctacc

SEQ ID NO: 268793 - DNA, 33 bp, Homo sapien
atttgtttcctgtttcaaacttctggagatata

SEQ ID NO: 268794 - DNA, 33 bp, Homo sapien
atttgtttcctgtttcgaacttctggagatata

SEQ ID NO: 268795 - DNA, 33 bp, Homo sapien
gtgactttagggccacagagaggagaatcagaa

SEQ ID NO: 268796 - DNA, 33 bp, Homo sapien
gtgactttagggccacggagaggagaatcagaa

SEQ ID NO: 268797 - DNA, 33 bp, Homo sapien
tctgaatcagtttagcagcctcttgactagtat

SEQ ID NO: 268798 - DNA, 33 bp, Homo sapien
tctgaatcagtttagcggcctcttgactagtat

SEQ ID NO: 268799 - DNA, 33 bp, Homo sapien
aaatcagcacaaatccactaaataaaaccactg

SEQ ID NO: 268800 - DNA, 33 bp, Homo sapien
aaatcagcacaaatccgctaaataaaaccactg

SEQ ID NO: 268801 - DNA, 33 bp, Homo sapien
gcctttagtttccatcaatggtagctttgttag

SEQ ID NO: 268802 - DNA, 33 bp, Homo sapien
gcctttagtttccatcgatggtagctttgttag

SEQ ID NO: 268803 - DNA, 33 bp, Homo sapien
gccccattaggcaaaacgtcttaattagcaagg

SEQ ID NO: 268804 - DNA, 33 bp, Homo sapien
gccccattaggcaaaatgtcttaattagcaagg

SEQ ID NO: 268805 - DNA, 33 bp, Homo sapien
tttgtgtaaatgtcttaaaagcagtgctagtta

SEQ ID NO: 268806 - DNA, 33 bp, Homo sapien
tttgtgtaaatgtctttaaagcagtgctagtta

SEQ ID NO: 268807 - DNA, 33 bp, Homo sapien
ggctcttttggtatcacggatgagtctgaacac

SEQ ID NO: 268808 - DNA, 33 bp, Homo sapien
ggctcttttggtatcatggatgagtctgaacac

SEQ ID NO: 268809 - DNA, 33 bp, Homo sapien
tgcaaatggatcccccaaaaaaattgacctaat

SEQ ID NO: 268810 - DNA, 33 bp, Homo sapien
tgcaaatggatcccccgaaaaaattgacctaat

SEQ ID NO: 268811 - DNA, 33 bp, Homo sapien
tgtgatcagatcgaacacggagataatttcact

SEQ ID NO: 268812 - DNA, 33 bp, Homo sapien
tgtgatcagatcgaacgcggagataatttcact

SEQ ID NO: 268813 - DNA, 33 bp, Homo sapien
acaaactgcctgaaaactgaccatcagagagtc

SEQ ID NO: 268814 - DNA, 33 bp, Homo sapien
acaaactgcctgaaaattgaccatcagagagtc

SEQ ID NO: 268815 - DNA, 33 bp, Homo sapien
gagagtttccaatcatgaatagaaatgcactgt

SEQ ID NO: 268816 - DNA, 33 bp, Homo sapien
gagagtttccaatcattaatagaaatgcactgt

SEQ ID NO: 268817 - DNA, 33 bp, Homo sapien
ccacaagctgtgtggacgtggagaagggtaagc

SEQ ID NO: 268818 - DNA, 33 bp, Homo sapien
ccacaagctgtgtggatgtggagaagggtaagc

SEQ ID NO: 268819 - DNA, 33 bp, Homo sapien
cagcttcctcacttacaaagtataaccactgca

SEQ ID NO: 268820 - DNA, 33 bp, Homo sapien
cagcttcctcacttaccaagtataaccactgca

SEQ ID NO: 268821 - DNA, 33 bp, Homo sapien
ctgtctctcctaatgtcaaataatgaagtagac

SEQ ID NO: 268822 - DNA, 33 bp, Homo sapien
ctgtctctcctaatgtgaaataatgaagtagac

SEQ ID NO: 268823 - DNA, 33 bp, Homo sapien
catctatatgtgaaaaaccttctctctcttgtg

SEQ ID NO: 268824 - DNA, 33 bp, Homo sapien
catctatatgtgaaaacccttctctctcttgtg

SEQ ID NO: 268825 - DNA, 33 bp, Homo sapien
attggtgaacccaccaagtgacagcattttcac

SEQ ID NO: 268826 - DNA, 33 bp, Homo sapien
attggtgaacccaccaggtgacagcattttcac

SEQ ID NO: 268827 - DNA, 33 bp, Homo sapien
ccacttgacaccccaaaatccctcatgtctctc

SEQ ID NO: 268828 - DNA, 33 bp, Homo sapien
ccacttgacaccccaagatccctcatgtctctc

SEQ ID NO: 268829 - DNA, 33 bp, Homo sapien
tcttaaactatattcacgtgtgttatctctttt

SEQ ID NO: 268830 - DNA, 33 bp, Homo sapien
tcttaaactatattcatgtgtgttatctctttt

SEQ ID NO: 268831 - DNA, 33 bp, Homo sapien
gttttatggaggagaaacatcatcattaatgaa

SEQ ID NO: 268832 - DNA, 33 bp, Homo sapien
gttttatggaggagaagcatcatcattaatgaa

SEQ ID NO: 268833 - DNA, 33 bp, Homo sapien
gcaaattatctgttcaagagtctgcctccccca

SEQ ID NO: 268834 - DNA, 33 bp, Homo sapien
gcaaattatctgttcacgagtctgcctccccca

SEQ ID NO: 268835 - DNA, 33 bp, Homo sapien
agctctgaccagaaggaacaaggagagtatgaa

SEQ ID NO: 268836 - DNA, 33 bp, Homo sapien
agctctgaccagaagggacaaggagagtatgaa

SEQ ID NO: 268837 - DNA, 33 bp, Homo sapien
tcccctatctctttaaccagtttaatcaacgtt

SEQ ID NO: 268838 - DNA, 33 bp, Homo sapien
tcccctatctctttaatcagtttaatcaacgtt

SEQ ID NO: 268839 - DNA, 33 bp, Homo sapien
ttgtgaaataactgtcccagactcttcaaaaat

SEQ ID NO: 268840 - DNA, 33 bp, Homo sapien
ttgtgaaataactgtctcagactcttcaaaaat

SEQ ID NO: 268841 - DNA, 33 bp, Homo sapien
tgtgctaaagcacttgcagttgccaatatgtag

SEQ ID NO: 268842 - DNA, 33 bp, Homo sapien
tgtgctaaagcacttgtagttgccaatatgtag

SEQ ID NO: 268843 - DNA, 33 bp, Homo sapien
gaaggaacatgagtgacggtgcagaaacgccaa

SEQ ID NO: 268844 - DNA, 33 bp, Homo sapien
gaaggaacatgagtgatggtgcagaaacgccaa

SEQ ID NO: 268845 - DNA, 33 bp, Homo sapien
ttataagcccaagagtaaaaagcagaggaacct

SEQ ID NO: 268846 - DNA, 33 bp, Homo sapien
ttataagcccaagagtgaaaagcagaggaacct

SEQ ID NO: 268847 - DNA, 33 bp, Homo sapien
acttctttcaggggcaaccgctacccaagactt

SEQ ID NO: 268848 - DNA, 33 bp, Homo sapien
acttctttcaggggcagccgctacccaagactt

SEQ ID NO: 268849 - DNA, 33 bp, Homo sapien
aggtttagcattaaggccctatctgcattgccc

SEQ ID NO: 268850 - DNA, 33 bp, Homo sapien
aggtttagcattaaggtcctatctgcattgccc

SEQ ID NO: 268851 - DNA, 33 bp, Homo sapien
acattgcctaaaacagaagcgcagatgagaggc

SEQ ID NO: 268852 - DNA, 33 bp, Homo sapien
acattgcctaaaacagtagcgcagatgagaggc

SEQ ID NO: 268853 - DNA, 33 bp, Homo sapien
aaagatatagagacacaagaaagtgtgatgatg

SEQ ID NO: 268854 - DNA, 33 bp, Homo sapien
aaagatatagagacacgagaaagtgtgatgatg

SEQ ID NO: 268855 - DNA, 33 bp, Homo sapien
cctgtccaggtagatacgaggtagcgttgccct

SEQ ID NO: 268856 - DNA, 33 bp, Homo sapien
cctgtccaggtagatatgaggtagcgttgccct

SEQ ID NO: 268857 - DNA, 33 bp, Homo sapien
tcataatcatagaaaacggctactccaactcca

SEQ ID NO: 268858 - DNA, 33 bp, Homo sapien
tcataatcatagaaaatggctactccaactcca

SEQ ID NO: 268859 - DNA, 33 bp, Homo sapien
atcattaattttgtcaaaggcagtcaaggaaga

SEQ ID NO: 268860 - DNA, 33 bp, Homo sapien
atcattaattttgtcagaggcagtcaaggaaga

SEQ ID NO: 268861 - DNA, 33 bp, Homo sapien
tgccttcatccaagttaaaaatcttaaagtcac

SEQ ID NO: 268862 - DNA, 33 bp, Homo sapien
tgccttcatccaagttgaaaatcttaaagtcac

SEQ ID NO: 268863 - DNA, 33 bp, Homo sapien
gcaggaaaaaaggcaacggctgacaggctaggg

SEQ ID NO: 268864 - DNA, 33 bp, Homo sapien
gcaggaaaaaaggcaatggctgacaggctaggg

SEQ ID NO: 268865 - DNA, 33 bp, Homo sapien
ctgtttgttctatgcacagcttcaactgatggg

SEQ ID NO: 268866 - DNA, 33 bp, Homo sapien
ctgtttgttctatgcagagcttcaactgatggg

SEQ ID NO: 268867 - DNA, 33 bp, Homo sapien
agcgatgctacaacaacgtacaaccccaaaaat

SEQ ID NO: 268868 - DNA, 33 bp, Homo sapien
agcgatgctacaacaatgtacaaccccaaaaat

SEQ ID NO: 268869 - DNA, 33 bp, Homo sapien
cccaacattcatctgcaagattgaacactgggt

SEQ ID NO: 268870 - DNA, 33 bp, Homo sapien
cccaacattcatctgcgagattgaacactgggt

SEQ ID NO: 268871 - DNA, 33 bp, Homo sapien
tatttttgttagaaaagcttactccccacttac

SEQ ID NO: 268872 - DNA, 33 bp, Homo sapien
tatttttgttagaaaatcttactccccacttac

SEQ ID NO: 268873 - DNA, 33 bp, Homo sapien
atggattaaaggcaacggggttcaacctacaag

SEQ ID NO: 268874 - DNA, 33 bp, Homo sapien
atggattaaaggcaactgggttcaacctacaag

SEQ ID NO: 268875 - DNA, 33 bp, Homo sapien
aggtaccagcagaacaagagtcaccatctcggc

SEQ ID NO: 268876 - DNA, 33 bp, Homo sapien
aggtaccagcagaacaggagtcaccatctcggc

SEQ ID NO: 268877 - DNA, 33 bp, Homo sapien
tgcctcccactaggtcacacttctccaacactc

SEQ ID NO: 268878 - DNA, 33 bp, Homo sapien
tgcctcccactaggtcgcacttctccaacactc

SEQ ID NO: 268879 - DNA, 33 bp, Homo sapien
taaccaacttgtcccacgttgcctggactgccc

SEQ ID NO: 268880 - DNA, 33 bp, Homo sapien
taaccaacttgtcccatgttgcctggactgccc

SEQ ID NO: 268881 - DNA, 33 bp, Homo sapien
tactcatgctacagaaactcggcttcacccata

SEQ ID NO: 268882 - DNA, 33 bp, Homo sapien
tactcatgctacagaatctcggcttcacccata

SEQ ID NO: 268883 - DNA, 33 bp, Homo sapien
ttgcaagattctgttaccttcatggacaatatt

SEQ ID NO: 268884 - DNA, 33 bp, Homo sapien
ttgcaagattctgttatcttcatggacaatatt

SEQ ID NO: 268885 - DNA, 33 bp, Homo sapien
ctgaatcgcatctgaactacatgcccaggattg

SEQ ID NO: 268886 - DNA, 33 bp, Homo sapien
ctgaatcgcatctgaattacatgcccaggattg

SEQ ID NO: 268887 - DNA, 33 bp, Homo sapien
tatgagttttctaggactatcatcacaaaatgc

SEQ ID NO: 268888 - DNA, 33 bp, Homo sapien
tatgagttttctaggagtatcatcacaaaatgc

SEQ ID NO: 268889 - DNA, 33 bp, Homo sapien
tgttgggttcaaagaccaggaaggaggctaatg

SEQ ID NO: 268890 - DNA, 33 bp, Homo sapien
tgttgggttcaaagactaggaaggaggctaatg

SEQ ID NO: 268891 - DNA, 33 bp, Homo sapien
ctaatgataccaactcaaccttaggcaaaagga

SEQ ID NO: 268892 - DNA, 33 bp, Homo sapien
ctaatgataccaactcgaccttaggcaaaagga

SEQ ID NO: 268893 - DNA, 33 bp, Homo sapien
tacctcattttaatcactcataccagccttcct

SEQ ID NO: 268894 - DNA, 33 bp, Homo sapien
tacctcattttaatcagtcataccagccttcct

SEQ ID NO: 268895 - DNA, 33 bp, Homo sapien
aagcaccatgtgaaataacgatgatgatgcaat

SEQ ID NO: 268896 - DNA, 33 bp, Homo sapien
aagcaccatgtgaaatgacgatgatgatgcaat

SEQ ID NO: 268897 - DNA, 33 bp, Homo sapien
catgtgtgtagacttacagtaagcaccatgtga

SEQ ID NO: 268898 - DNA, 33 bp, Homo sapien
catgtgtgtagacttatagtaagcaccatgtga

SEQ ID NO: 268899 - DNA, 33 bp, Homo sapien
ctctggaattagtcacaattcatttcttcttgc

SEQ ID NO: 268900 - DNA, 33 bp, Homo sapien
ctctggaattagtcacgattcatttcttcttgc

SEQ ID NO: 268901 - DNA, 33 bp, Homo sapien
actccctctcaccaggacaatgtattagaggtt

SEQ ID NO: 268902 - DNA, 33 bp, Homo sapien
actccctctcaccagggcaatgtattagaggtt

SEQ ID NO: 268903 - DNA, 33 bp, Homo sapien
ctgttttcccatgtgacaaagcgtcaagtcttc

SEQ ID NO: 268904 - DNA, 33 bp, Homo sapien
ctgttttcccatgtgataaagcgtcaagtcttc

SEQ ID NO: 268905 - DNA, 33 bp, Homo sapien
agtccacctcattttagcttctgctctcttccc

SEQ ID NO: 268906 - DNA, 33 bp, Homo sapien
agtccacctcattttatcttctgctctcttccc

SEQ ID NO: 268907 - DNA, 33 bp, Homo sapien
cagggagcaccttcaaagggcactggccttccc

SEQ ID NO: 268908 - DNA, 33 bp, Homo sapien
cagggagcaccttcaaggggcactggccttccc

SEQ ID NO: 268909 - DNA, 33 bp, Homo sapien
gagagagacatacagagagacaaaggcgtaaag

SEQ ID NO: 268910 - DNA, 33 bp, Homo sapien
gagagagacatacagatagacaaaggcgtaaag

SEQ ID NO: 268911 - DNA, 33 bp, Homo sapien
gcaaataagcagaccaaagaactgtttgcattt

SEQ ID NO: 268912 - DNA, 33 bp, Homo sapien
gcaaataagcagaccacagaactgtttgcattt

SEQ ID NO: 268913 - DNA, 33 bp, Homo sapien
ttccttgagttgatccactgtgctttgcacgct

SEQ ID NO: 268914 - DNA, 33 bp, Homo sapien
ttccttgagttgatccgctgtgctttgcacgct

SEQ ID NO: 268915 - DNA, 33 bp, Homo sapien
tttaaaaactgagttacgtatgttcgctaaaat

SEQ ID NO: 268916 - DNA, 33 bp, Homo sapien
tttaaaaactgagttatgtatgttcgctaaaat

SEQ ID NO: 268917 - DNA, 33 bp, Homo sapien
tgcagcctttgccatcaaactttctgggcagat

SEQ ID NO: 268918 - DNA, 33 bp, Homo sapien
tgcagcctttgccatcgaactttctgggcagat

SEQ ID NO: 268919 - DNA, 33 bp, Homo sapien
catgactgcttttagacgtcaacttcaaatcca

SEQ ID NO: 268920 - DNA, 33 bp, Homo sapien
catgactgcttttagatgtcaacttcaaatcca

SEQ ID NO: 268921 - DNA, 33 bp, Homo sapien
ctgtatttaactgttgcacttgtcaactttcaa

SEQ ID NO: 268922 - DNA, 33 bp, Homo sapien
ctgtatttaactgttggacttgtcaactttcaa

SEQ ID NO: 268923 - DNA, 33 bp, Homo sapien
aaactacagactaataactacttgcattaccac

SEQ ID NO: 268924 - DNA, 33 bp, Homo sapien
aaactacagactaatagctacttgcattaccac

SEQ ID NO: 268925 - DNA, 33 bp, Homo sapien
aaaaaatgctgaatgccattaattgttagagaa

SEQ ID NO: 268926 - DNA, 33 bp, Homo sapien
aaaaaatgctgaatgctattaattgttagagaa

SEQ ID NO: 268927 - DNA, 33 bp, Homo sapien
ctactgagaggtgtccaaactcagcatgctgct

SEQ ID NO: 268928 - DNA, 33 bp, Homo sapien
ctactgagaggtgtccgaactcagcatgctgct

SEQ ID NO: 268929 - DNA, 33 bp, Homo sapien
tagcaggcttccttaccagcatgtcgacccatt

SEQ ID NO: 268930 - DNA, 33 bp, Homo sapien
tagcaggcttccttactagcatgtcgacccatt

SEQ ID NO: 268931 - DNA, 33 bp, Homo sapien
agtatgtcttacaaagcaacttggctacactct

SEQ ID NO: 268932 - DNA, 33 bp, Homo sapien
agtatgtcttacaaagtaacttggctacactct

SEQ ID NO: 268933 - DNA, 33 bp, Homo sapien
tgtactccagcgacccaatttatctgtggaacc

SEQ ID NO: 268934 - DNA, 33 bp, Homo sapien
tgtactccagcgacccgatttatctgtggaacc

SEQ ID NO: 268935 - DNA, 33 bp, Homo sapien
taggggaagtagaggaatactgtgagatcaatt

SEQ ID NO: 268936 - DNA, 33 bp, Homo sapien
taggggaagtagaggagtactgtgagatcaatt

SEQ ID NO: 268937 - DNA, 33 bp, Homo sapien
gcacccaaagtgtgaaaagagaatgtagtctac

SEQ ID NO: 268938 - DNA, 33 bp, Homo sapien
gcacccaaagtgtgaagagagaatgtagtctac

SEQ ID NO: 268939 - DNA, 33 bp, Homo sapien
attaaaacatttgttcacaacatataccccctt

SEQ ID NO: 268940 - DNA, 33 bp, Homo sapien
attaaaacatttgttcgcaacatataccccctt

SEQ ID NO: 268941 - DNA, 33 bp, Homo sapien
tgaagaagtagtcctgaaagtttgagaatatgg

SEQ ID NO: 268942 - DNA, 33 bp, Homo sapien
tgaagaagtagtcctggaagtttgagaatatgg

SEQ ID NO: 268943 - DNA, 33 bp, Homo sapien
taatcgcatttgggaaaagtataacaaggtaga

SEQ ID NO: 268944 - DNA, 33 bp, Homo sapien
taatcgcatttgggaagagtataacaaggtaga

SEQ ID NO: 268945 - DNA, 33 bp, Homo sapien
agtcaaccataataaacgttacatagcaccaag

SEQ ID NO: 268946 - DNA, 33 bp, Homo sapien
agtcaaccataataaatgttacatagcaccaag

SEQ ID NO: 268947 - DNA, 33 bp, Homo sapien
tcccttcattccaaaccggcccgtgctggagag

SEQ ID NO: 268948 - DNA, 33 bp, Homo sapien
tcccttcattccaaactggcccgtgctggagag

SEQ ID NO: 268949 - DNA, 33 bp, Homo sapien
taatttatgtatgcaaatcagctaaaagtgtaa

SEQ ID NO: 268950 - DNA, 33 bp, Homo sapien
taatttatgtatgcaagtcagctaaaagtgtaa

SEQ ID NO: 268951 - DNA, 33 bp, Homo sapien
gagcagagataagccaaccatttctgctgtgcc

SEQ ID NO: 268952 - DNA, 33 bp, Homo sapien
gagcagagataagccagccatttctgctgtgcc

SEQ ID NO: 268953 - DNA, 33 bp, Homo sapien
ctaaatgtcatatccacactgaaagcaggaata

SEQ ID NO: 268954 - DNA, 33 bp, Homo sapien
ctaaatgtcatatccatactgaaagcaggaata

SEQ ID NO: 268955 - DNA, 33 bp, Homo sapien
aggagagtaaggtacactattgattggaaaatg

SEQ ID NO: 268956 - DNA, 33 bp, Homo sapien
aggagagtaaggtacattattgattggaaaatg

SEQ ID NO: 268957 - DNA, 33 bp, Homo sapien
caaacgactggttttccatagtccaggtagatg

SEQ ID NO: 268958 - DNA, 33 bp, Homo sapien
caaacgactggttttctatagtccaggtagatg

SEQ ID NO: 268959 - DNA, 33 bp, Homo sapien
atgacacattttacaaacactatcaatggtgat

SEQ ID NO: 268960 - DNA, 33 bp, Homo sapien
atgacacattttacaatcactatcaatggtgat

SEQ ID NO: 268961 - DNA, 33 bp, Homo sapien
attgccactcgatggccaaacgcccctgccttt

SEQ ID NO: 268962 - DNA, 33 bp, Homo sapien
attgccactcgatggcgaaacgcccctgccttt

SEQ ID NO: 268963 - DNA, 33 bp, Homo sapien
ctggctggtaccagtccaatgccactgtactct

SEQ ID NO: 268964 - DNA, 33 bp, Homo sapien
ctggctggtaccagtctaatgccactgtactct

SEQ ID NO: 268965 - DNA, 33 bp, Homo sapien
gaatagcaagtctaaacgtccagaggtgggaat

SEQ ID NO: 268966 - DNA, 33 bp, Homo sapien
gaatagcaagtctaaaggtccagaggtgggaat

SEQ ID NO: 268967 - DNA, 33 bp, Homo sapien
ggtagtgagggaaggcaccctttggatagaagc

SEQ ID NO: 268968 - DNA, 33 bp, Homo sapien
ggtagtgagggaaggcgccctttggatagaagc

SEQ ID NO: 268969 - DNA, 33 bp, Homo sapien
tcctggggccattttccaccatagctttgggca

SEQ ID NO: 268970 - DNA, 33 bp, Homo sapien
tcctggggccattttctaccatagctttgggca

SEQ ID NO: 268971 - DNA, 33 bp, Homo sapien
tggacatgggctgggccatagaatcctggggcc

SEQ ID NO: 268972 - DNA, 33 bp, Homo sapien
tggacatgggctgggctatagaatcctggggcc

SEQ ID NO: 268973 - DNA, 33 bp, Homo sapien
ttttagtgatgtgtcaacgcacaatgaggaaaa

SEQ ID NO: 268974 - DNA, 33 bp, Homo sapien
ttttagtgatgtgtcagcgcacaatgaggaaaa

SEQ ID NO: 268975 - DNA, 33 bp, Homo sapien
ccactgtactctagctaaataaatggttaaacg

SEQ ID NO: 268976 - DNA, 33 bp, Homo sapien
ccactgtactctagcttaataaatggttaaacg

SEQ ID NO: 268977 - DNA, 33 bp, Homo sapien
aggacagcctggaatcaacatcatgactcctca

SEQ ID NO: 268978 - DNA, 33 bp, Homo sapien
aggacagcctggaatccacatcatgactcctca

SEQ ID NO: 268979 - DNA, 33 bp, Homo sapien
cctcttcccactgacccactgtctaaaaaggtc

SEQ ID NO: 268980 - DNA, 33 bp, Homo sapien
cctcttcccactgacctactgtctaaaaaggtc

SEQ ID NO: 268981 - DNA, 33 bp, Homo sapien
catgaaagcagatggacgtctcaccttcccaga

SEQ ID NO: 268982 - DNA, 33 bp, Homo sapien
catgaaagcagatggatgtctcaccttcccaga

SEQ ID NO: 268983 - DNA, 33 bp, Homo sapien
gagttttcagtgcaaacactttcacattcttcg

SEQ ID NO: 268984 - DNA, 33 bp, Homo sapien
gagttttcagtgcaaagactttcacattcttcg

SEQ ID NO: 268985 - DNA, 33 bp, Homo sapien
tatatcctaagggcaacgaaaagcatttgaagg

SEQ ID NO: 268986 - DNA, 33 bp, Homo sapien
tatatcctaagggcaatgaaaagcatttgaagg

SEQ ID NO: 268987 - DNA, 33 bp, Homo sapien
ccatcagtctcctttacatccgtcaggtttcag

SEQ ID NO: 268988 - DNA, 33 bp, Homo sapien
ccatcagtctcctttatatccgtcaggtttcag

SEQ ID NO: 268989 - DNA, 33 bp, Homo sapien
tgtgacccgcaaagctaaaatacttaatatcag

SEQ ID NO: 268990 - DNA, 33 bp, Homo sapien
tgtgacccgcaaagctgaaatacttaatatcag

SEQ ID NO: 268991 - DNA, 33 bp, Homo sapien
tgatggaacatcgcaaatccagctcggaggaat

SEQ ID NO: 268992 - DNA, 33 bp, Homo sapien
tgatggaacatcgcaagtccagctcggaggaat

SEQ ID NO: 268993 - DNA, 33 bp, Homo sapien
ggtggaggctgtattgcatagtgattataaatt

SEQ ID NO: 268994 - DNA, 33 bp, Homo sapien
ggtggaggctgtattgtatagtgattataaatt

SEQ ID NO: 268995 - DNA, 33 bp, Homo sapien
gagaatggagtgctaacggtttagtcatggttt

SEQ ID NO: 268996 - DNA, 33 bp, Homo sapien
gagaatggagtgctaatggtttagtcatggttt

SEQ ID NO: 268997 - DNA, 33 bp, Homo sapien
aactcaggatctacacagcttattttctgtatg

SEQ ID NO: 268998 - DNA, 33 bp, Homo sapien
aactcaggatctacacggcttattttctgtatg

SEQ ID NO: 268999 - DNA, 33 bp, Homo sapien
tggaagcacttggtaacctgtaaattgtttgca

SEQ ID NO: 269000 - DNA, 33 bp, Homo sapien
tggaagcacttggtaagctgtaaattgtttgca

SEQ ID NO: 269001 - DNA, 33 bp, Homo sapien
tatccctctgataatcaatagtgtggaggcagc

SEQ ID NO: 269002 - DNA, 33 bp, Homo sapien
tatccctctgataatcgatagtgtggaggcagc

SEQ ID NO: 269003 - DNA, 33 bp, Homo sapien
taaatttaagagttatcagagaggcaaaattga

SEQ ID NO: 269004 - DNA, 33 bp, Homo sapien
taaatttaagagttattagagaggcaaaattga

SEQ ID NO: 269005 - DNA, 33 bp, Homo sapien
ctgattataaggcagaagtggttgatgctttaa

SEQ ID NO: 269006 - DNA, 33 bp, Homo sapien
ctgattataaggcagaggtggttgatgctttaa

SEQ ID NO: 269007 - DNA, 33 bp, Homo sapien
acatgagccagatacaaaggccaaaaaaagaaa

SEQ ID NO: 269008 - DNA, 33 bp, Homo sapien
acatgagccagatacagaggccaaaaaaagaaa

SEQ ID NO: 269009 - DNA, 33 bp, Homo sapien
aataagtatttgtcaaatgcctagcacaatgct

SEQ ID NO: 269010 - DNA, 33 bp, Homo sapien
aataagtatttgtcaattgcctagcacaatgct

SEQ ID NO: 269011 - DNA, 33 bp, Homo sapien
gtaaaggcctgtttcccacttataagaatggag

SEQ ID NO: 269012 - DNA, 33 bp, Homo sapien
gtaaaggcctgtttccgacttataagaatggag

SEQ ID NO: 269013 - DNA, 33 bp, Homo sapien
agaaactttggaaagactcccttcatcaattag

SEQ ID NO: 269014 - DNA, 33 bp, Homo sapien
agaaactttggaaagagtcccttcatcaattag

SEQ ID NO: 269015 - DNA, 33 bp, Homo sapien
tgaggcttagaaagaccgagtgatttgtatctg

SEQ ID NO: 269016 - DNA, 33 bp, Homo sapien
tgaggcttagaaagactgagtgatttgtatctg

SEQ ID NO: 269017 - DNA, 33 bp, Homo sapien
gagggtcaaatgaacccggtatccttaggtcac

SEQ ID NO: 269018 - DNA, 33 bp, Homo sapien
gagggtcaaatgaaccgggtatccttaggtcac

SEQ ID NO: 269019 - DNA, 33 bp, Homo sapien
cagcagactgatacaggagcagtacaccccacc

SEQ ID NO: 269020 - DNA, 33 bp, Homo sapien
cagcagactgatacagtagcagtacaccccacc

SEQ ID NO: 269021 - DNA, 33 bp, Homo sapien
ctgccacggctttgtacgttgttaaggagaaga

SEQ ID NO: 269022 - DNA, 33 bp, Homo sapien
ctgccacggctttgtatgttgttaaggagaaga

SEQ ID NO: 269023 - DNA, 33 bp, Homo sapien
agaattgttagcacagaaaggagaaggagtagc

SEQ ID NO: 269024 - DNA, 33 bp, Homo sapien
agaattgttagcacagcaaggagaaggagtagc

SEQ ID NO: 269025 - DNA, 33 bp, Homo sapien
gctgaatttgtctccccatttgaagtttgtagt

SEQ ID NO: 269026 - DNA, 33 bp, Homo sapien
gctgaatttgtctccctatttgaagtttgtagt

SEQ ID NO: 269027 - DNA, 33 bp, Homo sapien
ttacctgacttctcaaccagatagggggcactc

SEQ ID NO: 269028 - DNA, 33 bp, Homo sapien
ttacctgacttctcaatcagatagggggcactc

SEQ ID NO: 269029 - DNA, 33 bp, Homo sapien
agtgaagcctgtgatccccgttccgcttcaata

SEQ ID NO: 269030 - DNA, 33 bp, Homo sapien
agtgaagcctgtgatctccgttccgcttcaata

SEQ ID NO: 269031 - DNA, 33 bp, Homo sapien
tccagggtttaatctcacttcttcatctgttgc

SEQ ID NO: 269032 - DNA, 33 bp, Homo sapien
tccagggtttaatctcgcttcttcatctgttgc

SEQ ID NO: 269033 - DNA, 33 bp, Homo sapien
aacaaatgtaaggtgaaaacaaaaagcagtaat

SEQ ID NO: 269034 - DNA, 33 bp, Homo sapien
aacaaatgtaaggtgacaacaaaaagcagtaat

SEQ ID NO: 269035 - DNA, 33 bp, Homo sapien
ttggcaagctggagtaaaagttgacaggtaact

SEQ ID NO: 269036 - DNA, 33 bp, Homo sapien
ttggcaagctggagtacaagttgacaggtaact

SEQ ID NO: 269037 - DNA, 33 bp, Homo sapien
caatacataaatcttgcaatgaaagaagatcac

SEQ ID NO: 269038 - DNA, 33 bp, Homo sapien
caatacataaatcttggaatgaaagaagatcac

SEQ ID NO: 269039 - DNA, 33 bp, Homo sapien
taagtttttataggaaatacttgatgtgtatgt

SEQ ID NO: 269040 - DNA, 33 bp, Homo sapien
taagtttttataggaagtacttgatgtgtatgt

SEQ ID NO: 269041 - DNA, 33 bp, Homo sapien
acagaattcttagcaacgtacttccaattcagt

SEQ ID NO: 269042 - DNA, 33 bp, Homo sapien
acagaattcttagcaaggtacttccaattcagt

SEQ ID NO: 269043 - DNA, 33 bp, Homo sapien
gggtaacttgacctcaactatttaataaagacc

SEQ ID NO: 269044 - DNA, 33 bp, Homo sapien
gggtaacttgacctcagctatttaataaagacc

SEQ ID NO: 269045 - DNA, 33 bp, Homo sapien
ttctatcaggagttcaatgaaaagtcttatctt

SEQ ID NO: 269046 - DNA, 33 bp, Homo sapien
ttctatcaggagttcagtgaaaagtcttatctt

SEQ ID NO: 269047 - DNA, 33 bp, Homo sapien
atgtcttagtcacgtaaggaagccactaaaagg

SEQ ID NO: 269048 - DNA, 33 bp, Homo sapien
atgtcttagtcacgtagggaagccactaaaagg

SEQ ID NO: 269049 - DNA, 33 bp, Homo sapien
tatttgaaattactagcaaaggtgagatctcca

SEQ ID NO: 269050 - DNA, 33 bp, Homo sapien
tatttgaaattactagtaaaggtgagatctcca

SEQ ID NO: 269051 - DNA, 33 bp, Homo sapien
tgccacttgctagctacaaaaactctggagaat

SEQ ID NO: 269052 - DNA, 33 bp, Homo sapien
tgccacttgctagctataaaaactctggagaat

SEQ ID NO: 269053 - DNA, 33 bp, Homo sapien
ttctggacacataaatcatctcattgaattctt

SEQ ID NO: 269054 - DNA, 33 bp, Homo sapien
ttctggacacataaattatctcattgaattctt

SEQ ID NO: 269055 - DNA, 33 bp, Homo sapien
aggcggatgctagaaaacaaaactagttgctcc

SEQ ID NO: 269056 - DNA, 33 bp, Homo sapien
aggcggatgctagaaagcaaaactagttgctcc

SEQ ID NO: 269057 - DNA, 33 bp, Homo sapien
tattcttttgtgacacccttcatgacatgcccc

SEQ ID NO: 269058 - DNA, 33 bp, Homo sapien
tattcttttgtgacacgcttcatgacatgcccc

SEQ ID NO: 269059 - DNA, 33 bp, Homo sapien
tcagcacaggattttaaaaggctatttgactac

SEQ ID NO: 269060 - DNA, 33 bp, Homo sapien
tcagcacaggattttagaaggctatttgactac

SEQ ID NO: 269061 - DNA, 33 bp, Homo sapien
gcagaaagacagcttacacaaatgcagggaaaa

SEQ ID NO: 269062 - DNA, 33 bp, Homo sapien
gcagaaagacagcttatacaaatgcagggaaaa

SEQ ID NO: 269063 - DNA, 33 bp, Homo sapien
ctcttagagaggactccaaatataagcgttagt

SEQ ID NO: 269064 - DNA, 33 bp, Homo sapien
ctcttagagaggactcgaaatataagcgttagt

SEQ ID NO: 269065 - DNA, 33 bp, Homo sapien
agtcttttggaaagatgaaggaaatgatcagaa

SEQ ID NO: 269066 - DNA, 33 bp, Homo sapien
agtcttttggaaagattaaggaaatgatcagaa

SEQ ID NO: 269067 - DNA, 33 bp, Homo sapien
aataatattcaaagcaatctataggcttagtca

SEQ ID NO: 269068 - DNA, 33 bp, Homo sapien
aataatattcaaagcattctataggcttagtca

SEQ ID NO: 269069 - DNA, 33 bp, Homo sapien
gtgcaccttaaacttgaacatgcacatggatta

SEQ ID NO: 269070 - DNA, 33 bp, Homo sapien
gtgcaccttaaacttggacatgcacatggatta

SEQ ID NO: 269071 - DNA, 33 bp, Homo sapien
gtatctttctgctagacgtcttttaaaaaccta

SEQ ID NO: 269072 - DNA, 33 bp, Homo sapien
gtatctttctgctagatgtcttttaaaaaccta

SEQ ID NO: 269073 - DNA, 33 bp, Homo sapien
catatcgtgtataagacgagtacatatatatgt

SEQ ID NO: 269074 - DNA, 33 bp, Homo sapien
catatcgtgtataagatgagtacatatatatgt

SEQ ID NO: 269075 - DNA, 33 bp, Homo sapien
agtccgtgtccactaacatgcccatcagaagac

SEQ ID NO: 269076 - DNA, 33 bp, Homo sapien
agtccgtgtccactaatatgcccatcagaagac

SEQ ID NO: 269077 - DNA, 33 bp, Homo sapien
aacttgactgtggagaagagagaggataacaag

SEQ ID NO: 269078 - DNA, 33 bp, Homo sapien
aacttgactgtggagaggagagaggataacaag

SEQ ID NO: 269079 - DNA, 33 bp, Homo sapien
cttcctctctctgggcactgtcagtatcatgtc

SEQ ID NO: 269080 - DNA, 33 bp, Homo sapien
cttcctctctctgggcgctgtcagtatcatgtc

SEQ ID NO: 269081 - DNA, 33 bp, Homo sapien
tgccaggggcactatgaaggaaagagatgctgc

SEQ ID NO: 269082 - DNA, 33 bp, Homo sapien
tgccaggggcactatggaggaaagagatgctgc

SEQ ID NO: 269083 - DNA, 33 bp, Homo sapien
tttgccaaattcttctaaagcaacccacacaaa

SEQ ID NO: 269084 - DNA, 33 bp, Homo sapien
tttgccaaattcttctgaagcaacccacacaaa

SEQ ID NO: 269085 - DNA, 33 bp, Homo sapien
tcggatgcccattataagctctcatgaactcca

SEQ ID NO: 269086 - DNA, 33 bp, Homo sapien
tcggatgcccattataggctctcatgaactcca

SEQ ID NO: 269087 - DNA, 33 bp, Homo sapien
atttgcaaatgacccacgcaagtatcaaactga

SEQ ID NO: 269088 - DNA, 33 bp, Homo sapien
atttgcaaatgacccatgcaagtatcaaactga

SEQ ID NO: 269089 - DNA, 33 bp, Homo sapien
aatataagtctatcagcacaaaggcagacaaaa

SEQ ID NO: 269090 - DNA, 33 bp, Homo sapien
aatataagtctatcagtacaaaggcagacaaaa

SEQ ID NO: 269091 - DNA, 33 bp, Homo sapien
caacacttgccgtcagaaattggctctcctggc

SEQ ID NO: 269092 - DNA, 33 bp, Homo sapien
caacacttgccgtcaggaattggctctcctggc

SEQ ID NO: 269093 - DNA, 33 bp, Homo sapien
catttgtactgggttgaaaggcatccctccaaa

SEQ ID NO: 269094 - DNA, 33 bp, Homo sapien
catttgtactgggttggaaggcatccctccaaa

SEQ ID NO: 269095 - DNA, 33 bp, Homo sapien
tctctcattaatttaactataaaggcattgact

SEQ ID NO: 269096 - DNA, 33 bp, Homo sapien
tctctcattaatttaagtataaaggcattgact

SEQ ID NO: 269097 - DNA, 33 bp, Homo sapien
aaaatagttaatgcctcacagtgttgtttgtga

SEQ ID NO: 269098 - DNA, 33 bp, Homo sapien
aaaatagttaatgcctgacagtgttgtttgtga

SEQ ID NO: 269099 - DNA, 33 bp, Homo sapien
cttacggactgaaggaaaaagcttgaaaaaatg

SEQ ID NO: 269100 - DNA, 33 bp, Homo sapien
cttacggactgaaggagaaagcttgaaaaaatg

SEQ ID NO: 269101 - DNA, 33 bp, Homo sapien
aaaaaacttgaaatcaatatgtacttcaattca

SEQ ID NO: 269102 - DNA, 33 bp, Homo sapien
aaaaaacttgaaatcagtatgtacttcaattca

SEQ ID NO: 269103 - DNA, 33 bp, Homo sapien
tgacgtttaagaaaagcctatttggaggttgca

SEQ ID NO: 269104 - DNA, 33 bp, Homo sapien
tgacgtttaagaaaaggctatttggaggttgca

SEQ ID NO: 269105 - DNA, 33 bp, Homo sapien
tgtatggttgtactcccctgctagaacctccaa

SEQ ID NO: 269106 - DNA, 33 bp, Homo sapien
tgtatggttgtactccgctgctagaacctccaa

SEQ ID NO: 269107 - DNA, 33 bp, Homo sapien
ggtttcaaggctccaaaacaccactgtcaacat

SEQ ID NO: 269108 - DNA, 33 bp, Homo sapien
ggtttcaaggctccaacacaccactgtcaacat

SEQ ID NO: 269109 - DNA, 33 bp, Homo sapien
tgtgattttgcagggcaattggaaggatgaaac

SEQ ID NO: 269110 - DNA, 33 bp, Homo sapien
tgtgattttgcagggcgattggaaggatgaaac

SEQ ID NO: 269111 - DNA, 33 bp, Homo sapien
ccatgctaaacatccactatcctgtttcatcct

SEQ ID NO: 269112 - DNA, 33 bp, Homo sapien
ccatgctaaacatccattatcctgtttcatcct

SEQ ID NO: 269113 - DNA, 33 bp, Homo sapien
caactttccaggaatacgttcatcttataaact

SEQ ID NO: 269114 - DNA, 33 bp, Homo sapien
caactttccaggaatatgttcatcttataaact

SEQ ID NO: 269115 - DNA, 33 bp, Homo sapien
atgggctcaaaggagacctctcaaaaaccagca

SEQ ID NO: 269116 - DNA, 33 bp, Homo sapien
atgggctcaaaggagatctctcaaaaaccagca

SEQ ID NO: 269117 - DNA, 33 bp, Homo sapien
cactattctgcttaaaactctccagtgacttcc

SEQ ID NO: 269118 - DNA, 33 bp, Homo sapien
cactattctgcttaaatctctccagtgacttcc

SEQ ID NO: 269119 - DNA, 33 bp, Homo sapien
ttgttttagttactcacgggatggctagtctcc

SEQ ID NO: 269120 - DNA, 33 bp, Homo sapien
ttgttttagttactcatgggatggctagtctcc

SEQ ID NO: 269121 - DNA, 33 bp, Homo sapien
ttttctacaaatgaagcaagacagcaatcaaca

SEQ ID NO: 269122 - DNA, 33 bp, Homo sapien
ttttctacaaatgaaggaagacagcaatcaaca

SEQ ID NO: 269123 - DNA, 33 bp, Homo sapien
tgaagtgatgctgcaccagttccaagcccagtc

SEQ ID NO: 269124 - DNA, 33 bp, Homo sapien
tgaagtgatgctgcacgagttccaagcccagtc

SEQ ID NO: 269125 - DNA, 33 bp, Homo sapien
ccttctgctgaaaccactaaattgagcagttcc

SEQ ID NO: 269126 - DNA, 33 bp, Homo sapien
ccttctgctgaaaccattaaattgagcagttcc

SEQ ID NO: 269127 - DNA, 33 bp, Homo sapien
ttcctggcaaagggccacagcagcctaataaac

SEQ ID NO: 269128 - DNA, 33 bp, Homo sapien
ttcctggcaaagggccgcagcagcctaataaac

SEQ ID NO: 269129 - DNA, 33 bp, Homo sapien
gatcaagagaataggacgatattctggcaacta

SEQ ID NO: 269130 - DNA, 33 bp, Homo sapien
gatcaagagaataggatgatattctggcaacta

SEQ ID NO: 269131 - DNA, 33 bp, Homo sapien
tctttcttcaacatcaaacatacatacaaaagc

SEQ ID NO: 269132 - DNA, 33 bp, Homo sapien
tctttcttcaacatcagacatacatacaaaagc

SEQ ID NO: 269133 - DNA, 33 bp, Homo sapien
gcaagtgacacttgaaaagacgaatggcatgat

SEQ ID NO: 269134 - DNA, 33 bp, Homo sapien
gcaagtgacacttgaacagacgaatggcatgat

SEQ ID NO: 269135 - DNA, 33 bp, Homo sapien
acactcaggaatgaaaagatgaataagacattt

SEQ ID NO: 269136 - DNA, 33 bp, Homo sapien
acactcaggaatgaaaggatgaataagacattt

SEQ ID NO: 269137 - DNA, 33 bp, Homo sapien
tcgagcagtacctgacactgggccagacttaga

SEQ ID NO: 269138 - DNA, 33 bp, Homo sapien
tcgagcagtacctgacgctgggccagacttaga

SEQ ID NO: 269139 - DNA, 33 bp, Homo sapien
cgcactggcatgaccacctttttgtaagctgcc

SEQ ID NO: 269140 - DNA, 33 bp, Homo sapien
cgcactggcatgaccatctttttgtaagctgcc

SEQ ID NO: 269141 - DNA, 33 bp, Homo sapien
ttttcatgaagcttacagataattaataaatat

SEQ ID NO: 269142 - DNA, 33 bp, Homo sapien
ttttcatgaagcttactgataattaataaatat

SEQ ID NO: 269143 - DNA, 33 bp, Homo sapien
ctccagttctccttaccattctcctgtatctgc

SEQ ID NO: 269144 - DNA, 33 bp, Homo sapien
ctccagttctccttactattctcctgtatctgc

SEQ ID NO: 269145 - DNA, 33 bp, Homo sapien
cagtcttttaaaagtcaatgtcctcttctaata

SEQ ID NO: 269146 - DNA, 33 bp, Homo sapien
cagtcttttaaaagtctatgtcctcttctaata

SEQ ID NO: 269147 - DNA, 33 bp, Homo sapien
atattcttgcgttacaagtccatggattcaact

SEQ ID NO: 269148 - DNA, 33 bp, Homo sapien
atattcttgcgttacacgtccatggattcaact

SEQ ID NO: 269149 - DNA, 33 bp, Homo sapien
tcatgagaaaattgccagcttgggtggtcacag

SEQ ID NO: 269150 - DNA, 33 bp, Homo sapien
tcatgagaaaattgccggcttgggtggtcacag

SEQ ID NO: 269151 - DNA, 33 bp, Homo sapien
aatataacttaatgaacgcttgccaataaggaa

SEQ ID NO: 269152 - DNA, 33 bp, Homo sapien
aatataacttaatgaaggcttgccaataaggaa

SEQ ID NO: 269153 - DNA, 33 bp, Homo sapien
tctgaacttgaatagggagcaataaacctgttt

SEQ ID NO: 269154 - DNA, 33 bp, Homo sapien
tctgaacttgaataggtagcaataaacctgttt

SEQ ID NO: 269155 - DNA, 33 bp, Homo sapien
gtggtcaacatttggaagctgttatggaagggg

SEQ ID NO: 269156 - DNA, 33 bp, Homo sapien
gtggtcaacatttggaggctgttatggaagggg

SEQ ID NO: 269157 - DNA, 33 bp, Homo sapien
agaatttacatcaacaaaaatctagtcatttaa

SEQ ID NO: 269158 - DNA, 33 bp, Homo sapien
agaatttacatcaacacaaatctagtcatttaa

SEQ ID NO: 269159 - DNA, 33 bp, Homo sapien
actagtgaaatccaacagtagtcaagtttacca

SEQ ID NO: 269160 - DNA, 33 bp, Homo sapien
actagtgaaatccaacggtagtcaagtttacca

SEQ ID NO: 269161 - DNA, 33 bp, Homo sapien
tttgggaaatagtctaccagccttacctggttg

SEQ ID NO: 269162 - DNA, 33 bp, Homo sapien
tttgggaaatagtctatcagccttacctggttg

SEQ ID NO: 269163 - DNA, 33 bp, Homo sapien
tctgggactggaatataaaaaagaatcaaaggt

SEQ ID NO: 269164 - DNA, 33 bp, Homo sapien
tctgggactggaatatgaaaaagaatcaaaggt

SEQ ID NO: 269165 - DNA, 33 bp, Homo sapien
aagcagaagccagttaggatgacaggtgataga

SEQ ID NO: 269166 - DNA, 33 bp, Homo sapien
aagcagaagccagttatgatgacaggtgataga

SEQ ID NO: 269167 - DNA, 33 bp, Homo sapien
gaggagggaagatgtcacgggagtctgcacagg

SEQ ID NO: 269168 - DNA, 33 bp, Homo sapien
gaggagggaagatgtcgcgggagtctgcacagg

SEQ ID NO: 269169 - DNA, 33 bp, Homo sapien
gagactctgtgagcaaatgacttcctaatactt

SEQ ID NO: 269170 - DNA, 33 bp, Homo sapien
gagactctgtgagcaagtgacttcctaatactt

SEQ ID NO: 269171 - DNA, 33 bp, Homo sapien
ctcagagaatagcgaacgcttccttgtgccagg

SEQ ID NO: 269172 - DNA, 33 bp, Homo sapien
ctcagagaatagcgaatgcttccttgtgccagg

SEQ ID NO: 269173 - DNA, 33 bp, Homo sapien
gatggacattcaattcaataagcccagcgtgtg

SEQ ID NO: 269174 - DNA, 33 bp, Homo sapien
gatggacattcaattccataagcccagcgtgtg

SEQ ID NO: 269175 - DNA, 33 bp, Homo sapien
tcagtggtaaccctcaatgagggccttgtctga

SEQ ID NO: 269176 - DNA, 33 bp, Homo sapien
tcagtggtaaccctcagtgagggccttgtctga

SEQ ID NO: 269177 - DNA, 33 bp, Homo sapien
tctacgaaacgcttcgcatatgttacctcattt

SEQ ID NO: 269178 - DNA, 33 bp, Homo sapien
tctacgaaacgcttcgtatatgttacctcattt

SEQ ID NO: 269179 - DNA, 33 bp, Homo sapien
tttgctaagtggcccaatcttgaattccaccac

SEQ ID NO: 269180 - DNA, 33 bp, Homo sapien
tttgctaagtggcccagtcttgaattccaccac

SEQ ID NO: 269181 - DNA, 33 bp, Homo sapien
acactaaatgtcaccacgttgtacactttaaaa

SEQ ID NO: 269182 - DNA, 33 bp, Homo sapien
acactaaatgtcaccatgttgtacactttaaaa

SEQ ID NO: 269183 - DNA, 33 bp, Homo sapien
acaaaccctggaataaggccgtgaaagcaggga

SEQ ID NO: 269184 - DNA, 33 bp, Homo sapien
acaaaccctggaataatgccgtgaaagcaggga

SEQ ID NO: 269185 - DNA, 33 bp, Homo sapien
acgggcagagcagtccacggagccagaaaagag

SEQ ID NO: 269186 - DNA, 33 bp, Homo sapien
acgggcagagcagtccgcggagccagaaaagag

SEQ ID NO: 269187 - DNA, 33 bp, Homo sapien
tttctttagtctttataaggctagcttcaggta

SEQ ID NO: 269188 - DNA, 33 bp, Homo sapien
tttctttagtctttatgaggctagcttcaggta

SEQ ID NO: 269189 - DNA, 33 bp, Homo sapien
ctcattaagctcatcccctacccatgaccttat

SEQ ID NO: 269190 - DNA, 33 bp, Homo sapien
ctcattaagctcatcctctacccatgaccttat

SEQ ID NO: 269191 - DNA, 33 bp, Homo sapien
aaagaaatgttgcttgcaccctcacaataacaa

SEQ ID NO: 269192 - DNA, 33 bp, Homo sapien
aaagaaatgttgcttgtaccctcacaataacaa

SEQ ID NO: 269193 - DNA, 33 bp, Homo sapien
tcttcagacatctgaaataatcaaacatcctta

SEQ ID NO: 269194 - DNA, 33 bp, Homo sapien
tcttcagacatctgaagtaatcaaacatcctta

SEQ ID NO: 269195 - DNA, 33 bp, Homo sapien
aggttttaatgtcttacgcacttttgacttccc

SEQ ID NO: 269196 - DNA, 33 bp, Homo sapien
aggttttaatgtcttatgcacttttgacttccc

SEQ ID NO: 269197 - DNA, 33 bp, Homo sapien
acccggtgaaatggccaatgttttaatatcctt

SEQ ID NO: 269198 - DNA, 33 bp, Homo sapien
acccggtgaaatggccgatgttttaatatcctt

SEQ ID NO: 269199 - DNA, 33 bp, Homo sapien
ctttctgtttccaaagaaataccgggcatgtca

SEQ ID NO: 269200 - DNA, 33 bp, Homo sapien
ctttctgtttccaaagtaataccgggcatgtca

SEQ ID NO: 269201 - DNA, 33 bp, Homo sapien
tatatttagaatcaaacgtctgacagcaatctc

SEQ ID NO: 269202 - DNA, 33 bp, Homo sapien
tatatttagaatcaaatgtctgacagcaatctc

SEQ ID NO: 269203 - DNA, 33 bp, Homo sapien
atttctttatacagcaaattgcacagagtttga

SEQ ID NO: 269204 - DNA, 33 bp, Homo sapien
atttctttatacagcagattgcacagagtttga

SEQ ID NO: 269205 - DNA, 33 bp, Homo sapien
tcagtctttctctctacagctctacggcagtgc

SEQ ID NO: 269206 - DNA, 33 bp, Homo sapien
tcagtctttctctctatagctctacggcagtgc

SEQ ID NO: 269207 - DNA, 33 bp, Homo sapien
tgtaccttcatgccccggccaagttttgtattt

SEQ ID NO: 269208 - DNA, 33 bp, Homo sapien
tgtaccttcatgcccctgccaagttttgtattt

SEQ ID NO: 269209 - DNA, 33 bp, Homo sapien
gagagtaattcaaaagcaaatctaaggaagaat

SEQ ID NO: 269210 - DNA, 33 bp, Homo sapien
gagagtaattcaaaaggaaatctaaggaagaat

SEQ ID NO: 269211 - DNA, 33 bp, Homo sapien
accatttaaacctattaaaacacaatgataatc

SEQ ID NO: 269212 - DNA, 33 bp, Homo sapien
accatttaaacctattgaaacacaatgataatc

SEQ ID NO: 269213 - DNA, 33 bp, Homo sapien
aaaaggagagtagtaacctgtaggaagtattta

SEQ ID NO: 269214 - DNA, 33 bp, Homo sapien
aaaaggagagtagtaatctgtaggaagtattta

SEQ ID NO: 269215 - DNA, 33 bp, Homo sapien
ttctaaatgtctacagcaaaaggaaaatggtaa

SEQ ID NO: 269216 - DNA, 33 bp, Homo sapien
ttctaaatgtctacaggaaaaggaaaatggtaa

SEQ ID NO: 269217 - DNA, 33 bp, Homo sapien
acactgatcctgtaacactttgcttctatttca

SEQ ID NO: 269218 - DNA, 33 bp, Homo sapien
acactgatcctgtaactctttgcttctatttca

SEQ ID NO: 269219 - DNA, 33 bp, Homo sapien
atgccaaacattcaaccgtggttggcagttata

SEQ ID NO: 269220 - DNA, 33 bp, Homo sapien
atgccaaacattcaactgtggttggcagttata

SEQ ID NO: 269221 - DNA, 33 bp, Homo sapien
ctgcctctcagtcttcaacactcatcttgtcca

SEQ ID NO: 269222 - DNA, 33 bp, Homo sapien
ctgcctctcagtcttcgacactcatcttgtcca

SEQ ID NO: 269223 - DNA, 33 bp, Homo sapien
attttccccagaaggaaccggatcttctgggct

SEQ ID NO: 269224 - DNA, 33 bp, Homo sapien
attttccccagaaggacccggatcttctgggct

SEQ ID NO: 269225 - DNA, 33 bp, Homo sapien
tgaaggctcagggaacacttggtcctggccaca

SEQ ID NO: 269226 - DNA, 33 bp, Homo sapien
tgaaggctcagggaacgcttggtcctggccaca

SEQ ID NO: 269227 - DNA, 33 bp, Homo sapien
acatttcatacgcatacgaatggagcacacggg

SEQ ID NO: 269228 - DNA, 33 bp, Homo sapien
acatttcatacgcataggaatggagcacacggg

SEQ ID NO: 269229 - DNA, 33 bp, Homo sapien
gagtgtgctaggtttagggtggccagacacgtc

SEQ ID NO: 269230 - DNA, 33 bp, Homo sapien
gagtgtgctaggtttatggtggccagacacgtc

SEQ ID NO: 269231 - DNA, 33 bp, Homo sapien
aggagtcctgaaacaacagaattttactctctc

SEQ ID NO: 269232 - DNA, 33 bp, Homo sapien
aggagtcctgaaacaatagaattttactctctc

SEQ ID NO: 269233 - DNA, 33 bp, Homo sapien
aggaactgccctttggaatttgaaaagcagaag

SEQ ID NO: 269234 - DNA, 33 bp, Homo sapien
aggaactgccctttgggatttgaaaagcagaag

SEQ ID NO: 269235 - DNA, 33 bp, Homo sapien
ggaaaaccatcttaccaattcaagaccactcag

SEQ ID NO: 269236 - DNA, 33 bp, Homo sapien
ggaaaaccatcttaccgattcaagaccactcag

SEQ ID NO: 269237 - DNA, 33 bp, Homo sapien
tgaccaaacagagtgaactggaatgtcagcccc

SEQ ID NO: 269238 - DNA, 33 bp, Homo sapien
tgaccaaacagagtgagctggaatgtcagcccc

SEQ ID NO: 269239 - DNA, 33 bp, Homo sapien
ctgtattgacctcaatcatgggatgcacggcgc

SEQ ID NO: 269240 - DNA, 33 bp, Homo sapien
ctgtattgacctcaatgatgggatgcacggcgc

SEQ ID NO: 269241 - DNA, 33 bp, Homo sapien
gagaggctgtgtgaaaaaaggtgccctacctaa

SEQ ID NO: 269242 - DNA, 33 bp, Homo sapien
gagaggctgtgtgaaacaaggtgccctacctaa

SEQ ID NO: 269243 - DNA, 33 bp, Homo sapien
taactgaggttctctaaactgtgccaccccact

SEQ ID NO: 269244 - DNA, 33 bp, Homo sapien
taactgaggttctctagactgtgccaccccact

SEQ ID NO: 269245 - DNA, 33 bp, Homo sapien
acctaccatgatgatacggatagttccactctg

SEQ ID NO: 269246 - DNA, 33 bp, Homo sapien
acctaccatgatgatagggatagttccactctg

SEQ ID NO: 269247 - DNA, 33 bp, Homo sapien
gaactttctacctcaccctacaaatgtaccctt

SEQ ID NO: 269248 - DNA, 33 bp, Homo sapien
gaactttctacctcactctacaaatgtaccctt

SEQ ID NO: 269249 - DNA, 33 bp, Homo sapien
gaaagctgaagaggacaagaagggtacatttgt

SEQ ID NO: 269250 - DNA, 33 bp, Homo sapien
gaaagctgaagaggactagaagggtacatttgt

SEQ ID NO: 269251 - DNA, 33 bp, Homo sapien
agatttactgaaataccgcaatgaagggaggaa

SEQ ID NO: 269252 - DNA, 33 bp, Homo sapien
agatttactgaaatactgcaatgaagggaggaa

SEQ ID NO: 269253 - DNA, 33 bp, Homo sapien
cccatcgcaccgccagaaaggtactactgatca

SEQ ID NO: 269254 - DNA, 33 bp, Homo sapien
cccatcgcaccgccagcaaggtactactgatca

SEQ ID NO: 269255 - DNA, 33 bp, Homo sapien
ggggaagaacaggggacaatccttacagcagca

SEQ ID NO: 269256 - DNA, 33 bp, Homo sapien
ggggaagaacaggggagaatccttacagcagca

SEQ ID NO: 269257 - DNA, 33 bp, Homo sapien
tgttttgggataaaagccttccttgatcttcag

SEQ ID NO: 269258 - DNA, 33 bp, Homo sapien
tgttttgggataaaaggcttccttgatcttcag

SEQ ID NO: 269259 - DNA, 33 bp, Homo sapien
ccagaaagttaagtgcgctggcattttgaaagg

SEQ ID NO: 269260 - DNA, 33 bp, Homo sapien
ccagaaagttaagtgctctggcattttgaaagg

SEQ ID NO: 269261 - DNA, 33 bp, Homo sapien
tttaccttccggagccagcttcgtggtggtttc

SEQ ID NO: 269262 - DNA, 33 bp, Homo sapien
tttaccttccggagccggcttcgtggtggtttc

SEQ ID NO: 269263 - DNA, 33 bp, Homo sapien
tgtcaagagctgacaccaaagtctatgcctttt

SEQ ID NO: 269264 - DNA, 33 bp, Homo sapien
tgtcaagagctgacacgaaagtctatgcctttt

SEQ ID NO: 269265 - DNA, 33 bp, Homo sapien
gcaacatagtagaggcacttggggtaagttact

SEQ ID NO: 269266 - DNA, 33 bp, Homo sapien
gcaacatagtagaggcgcttggggtaagttact

SEQ ID NO: 269267 - DNA, 33 bp, Homo sapien
attaaaatcttgtgacaggacttggcacacact

SEQ ID NO: 269268 - DNA, 33 bp, Homo sapien
attaaaatcttgtgacgggacttggcacacact

SEQ ID NO: 269269 - DNA, 33 bp, Homo sapien
gggataaattatgccaacaattctgataataca

SEQ ID NO: 269270 - DNA, 33 bp, Homo sapien
gggataaattatgccaccaattctgataataca

SEQ ID NO: 269271 - DNA, 33 bp, Homo sapien
acagcactcacacccacgttgtgcatccaaaat

SEQ ID NO: 269272 - DNA, 33 bp, Homo sapien
acagcactcacacccatgttgtgcatccaaaat

SEQ ID NO: 269273 - DNA, 33 bp, Homo sapien
catttcagcatctccccagtgttttttcagtgc

SEQ ID NO: 269274 - DNA, 33 bp, Homo sapien
catttcagcatctccctagtgttttttcagtgc

SEQ ID NO: 269275 - DNA, 33 bp, Homo sapien
atggccatgcagtcacaacatcaagagaagaca

SEQ ID NO: 269276 - DNA, 33 bp, Homo sapien
atggccatgcagtcacgacatcaagagaagaca

SEQ ID NO: 269277 - DNA, 33 bp, Homo sapien
aacccaacatgaggaaatactgccagttgctga

SEQ ID NO: 269278 - DNA, 33 bp, Homo sapien
aacccaacatgaggaagtactgccagttgctga

SEQ ID NO: 269279 - DNA, 33 bp, Homo sapien
tgataatcactttccacacttttgattatatct

SEQ ID NO: 269280 - DNA, 33 bp, Homo sapien
tgataatcactttccatacttttgattatatct

SEQ ID NO: 269281 - DNA, 33 bp, Homo sapien
gaaatcatatctagaaaaggaaaaggctctgga

SEQ ID NO: 269282 - DNA, 33 bp, Homo sapien
gaaatcatatctagaagaggaaaaggctctgga

SEQ ID NO: 269283 - DNA, 33 bp, Homo sapien
aggccagtgatgagtgcaagtcaaaccaagaag

SEQ ID NO: 269284 - DNA, 33 bp, Homo sapien
aggccagtgatgagtggaagtcaaaccaagaag

SEQ ID NO: 269285 - DNA, 33 bp, Homo sapien
ctctcacttcaagaaaccagttactgaacatat

SEQ ID NO: 269286 - DNA, 33 bp, Homo sapien
ctctcacttcaagaaagcagttactgaacatat

SEQ ID NO: 269287 - DNA, 33 bp, Homo sapien
tggcctgtgtcactcaaaggtggaacagcaacc

SEQ ID NO: 269288 - DNA, 33 bp, Homo sapien
tggcctgtgtcactcagaggtggaacagcaacc

SEQ ID NO: 269289 - DNA, 33 bp, Homo sapien
ccagaggggcagcccaagtacagcaaggtcttg

SEQ ID NO: 269290 - DNA, 33 bp, Homo sapien
ccagaggggcagcccacgtacagcaaggtcttg

SEQ ID NO: 269291 - DNA, 33 bp, Homo sapien
gagcaaggtctctagcaagaaaaaggcaaagga

SEQ ID NO: 269292 - DNA, 33 bp, Homo sapien
gagcaaggtctctagcgagaaaaaggcaaagga

SEQ ID NO: 269293 - DNA, 33 bp, Homo sapien
gatctcacactgaatcaaatatatgctccaggg

SEQ ID NO: 269294 - DNA, 33 bp, Homo sapien
gatctcacactgaatccaatatatgctccaggg

SEQ ID NO: 269295 - DNA, 33 bp, Homo sapien
aacccaacatcaaaccaaacaagaattagttac

SEQ ID NO: 269296 - DNA, 33 bp, Homo sapien
aacccaacatcaaaccgaacaagaattagttac

SEQ ID NO: 269297 - DNA, 33 bp, Homo sapien
agagtcctttccatgaaaagtaagttgggttgt

SEQ ID NO: 269298 - DNA, 33 bp, Homo sapien
agagtcctttccatgagaagtaagttgggttgt

SEQ ID NO: 269299 - DNA, 33 bp, Homo sapien
aagtctgagtctgaaaaaacgtgtagatgatat

SEQ ID NO: 269300 - DNA, 33 bp, Homo sapien
aagtctgagtctgaaagaacgtgtagatgatat

SEQ ID NO: 269301 - DNA, 33 bp, Homo sapien
tccttcaaaactctagaaagatgttgtagaata

SEQ ID NO: 269302 - DNA, 33 bp, Homo sapien
tccttcaaaactctagcaagatgttgtagaata

SEQ ID NO: 269303 - DNA, 33 bp, Homo sapien
agtcctcttgattgaactgtttctactgctgct

SEQ ID NO: 269304 - DNA, 33 bp, Homo sapien
agtcctcttgattgaattgtttctactgctgct

SEQ ID NO: 269305 - DNA, 33 bp, Homo sapien
ttggtgatctgacaaacacacagttgttggcag

SEQ ID NO: 269306 - DNA, 33 bp, Homo sapien
ttggtgatctgacaaagacacagttgttggcag

SEQ ID NO: 269307 - DNA, 33 bp, Homo sapien
gacaagaaagtggtagccaagctgtcataaaga

SEQ ID NO: 269308 - DNA, 33 bp, Homo sapien
gacaagaaagtggtaggcaagctgtcataaaga

SEQ ID NO: 269309 - DNA, 33 bp, Homo sapien
aaaaccaccaccacaacaaaacattcacgtctt

SEQ ID NO: 269310 - DNA, 33 bp, Homo sapien
aaaaccaccaccacaagaaaacattcacgtctt

SEQ ID NO: 269311 - DNA, 33 bp, Homo sapien
gccatagacctcaagaccacagcataaaacggg

SEQ ID NO: 269312 - DNA, 33 bp, Homo sapien
gccatagacctcaagatcacagcataaaacggg

SEQ ID NO: 269313 - DNA, 33 bp, Homo sapien
ttggaaagaaagaaaaaccatcccagacatatc

SEQ ID NO: 269314 - DNA, 33 bp, Homo sapien
ttggaaagaaagaaaacccatcccagacatatc

SEQ ID NO: 269315 - DNA, 33 bp, Homo sapien
tcacagttttgtcaaccaagcaatacataacct

SEQ ID NO: 269316 - DNA, 33 bp, Homo sapien
tcacagttttgtcaactaagcaatacataacct

SEQ ID NO: 269317 - DNA, 33 bp, Homo sapien
acaaggaaatgtggccgatccttgtcattccag

SEQ ID NO: 269318 - DNA, 33 bp, Homo sapien
acaaggaaatgtggcctatccttgtcattccag

SEQ ID NO: 269319 - DNA, 33 bp, Homo sapien
tactacagtgattcctaaactttgctacatatt

SEQ ID NO: 269320 - DNA, 33 bp, Homo sapien
tactacagtgattcctcaactttgctacatatt

SEQ ID NO: 269321 - DNA, 33 bp, Homo sapien
taaacttctttccttaacatgtgactactcact

SEQ ID NO: 269322 - DNA, 33 bp, Homo sapien
taaacttctttccttaccatgtgactactcact

SEQ ID NO: 269323 - DNA, 33 bp, Homo sapien
ttcataatattgagcccgagttggtctcctggt

SEQ ID NO: 269324 - DNA, 33 bp, Homo sapien
ttcataatattgagcctgagttggtctcctggt

SEQ ID NO: 269325 - DNA, 33 bp, Homo sapien
ctgaagtccttgctgccagttcaaacttgttca

SEQ ID NO: 269326 - DNA, 33 bp, Homo sapien
ctgaagtccttgctgctagttcaaacttgttca

SEQ ID NO: 269327 - DNA, 33 bp, Homo sapien
actacactgtaagtacgcagtaaatattagctg

SEQ ID NO: 269328 - DNA, 33 bp, Homo sapien
actacactgtaagtactcagtaaatattagctg

SEQ ID NO: 269329 - DNA, 33 bp, Homo sapien
aggaaagcttactgaaactgatcattgttgaac

SEQ ID NO: 269330 - DNA, 33 bp, Homo sapien
aggaaagcttactgaacctgatcattgttgaac

SEQ ID NO: 269331 - DNA, 33 bp, Homo sapien
aaggtgttaacataacaaaggggagtgatggaa

SEQ ID NO: 269332 - DNA, 33 bp, Homo sapien
aaggtgttaacataacgaaggggagtgatggaa

SEQ ID NO: 269333 - DNA, 33 bp, Homo sapien
cccgatgccaggtagcactgcagacccctcact

SEQ ID NO: 269334 - DNA, 33 bp, Homo sapien
cccgatgccaggtagcgctgcagacccctcact

SEQ ID NO: 269335 - DNA, 33 bp, Homo sapien
agaagaggtctctgaacctttggattaaaaaac

SEQ ID NO: 269336 - DNA, 33 bp, Homo sapien
agaagaggtctctgaatctttggattaaaaaac

SEQ ID NO: 269337 - DNA, 33 bp, Homo sapien
actgacagtctgagccacactaggaagctttgg

SEQ ID NO: 269338 - DNA, 33 bp, Homo sapien
actgacagtctgagccgcactaggaagctttgg

SEQ ID NO: 269339 - DNA, 33 bp, Homo sapien
agacatcaatgcagaccgaaaagcaaactgggg

SEQ ID NO: 269340 - DNA, 33 bp, Homo sapien
agacatcaatgcagactgaaaagcaaactgggg

SEQ ID NO: 269341 - DNA, 33 bp, Homo sapien
gtcaaaaaggctttaggagggctttaggatctt

SEQ ID NO: 269342 - DNA, 33 bp, Homo sapien
gtcaaaaaggctttagtagggctttaggatctt

SEQ ID NO: 269343 - DNA, 33 bp, Homo sapien
actagtggagttttcaaatttggtgtctctttc

SEQ ID NO: 269344 - DNA, 33 bp, Homo sapien
actagtggagttttcacatttggtgtctctttc

SEQ ID NO: 269345 - DNA, 33 bp, Homo sapien
ctgcaaatggtgaagaaagaagaggctagccta

SEQ ID NO: 269346 - DNA, 33 bp, Homo sapien
ctgcaaatggtgaagagagaagaggctagccta

SEQ ID NO: 269347 - DNA, 33 bp, Homo sapien
tatctcttatcatgaactggatttcccgagaca

SEQ ID NO: 269348 - DNA, 33 bp, Homo sapien
tatctcttatcatgaattggatttcccgagaca

SEQ ID NO: 269349 - DNA, 33 bp, Homo sapien
gcattacagcacaaaaaccctgagactacgaaa

SEQ ID NO: 269350 - DNA, 33 bp, Homo sapien
gcattacagcacaaaatccctgagactacgaaa

SEQ ID NO: 269351 - DNA, 33 bp, Homo sapien
agtgcactttaggaaaaaaaacaaatgcattta

SEQ ID NO: 269352 - DNA, 33 bp, Homo sapien
agtgcactttaggaaacaaaacaaatgcattta

SEQ ID NO: 269353 - DNA, 33 bp, Homo sapien
atgaggcaccgttgagaaatgggctttagagga

SEQ ID NO: 269354 - DNA, 33 bp, Homo sapien
atgaggcaccgttgaggaatgggctttagagga

SEQ ID NO: 269355 - DNA, 33 bp, Homo sapien
agaaaaacttcactgaaaagaaatctgagagat

SEQ ID NO: 269356 - DNA, 33 bp, Homo sapien
agaaaaacttcactgacaagaaatctgagagat

SEQ ID NO: 269357 - DNA, 33 bp, Homo sapien
cccacccgtaacatgaatacaataaagagcacc

SEQ ID NO: 269358 - DNA, 33 bp, Homo sapien
cccacccgtaacatgagtacaataaagagcacc

SEQ ID NO: 269359 - DNA, 33 bp, Homo sapien
taacgccgttttacagacattctctcatttgat

SEQ ID NO: 269360 - DNA, 33 bp, Homo sapien
taacgccgttttacaggcattctctcatttgat

SEQ ID NO: 269361 - DNA, 33 bp, Homo sapien
cagtggaaggctgccaagtcttcacccaaaacc

SEQ ID NO: 269362 - DNA, 33 bp, Homo sapien
cagtggaaggctgccacgtcttcacccaaaacc

SEQ ID NO: 269363 - DNA, 33 bp, Homo sapien
cccagaggtcacttctaaatggggatttcagga

SEQ ID NO: 269364 - DNA, 33 bp, Homo sapien
cccagaggtcacttctgaatggggatttcagga

SEQ ID NO: 269365 - DNA, 33 bp, Homo sapien
ggtggatgggtgaagacgggtgaatggagatat

SEQ ID NO: 269366 - DNA, 33 bp, Homo sapien
ggtggatgggtgaagatgggtgaatggagatat

SEQ ID NO: 269367 - DNA, 33 bp, Homo sapien
gactctagatgcttccaaacaggtaagaaataa

SEQ ID NO: 269368 - DNA, 33 bp, Homo sapien
gactctagatgcttccgaacaggtaagaaataa

SEQ ID NO: 269369 - DNA, 33 bp, Homo sapien
ataaggatctggaaaccaaagggtcctgggatc

SEQ ID NO: 269370 - DNA, 33 bp, Homo sapien
ataaggatctggaaactaaagggtcctgggatc

SEQ ID NO: 269371 - DNA, 33 bp, Homo sapien
gaggttattaagaataggctatttgattcctaa

SEQ ID NO: 269372 - DNA, 33 bp, Homo sapien
gaggttattaagaatatgctatttgattcctaa

SEQ ID NO: 269373 - DNA, 33 bp, Homo sapien
atttttcttttcatccacaatatctggcaggtt

SEQ ID NO: 269374 - DNA, 33 bp, Homo sapien
atttttcttttcatccgcaatatctggcaggtt

SEQ ID NO: 269375 - DNA, 33 bp, Homo sapien
tgaaaagaaaaataaaatgtagttcagagcctc

SEQ ID NO: 269376 - DNA, 33 bp, Homo sapien
tgaaaagaaaaataaagtgtagttcagagcctc

SEQ ID NO: 269377 - DNA, 33 bp, Homo sapien
tcagagtcactgtgtcaatttcttttgggccca

SEQ ID NO: 269378 - DNA, 33 bp, Homo sapien
tcagagtcactgtgtcgatttcttttgggccca

SEQ ID NO: 269379 - DNA, 33 bp, Homo sapien
gccataaaagtgaatcaaattatatcctttgca

SEQ ID NO: 269380 - DNA, 33 bp, Homo sapien
gccataaaagtgaatcgaattatatcctttgca

SEQ ID NO: 269381 - DNA, 33 bp, Homo sapien
agtctacttgttaaggaagtttctgtcttttac

SEQ ID NO: 269382 - DNA, 33 bp, Homo sapien
agtctacttgttaagggagtttctgtcttttac

SEQ ID NO: 269383 - DNA, 33 bp, Homo sapien
tgttctggaattggagaaaatcaccctctggaa

SEQ ID NO: 269384 - DNA, 33 bp, Homo sapien
tgttctggaattggagcaaatcaccctctggaa

SEQ ID NO: 269385 - DNA, 33 bp, Homo sapien
atgggtccctgtcaccacatttttctatttcca

SEQ ID NO: 269386 - DNA, 33 bp, Homo sapien
atgggtccctgtcaccgcatttttctatttcca

SEQ ID NO: 269387 - DNA, 33 bp, Homo sapien
tcatttgaaagcattacatctcatccactagga

SEQ ID NO: 269388 - DNA, 33 bp, Homo sapien
tcatttgaaagcattatatctcatccactagga

SEQ ID NO: 269389 - DNA, 33 bp, Homo sapien
ctgccatgtcaccttaacggcctctgtcggctg

SEQ ID NO: 269390 - DNA, 33 bp, Homo sapien
ctgccatgtcaccttaccggcctctgtcggctg

SEQ ID NO: 269391 - DNA, 33 bp, Homo sapien
ctggttcagtgaaataataacctggttggcaat

SEQ ID NO: 269392 - DNA, 33 bp, Homo sapien
ctggttcagtgaaatagtaacctggttggcaat

SEQ ID NO: 269393 - DNA, 33 bp, Homo sapien
gactggtgtctttgtaaaaagtggaatttggag

SEQ ID NO: 269394 - DNA, 33 bp, Homo sapien
gactggtgtctttgtataaagtggaatttggag

SEQ ID NO: 269395 - DNA, 33 bp, Homo sapien
acctctaggaaaattaaattggagctgaagaac

SEQ ID NO: 269396 - DNA, 33 bp, Homo sapien
acctctaggaaaattatattggagctgaagaac

SEQ ID NO: 269397 - DNA, 33 bp, Homo sapien
gatttcttaactgtaaaggcacaatctaactgc

SEQ ID NO: 269398 - DNA, 33 bp, Homo sapien
gatttcttaactgtaatggcacaatctaactgc

SEQ ID NO: 269399 - DNA, 33 bp, Homo sapien
gctctctaggagtttacagtccaggagggaagg

SEQ ID NO: 269400 - DNA, 33 bp, Homo sapien
gctctctaggagtttatagtccaggagggaagg

SEQ ID NO: 269401 - DNA, 33 bp, Homo sapien
ggcctcgaacccaagcacctctaaaaacaagat

SEQ ID NO: 269402 - DNA, 33 bp, Homo sapien
ggcctcgaacccaagcgcctctaaaaacaagat

SEQ ID NO: 269403 - DNA, 33 bp, Homo sapien
tggtcctagaaggtgaaaaagtactaaccaaaa

SEQ ID NO: 269404 - DNA, 33 bp, Homo sapien
tggtcctagaaggtgagaaagtactaaccaaaa

SEQ ID NO: 269405 - DNA, 33 bp, Homo sapien
tgacaagggcatcgctaaaggtcagacatccta

SEQ ID NO: 269406 - DNA, 33 bp, Homo sapien
tgacaagggcatcgctgaaggtcagacatccta

SEQ ID NO: 269407 - DNA, 33 bp, Homo sapien
ttttaacaatcaatcaagagttttcctgaggcg

SEQ ID NO: 269408 - DNA, 33 bp, Homo sapien
ttttaacaatcaatcaggagttttcctgaggcg

SEQ ID NO: 269409 - DNA, 33 bp, Homo sapien
ggacatacccaggtgaactcagagagtaaaaga

SEQ ID NO: 269410 - DNA, 33 bp, Homo sapien
ggacatacccaggtgacctcagagagtaaaaga

SEQ ID NO: 269411 - DNA, 33 bp, Homo sapien
gtgcttactgaagcaaatgccagaaacgcgctg

SEQ ID NO: 269412 - DNA, 33 bp, Homo sapien
gtgcttactgaagcaagtgccagaaacgcgctg

SEQ ID NO: 269413 - DNA, 33 bp, Homo sapien
ttgcttcagtaagcacactgagaagggtccaac

SEQ ID NO: 269414 - DNA, 33 bp, Homo sapien
ttgcttcagtaagcacgctgagaagggtccaac

SEQ ID NO: 269415 - DNA, 33 bp, Homo sapien
ggtgacttcatttggaacctcatccctgtccct

SEQ ID NO: 269416 - DNA, 33 bp, Homo sapien
ggtgacttcatttggagcctcatccctgtccct

SEQ ID NO: 269417 - DNA, 33 bp, Homo sapien
ctcatttacacttttaccaacagaatctaagag

SEQ ID NO: 269418 - DNA, 33 bp, Homo sapien
ctcatttacacttttagcaacagaatctaagag

SEQ ID NO: 269419 - DNA, 33 bp, Homo sapien
ggggttgtaaacagacagcaacttacttttgtg

SEQ ID NO: 269420 - DNA, 33 bp, Homo sapien
ggggttgtaaacagactgcaacttacttttgtg

SEQ ID NO: 269421 - DNA, 33 bp, Homo sapien
tatggggcaacggcgactagagaggaacagcgg

SEQ ID NO: 269422 - DNA, 33 bp, Homo sapien
tatggggcaacggcgagtagagaggaacagcgg

SEQ ID NO: 269423 - DNA, 33 bp, Homo sapien
attacgttaattcttcccactcaataacctaat

SEQ ID NO: 269424 - DNA, 33 bp, Homo sapien
attacgttaattcttctcactcaataacctaat

SEQ ID NO: 269425 - DNA, 33 bp, Homo sapien
catggcaaaattgggtaaattctgacttcagca

SEQ ID NO: 269426 - DNA, 33 bp, Homo sapien
catggcaaaattgggtgaattctgacttcagca

SEQ ID NO: 269427 - DNA, 33 bp, Homo sapien
gtggtggttgttttcacgtgggcttaagatagt

SEQ ID NO: 269428 - DNA, 33 bp, Homo sapien
gtggtggttgttttcatgtgggcttaagatagt

SEQ ID NO: 269429 - DNA, 33 bp, Homo sapien
gccaaggaaaataacaatgtaacaagatattac

SEQ ID NO: 269430 - DNA, 33 bp, Homo sapien
gccaaggaaaataacagtgtaacaagatattac

SEQ ID NO: 269431 - DNA, 33 bp, Homo sapien
tctgaattttccaagagtctggggctcccaagt

SEQ ID NO: 269432 - DNA, 33 bp, Homo sapien
tctgaattttccaagattctggggctcccaagt

SEQ ID NO: 269433 - DNA, 33 bp, Homo sapien
gatcacagatgcaagaacctgagataaagaggg

SEQ ID NO: 269434 - DNA, 33 bp, Homo sapien
gatcacagatgcaagagcctgagataaagaggg

SEQ ID NO: 269435 - DNA, 33 bp, Homo sapien
ggaatttctggatccacaaggtgataaaatgtt

SEQ ID NO: 269436 - DNA, 33 bp, Homo sapien
ggaatttctggatccataaggtgataaaatgtt

SEQ ID NO: 269437 - DNA, 33 bp, Homo sapien
tgggttcacttggctgcaagaaagagaatctta

SEQ ID NO: 269438 - DNA, 33 bp, Homo sapien
tgggttcacttggctggaagaaagagaatctta

SEQ ID NO: 269439 - DNA, 33 bp, Homo sapien
aaccactgactactaacgtgtaggtttcctctt

SEQ ID NO: 269440 - DNA, 33 bp, Homo sapien
aaccactgactactaatgtgtaggtttcctctt

SEQ ID NO: 269441 - DNA, 33 bp, Homo sapien
acagatattaaaaacgccaagatggtgacagag

SEQ ID NO: 269442 - DNA, 33 bp, Homo sapien
acagatattaaaaacgtcaagatggtgacagag

SEQ ID NO: 269443 - DNA, 33 bp, Homo sapien
aataagaaaaataacaatgagcatctttaatat

SEQ ID NO: 269444 - DNA, 33 bp, Homo sapien
aataagaaaaataacagtgagcatctttaatat

SEQ ID NO: 269445 - DNA, 33 bp, Homo sapien
tattgctcttccaaataaatgtgtgatatctct

SEQ ID NO: 269446 - DNA, 33 bp, Homo sapien
tattgctcttccaaatgaatgtgtgatatctct

SEQ ID NO: 269447 - DNA, 33 bp, Homo sapien
catgtattaaaggaacccattcatcagtgttgc

SEQ ID NO: 269448 - DNA, 33 bp, Homo sapien
catgtattaaaggaacgcattcatcagtgttgc

SEQ ID NO: 269449 - DNA, 33 bp, Homo sapien
tccaggaacacagaaaatttcaaagggctttct

SEQ ID NO: 269450 - DNA, 33 bp, Homo sapien
tccaggaacacagaaagtttcaaagggctttct

SEQ ID NO: 269451 - DNA, 33 bp, Homo sapien
gcacttagtgcacataggagcaaaggcagtggg

SEQ ID NO: 269452 - DNA, 33 bp, Homo sapien
gcacttagtgcacatatgagcaaaggcagtggg

SEQ ID NO: 269453 - DNA, 33 bp, Homo sapien
accatgttttaaaaagcaggaaccagccaggca

SEQ ID NO: 269454 - DNA, 33 bp, Homo sapien
accatgttttaaaaagtaggaaccagccaggca

SEQ ID NO: 269455 - DNA, 33 bp, Homo sapien
ggacaatataacgacactctgtttctacaaaaa

SEQ ID NO: 269456 - DNA, 33 bp, Homo sapien
ggacaatataacgacattctgtttctacaaaaa

SEQ ID NO: 269457 - DNA, 33 bp, Homo sapien
agttccatagaggaaaatgacctcatccataat

SEQ ID NO: 269458 - DNA, 33 bp, Homo sapien
agttccatagaggaaagtgacctcatccataat

SEQ ID NO: 269459 - DNA, 33 bp, Homo sapien
agggttagtttgccccacacatagctctaatcc

SEQ ID NO: 269460 - DNA, 33 bp, Homo sapien
agggttagtttgccccgcacatagctctaatcc

SEQ ID NO: 269461 - DNA, 33 bp, Homo sapien
tgacattcaaaagtccaatattagtcttaatgt

SEQ ID NO: 269462 - DNA, 33 bp, Homo sapien
tgacattcaaaagtccgatattagtcttaatgt

SEQ ID NO: 269463 - DNA, 33 bp, Homo sapien
ggtcagtggggcaaacagttcagcaaatcattt

SEQ ID NO: 269464 - DNA, 33 bp, Homo sapien
ggtcagtggggcaaaccgttcagcaaatcattt

SEQ ID NO: 269465 - DNA, 33 bp, Homo sapien
ctgctgagtataagtaataactgactttaatga

SEQ ID NO: 269466 - DNA, 33 bp, Homo sapien
ctgctgagtataagtagtaactgactttaatga

SEQ ID NO: 269467 - DNA, 33 bp, Homo sapien
tgtgagaacagcttaaatactacgaattgaaat

SEQ ID NO: 269468 - DNA, 33 bp, Homo sapien
tgtgagaacagcttaagtactacgaattgaaat

SEQ ID NO: 269469 - DNA, 33 bp, Homo sapien
cctctaccctgcacccagaataatatctctaaa

SEQ ID NO: 269470 - DNA, 33 bp, Homo sapien
cctctaccctgcacccggaataatatctctaaa

SEQ ID NO: 269471 - DNA, 33 bp, Homo sapien
tatattttggcctgaaattagaggtgtgactta

SEQ ID NO: 269472 - DNA, 33 bp, Homo sapien
tatattttggcctgaagttagaggtgtgactta

SEQ ID NO: 269473 - DNA, 33 bp, Homo sapien
tagtgttctagttagcagacttttcatttactg

SEQ ID NO: 269474 - DNA, 33 bp, Homo sapien
tagtgttctagttagctgacttttcatttactg

SEQ ID NO: 269475 - DNA, 33 bp, Homo sapien
gcagatcaggtatttacataatcttccagtatt

SEQ ID NO: 269476 - DNA, 33 bp, Homo sapien
gcagatcaggtatttatataatcttccagtatt

SEQ ID NO: 269477 - DNA, 33 bp, Homo sapien
tctctgtgatttgaaaatatctgttgagggaat

SEQ ID NO: 269478 - DNA, 33 bp, Homo sapien
tctctgtgatttgaaagtatctgttgagggaat

SEQ ID NO: 269479 - DNA, 33 bp, Homo sapien
agataacagatggtcactagaaatatttatata

SEQ ID NO: 269480 - DNA, 33 bp, Homo sapien
agataacagatggtcattagaaatatttatata

SEQ ID NO: 269481 - DNA, 33 bp, Homo sapien
gacaggtaacagataccgatcatttttatggtg

SEQ ID NO: 269482 - DNA, 33 bp, Homo sapien
gacaggtaacagatactgatcatttttatggtg

SEQ ID NO: 269483 - DNA, 33 bp, Homo sapien
aagcaagtttaatcaaagatcatctcacgctga

SEQ ID NO: 269484 - DNA, 33 bp, Homo sapien
aagcaagtttaatcaatgatcatctcacgctga

SEQ ID NO: 269485 - DNA, 33 bp, Homo sapien
tagtcaaacgtcgaaacttgcttgagatggcta

SEQ ID NO: 269486 - DNA, 33 bp, Homo sapien
tagtcaaacgtcgaaagttgcttgagatggcta

SEQ ID NO: 269487 - DNA, 33 bp, Homo sapien
cgtgctattgagaaaactagtaaaaataccagg

SEQ ID NO: 269488 - DNA, 33 bp, Homo sapien
cgtgctattgagaaaattagtaaaaataccagg

SEQ ID NO: 269489 - DNA, 33 bp, Homo sapien
tagagactggaagcaaaaagatatagaatttca

SEQ ID NO: 269490 - DNA, 33 bp, Homo sapien
tagagactggaagcaacaagatatagaatttca

SEQ ID NO: 269491 - DNA, 33 bp, Homo sapien
accaagcacactgtgaaatatctataataggca

SEQ ID NO: 269492 - DNA, 33 bp, Homo sapien
accaagcacactgtgagatatctataataggca

SEQ ID NO: 269493 - DNA, 33 bp, Homo sapien
cagttcttttgaggaactagcactctttctgaa

SEQ ID NO: 269494 - DNA, 33 bp, Homo sapien
cagttcttttgaggaattagcactctttctgaa

SEQ ID NO: 269495 - DNA, 33 bp, Homo sapien
atggcaagtaacataactgaaatcctgtcctac

SEQ ID NO: 269496 - DNA, 33 bp, Homo sapien
atggcaagtaacataattgaaatcctgtcctac

SEQ ID NO: 269497 - DNA, 33 bp, Homo sapien
tgtatattgcagaccaactctagtaggacagga

SEQ ID NO: 269498 - DNA, 33 bp, Homo sapien
tgtatattgcagaccatctctagtaggacagga

SEQ ID NO: 269499 - DNA, 33 bp, Homo sapien
ctgaaggcagagaccaagtctaaagtaattttt

SEQ ID NO: 269500 - DNA, 33 bp, Homo sapien
ctgaaggcagagaccaggtctaaagtaattttt

SEQ ID NO: 269501 - DNA, 33 bp, Homo sapien
tgccattgggctttctcacttactatcctgtta

SEQ ID NO: 269502 - DNA, 33 bp, Homo sapien
tgccattgggctttcttacttactatcctgtta

SEQ ID NO: 269503 - DNA, 33 bp, Homo sapien
ttaagctaggtagttccctttgactatacaatt

SEQ ID NO: 269504 - DNA, 33 bp, Homo sapien
ttaagctaggtagttctctttgactatacaatt

SEQ ID NO: 269505 - DNA, 33 bp, Homo sapien
ggtttggtcctactctcacttgatcaaggatgt

SEQ ID NO: 269506 - DNA, 33 bp, Homo sapien
ggtttggtcctactcttacttgatcaaggatgt

SEQ ID NO: 269507 - DNA, 33 bp, Homo sapien
gaagacatccaatccaagttaggttaatcaatt

SEQ ID NO: 269508 - DNA, 33 bp, Homo sapien
gaagacatccaatccaggttaggttaatcaatt

SEQ ID NO: 269509 - DNA, 33 bp, Homo sapien
gacaacaaatcccagcaagggacaaacagccgg

SEQ ID NO: 269510 - DNA, 33 bp, Homo sapien
gacaacaaatcccagcgagggacaaacagccgg

SEQ ID NO: 269511 - DNA, 33 bp, Homo sapien
acccactgggtgactacgctactccaagggccc

SEQ ID NO: 269512 - DNA, 33 bp, Homo sapien
acccactgggtgactatgctactccaagggccc

SEQ ID NO: 269513 - DNA, 33 bp, Homo sapien
ccttcccttctgagaacgtcattatgttcattg

SEQ ID NO: 269514 - DNA, 33 bp, Homo sapien
ccttcccttctgagaatgtcattatgttcattg

SEQ ID NO: 269515 - DNA, 33 bp, Homo sapien
cttagactgtggtgggccactctcctcacttgt

SEQ ID NO: 269516 - DNA, 33 bp, Homo sapien
cttagactgtggtgggtcactctcctcacttgt

SEQ ID NO: 269517 - DNA, 33 bp, Homo sapien
cccaaaaagagaaatactattggcttagttagg

SEQ ID NO: 269518 - DNA, 33 bp, Homo sapien
cccaaaaagagaaatattattggcttagttagg

SEQ ID NO: 269519 - DNA, 33 bp, Homo sapien
aagaacaaaagaaataatatacacactaccaac

SEQ ID NO: 269520 - DNA, 33 bp, Homo sapien
aagaacaaaagaaatattatacacactaccaac

SEQ ID NO: 269521 - DNA, 33 bp, Homo sapien
gcaaagaactctattacccatggcatggtaagc

SEQ ID NO: 269522 - DNA, 33 bp, Homo sapien
gcaaagaactctattatccatggcatggtaagc

SEQ ID NO: 269523 - DNA, 33 bp, Homo sapien
gttcccaagatcctgaagaactagataagcctc

SEQ ID NO: 269524 - DNA, 33 bp, Homo sapien
gttcccaagatcctgatgaactagataagcctc

SEQ ID NO: 269525 - DNA, 33 bp, Homo sapien
tactccaggctatagaccaacatttctcaaacc

SEQ ID NO: 269526 - DNA, 33 bp, Homo sapien
tactccaggctatagatcaacatttctcaaacc

SEQ ID NO: 269527 - DNA, 33 bp, Homo sapien
acacttagagcaagcaagtttgaacattgcgac

SEQ ID NO: 269528 - DNA, 33 bp, Homo sapien
acacttagagcaagcaggtttgaacattgcgac

SEQ ID NO: 269529 - DNA, 33 bp, Homo sapien
cagaggtcagtgacgacaggcatagtaaatgta

SEQ ID NO: 269530 - DNA, 33 bp, Homo sapien
cagaggtcagtgacgagaggcatagtaaatgta

SEQ ID NO: 269531 - DNA, 33 bp, Homo sapien
tacatttcaactacagcaacattttgacaagga

SEQ ID NO: 269532 - DNA, 33 bp, Homo sapien
tacatttcaactacagtaacattttgacaagga

SEQ ID NO: 269533 - DNA, 33 bp, Homo sapien
gggtttgtggacttcacggttcaggttggcagg

SEQ ID NO: 269534 - DNA, 33 bp, Homo sapien
gggtttgtggacttcatggttcaggttggcagg

SEQ ID NO: 269535 - DNA, 33 bp, Homo sapien
atgagtgtttactacacaagaatcgtgcattta

SEQ ID NO: 269536 - DNA, 33 bp, Homo sapien
atgagtgtttactacataagaatcgtgcattta

SEQ ID NO: 269537 - DNA, 33 bp, Homo sapien
acaaactcaggtcaaccccattctatgttaaat

SEQ ID NO: 269538 - DNA, 33 bp, Homo sapien
acaaactcaggtcaactccattctatgttaaat

SEQ ID NO: 269539 - DNA, 33 bp, Homo sapien
tgtatccagaacatcactgaaaactcctcaggg

SEQ ID NO: 269540 - DNA, 33 bp, Homo sapien
tgtatccagaacatcattgaaaactcctcaggg

SEQ ID NO: 269541 - DNA, 33 bp, Homo sapien
attacattctgtctggaaagataatggcaaaga

SEQ ID NO: 269542 - DNA, 33 bp, Homo sapien
attacattctgtctggcaagataatggcaaaga

SEQ ID NO: 269543 - DNA, 33 bp, Homo sapien
ctatgttagtgtgactcaattcattttcctacc

SEQ ID NO: 269544 - DNA, 33 bp, Homo sapien
ctatgttagtgtgacttaattcattttcctacc

SEQ ID NO: 269545 - DNA, 33 bp, Homo sapien
acttacagaattcctacctaaaagtcttcccaa

SEQ ID NO: 269546 - DNA, 33 bp, Homo sapien
acttacagaattcctatctaaaagtcttcccaa

SEQ ID NO: 269547 - DNA, 33 bp, Homo sapien
tgatggaataacagggaccacatttaaacactt

SEQ ID NO: 269548 - DNA, 33 bp, Homo sapien
tgatggaataacagggcccacatttaaacactt

SEQ ID NO: 269549 - DNA, 33 bp, Homo sapien
gtccattatttcagtcaattgcttatttataat

SEQ ID NO: 269550 - DNA, 33 bp, Homo sapien
gtccattatttcagtcgattgcttatttataat

SEQ ID NO: 269551 - DNA, 33 bp, Homo sapien
aaacattacttgtctaagtttggctgccttata

SEQ ID NO: 269552 - DNA, 33 bp, Homo sapien
aaacattacttgtctacgtttggctgccttata

SEQ ID NO: 269553 - DNA, 33 bp, Homo sapien
atgcatatttatactaccttctactcccacccc

SEQ ID NO: 269554 - DNA, 33 bp, Homo sapien
atgcatatttatactatcttctactcccacccc

SEQ ID NO: 269555 - DNA, 33 bp, Homo sapien
gtaaaagtaaatgacaagtaaagctcatgaaat

SEQ ID NO: 269556 - DNA, 33 bp, Homo sapien
gtaaaagtaaatgacacgtaaagctcatgaaat

SEQ ID NO: 269557 - DNA, 33 bp, Homo sapien
gcttagatcctaaaaaatgggggctttccatct

SEQ ID NO: 269558 - DNA, 33 bp, Homo sapien
gcttagatcctaaaaagtgggggctttccatct

SEQ ID NO: 269559 - DNA, 33 bp, Homo sapien
cacagtgcctgacacacgctgagttctaaatgc

SEQ ID NO: 269560 - DNA, 33 bp, Homo sapien
cacagtgcctgacacatgctgagttctaaatgc

SEQ ID NO: 269561 - DNA, 33 bp, Homo sapien
gtaatttgcaaactaaagccatcaccaactaat

SEQ ID NO: 269562 - DNA, 33 bp, Homo sapien
gtaatttgcaaactaaggccatcaccaactaat

SEQ ID NO: 269563 - DNA, 33 bp, Homo sapien
ggtgccatttcacagactacctcgggccagcag

SEQ ID NO: 269564 - DNA, 33 bp, Homo sapien
ggtgccatttcacagattacctcgggccagcag

SEQ ID NO: 269565 - DNA, 33 bp, Homo sapien
ccagtcctaagtaaaaccttgcagaaatatgtg

SEQ ID NO: 269566 - DNA, 33 bp, Homo sapien
ccagtcctaagtaaaatcttgcagaaatatgtg

SEQ ID NO: 269567 - DNA, 33 bp, Homo sapien
gataatttagattgtacggcttattggcccaat

SEQ ID NO: 269568 - DNA, 33 bp, Homo sapien
gataatttagattgtatggcttattggcccaat

SEQ ID NO: 269569 - DNA, 33 bp, Homo sapien
ttgtgaccacacacccaggcttgacaaagctgt

SEQ ID NO: 269570 - DNA, 33 bp, Homo sapien
ttgtgaccacacacccgggcttgacaaagctgt

SEQ ID NO: 269571 - DNA, 33 bp, Homo sapien
tctgtgtcttcaactacagtggacattctacaa

SEQ ID NO: 269572 - DNA, 33 bp, Homo sapien
tctgtgtcttcaactagagtggacattctacaa

SEQ ID NO: 269573 - DNA, 33 bp, Homo sapien
atatgctaggtttctacgtacttattactaatt

SEQ ID NO: 269574 - DNA, 33 bp, Homo sapien
atatgctaggtttctatgtacttattactaatt

SEQ ID NO: 269575 - DNA, 33 bp, Homo sapien
tctgaaatgttggatacggtgtttagaagttaa

SEQ ID NO: 269576 - DNA, 33 bp, Homo sapien
tctgaaatgttggatatggtgtttagaagttaa

SEQ ID NO: 269577 - DNA, 33 bp, Homo sapien
acataatttgtggcccccagtgcaaaataaaaa

SEQ ID NO: 269578 - DNA, 33 bp, Homo sapien
acataatttgtggccctcagtgcaaaataaaaa

SEQ ID NO: 269579 - DNA, 33 bp, Homo sapien
tagctctattcagaagccatggggaagacagtt

SEQ ID NO: 269580 - DNA, 33 bp, Homo sapien
tagctctattcagaaggcatggggaagacagtt

SEQ ID NO: 269581 - DNA, 33 bp, Homo sapien
tttagacaggacaaacaaaattcaatttagatt

SEQ ID NO: 269582 - DNA, 33 bp, Homo sapien
tttagacaggacaaacgaaattcaatttagatt

SEQ ID NO: 269583 - DNA, 33 bp, Homo sapien
ttcatagatacagtcacaggtggagggcttggc

SEQ ID NO: 269584 - DNA, 33 bp, Homo sapien
ttcatagatacagtcataggtggagggcttggc

SEQ ID NO: 269585 - DNA, 33 bp, Homo sapien
aaatcaaagagaaagaatatttgaagcacaaag

SEQ ID NO: 269586 - DNA, 33 bp, Homo sapien
aaatcaaagagaaagactatttgaagcacaaag

SEQ ID NO: 269587 - DNA, 33 bp, Homo sapien
ttttactgtgtacatcaccattattttacttta

SEQ ID NO: 269588 - DNA, 33 bp, Homo sapien
ttttactgtgtacatctccattattttacttta

SEQ ID NO: 269589 - DNA, 33 bp, Homo sapien
aattcacactcagtcaactttggatcaaatact

SEQ ID NO: 269590 - DNA, 33 bp, Homo sapien
aattcacactcagtcacctttggatcaaatact

SEQ ID NO: 269591 - DNA, 33 bp, Homo sapien
ctcatagtacccatcacatcgtgcaataaacgt

SEQ ID NO: 269592 - DNA, 33 bp, Homo sapien
ctcatagtacccatcatatcgtgcaataaacgt

SEQ ID NO: 269593 - DNA, 33 bp, Homo sapien
atcttccccttatccaactctaggctttgctga

SEQ ID NO: 269594 - DNA, 33 bp, Homo sapien
atcttccccttatccagctctaggctttgctga

SEQ ID NO: 269595 - DNA, 33 bp, Homo sapien
cttcactcgctggtacaaagcagatgtcaaagg

SEQ ID NO: 269596 - DNA, 33 bp, Homo sapien
cttcactcgctggtacgaagcagatgtcaaagg

SEQ ID NO: 269597 - DNA, 33 bp, Homo sapien
tcaagaaaagccatcaatgaaggctacattgca

SEQ ID NO: 269598 - DNA, 33 bp, Homo sapien
tcaagaaaagccatcactgaaggctacattgca

SEQ ID NO: 269599 - DNA, 33 bp, Homo sapien
cattgcagttgagttacccaaatttgaagaaag

SEQ ID NO: 269600 - DNA, 33 bp, Homo sapien
cattgcagttgagttagccaaatttgaagaaag

SEQ ID NO: 269601 - DNA, 33 bp, Homo sapien
gtacagtaaggccaaacggttcagagtgttctt

SEQ ID NO: 269602 - DNA, 33 bp, Homo sapien
gtacagtaaggccaaatggttcagagtgttctt

SEQ ID NO: 269603 - DNA, 33 bp, Homo sapien
taagaatcagtctactcaatgtgccacatcagt

SEQ ID NO: 269604 - DNA, 33 bp, Homo sapien
taagaatcagtctacttaatgtgccacatcagt

SEQ ID NO: 269605 - DNA, 33 bp, Homo sapien
actccccctttacttacagtgactcagctatcc

SEQ ID NO: 269606 - DNA, 33 bp, Homo sapien
actccccctttacttatagtgactcagctatcc

SEQ ID NO: 269607 - DNA, 33 bp, Homo sapien
caaatagttcctggataagattctgaataatgc

SEQ ID NO: 269608 - DNA, 33 bp, Homo sapien
caaatagttcctggatgagattctgaataatgc

SEQ ID NO: 269609 - DNA, 33 bp, Homo sapien
gttcttgcctcacagaaaggaatagtatccagt

SEQ ID NO: 269610 - DNA, 33 bp, Homo sapien
gttcttgcctcacagagaggaatagtatccagt

SEQ ID NO: 269611 - DNA, 33 bp, Homo sapien
aattttcttgcagggaaagtgtaaataatctgg

SEQ ID NO: 269612 - DNA, 33 bp, Homo sapien
aattttcttgcagggagagtgtaaataatctgg

SEQ ID NO: 269613 - DNA, 33 bp, Homo sapien
ctttatctcaaaaagcaaagcagaaactacagc

SEQ ID NO: 269614 - DNA, 33 bp, Homo sapien
ctttatctcaaaaagcgaagcagaaactacagc

SEQ ID NO: 269615 - DNA, 33 bp, Homo sapien
aggagcctataaccagcaggtatcacagaaatt

SEQ ID NO: 269616 - DNA, 33 bp, Homo sapien
aggagcctataaccagtaggtatcacagaaatt

SEQ ID NO: 269617 - DNA, 33 bp, Homo sapien
ctcagaattttaacaaatgcaccaaagtgacat

SEQ ID NO: 269618 - DNA, 33 bp, Homo sapien
ctcagaattttaacaagtgcaccaaagtgacat

SEQ ID NO: 269619 - DNA, 33 bp, Homo sapien
tctcatgcttcttttcccagatgatcgaggact

SEQ ID NO: 269620 - DNA, 33 bp, Homo sapien
tctcatgcttcttttctcagatgatcgaggact

SEQ ID NO: 269621 - DNA, 33 bp, Homo sapien
attcaccatggtaggaagataaaacatatttca

SEQ ID NO: 269622 - DNA, 33 bp, Homo sapien
attcaccatggtaggaggataaaacatatttca

SEQ ID NO: 269623 - DNA, 33 bp, Homo sapien
agtgcaaggaaaaatacacaatttgcttaacct

SEQ ID NO: 269624 - DNA, 33 bp, Homo sapien
agtgcaaggaaaaatatacaatttgcttaacct

SEQ ID NO: 269625 - DNA, 33 bp, Homo sapien
ttcatgtgctcagtaccatcccattgaataaaa

SEQ ID NO: 269626 - DNA, 33 bp, Homo sapien
ttcatgtgctcagtactatcccattgaataaaa

SEQ ID NO: 269627 - DNA, 33 bp, Homo sapien
taatgttattactagaatcacactgttcattat

SEQ ID NO: 269628 - DNA, 33 bp, Homo sapien
taatgttattactagagtcacactgttcattat

SEQ ID NO: 269629 - DNA, 33 bp, Homo sapien
tgccttatgataacaccgatttgtgtctattat

SEQ ID NO: 269630 - DNA, 33 bp, Homo sapien
tgccttatgataacactgatttgtgtctattat

SEQ ID NO: 269631 - DNA, 33 bp, Homo sapien
taaaaatgtacattcaaccaattccatatcaaa

SEQ ID NO: 269632 - DNA, 33 bp, Homo sapien
taaaaatgtacattcatccaattccatatcaaa

SEQ ID NO: 269633 - DNA, 33 bp, Homo sapien
gtaacagctgagatacccctgctggtaagtggc

SEQ ID NO: 269634 - DNA, 33 bp, Homo sapien
gtaacagctgagatactcctgctggtaagtggc

SEQ ID NO: 269635 - DNA, 33 bp, Homo sapien
gtattaagtccaggggaatggtcagcaccaacc

SEQ ID NO: 269636 - DNA, 33 bp, Homo sapien
gtattaagtccagggggatggtcagcaccaacc

SEQ ID NO: 269637 - DNA, 33 bp, Homo sapien
ttctatgttgtggatgaaaaaaccgaggccctg

SEQ ID NO: 269638 - DNA, 33 bp, Homo sapien
ttctatgttgtggatgcaaaaaccgaggccctg

SEQ ID NO: 269639 - DNA, 33 bp, Homo sapien
cagcctaaccgtataacggagaatttaactcat

SEQ ID NO: 269640 - DNA, 33 bp, Homo sapien
cagcctaaccgtataatggagaatttaactcat

SEQ ID NO: 269641 - DNA, 33 bp, Homo sapien
cctgtgagcttctggtagcaacagtttcatcta

SEQ ID NO: 269642 - DNA, 33 bp, Homo sapien
cctgtgagcttctggttgcaacagtttcatcta

SEQ ID NO: 269643 - DNA, 33 bp, Homo sapien
tgggcaatcactttccaatgaaacctcttactc

SEQ ID NO: 269644 - DNA, 33 bp, Homo sapien
tgggcaatcactttccgatgaaacctcttactc

SEQ ID NO: 269645 - DNA, 33 bp, Homo sapien
cttgctgtaaatcccacggcactcttgactctt

SEQ ID NO: 269646 - DNA, 33 bp, Homo sapien
cttgctgtaaatcccatggcactcttgactctt

SEQ ID NO: 269647 - DNA, 33 bp, Homo sapien
gaccttgtcatcacataataagcaggcgatcca

SEQ ID NO: 269648 - DNA, 33 bp, Homo sapien
gaccttgtcatcacatcataagcaggcgatcca

SEQ ID NO: 269649 - DNA, 33 bp, Homo sapien
accggtccctttgtaacgcttggcagtttgcac

SEQ ID NO: 269650 - DNA, 33 bp, Homo sapien
accggtccctttgtaatgcttggcagtttgcac

SEQ ID NO: 269651 - DNA, 33 bp, Homo sapien
gctgtacccctaggaacggcgcacccctctggg

SEQ ID NO: 269652 - DNA, 33 bp, Homo sapien
gctgtacccctaggaatggcgcacccctctggg

SEQ ID NO: 269653 - DNA, 33 bp, Homo sapien
aataaatgtttatgaacggaaagaacaaatcca

SEQ ID NO: 269654 - DNA, 33 bp, Homo sapien
aataaatgtttatgaatggaaagaacaaatcca

SEQ ID NO: 269655 - DNA, 33 bp, Homo sapien
tctcttgcatcaattaacttcaccagccattaa

SEQ ID NO: 269656 - DNA, 33 bp, Homo sapien
tctcttgcatcaattatcttcaccagccattaa

SEQ ID NO: 269657 - DNA, 33 bp, Homo sapien
gagagaatattttaaactgacgttgcggagaga

SEQ ID NO: 269658 - DNA, 33 bp, Homo sapien
gagagaatattttaaattgacgttgcggagaga

SEQ ID NO: 269659 - DNA, 33 bp, Homo sapien
gtttgtgaaaccagtcaaagaagacgccttgat

SEQ ID NO: 269660 - DNA, 33 bp, Homo sapien
gtttgtgaaaccagtcgaagaagacgccttgat

SEQ ID NO: 269661 - DNA, 33 bp, Homo sapien
tttcttaaatttttgcaaccaatctgtttaata

SEQ ID NO: 269662 - DNA, 33 bp, Homo sapien
tttcttaaatttttgcgaccaatctgtttaata

SEQ ID NO: 269663 - DNA, 33 bp, Homo sapien
tgtgttctaagctataccatacaggtttatgta

SEQ ID NO: 269664 - DNA, 33 bp, Homo sapien
tgtgttctaagctatatcatacaggtttatgta

SEQ ID NO: 269665 - DNA, 33 bp, Homo sapien
ttcctcttgtttcatacagttgacatctttcag

SEQ ID NO: 269666 - DNA, 33 bp, Homo sapien
ttcctcttgtttcatatagttgacatctttcag

SEQ ID NO: 269667 - DNA, 33 bp, Homo sapien
tcctggcccagcggctaagatacctgacctgtt

SEQ ID NO: 269668 - DNA, 33 bp, Homo sapien
tcctggcccagcggctgagatacctgacctgtt

SEQ ID NO: 269669 - DNA, 33 bp, Homo sapien
tggcagacatcggctaacagtcaaggagggtta

SEQ ID NO: 269670 - DNA, 33 bp, Homo sapien
tggcagacatcggctaccagtcaaggagggtta

SEQ ID NO: 269671 - DNA, 33 bp, Homo sapien
tcaatgatctcagctacgctactgataagcatg

SEQ ID NO: 269672 - DNA, 33 bp, Homo sapien
tcaatgatctcagctatgctactgataagcatg

SEQ ID NO: 269673 - DNA, 33 bp, Homo sapien
gcagaggcttcttcaacgttcagtcattcttgc

SEQ ID NO: 269674 - DNA, 33 bp, Homo sapien
gcagaggcttcttcaatgttcagtcattcttgc

SEQ ID NO: 269675 - DNA, 33 bp, Homo sapien
cacatggaggctgacaagaaggtaaacaagaat

SEQ ID NO: 269676 - DNA, 33 bp, Homo sapien
cacatggaggctgacaggaaggtaaacaagaat

SEQ ID NO: 269677 - DNA, 33 bp, Homo sapien
gacaaaacaagaatcacgtcaaaaaagcctgag

SEQ ID NO: 269678 - DNA, 33 bp, Homo sapien
gacaaaacaagaatcatgtcaaaaaagcctgag

SEQ ID NO: 269679 - DNA, 33 bp, Homo sapien
aacttctcacagtccactaataaagctttaaat

SEQ ID NO: 269680 - DNA, 33 bp, Homo sapien
aacttctcacagtccattaataaagctttaaat

SEQ ID NO: 269681 - DNA, 33 bp, Homo sapien
tcacgcttagatattacgcaagaagtgacgtgg

SEQ ID NO: 269682 - DNA, 33 bp, Homo sapien
tcacgcttagatattatgcaagaagtgacgtgg

SEQ ID NO: 269683 - DNA, 33 bp, Homo sapien
tcttccagaagtctaactcctcgcaaccacatc

SEQ ID NO: 269684 - DNA, 33 bp, Homo sapien
tcttccagaagtctaattcctcgcaaccacatc

SEQ ID NO: 269685 - DNA, 33 bp, Homo sapien
ctcagcttcctactggacaatggtttcctccac

SEQ ID NO: 269686 - DNA, 33 bp, Homo sapien
ctcagcttcctactgggcaatggtttcctccac

SEQ ID NO: 269687 - DNA, 33 bp, Homo sapien
ctcacacctgtaatcgcaggactttgggaagtt

SEQ ID NO: 269688 - DNA, 33 bp, Homo sapien
ctcacacctgtaatcgtaggactttgggaagtt

SEQ ID NO: 269689 - DNA, 33 bp, Homo sapien
taaaccttttcattgacagttgtttgcaatttt

SEQ ID NO: 269690 - DNA, 33 bp, Homo sapien
taaaccttttcattgatagttgtttgcaatttt

SEQ ID NO: 269691 - DNA, 33 bp, Homo sapien
atgagatcccactgcacacccactggaataatc

SEQ ID NO: 269692 - DNA, 33 bp, Homo sapien
atgagatcccactgcatacccactggaataatc

SEQ ID NO: 269693 - DNA, 33 bp, Homo sapien
acaaatctgtgaagtaaaacgatagacatatag

SEQ ID NO: 269694 - DNA, 33 bp, Homo sapien
acaaatctgtgaagtataacgatagacatatag

SEQ ID NO: 269695 - DNA, 33 bp, Homo sapien
ctaaaggactctgctcccttctgcagcacgtag

SEQ ID NO: 269696 - DNA, 33 bp, Homo sapien
ctaaaggactctgctcgcttctgcagcacgtag

SEQ ID NO: 269697 - DNA, 33 bp, Homo sapien
gctcacacttttgtaaataatccatcaaacaga

SEQ ID NO: 269698 - DNA, 33 bp, Homo sapien
gctcacacttttgtaactaatccatcaaacaga

SEQ ID NO: 269699 - DNA, 33 bp, Homo sapien
ccaggaggaaaagtcaatctggaaaagcaaatg

SEQ ID NO: 269700 - DNA, 33 bp, Homo sapien
ccaggaggaaaagtcagtctggaaaagcaaatg

SEQ ID NO: 269701 - DNA, 33 bp, Homo sapien
tgagagataattatgacgctctattttacctat

SEQ ID NO: 269702 - DNA, 33 bp, Homo sapien
tgagagataattatgatgctctattttacctat

SEQ ID NO: 269703 - DNA, 33 bp, Homo sapien
cacttataagcaaacacagtgtctacaagatgc

SEQ ID NO: 269704 - DNA, 33 bp, Homo sapien
cacttataagcaaacatagtgtctacaagatgc

SEQ ID NO: 269705 - DNA, 33 bp, Homo sapien
gacaacctggaaagaagatttatgcactggaaa

SEQ ID NO: 269706 - DNA, 33 bp, Homo sapien
gacaacctggaaagaatatttatgcactggaaa

SEQ ID NO: 269707 - DNA, 33 bp, Homo sapien
gtcagaattgagtcaactgagacctttcccgag

SEQ ID NO: 269708 - DNA, 33 bp, Homo sapien
gtcagaattgagtcaattgagacctttcccgag

SEQ ID NO: 269709 - DNA, 33 bp, Homo sapien
caaattaacccaagtcaatacctgtgcagttcc

SEQ ID NO: 269710 - DNA, 33 bp, Homo sapien
caaattaacccaagtcgatacctgtgcagttcc

SEQ ID NO: 269711 - DNA, 33 bp, Homo sapien
tcctgacactattagaaggttaattaccaacat

SEQ ID NO: 269712 - DNA, 33 bp, Homo sapien
tcctgacactattagagggttaattaccaacat

SEQ ID NO: 269713 - DNA, 33 bp, Homo sapien
tttatatttcagctggacagcatttacttgctc

SEQ ID NO: 269714 - DNA, 33 bp, Homo sapien
tttatatttcagctgggcagcatttacttgctc

SEQ ID NO: 269715 - DNA, 33 bp, Homo sapien
catttgtacttataaacttatagcacagtacct

SEQ ID NO: 269716 - DNA, 33 bp, Homo sapien
catttgtacttataaagttatagcacagtacct

SEQ ID NO: 269717 - DNA, 33 bp, Homo sapien
tgcaagctactgagcaagctactatccttgtca

SEQ ID NO: 269718 - DNA, 33 bp, Homo sapien
tgcaagctactgagcacgctactatccttgtca

SEQ ID NO: 269719 - DNA, 33 bp, Homo sapien
tcctactcatttctaaagccttactaaacatga

SEQ ID NO: 269720 - DNA, 33 bp, Homo sapien
tcctactcatttctaatgccttactaaacatga

SEQ ID NO: 269721 - DNA, 33 bp, Homo sapien
tgaggacttgagctacagaatgcgttgctggat

SEQ ID NO: 269722 - DNA, 33 bp, Homo sapien
tgaggacttgagctacggaatgcgttgctggat

SEQ ID NO: 269723 - DNA, 33 bp, Homo sapien
aatgtttatgttactacgttaaaaagcctggcc

SEQ ID NO: 269724 - DNA, 33 bp, Homo sapien
aatgtttatgttactatgttaaaaagcctggcc

SEQ ID NO: 269725 - DNA, 33 bp, Homo sapien
ttgttaaactgcatgacgaaataatgtgagtca

SEQ ID NO: 269726 - DNA, 33 bp, Homo sapien
ttgttaaactgcatgatgaaataatgtgagtca

SEQ ID NO: 269727 - DNA, 33 bp, Homo sapien
tgctaccctaggtaaccgagtcaatagtattag

SEQ ID NO: 269728 - DNA, 33 bp, Homo sapien
tgctaccctaggtaactgagtcaatagtattag

SEQ ID NO: 269729 - DNA, 33 bp, Homo sapien
agtttggaggagtattcaaagaattagggggta

SEQ ID NO: 269730 - DNA, 33 bp, Homo sapien
agtttggaggagtattgaaagaattagggggta

SEQ ID NO: 269731 - DNA, 33 bp, Homo sapien
acactaccatctctcacgtgtttttgagccaaa

SEQ ID NO: 269732 - DNA, 33 bp, Homo sapien
acactaccatctctcatgtgtttttgagccaaa

SEQ ID NO: 269733 - DNA, 33 bp, Homo sapien
ctggctaagcagatgagctctaaaaacagatta

SEQ ID NO: 269734 - DNA, 33 bp, Homo sapien
ctggctaagcagatgatctctaaaaacagatta

SEQ ID NO: 269735 - DNA, 33 bp, Homo sapien
gtggaacaaatgatcaaattggcacaattccta

SEQ ID NO: 269736 - DNA, 33 bp, Homo sapien
gtggaacaaatgatcagattggcacaattccta

SEQ ID NO: 269737 - DNA, 33 bp, Homo sapien
ggcacagataaaaaaaacgagaagttgaatgaa

SEQ ID NO: 269738 - DNA, 33 bp, Homo sapien
ggcacagataaaaaaatcgagaagttgaatgaa

SEQ ID NO: 269739 - DNA, 33 bp, Homo sapien
ttaaaaagaatcaacaactagatccaaacatga

SEQ ID NO: 269740 - DNA, 33 bp, Homo sapien
ttaaaaagaatcaacagctagatccaaacatga

SEQ ID NO: 269741 - DNA, 33 bp, Homo sapien
aggagaaagtatgaagcagtgaacagactgcgg

SEQ ID NO: 269742 - DNA, 33 bp, Homo sapien
aggagaaagtatgaagtagtgaacagactgcgg

SEQ ID NO: 269743 - DNA, 33 bp, Homo sapien
ggaagaccaaatgacaccataaacatgttatcg

SEQ ID NO: 269744 - DNA, 33 bp, Homo sapien
ggaagaccaaatgacatcataaacatgttatcg

SEQ ID NO: 269745 - DNA, 33 bp, Homo sapien
ttcatacaaaaacaacaccgtgcttccaatcgt

SEQ ID NO: 269746 - DNA, 33 bp, Homo sapien
ttcatacaaaaacaacgccgtgcttccaatcgt

SEQ ID NO: 269747 - DNA, 33 bp, Homo sapien
ttattttagggatttgcaaagcttgtcttggca

SEQ ID NO: 269748 - DNA, 33 bp, Homo sapien
ttattttagggatttggaaagcttgtcttggca

SEQ ID NO: 269749 - DNA, 33 bp, Homo sapien
agtacctgagaaataacctgatttgggaaataa

SEQ ID NO: 269750 - DNA, 33 bp, Homo sapien
agtacctgagaaataagctgatttgggaaataa

SEQ ID NO: 269751 - DNA, 33 bp, Homo sapien
tatccatgattttcatcactttcttaccttctg

SEQ ID NO: 269752 - DNA, 33 bp, Homo sapien
tatccatgattttcattactttcttaccttctg

SEQ ID NO: 269753 - DNA, 33 bp, Homo sapien
gggatagctacggaaaaggaaaactacttcagg

SEQ ID NO: 269754 - DNA, 33 bp, Homo sapien
gggatagctacggaaatggaaaactacttcagg

SEQ ID NO: 269755 - DNA, 33 bp, Homo sapien
acctgagatgtttgagaaagttactcaattttc

SEQ ID NO: 269756 - DNA, 33 bp, Homo sapien
acctgagatgtttgaggaagttactcaattttc

SEQ ID NO: 269757 - DNA, 33 bp, Homo sapien
aaccttgtcttattcacattcagggaagtctag

SEQ ID NO: 269758 - DNA, 33 bp, Homo sapien
aaccttgtcttattcatattcagggaagtctag

SEQ ID NO: 269759 - DNA, 33 bp, Homo sapien
agaggaccatgtggtacgttataaacagttttg

SEQ ID NO: 269760 - DNA, 33 bp, Homo sapien
agaggaccatgtggtatgttataaacagttttg

SEQ ID NO: 269761 - DNA, 33 bp, Homo sapien
atgggagaataggtctcaaacatggtaatatta

SEQ ID NO: 269762 - DNA, 33 bp, Homo sapien
atgggagaataggtcttaaacatggtaatatta

SEQ ID NO: 269763 - DNA, 33 bp, Homo sapien
acattgttcagcagccaaaaagaatgccaggct

SEQ ID NO: 269764 - DNA, 33 bp, Homo sapien
acattgttcagcagccgaaaagaatgccaggct

SEQ ID NO: 269765 - DNA, 33 bp, Homo sapien
acaacatcagtatttacacaaggaaggcctttg

SEQ ID NO: 269766 - DNA, 33 bp, Homo sapien
acaacatcagtatttatacaaggaaggcctttg

SEQ ID NO: 269767 - DNA, 33 bp, Homo sapien
cagctaaagcactatgcacagggaaattgtgga

SEQ ID NO: 269768 - DNA, 33 bp, Homo sapien
cagctaaagcactatggacagggaaattgtgga

SEQ ID NO: 269769 - DNA, 33 bp, Homo sapien
agagtatccacgctgtaaaacctgcccagcttt

SEQ ID NO: 269770 - DNA, 33 bp, Homo sapien
agagtatccacgctgtgaaacctgcccagcttt

SEQ ID NO: 269771 - DNA, 33 bp, Homo sapien
tgtatcctctaaccaacgctgacttttggtgtg

SEQ ID NO: 269772 - DNA, 33 bp, Homo sapien
tgtatcctctaaccaatgctgacttttggtgtg

SEQ ID NO: 269773 - DNA, 33 bp, Homo sapien
ggattaaacggcttcccactcccaagcacgaca

SEQ ID NO: 269774 - DNA, 33 bp, Homo sapien
ggattaaacggcttcctactcccaagcacgaca

SEQ ID NO: 269775 - DNA, 33 bp, Homo sapien
acacatgcacaatctccctgtcatcaacgttcc

SEQ ID NO: 269776 - DNA, 33 bp, Homo sapien
acacatgcacaatctctctgtcatcaacgttcc

SEQ ID NO: 269777 - DNA, 33 bp, Homo sapien
atctgtgaacctatcccgacacatcaatgtcac

SEQ ID NO: 269778 - DNA, 33 bp, Homo sapien
atctgtgaacctatccggacacatcaatgtcac

SEQ ID NO: 269779 - DNA, 33 bp, Homo sapien
tttgaggtcccgtgcagatgggtggcacatggg

SEQ ID NO: 269780 - DNA, 33 bp, Homo sapien
tttgaggtcccgtgcatatgggtggcacatggg

SEQ ID NO: 269781 - DNA, 33 bp, Homo sapien
gcgcctccagagacaacgaatggacaaacagca

SEQ ID NO: 269782 - DNA, 33 bp, Homo sapien
gcgcctccagagacaatgaatggacaaacagca

SEQ ID NO: 269783 - DNA, 33 bp, Homo sapien
cgtgaccttgctctgacacttaggtttatggta

SEQ ID NO: 269784 - DNA, 33 bp, Homo sapien
cgtgaccttgctctgatacttaggtttatggta

SEQ ID NO: 269785 - DNA, 33 bp, Homo sapien
ccaagaccaccagtgagacattagtccaagtat

SEQ ID NO: 269786 - DNA, 33 bp, Homo sapien
ccaagaccaccagtgatacattagtccaagtat

SEQ ID NO: 269787 - DNA, 33 bp, Homo sapien
agatgaagcagctgcaagtgttactacttgaga

SEQ ID NO: 269788 - DNA, 33 bp, Homo sapien
agatgaagcagctgcaggtgttactacttgaga

SEQ ID NO: 269789 - DNA, 33 bp, Homo sapien
aatttattaacatgtacgtggaagcctccagag

SEQ ID NO: 269790 - DNA, 33 bp, Homo sapien
aatttattaacatgtatgtggaagcctccagag

SEQ ID NO: 269791 - DNA, 33 bp, Homo sapien
catgtcctgagcacaccaaggtctcctacagtg

SEQ ID NO: 269792 - DNA, 33 bp, Homo sapien
catgtcctgagcacacgaaggtctcctacagtg

SEQ ID NO: 269793 - DNA, 33 bp, Homo sapien
aaatacctacacagacaattttggcccagtcca

SEQ ID NO: 269794 - DNA, 33 bp, Homo sapien
aaatacctacacagacgattttggcccagtcca

SEQ ID NO: 269795 - DNA, 33 bp, Homo sapien
cacttgaagtgggacccgactcagtacctaact

SEQ ID NO: 269796 - DNA, 33 bp, Homo sapien
cacttgaagtgggacctgactcagtacctaact

SEQ ID NO: 269797 - DNA, 33 bp, Homo sapien
gtgatgaagtcctggccaaaaaaaatcactttg

SEQ ID NO: 269798 - DNA, 33 bp, Homo sapien
gtgatgaagtcctggctaaaaaaaatcactttg

SEQ ID NO: 269799 - DNA, 33 bp, Homo sapien
ctcggattcaaacgaacatagaatatccactac

SEQ ID NO: 269800 - DNA, 33 bp, Homo sapien
ctcggattcaaacgaagatagaatatccactac

SEQ ID NO: 269801 - DNA, 33 bp, Homo sapien
ctaggatcagccatggcacattttaattacctt

SEQ ID NO: 269802 - DNA, 33 bp, Homo sapien
ctaggatcagccatggtacattttaattacctt

SEQ ID NO: 269803 - DNA, 33 bp, Homo sapien
accacctatatcgtaacctccattctagtctaa

SEQ ID NO: 269804 - DNA, 33 bp, Homo sapien
accacctatatcgtaatctccattctagtctaa

SEQ ID NO: 269805 - DNA, 33 bp, Homo sapien
ctgtgagcatacaaaagtcttttatctgtgtct

SEQ ID NO: 269806 - DNA, 33 bp, Homo sapien
ctgtgagcatacaaaattcttttatctgtgtct

SEQ ID NO: 269807 - DNA, 33 bp, Homo sapien
acagaataacttcaccaggaccattaaagtacc

SEQ ID NO: 269808 - DNA, 33 bp, Homo sapien
acagaataacttcaccgggaccattaaagtacc

SEQ ID NO: 269809 - DNA, 33 bp, Homo sapien
tatgtgtgtattatccaactctatctgcatttc

SEQ ID NO: 269810 - DNA, 33 bp, Homo sapien
tatgtgtgtattatccgactctatctgcatttc

SEQ ID NO: 269811 - DNA, 33 bp, Homo sapien
ggatgatttaaggtacacaaggcctgtcgcctt

SEQ ID NO: 269812 - DNA, 33 bp, Homo sapien
ggatgatttaaggtacgcaaggcctgtcgcctt

SEQ ID NO: 269813 - DNA, 33 bp, Homo sapien
cctatgaaggaaaacaccttttagacaccaatc

SEQ ID NO: 269814 - DNA, 33 bp, Homo sapien
cctatgaaggaaaacatcttttagacaccaatc

SEQ ID NO: 269815 - DNA, 33 bp, Homo sapien
cactgcaatagagcaagttaaagtttatataat

SEQ ID NO: 269816 - DNA, 33 bp, Homo sapien
cactgcaatagagcaatttaaagtttatataat

SEQ ID NO: 269817 - DNA, 33 bp, Homo sapien
gactactaggaaatcactgaatattttattact

SEQ ID NO: 269818 - DNA, 33 bp, Homo sapien
gactactaggaaatcagtgaatattttattact

SEQ ID NO: 269819 - DNA, 33 bp, Homo sapien
gaaacagtaaggaagacgaaggactgaacattt

SEQ ID NO: 269820 - DNA, 33 bp, Homo sapien
gaaacagtaaggaagatgaaggactgaacattt

SEQ ID NO: 269821 - DNA, 33 bp, Homo sapien
tgaaatgtgattttcacaaaactagtattttca

SEQ ID NO: 269822 - DNA, 33 bp, Homo sapien
tgaaatgtgattttcataaaactagtattttca

SEQ ID NO: 269823 - DNA, 33 bp, Homo sapien
tgctctgtccgcataacgtctgcacgtgcatcc

SEQ ID NO: 269824 - DNA, 33 bp, Homo sapien
tgctctgtccgcataatgtctgcacgtgcatcc

SEQ ID NO: 269825 - DNA, 33 bp, Homo sapien
ctgctaagtcagatcaaatttgctaacaggaag

SEQ ID NO: 269826 - DNA, 33 bp, Homo sapien
ctgctaagtcagatcagatttgctaacaggaag

SEQ ID NO: 269827 - DNA, 33 bp, Homo sapien
acacacacacacatcagagggtgtcattgctga

SEQ ID NO: 269828 - DNA, 33 bp, Homo sapien
acacacacacacatcatagggtgtcattgctga

SEQ ID NO: 269829 - DNA, 33 bp, Homo sapien
ttctaggcattggcgaatcagcaaagaacaaaa

SEQ ID NO: 269830 - DNA, 33 bp, Homo sapien
ttctaggcattggcgattcagcaaagaacaaaa

SEQ ID NO: 269831 - DNA, 33 bp, Homo sapien
aggatgttatgttggcactccttctatcctagt

SEQ ID NO: 269832 - DNA, 33 bp, Homo sapien
aggatgttatgttggcgctccttctatcctagt

SEQ ID NO: 269833 - DNA, 33 bp, Homo sapien
cactctcagtctgacgccggagactgggaacct

SEQ ID NO: 269834 - DNA, 33 bp, Homo sapien
cactctcagtctgacggcggagactgggaacct

SEQ ID NO: 269835 - DNA, 33 bp, Homo sapien
aaatgcacagcattccaacatctttctctgaaa

SEQ ID NO: 269836 - DNA, 33 bp, Homo sapien
aaatgcacagcattccgacatctttctctgaaa

SEQ ID NO: 269837 - DNA, 33 bp, Homo sapien
gcatgaattctaagacaatcctgcaaatattcc

SEQ ID NO: 269838 - DNA, 33 bp, Homo sapien
gcatgaattctaagacgatcctgcaaatattcc

SEQ ID NO: 269839 - DNA, 33 bp, Homo sapien
cccctacactaactcccagggctgtgtagcaag

SEQ ID NO: 269840 - DNA, 33 bp, Homo sapien
cccctacactaactcctagggctgtgtagcaag

SEQ ID NO: 269841 - DNA, 33 bp, Homo sapien
ggtcctgcctcccaaaggtacttcaggccagtc

SEQ ID NO: 269842 - DNA, 33 bp, Homo sapien
ggtcctgcctcccaaatgtacttcaggccagtc

SEQ ID NO: 269843 - DNA, 33 bp, Homo sapien
ccaatgtgactgagtacgccatatttttatcct

SEQ ID NO: 269844 - DNA, 33 bp, Homo sapien
ccaatgtgactgagtatgccatatttttatcct

SEQ ID NO: 269845 - DNA, 33 bp, Homo sapien
catagcttgctgcctacgtaacttatgcagaag

SEQ ID NO: 269846 - DNA, 33 bp, Homo sapien
catagcttgctgcctatgtaacttatgcagaag

SEQ ID NO: 269847 - DNA, 33 bp, Homo sapien
aaggagcatacagaaaacttcccatgatggggc

SEQ ID NO: 269848 - DNA, 33 bp, Homo sapien
aaggagcatacagaaagcttcccatgatggggc

SEQ ID NO: 269849 - DNA, 33 bp, Homo sapien
ataccaattccttgacaactttgttgcagttga

SEQ ID NO: 269850 - DNA, 33 bp, Homo sapien
ataccaattccttgactactttgttgcagttga

SEQ ID NO: 269851 - DNA, 33 bp, Homo sapien
attcacgtagtgcttaaaatgctgcttctacca

SEQ ID NO: 269852 - DNA, 33 bp, Homo sapien
attcacgtagtgcttagaatgctgcttctacca

SEQ ID NO: 269853 - DNA, 33 bp, Homo sapien
cccacctcttaacaccaacacattagagattaa

SEQ ID NO: 269854 - DNA, 33 bp, Homo sapien
cccacctcttaacacctacacattagagattaa

SEQ ID NO: 269855 - DNA, 33 bp, Homo sapien
ttcaggtttcccaccacgaaatgtgaagcgagc

SEQ ID NO: 269856 - DNA, 33 bp, Homo sapien
ttcaggtttcccaccatgaaatgtgaagcgagc

SEQ ID NO: 269857 - DNA, 33 bp, Homo sapien
caacctggtattcaaacagagaaaaggcagaga

SEQ ID NO: 269858 - DNA, 33 bp, Homo sapien
caacctggtattcaaatagagaaaaggcagaga

SEQ ID NO: 269859 - DNA, 33 bp, Homo sapien
gtctattcagtagacacaatgtgtagacaacct

SEQ ID NO: 269860 - DNA, 33 bp, Homo sapien
gtctattcagtagacataatgtgtagacaacct

SEQ ID NO: 269861 - DNA, 33 bp, Homo sapien
caatgctacactacacaggcacaaatttatata

SEQ ID NO: 269862 - DNA, 33 bp, Homo sapien
caatgctacactacacgggcacaaatttatata

SEQ ID NO: 269863 - DNA, 33 bp, Homo sapien
attggtttaaaatgcaaattccagcgccccctt

SEQ ID NO: 269864 - DNA, 33 bp, Homo sapien
attggtttaaaatgcagattccagcgccccctt

SEQ ID NO: 269865 - DNA, 33 bp, Homo sapien
acttgttgccaaaaatgaaactgttaggcctaa

SEQ ID NO: 269866 - DNA, 33 bp, Homo sapien
acttgttgccaaaaattaaactgttaggcctaa

SEQ ID NO: 269867 - DNA, 33 bp, Homo sapien
ggaaaagtacaaggaaagaactttgacaagtga

SEQ ID NO: 269868 - DNA, 33 bp, Homo sapien
ggaaaagtacaaggaaggaactttgacaagtga

SEQ ID NO: 269869 - DNA, 33 bp, Homo sapien
agttgtaagaattagaagtagtttatgaagagc

SEQ ID NO: 269870 - DNA, 33 bp, Homo sapien
agttgtaagaattagaggtagtttatgaagagc

SEQ ID NO: 269871 - DNA, 33 bp, Homo sapien
tttttcttattgttgcaaacctaagggatatga

SEQ ID NO: 269872 - DNA, 33 bp, Homo sapien
tttttcttattgttgcgaacctaagggatatga

SEQ ID NO: 269873 - DNA, 33 bp, Homo sapien
ggaggtgaaccaatctcaatgatgcttttccag

SEQ ID NO: 269874 - DNA, 33 bp, Homo sapien
ggaggtgaaccaatctgaatgatgcttttccag

SEQ ID NO: 269875 - DNA, 33 bp, Homo sapien
ccagtgatggatacaccctagccctctgtgtga

SEQ ID NO: 269876 - DNA, 33 bp, Homo sapien
ccagtgatggatacactctagccctctgtgtga

SEQ ID NO: 269877 - DNA, 33 bp, Homo sapien
tgcctttcccaatccaatcagctgtggtgggct

SEQ ID NO: 269878 - DNA, 33 bp, Homo sapien
tgcctttcccaatccagtcagctgtggtgggct

SEQ ID NO: 269879 - DNA, 33 bp, Homo sapien
tacttgacatttactaagggctcaaataaatag

SEQ ID NO: 269880 - DNA, 33 bp, Homo sapien
tacttgacatttactacgggctcaaataaatag

SEQ ID NO: 269881 - DNA, 33 bp, Homo sapien
gaatgcagaaccctcacgttttcttaaattctc

SEQ ID NO: 269882 - DNA, 33 bp, Homo sapien
gaatgcagaaccctcatgttttcttaaattctc

SEQ ID NO: 269883 - DNA, 33 bp, Homo sapien
aatcttgatcagaatgaacattaatgttgcctg

SEQ ID NO: 269884 - DNA, 33 bp, Homo sapien
aatcttgatcagaatgtacattaatgttgcctg

SEQ ID NO: 269885 - DNA, 33 bp, Homo sapien
atgttaaaatgtctccactctaatgtattttgc

SEQ ID NO: 269886 - DNA, 33 bp, Homo sapien
atgttaaaatgtctccgctctaatgtattttgc

SEQ ID NO: 269887 - DNA, 33 bp, Homo sapien
ttagtatggtatatcacaaggagtagttcagtt

SEQ ID NO: 269888 - DNA, 33 bp, Homo sapien
ttagtatggtatatcataaggagtagttcagtt

SEQ ID NO: 269889 - DNA, 33 bp, Homo sapien
actcagaattgtagaacaaagagtgttgtggtt

SEQ ID NO: 269890 - DNA, 33 bp, Homo sapien
actcagaattgtagaataaagagtgttgtggtt

SEQ ID NO: 269891 - DNA, 33 bp, Homo sapien
cctgcagccaaagtaaagagtttggatggtatt

SEQ ID NO: 269892 - DNA, 33 bp, Homo sapien
cctgcagccaaagtaaggagtttggatggtatt

SEQ ID NO: 269893 - DNA, 33 bp, Homo sapien
tcatggtggtggtagtaaataataatgataaaa

SEQ ID NO: 269894 - DNA, 33 bp, Homo sapien
tcatggtggtggtagtgaataataatgataaaa

SEQ ID NO: 269895 - DNA, 33 bp, Homo sapien
gaggcctgtccccacaaaaagatttcataggta

SEQ ID NO: 269896 - DNA, 33 bp, Homo sapien
gaggcctgtccccacagaaagatttcataggta

SEQ ID NO: 269897 - DNA, 33 bp, Homo sapien
aacttaatgctaaggaccagttatgttttactg

SEQ ID NO: 269898 - DNA, 33 bp, Homo sapien
aacttaatgctaaggagcagttatgttttactg

SEQ ID NO: 269899 - DNA, 33 bp, Homo sapien
tatcatagaacaattaccttaatcataggaaag

SEQ ID NO: 269900 - DNA, 33 bp, Homo sapien
tatcatagaacaattatcttaatcataggaaag

SEQ ID NO: 269901 - DNA, 33 bp, Homo sapien
ataatctggtggaaaacgaacaccttagttcta

SEQ ID NO: 269902 - DNA, 33 bp, Homo sapien
ataatctggtggaaaatgaacaccttagttcta

SEQ ID NO: 269903 - DNA, 33 bp, Homo sapien
atctctatggattcaactcactatcagtattta

SEQ ID NO: 269904 - DNA, 33 bp, Homo sapien
atctctatggattcaattcactatcagtattta

SEQ ID NO: 269905 - DNA, 33 bp, Homo sapien
aatgctgcttattagagacatcgctgatcctcc

SEQ ID NO: 269906 - DNA, 33 bp, Homo sapien
aatgctgcttattagatacatcgctgatcctcc

SEQ ID NO: 269907 - DNA, 33 bp, Homo sapien
gggatagccaagcctcacattcatttaaaaggc

SEQ ID NO: 269908 - DNA, 33 bp, Homo sapien
gggatagccaagcctcgcattcatttaaaaggc

SEQ ID NO: 269909 - DNA, 33 bp, Homo sapien
caggcaaaacccatcaagaattattccctgcct

SEQ ID NO: 269910 - DNA, 33 bp, Homo sapien
caggcaaaacccatcacgaattattccctgcct

SEQ ID NO: 269911 - DNA, 33 bp, Homo sapien
cgcagagccatactcagccagttaggtgtcaaa

SEQ ID NO: 269912 - DNA, 33 bp, Homo sapien
cgcagagccatactcatccagttaggtgtcaaa

SEQ ID NO: 269913 - DNA, 33 bp, Homo sapien
gtttcaacacctaaaagtgtcagcaagcctctg

SEQ ID NO: 269914 - DNA, 33 bp, Homo sapien
gtttcaacacctaaaattgtcagcaagcctctg

SEQ ID NO: 269915 - DNA, 33 bp, Homo sapien
tgaaacccaacagtagaaaatggaattatagag

SEQ ID NO: 269916 - DNA, 33 bp, Homo sapien
tgaaacccaacagtaggaaatggaattatagag

SEQ ID NO: 269917 - DNA, 33 bp, Homo sapien
ttatatagatttgttacgtctaaattggactac

SEQ ID NO: 269918 - DNA, 33 bp, Homo sapien
ttatatagatttgttatgtctaaattggactac

SEQ ID NO: 269919 - DNA, 33 bp, Homo sapien
ctgctccaatcctaaactgatagtgtaggcagt

SEQ ID NO: 269920 - DNA, 33 bp, Homo sapien
ctgctccaatcctaaattgatagtgtaggcagt

SEQ ID NO: 269921 - DNA, 33 bp, Homo sapien
caaattctcattcaaaagtgaaatgatcttcag

SEQ ID NO: 269922 - DNA, 33 bp, Homo sapien
caaattctcattcaaaggtgaaatgatcttcag

SEQ ID NO: 269923 - DNA, 33 bp, Homo sapien
ttgtttttttctactcccatcttccaattgtac

SEQ ID NO: 269924 - DNA, 33 bp, Homo sapien
ttgtttttttctactcgcatcttccaattgtac

SEQ ID NO: 269925 - DNA, 33 bp, Homo sapien
cgattcctatctcttaacccagaaaagactgat

SEQ ID NO: 269926 - DNA, 33 bp, Homo sapien
cgattcctatctcttagcccagaaaagactgat

SEQ ID NO: 269927 - DNA, 33 bp, Homo sapien
actaattcaagtttccatttgtattctggtaga

SEQ ID NO: 269928 - DNA, 33 bp, Homo sapien
actaattcaagtttccgtttgtattctggtaga

SEQ ID NO: 269929 - DNA, 33 bp, Homo sapien
tgactaatagccgtataaaggagttgggcataa

SEQ ID NO: 269930 - DNA, 33 bp, Homo sapien
tgactaatagccgtatgaaggagttgggcataa

SEQ ID NO: 269931 - DNA, 33 bp, Homo sapien
aagatgacaatcctgccattctttctaatttaa

SEQ ID NO: 269932 - DNA, 33 bp, Homo sapien
aagatgacaatcctgctattctttctaatttaa

SEQ ID NO: 269933 - DNA, 33 bp, Homo sapien
gattttagccgtatcaaacttatataactgttt

SEQ ID NO: 269934 - DNA, 33 bp, Homo sapien
gattttagccgtatcagacttatataactgttt

SEQ ID NO: 269935 - DNA, 33 bp, Homo sapien
cttgaattctgctttacgtggtactaatattac

SEQ ID NO: 269936 - DNA, 33 bp, Homo sapien
cttgaattctgctttatgtggtactaatattac

SEQ ID NO: 269937 - DNA, 33 bp, Homo sapien
ctagtagaagcaaacaagttagatcatatttta

SEQ ID NO: 269938 - DNA, 33 bp, Homo sapien
ctagtagaagcaaacaggttagatcatatttta

SEQ ID NO: 269939 - DNA, 33 bp, Homo sapien
tagttttaccccaatacactgtgccattggtga

SEQ ID NO: 269940 - DNA, 33 bp, Homo sapien
tagttttaccccaatatactgtgccattggtga

SEQ ID NO: 269941 - DNA, 33 bp, Homo sapien
aagtgttagcttctccagagttaaagtcattac

SEQ ID NO: 269942 - DNA, 33 bp, Homo sapien
aagtgttagcttctccggagttaaagtcattac

SEQ ID NO: 269943 - DNA, 33 bp, Homo sapien
tactggtgggggaaaaaaattggtactgcgaaa

SEQ ID NO: 269944 - DNA, 33 bp, Homo sapien
tactggtgggggaaaacaattggtactgcgaaa

SEQ ID NO: 269945 - DNA, 33 bp, Homo sapien
agtggttgaatttgtccagggagaatgtgaaga

SEQ ID NO: 269946 - DNA, 33 bp, Homo sapien
agtggttgaatttgtctagggagaatgtgaaga

SEQ ID NO: 269947 - DNA, 33 bp, Homo sapien
cctcatgctattaaccgagaagctctgtttaag

SEQ ID NO: 269948 - DNA, 33 bp, Homo sapien
cctcatgctattaacctagaagctctgtttaag

SEQ ID NO: 269949 - DNA, 33 bp, Homo sapien
ttatgtttccttctgacgttcctgctaatctta

SEQ ID NO: 269950 - DNA, 33 bp, Homo sapien
ttatgtttccttctgatgttcctgctaatctta

SEQ ID NO: 269951 - DNA, 33 bp, Homo sapien
aggacagcaatcaatgaaaaccttctcctgtag

SEQ ID NO: 269952 - DNA, 33 bp, Homo sapien
aggacagcaatcaatgcaaaccttctcctgtag

SEQ ID NO: 269953 - DNA, 33 bp, Homo sapien
aagtgaatttccatgaagttttgtttttaatga

SEQ ID NO: 269954 - DNA, 33 bp, Homo sapien
aagtgaatttccatgaggttttgtttttaatga

SEQ ID NO: 269955 - DNA, 33 bp, Homo sapien
caccacctctcagtctaaactttccagaggcaa

SEQ ID NO: 269956 - DNA, 33 bp, Homo sapien
caccacctctcagtcttaactttccagaggcaa

SEQ ID NO: 269957 - DNA, 33 bp, Homo sapien
acgtttctgaacatcaatcgtggcaaagaattt

SEQ ID NO: 269958 - DNA, 33 bp, Homo sapien
acgtttctgaacatcagtcgtggcaaagaattt

SEQ ID NO: 269959 - DNA, 33 bp, Homo sapien
ggaaacctaagagaccaatagctctgttttaag

SEQ ID NO: 269960 - DNA, 33 bp, Homo sapien
ggaaacctaagagaccgatagctctgttttaag

SEQ ID NO: 269961 - DNA, 33 bp, Homo sapien
ggagttatccttctccagaaaacaactagccta

SEQ ID NO: 269962 - DNA, 33 bp, Homo sapien
ggagttatccttctccggaaaacaactagccta

SEQ ID NO: 269963 - DNA, 33 bp, Homo sapien
tttgagattctgattgcggttcttttgaataaa

SEQ ID NO: 269964 - DNA, 33 bp, Homo sapien
tttgagattctgattgtggttcttttgaataaa

SEQ ID NO: 269965 - DNA, 33 bp, Homo sapien
gtggtggaaattctgactagagggataaaaaat

SEQ ID NO: 269966 - DNA, 33 bp, Homo sapien
gtggtggaaattctgattagagggataaaaaat

SEQ ID NO: 269967 - DNA, 33 bp, Homo sapien
aaaggaactattcttcactacacgagcactaaa

SEQ ID NO: 269968 - DNA, 33 bp, Homo sapien
aaaggaactattcttcgctacacgagcactaaa

SEQ ID NO: 269969 - DNA, 33 bp, Homo sapien
ttgacccacccctggacgatgcaaaacccacac

SEQ ID NO: 269970 - DNA, 33 bp, Homo sapien
ttgacccacccctggatgatgcaaaacccacac

SEQ ID NO: 269971 - DNA, 33 bp, Homo sapien
taagtgttaggacaggaaacctgctgtgggtcc

SEQ ID NO: 269972 - DNA, 33 bp, Homo sapien
taagtgttaggacagggaacctgctgtgggtcc

SEQ ID NO: 269973 - DNA, 33 bp, Homo sapien
aatatcacttggctaacgtttttctagacctgc

SEQ ID NO: 269974 - DNA, 33 bp, Homo sapien
aatatcacttggctaatgtttttctagacctgc

SEQ ID NO: 269975 - DNA, 33 bp, Homo sapien
atgtgcagtgttataactcaacaatgtattata

SEQ ID NO: 269976 - DNA, 33 bp, Homo sapien
atgtgcagtgttataagtcaacaatgtattata

SEQ ID NO: 269977 - DNA, 33 bp, Homo sapien
cagtggtcagtgcttacgatggctggttttatg

SEQ ID NO: 269978 - DNA, 33 bp, Homo sapien
cagtggtcagtgcttatgatggctggttttatg

SEQ ID NO: 269979 - DNA, 33 bp, Homo sapien
aataccaactagacttcaaagcctgaattacat

SEQ ID NO: 269980 - DNA, 33 bp, Homo sapien
aataccaactagactttaaagcctgaattacat

SEQ ID NO: 269981 - DNA, 33 bp, Homo sapien
aatgagtgctccaaaccactgcgtttgttctca

SEQ ID NO: 269982 - DNA, 33 bp, Homo sapien
aatgagtgctccaaactactgcgtttgttctca

SEQ ID NO: 269983 - DNA, 33 bp, Homo sapien
ggcttagtgcagaatacaagcaggagaaatccc

SEQ ID NO: 269984 - DNA, 33 bp, Homo sapien
ggcttagtgcagaatataagcaggagaaatccc

SEQ ID NO: 269985 - DNA, 33 bp, Homo sapien
gaggttcttgttgttccaatatcctctttggtt

SEQ ID NO: 269986 - DNA, 33 bp, Homo sapien
gaggttcttgttgttctaatatcctctttggtt

SEQ ID NO: 269987 - DNA, 33 bp, Homo sapien
attataattactaagggatcctcattgcctcca

SEQ ID NO: 269988 - DNA, 33 bp, Homo sapien
attataattactaaggtatcctcattgcctcca

SEQ ID NO: 269989 - DNA, 33 bp, Homo sapien
ctaaaactaagtgacaacctgagtaaactatct

SEQ ID NO: 269990 - DNA, 33 bp, Homo sapien
ctaaaactaagtgacaccctgagtaaactatct

SEQ ID NO: 269991 - DNA, 33 bp, Homo sapien
atgcagaatgggaacactgcaaggttggcctca

SEQ ID NO: 269992 - DNA, 33 bp, Homo sapien
atgcagaatgggaacattgcaaggttggcctca

SEQ ID NO: 269993 - DNA, 33 bp, Homo sapien
accaaagcatacacgcgcctaatgtctgtccta

SEQ ID NO: 269994 - DNA, 33 bp, Homo sapien
accaaagcatacacgctcctaatgtctgtccta

SEQ ID NO: 269995 - DNA, 33 bp, Homo sapien
tctggaaattctagtccacaggttaaccactgt

SEQ ID NO: 269996 - DNA, 33 bp, Homo sapien
tctggaaattctagtctacaggttaaccactgt

SEQ ID NO: 269997 - DNA, 33 bp, Homo sapien
gagaaacacctagatgacaactgggtggcaagt

SEQ ID NO: 269998 - DNA, 33 bp, Homo sapien
gagaaacacctagatggcaactgggtggcaagt

SEQ ID NO: 269999 - DNA, 33 bp, Homo sapien
ctaactgtttttcctaaagaccctgagcctcct

SEQ ID NO: 270000 - DNA, 33 bp, Homo sapien
ctaactgtttttcctacagaccctgagcctcct

SEQ ID NO: 270001 - DNA, 33 bp, Homo sapien
ttttcattaagtagcactactatcatcttgata

SEQ ID NO: 270002 - DNA, 33 bp, Homo sapien
ttttcattaagtagcattactatcatcttgata

SEQ ID NO: 270003 - DNA, 33 bp, Homo sapien
tggtttggtacagtcacaggttgaaaatatgag

SEQ ID NO: 270004 - DNA, 33 bp, Homo sapien
tggtttggtacagtcataggttgaaaatatgag

SEQ ID NO: 270005 - DNA, 33 bp, Homo sapien
tcagaagtttgtttagcacatttaattagcatc

SEQ ID NO: 270006 - DNA, 33 bp, Homo sapien
tcagaagtttgtttaggacatttaattagcatc

SEQ ID NO: 270007 - DNA, 33 bp, Homo sapien
accttagttctgttaacccccaacacagcctta

SEQ ID NO: 270008 - DNA, 33 bp, Homo sapien
accttagttctgttaatccccaacacagcctta

SEQ ID NO: 270009 - DNA, 33 bp, Homo sapien
agctgctctaaatcagcaaaagaggaaacatat

SEQ ID NO: 270010 - DNA, 33 bp, Homo sapien
agctgctctaaatcagtaaaagaggaaacatat

SEQ ID NO: 270011 - DNA, 33 bp, Homo sapien
tgtaccccttctgttacgaccaatagcctaatc

SEQ ID NO: 270012 - DNA, 33 bp, Homo sapien
tgtaccccttctgttatgaccaatagcctaatc

SEQ ID NO: 270013 - DNA, 33 bp, Homo sapien
aaacccataacttgcacggaagaaaataaattg

SEQ ID NO: 270014 - DNA, 33 bp, Homo sapien
aaacccataacttgcatggaagaaaataaattg

SEQ ID NO: 270015 - DNA, 33 bp, Homo sapien
aaagtcagatggttctaaaaggtcaatagtgaa

SEQ ID NO: 270016 - DNA, 33 bp, Homo sapien
aaagtcagatggttctgaaaggtcaatagtgaa

SEQ ID NO: 270017 - DNA, 33 bp, Homo sapien
tggtacttaagaatccagaagcacaagaacaaa

SEQ ID NO: 270018 - DNA, 33 bp, Homo sapien
tggtacttaagaatccggaagcacaagaacaaa

SEQ ID NO: 270019 - DNA, 33 bp, Homo sapien
tatagaattgtggggaatagtgaaataatggat

SEQ ID NO: 270020 - DNA, 33 bp, Homo sapien
tatagaattgtggggagtagtgaaataatggat

SEQ ID NO: 270021 - DNA, 33 bp, Homo sapien
aattgtgtgaagatgcagaatagcagtgcaaac

SEQ ID NO: 270022 - DNA, 33 bp, Homo sapien
aattgtgtgaagatgcggaatagcagtgcaaac

SEQ ID NO: 270023 - DNA, 33 bp, Homo sapien
ttaacatttactatcaacttactctcactccat

SEQ ID NO: 270024 - DNA, 33 bp, Homo sapien
ttaacatttactatcagcttactctcactccat

SEQ ID NO: 270025 - DNA, 33 bp, Homo sapien
aaatactgctcttattaaaaatgaaatgaaaag

SEQ ID NO: 270026 - DNA, 33 bp, Homo sapien
aaatactgctcttattgaaaatgaaatgaaaag

SEQ ID NO: 270027 - DNA, 33 bp, Homo sapien
agtaccatcaaaatgaccataagctaacttcat

SEQ ID NO: 270028 - DNA, 33 bp, Homo sapien
agtaccatcaaaatgatcataagctaacttcat

SEQ ID NO: 270029 - DNA, 33 bp, Homo sapien
ttaaggatttagtataagaaagttcacttcctt

SEQ ID NO: 270030 - DNA, 33 bp, Homo sapien
ttaaggatttagtataggaaagttcacttcctt

SEQ ID NO: 270031 - DNA, 33 bp, Homo sapien
aatcataaatgtttgggacatagagtaacactt

SEQ ID NO: 270032 - DNA, 33 bp, Homo sapien
aatcataaatgtttggtacatagagtaacactt

SEQ ID NO: 270033 - DNA, 33 bp, Homo sapien
ctacttttctcctacacacataaatgacatgaa

SEQ ID NO: 270034 - DNA, 33 bp, Homo sapien
ctacttttctcctacatacataaatgacatgaa

SEQ ID NO: 270035 - DNA, 33 bp, Homo sapien
atgtgtgtcttctatgaatcaagtgtgtactta

SEQ ID NO: 270036 - DNA, 33 bp, Homo sapien
atgtgtgtcttctatgtatcaagtgtgtactta

SEQ ID NO: 270037 - DNA, 33 bp, Homo sapien
gtctcaaaagctgtcactccttcaggtacctga

SEQ ID NO: 270038 - DNA, 33 bp, Homo sapien
gtctcaaaagctgtcattccttcaggtacctga

SEQ ID NO: 270039 - DNA, 33 bp, Homo sapien
acctcggctccctccacattaggttagagaatt

SEQ ID NO: 270040 - DNA, 33 bp, Homo sapien
acctcggctccctccatattaggttagagaatt

SEQ ID NO: 270041 - DNA, 33 bp, Homo sapien
tttgataagaatatcacggaatctgtaaattgc

SEQ ID NO: 270042 - DNA, 33 bp, Homo sapien
tttgataagaatatcatggaatctgtaaattgc

SEQ ID NO: 270043 - DNA, 33 bp, Homo sapien; identical to SEQ ID NO: 270041

SEQ ID NO: 270044 - DNA, 33 bp, Homo sapien; identical to SEQ ID NO: 270042

SEQ ID NO: 270045 - DNA, 33 bp, Homo sapien
acatccatgcacatgaacacttttctaataatt

SEQ ID NO: 270046 - DNA, 33 bp, Homo sapien
acatccatgcacatgatcacttttctaataatt

SEQ ID NO: 270047 - DNA, 33 bp, Homo sapien
atcatcatattgggtagtaagatttaacatatg

SEQ ID NO: 270048 - DNA, 33 bp, Homo sapien
atcatcatattgggtattaagatttaacatatg

SEQ ID NO: 270049 - DNA, 33 bp, Homo sapien
tgggaggagagcgctacggatacatactttgtc

SEQ ID NO: 270050 - DNA, 33 bp, Homo sapien
tgggaggagagcgctatggatacatactttgtc

SEQ ID NO: 270051 - DNA, 33 bp, Homo sapien
tatttgctaaattcagcccaagtattcagctat

SEQ ID NO: 270052 - DNA, 33 bp, Homo sapien
tatttgctaaattcagtccaagtattcagctat

SEQ ID NO: 270053 - DNA, 33 bp, Homo sapien
ctgtttgtgggaaatacgctcaacctcctcaaa

SEQ ID NO: 270054 - DNA, 33 bp, Homo sapien
ctgtttgtgggaaatatgctcaacctcctcaaa

SEQ ID NO: 270055 - DNA, 33 bp, Homo sapien
tgtatctgtcctttgccaaaaataaatcagagt

SEQ ID NO: 270056 - DNA, 33 bp, Homo sapien
tgtatctgtcctttgctaaaaataaatcagagt

SEQ ID NO: 270057 - DNA, 33 bp, Homo sapien
cctctaggagttctagcatcttgaatctaaaga

SEQ ID NO: 270058 - DNA, 33 bp, Homo sapien
cctctaggagttctaggatcttgaatctaaaga

SEQ ID NO: 270059 - DNA, 33 bp, Homo sapien
aagttgcactataagcccgttagtgtcaagaag

SEQ ID NO: 270060 - DNA, 33 bp, Homo sapien
aagttgcactataagctcgttagtgtcaagaag

SEQ ID NO: 270061 - DNA, 33 bp, Homo sapien
ttggttccctgagaccaaatccccacgaggcat

SEQ ID NO: 270062 - DNA, 33 bp, Homo sapien
ttggttccctgagaccgaatccccacgaggcat

SEQ ID NO: 270063 - DNA, 33 bp, Homo sapien
agtgtttcagcatgcactacagtggagtaggcc

SEQ ID NO: 270064 - DNA, 33 bp, Homo sapien
agtgtttcagcatgcattacagtggagtaggcc

SEQ ID NO: 270065 - DNA, 33 bp, Homo sapien
agaaatggaactggtaaaaggagttgcaggaca

SEQ ID NO: 270066 - DNA, 33 bp, Homo sapien
agaaatggaactggtagaaggagttgcaggaca

SEQ ID NO: 270067 - DNA, 33 bp, Homo sapien
agggaggtgtcagggacgactgtaaggtgtttg

SEQ ID NO: 270068 - DNA, 33 bp, Homo sapien
agggaggtgtcagggatgactgtaaggtgtttg

SEQ ID NO: 270069 - DNA, 33 bp, Homo sapien
cacatcacctagtaaactgtttatcctttaaag

SEQ ID NO: 270070 - DNA, 33 bp, Homo sapien
cacatcacctagtaaattgtttatcctttaaag

SEQ ID NO: 270071 - DNA, 33 bp, Homo sapien
aaacttgtgttggggcaagaaagaagtctagag

SEQ ID NO: 270072 - DNA, 33 bp, Homo sapien
aaacttgtgttggggccagaaagaagtctagag

SEQ ID NO: 270073 - DNA, 33 bp, Homo sapien
tttttgttttggctgaaatgtgcaaggtgacca

SEQ ID NO: 270074 - DNA, 33 bp, Homo sapien
tttttgttttggctgacatgtgcaaggtgacca

SEQ ID NO: 270075 - DNA, 33 bp, Homo sapien
tttattttctgtaaagactccctattcctctta

SEQ ID NO: 270076 - DNA, 33 bp, Homo sapien
tttattttctgtaaagtctccctattcctctta

SEQ ID NO: 270077 - DNA, 33 bp, Homo sapien
ttctttagattccacgcatgagaaattgtggca

SEQ ID NO: 270078 - DNA, 33 bp, Homo sapien
ttctttagattccacgtatgagaaattgtggca

SEQ ID NO: 270079 - DNA, 33 bp, Homo sapien
gtaaataattcacaaaacaatttccaggaggcc

SEQ ID NO: 270080 - DNA, 33 bp, Homo sapien
gtaaataattcacaaagcaatttccaggaggcc

SEQ ID NO: 270081 - DNA, 33 bp, Homo sapien
ggccatgatactgcaaaaaagaaatcaataaag

SEQ ID NO: 270082 - DNA, 33 bp, Homo sapien
ggccatgatactgcaacaaagaaatcaataaag

SEQ ID NO: 270083 - DNA, 33 bp, Homo sapien
ctactgagcctaccttaaagctataacattgaa

SEQ ID NO: 270084 - DNA, 33 bp, Homo sapien
ctactgagcctaccttgaagctataacattgaa

SEQ ID NO: 270085 - DNA, 33 bp, Homo sapien
cctaactggataagtaccgaagacaattttaag

SEQ ID NO: 270086 - DNA, 33 bp, Homo sapien
cctaactggataagtatcgaagacaattttaag

SEQ ID NO: 270087 - DNA, 33 bp, Homo sapien
aaacaatgaccaactacgtcagagcatccccaa

SEQ ID NO: 270088 - DNA, 33 bp, Homo sapien
aaacaatgaccaactatgtcagagcatccccaa

SEQ ID NO: 270089 - DNA, 33 bp, Homo sapien
cacagagaaatcaagcaatctgattatttcatt

SEQ ID NO: 270090 - DNA, 33 bp, Homo sapien
cacagagaaatcaagcgatctgattatttcatt

SEQ ID NO: 270091 - DNA, 33 bp, Homo sapien
aaatggattttaaaaaatacttgtcctatgaag

SEQ ID NO: 270092 - DNA, 33 bp, Homo sapien
aaatggattttaaaaattacttgtcctatgaag

SEQ ID NO: 270093 - DNA, 33 bp, Homo sapien
agagaccagtaggaaaataacttaggagactca

SEQ ID NO: 270094 - DNA, 33 bp, Homo sapien
agagaccagtaggaaagtaacttaggagactca

SEQ ID NO: 270095 - DNA, 33 bp, Homo sapien
aggcaggattctaaggaatgtttcccatgtacc

SEQ ID NO: 270096 - DNA, 33 bp, Homo sapien
aggcaggattctaaggtatgtttcccatgtacc

SEQ ID NO: 270097 - DNA, 33 bp, Homo sapien
ttagtggcctgaaacccagatttttcatctcct

SEQ ID NO: 270098 - DNA, 33 bp, Homo sapien
ttagtggcctgaaacctagatttttcatctcct

SEQ ID NO: 270099 - DNA, 33 bp, Homo sapien
cctgagaatttgaaccgggaaataaattataaa

SEQ ID NO: 270100 - DNA, 33 bp, Homo sapien
cctgagaatttgaacctggaaataaattataaa

SEQ ID NO: 270101 - DNA, 33 bp, Homo sapien
taaggcatcctttataataactctgaaattcac

SEQ ID NO: 270102 - DNA, 33 bp, Homo sapien
taaggcatcctttatagtaactctgaaattcac

SEQ ID NO: 270103 - DNA, 33 bp, Homo sapien
tggccacacccaagagaaatacctcaagaccaa

SEQ ID NO: 270104 - DNA, 33 bp, Homo sapien
tggccacacccaagaggaatacctcaagaccaa

SEQ ID NO: 270105 - DNA, 33 bp, Homo sapien
tagtagaggggacaaaattatttcatacaactg

SEQ ID NO: 270106 - DNA, 33 bp, Homo sapien
tagtagaggggacaaagttatttcatacaactg

SEQ ID NO: 270107 - DNA, 33 bp, Homo sapien
tggagggataaaagcaagatgggctcaggcaga

SEQ ID NO: 270108 - DNA, 33 bp, Homo sapien
tggagggataaaagcacgatgggctcaggcaga

SEQ ID NO: 270109 - DNA, 33 bp, Homo sapien
agactaaagatagatgacatagaaatcaaactt

SEQ ID NO: 270110 - DNA, 33 bp, Homo sapien
agactaaagatagatggcatagaaatcaaactt

SEQ ID NO: 270111 - DNA, 33 bp, Homo sapien
aggtaaccttggtcaggctaattaacctgtctg

SEQ ID NO: 270112 - DNA, 33 bp, Homo sapien
aggtaaccttggtcagtctaattaacctgtctg

SEQ ID NO: 270113 - DNA, 33 bp, Homo sapien
gaatgtattccatagcagcaagcatctagggta

SEQ ID NO: 270114 - DNA, 33 bp, Homo sapien
gaatgtattccatagcggcaagcatctagggta

SEQ ID NO: 270115 - DNA, 33 bp, Homo sapien
atattgctacttaacacattcggtcttttcttt

SEQ ID NO: 270116 - DNA, 33 bp, Homo sapien
atattgctacttaacatattcggtcttttcttt

SEQ ID NO: 270117 - DNA, 33 bp, Homo sapien
ggtaagaagatatcagaacaattatgtaaattt

SEQ ID NO: 270118 - DNA, 33 bp, Homo sapien
ggtaagaagatatcaggacaattatgtaaattt

SEQ ID NO: 270119 - DNA, 33 bp, Homo sapien
aagacttgtgaggatacgcctgggcccaattac

SEQ ID NO: 270120 - DNA, 33 bp, Homo sapien
aagacttgtgaggatatgcctgggcccaattac

SEQ ID NO: 270121 - DNA, 33 bp, Homo sapien
tttctcagtgcaaaaacgagagcaattggtcac

SEQ ID NO: 270122 - DNA, 33 bp, Homo sapien
tttctcagtgcaaaaatgagagcaattggtcac

SEQ ID NO: 270123 - DNA, 33 bp, Homo sapien
tcagcctctgaagccacaatactgggcttagtc

SEQ ID NO: 270124 - DNA, 33 bp, Homo sapien
tcagcctctgaagccataatactgggcttagtc

SEQ ID NO: 270125 - DNA, 33 bp, Homo sapien
ctaatgcaacctaagaaactctgagaattaatt

SEQ ID NO: 270126 - DNA, 33 bp, Homo sapien
ctaatgcaacctaagatactctgagaattaatt

SEQ ID NO: 270127 - DNA, 33 bp, Homo sapien
tctgaaaaaggtgacaaattgatctagaatcaa

SEQ ID NO: 270128 - DNA, 33 bp, Homo sapien
tctgaaaaaggtgacacattgatctagaatcaa

SEQ ID NO: 270129 - DNA, 33 bp, Homo sapien
gtaaatagatggtcaaaaagagaatcttgtgta

SEQ ID NO: 270130 - DNA, 33 bp, Homo sapien
gtaaatagatggtcaagaagagaatcttgtgta

SEQ ID NO: 270131 - DNA, 33 bp, Homo sapien
atcttcttcacagagcagaacatattcacacca

SEQ ID NO: 270132 - DNA, 33 bp, Homo sapien
atcttcttcacagagcggaacatattcacacca

SEQ ID NO: 270133 - DNA, 33 bp, Homo sapien
catccaccattacatcaaaaactttgggaaacc

SEQ ID NO: 270134 - DNA, 33 bp, Homo sapien
catccaccattacatcgaaaactttgggaaacc

SEQ ID NO: 270135 - DNA, 33 bp, Homo sapien
ggggttatattctggtaaaccattgtaaatgga

SEQ ID NO: 270136 - DNA, 33 bp, Homo sapien
ggggttatattctggtgaaccattgtaaatgga

SEQ ID NO: 270137 - DNA, 33 bp, Homo sapien
tggaaaatgtatatgacgtcatgttggtttttt

SEQ ID NO: 270138 - DNA, 33 bp, Homo sapien
tggaaaatgtatatgatgtcatgttggtttttt

SEQ ID NO: 270139 - DNA, 33 bp, Homo sapien
agacttctgacttttacaattattaaatgagaa

SEQ ID NO: 270140 - DNA, 33 bp, Homo sapien
agacttctgacttttagaattattaaatgagaa

SEQ ID NO: 270141 - DNA, 33 bp, Homo sapien
gaagacttgagacaaaattaatgagtgttaaag

SEQ ID NO: 270142 - DNA, 33 bp, Homo sapien
gaagacttgagacaaagttaatgagtgttaaag

SEQ ID NO: 270143 - DNA, 33 bp, Homo sapien
agtctttgtttcctacaattcacaggaaattaa

SEQ ID NO: 270144 - DNA, 33 bp, Homo sapien
agtctttgtttcctacgattcacaggaaattaa

SEQ ID NO: 270145 - DNA, 33 bp, Homo sapien
ctcagtgaaaatggaacgtcagatttctgggaa

SEQ ID NO: 270146 - DNA, 33 bp, Homo sapien
ctcagtgaaaatggaaggtcagatttctgggaa

SEQ ID NO: 270147 - DNA, 33 bp, Homo sapien
tttggatttgctgttcacttttggacatgaaac

SEQ ID NO: 270148 - DNA, 33 bp, Homo sapien
tttggatttgctgttcgcttttggacatgaaac

SEQ ID NO: 270149 - DNA, 33 bp, Homo sapien
gtggccactatgcttcacttgttttacgtttat

SEQ ID NO: 270150 - DNA, 33 bp, Homo sapien
gtggccactatgcttcccttgttttacgtttat

SEQ ID NO: 270151 - DNA, 33 bp, Homo sapien
tgaacttaacgttaccaaaagcaaaagccatgc

SEQ ID NO: 270152 - DNA, 33 bp, Homo sapien
tgaacttaacgttaccgaaagcaaaagccatgc

SEQ ID NO: 270153 - DNA, 33 bp, Homo sapien
atttatactcaaacccaaatagcatctccattt

SEQ ID NO: 270154 - DNA, 33 bp, Homo sapien
atttatactcaaacccgaatagcatctccattt

SEQ ID NO: 270155 - DNA, 33 bp, Homo sapien
ctatttaatcaactaaactcagttcccaatatg

SEQ ID NO: 270156 - DNA, 33 bp, Homo sapien
ctatttaatcaactaagctcagttcccaatatg

SEQ ID NO: 270157 - DNA, 33 bp, Homo sapien
agtcattacttgagtcagaattagttaaaacac

SEQ ID NO: 270158 - DNA, 33 bp, Homo sapien
agtcattacttgagtcggaattagttaaaacac

SEQ ID NO: 270159 - DNA, 33 bp, Homo sapien
cttttggaagtacatacggcatcccaactaggc

SEQ ID NO: 270160 - DNA, 33 bp, Homo sapien
cttttggaagtacatatggcatcccaactaggc

SEQ ID NO: 270161 - DNA, 33 bp, Homo sapien
gagctgatataaaacaacctcattaacacatac

SEQ ID NO: 270162 - DNA, 33 bp, Homo sapien
gagctgatataaaacatcctcattaacacatac

SEQ ID NO: 270163 - DNA, 33 bp, Homo sapien
atcaattatggtcttcccttttctttgcaccaa

SEQ ID NO: 270164 - DNA, 33 bp, Homo sapien
atcaattatggtcttctcttttctttgcaccaa

SEQ ID NO: 270165 - DNA, 33 bp, Homo sapien
cactgttgcttaaaacacggtattccgaataag

SEQ ID NO: 270166 - DNA, 33 bp, Homo sapien
cactgttgcttaaaacgcggtattccgaataag

SEQ ID NO: 270167 - DNA, 33 bp, Homo sapien
tggtgctaaagaaatgcagcaaactcaataaat

SEQ ID NO: 270168 - DNA, 33 bp, Homo sapien
tggtgctaaagaaatggagcaaactcaataaat

SEQ ID NO: 270169 - DNA, 33 bp, Homo sapien
acttactatatgtagaaggtcatatgtgaaaag

SEQ ID NO: 270170 - DNA, 33 bp, Homo sapien
acttactatatgtagacggtcatatgtgaaaag

SEQ ID NO: 270171 - DNA, 33 bp, Homo sapien
tgggacaaaaatataaaccctctacctgttatt

SEQ ID NO: 270172 - DNA, 33 bp, Homo sapien
tgggacaaaaatataacccctctacctgttatt

SEQ ID NO: 270173 - DNA, 33 bp, Homo sapien
agcagaaggtgagacactgcaggaaatggaacg

SEQ ID NO: 270174 - DNA, 33 bp, Homo sapien
agcagaaggtgagacattgcaggaaatggaacg

SEQ ID NO: 270175 - DNA, 33 bp, Homo sapien
gttgatgggaagttaaagttgatgggaaaatta

SEQ ID NO: 270176 - DNA, 33 bp, Homo sapien
gttgatgggaagttaaggttgatgggaaaatta

SEQ ID NO: 270177 - DNA, 33 bp, Homo sapien
ttttcatttgtgaatacctaattatcctagcag

SEQ ID NO: 270178 - DNA, 33 bp, Homo sapien
ttttcatttgtgaatatctaattatcctagcag

SEQ ID NO: 270179 - DNA, 33 bp, Homo sapien
agatggtttatagacacctgagttcaaaatgtg

SEQ ID NO: 270180 - DNA, 33 bp, Homo sapien
agatggtttatagacatctgagttcaaaatgtg

SEQ ID NO: 270181 - DNA, 33 bp, Homo sapien
ctcattccagtgtacaaagcaaacaaaatgttc

SEQ ID NO: 270182 - DNA, 33 bp, Homo sapien
ctcattccagtgtacacagcaaacaaaatgttc

SEQ ID NO: 270183 - DNA, 33 bp, Homo sapien
tccctgctcttaacttcaaaccacaccatctct

SEQ ID NO: 270184 - DNA, 33 bp, Homo sapien
tccctgctcttaactttaaaccacaccatctct

SEQ ID NO: 270185 - DNA, 33 bp, Homo sapien
cataaatatttaccaactcctggctaagtgtca

SEQ ID NO: 270186 - DNA, 33 bp, Homo sapien
cataaatatttaccaagtcctggctaagtgtca

SEQ ID NO: 270187 - DNA, 33 bp, Homo sapien
atccttgtaccttatagctttctcctgtaatgt

SEQ ID NO: 270188 - DNA, 33 bp, Homo sapien
atccttgtaccttatatctttctcctgtaatgt

SEQ ID NO: 270189 - DNA, 33 bp, Homo sapien
atagatgactggcaacactgttattggatttta

SEQ ID NO: 270190 - DNA, 33 bp, Homo sapien
atagatgactggcaactctgttattggatttta

SEQ ID NO: 270191 - DNA, 33 bp, Homo sapien
gtaacagaagggaatccaagtatactgtcaaaa

SEQ ID NO: 270192 - DNA, 33 bp, Homo sapien
gtaacagaagggaatctaagtatactgtcaaaa

SEQ ID NO: 270193 - DNA, 33 bp, Homo sapien
caggaaggccttgaccaaaataagactattcaa

SEQ ID NO: 270194 - DNA, 33 bp, Homo sapien
caggaaggccttgaccgaaataagactattcaa

SEQ ID NO: 270195 - DNA, 33 bp, Homo sapien
tgcccaattatttgaacagcagtttttatgctg

SEQ ID NO: 270196 - DNA, 33 bp, Homo sapien
tgcccaattatttgaatagcagtttttatgctg

SEQ ID NO: 270197 - DNA, 33 bp, Homo sapien
tttcaaaggctttgaacgaagcttggtggagtt

SEQ ID NO: 270198 - DNA, 33 bp, Homo sapien
tttcaaaggctttgaatgaagcttggtggagtt

SEQ ID NO: 270199 - DNA, 33 bp, Homo sapien
catatactctggttaactatatgctgctctcat

SEQ ID NO: 270200 - DNA, 33 bp, Homo sapien
catatactctggttaagtatatgctgctctcat

SEQ ID NO: 270201 - DNA, 33 bp, Homo sapien
gcaacaaaggatagtgacaagaaccagttattt

SEQ ID NO: 270202 - DNA, 33 bp, Homo sapien
gcaacaaaggatagtggcaagaaccagttattt

SEQ ID NO: 270203 - DNA, 33 bp, Homo sapien
tcacacacagtgatcacgtacctatcggcactg

SEQ ID NO: 270204 - DNA, 33 bp, Homo sapien
tcacacacagtgatcatgtacctatcggcactg

SEQ ID NO: 270205 - DNA, 33 bp, Homo sapien
agaccacccttcagaaatggacaatttgatcgg

SEQ ID NO: 270206 - DNA, 33 bp, Homo sapien
agaccacccttcagaagtggacaatttgatcgg

SEQ ID NO: 270207 - DNA, 33 bp, Homo sapien
gcagacgcatacacaaattatagtcttagtata

SEQ ID NO: 270208 - DNA, 33 bp, Homo sapien
gcagacgcatacacaagttatagtcttagtata

SEQ ID NO: 270209 - DNA, 33 bp, Homo sapien
tgtgagaattaattaacattttgcgtatcctca

SEQ ID NO: 270210 - DNA, 33 bp, Homo sapien
tgtgagaattaattaagattttgcgtatcctca

SEQ ID NO: 270211 - DNA, 33 bp, Homo sapien
agtatctttgcaaatacctttgtggttaataat

SEQ ID NO: 270212 - DNA, 33 bp, Homo sapien
agtatctttgcaaatatctttgtggttaataat

SEQ ID NO: 270213 - DNA, 33 bp, Homo sapien
atggtgcaacaaaatcaagctgcctgttaaacc

SEQ ID NO: 270214 - DNA, 33 bp, Homo sapien
atggtgcaacaaaatcgagctgcctgttaaacc

SEQ ID NO: 270215 - DNA, 33 bp, Homo sapien
aggtagcacagtttcacgcaggggagttttgga

SEQ ID NO: 270216 - DNA, 33 bp, Homo sapien
aggtagcacagtttcatgcaggggagttttgga

SEQ ID NO: 270217 - DNA, 33 bp, Homo sapien
gtgtgtagtatttcaacagcttttgaggtgtaa

SEQ ID NO: 270218 - DNA, 33 bp, Homo sapien
gtgtgtagtatttcaatagcttttgaggtgtaa

SEQ ID NO: 270219 - DNA, 33 bp, Homo sapien
aaaactcaaccaaataacctaccaactgaaggg

SEQ ID NO: 270220 - DNA, 33 bp, Homo sapien
aaaactcaaccaaatagcctaccaactgaaggg

SEQ ID NO: 270221 - DNA, 33 bp, Homo sapien
attaagtccaactttcactcttctcctggatgc

SEQ ID NO: 270222 - DNA, 33 bp, Homo sapien
attaagtccaactttcgctcttctcctggatgc

SEQ ID NO: 270223 - DNA, 33 bp, Homo sapien
agcatttggcccagaacgtcagtcctgatcagt

SEQ ID NO: 270224 - DNA, 33 bp, Homo sapien
agcatttggcccagaatgtcagtcctgatcagt

SEQ ID NO: 270225 - DNA, 33 bp, Homo sapien
ttgacactggcagttaactgggacctcagctgg

SEQ ID NO: 270226 - DNA, 33 bp, Homo sapien
ttgacactggcagttacctgggacctcagctgg

SEQ ID NO: 270227 - DNA, 33 bp, Homo sapien
ggaaatagaagtataccgcttgaaggttcttaa

SEQ ID NO: 270228 - DNA, 33 bp, Homo sapien
ggaaatagaagtatactgcttgaaggttcttaa

SEQ ID NO: 270229 - DNA, 33 bp, Homo sapien
tattccttcacatggactaatagtttaagaacc

SEQ ID NO: 270230 - DNA, 33 bp, Homo sapien
tattccttcacatggattaatagtttaagaacc

SEQ ID NO: 270231 - DNA, 33 bp, Homo sapien
gttaatgattactgtaaattttcaaagatttaa

SEQ ID NO: 270232 - DNA, 33 bp, Homo sapien
gttaatgattactgtacattttcaaagatttaa

SEQ ID NO: 270233 - DNA, 33 bp, Homo sapien
catctttcctctggtaaatacttcaatagattt

SEQ ID NO: 270234 - DNA, 33 bp, Homo sapien
catctttcctctggtacatacttcaatagattt

SEQ ID NO: 270235 - DNA, 33 bp, Homo sapien
taactacttccagatgaaaactcactgtgtagg

SEQ ID NO: 270236 - DNA, 33 bp, Homo sapien
taactacttccagatggaaactcactgtgtagg

SEQ ID NO: 270237 - DNA, 33 bp, Homo sapien
tataaacttgctctcaaaatcatcaagattgaa

SEQ ID NO: 270238 - DNA, 33 bp, Homo sapien
tataaacttgctctcagaatcatcaagattgaa

SEQ ID NO: 270239 - DNA, 33 bp, Homo sapien
ttcttattgctaagaaatatctcctttcattac

SEQ ID NO: 270240 - DNA, 33 bp, Homo sapien
ttcttattgctaagaactatctcctttcattac

SEQ ID NO: 270241 - DNA, 33 bp, Homo sapien
accagaaacacactaaatattcaacaacaaact

SEQ ID NO: 270242 - DNA, 33 bp, Homo sapien
accagaaacacactaactattcaacaacaaact

SEQ ID NO: 270243 - DNA, 33 bp, Homo sapien
acttttcataacaaaaacctttaggattagctg

SEQ ID NO: 270244 - DNA, 33 bp, Homo sapien
acttttcataacaaaagcctttaggattagctg

SEQ ID NO: 270245 - DNA, 33 bp, Homo sapien
tacgtggactactacactggccctaaatggtcc

SEQ ID NO: 270246 - DNA, 33 bp, Homo sapien
tacgtggactactacagtggccctaaatggtcc

SEQ ID NO: 270247 - DNA, 33 bp, Homo sapien
gaacatgcaaaataacacaaattatggtctcta

SEQ ID NO: 270248 - DNA, 33 bp, Homo sapien
gaacatgcaaaataacgcaaattatggtctcta

SEQ ID NO: 270249 - DNA, 33 bp, Homo sapien
tggcttcctctttctcacccatctactcatgct

SEQ ID NO: 270250 - DNA, 33 bp, Homo sapien
tggcttcctctttctcgcccatctactcatgct

SEQ ID NO: 270251 - DNA, 33 bp, Homo sapien
tccccgttcatccatccaagaccacagtggtaa

SEQ ID NO: 270252 - DNA, 33 bp, Homo sapien
tccccgttcatccatctaagaccacagtggtaa

SEQ ID NO: 270253 - DNA, 33 bp, Homo sapien
tggtgtggttgtaggtaaaaatgcatgatggca

SEQ ID NO: 270254 - DNA, 33 bp, Homo sapien
tggtgtggttgtaggttaaaatgcatgatggca

SEQ ID NO: 270255 - DNA, 33 bp, Homo sapien
acgtttgactctggtaacaactagtttcagcac

SEQ ID NO: 270256 - DNA, 33 bp, Homo sapien
acgtttgactctggtagcaactagtttcagcac

SEQ ID NO: 270257 - DNA, 33 bp, Homo sapien
ttttgggggctggccagaatgttttcagaaaga

SEQ ID NO: 270258 - DNA, 33 bp, Homo sapien
ttttgggggctggccataatgttttcagaaaga

SEQ ID NO: 270259 - DNA, 33 bp, Homo sapien
cccagttcactgcagaaaaggaccatcctgaga

SEQ ID NO: 270260 - DNA, 33 bp, Homo sapien
cccagttcactgcagagaaggaccatcctgaga

SEQ ID NO: 270261 - DNA, 33 bp, Homo sapien
ctgcacctactggtaacggcaattgtcttccat

SEQ ID NO: 270262 - DNA, 33 bp, Homo sapien
ctgcacctactggtaatggcaattgtcttccat

SEQ ID NO: 270263 - DNA, 33 bp, Homo sapien
ataagattgccctatcacagagttatagcactt

SEQ ID NO: 270264 - DNA, 33 bp, Homo sapien
ataagattgccctatcgcagagttatagcactt

SEQ ID NO: 270265 - DNA, 33 bp, Homo sapien
tgatgtccaaatgcataaaattgggttaatgac

SEQ ID NO: 270266 - DNA, 33 bp, Homo sapien
tgatgtccaaatgcatgaaattgggttaatgac

SEQ ID NO: 270267 - DNA, 33 bp, Homo sapien
actgaagctcattgaactggcttaaacaggcca

SEQ ID NO: 270268 - DNA, 33 bp, Homo sapien
actgaagctcattgaattggcttaaacaggcca

SEQ ID NO: 270269 - DNA, 33 bp, Homo sapien
atcacaaggtgaagtccgacaataggccgtctg

SEQ ID NO: 270270 - DNA, 33 bp, Homo sapien
atcacaaggtgaagtctgacaataggccgtctg

SEQ ID NO: 270271 - DNA, 33 bp, Homo sapien
acactgcaagttaagtaacaacaccaacttcaa

SEQ ID NO: 270272 - DNA, 33 bp, Homo sapien
acactgcaagttaagtgacaacaccaacttcaa

SEQ ID NO: 270273 - DNA, 33 bp, Homo sapien
actggaggagtggcggcacaccacattcttgca

SEQ ID NO: 270274 - DNA, 33 bp, Homo sapien
actggaggagtggcggtacaccacattcttgca

SEQ ID NO: 270275 - DNA, 33 bp, Homo sapien
ttattatgaggccaaggctggcttagtggaaga

SEQ ID NO: 270276 - DNA, 33 bp, Homo sapien
ttattatgaggccaagtctggcttagtggaaga

SEQ ID NO: 270277 - DNA, 33 bp, Homo sapien
acagttctgtaaatcaaaagtccaacacaagtc

SEQ ID NO: 270278 - DNA, 33 bp, Homo sapien
acagttctgtaaatcagaagtccaacacaagtc

SEQ ID NO: 270279 - DNA, 33 bp, Homo sapien
catagaaggtaacataggctccagggattagga

SEQ ID NO: 270280 - DNA, 33 bp, Homo sapien
catagaaggtaacatatgctccagggattagga

SEQ ID NO: 270281 - DNA, 33 bp, Homo sapien
atttgataataggtgaagctagtttgcagattg

SEQ ID NO: 270282 - DNA, 33 bp, Homo sapien
atttgataataggtgaggctagtttgcagattg

SEQ ID NO: 270283 - DNA, 33 bp, Homo sapien
caaaacagaaaaaacaaagtatccaaggactgt

SEQ ID NO: 270284 - DNA, 33 bp, Homo sapien
caaaacagaaaaaacagagtatccaaggactgt

SEQ ID NO: 270285 - DNA, 33 bp, Homo sapien
agaggcttctggacagcctggacaagcaaagat

SEQ ID NO: 270286 - DNA, 33 bp, Homo sapien
agaggcttctggacagtctggacaagcaaagat

SEQ ID NO: 270287 - DNA, 33 bp, Homo sapien
ctgcttgggtatctacaaagatttcctttttct

SEQ ID NO: 270288 - DNA, 33 bp, Homo sapien
ctgcttgggtatctacgaagatttcctttttct

SEQ ID NO: 270289 - DNA, 33 bp, Homo sapien
gtctgatgttgagctacagctgagcaatgcact

SEQ ID NO: 270290 - DNA, 33 bp, Homo sapien
gtctgatgttgagctatagctgagcaatgcact

SEQ ID NO: 270291 - DNA, 33 bp, Homo sapien
ggaatgggtaggagagccaagaggtgaagagta

SEQ ID NO: 270292 - DNA, 33 bp, Homo sapien
ggaatgggtaggagaggcaagaggtgaagagta

SEQ ID NO: 270293 - DNA, 33 bp, Homo sapien
aagcaagcaagtctgaacagcacaagaagtaag

SEQ ID NO: 270294 - DNA, 33 bp, Homo sapien
aagcaagcaagtctgagcagcacaagaagtaag

SEQ ID NO: 270295 - DNA, 33 bp, Homo sapien
atcagccaatacgtgtcaggattcatctggaac

SEQ ID NO: 270296 - DNA, 33 bp, Homo sapien
atcagccaatacgtgtgaggattcatctggaac

SEQ ID NO: 270297 - DNA, 33 bp, Homo sapien
ggaattaaacgttggccagctctgcataactgt

SEQ ID NO: 270298 - DNA, 33 bp, Homo sapien
ggaattaaacgttggctagctctgcataactgt

SEQ ID NO: 270299 - DNA, 33 bp, Homo sapien
tcactacagaggctacggcactattgaggagag

SEQ ID NO: 270300 - DNA, 33 bp, Homo sapien
tcactacagaggctactgcactattgaggagag

SEQ ID NO: 270301 - DNA, 33 bp, Homo sapien
gagcttcttgctttcccctgagacattaggcat

SEQ ID NO: 270302 - DNA, 33 bp, Homo sapien
gagcttcttgctttcctctgagacattaggcat

SEQ ID NO: 270303 - DNA, 33 bp, Homo sapien
atatttggcagaagaaatctctaagcaaagtgt

SEQ ID NO: 270304 - DNA, 33 bp, Homo sapien
atatttggcagaagaagtctctaagcaaagtgt

SEQ ID NO: 270305 - DNA, 33 bp, Homo sapien
aggagggaagtaatccaaaactaagtttttctg

SEQ ID NO: 270306 - DNA, 33 bp, Homo sapien
aggagggaagtaatccgaaactaagtttttctg

SEQ ID NO: 270307 - DNA, 33 bp, Homo sapien
ggcagagacagtgttacgtgttcactaaaacca

SEQ ID NO: 270308 - DNA, 33 bp, Homo sapien
ggcagagacagtgttatgtgttcactaaaacca

SEQ ID NO: 270309 - DNA, 33 bp, Homo sapien
ccatgattaagtaggactcatcacaagggtaca

SEQ ID NO: 270310 - DNA, 33 bp, Homo sapien
ccatgattaagtaggattcatcacaagggtaca

SEQ ID NO: 270311 - DNA, 33 bp, Homo sapien
cttctgccctgctgtacgttttctcttcacttt

SEQ ID NO: 270312 - DNA, 33 bp, Homo sapien
cttctgccctgctgtatgttttctcttcacttt

SEQ ID NO: 270313 - DNA, 33 bp, Homo sapien
gagcaataggatggaacatagcaaagtgtgaga

SEQ ID NO: 270314 - DNA, 33 bp, Homo sapien
gagcaataggatggaatatagcaaagtgtgaga

SEQ ID NO: 270315 - DNA, 33 bp, Homo sapien
cttaatttacaacaaaagaagagttataagtgt

SEQ ID NO: 270316 - DNA, 33 bp, Homo sapien
cttaatttacaacaaaggaagagttataagtgt

SEQ ID NO: 270317 - DNA, 33 bp, Homo sapien
tccaagcaatgaagatcatctgaagtgagtccc

SEQ ID NO: 270318 - DNA, 33 bp, Homo sapien
tccaagcaatgaagattatctgaagtgagtccc

SEQ ID NO: 270319 - DNA, 33 bp, Homo sapien
ccctagggcttcctaagcttatctaacttatgc

SEQ ID NO: 270320 - DNA, 33 bp, Homo sapien
ccctagggcttcctaatcttatctaacttatgc

SEQ ID NO: 270321 - DNA, 33 bp, Homo sapien
tgattatagaaagatacgtagagtaaggctcag

SEQ ID NO: 270322 - DNA, 33 bp, Homo sapien
tgattatagaaagatatgtagagtaaggctcag

SEQ ID NO: 270323 - DNA, 33 bp, Homo sapien
tcaagagctcaggagacaaatacaggttagaga

SEQ ID NO: 270324 - DNA, 33 bp, Homo sapien
tcaagagctcaggagagaaatacaggttagaga

SEQ ID NO: 270325 - DNA, 33 bp, Homo sapien
gggaatgatttgagaaacaggtttggggaagat

SEQ ID NO: 270326 - DNA, 33 bp, Homo sapien
gggaatgatttgagaaccaggtttggggaagat

SEQ ID NO: 270327 - DNA, 33 bp, Homo sapien
aagaggatagattcagaagatatagaggaggga

SEQ ID NO: 270328 - DNA, 33 bp, Homo sapien
aagaggatagattcaggagatatagaggaggga

SEQ ID NO: 270329 - DNA, 33 bp, Homo sapien
cagctgcagagcatcaaaaccatttaggagctt

SEQ ID NO: 270330 - DNA, 33 bp, Homo sapien
cagctgcagagcatcagaaccatttaggagctt

SEQ ID NO: 270331 - DNA, 33 bp, Homo sapien
catcaattgcttttcagagttgatagctgctgc

SEQ ID NO: 270332 - DNA, 33 bp, Homo sapien
catcaattgcttttcatagttgatagctgctgc

SEQ ID NO: 270333 - DNA, 33 bp, Homo sapien
ttttgcaaaggccacaaataggcgttccaatca

SEQ ID NO: 270334 - DNA, 33 bp, Homo sapien
ttttgcaaaggccacacataggcgttccaatca

SEQ ID NO: 270335 - DNA, 33 bp, Homo sapien
aaaccatagcctcagcaaaattcctaatgaaga

SEQ ID NO: 270336 - DNA, 33 bp, Homo sapien
aaaccatagcctcagccaaattcctaatgaaga

SEQ ID NO: 270337 - DNA, 33 bp, Homo sapien
gtgtggagagaacaaacagcatggttcctttca

SEQ ID NO: 270338 - DNA, 33 bp, Homo sapien
gtgtggagagaacaaatagcatggttcctttca

SEQ ID NO: 270339 - DNA, 33 bp, Homo sapien
tctcacagacgttgctcacatctggcatactgt

SEQ ID NO: 270340 - DNA, 33 bp, Homo sapien
tctcacagacgttgcttacatctggcatactgt

SEQ ID NO: 270341 - DNA, 33 bp, Homo sapien
gtttgatcaaaggatccaactagcaagagatgg

SEQ ID NO: 270342 - DNA, 33 bp, Homo sapien
gtttgatcaaaggatcgaactagcaagagatgg

SEQ ID NO: 270343 - DNA, 33 bp, Homo sapien
tcttccactgaagtcaaagtttagttgggagag

SEQ ID NO: 270344 - DNA, 33 bp, Homo sapien
tcttccactgaagtcagagtttagttgggagag

SEQ ID NO: 270345 - DNA, 33 bp, Homo sapien
gcaagaagtttctgacaaattgttgttcagtga

SEQ ID NO: 270346 - DNA, 33 bp, Homo sapien
gcaagaagtttctgaccaattgttgttcagtga

SEQ ID NO: 270347 - DNA, 33 bp, Homo sapien
aaatgtacctcttagaaccattagaactaaggt

SEQ ID NO: 270348 - DNA, 33 bp, Homo sapien
aaatgtacctcttagagccattagaactaaggt

SEQ ID NO: 270349 - DNA, 33 bp, Homo sapien
cctgaccaggcaactaacccctgcaaaggtcag

SEQ ID NO: 270350 - DNA, 33 bp, Homo sapien
cctgaccaggcaactagcccctgcaaaggtcag

SEQ ID NO: 270351 - DNA, 33 bp, Homo sapien
gggatggaggaaccacaggatggaaggtgcctg

SEQ ID NO: 270352 - DNA, 33 bp, Homo sapien
gggatggaggaaccacgggatggaaggtgcctg

SEQ ID NO: 270353 - DNA, 33 bp, Homo sapien
cctcagatcaaccacaatcctgcattctgtggt

SEQ ID NO: 270354 - DNA, 33 bp, Homo sapien
cctcagatcaaccacagtcctgcattctgtggt

SEQ ID NO: 270355 - DNA, 33 bp, Homo sapien
agtgagtagttatgaaaggcagaatttacaaca

SEQ ID NO: 270356 - DNA, 33 bp, Homo sapien
agtgagtagttatgaagggcagaatttacaaca

SEQ ID NO: 270357 - DNA, 33 bp, Homo sapien
atgagtttaaggagaaattctacagccaaaaca

SEQ ID NO: 270358 - DNA, 33 bp, Homo sapien
atgagtttaaggagaatttctacagccaaaaca

SEQ ID NO: 270359 - DNA, 33 bp, Homo sapien
ttctgcataataacaacgtaaagtgaaggaaga

SEQ ID NO: 270360 - DNA, 33 bp, Homo sapien
ttctgcataataacaatgtaaagtgaaggaaga

SEQ ID NO: 270361 - DNA, 33 bp, Homo sapien
atgcagaagtgggtcacgaacattaagagaact

SEQ ID NO: 270362 - DNA, 33 bp, Homo sapien
atgcagaagtgggtcatgaacattaagagaact

SEQ ID NO: 270363 - DNA, 33 bp, Homo sapien
gcctttctgccaacaacttattagtatgccatc

SEQ ID NO: 270364 - DNA, 33 bp, Homo sapien
gcctttctgccaacaagttattagtatgccatc

SEQ ID NO: 270365 - DNA, 33 bp, Homo sapien
aacaggtatcgtgggcaaaagcaaaccctcata

SEQ ID NO: 270366 - DNA, 33 bp, Homo sapien
aacaggtatcgtgggccaaagcaaaccctcata

SEQ ID NO: 270367 - DNA, 33 bp, Homo sapien
aaagcaaaccctcataagacccagcaagcaata

SEQ ID NO: 270368 - DNA, 33 bp, Homo sapien
aaagcaaaccctcataggacccagcaagcaata

SEQ ID NO: 270369 - DNA, 33 bp, Homo sapien
aaaatggggttgtctacggaaggaagagaggca

SEQ ID NO: 270370 - DNA, 33 bp, Homo sapien
aaaatggggttgtctatggaaggaagagaggca

SEQ ID NO: 270371 - DNA, 33 bp, Homo sapien
aaaacactcacctcccaagactccactgcagct

SEQ ID NO: 270372 - DNA, 33 bp, Homo sapien
aaaacactcacctccccagactccactgcagct

SEQ ID NO: 270373 - DNA, 33 bp, Homo sapien
tctgctcttatctcaccgagttccatggccatt

SEQ ID NO: 270374 - DNA, 33 bp, Homo sapien
tctgctcttatctcactgagttccatggccatt

SEQ ID NO: 270375 - DNA, 33 bp, Homo sapien
tgcaaggcaaattgtcaagaagggtaggctgaa

SEQ ID NO: 270376 - DNA, 33 bp, Homo sapien
tgcaaggcaaattgtcgagaagggtaggctgaa

SEQ ID NO: 270377 - DNA, 33 bp, Homo sapien
gaccaaagtaacagggccatctggatgagatcc

SEQ ID NO: 270378 - DNA, 33 bp, Homo sapien
gaccaaagtaacagggtcatctggatgagatcc

SEQ ID NO: 270379 - DNA, 33 bp, Homo sapien
gacacactaaatggcccattcaggacacagtca

SEQ ID NO: 270380 - DNA, 33 bp, Homo sapien
gacacactaaatggcctattcaggacacagtca

SEQ ID NO: 270381 - DNA, 33 bp, Homo sapien
attaaattatttccataagtcttggctgtcgtt

SEQ ID NO: 270382 - DNA, 33 bp, Homo sapien
attaaattatttccatgagtcttggctgtcgtt

SEQ ID NO: 270383 - DNA, 33 bp, Homo sapien
ggctcagagaacttcgccaactccccagcggtg

SEQ ID NO: 270384 - DNA, 33 bp, Homo sapien
ggctcagagaacttcgtcaactccccagcggtg

SEQ ID NO: 270385 - DNA, 33 bp, Homo sapien
ttaaattatcgggctccaagctagtgattgtgt

SEQ ID NO: 270386 - DNA, 33 bp, Homo sapien
ttaaattatcgggctctaagctagtgattgtgt

SEQ ID NO: 270387 - DNA, 33 bp, Homo sapien
aggtttcaaggcatgacgaaagggtaacacgag

SEQ ID NO: 270388 - DNA, 33 bp, Homo sapien
aggtttcaaggcatgatgaaagggtaacacgag

SEQ ID NO: 270389 - DNA, 33 bp, Homo sapien
atgatgagattactacacattgtatgcctatat

SEQ ID NO: 270390 - DNA, 33 bp, Homo sapien
atgatgagattactacgcattgtatgcctatat

SEQ ID NO: 270391 - DNA, 33 bp, Homo sapien
aaggattgttattcaaattctgtagtttcaatg

SEQ ID NO: 270392 - DNA, 33 bp, Homo sapien
aaggattgttattcaagttctgtagtttcaatg

SEQ ID NO: 270393 - DNA, 33 bp, Homo sapien
gacaggagaattaaacagagattgcaaggctag

SEQ ID NO: 270394 - DNA, 33 bp, Homo sapien
gacaggagaattaaacggagattgcaaggctag

SEQ ID NO: 270395 - DNA, 33 bp, Homo sapien
catgtggaaactgacacattccaacaccacatg

SEQ ID NO: 270396 - DNA, 33 bp, Homo sapien
catgtggaaactgacatattccaacaccacatg

SEQ ID NO: 270397 - DNA, 33 bp, Homo sapien
aaagaatgagttccatcaatacctactttattg

SEQ ID NO: 270398 - DNA, 33 bp, Homo sapien
aaagaatgagttccattaatacctactttattg

SEQ ID NO: 270399 - DNA, 33 bp, Homo sapien
tttcacacatcctctacgggagacaggaaggaa

SEQ ID NO: 270400 - DNA, 33 bp, Homo sapien
tttcacacatcctctatgggagacaggaaggaa

SEQ ID NO: 270401 - DNA, 33 bp, Homo sapien
tgagacctgaggtttccctttgaaagttcatcc

SEQ ID NO: 270402 - DNA, 33 bp, Homo sapien
tgagacctgaggtttctctttgaaagttcatcc

SEQ ID NO: 270403 - DNA, 33 bp, Homo sapien
gtgatttagggaagaaatatgtgacagttctgc

SEQ ID NO: 270404 - DNA, 33 bp, Homo sapien
gtgatttagggaagaagtatgtgacagttctgc

SEQ ID NO: 270405 - DNA, 33 bp, Homo sapien
caatcctggttgagtacagatcagctacagggt

SEQ ID NO: 270406 - DNA, 33 bp, Homo sapien
caatcctggttgagtatagatcagctacagggt

SEQ ID NO: 270407 - DNA, 33 bp, Homo sapien
atactgcctcagggtcaaacacaacaaatacca

SEQ ID NO: 270408 - DNA, 33 bp, Homo sapien
atactgcctcagggtcgaacacaacaaatacca

SEQ ID NO: 270409 - DNA, 33 bp, Homo sapien
ttttctaacatgtctcaataagctgtcagctct

SEQ ID NO: 270410 - DNA, 33 bp, Homo sapien
ttttctaacatgtctcgataagctgtcagctct

SEQ ID NO: 270411 - DNA, 33 bp, Homo sapien
agtgagacaaccgagacgagaaacattcacatt

SEQ ID NO: 270412 - DNA, 33 bp, Homo sapien
agtgagacaaccgagatgagaaacattcacatt

SEQ ID NO: 270413 - DNA, 33 bp, Homo sapien
cgctagactattctacactctatagaaacaaat

SEQ ID NO: 270414 - DNA, 33 bp, Homo sapien
cgctagactattctacgctctatagaaacaaat

SEQ ID NO: 270415 - DNA, 33 bp, Homo sapien
tgattcttcatgccaccagatgtctacaactcc

SEQ ID NO: 270416 - DNA, 33 bp, Homo sapien
tgattcttcatgccacgagatgtctacaactcc

SEQ ID NO: 270417 - DNA, 33 bp, Homo sapien
ttttcagataaggaacagtcttggtttggtttc

SEQ ID NO: 270418 - DNA, 33 bp, Homo sapien
ttttcagataaggaactgtcttggtttggtttc

SEQ ID NO: 270419 - DNA, 33 bp, Homo sapien
gttccttgcaaggttggatttcccttctgctga

SEQ ID NO: 270420 - DNA, 33 bp, Homo sapien
gttccttgcaaggttgtatttcccttctgctga

SEQ ID NO: 270421 - DNA, 33 bp, Homo sapien
taactgtgatacaaaaatagtttagagttaaaa

SEQ ID NO: 270422 - DNA, 33 bp, Homo sapien
taactgtgatacaaaattagtttagagttaaaa

SEQ ID NO: 270423 - DNA, 33 bp, Homo sapien
agaggtttttcatgagaccccctcccatacagc

SEQ ID NO: 270424 - DNA, 33 bp, Homo sapien
agaggtttttcatgaggccccctcccatacagc

SEQ ID NO: 270425 - DNA, 33 bp, Homo sapien; identical to SEQ ID NO: 270423

SEQ ID NO: 270426 - DNA, 33 bp, Homo sapien; identical to SEQ ID NO: 270424

SEQ ID NO: 270427 - DNA, 33 bp, Homo sapien
ttcaaagtcacttcaaagtcacttccaaaagtt

SEQ ID NO: 270428 - DNA, 33 bp, Homo sapien
ttcaaagtcacttcaatgtcacttccaaaagtt

SEQ ID NO: 270429 - DNA, 33 bp, Homo sapien
ggcatgaaccatcgcacctggctgaaggcttca

SEQ ID NO: 270430 - DNA, 33 bp, Homo sapien
ggcatgaaccatcgcatctggctgaaggcttca

SEQ ID NO: 270431 - DNA, 33 bp, Homo sapien
actggcattcgatcaaggtttgttatattaaat

SEQ ID NO: 270432 - DNA, 33 bp, Homo sapien
actggcattcgatcaatgtttgttatattaaat

SEQ ID NO: 270433 - DNA, 33 bp, Homo sapien
cggccaggagactcttaaaatgcagaaaaaagt

SEQ ID NO: 270434 - DNA, 33 bp, Homo sapien
cggccaggagactctttaaatgcagaaaaaagt

SEQ ID NO: 270435 - DNA, 33 bp, Homo sapien
tttgtcagtgtctaataaaccctaaattgacat

SEQ ID NO: 270436 - DNA, 33 bp, Homo sapien
tttgtcagtgtctaatgaaccctaaattgacat

SEQ ID NO: 270437 - DNA, 33 bp, Homo sapien
ctgttgtgaggtaacaagtaactgttgtttttt

SEQ ID NO: 270438 - DNA, 33 bp, Homo sapien
ctgttgtgaggtaacaggtaactgttgtttttt

SEQ ID NO: 270439 - DNA, 33 bp, Homo sapien
acacccaggcaaatttcaaacattgttgtataa

SEQ ID NO: 270440 - DNA, 33 bp, Homo sapien
acacccaggcaaattttaaacattgttgtataa

SEQ ID NO: 270441 - DNA, 33 bp, Homo sapien
tcttggcttaggattcccaggacttctcactta

SEQ ID NO: 270442 - DNA, 33 bp, Homo sapien
tcttggcttaggattctcaggacttctcactta

SEQ ID NO: 270443 - DNA, 33 bp, Homo sapien
tgtttgcttgttttgaagtaaacacagtagaag

SEQ ID NO: 270444 - DNA, 33 bp, Homo sapien
tgtttgcttgttttgaggtaaacacagtagaag

SEQ ID NO: 270445 - DNA, 33 bp, Homo sapien
aaagactggctgcgacaaaagaaagaagataac

SEQ ID NO: 270446 - DNA, 33 bp, Homo sapien
aaagactggctgcgacgaaagaaagaagataac

SEQ ID NO: 270447 - DNA, 33 bp, Homo sapien; identical to SEQ ID NO: 270445

SEQ ID NO: 270448 - DNA, 33 bp, Homo sapien; identical to SEQ ID NO: 270446

SEQ ID NO: 270449 - DNA, 33 bp, Homo sapien
gactcttgaatttacccagttaatgtgatgtca

SEQ ID NO: 270450 - DNA, 33 bp, Homo sapien
gactcttgaatttaccgagttaatgtgatgtca

SEQ ID NO: 270451 - DNA, 33 bp, Homo sapien
ctcacctcattctggagagtttccatattcacc

SEQ ID NO: 270452 - DNA, 33 bp, Homo sapien
ctcacctcattctggatagtttccatattcacc

SEQ ID NO: 270453 - DNA, 33 bp, Homo sapien
caataaataaaagagaaagctaactagtttgaa

SEQ ID NO: 270454 - DNA, 33 bp, Homo sapien
caataaataaaagagagagctaactagtttgaa

SEQ ID NO: 270455 - DNA, 33 bp, Homo sapien
ttttcaaggccttaaaggttaataattgttagt

SEQ ID NO: 270456 - DNA, 33 bp, Homo sapien
ttttcaaggccttaaatgttaataattgttagt

SEQ ID NO: 270457 - DNA, 33 bp, Homo sapien
ctgaggacaactggtcaaaacaaacattttatt

SEQ ID NO: 270458 - DNA, 33 bp, Homo sapien
ctgaggacaactggtcgaaacaaacattttatt

SEQ ID NO: 270459 - DNA, 33 bp, Homo sapien
gcccagttccaaaggtcaaagcttgctccgcgc

SEQ ID NO: 270460 - DNA, 33 bp, Homo sapien
gcccagttccaaaggtgaaagcttgctccgcgc

SEQ ID NO: 270461 - DNA, 33 bp, Homo sapien
ctaagtcctagaatgaaaagaaagatggagtga

SEQ ID NO: 270462 - DNA, 33 bp, Homo sapien
ctaagtcctagaatgagaagaaagatggagtga

SEQ ID NO: 270463 - DNA, 33 bp, Homo sapien
tcactctagaggaaaaccagcaccatgtaaaaa

SEQ ID NO: 270464 - DNA, 33 bp, Homo sapien
tcactctagaggaaaatcagcaccatgtaaaaa

SEQ ID NO: 270465 - DNA, 33 bp, Homo sapien
aatgacagcttcacagaaagaggttggcttgta

SEQ ID NO: 270466 - DNA, 33 bp, Homo sapien
aatgacagcttcacaggaagaggttggcttgta

SEQ ID NO: 270467 - DNA, 33 bp, Homo sapien
atgcttgtttgacttacaaggtgctgctgctgg

SEQ ID NO: 270468 - DNA, 33 bp, Homo sapien
atgcttgtttgacttataaggtgctgctgctgg

SEQ ID NO: 270469 - DNA, 33 bp, Homo sapien
tcctttaaaatgccataaagtcagttgttacaa

SEQ ID NO: 270470 - DNA, 33 bp, Homo sapien
tcctttaaaatgccatgaagtcagttgttacaa

SEQ ID NO: 270471 - DNA, 33 bp, Homo sapien
tgtctttatttgacctcactgagcgctctctca

SEQ ID NO: 270472 - DNA, 33 bp, Homo sapien
tgtctttatttgacctgactgagcgctctctca

SEQ ID NO: 270473 - DNA, 33 bp, Homo sapien
cgaaatcccatctgtacaagaaatgcaaatatt

SEQ ID NO: 270474 - DNA, 33 bp, Homo sapien
cgaaatcccatctgtagaagaaatgcaaatatt

SEQ ID NO: 270475 - DNA, 33 bp, Homo sapien
ggaacactacagaaaccacctaacttacttcct

SEQ ID NO: 270476 - DNA, 33 bp, Homo sapien
ggaacactacagaaactacctaacttacttcct

SEQ ID NO: 270477 - DNA, 33 bp, Homo sapien
atgtttctcccatcaccattactaagtcctgga

SEQ ID NO: 270478 - DNA, 33 bp, Homo sapien
atgtttctcccatcacgattactaagtcctgga

SEQ ID NO: 270479 - DNA, 33 bp, Homo sapien
tcatacgctgttgatccatcagcaagtcctgtt

SEQ ID NO: 270480 - DNA, 33 bp, Homo sapien
tcatacgctgttgatctatcagcaagtcctgtt

SEQ ID NO: 270481 - DNA, 33 bp, Homo sapien
agtcaaatggtactcaaaagcttctaatgaaaa

SEQ ID NO: 270482 - DNA, 33 bp, Homo sapien
agtcaaatggtactcagaagcttctaatgaaaa

SEQ ID NO: 270483 - DNA, 33 bp, Homo sapien
atgtctagggctgcatcaaaggaaacttctctt

SEQ ID NO: 270484 - DNA, 33 bp, Homo sapien
atgtctagggctgcatgaaaggaaacttctctt

SEQ ID NO: 270485 - DNA, 33 bp, Homo sapien
tgggtgttgtttcataacctataggtacaattg

SEQ ID NO: 270486 - DNA, 33 bp, Homo sapien
tgggtgttgtttcataccctataggtacaattg

SEQ ID NO: 270487 - DNA, 33 bp, Homo sapien
caacaagtcaacaggggacatttttgcaaacag

SEQ ID NO: 270488 - DNA, 33 bp, Homo sapien
caacaagtcaacagggtacatttttgcaaacag

SEQ ID NO: 270489 - DNA, 33 bp, Homo sapien
taatttgtagtttgaaaaattgaccagataagg

SEQ ID NO: 270490 - DNA, 33 bp, Homo sapien
taatttgtagtttgaagaattgaccagataagg

SEQ ID NO: 270491 - DNA, 33 bp, Homo sapien
atgggggagtgaggaacgaaggacctttgggag

SEQ ID NO: 270492 - DNA, 33 bp, Homo sapien
atgggggagtgaggaatgaaggacctttgggag

SEQ ID NO: 270493 - DNA, 33 bp, Homo sapien
cactctgtggccaaaagtgtggactcttgggct

SEQ ID NO: 270494 - DNA, 33 bp, Homo sapien
cactctgtggccaaaattgtggactcttgggct

SEQ ID NO: 270495 - DNA, 33 bp, Homo sapien
tctgtcaatttaagtaccactgccaagtcatag

SEQ ID NO: 270496 - DNA, 33 bp, Homo sapien
tctgtcaatttaagtagcactgccaagtcatag

SEQ ID NO: 270497 - DNA, 33 bp, Homo sapien
tgtcctaaagggcgatcaggcagctgaaccaag

SEQ ID NO: 270498 - DNA, 33 bp, Homo sapien
tgtcctaaagggcgattaggcagctgaaccaag

SEQ ID NO: 270499 - DNA, 33 bp, Homo sapien
agacttgggagatgcccatattgtctgggactg

SEQ ID NO: 270500 - DNA, 33 bp, Homo sapien
agacttgggagatgcctatattgtctgggactg

SEQ ID NO: 270501 - DNA, 33 bp, Homo sapien
cagaagggtgatcacactattttgaacagatgc

SEQ ID NO: 270502 - DNA, 33 bp, Homo sapien
cagaagggtgatcacattattttgaacagatgc

SEQ ID NO: 270503 - DNA, 33 bp, Homo sapien
atgaaggaaccacgaacacaaaacaaggaaaac

SEQ ID NO: 270504 - DNA, 33 bp, Homo sapien
atgaaggaaccacgaatacaaaacaaggaaaac

SEQ ID NO: 270505 - DNA, 33 bp, Homo sapien
aaaagacagattttcacagtgctgccatgatgc

SEQ ID NO: 270506 - DNA, 33 bp, Homo sapien
aaaagacagattttcagagtgctgccatgatgc

SEQ ID NO: 270507 - DNA, 33 bp, Homo sapien
tggtgagttttagcaaaatttggatataagaga

SEQ ID NO: 270508 - DNA, 33 bp, Homo sapien
tggtgagttttagcaatatttggatataagaga

SEQ ID NO: 270509 - DNA, 33 bp, Homo sapien
ttaaagagaagagaccacagatatgagaaaaca

SEQ ID NO: 270510 - DNA, 33 bp, Homo sapien
ttaaagagaagagaccgcagatatgagaaaaca

SEQ ID NO: 270511 - DNA, 33 bp, Homo sapien
atccacgcagccaaagaatgatttatcctgaaa

SEQ ID NO: 270512 - DNA, 33 bp, Homo sapien
atccacgcagccaaaggatgatttatcctgaaa

SEQ ID NO: 270513 - DNA, 33 bp, Homo sapien
aattggttaagaccaccgctctctttctacttg

SEQ ID NO: 270514 - DNA, 33 bp, Homo sapien
aattggttaagaccactgctctctttctacttg

SEQ ID NO: 270515 - DNA, 33 bp, Homo sapien
gatcccactgtgtagaaaatgcaatgagggaga

SEQ ID NO: 270516 - DNA, 33 bp, Homo sapien
gatcccactgtgtagagaatgcaatgagggaga

SEQ ID NO: 270517 - DNA, 33 bp, Homo sapien
aaataaaacagtggaaagggtttgggagagtct

SEQ ID NO: 270518 - DNA, 33 bp, Homo sapien
aaataaaacagtggaaggggtttgggagagtct

SEQ ID NO: 270519 - DNA, 33 bp, Homo sapien
tgaggtaaagtggtgcaaggatatttgagtgaa

SEQ ID NO: 270520 - DNA, 33 bp, Homo sapien
tgaggtaaagtggtgcgaggatatttgagtgaa

SEQ ID NO: 270521 - DNA, 33 bp, Homo sapien
ctctctcataggtgatcactaaccaaataaatt

SEQ ID NO: 270522 - DNA, 33 bp, Homo sapien
ctctctcataggtgattactaaccaaataaatt

SEQ ID NO: 270523 - DNA, 33 bp, Homo sapien
ctccagagaagttttcaccaacagattttttaa

SEQ ID NO: 270524 - DNA, 33 bp, Homo sapien
ctccagagaagttttcgccaacagattttttaa

SEQ ID NO: 270525 - DNA, 33 bp, Homo sapien
agtatctagacacagaagtgaccctggcaggaa

SEQ ID NO: 270526 - DNA, 33 bp, Homo sapien
agtatctagacacagacgtgaccctggcaggaa

SEQ ID NO: 270527 - DNA, 33 bp, Homo sapien
ctagggaaatggagcaaaaatgaagcaagctcg

SEQ ID NO: 270528 - DNA, 33 bp, Homo sapien
ctagggaaatggagcagaaatgaagcaagctcg

SEQ ID NO: 270529 - DNA, 33 bp, Homo sapien
accaacataattacgacgtggctgcattcctag

SEQ ID NO: 270530 - DNA, 33 bp, Homo sapien
accaacataattacgatgtggctgcattcctag

SEQ ID NO: 270531 - DNA, 33 bp, Homo sapien
gaaaacaggaggaggaaggcattttaattcact

SEQ ID NO: 270532 - DNA, 33 bp, Homo sapien
gaaaacaggaggaggagggcattttaattcact

SEQ ID NO: 270533 - DNA, 33 bp, Homo sapien
aaatcctaatcttctaaccattatctatagata

SEQ ID NO: 270534 - DNA, 33 bp, Homo sapien
aaatcctaatcttctacccattatctatagata

SEQ ID NO: 270535 - DNA, 33 bp, Homo sapien
agaagattcattataaatgggataactcgtgtg

SEQ ID NO: 270536 - DNA, 33 bp, Homo sapien
agaagattcattataagtgggataactcgtgtg

SEQ ID NO: 270537 - DNA, 33 bp, Homo sapien
atcaatatcagtacaacactaacatccaaataa

SEQ ID NO: 270538 - DNA, 33 bp, Homo sapien
atcaatatcagtacaatactaacatccaaataa

SEQ ID NO: 270539 - DNA, 33 bp, Homo sapien
catttcccagagttaactgactgatctttgcat

SEQ ID NO: 270540 - DNA, 33 bp, Homo sapien
catttcccagagttaattgactgatctttgcat

SEQ ID NO: 270541 - DNA, 33 bp, Homo sapien
ccagtgggaaagctccacagctggtttgttctg

SEQ ID NO: 270542 - DNA, 33 bp, Homo sapien
ccagtgggaaagctccgcagctggtttgttctg

SEQ ID NO: 270543 - DNA, 33 bp, Homo sapien
ttagaccagagaaacactgccagtatataaata

SEQ ID NO: 270544 - DNA, 33 bp, Homo sapien
ttagaccagagaaacagtgccagtatataaata

SEQ ID NO: 270545 - DNA, 33 bp, Homo sapien
gagtttgtgttcaaaccgagggcttaccccaaa

SEQ ID NO: 270546 - DNA, 33 bp, Homo sapien
gagtttgtgttcaaactgagggcttaccccaaa

SEQ ID NO: 270547 - DNA, 33 bp, Homo sapien
gctcaatataagctacgctgttatggctggaat

SEQ ID NO: 270548 - DNA, 33 bp, Homo sapien
gctcaatataagctactctgttatggctggaat

SEQ ID NO: 270549 - DNA, 33 bp, Homo sapien
tctcaaggggagattgaatgtagccttttgggt

SEQ ID NO: 270550 - DNA, 33 bp, Homo sapien
tctcaaggggagattgcatgtagccttttgggt

SEQ ID NO: 270551 - DNA, 33 bp, Homo sapien
ccatttcaagagacagaattttgcataatcact

SEQ ID NO: 270552 - DNA, 33 bp, Homo sapien
ccatttcaagagacagcattttgcataatcact

SEQ ID NO: 270553 - DNA, 33 bp, Homo sapien
agaactaatagaaaagccatgagcccaagggca

SEQ ID NO: 270554 - DNA, 33 bp, Homo sapien
agaactaatagaaaaggcatgagcccaagggca

SEQ ID NO: 270555 - DNA, 33 bp, Homo sapien
ataaagagactttaaccaaaggactatttacct

SEQ ID NO: 270556 - DNA, 33 bp, Homo sapien
ataaagagactttaacgaaaggactatttacct

SEQ ID NO: 270557 - DNA, 33 bp, Homo sapien
aactgcaaacgacctaaatattccacagtagga

SEQ ID NO: 270558 - DNA, 33 bp, Homo sapien
aactgcaaacgacctacatattccacagtagga

SEQ ID NO: 270559 - DNA, 33 bp, Homo sapien
caccacctctccttcacgaaatgtcagtaccac

SEQ ID NO: 270560 - DNA, 33 bp, Homo sapien
caccacctctccttcatgaaatgtcagtaccac

SEQ ID NO: 270561 - DNA, 33 bp, Homo sapien
catgaactctctcatagatggaatctaaaaaag

SEQ ID NO: 270562 - DNA, 33 bp, Homo sapien
catgaactctctcatatatggaatctaaaaaag

SEQ ID NO: 270563 - DNA, 33 bp, Homo sapien
taagtggagcataaccaagggccccagctttca

SEQ ID NO: 270564 - DNA, 33 bp, Homo sapien
taagtggagcataaccgagggccccagctttca

SEQ ID NO: 270565 - DNA, 33 bp, Homo sapien
cacagtaatgaacgcaataacgacgggagccag

SEQ ID NO: 270566 - DNA, 33 bp, Homo sapien
cacagtaatgaacgcagtaacgacgggagccag

SEQ ID NO: 270567 - DNA, 33 bp, Homo sapien
ccctcatatcaagtagcagtgggtcaaagagaa

SEQ ID NO: 270568 - DNA, 33 bp, Homo sapien
ccctcatatcaagtagtagtgggtcaaagagaa

SEQ ID NO: 270569 - DNA, 33 bp, Homo sapien
acataaaccttttatacgtcagagttgaattcc

SEQ ID NO: 270570 - DNA, 33 bp, Homo sapien
acataaaccttttatatgtcagagttgaattcc

SEQ ID NO: 270571 - DNA, 33 bp, Homo sapien
cttggaactttgaagacgacgatcagaggatgc

SEQ ID NO: 270572 - DNA, 33 bp, Homo sapien
cttggaactttgaagaggacgatcagaggatgc

SEQ ID NO: 270573 - DNA, 33 bp, Homo sapien
ttcaatatcttgtccaaagttattgctagcgtt

SEQ ID NO: 270574 - DNA, 33 bp, Homo sapien
ttcaatatcttgtccagagttattgctagcgtt

SEQ ID NO: 270575 - DNA, 33 bp, Homo sapien
taatacccgaagttcaaattacctcttaggtag

SEQ ID NO: 270576 - DNA, 33 bp, Homo sapien
taatacccgaagttcagattacctcttaggtag

SEQ ID NO: 270577 - DNA, 33 bp, Homo sapien
atctctcaaagaatcaagccttagctaaaaatt

SEQ ID NO: 270578 - DNA, 33 bp, Homo sapien
atctctcaaagaatcaggccttagctaaaaatt

SEQ ID NO: 270579 - DNA, 33 bp, Homo sapien
gtgagctatggagaacaggaatcattttatatc

SEQ ID NO: 270580 - DNA, 33 bp, Homo sapien
gtgagctatggagaactggaatcattttatatc

SEQ ID NO: 270581 - DNA, 33 bp, Homo sapien
aaggtcccacacacaaccaattttccattccgt

SEQ ID NO: 270582 - DNA, 33 bp, Homo sapien
aaggtcccacacacaatcaattttccattccgt

SEQ ID NO: 270583 - DNA, 33 bp, Homo sapien
aacagaatttaaaaggaccattctaattatagt

SEQ ID NO: 270584 - DNA, 33 bp, Homo sapien
aacagaatttaaaagggccattctaattatagt

SEQ ID NO: 270585 - DNA, 33 bp, Homo sapien
gcagtgtccacatatcaattccacttttcttgt

SEQ ID NO: 270586 - DNA, 33 bp, Homo sapien
gcagtgtccacatatcgattccacttttcttgt

SEQ ID NO: 270587 - DNA, 33 bp, Homo sapien
ttcttctcagcatatcacacttattccaaaatt

SEQ ID NO: 270588 - DNA, 33 bp, Homo sapien
ttcttctcagcatatcgcacttattccaaaatt

SEQ ID NO: 270589 - DNA, 33 bp, Homo sapien
gctaactgaaacaaaacatagtcacctgaccca

SEQ ID NO: 270590 - DNA, 33 bp, Homo sapien
gctaactgaaacaaaagatagtcacctgaccca

SEQ ID NO: 270591 - DNA, 33 bp, Homo sapien
gtgtgatattgtgaaacagatgtttggtctttg

SEQ ID NO: 270592 - DNA, 33 bp, Homo sapien
gtgtgatattgtgaaatagatgtttggtctttg

SEQ ID NO: 270593 - DNA, 33 bp, Homo sapien
ctaatagttccccagacacattgtgttgtgtga

SEQ ID NO: 270594 - DNA, 33 bp, Homo sapien
ctaatagttccccagatacattgtgttgtgtga

SEQ ID NO: 270595 - DNA, 33 bp, Homo sapien
atctctgcactccccaatcatactttcccattc

SEQ ID NO: 270596 - DNA, 33 bp, Homo sapien
atctctgcactccccagtcatactttcccattc

SEQ ID NO: 270597 - DNA, 33 bp, Homo sapien
tccaattttgagtgtaagcaaatctgtgttttt

SEQ ID NO: 270598 - DNA, 33 bp, Homo sapien
tccaattttgagtgtatgcaaatctgtgttttt

SEQ ID NO: 270599 - DNA, 33 bp, Homo sapien
attttcttttcagtgcagagtttcagagactta

SEQ ID NO: 270600 - DNA, 33 bp, Homo sapien
attttcttttcagtgcggagtttcagagactta

SEQ ID NO: 270601 - DNA, 33 bp, Homo sapien
cacgtgctctaaataaaggaatggaggaagatt

SEQ ID NO: 270602 - DNA, 33 bp, Homo sapien
cacgtgctctaaataagggaatggaggaagatt

SEQ ID NO: 270603 - DNA, 33 bp, Homo sapien
aataatgctcatgactaagatttgtgaataagt

SEQ ID NO: 270604 - DNA, 33 bp, Homo sapien
aataatgctcatgactcagatttgtgaataagt

SEQ ID NO: 270605 - DNA, 33 bp, Homo sapien
ggtatgagagcagaagaaaaacatggtttgaga

SEQ ID NO: 270606 - DNA, 33 bp, Homo sapien
ggtatgagagcagaaggaaaacatggtttgaga

SEQ ID NO: 270607 - DNA, 33 bp, Homo sapien
agcacttagtacagaactggggtcctaaaaata

SEQ ID NO: 270608 - DNA, 33 bp, Homo sapien
agcacttagtacagaattggggtcctaaaaata

SEQ ID NO: 270609 - DNA, 33 bp, Homo sapien
aatgaagtactgatacaagctacaatacagatg

SEQ ID NO: 270610 - DNA, 33 bp, Homo sapien
aatgaagtactgatacgagctacaatacagatg

SEQ ID NO: 270611 - DNA, 33 bp, Homo sapien
tgatctgggcattcctcaaaaagttaacataga

SEQ ID NO: 270612 - DNA, 33 bp, Homo sapien
tgatctgggcattccttaaaaagttaacataga

SEQ ID NO: 270613 - DNA, 33 bp, Homo sapien
caaaaaatgaaaacaaatggtataatgctactt

SEQ ID NO: 270614 - DNA, 33 bp, Homo sapien
caaaaaatgaaaacaagtggtataatgctactt

SEQ ID NO: 270615 - DNA, 33 bp, Homo sapien
aatctcaactgggaaaatgctttaaagaaatca

SEQ ID NO: 270616 - DNA, 33 bp, Homo sapien
aatctcaactgggaaactgctttaaagaaatca

SEQ ID NO: 270617 - DNA, 33 bp, Homo sapien
gtaagccctcagtgataaacagggaaaattcac

SEQ ID NO: 270618 - DNA, 33 bp, Homo sapien
gtaagccctcagtgattaacagggaaaattcac

SEQ ID NO: 270619 - DNA, 33 bp, Homo sapien
gatttgcctggctcaaataagcaagaaatgggc

SEQ ID NO: 270620 - DNA, 33 bp, Homo sapien
gatttgcctggctcaagtaagcaagaaatgggc

SEQ ID NO: 270621 - DNA, 33 bp, Homo sapien
aaaattgttctgagaactacctcctcatcaatc

SEQ ID NO: 270622 - DNA, 33 bp, Homo sapien
aaaattgttctgagaattacctcctcatcaatc

SEQ ID NO: 270623 - DNA, 33 bp, Homo sapien
catgtatttctagtgaccaattcaaattagtac

SEQ ID NO: 270624 - DNA, 33 bp, Homo sapien
catgtatttctagtgatcaattcaaattagtac

SEQ ID NO: 270625 - DNA, 33 bp, Homo sapien
tccatctgccacatcaccttatgctggcattca

SEQ ID NO: 270626 - DNA, 33 bp, Homo sapien
tccatctgccacatcatcttatgctggcattca

SEQ ID NO: 270627 - DNA, 33 bp, Homo sapien
atacattcatgttttacggtatccaaaacatag

SEQ ID NO: 270628 - DNA, 33 bp, Homo sapien
atacattcatgttttatggtatccaaaacatag

SEQ ID NO: 270629 - DNA, 33 bp, Homo sapien
ctgagtgggttttggtaaaatgctcaacaatta

SEQ ID NO: 270630 - DNA, 33 bp, Homo sapien
ctgagtgggttttggttaaatgctcaacaatta

SEQ ID NO: 270631 - DNA, 33 bp, Homo sapien
gaccaaagagactatacaatgtaagtatttgcc

SEQ ID NO: 270632 - DNA, 33 bp, Homo sapien
gaccaaagagactatataatgtaagtatttgcc

SEQ ID NO: 270633 - DNA, 33 bp, Homo sapien
agggactgctcaagtaataaaagatggtagcta

SEQ ID NO: 270634 - DNA, 33 bp, Homo sapien
agggactgctcaagtagtaaaagatggtagcta

SEQ ID NO: 270635 - DNA, 33 bp, Homo sapien
gtttttccaacctaaacaagtcttctttcctca

SEQ ID NO: 270636 - DNA, 33 bp, Homo sapien
gtttttccaacctaaataagtcttctttcctca

SEQ ID NO: 270637 - DNA, 33 bp, Homo sapien
agaggatctaaacaacacagtcaaacaacaagt

SEQ ID NO: 270638 - DNA, 33 bp, Homo sapien
agaggatctaaacaacccagtcaaacaacaagt

SEQ ID NO: 270639 - DNA, 33 bp, Homo sapien
tgtgttcttaacctaccgactgctattctcact

SEQ ID NO: 270640 - DNA, 33 bp, Homo sapien
tgtgttcttaacctactgactgctattctcact

SEQ ID NO: 270641 - DNA, 33 bp, Homo sapien
ttagactccagaaagacagataattgtttagta

SEQ ID NO: 270642 - DNA, 33 bp, Homo sapien
ttagactccagaaagagagataattgtttagta

SEQ ID NO: 270643 - DNA, 33 bp, Homo sapien
tctgacattatctccacgtagacagattggaat

SEQ ID NO: 270644 - DNA, 33 bp, Homo sapien
tctgacattatctccaggtagacagattggaat

SEQ ID NO: 270645 - DNA, 33 bp, Homo sapien
gcatcagctcctgttaaaccagataacctggag

SEQ ID NO: 270646 - DNA, 33 bp, Homo sapien
gcatcagctcctgttagaccagataacctggag

SEQ ID NO: 270647 - DNA, 33 bp, Homo sapien
ctaacctctgatggtacaaatgatctcctgtga

SEQ ID NO: 270648 - DNA, 33 bp, Homo sapien
ctaacctctgatggtagaaatgatctcctgtga

SEQ ID NO: 270649 - DNA, 33 bp, Homo sapien
taacaggacactctccagatttggacccagaac

SEQ ID NO: 270650 - DNA, 33 bp, Homo sapien
taacaggacactctccggatttggacccagaac

SEQ ID NO: 270651 - DNA, 33 bp, Homo sapien
ggagagtgtcctgttacgaactccgtgtttgtg

SEQ ID NO: 270652 - DNA, 33 bp, Homo sapien
ggagagtgtcctgttatgaactccgtgtttgtg

SEQ ID NO: 270653 - DNA, 33 bp, Homo sapien
agaagaagcaaaatcaaactttagtggcagctt

SEQ ID NO: 270654 - DNA, 33 bp, Homo sapien
agaagaagcaaaatcagactttagtggcagctt

SEQ ID NO: 270655 - DNA, 33 bp, Homo sapien
ccactgcatggccaaactccaggtgacgatcat

SEQ ID NO: 270656 - DNA, 33 bp, Homo sapien
ccactgcatggccaaattccaggtgacgatcat

SEQ ID NO: 270657 - DNA, 33 bp, Homo sapien
ggaaaaataaggtcacacctggacttaaaggat

SEQ ID NO: 270658 - DNA, 33 bp, Homo sapien
ggaaaaataaggtcacgcctggacttaaaggat

SEQ ID NO: 270659 - DNA, 33 bp, Homo sapien
aagtctgttctttccactatgctgaatgtcttg

SEQ ID NO: 270660 - DNA, 33 bp, Homo sapien
aagtctgttctttccattatgctgaatgtcttg

SEQ ID NO: 270661 - DNA, 33 bp, Homo sapien
ggagacaattaacctacatgattttttgcatga

SEQ ID NO: 270662 - DNA, 33 bp, Homo sapien
ggagacaattaacctatatgattttttgcatga

SEQ ID NO: 270663 - DNA, 33 bp, Homo sapien
gtaaatcttcttgtgaacaggattcagccttgg

SEQ ID NO: 270664 - DNA, 33 bp, Homo sapien
gtaaatcttcttgtgatcaggattcagccttgg

SEQ ID NO: 270665 - DNA, 33 bp, Homo sapien
acctctctggttaaggaaaaaaaggaaggcagt

SEQ ID NO: 270666 - DNA, 33 bp, Homo sapien
acctctctggttaagggaaaaaaggaaggcagt

SEQ ID NO: 270667 - DNA, 33 bp, Homo sapien
atgaatgtgttatctgaagcctttatctcttta

SEQ ID NO: 270668 - DNA, 33 bp, Homo sapien
atgaatgtgttatctgcagcctttatctcttta

SEQ ID NO: 270669 - DNA, 33 bp, Homo sapien
catgtgccccatagacaggttggtacaactgcc

SEQ ID NO: 270670 - DNA, 33 bp, Homo sapien
catgtgccccatagaccggttggtacaactgcc

SEQ ID NO: 270671 - DNA, 33 bp, Homo sapien
tcagttaaagaacgaaatgatctgatactgcaa

SEQ ID NO: 270672 - DNA, 33 bp, Homo sapien
tcagttaaagaacgaagtgatctgatactgcaa

SEQ ID NO: 270673 - DNA, 33 bp, Homo sapien
tgtgcttaaatatagaatacctaacttggtaga

SEQ ID NO: 270674 - DNA, 33 bp, Homo sapien
tgtgcttaaatatagactacctaacttggtaga

SEQ ID NO: 270675 - DNA, 33 bp, Homo sapien
aagtgggaactaggtccaatatgtgcttaaata

SEQ ID NO: 270676 - DNA, 33 bp, Homo sapien
aagtgggaactaggtctaatatgtgcttaaata

SEQ ID NO: 270677 - DNA, 33 bp, Homo sapien
ggtgaagattaagtaccggcaaaatcacgtcaa

SEQ ID NO: 270678 - DNA, 33 bp, Homo sapien
ggtgaagattaagtactggcaaaatcacgtcaa

SEQ ID NO: 270679 - DNA, 33 bp, Homo sapien
gaaattcaatattgaaatggtcaaaaatggaat

SEQ ID NO: 270680 - DNA, 33 bp, Homo sapien
gaaattcaatattgaagtggtcaaaaatggaat

SEQ ID NO: 270681 - DNA, 33 bp, Homo sapien
atccaactagactataccttcactagggactct

SEQ ID NO: 270682 - DNA, 33 bp, Homo sapien
atccaactagactatagcttcactagggactct

SEQ ID NO: 270683 - DNA, 33 bp, Homo sapien
tttgttttcttctaaaccctagcagtaagtctg

SEQ ID NO: 270684 - DNA, 33 bp, Homo sapien
tttgttttcttctaaatcctagcagtaagtctg

SEQ ID NO: 270685 - DNA, 33 bp, Homo sapien
tgaaccaatgtataaaactccatgtatcaattt

SEQ ID NO: 270686 - DNA, 33 bp, Homo sapien
tgaaccaatgtataaacctccatgtatcaattt

SEQ ID NO: 270687 - DNA, 33 bp, Homo sapien
gaccgttcttggaaggacaggaaggtctagaaa

SEQ ID NO: 270688 - DNA, 33 bp, Homo sapien
gaccgttcttggaaggccaggaaggtctagaaa

SEQ ID NO: 270689 - DNA, 33 bp, Homo sapien
ttgcctggccgcattacccccttttactgataa

SEQ ID NO: 270690 - DNA, 33 bp, Homo sapien
ttgcctggccgcattatccccttttactgataa

SEQ ID NO: 270691 - DNA, 33 bp, Homo sapien
acctggtcttgaagaacagtaaaataataacaa

SEQ ID NO: 270692 - DNA, 33 bp, Homo sapien
acctggtcttgaagaagagtaaaataataacaa

SEQ ID NO: 270693 - DNA, 33 bp, Homo sapien
aaggatagctagtggaacaaatgagatatctga

SEQ ID NO: 270694 - DNA, 33 bp, Homo sapien
aaggatagctagtggagcaaatgagatatctga

SEQ ID NO: 270695 - DNA, 33 bp, Homo sapien
tttgcaaactataagacgaaaatatgggctgtc

SEQ ID NO: 270696 - DNA, 33 bp, Homo sapien
tttgcaaactataagatgaaaatatgggctgtc

SEQ ID NO: 270697 - DNA, 33 bp, Homo sapien
taatcttagaccaaaaagaacctctggggtgat

SEQ ID NO: 270698 - DNA, 33 bp, Homo sapien
taatcttagaccaaaaggaacctctggggtgat

SEQ ID NO: 270699 - DNA, 33 bp, Homo sapien
cggtggtcttcatggtcaaaaagttaaggactt

SEQ ID NO: 270700 - DNA, 33 bp, Homo sapien
cggtggtcttcatggttaaaaagttaaggactt

SEQ ID NO: 270701 - DNA, 33 bp, Homo sapien
attagaagcttggagagagtgtcttaactcaat

SEQ ID NO: 270702 - DNA, 33 bp, Homo sapien
attagaagcttggagatagtgtcttaactcaat

SEQ ID NO: 270703 - DNA, 33 bp, Homo sapien
cctgactcaggaaagcaaatacaacaaaattag

SEQ ID NO: 270704 - DNA, 33 bp, Homo sapien
cctgactcaggaaagcgaatacaacaaaattag

SEQ ID NO: 270705 - DNA, 33 bp, Homo sapien
attgtccttggtgaaactgtgcccactgtagag

SEQ ID NO: 270706 - DNA, 33 bp, Homo sapien
attgtccttggtgaaagtgtgcccactgtagag

SEQ ID NO: 270707 - DNA, 33 bp, Homo sapien
actcaagatcggagaaccaaggtcagacaagtg

SEQ ID NO: 270708 - DNA, 33 bp, Homo sapien
actcaagatcggagaatcaaggtcagacaagtg

SEQ ID NO: 270709 - DNA, 33 bp, Homo sapien
tcctttcaatggacccgggaaaatctactttct

SEQ ID NO: 270710 - DNA, 33 bp, Homo sapien
tcctttcaatggaccctggaaaatctactttct

SEQ ID NO: 270711 - DNA, 33 bp, Homo sapien
cttctgctgtatcccactggctaaacataccat

SEQ ID NO: 270712 - DNA, 33 bp, Homo sapien
cttctgctgtatcccattggctaaacataccat

SEQ ID NO: 270713 - DNA, 33 bp, Homo sapien
agttactttgaagaggcccgggcagaaaccaca

SEQ ID NO: 270714 - DNA, 33 bp, Homo sapien
agttactttgaagaggtccgggcagaaaccaca

SEQ ID NO: 270715 - DNA, 33 bp, Homo sapien
ccagttgggaactccccaatcttggacacatta

SEQ ID NO: 270716 - DNA, 33 bp, Homo sapien
ccagttgggaactccctaatcttggacacatta

SEQ ID NO: 270717 - DNA, 33 bp, Homo sapien
ccatctcacggcagtcagaatggtgattattaa

SEQ ID NO: 270718 - DNA, 33 bp, Homo sapien
ccatctcacggcagtcggaatggtgattattaa

SEQ ID NO: 270719 - DNA, 33 bp, Homo sapien
catctggtgaagccaactgtggactcagctctt

SEQ ID NO: 270720 - DNA, 33 bp, Homo sapien
catctggtgaagccaattgtggactcagctctt

SEQ ID NO: 270721 - DNA, 33 bp, Homo sapien
tcagccccatagctccaaggaacacagtaatga

SEQ ID NO: 270722 - DNA, 33 bp, Homo sapien
tcagccccatagctccgaggaacacagtaatga

SEQ ID NO: 270723 - DNA, 33 bp, Homo sapien
aacaactttgctaatcacagaaatagctcctgc

SEQ ID NO: 270724 - DNA, 33 bp, Homo sapien
aacaactttgctaatcccagaaatagctcctgc

SEQ ID NO: 270725 - DNA, 33 bp, Homo sapien
taatgaaatgcctaacaaaggacctggtctaaa

SEQ ID NO: 270726 - DNA, 33 bp, Homo sapien
taatgaaatgcctaacgaaggacctggtctaaa

SEQ ID NO: 270727 - DNA, 33 bp, Homo sapien
ttacatgatgataaaaactaggaaattaacatt

SEQ ID NO: 270728 - DNA, 33 bp, Homo sapien
ttacatgatgataaaagctaggaaattaacatt

SEQ ID NO: 270729 - DNA, 33 bp, Homo sapien
caaggattggtgaagacgtggaaaaataggaac

SEQ ID NO: 270730 - DNA, 33 bp, Homo sapien
caaggattggtgaagatgtggaaaaataggaac

SEQ ID NO: 270731 - DNA, 33 bp, Homo sapien
agttctgaattctctcaagtaggctcaagtaat

SEQ ID NO: 270732 - DNA, 33 bp, Homo sapien
agttctgaattctctcgagtaggctcaagtaat

SEQ ID NO: 270733 - DNA, 33 bp, Homo sapien
ctgtacaggtgccaacccattaaccctgaggac

SEQ ID NO: 270734 - DNA, 33 bp, Homo sapien
ctgtacaggtgccaactcattaaccctgaggac

SEQ ID NO: 270735 - DNA, 33 bp, Homo sapien
ttctgtggcctgaaacaggcatatgacagctgt

SEQ ID NO: 270736 - DNA, 33 bp, Homo sapien
ttctgtggcctgaaacgggcatatgacagctgt

SEQ ID NO: 270737 - DNA, 33 bp, Homo sapien
agtgtttttttcaaaacgggatagccagcgccc

SEQ ID NO: 270738 - DNA, 33 bp, Homo sapien
agtgtttttttcaaaatgggatagccagcgccc

SEQ ID NO: 270739 - DNA, 33 bp, Homo sapien
ttacagaaaagttgccagaaaggtacaatgaac

SEQ ID NO: 270740 - DNA, 33 bp, Homo sapien
ttacagaaaagttgccggaaaggtacaatgaac

SEQ ID NO: 270741 - DNA, 33 bp, Homo sapien
cattgcccttagaaaaacacagtgatttgttaa

SEQ ID NO: 270742 - DNA, 33 bp, Homo sapien
cattgcccttagaaaaccacagtgatttgttaa

SEQ ID NO: 270743 - DNA, 33 bp, Homo sapien
atcagacacacacacacgtcagtatagtcttag

SEQ ID NO: 270744 - DNA, 33 bp, Homo sapien
atcagacacacacacatgtcagtatagtcttag

SEQ ID NO: 270745 - DNA, 33 bp, Homo sapien
tagactaattacaatacggcataggtgtatgtt

SEQ ID NO: 270746 - DNA, 33 bp, Homo sapien
tagactaattacaatatggcataggtgtatgtt

SEQ ID NO: 270747 - DNA, 33 bp, Homo sapien
acagagtgtgttcctcaatcaagttcatctaaa

SEQ ID NO: 270748 - DNA, 33 bp, Homo sapien
acagagtgtgttcctcgatcaagttcatctaaa

SEQ ID NO: 270749 - DNA, 33 bp, Homo sapien
cagctggcatcctccaacatagcaacacatatt

SEQ ID NO: 270750 - DNA, 33 bp, Homo sapien
cagctggcatcctccaccatagcaacacatatt

SEQ ID NO: 270751 - DNA, 33 bp, Homo sapien
aaaatcaagtttttcaagcagcagtggcatgac

SEQ ID NO: 270752 - DNA, 33 bp, Homo sapien
aaaatcaagtttttcaggcagcagtggcatgac

SEQ ID NO: 270753 - DNA, 33 bp, Homo sapien
gacagagcagcagtagcattttcagaaaaatca

SEQ ID NO: 270754 - DNA, 33 bp, Homo sapien
gacagagcagcagtagtattttcagaaaaatca

SEQ ID NO: 270755 - DNA, 33 bp, Homo sapien
ctgcatggtaattgaacctgtggcaacagagag

SEQ ID NO: 270756 - DNA, 33 bp, Homo sapien
ctgcatggtaattgaagctgtggcaacagagag

SEQ ID NO: 270757 - DNA, 33 bp, Homo sapien
ctttgccaatcaaacccagctacttgttttaaa

SEQ ID NO: 270758 - DNA, 33 bp, Homo sapien
ctttgccaatcaaacctagctacttgttttaaa

SEQ ID NO: 270759 - DNA, 33 bp, Homo sapien
tcattggtggccttaaaatgagcaatttcagtg

SEQ ID NO: 270760 - DNA, 33 bp, Homo sapien
tcattggtggccttaacatgagcaatttcagtg

SEQ ID NO: 270761 - DNA, 33 bp, Homo sapien
aacaatgatcatgaacaaggcaatttagtgcct

SEQ ID NO: 270762 - DNA, 33 bp, Homo sapien
aacaatgatcatgaacgaggcaatttagtgcct

SEQ ID NO: 270763 - DNA, 33 bp, Homo sapien
aataacaaaatggaaactaaaatcagcacctac

SEQ ID NO: 270764 - DNA, 33 bp, Homo sapien
aataacaaaatggaaagtaaaatcagcacctac

SEQ ID NO: 270765 - DNA, 33 bp, Homo sapien
cagccttccatcatagacaggggatgctgtttt

SEQ ID NO: 270766 - DNA, 33 bp, Homo sapien
cagccttccatcatagtcaggggatgctgtttt

SEQ ID NO: 270767 - DNA, 33 bp, Homo sapien
ctttccgtgatgaaggacatcatttctaaatca

SEQ ID NO: 270768 - DNA, 33 bp, Homo sapien
ctttccgtgatgaagggcatcatttctaaatca

SEQ ID NO: 270769 - DNA, 33 bp, Homo sapien
cattaagcaactaaaaccagctggaactaatgg

SEQ ID NO: 270770 - DNA, 33 bp, Homo sapien
cattaagcaactaaaatcagctggaactaatgg

SEQ ID NO: 270771 - DNA, 33 bp, Homo sapien
caccattctcgtaaccccacatttttattatat

SEQ ID NO: 270772 - DNA, 33 bp, Homo sapien
caccattctcgtaacctcacatttttattatat

SEQ ID NO: 270773 - DNA, 33 bp, Homo sapien
atattaatttggggctaaatcaccaatggtttg

SEQ ID NO: 270774 - DNA, 33 bp, Homo sapien
atattaatttggggctgaatcaccaatggtttg

SEQ ID NO: 270775 - DNA, 33 bp, Homo sapien
ggccacacaagactacaaatgggagctgattag

SEQ ID NO: 270776 - DNA, 33 bp, Homo sapien
ggccacacaagactacgaatgggagctgattag

SEQ ID NO: 270777 - DNA, 33 bp, Homo sapien
gttcaaaaagtacttaaaggcaggacccaagta

SEQ ID NO: 270778 - DNA, 33 bp, Homo sapien
gttcaaaaagtacttagaggcaggacccaagta

SEQ ID NO: 270779 - DNA, 33 bp, Homo sapien
agtactattgcttccaacactgtagctcaacag

SEQ ID NO: 270780 - DNA, 33 bp, Homo sapien
agtactattgcttccagcactgtagctcaacag

SEQ ID NO: 270781 - DNA, 33 bp, Homo sapien
agcttacacataagtacgaagcaatgcacagcc

SEQ ID NO: 270782 - DNA, 33 bp, Homo sapien
agcttacacataagtatgaagcaatgcacagcc

SEQ ID NO: 270783 - DNA, 33 bp, Homo sapien
gaattctggaaaatacacaaaatagtaggagga

SEQ ID NO: 270784 - DNA, 33 bp, Homo sapien
gaattctggaaaatacgcaaaatagtaggagga

SEQ ID NO: 270785 - DNA, 33 bp, Homo sapien
gggagttagcagtggacgtggtatgaagtgatc

SEQ ID NO: 270786 - DNA, 33 bp, Homo sapien
gggagttagcagtggaggtggtatgaagtgatc

SEQ ID NO: 270787 - DNA, 33 bp, Homo sapien
atagaggtacacgatagagtaaagggtaaaggg

SEQ ID NO: 270788 - DNA, 33 bp, Homo sapien
atagaggtacacgatatagtaaagggtaaaggg

SEQ ID NO: 270789 - DNA, 33 bp, Homo sapien
atcataaggtaatcaactgccagtataataact

SEQ ID NO: 270790 - DNA, 33 bp, Homo sapien
atcataaggtaatcaattgccagtataataact

SEQ ID NO: 270791 - DNA, 33 bp, Homo sapien
aacctatacctgctggcagttctcaggccctgc

SEQ ID NO: 270792 - DNA, 33 bp, Homo sapien
aacctatacctgctggtagttctcaggccctgc

SEQ ID NO: 270793 - DNA, 33 bp, Homo sapien
gaatttagagaggctacgcttgtactacaggtc

SEQ ID NO: 270794 - DNA, 33 bp, Homo sapien
gaatttagagaggctatgcttgtactacaggtc

SEQ ID NO: 270795 - DNA, 33 bp, Homo sapien
aactggaattaatagcaactaacttttagtact

SEQ ID NO: 270796 - DNA, 33 bp, Homo sapien
aactggaattaatagcgactaacttttagtact

SEQ ID NO: 270797 - DNA, 33 bp, Homo sapien
atgatgagagttgaacaaattgaagattgcttt

SEQ ID NO: 270798 - DNA, 33 bp, Homo sapien
atgatgagagttgaaccaattgaagattgcttt

SEQ ID NO: 270799 - DNA, 33 bp, Homo sapien
tatgagatttctctcaactttacagagtttctt

SEQ ID NO: 270800 - DNA, 33 bp, Homo sapien
tatgagatttctctcagctttacagagtttctt

SEQ ID NO: 270801 - DNA, 33 bp, Homo sapien
ttgatactattctccacacagtgaactcaggag

SEQ ID NO: 270802 - DNA, 33 bp, Homo sapien
ttgatactattctccatacagtgaactcaggag

SEQ ID NO: 270803 - DNA, 33 bp, Homo sapien
tctgacatttccatgaaaaccaaagataaaagt

SEQ ID NO: 270804 - DNA, 33 bp, Homo sapien
tctgacatttccatgagaaccaaagataaaagt

SEQ ID NO: 270805 - DNA, 33 bp, Homo sapien
tagctccccaagataacgatctagcactgtatt

SEQ ID NO: 270806 - DNA, 33 bp, Homo sapien
tagctccccaagataatgatctagcactgtatt

SEQ ID NO: 270807 - DNA, 33 bp, Homo sapien
aagctgtctctaaaacgctgagtgtaagatatc

SEQ ID NO: 270808 - DNA, 33 bp, Homo sapien
aagctgtctctaaaactctgagtgtaagatatc

SEQ ID NO: 270809 - DNA, 33 bp, Homo sapien
agctcacagtccagcaagggacataaacaagct

SEQ ID NO: 270810 - DNA, 33 bp, Homo sapien
agctcacagtccagcaggggacataaacaagct

SEQ ID NO: 270811 - DNA, 33 bp, Homo sapien
gccccttctctatcacaatcttccctcctgctc

SEQ ID NO: 270812 - DNA, 33 bp, Homo sapien
gccccttctctatcaccatcttccctcctgctc

SEQ ID NO: 270813 - DNA, 33 bp, Homo sapien
ttttggtcatctccacagagtaaactaattgca

SEQ ID NO: 270814 - DNA, 33 bp, Homo sapien
ttttggtcatctccacggagtaaactaattgca

SEQ ID NO: 270815 - DNA, 33 bp, Homo sapien
ctaagggtgtggaaggaatcagaaaaactacaa

SEQ ID NO: 270816 - DNA, 33 bp, Homo sapien
ctaagggtgtggaaggcatcagaaaaactacaa

SEQ ID NO: 270817 - DNA, 33 bp, Homo sapien
cttaactatttatataactttcccactccatga

SEQ ID NO: 270818 - DNA, 33 bp, Homo sapien
cttaactatttatatacctttcccactccatga

SEQ ID NO: 270819 - DNA, 33 bp, Homo sapien
tcccttagaagcgccaagagtgaactaaaaaat

SEQ ID NO: 270820 - DNA, 33 bp, Homo sapien
tcccttagaagcgccacgagtgaactaaaaaat

SEQ ID NO: 270821 - DNA, 33 bp, Homo sapien
agtgatatctttggtacgatttttttcaaagcc

SEQ ID NO: 270822 - DNA, 33 bp, Homo sapien
agtgatatctttggtatgatttttttcaaagcc

SEQ ID NO: 270823 - DNA, 33 bp, Homo sapien
atgcatacaagggtacaacacaagctgcagttg

SEQ ID NO: 270824 - DNA, 33 bp, Homo sapien
atgcatacaagggtactacacaagctgcagttg

SEQ ID NO: 270825 - DNA, 33 bp, Homo sapien
aagacaatctgttcagactaggccctgtggctt

SEQ ID NO: 270826 - DNA, 33 bp, Homo sapien
aagacaatctgttcaggctaggccctgtggctt

SEQ ID NO: 270827 - DNA, 33 bp, Homo sapien
taactgtatcaccttaagaagttgcttaactac

SEQ ID NO: 270828 - DNA, 33 bp, Homo sapien
taactgtatcaccttaggaagttgcttaactac

SEQ ID NO: 270829 - DNA, 33 bp, Homo sapien
cctaatttatgaggaaatcaacattgcaaagag

SEQ ID NO: 270830 - DNA, 33 bp, Homo sapien
cctaatttatgaggaagtcaacattgcaaagag

SEQ ID NO: 270831 - DNA, 33 bp, Homo sapien
catgttatctgactcccctttctgctatgagtt

SEQ ID NO: 270832 - DNA, 33 bp, Homo sapien
catgttatctgactccgctttctgctatgagtt

SEQ ID NO: 270833 - DNA, 33 bp, Homo sapien
aggttttggagcagggccaatcagtagatacta

SEQ ID NO: 270834 - DNA, 33 bp, Homo sapien
aggttttggagcagggtcaatcagtagatacta

SEQ ID NO: 270835 - DNA, 33 bp, Homo sapien
aaattcacattttaaaaggatgaattatgtggc

SEQ ID NO: 270836 - DNA, 33 bp, Homo sapien
aaattcacattttaaatggatgaattatgtggc

SEQ ID NO: 270837 - DNA, 33 bp, Homo sapien
tttctaggcttatcatgactgtatcccaacacc

SEQ ID NO: 270838 - DNA, 33 bp, Homo sapien
tttctaggcttatcattactgtatcccaacacc

SEQ ID NO: 270839 - DNA, 33 bp, Homo sapien
gaagaatgaaagagaacggacatcaggcataat

SEQ ID NO: 270840 - DNA, 33 bp, Homo sapien
gaagaatgaaagagaagggacatcaggcataat

SEQ ID NO: 270841 - DNA, 33 bp, Homo sapien
ggaattgctgggccataagataactatatgttt

SEQ ID NO: 270842 - DNA, 33 bp, Homo sapien
ggaattgctgggccatgagataactatatgttt

SEQ ID NO: 270843 - DNA, 33 bp, Homo sapien
tcatcttaaatgttacagagatttgcactgcac

SEQ ID NO: 270844 - DNA, 33 bp, Homo sapien
tcatcttaaatgttacggagatttgcactgcac

SEQ ID NO: 270845 - DNA, 33 bp, Homo sapien
ctgctaatgaggtttaacaatattctcataagc

SEQ ID NO: 270846 - DNA, 33 bp, Homo sapien
ctgctaatgaggtttagcaatattctcataagc

SEQ ID NO: 270847 - DNA, 33 bp, Homo sapien
tgaagttacataacaacagtggattgggagaca

SEQ ID NO: 270848 - DNA, 33 bp, Homo sapien
tgaagttacataacaagagtggattgggagaca

SEQ ID NO: 270849 - DNA, 33 bp, Homo sapien
gtatgtagtagaaccactaaagcttaaacaagt

SEQ ID NO: 270850 - DNA, 33 bp, Homo sapien
gtatgtagtagaaccattaaagcttaaacaagt

SEQ ID NO: 270851 - DNA, 33 bp, Homo sapien
agggtatatggtggtaagagagctgacataaca

SEQ ID NO: 270852 - DNA, 33 bp, Homo sapien
agggtatatggtggtatgagagctgacataaca

SEQ ID NO: 270853 - DNA, 33 bp, Homo sapien
ccaagaaaatgcagtgccaaaggaagaagaaat

SEQ ID NO: 270854 - DNA, 33 bp, Homo sapien
ccaagaaaatgcagtgtcaaaggaagaagaaat

SEQ ID NO: 270855 - DNA, 33 bp, Homo sapien
ataagaagtagcagcccaaactataaaatactt

SEQ ID NO: 270856 - DNA, 33 bp, Homo sapien
ataagaagtagcagcctaaactataaaatactt

SEQ ID NO: 270857 - DNA, 33 bp, Homo sapien
gacacaattcatacacacacaaaaaaaatacaa

SEQ ID NO: 270858 - DNA, 33 bp, Homo sapien
gacacaattcatacactcacaaaaaaaatacaa

SEQ ID NO: 270859 - DNA, 33 bp, Homo sapien
tggtggcactagagaacagaactgagcattcca

SEQ ID NO: 270860 - DNA, 33 bp, Homo sapien
tggtggcactagagaatagaactgagcattcca

SEQ ID NO: 270861 - DNA, 33 bp, Homo sapien
tatattctaaaaactacactttcgcgttgaaca

SEQ ID NO: 270862 - DNA, 33 bp, Homo sapien
tatattctaaaaactatactttcgcgttgaaca

SEQ ID NO: 270863 - DNA, 33 bp, Homo sapien
tactctgatcatactgaatttttattccataaa

SEQ ID NO: 270864 - DNA, 33 bp, Homo sapien
tactctgatcatactgcatttttattccataaa

SEQ ID NO: 270865 - DNA, 33 bp, Homo sapien
gcaaatgcaataaaaacaagggttaatagatgg

SEQ ID NO: 270866 - DNA, 33 bp, Homo sapien
gcaaatgcaataaaaataagggttaatagatgg

SEQ ID NO: 270867 - DNA, 33 bp, Homo sapien
agggccaggcaactgcccttccacctgaagcag

SEQ ID NO: 270868 - DNA, 33 bp, Homo sapien
agggccaggcaactgcgcttccacctgaagcag

SEQ ID NO: 270869 - DNA, 33 bp, Homo sapien
ctggcgtcatctgcatcataaaatttggtctcc

SEQ ID NO: 270870 - DNA, 33 bp, Homo sapien
ctggcgtcatctgcatgataaaatttggtctcc

SEQ ID NO: 270871 - DNA, 33 bp, Homo sapien
ctagcgtggcatataacggtacttgcaaagtag

SEQ ID NO: 270872 - DNA, 33 bp, Homo sapien
ctagcgtggcatataatggtacttgcaaagtag

SEQ ID NO: 270873 - DNA, 33 bp, Homo sapien
aagtaagcagtagttacaagcttaacattacaa

SEQ ID NO: 270874 - DNA, 33 bp, Homo sapien
aagtaagcagtagttagaagcttaacattacaa

SEQ ID NO: 270875 - DNA, 33 bp, Homo sapien
taatagtcagtattaaagaaacctaaaagaaca

SEQ ID NO: 270876 - DNA, 33 bp, Homo sapien
taatagtcagtattaaggaaacctaaaagaaca

SEQ ID NO: 270877 - DNA, 33 bp, Homo sapien
aggattattgtactgacatttgaaggaaaagta

SEQ ID NO: 270878 - DNA, 33 bp, Homo sapien
aggattattgtactgatatttgaaggaaaagta

SEQ ID NO: 270879 - DNA, 33 bp, Homo sapien
atacactgcttcccaaagtgtcacagaagattt

SEQ ID NO: 270880 - DNA, 33 bp, Homo sapien
atacactgcttcccaaggtgtcacagaagattt

SEQ ID NO: 270881 - DNA, 33 bp, Homo sapien
aatattataaatatcactgaagcatttttattg

SEQ ID NO: 270882 - DNA, 33 bp, Homo sapien
aatattataaatatcattgaagcatttttattg

SEQ ID NO: 270883 - DNA, 33 bp, Homo sapien
tgtctcccatgaatcaagtaaacttcttaacca

SEQ ID NO: 270884 - DNA, 33 bp, Homo sapien
tgtctcccatgaatcacgtaaacttcttaacca

SEQ ID NO: 270885 - DNA, 33 bp, Homo sapien
tggtattctcagaaagaatttttagaatggaag

SEQ ID NO: 270886 - DNA, 33 bp, Homo sapien
tggtattctcagaaagtatttttagaatggaag

SEQ ID NO: 270887 - DNA, 33 bp, Homo sapien
tcagtttactgtagaaaattgaatgaatattca

SEQ ID NO: 270888 - DNA, 33 bp, Homo sapien
tcagtttactgtagaagattgaatgaatattca

SEQ ID NO: 270889 - DNA, 33 bp, Homo sapien
tgaaaagacactttgcaatgtatttttgaagct

SEQ ID NO: 270890 - DNA, 33 bp, Homo sapien
tgaaaagacactttgccatgtatttttgaagct

SEQ ID NO: 270891 - DNA, 33 bp, Homo sapien
gtagtttaggactaacaactggggctgcaagga

SEQ ID NO: 270892 - DNA, 33 bp, Homo sapien
gtagtttaggactaacgactggggctgcaagga

SEQ ID NO: 270893 - DNA, 33 bp, Homo sapien
ggaaagttctggctcacgtccttctggaaagac

SEQ ID NO: 270894 - DNA, 33 bp, Homo sapien
ggaaagttctggctcatgtccttctggaaagac

SEQ ID NO: 270895 - DNA, 33 bp, Homo sapien
tgtgtgcgcacattcacaatgttagaaaaaaac

SEQ ID NO: 270896 - DNA, 33 bp, Homo sapien
tgtgtgcgcacattcagaatgttagaaaaaaac

SEQ ID NO: 270897 - DNA, 33 bp, Homo sapien
tggcactttataaaaacactgtcagcctggtct

SEQ ID NO: 270898 - DNA, 33 bp, Homo sapien
tggcactttataaaaatactgtcagcctggtct

SEQ ID NO: 270899 - DNA, 33 bp, Homo sapien
agaaatggttcagctaagcctggtcaatagtaa

SEQ ID NO: 270900 - DNA, 33 bp, Homo sapien
agaaatggttcagctatgcctggtcaatagtaa

SEQ ID NO: 270901 - DNA, 33 bp, Homo sapien
gtagcttccacataaccgtaacaggagcatata

SEQ ID NO: 270902 - DNA, 33 bp, Homo sapien
gtagcttccacataactgtaacaggagcatata

SEQ ID NO: 270903 - DNA, 33 bp, Homo sapien
tctgctaaacactttacaaggacatactcattg

SEQ ID NO: 270904 - DNA, 33 bp, Homo sapien
tctgctaaacactttataaggacatactcattg

SEQ ID NO: 270905 - DNA, 33 bp, Homo sapien
acttgttatggatttacagtaaatgaaaacagc

SEQ ID NO: 270906 - DNA, 33 bp, Homo sapien
acttgttatggatttagagtaaatgaaaacagc

SEQ ID NO: 270907 - DNA, 33 bp, Homo sapien
tggggacactggtgcacgaagtcttctttccta

SEQ ID NO: 270908 - DNA, 33 bp, Homo sapien
tggggacactggtgcatgaagtcttctttccta

SEQ ID NO: 270909 - DNA, 33 bp, Homo sapien
tacatagcaccatctacaaaataactgccaaaa

SEQ ID NO: 270910 - DNA, 33 bp, Homo sapien
tacatagcaccatctataaaataactgccaaaa

SEQ ID NO: 270911 - DNA, 33 bp, Homo sapien
attaaacatggtaaaaagtatttggagcccaag

SEQ ID NO: 270912 - DNA, 33 bp, Homo sapien
attaaacatggtaaaatgtatttggagcccaag

SEQ ID NO: 270913 - DNA, 33 bp, Homo sapien
taacagaaatcataaaaccttaaaataccagct

SEQ ID NO: 270914 - DNA, 33 bp, Homo sapien
taacagaaatcataaagccttaaaataccagct

SEQ ID NO: 270915 - DNA, 33 bp, Homo sapien
tcatttaagcaatgaaccaagtagcactcaaac

SEQ ID NO: 270916 - DNA, 33 bp, Homo sapien
tcatttaagcaatgaagcaagtagcactcaaac

SEQ ID NO: 270917 - DNA, 33 bp, Homo sapien
tttacagatagaacaaatgacacctagaagggg

SEQ ID NO: 270918 - DNA, 33 bp, Homo sapien
tttacagatagaacaagtgacacctagaagggg

SEQ ID NO: 270919 - DNA, 33 bp, Homo sapien
tctccataatctgaccacaacctggatttctag

SEQ ID NO: 270920 - DNA, 33 bp, Homo sapien
tctccataatctgaccgcaacctggatttctag

SEQ ID NO: 270921 - DNA, 33 bp, Homo sapien
gagacggagtgctagacaaaagagctaaataat

SEQ ID NO: 270922 - DNA, 33 bp, Homo sapien
gagacggagtgctagagaaaagagctaaataat

SEQ ID NO: 270923 - DNA, 33 bp, Homo sapien
ggcctgttttgtccgcaaattatttagctcttt

SEQ ID NO: 270924 - DNA, 33 bp, Homo sapien
ggcctgttttgtccgccaattatttagctcttt

SEQ ID NO: 270925 - DNA, 33 bp, Homo sapien
ctagtctttatatccaacacttggaaacagtaa

SEQ ID NO: 270926 - DNA, 33 bp, Homo sapien
ctagtctttatatccagcacttggaaacagtaa

SEQ ID NO: 270927 - DNA, 33 bp, Homo sapien
ccagattccttagctcaaaactgtgaaccacat

SEQ ID NO: 270928 - DNA, 33 bp, Homo sapien
ccagattccttagctcgaaactgtgaaccacat

SEQ ID NO: 270929 - DNA, 33 bp, Homo sapien
cactattactcaattacgttaagccagcagtcc

SEQ ID NO: 270930 - DNA, 33 bp, Homo sapien
cactattactcaattatgttaagccagcagtcc

SEQ ID NO: 270931 - DNA, 33 bp, Homo sapien
actaggcttctgaaaacaccaatcaagagttgc

SEQ ID NO: 270932 - DNA, 33 bp, Homo sapien
actaggcttctgaaaataccaatcaagagttgc

SEQ ID NO: 270933 - DNA, 33 bp, Homo sapien
ggttcatatgtaaccaatctatccctgatggac

SEQ ID NO: 270934 - DNA, 33 bp, Homo sapien
ggttcatatgtaaccactctatccctgatggac

SEQ ID NO: 270935 - DNA, 33 bp, Homo sapien
cgcttctaactacttcacgtgttcttatttaat

SEQ ID NO: 270936 - DNA, 33 bp, Homo sapien
cgcttctaactacttctcgtgttcttatttaat

SEQ ID NO: 270937 - DNA, 33 bp, Homo sapien
caattcatctgtaaaactttatggacctagtgt

SEQ ID NO: 270938 - DNA, 33 bp, Homo sapien
caattcatctgtaaaagtttatggacctagtgt

SEQ ID NO: 270939 - DNA, 33 bp, Homo sapien
acctagcctctaaaacaattttaaatgataaaa

SEQ ID NO: 270940 - DNA, 33 bp, Homo sapien
acctagcctctaaaacgattttaaatgataaaa

SEQ ID NO: 270941 - DNA, 33 bp, Homo sapien
tcaatgtccacctctaataaagataaatcccta

SEQ ID NO: 270942 - DNA, 33 bp, Homo sapien
tcaatgtccacctctagtaaagataaatcccta

SEQ ID NO: 270943 - DNA, 33 bp, Homo sapien
gtaaatcctatttccaactatgcttgatataca

SEQ ID NO: 270944 - DNA, 33 bp, Homo sapien
gtaaatcctatttccagctatgcttgatataca

SEQ ID NO: 270945 - DNA, 33 bp, Homo sapien
tgtgtaagcattatcaaattcgttaacctttct

SEQ ID NO: 270946 - DNA, 33 bp, Homo sapien
tgtgtaagcattatcacattcgttaacctttct

SEQ ID NO: 270947 - DNA, 33 bp, Homo sapien
actagatagatgatcacggccaagtaacctatg

SEQ ID NO: 270948 - DNA, 33 bp, Homo sapien
actagatagatgatcagggccaagtaacctatg

SEQ ID NO: 270949 - DNA, 33 bp, Homo sapien
ctgattgtgcaaagtacaggacattatattcga

SEQ ID NO: 270950 - DNA, 33 bp, Homo sapien
ctgattgtgcaaagtataggacattatattcga

SEQ ID NO: 270951 - DNA, 33 bp, Homo sapien
gtcagtactcgctttaaagaacaagatgggtga

SEQ ID NO: 270952 - DNA, 33 bp, Homo sapien
gtcagtactcgctttagagaacaagatgggtga

SEQ ID NO: 270953 - DNA, 33 bp, Homo sapien
agtatttgtgtgtatacagaaaatctggaaaat

SEQ ID NO: 270954 - DNA, 33 bp, Homo sapien
agtatttgtgtgtatatagaaaatctggaaaat

SEQ ID NO: 270955 - DNA, 33 bp, Homo sapien
attttgacctatctcaccaagcgagagggaggc

SEQ ID NO: 270956 - DNA, 33 bp, Homo sapien
attttgacctatctcatcaagcgagagggaggc

SEQ ID NO: 270957 - DNA, 33 bp, Homo sapien
gtactctgattttcaaaaatgctgcgtctcaaa

SEQ ID NO: 270958 - DNA, 33 bp, Homo sapien
gtactctgattttcaataatgctgcgtctcaaa

SEQ ID NO: 270959 - DNA, 33 bp, Homo sapien
cagcttcctatcctgacattaagtcttagcaaa

SEQ ID NO: 270960 - DNA, 33 bp, Homo sapien
cagcttcctatcctgatattaagtcttagcaaa

SEQ ID NO: 270961 - DNA, 33 bp, Homo sapien
agggagataggtttagaaattaacaacacaatg

SEQ ID NO: 270962 - DNA, 33 bp, Homo sapien
agggagataggtttaggaattaacaacacaatg

SEQ ID NO: 270963 - DNA, 33 bp, Homo sapien
agatcataagcctataaaacagtgattgttaca

SEQ ID NO: 270964 - DNA, 33 bp, Homo sapien
agatcataagcctatagaacagtgattgttaca

SEQ ID NO: 270965 - DNA, 33 bp, Homo sapien
aaaattcactaagggaactcactcaaatggaaa

SEQ ID NO: 270966 - DNA, 33 bp, Homo sapien
aaaattcactaagggagctcactcaaatggaaa

SEQ ID NO: 270967 - DNA, 33 bp, Homo sapien
agtcaaccctcttacaagacttagtggaatttg

SEQ ID NO: 270968 - DNA, 33 bp, Homo sapien
agtcaaccctcttacaggacttagtggaatttg

SEQ ID NO: 270969 - DNA, 33 bp, Homo sapien
ctgtccatttggtgacagatgttagaatcctct

SEQ ID NO: 270970 - DNA, 33 bp, Homo sapien
ctgtccatttggtgacggatgttagaatcctct

SEQ ID NO: 270971 - DNA, 33 bp, Homo sapien
gaaaccaaccatacccaccttcagctcactgat

SEQ ID NO: 270972 - DNA, 33 bp, Homo sapien
gaaaccaaccatacccgccttcagctcactgat

SEQ ID NO: 270973 - DNA, 33 bp, Homo sapien
aacagatctgtgaatcccagattaagaactcaa

SEQ ID NO: 270974 - DNA, 33 bp, Homo sapien
aacagatctgtgaatctcagattaagaactcaa

SEQ ID NO: 270975 - DNA, 33 bp, Homo sapien
tcacctcctgccgtgcaacccagttaataacag

SEQ ID NO: 270976 - DNA, 33 bp, Homo sapien
tcacctcctgccgtgcgacccagttaataacag

SEQ ID NO: 270977 - DNA, 33 bp, Homo sapien
ttatgaatgttctaaacgcaactaaactgtacc

SEQ ID NO: 270978 - DNA, 33 bp, Homo sapien
ttatgaatgttctaaatgcaactaaactgtacc

SEQ ID NO: 270979 - DNA, 33 bp, Homo sapien
acttctcctgcaccgacgacgtgtttgcctgct

SEQ ID NO: 270980 - DNA, 33 bp, Homo sapien
acttctcctgcaccgatgacgtgtttgcctgct

SEQ ID NO: 270981 - DNA, 33 bp, Homo sapien
ataatattccattggagacatatagtaagtgcc

SEQ ID NO: 270982 - DNA, 33 bp, Homo sapien
ataatattccattggatacatatagtaagtgcc

SEQ ID NO: 270983 - DNA, 33 bp, Homo sapien
gttatctcttgaagtaccatcgtttcaggcatt

SEQ ID NO: 270984 - DNA, 33 bp, Homo sapien
gttatctcttgaagtatcatcgtttcaggcatt

SEQ ID NO: 270985 - DNA, 33 bp, Homo sapien
aagaaccggggatgcaagttgataggttcttgt

SEQ ID NO: 270986 - DNA, 33 bp, Homo sapien
aagaaccggggatgcaggttgataggttcttgt

SEQ ID NO: 270987 - DNA, 33 bp, Homo sapien
ccttccgaatagacgcaatctcttgaggggaga

SEQ ID NO: 270988 - DNA, 33 bp, Homo sapien
ccttccgaatagacgcgatctcttgaggggaga

SEQ ID NO: 270989 - DNA, 33 bp, Homo sapien
gagtcaattcaagaaacaggtcatgtatcttac

SEQ ID NO: 270990 - DNA, 33 bp, Homo sapien
gagtcaattcaagaaataggtcatgtatcttac

SEQ ID NO: 270991 - DNA, 33 bp, Homo sapien
actctgttgttaccaccctaccaagcctgttgg

SEQ ID NO: 270992 - DNA, 33 bp, Homo sapien
actctgttgttaccactctaccaagcctgttgg

SEQ ID NO: 270993 - DNA, 33 bp, Homo sapien
atttcacctttgagccgcagtcctcatctgtca

SEQ ID NO: 270994 - DNA, 33 bp, Homo sapien
atttcacctttgagcctcagtcctcatctgtca

SEQ ID NO: 270995 - DNA, 33 bp, Homo sapien
ttttaagtagcctaaacattcttcagcatacaa

SEQ ID NO: 270996 - DNA, 33 bp, Homo sapien
ttttaagtagcctaaatattcttcagcatacaa

SEQ ID NO: 270997 - DNA, 33 bp, Homo sapien
aaacgtcctgcaactccatcacattctgtgatt

SEQ ID NO: 270998 - DNA, 33 bp, Homo sapien
aaacgtcctgcaactctatcacattctgtgatt

SEQ ID NO: 270999 - DNA, 33 bp, Homo sapien
ctttaatattccaaatcagtgagtcaagcccca

SEQ ID NO: 271000 - DNA, 33 bp, Homo sapien
ctttaatattccaaatgagtgagtcaagcccca

SEQ ID NO: 271001 - DNA, 33 bp, Homo sapien
tgcatttgaaataaaaccttttaggctatgcat

SEQ ID NO: 271002 - DNA, 33 bp, Homo sapien
tgcatttgaaataaaatcttttaggctatgcat

SEQ ID NO: 271003 - DNA, 33 bp, Homo sapien
cattgctgcctatgtaccatacgatgtaaagta

SEQ ID NO: 271004 - DNA, 33 bp, Homo sapien
cattgctgcctatgtatcatacgatgtaaagta

SEQ ID NO: 271005 - DNA, 33 bp, Homo sapien
ccccaagttctgcccaatggcacctcaagccaa

SEQ ID NO: 271006 - DNA, 33 bp, Homo sapien
ccccaagttctgcccagtggcacctcaagccaa

SEQ ID NO: 271007 - DNA, 33 bp, Homo sapien
agaaaactgtgcagaacaatacatcaactacta

SEQ ID NO: 271008 - DNA, 33 bp, Homo sapien
agaaaactgtgcagaagaatacatcaactacta

SEQ ID NO: 271009 - DNA, 33 bp, Homo sapien
ccagtctcatgagtgaacaaatcagaatacgtc

SEQ ID NO: 271010 - DNA, 33 bp, Homo sapien
ccagtctcatgagtgagcaaatcagaatacgtc

SEQ ID NO: 271011 - DNA, 33 bp, Homo sapien
ctgccctggagcacaacgtgggcagtggttgca

SEQ ID NO: 271012 - DNA, 33 bp, Homo sapien
ctgccctggagcacaatgtgggcagtggttgca

SEQ ID NO: 271013 - DNA, 33 bp, Homo sapien
ctcctgggctacacaccggtacagcattcctgt

SEQ ID NO: 271014 - DNA, 33 bp, Homo sapien
ctcctgggctacacactggtacagcattcctgt

SEQ ID NO: 271015 - DNA, 33 bp, Homo sapien
aaggtccaggtaaccaggtcccaagattgtatc

SEQ ID NO: 271016 - DNA, 33 bp, Homo sapien
aaggtccaggtaaccatgtcccaagattgtatc

SEQ ID NO: 271017 - DNA, 33 bp, Homo sapien
aaaaaatcatatgagaaaaatagctgtgttttt

SEQ ID NO: 271018 - DNA, 33 bp, Homo sapien
aaaaaatcatatgagacaaatagctgtgttttt

SEQ ID NO: 271019 - DNA, 33 bp, Homo sapien
agagcttcaacaagtaaatgtaaaaggaaacgg

SEQ ID NO: 271020 - DNA, 33 bp, Homo sapien
agagcttcaacaagtagatgtaaaaggaaacgg

SEQ ID NO: 271021 - DNA, 33 bp, Homo sapien
cctttatggcctactccgacaatctttccattt

SEQ ID NO: 271022 - DNA, 33 bp, Homo sapien
cctttatggcctactctgacaatctttccattt

SEQ ID NO: 271023 - DNA, 33 bp, Homo sapien
cgatagatgcgtttaacctgtggcaggccaggt

SEQ ID NO: 271024 - DNA, 33 bp, Homo sapien
cgatagatgcgtttaatctgtggcaggccaggt

SEQ ID NO: 271025 - DNA, 33 bp, Homo sapien
actaagcctttagaaacattcgaatactgaata

SEQ ID NO: 271026 - DNA, 33 bp, Homo sapien
actaagcctttagaaatattcgaatactgaata

SEQ ID NO: 271027 - DNA, 33 bp, Homo sapien
atcaaagactctgcaaattaactccttagcgaa

SEQ ID NO: 271028 - DNA, 33 bp, Homo sapien
atcaaagactctgcaatttaactccttagcgaa

SEQ ID NO: 271029 - DNA, 33 bp, Homo sapien
aaggttttaaggagaacagatgtcagagatata

SEQ ID NO: 271030 - DNA, 33 bp, Homo sapien
aaggttttaaggagaatagatgtcagagatata

SEQ ID NO: 271031 - DNA, 33 bp, Homo sapien
ggtttctgatgtctgcaatcaatgaattatatc

SEQ ID NO: 271032 - DNA, 33 bp, Homo sapien
ggtttctgatgtctgctatcaatgaattatatc

SEQ ID NO: 271033 - DNA, 33 bp, Homo sapien
tttagaaacagtaaaacaaatgcttgattcttt

SEQ ID NO: 271034 - DNA, 33 bp, Homo sapien
tttagaaacagtaaaataaatgcttgattcttt

SEQ ID NO: 271035 - DNA, 33 bp, Homo sapien
ggagctcgggtggtaacacaagcaatgaggagc

SEQ ID NO: 271036 - DNA, 33 bp, Homo sapien
ggagctcgggtggtaatacaagcaatgaggagc

SEQ ID NO: 271037 - DNA, 33 bp, Homo sapien
ttaatcaatacagcaaagtggaaccattacctt

SEQ ID NO: 271038 - DNA, 33 bp, Homo sapien
ttaatcaatacagcaatgtggaaccattacctt

SEQ ID NO: 271039 - DNA, 33 bp, Homo sapien
atgatatgatcttctgaatagaaaattctaaag

SEQ ID NO: 271040 - DNA, 33 bp, Homo sapien
atgatatgatcttctggatagaaaattctaaag

SEQ ID NO: 271041 - DNA, 33 bp, Homo sapien
tttaattctcacaacactattatcaggtagaaa

SEQ ID NO: 271042 - DNA, 33 bp, Homo sapien
tttaattctcacaacagtattatcaggtagaaa

SEQ ID NO: 271043 - DNA, 33 bp, Homo sapien
gtctcctccaaatggcaatatgcaaaggataaa

SEQ ID NO: 271044 - DNA, 33 bp, Homo sapien
gtctcctccaaatggcgatatgcaaaggataaa

SEQ ID NO: 271045 - DNA, 33 bp, Homo sapien
gaatgttttctgatgcacaatatgagcaaatac

SEQ ID NO: 271046 - DNA, 33 bp, Homo sapien
gaatgttttctgatgcgcaatatgagcaaatac

SEQ ID NO: 271047 - DNA, 33 bp, Homo sapien
agaatccactttccaactccagaggctaaaaat

SEQ ID NO: 271048 - DNA, 33 bp, Homo sapien
agaatccactttccaattccagaggctaaaaat

SEQ ID NO: 271049 - DNA, 33 bp, Homo sapien
gtcttacgagtctatgaaaatcaaacacatgag

SEQ ID NO: 271050 - DNA, 33 bp, Homo sapien
gtcttacgagtctatggaaatcaaacacatgag

SEQ ID NO: 271051 - DNA, 33 bp, Homo sapien
gtcctacaagaggagaaggaagataatggggaa

SEQ ID NO: 271052 - DNA, 33 bp, Homo sapien
gtcctacaagaggagagggaagataatggggaa

SEQ ID NO: 271053 - DNA, 33 bp, Homo sapien
tggccctgctcattgcggagatacctgaaaagt

SEQ ID NO: 271054 - DNA, 33 bp, Homo sapien
tggccctgctcattgctgagatacctgaaaagt

SEQ ID NO: 271055 - DNA, 33 bp, Homo sapien
agggtatgcttttacaagagtatatttatgtct

SEQ ID NO: 271056 - DNA, 33 bp, Homo sapien
agggtatgcttttacaggagtatatttatgtct

SEQ ID NO: 271057 - DNA, 33 bp, Homo sapien
tttctagagaagccagaagtttacttatgaaac

SEQ ID NO: 271058 - DNA, 33 bp, Homo sapien
tttctagagaagccaggagtttacttatgaaac

SEQ ID NO: 271059 - DNA, 33 bp, Homo sapien
gagatccactgttccacgaaaattatgccaggg

SEQ ID NO: 271060 - DNA, 33 bp, Homo sapien
gagatccactgttccatgaaaattatgccaggg

SEQ ID NO: 271061 - DNA, 33 bp, Homo sapien
ttagatgttactggaagattgaaatgactggct

SEQ ID NO: 271062 - DNA, 33 bp, Homo sapien
ttagatgttactggaatattgaaatgactggct

SEQ ID NO: 271063 - DNA, 33 bp, Homo sapien
ctgtctccatcgcaaacctgaataattgtaggg

SEQ ID NO: 271064 - DNA, 33 bp, Homo sapien
ctgtctccatcgcaaagctgaataattgtaggg

SEQ ID NO: 271065 - DNA, 33 bp, Homo sapien
taattttgttgcttaaatcgtcccagctttggc

SEQ ID NO: 271066 - DNA, 33 bp, Homo sapien
taattttgttgcttaactcgtcccagctttggc

SEQ ID NO: 271067 - DNA, 33 bp, Homo sapien
taaccagtaagtacagaagagagatgtgaacaa

SEQ ID NO: 271068 - DNA, 33 bp, Homo sapien
taaccagtaagtacaggagagagatgtgaacaa

SEQ ID NO: 271069 - DNA, 33 bp, Homo sapien
ctaactcacccacagcaatttccaatcttgcaa

SEQ ID NO: 271070 - DNA, 33 bp, Homo sapien
ctaactcacccacagccatttccaatcttgcaa

SEQ ID NO: 271071 - DNA, 33 bp, Homo sapien
aattaaaacttacttccctcgcccaggctagag

SEQ ID NO: 271072 - DNA, 33 bp, Homo sapien
aattaaaacttacttctctcgcccaggctagag

SEQ ID NO: 271073 - DNA, 33 bp, Homo sapien
aaccaaaacataaacacaagagactttagtaaa

SEQ ID NO: 271074 - DNA, 33 bp, Homo sapien
aaccaaaacataaacataagagactttagtaaa

SEQ ID NO: 271075 - DNA, 33 bp, Homo sapien
tcatttatctaagtcaaaagcaataagaaagaa

SEQ ID NO: 271076 - DNA, 33 bp, Homo sapien
tcatttatctaagtcataagcaataagaaagaa

SEQ ID NO: 271077 - DNA, 33 bp, Homo sapien
caagctcaagggttgacagtgaaccacaggtag

SEQ ID NO: 271078 - DNA, 33 bp, Homo sapien
caagctcaagggttgatagtgaaccacaggtag

SEQ ID NO: 271079 - DNA, 33 bp, Homo sapien
ttatacatcatcttaagaaattatctcaggcca

SEQ ID NO: 271080 - DNA, 33 bp, Homo sapien
ttatacatcatcttaataaattatctcaggcca

SEQ ID NO: 271081 - DNA, 33 bp, Homo sapien
cttgcaggaggtgttacatcggggaagctatca

SEQ ID NO: 271082 - DNA, 33 bp, Homo sapien
cttgcaggaggtgttatatcggggaagctatca

SEQ ID NO: 271083 - DNA, 33 bp, Homo sapien
tctctcctggcttatacagtatgttaccagcag

SEQ ID NO: 271084 - DNA, 33 bp, Homo sapien
tctctcctggcttatatagtatgttaccagcag

SEQ ID NO: 271085 - DNA, 33 bp, Homo sapien
caggtgtgagactttggaaatttagacttaaac

SEQ ID NO: 271086 - DNA, 33 bp, Homo sapien
caggtgtgagactttgtaaatttagacttaaac

SEQ ID NO: 271087 - DNA, 33 bp, Homo sapien
aggtgagggttgatgcagaaggtatattagaaa

SEQ ID NO: 271088 - DNA, 33 bp, Homo sapien
aggtgagggttgatgcggaaggtatattagaaa

SEQ ID NO: 271089 - DNA, 33 bp, Homo sapien
acatggtttaggaaataaaaatctgtttctaat

SEQ ID NO: 271090 - DNA, 33 bp, Homo sapien
acatggtttaggaaatcaaaatctgtttctaat

SEQ ID NO: 271091 - DNA, 33 bp, Homo sapien
gtatctacggcatagaaacaatggacaaaggga

SEQ ID NO: 271092 - DNA, 33 bp, Homo sapien
gtatctacggcatagatacaatggacaaaggga

SEQ ID NO: 271093 - DNA, 33 bp, Homo sapien
ccttgtcataagtccaaatctttaaattgacat

SEQ ID NO: 271094 - DNA, 33 bp, Homo sapien
ccttgtcataagtccagatctttaaattgacat

SEQ ID NO: 271095 - DNA, 33 bp, Homo sapien
tgcctcttgttggctacaggatagaagctgtag

SEQ ID NO: 271096 - DNA, 33 bp, Homo sapien
tgcctcttgttggctataggatagaagctgtag

SEQ ID NO: 271097 - DNA, 33 bp, Homo sapien
aagcgtaaacttcaaaatcaaaccatctgagct

SEQ ID NO: 271098 - DNA, 33 bp, Homo sapien
aagcgtaaacttcaaagtcaaaccatctgagct

SEQ ID NO: 271099 - DNA, 33 bp, Homo sapien
acgtgtatccatatacaaggtctcattgataca

SEQ ID NO: 271100 - DNA, 33 bp, Homo sapien
acgtgtatccatatactaggtctcattgataca

SEQ ID NO: 271101 - DNA, 33 bp, Homo sapien
aaattattcatacataaggtaggcagaataatg

SEQ ID NO: 271102 - DNA, 33 bp, Homo sapien
aaattattcatacatatggtaggcagaataatg

SEQ ID NO: 271103 - DNA, 33 bp, Homo sapien
acatgataatgacagccgcctttagtcacaacc

SEQ ID NO: 271104 - DNA, 33 bp, Homo sapien
acatgataatgacagctgcctttagtcacaacc

SEQ ID NO: 271105 - DNA, 33 bp, Homo sapien
tctggtgtgtgaaacaagaacccaaatgcattg

SEQ ID NO: 271106 - DNA, 33 bp, Homo sapien
tctggtgtgtgaaacatgaacccaaatgcattg

SEQ ID NO: 271107 - DNA, 33 bp, Homo sapien
aaaaaacagacatccacagtgggaatcactgtg

SEQ ID NO: 271108 - DNA, 33 bp, Homo sapien
aaaaaacagacatccatagtgggaatcactgtg

SEQ ID NO: 271109 - DNA, 33 bp, Homo sapien
actgaaagaaagtcggacagcaaattgcacaga

SEQ ID NO: 271110 - DNA, 33 bp, Homo sapien
actgaaagaaagtcgggcagcaaattgcacaga

SEQ ID NO: 271111 - DNA, 33 bp, Homo sapien
gatgactctgcaagaaatcaggggaaattcaga

SEQ ID NO: 271112 - DNA, 33 bp, Homo sapien
gatgactctgcaagaagtcaggggaaattcaga

SEQ ID NO: 271113 - DNA, 33 bp, Homo sapien
ctgcttcacaggcctcaaactacctctccagtc

SEQ ID NO: 271114 - DNA, 33 bp, Homo sapien
ctgcttcacaggcctcgaactacctctccagtc

SEQ ID NO: 271115 - DNA, 33 bp, Homo sapien
attcaagttagttcaacgtagcattgtctgtcc

SEQ ID NO: 271116 - DNA, 33 bp, Homo sapien
attcaagttagttcaatgtagcattgtctgtcc

SEQ ID NO: 271117 - DNA, 33 bp, Homo sapien
tttctcttgcattttcacataattgggcttgac

SEQ ID NO: 271118 - DNA, 33 bp, Homo sapien
tttctcttgcattttcgcataattgggcttgac

SEQ ID NO: 271119 - DNA, 33 bp, Homo sapien
tagcctggagagtcgacccttcaaaggaaaata

SEQ ID NO: 271120 - DNA, 33 bp, Homo sapien
tagcctggagagtcgatccttcaaaggaaaata

SEQ ID NO: 271121 - DNA, 33 bp, Homo sapien
ctctaaaagaaaccaacacagcacagttcaata

SEQ ID NO: 271122 - DNA, 33 bp, Homo sapien
ctctaaaagaaaccaatacagcacagttcaata

SEQ ID NO: 271123 - DNA, 33 bp, Homo sapien
ccgagtctttgatatacagagaccctattagac

SEQ ID NO: 271124 - DNA, 33 bp, Homo sapien
ccgagtctttgatatatagagaccctattagac

SEQ ID NO: 271125 - DNA, 33 bp, Homo sapien
gccttcacctttgctccccatccatgctggtga

SEQ ID NO: 271126 - DNA, 33 bp, Homo sapien
gccttcacctttgctctccatccatgctggtga

SEQ ID NO: 271127 - DNA, 33 bp, Homo sapien
catcgcttttacctataaaccacatcttccttt

SEQ ID NO: 271128 - DNA, 33 bp, Homo sapien
catcgcttttacctatgaaccacatcttccttt

SEQ ID NO: 271129 - DNA, 33 bp, Homo sapien
ggtgtggacttggtaccgatatttgagtaattc

SEQ ID NO: 271130 - DNA, 33 bp, Homo sapien
ggtgtggacttggtactgatatttgagtaattc

SEQ ID NO: 271131 - DNA, 33 bp, Homo sapien
agttagtcagtaagaagatgatcatttggcaaa

SEQ ID NO: 271132 - DNA, 33 bp, Homo sapien
agttagtcagtaagaatatgatcatttggcaaa

SEQ ID NO: 271133 - DNA, 33 bp, Homo sapien
gtccactaattattcaaatcatctctctttcat

SEQ ID NO: 271134 - DNA, 33 bp, Homo sapien
gtccactaattattcatatcatctctctttcat

SEQ ID NO: 271135 - DNA, 33 bp, Homo sapien
agcaattgcatggttcacttaccaacaggcaat

SEQ ID NO: 271136 - DNA, 33 bp, Homo sapien
agcaattgcatggttcgcttaccaacaggcaat

SEQ ID NO: 271137 - DNA, 33 bp, Homo sapien
cctgtttttgtattccacttgtcacttccctgg

SEQ ID NO: 271138 - DNA, 33 bp, Homo sapien
cctgtttttgtattccgcttgtcacttccctgg

SEQ ID NO: 271139 - DNA, 33 bp, Homo sapien
cctgctgaaagcagacaataatgcctctctcat

SEQ ID NO: 271140 - DNA, 33 bp, Homo sapien
cctgctgaaagcagacgataatgcctctctcat

SEQ ID NO: 271141 - DNA, 33 bp, Homo sapien
ttgttccaaagccaccaaattcatcttttcttt

SEQ ID NO: 271142 - DNA, 33 bp, Homo sapien
ttgttccaaagccaccgaattcatcttttcttt

SEQ ID NO: 271143 - DNA, 33 bp, Homo sapien
ttctctggtctcaaccaaagtcatagtcatttg

SEQ ID NO: 271144 - DNA, 33 bp, Homo sapien
ttctctggtctcaaccgaagtcatagtcatttg

SEQ ID NO: 271145 - DNA, 33 bp, Homo sapien
gtttccgctcatgacaactatgaaaatctctct

SEQ ID NO: 271146 - DNA, 33 bp, Homo sapien
gtttccgctcatgacagctatgaaaatctctct

SEQ ID NO: 271147 - DNA, 33 bp, Homo sapien
tgtttgaagacaaaaaatgttaagccacagaaa

SEQ ID NO: 271148 - DNA, 33 bp, Homo sapien
tgtttgaagacaaaaagtgttaagccacagaaa

SEQ ID NO: 271149 - DNA, 33 bp, Homo sapien
tccctgatcctgtaaccacatgtccacaagtag

SEQ ID NO: 271150 - DNA, 33 bp, Homo sapien
tccctgatcctgtaactacatgtccacaagtag

SEQ ID NO: 271151 - DNA, 33 bp, Homo sapien
tagaacatatacattaccatcattccagaaagt

SEQ ID NO: 271152 - DNA, 33 bp, Homo sapien
tagaacatatacattatcatcattccagaaagt

SEQ ID NO: 271153 - DNA, 33 bp, Homo sapien
ggggacttcctcaaacagataaagaacatctac

SEQ ID NO: 271154 - DNA, 33 bp, Homo sapien
ggggacttcctcaaactgataaagaacatctac

SEQ ID NO: 271155 - DNA, 33 bp, Homo sapien
tctggctcagaaactaacaggatcccaggcagt

SEQ ID NO: 271156 - DNA, 33 bp, Homo sapien
tctggctcagaaactatcaggatcccaggcagt

SEQ ID NO: 271157 - DNA, 33 bp, Homo sapien
aacaaaacaacaactacgcaaaacctacctgtg

SEQ ID NO: 271158 - DNA, 33 bp, Homo sapien
aacaaaacaacaactatgcaaaacctacctgtg

SEQ ID NO: 271159 - DNA, 33 bp, Homo sapien
tgtgtgcagtttgtcaaaaggcaatttatctaa

SEQ ID NO: 271160 - DNA, 33 bp, Homo sapien
tgtgtgcagtttgtcagaaggcaatttatctaa

SEQ ID NO: 271161 - DNA, 33 bp, Homo sapien
ggacattttgtaagtacgtttactcctgcatga

SEQ ID NO: 271162 - DNA, 33 bp, Homo sapien
ggacattttgtaagtatgtttactcctgcatga

SEQ ID NO: 271163 - DNA, 33 bp, Homo sapien
aacagctacacagctaaaactacagtatgagtg

SEQ ID NO: 271164 - DNA, 33 bp, Homo sapien
aacagctacacagctacaactacagtatgagtg

SEQ ID NO: 271165 - DNA, 33 bp, Homo sapien
ccagagcagtaagccacggaacatagtcattgt

SEQ ID NO: 271166 - DNA, 33 bp, Homo sapien
ccagagcagtaagccatggaacatagtcattgt

SEQ ID NO: 271167 - DNA, 33 bp, Homo sapien
acctttggatccagagacaggcacatgacccaa

SEQ ID NO: 271168 - DNA, 33 bp, Homo sapien
acctttggatccagaggcaggcacatgacccaa

SEQ ID NO: 271169 - DNA, 33 bp, Homo sapien
ttctggagctgtctggaataaagtgccatctct

SEQ ID NO: 271170 - DNA, 33 bp, Homo sapien
ttctggagctgtctgggataaagtgccatctct

SEQ ID NO: 271171 - DNA, 33 bp, Homo sapien
ggtgtcccagtctccaaggaagtgaaagtttgg

SEQ ID NO: 271172 - DNA, 33 bp, Homo sapien
ggtgtcccagtctccagggaagtgaaagtttgg

SEQ ID NO: 271173 - DNA, 33 bp, Homo sapien
aaggcagtttacatcaaggtaaagcttccagaa

SEQ ID NO: 271174 - DNA, 33 bp, Homo sapien
aaggcagtttacatcagggtaaagcttccagaa

SEQ ID NO: 271175 - DNA, 33 bp, Homo sapien
ttatgggagaaagtcacacaaagattaaaaaac

SEQ ID NO: 271176 - DNA, 33 bp, Homo sapien
ttatgggagaaagtcatacaaagattaaaaaac

SEQ ID NO: 271177 - DNA, 33 bp, Homo sapien
cataagtgccttatacaagcatgccatttttta

SEQ ID NO: 271178 - DNA, 33 bp, Homo sapien
cataagtgccttatactagcatgccatttttta

SEQ ID NO: 271179 - DNA, 33 bp, Homo sapien
cagagcattaaaacaaatacaggacccttctaa

SEQ ID NO: 271180 - DNA, 33 bp, Homo sapien
cagagcattaaaacaactacaggacccttctaa

SEQ ID NO: 271181 - DNA, 33 bp, Homo sapien
taagtgctaaaaactagagccagcgcttgccaa

SEQ ID NO: 271182 - DNA, 33 bp, Homo sapien
taagtgctaaaaactatagccagcgcttgccaa

SEQ ID NO: 271183 - DNA, 33 bp, Homo sapien
agtaagaggggcaaaaaagatcactgttaggta

SEQ ID NO: 271184 - DNA, 33 bp, Homo sapien
agtaagaggggcaaaagagatcactgttaggta

SEQ ID NO: 271185 - DNA, 33 bp, Homo sapien
agtcaggttctccacaagaagtttctcaaaagt

SEQ ID NO: 271186 - DNA, 33 bp, Homo sapien
agtcaggttctccacacgaagtttctcaaaagt

SEQ ID NO: 271187 - DNA, 33 bp, Homo sapien
tctccactcacaagacactcatagtctaaaagg

SEQ ID NO: 271188 - DNA, 33 bp, Homo sapien
tctccactcacaagacgctcatagtctaaaagg

SEQ ID NO: 271189 - DNA, 33 bp, Homo sapien
attgtgcaatggtgaacgttttgtggtgttttt

SEQ ID NO: 271190 - DNA, 33 bp, Homo sapien
attgtgcaatggtgaatgttttgtggtgttttt

SEQ ID NO: 271191 - DNA, 33 bp, Homo sapien
ctgaaatccaaagatacgtctattgcatttatt

SEQ ID NO: 271192 - DNA, 33 bp, Homo sapien
ctgaaatccaaagatatgtctattgcatttatt

SEQ ID NO: 271193 - DNA, 33 bp, Homo sapien
ctttttcctcttttgacatctcagcatgaactc

SEQ ID NO: 271194 - DNA, 33 bp, Homo sapien
ctttttcctcttttgagatctcagcatgaactc

SEQ ID NO: 271195 - DNA, 33 bp, Homo sapien
caaatcctccatgaacaataaacacacctcttt

SEQ ID NO: 271196 - DNA, 33 bp, Homo sapien
caaatcctccatgaaccataaacacacctcttt

SEQ ID NO: 271197 - DNA, 33 bp, Homo sapien
tgtggttagagagtgacgggctgaagaggttag

SEQ ID NO: 271198 - DNA, 33 bp, Homo sapien
tgtggttagagagtgatgggctgaagaggttag

SEQ ID NO: 271199 - DNA, 33 bp, Homo sapien
tcatctggggcgcttaacaggaaagatgaactt

SEQ ID NO: 271200 - DNA, 33 bp, Homo sapien
tcatctggggcgcttatcaggaaagatgaactt

SEQ ID NO: 271201 - DNA, 33 bp, Homo sapien
ataattactaaaacccacaagctacctgaatgc

SEQ ID NO: 271202 - DNA, 33 bp, Homo sapien
ataattactaaaacccgcaagctacctgaatgc

SEQ ID NO: 271203 - DNA, 33 bp, Homo sapien
acagaaagcacttcacaaaagaggatatccaaa

SEQ ID NO: 271204 - DNA, 33 bp, Homo sapien
acagaaagcacttcacgaaagaggatatccaaa

SEQ ID NO: 271205 - DNA, 33 bp, Homo sapien
tcttactgcttcctggcacatggagtgttccac

SEQ ID NO: 271206 - DNA, 33 bp, Homo sapien
tcttactgcttcctggtacatggagtgttccac

SEQ ID NO: 271207 - DNA, 33 bp, Homo sapien
attcaattgctgttatgaaaggcctactagtgc

SEQ ID NO: 271208 - DNA, 33 bp, Homo sapien
attcaattgctgttattaaaggcctactagtgc

SEQ ID NO: 271209 - DNA, 33 bp, Homo sapien
ttcccctgagaatctacagagacagggtagaac

SEQ ID NO: 271210 - DNA, 33 bp, Homo sapien
ttcccctgagaatctatagagacagggtagaac

SEQ ID NO: 271211 - DNA, 33 bp, Homo sapien
gaaagtcaccttgggaagaactcttgttatccc

SEQ ID NO: 271212 - DNA, 33 bp, Homo sapien
gaaagtcaccttgggaggaactcttgttatccc

SEQ ID NO: 271213 - DNA, 33 bp, Homo sapien
ttcttcctcttccgggaacattgtctgcaggca

SEQ ID NO: 271214 - DNA, 33 bp, Homo sapien
ttcttcctcttccggggacattgtctgcaggca

SEQ ID NO: 271215 - DNA, 33 bp, Homo sapien
tttctggaagagtctacgtacaaatggcattat

SEQ ID NO: 271216 - DNA, 33 bp, Homo sapien
tttctggaagagtctatgtacaaatggcattat

SEQ ID NO: 271217 - DNA, 33 bp, Homo sapien
tatattcaaatacagacggagcttttgctaaaa

SEQ ID NO: 271218 - DNA, 33 bp, Homo sapien
tatattcaaatacagagggagcttttgctaaaa

SEQ ID NO: 271219 - DNA, 33 bp, Homo sapien
tatactacatttcgtaaacaattatttgataca

SEQ ID NO: 271220 - DNA, 33 bp, Homo sapien
tatactacatttcgtacacaattatttgataca

SEQ ID NO: 271221 - DNA, 33 bp, Homo sapien
acttatgcactgatgagattttagcaagttctc

SEQ ID NO: 271222 - DNA, 33 bp, Homo sapien
acttatgcactgatgatattttagcaagttctc

SEQ ID NO: 271223 - DNA, 33 bp, Homo sapien
tattcattcatttttcccttattcaaagccatc

SEQ ID NO: 271224 - DNA, 33 bp, Homo sapien
tattcattcatttttctcttattcaaagccatc

SEQ ID NO: 271225 - DNA, 33 bp, Homo sapien
tcctttgctctaaaacagttgctgtcatttgtg

SEQ ID NO: 271226 - DNA, 33 bp, Homo sapien
tcctttgctctaaaacggttgctgtcatttgtg

SEQ ID NO: 271227 - DNA, 33 bp, Homo sapien
ttgtcattcaggagacaaaaagggggcaaatac

SEQ ID NO: 271228 - DNA, 33 bp, Homo sapien
ttgtcattcaggagacgaaaagggggcaaatac

SEQ ID NO: 271229 - DNA, 33 bp, Homo sapien
ctgtctggcaattgcaatccctgctccagtaca

SEQ ID NO: 271230 - DNA, 33 bp, Homo sapien
ctgtctggcaattgcagtccctgctccagtaca

SEQ ID NO: 271231 - DNA, 33 bp, Homo sapien
atttactaagaggtgactatatgagtggcatta

SEQ ID NO: 271232 - DNA, 33 bp, Homo sapien
atttactaagaggtgagtatatgagtggcatta

SEQ ID NO: 271233 - DNA, 33 bp, Homo sapien
gtgactctgaaaaccaatctttcatttttcctt

SEQ ID NO: 271234 - DNA, 33 bp, Homo sapien
gtgactctgaaaaccagtctttcatttttcctt

SEQ ID NO: 271235 - DNA, 33 bp, Homo sapien
ctctggtctccctgtgaacgatgaccaaatatg

SEQ ID NO: 271236 - DNA, 33 bp, Homo sapien
ctctggtctccctgtggacgatgaccaaatatg

SEQ ID NO: 271237 - DNA, 33 bp, Homo sapien
gcttcaggttgtgaaactcatgatacagaattt

SEQ ID NO: 271238 - DNA, 33 bp, Homo sapien
gcttcaggttgtgaaagtcatgatacagaattt

SEQ ID NO: 271239 - DNA, 33 bp, Homo sapien
ctggctgaatttaccacggactatttttctagc

SEQ ID NO: 271240 - DNA, 33 bp, Homo sapien
ctggctgaatttaccatggactatttttctagc

SEQ ID NO: 271241 - DNA, 33 bp, Homo sapien
tttagacatagaaaaaaaggcccagaagagtta

SEQ ID NO: 271242 - DNA, 33 bp, Homo sapien
tttagacatagaaaaagaggcccagaagagtta

SEQ ID NO: 271243 - DNA, 33 bp, Homo sapien
catggaatcacattacagaaaatcatcagaggc

SEQ ID NO: 271244 - DNA, 33 bp, Homo sapien
catggaatcacattacggaaaatcatcagaggc

SEQ ID NO: 271245 - DNA, 33 bp, Homo sapien
ttgtattttatagaaacgtgcttgatggagatt

SEQ ID NO: 271246 - DNA, 33 bp, Homo sapien
ttgtattttatagaaatgtgcttgatggagatt

SEQ ID NO: 271247 - DNA, 33 bp, Homo sapien
tactactctttggaaaatcataacacaggccca

SEQ ID NO: 271248 - DNA, 33 bp, Homo sapien
tactactctttggaaattcataacacaggccca

SEQ ID NO: 271249 - DNA, 33 bp, Homo sapien
gaagtggatattcacaagaagtaaggcaattca

SEQ ID NO: 271250 - DNA, 33 bp, Homo sapien
gaagtggatattcacaggaagtaaggcaattca

SEQ ID NO: 271251 - DNA, 33 bp, Homo sapien
ttgttaagcaatcataacttggcttatacagag

SEQ ID NO: 271252 - DNA, 33 bp, Homo sapien
ttgttaagcaatcataccttggcttatacagag

SEQ ID NO: 271253 - DNA, 33 bp, Homo sapien
ttagcttcattgctagaatgcttgggactttta

SEQ ID NO: 271254 - DNA, 33 bp, Homo sapien
ttagcttcattgctaggatgcttgggactttta

SEQ ID NO: 271255 - DNA, 33 bp, Homo sapien
caaagtcatctggtgaacagaaactactcagga

SEQ ID NO: 271256 - DNA, 33 bp, Homo sapien
caaagtcatctggtgaccagaaactactcagga

SEQ ID NO: 271257 - DNA, 33 bp, Homo sapien
ttacaaacttcactcacgtatttttccgcttgt

SEQ ID NO: 271258 - DNA, 33 bp, Homo sapien
ttacaaacttcactcaggtatttttccgcttgt

SEQ ID NO: 271259 - DNA, 33 bp, Homo sapien
aaataccctccaggaaatgatgagctaccattt

SEQ ID NO: 271260 - DNA, 33 bp, Homo sapien
aaataccctccaggaagtgatgagctaccattt

SEQ ID NO: 271261 - DNA, 33 bp, Homo sapien
atacggggtcatacagaaacagcttacttatat

SEQ ID NO: 271262 - DNA, 33 bp, Homo sapien
atacggggtcatacaggaacagcttacttatat

SEQ ID NO: 271263 - DNA, 33 bp, Homo sapien
ttgcatgattaaattaagatcggaatgtattgc

SEQ ID NO: 271264 - DNA, 33 bp, Homo sapien
ttgcatgattaaattaggatcggaatgtattgc

SEQ ID NO: 271265 - DNA, 33 bp, Homo sapien
aaagctaggttaaaaaagatagttattgtgctt

SEQ ID NO: 271266 - DNA, 33 bp, Homo sapien
aaagctaggttaaaaaggatagttattgtgctt

SEQ ID NO: 271267 - DNA, 33 bp, Homo sapien
gtaatatattttctgacagttgagataattggt

SEQ ID NO: 271268 - DNA, 33 bp, Homo sapien
gtaatatattttctgatagttgagataattggt

SEQ ID NO: 271269 - DNA, 33 bp, Homo sapien
tggaaaattgttaccaatgattgaatagactat

SEQ ID NO: 271270 - DNA, 33 bp, Homo sapien
tggaaaattgttaccagtgattgaatagactat

SEQ ID NO: 271271 - DNA, 33 bp, Homo sapien
aattgagtcctgtaaaacgtcctcaaagaatca

SEQ ID NO: 271272 - DNA, 33 bp, Homo sapien
aattgagtcctgtaaagcgtcctcaaagaatca

SEQ ID NO: 271273 - DNA, 33 bp, Homo sapien
aatctctgcacattacccagttcccaaagccaa

SEQ ID NO: 271274 - DNA, 33 bp, Homo sapien
aatctctgcacattactcagttcccaaagccaa

SEQ ID NO: 271275 - DNA, 33 bp, Homo sapien
tgacaccaatccaagaaagccaatataacacaa

SEQ ID NO: 271276 - DNA, 33 bp, Homo sapien
tgacaccaatccaagagagccaatataacacaa

SEQ ID NO: 271277 - DNA, 33 bp, Homo sapien
aaatgcaggatatagaagtaaacaattgaattc

SEQ ID NO: 271278 - DNA, 33 bp, Homo sapien
aaatgcaggatatagaggtaaacaattgaattc

SEQ ID NO: 271279 - DNA, 33 bp, Homo sapien
acctgacaaaagcaagaaatggggatatgattc

SEQ ID NO: 271280 - DNA, 33 bp, Homo sapien
acctgacaaaagcaaggaatggggatatgattc

SEQ ID NO: 271281 - DNA, 33 bp, Homo sapien
ctctgtaatcctcaataaattcagttagggtga

SEQ ID NO: 271282 - DNA, 33 bp, Homo sapien
ctctgtaatcctcaatgaattcagttagggtga

SEQ ID NO: 271283 - DNA, 33 bp, Homo sapien
acaaacataaaatggaaatcttaggaacacttt

SEQ ID NO: 271284 - DNA, 33 bp, Homo sapien
acaaacataaaatggacatcttaggaacacttt

SEQ ID NO: 271285 - DNA, 33 bp, Homo sapien
aacaactgcagattacacaagggtaaacactgc

SEQ ID NO: 271286 - DNA, 33 bp, Homo sapien
aacaactgcagattactcaagggtaaacactgc

SEQ ID NO: 271287 - DNA, 33 bp, Homo sapien
actagcagacacataccagcaggttaacatccc

SEQ ID NO: 271288 - DNA, 33 bp, Homo sapien
actagcagacacatacgagcaggttaacatccc

SEQ ID NO: 271289 - DNA, 33 bp, Homo sapien
actgataatgagcataagttttcttttgggggt

SEQ ID NO: 271290 - DNA, 33 bp, Homo sapien
actgataatgagcataggttttcttttgggggt

SEQ ID NO: 271291 - DNA, 33 bp, Homo sapien
taattaatatgcataaccatgggagccatacaa

SEQ ID NO: 271292 - DNA, 33 bp, Homo sapien
taattaatatgcataatcatgggagccatacaa

SEQ ID NO: 271293 - DNA, 33 bp, Homo sapien
tctccagtgtacttccgcattcatgctagtgaa

SEQ ID NO: 271294 - DNA, 33 bp, Homo sapien
tctccagtgtacttcctcattcatgctagtgaa

SEQ ID NO: 271295 - DNA, 33 bp, Homo sapien
agccccagttcttctacgcatttgctatgtcat

SEQ ID NO: 271296 - DNA, 33 bp, Homo sapien
agccccagttcttctatgcatttgctatgtcat

SEQ ID NO: 271297 - DNA, 33 bp, Homo sapien
aaagactcagactgacaaccgagataaaatcac

SEQ ID NO: 271298 - DNA, 33 bp, Homo sapien
aaagactcagactgaccaccgagataaaatcac

SEQ ID NO: 271299 - DNA, 33 bp, Homo sapien
tgtaggcttgtaagaccggaggcctgtgctcag

SEQ ID NO: 271300 - DNA, 33 bp, Homo sapien
tgtaggcttgtaagactggaggcctgtgctcag

SEQ ID NO: 271301 - DNA, 33 bp, Homo sapien
cctgagactttaccgaagtcgcttatcagctta

SEQ ID NO: 271302 - DNA, 33 bp, Homo sapien
cctgagactttaccgacgtcgcttatcagctta

SEQ ID NO: 271303 - DNA, 33 bp, Homo sapien
gtctggggcacccccccaccaacaacagggcca

SEQ ID NO: 271304 - DNA, 33 bp, Homo sapien
gtctggggcacccccctaccaacaacagggcca

SEQ ID NO: 271305 - DNA, 33 bp, Homo sapien
aagtaatgagatcatcaataaagtttgtaaact

SEQ ID NO: 271306 - DNA, 33 bp, Homo sapien
aagtaatgagatcatctataaagtttgtaaact

SEQ ID NO: 271307 - DNA, 33 bp, Homo sapien
gcctgcttgatctggaagtatggaaatggatca

SEQ ID NO: 271308 - DNA, 33 bp, Homo sapien
gcctgcttgatctggaggtatggaaatggatca

SEQ ID NO: 271309 - DNA, 33 bp, Homo sapien
gtatatctgtggaaagaccccttaaagaaaatg

SEQ ID NO: 271310 - DNA, 33 bp, Homo sapien
gtatatctgtggaaaggccccttaaagaaaatg

SEQ ID NO: 271311 - DNA, 33 bp, Homo sapien
tctgtgtgaaggaaaacgcagtgctctggactt

SEQ ID NO: 271312 - DNA, 33 bp, Homo sapien
tctgtgtgaaggaaaatgcagtgctctggactt

SEQ ID NO: 271313 - DNA, 33 bp, Homo sapien
tctattaatctgttgacagtctctcaaagaaag

SEQ ID NO: 271314 - DNA, 33 bp, Homo sapien
tctattaatctgttgatagtctctcaaagaaag

SEQ ID NO: 271315 - DNA, 33 bp, Homo sapien
aaaaagtacttttagaaatccaaatgccagtca

SEQ ID NO: 271316 - DNA, 33 bp, Homo sapien
aaaaagtacttttagatatccaaatgccagtca

SEQ ID NO: 271317 - DNA, 33 bp, Homo sapien
gtgaagggactcaacaatatgaacaaaattagg

SEQ ID NO: 271318 - DNA, 33 bp, Homo sapien
gtgaagggactcaacagtatgaacaaaattagg

SEQ ID NO: 271319 - DNA, 33 bp, Homo sapien
ttgaaggaatgcccaacataaggcttaaggcaa

SEQ ID NO: 271320 - DNA, 33 bp, Homo sapien
ttgaaggaatgcccaatataaggcttaaggcaa

SEQ ID NO: 271321 - DNA, 33 bp, Homo sapien
cagaaagtatgttgtcaacaggtggtaacttcg

SEQ ID NO: 271322 - DNA, 33 bp, Homo sapien
cagaaagtatgttgtcgacaggtggtaacttcg

SEQ ID NO: 271323 - DNA, 33 bp, Homo sapien
gccctgttggggtgtacggtggacgaattcact

SEQ ID NO: 271324 - DNA, 33 bp, Homo sapien
gccctgttggggtgtatggtggacgaattcact

SEQ ID NO: 271325 - DNA, 33 bp, Homo sapien
ctccttctctcttgcacactcatgcccttctag

SEQ ID NO: 271326 - DNA, 33 bp, Homo sapien
ctccttctctcttgcagactcatgcccttctag

SEQ ID NO: 271327 - DNA, 33 bp, Homo sapien
atttgcaaaatatgcaagaaacaaattaaaact

SEQ ID NO: 271328 - DNA, 33 bp, Homo sapien
atttgcaaaatatgcatgaaacaaattaaaact

SEQ ID NO: 271329 - DNA, 33 bp, Homo sapien
tttggaagggtgtccaaccagaagtagtagaaa

SEQ ID NO: 271330 - DNA, 33 bp, Homo sapien
tttggaagggtgtccatccagaagtagtagaaa

SEQ ID NO: 271331 - DNA, 33 bp, Homo sapien
gccatatgcccaagaaccagggttatgttcaat

SEQ ID NO: 271332 - DNA, 33 bp, Homo sapien
gccatatgcccaagaatcagggttatgttcaat

SEQ ID NO: 271333 - DNA, 33 bp, Homo sapien
agtgctgtaactaaggcccagactccacatcac

SEQ ID NO: 271334 - DNA, 33 bp, Homo sapien
agtgctgtaactaaggtccagactccacatcac

SEQ ID NO: 271335 - DNA, 33 bp, Homo sapien
tgcaaagcagtgtatcaacctttttcaggtagc

SEQ ID NO: 271336 - DNA, 33 bp, Homo sapien
tgcaaagcagtgtatcgacctttttcaggtagc

SEQ ID NO: 271337 - DNA, 33 bp, Homo sapien
aagaagtttgcagaaaaagttctgaagtcttgt

SEQ ID NO: 271338 - DNA, 33 bp, Homo sapien
aagaagtttgcagaaagagttctgaagtcttgt

SEQ ID NO: 271339 - DNA, 33 bp, Homo sapien
tcctttatgacatagcacttaatatccctcagt

SEQ ID NO: 271340 - DNA, 33 bp, Homo sapien
tcctttatgacatagcgcttaatatccctcagt

SEQ ID NO: 271341 - DNA, 33 bp, Homo sapien
ggtagcaggaagaaggacagaataccgacacag

SEQ ID NO: 271342 - DNA, 33 bp, Homo sapien
ggtagcaggaagaagggcagaataccgacacag

SEQ ID NO: 271343 - DNA, 33 bp, Homo sapien
gcatcaaggtcatctagaagctttaaataacac

SEQ ID NO: 271344 - DNA, 33 bp, Homo sapien
gcatcaaggtcatctataagctttaaataacac

SEQ ID NO: 271345 - DNA, 33 bp, Homo sapien
gctttcatcttcagagacaaagtggaagtttct

SEQ ID NO: 271346 - DNA, 33 bp, Homo sapien
gctttcatcttcagagccaaagtggaagtttct

SEQ ID NO: 271347 - DNA, 33 bp, Homo sapien
tcaagctagtacataccggctataatacatctc

SEQ ID NO: 271348 - DNA, 33 bp, Homo sapien
tcaagctagtacatactggctataatacatctc

SEQ ID NO: 271349 - DNA, 33 bp, Homo sapien
agctttaaattggctacgttgaggatatttaca

SEQ ID NO: 271350 - DNA, 33 bp, Homo sapien
agctttaaattggctatgttgaggatatttaca

SEQ ID NO: 271351 - DNA, 33 bp, Homo sapien
atgccttccagccttaaggaactacttctcatt

SEQ ID NO: 271352 - DNA, 33 bp, Homo sapien
atgccttccagccttatggaactacttctcatt

SEQ ID NO: 271353 - DNA, 33 bp, Homo sapien
aacttacctgaagataagtttgaaaagttacct

SEQ ID NO: 271354 - DNA, 33 bp, Homo sapien
aacttacctgaagatacgtttgaaaagttacct

SEQ ID NO: 271355 - DNA, 33 bp, Homo sapien
gtatgccagactttcagattgttgcatcttttg

SEQ ID NO: 271356 - DNA, 33 bp, Homo sapien
gtatgccagactttcatattgttgcatcttttg

SEQ ID NO: 271357 - DNA, 33 bp, Homo sapien
gtgctgatgaagcaaacgtgaagggtgtgacag

SEQ ID NO: 271358 - DNA, 33 bp, Homo sapien
gtgctgatgaagcaaatgtgaagggtgtgacag

SEQ ID NO: 271359 - DNA, 33 bp, Homo sapien
ctcagtttgacatcaacgtaaagcccaagactg

SEQ ID NO: 271360 - DNA, 33 bp, Homo sapien
ctcagtttgacatcaaggtaaagcccaagactg

SEQ ID NO: 271361 - DNA, 33 bp, Homo sapien
gggtttgcacggagacactctatgctctctatg

SEQ ID NO: 271362 - DNA, 33 bp, Homo sapien
gggtttgcacggagacgctctatgctctctatg

SEQ ID NO: 271363 - DNA, 33 bp, Homo sapien
ggataaaataagcagacgtgtttgaattaatta

SEQ ID NO: 271364 - DNA, 33 bp, Homo sapien
ggataaaataagcagatgtgtttgaattaatta

SEQ ID NO: 271365 - DNA, 33 bp, Homo sapien
ctgaattcttgaccccaccctgctactagccag

SEQ ID NO: 271366 - DNA, 33 bp, Homo sapien
ctgaattcttgaccccgccctgctactagccag

SEQ ID NO: 271367 - DNA, 33 bp, Homo sapien
aaacaaaattccgtaacagaacacatctttttc

SEQ ID NO: 271368 - DNA, 33 bp, Homo sapien
aaacaaaattccgtaatagaacacatctttttc

SEQ ID NO: 271369 - DNA, 33 bp, Homo sapien
atggaatatgtgtaccgcaattgctttagtcaa

SEQ ID NO: 271370 - DNA, 33 bp, Homo sapien
atggaatatgtgtacctcaattgctttagtcaa

SEQ ID NO: 271371 - DNA, 33 bp, Homo sapien
ctctagaatagaagcacctttggaacagaactt

SEQ ID NO: 271372 - DNA, 33 bp, Homo sapien
ctctagaatagaagcatctttggaacagaactt

SEQ ID NO: 271373 - DNA, 33 bp, Homo sapien
actccctcctgcttgcaaaactacaggagttaa

SEQ ID NO: 271374 - DNA, 33 bp, Homo sapien
actccctcctgcttgccaaactacaggagttaa

SEQ ID NO: 271375 - DNA, 33 bp, Homo sapien
cataatgctttttagccatagataatacgttac

SEQ ID NO: 271376 - DNA, 33 bp, Homo sapien
cataatgctttttagcgatagataatacgttac

SEQ ID NO: 271377 - DNA, 33 bp, Homo sapien
ttgtgaataatgcctcgcaacatgaagatgttt

SEQ ID NO: 271378 - DNA, 33 bp, Homo sapien
ttgtgaataatgcctctcaacatgaagatgttt

SEQ ID NO: 271379 - DNA, 33 bp, Homo sapien
agcaggaagaactcacaggtttaggaaacaagg

SEQ ID NO: 271380 - DNA, 33 bp, Homo sapien
agcaggaagaactcacgggtttaggaaacaagg

SEQ ID NO: 271381 - DNA, 33 bp, Homo sapien
atattacagtacacagcataattacctgccact

SEQ ID NO: 271382 - DNA, 33 bp, Homo sapien
atattacagtacacaggataattacctgccact

SEQ ID NO: 271383 - DNA, 33 bp, Homo sapien
ctacaaccaagagcacactatgaggttttctgc

SEQ ID NO: 271384 - DNA, 33 bp, Homo sapien
ctacaaccaagagcacgctatgaggttttctgc

SEQ ID NO: 271385 - DNA, 33 bp, Homo sapien
aagctattttgttccacgtgcacaggtttttta

SEQ ID NO: 271386 - DNA, 33 bp, Homo sapien
aagctattttgttccatgtgcacaggtttttta

SEQ ID NO: 271387 - DNA, 33 bp, Homo sapien
catagaaatcacttgcagatcttgtaaaacaaa

SEQ ID NO: 271388 - DNA, 33 bp, Homo sapien
catagaaatcacttgcggatcttgtaaaacaaa

SEQ ID NO: 271389 - DNA, 33 bp, Homo sapien
gagaaggaatctactaactagtgaggtaccaac

SEQ ID NO: 271390 - DNA, 33 bp, Homo sapien
gagaaggaatctactagctagtgaggtaccaac

SEQ ID NO: 271391 - DNA, 33 bp, Homo sapien
gagctcaccctgatgcaatgggccgatagcctg

SEQ ID NO: 271392 - DNA, 33 bp, Homo sapien
gagctcaccctgatgcgatgggccgatagcctg

SEQ ID NO: 271393 - DNA, 33 bp, Homo sapien
agaaggccttcctaccacaggtgttccagaaga

SEQ ID NO: 271394 - DNA, 33 bp, Homo sapien
agaaggccttcctaccgcaggtgttccagaaga

SEQ ID NO: 271395 - DNA, 33 bp, Homo sapien
tgtgattactttacaacctaaggactagcttct

SEQ ID NO: 271396 - DNA, 33 bp, Homo sapien
tgtgattactttacaatctaaggactagcttct

SEQ ID NO: 271397 - DNA, 33 bp, Homo sapien
tttacactgcatagccaatgaaaaatggaaagt

SEQ ID NO: 271398 - DNA, 33 bp, Homo sapien
tttacactgcatagccgatgaaaaatggaaagt

SEQ ID NO: 271399 - DNA, 33 bp, Homo sapien
cttacataagttactacgcatactgtgtttcac

SEQ ID NO: 271400 - DNA, 33 bp, Homo sapien
cttacataagttactatgcatactgtgtttcac

SEQ ID NO: 271401 - DNA, 33 bp, Homo sapien
cacctgtgatggaagaataaggccacaggatag

SEQ ID NO: 271402 - DNA, 33 bp, Homo sapien
cacctgtgatggaagactaaggccacaggatag

SEQ ID NO: 271403 - DNA, 33 bp, Homo sapien
aggctcacaggctgacaaggacactagaggggc

SEQ ID NO: 271404 - DNA, 33 bp, Homo sapien
aggctcacaggctgacgaggacactagaggggc

SEQ ID NO: 271405 - DNA, 33 bp, Homo sapien
gcaatttgctatggaaccaggtagagctgacac

SEQ ID NO: 271406 - DNA, 33 bp, Homo sapien
gcaatttgctatggaagcaggtagagctgacac

SEQ ID NO: 271407 - DNA, 33 bp, Homo sapien
tactcaagaatacgtaaaagacctcatatttag

SEQ ID NO: 271408 - DNA, 33 bp, Homo sapien
tactcaagaatacgtagaagacctcatatttag

SEQ ID NO: 271409 - DNA, 33 bp, Homo sapien
atacactttatgcatacaaaagatcattcaggg

SEQ ID NO: 271410 - DNA, 33 bp, Homo sapien
atacactttatgcatagaaaagatcattcaggg

SEQ ID NO: 271411 - DNA, 33 bp, Homo sapien
aaaataaaaacttctgccaaattttagcaatca

SEQ ID NO: 271412 - DNA, 33 bp, Homo sapien
aaaataaaaacttctggcaaattttagcaatca

SEQ ID NO: 271413 - DNA, 33 bp, Homo sapien
agggaagaacttgctactactaacacagaaact

SEQ ID NO: 271414 - DNA, 33 bp, Homo sapien
agggaagaacttgctattactaacacagaaact

SEQ ID NO: 271415 - DNA, 33 bp, Homo sapien
ttatttcacttcagcaactatgtagcctgagga

SEQ ID NO: 271416 - DNA, 33 bp, Homo sapien
ttatttcacttcagcagctatgtagcctgagga

SEQ ID NO: 271417 - DNA, 33 bp, Homo sapien
taaatggctatttttccaaatcaagttggtaaa

SEQ ID NO: 271418 - DNA, 33 bp, Homo sapien
taaatggctatttttctaaatcaagttggtaaa

SEQ ID NO: 271419 - DNA, 33 bp, Homo sapien
ttttagccttcgtttcaagttttggataatttt

SEQ ID NO: 271420 - DNA, 33 bp, Homo sapien
ttttagccttcgtttccagttttggataatttt

SEQ ID NO: 271421 - DNA, 33 bp, Homo sapien
ttacttctccaatcaacagggacctcccctgtt

SEQ ID NO: 271422 - DNA, 33 bp, Homo sapien
ttacttctccaatcaagagggacctcccctgtt

SEQ ID NO: 271423 - DNA, 33 bp, Homo sapien
gagtgtgattaacaggcccacaggttggatgca

SEQ ID NO: 271424 - DNA, 33 bp, Homo sapien
gagtgtgattaacaggtccacaggttggatgca

SEQ ID NO: 271425 - DNA, 33 bp, Homo sapien
aggggacacatctatgaagcaatggtttctcct

SEQ ID NO: 271426 - DNA, 33 bp, Homo sapien
aggggacacatctatgcagcaatggtttctcct

SEQ ID NO: 271427 - DNA, 33 bp, Homo sapien
attcacttccgggaaccgaacttaatcaatcaa

SEQ ID NO: 271428 - DNA, 33 bp, Homo sapien
attcacttccgggaactgaacttaatcaatcaa

SEQ ID NO: 271429 - DNA, 33 bp, Homo sapien
aaatactcactaactaagcatctggcaaaggcc

SEQ ID NO: 271430 - DNA, 33 bp, Homo sapien
aaatactcactaactaggcatctggcaaaggcc

SEQ ID NO: 271431 - DNA, 33 bp, Homo sapien
agccagccagcttccaaatgtggacctttaatc

SEQ ID NO: 271432 - DNA, 33 bp, Homo sapien
agccagccagcttccagatgtggacctttaatc

SEQ ID NO: 271433 - DNA, 33 bp, Homo sapien
actggaccactctggacacgtgcatggacatga

SEQ ID NO: 271434 - DNA, 33 bp, Homo sapien
actggaccactctggagacgtgcatggacatga

SEQ ID NO: 271435 - DNA, 33 bp, Homo sapien
gtccagtgggacatacactgacacctaggcaat

SEQ ID NO: 271436 - DNA, 33 bp, Homo sapien
gtccagtgggacatacgctgacacctaggcaat

SEQ ID NO: 271437 - DNA, 33 bp, Homo sapien
ggattgtgactctacaaaaaaagttgttgtcta

SEQ ID NO: 271438 - DNA, 33 bp, Homo sapien
ggattgtgactctacagaaaaagttgttgtcta

SEQ ID NO: 271439 - DNA, 33 bp, Homo sapien
tctattggcaattgaacagtcattaataacact

SEQ ID NO: 271440 - DNA, 33 bp, Homo sapien
tctattggcaattgaatagtcattaataacact

SEQ ID NO: 271441 - DNA, 33 bp, Homo sapien
gaggaaaggttgtcaaactttagataactccac

SEQ ID NO: 271442 - DNA, 33 bp, Homo sapien
gaggaaaggttgtcaagctttagataactccac

SEQ ID NO: 271443 - DNA, 33 bp, Homo sapien
ataaaagaaaggcatccccccagaatacaacgt

SEQ ID NO: 271444 - DNA, 33 bp, Homo sapien
ataaaagaaaggcatcgccccagaatacaacgt

SEQ ID NO: 271445 - DNA, 33 bp, Homo sapien
aacatgctataatcccaaaggctacagatgcca

SEQ ID NO: 271446 - DNA, 33 bp, Homo sapien
aacatgctataatcccgaaggctacagatgcca

SEQ ID NO: 271447 - DNA, 33 bp, Homo sapien
tctgtgagcacaaaagaatcatcagaagagata

SEQ ID NO: 271448 - DNA, 33 bp, Homo sapien
tctgtgagcacaaaaggatcatcagaagagata

SEQ ID NO: 271449 - DNA, 33 bp, Homo sapien
cctccagtggcttccactcatttaaaatccaaa

SEQ ID NO: 271450 - DNA, 33 bp, Homo sapien
cctccagtggcttccagtcatttaaaatccaaa

SEQ ID NO: 271451 - DNA, 33 bp, Homo sapien
aataaacaatgcttctaaattctatagagatgt

SEQ ID NO: 271452 - DNA, 33 bp, Homo sapien
aataaacaatgcttctgaattctatagagatgt

SEQ ID NO: 271453 - DNA, 33 bp, Homo sapien
atataaatcgaacagacgagcatttttaaaaac

SEQ ID NO: 271454 - DNA, 33 bp, Homo sapien
atataaatcgaacagatgagcatttttaaaaac

SEQ ID NO: 271455 - DNA, 33 bp, Homo sapien
tgacaccttggaaagcaaaacttcgaatagggg

SEQ ID NO: 271456 - DNA, 33 bp, Homo sapien
tgacaccttggaaagcgaaacttcgaatagggg

SEQ ID NO: 271457 - DNA, 33 bp, Homo sapien
gtatatctcatgtgccagaaacactactgggta

SEQ ID NO: 271458 - DNA, 33 bp, Homo sapien
gtatatctcatgtgccggaaacactactgggta

SEQ ID NO: 271459 - DNA, 33 bp, Homo sapien
ttaacacggcaagcctaagactgctatgcttag

SEQ ID NO: 271460 - DNA, 33 bp, Homo sapien
ttaacacggcaagcctgagactgctatgcttag

SEQ ID NO: 271461 - DNA, 33 bp, Homo sapien
gatgttcattaatcacaggtaaattagtagaca

SEQ ID NO: 271462 - DNA, 33 bp, Homo sapien
gatgttcattaatcacgggtaaattagtagaca

SEQ ID NO: 271463 - DNA, 33 bp, Homo sapien
aagaacaagcaggtccgcgtagcccagaggaag

SEQ ID NO: 271464 - DNA, 33 bp, Homo sapien
aagaacaagcaggtcctcgtagcccagaggaag

SEQ ID NO: 271465 - DNA, 33 bp, Homo sapien
gcttaataatccatataaaaagtctagctctcg

SEQ ID NO: 271466 - DNA, 33 bp, Homo sapien
gcttaataatccatatgaaaagtctagctctcg

SEQ ID NO: 271467 - DNA, 33 bp, Homo sapien
ccatgtgatgagttagaacagcttaataatcca

SEQ ID NO: 271468 - DNA, 33 bp, Homo sapien
ccatgtgatgagttaggacagcttaataatcca

SEQ ID NO: 271469 - DNA, 33 bp, Homo sapien
acatttctatcagcgacgtgacactttcagttg

SEQ ID NO: 271470 - DNA, 33 bp, Homo sapien
acatttctatcagcgatgtgacactttcagttg

SEQ ID NO: 271471 - DNA, 33 bp, Homo sapien
gtgtgtatgaaaggggcatagcgccagagatga

SEQ ID NO: 271472 - DNA, 33 bp, Homo sapien
gtgtgtatgaaaggggtatagcgccagagatga

SEQ ID NO: 271473 - DNA, 33 bp, Homo sapien
ggacattcatttttcacctccaaaactgttcaa

SEQ ID NO: 271474 - DNA, 33 bp, Homo sapien
ggacattcatttttcatctccaaaactgttcaa

SEQ ID NO: 271475 - DNA, 33 bp, Homo sapien
actggtacacctcctaccaccatataagcatct

SEQ ID NO: 271476 - DNA, 33 bp, Homo sapien
actggtacacctcctatcaccatataagcatct

SEQ ID NO: 271477 - DNA, 33 bp, Homo sapien
cctcttggtctctctccatgccctgactgtctt

SEQ ID NO: 271478 - DNA, 33 bp, Homo sapien
cctcttggtctctctcgatgccctgactgtctt

SEQ ID NO: 271479 - DNA, 33 bp, Homo sapien
ttgattagtcggatctcaatctagacgaagctt

SEQ ID NO: 271480 - DNA, 33 bp, Homo sapien
ttgattagtcggatctgaatctagacgaagctt

SEQ ID NO: 271481 - DNA, 33 bp, Homo sapien
ctttgaatgtcaggaaccttttcttcttgtagt

SEQ ID NO: 271482 - DNA, 33 bp, Homo sapien
ctttgaatgtcaggaatcttttcttcttgtagt

SEQ ID NO: 271483 - DNA, 33 bp, Homo sapien
acggcaaaaaagcttacaatgggtagtgaaatt

SEQ ID NO: 271484 - DNA, 33 bp, Homo sapien
acggcaaaaaagcttagaatgggtagtgaaatt

SEQ ID NO: 271485 - DNA, 33 bp, Homo sapien
ttgcaaaccagacagaaagatcccctcttgatc

SEQ ID NO: 271486 - DNA, 33 bp, Homo sapien
ttgcaaaccagacagacagatcccctcttgatc

SEQ ID NO: 271487 - DNA, 33 bp, Homo sapien
cccaggataggctatgcatttcctcaacttata

SEQ ID NO: 271488 - DNA, 33 bp, Homo sapien
cccaggataggctatgtatttcctcaacttata

SEQ ID NO: 271489 - DNA, 33 bp, Homo sapien
ctagtcctagaagctacagtcctagatcctcaa

SEQ ID NO: 271490 - DNA, 33 bp, Homo sapien
ctagtcctagaagctagagtcctagatcctcaa

SEQ ID NO: 271491 - DNA, 33 bp, Homo sapien
acatttgagggcctcactgaaataagtaagaat

SEQ ID NO: 271492 - DNA, 33 bp, Homo sapien
acatttgagggcctcattgaaataagtaagaat

SEQ ID NO: 271493 - DNA, 33 bp, Homo sapien
agagtaacggttctgaagttagaccatgagggc

SEQ ID NO: 271494 - DNA, 33 bp, Homo sapien
agagtaacggttctgatgttagaccatgagggc

SEQ ID NO: 271495 - DNA, 33 bp, Homo sapien
atactcaggaaatagaactctggcaaacagccc

SEQ ID NO: 271496 - DNA, 33 bp, Homo sapien
atactcaggaaatagacctctggcaaacagccc

SEQ ID NO: 271497 - DNA, 33 bp, Homo sapien
atctgtgctagagggagtatggctcatgcgagg

SEQ ID NO: 271498 - DNA, 33 bp, Homo sapien
atctgtgctagagggattatggctcatgcgagg

SEQ ID NO: 271499 - DNA, 33 bp, Homo sapien
gataacaggaatttgacggttagtgatggtaac

SEQ ID NO: 271500 - DNA, 33 bp, Homo sapien
gataacaggaatttgatggttagtgatggtaac

SEQ ID NO: 271501 - DNA, 33 bp, Homo sapien
ctcctttgccttatgcgcctcccaatggcaagc

SEQ ID NO: 271502 - DNA, 33 bp, Homo sapien
ctcctttgccttatgctcctcccaatggcaagc

SEQ ID NO: 271503 - DNA, 33 bp, Homo sapien
aaaatgtttcttagtaatacaaaatgcatacac

SEQ ID NO: 271504 - DNA, 33 bp, Homo sapien
aaaatgtttcttagtagtacaaaatgcatacac

SEQ ID NO: 271505 - DNA, 33 bp, Homo sapien
gaacccattgaattccaaagaatacctgtcaaa

SEQ ID NO: 271506 - DNA, 33 bp, Homo sapien
gaacccattgaattccgaagaatacctgtcaaa

SEQ ID NO: 271507 - DNA, 33 bp, Homo sapien
gcctcttctcttctccagcattggtctgaacac

SEQ ID NO: 271508 - DNA, 33 bp, Homo sapien
gcctcttctcttctccggcattggtctgaacac

SEQ ID NO: 271509 - DNA, 33 bp, Homo sapien
gacactttctttagcccgagcacatttttaact

SEQ ID NO: 271510 - DNA, 33 bp, Homo sapien
gacactttctttagcctgagcacatttttaact

SEQ ID NO: 271511 - DNA, 33 bp, Homo sapien
atatagtattctcaaaactgactacaaataatt

SEQ ID NO: 271512 - DNA, 33 bp, Homo sapien
atatagtattctcaaagctgactacaaataatt

SEQ ID NO: 271513 - DNA, 33 bp, Homo sapien
agtttatttttctaaaagtattcagcaaagact

SEQ ID NO: 271514 - DNA, 33 bp, Homo sapien
agtttatttttctaaatgtattcagcaaagact

SEQ ID NO: 271515 - DNA, 33 bp, Homo sapien
tctttttgagccattcacacccactgatatcac

SEQ ID NO: 271516 - DNA, 33 bp, Homo sapien
tctttttgagccattcgcacccactgatatcac

SEQ ID NO: 271517 - DNA, 33 bp, Homo sapien
gtaaaagcccagcatacgtagtcagtgcttgca

SEQ ID NO: 271518 - DNA, 33 bp, Homo sapien
gtaaaagcccagcatatgtagtcagtgcttgca

SEQ ID NO: 271519 - DNA, 33 bp, Homo sapien
ctgatgaatgacccaacgcgtgaatgcatcctc

SEQ ID NO: 271520 - DNA, 33 bp, Homo sapien
ctgatgaatgacccaatgcgtgaatgcatcctc

SEQ ID NO: 271521 - DNA, 33 bp, Homo sapien
tccatcaacagtatacagggttccaatttctcc

SEQ ID NO: 271522 - DNA, 33 bp, Homo sapien
tccatcaacagtatacggggttccaatttctcc

SEQ ID NO: 271523 - DNA, 33 bp, Homo sapien
gtggactcattttaaacgcaaggggtgaggcca

SEQ ID NO: 271524 - DNA, 33 bp, Homo sapien
gtggactcattttaaatgcaaggggtgaggcca

SEQ ID NO: 271525 - DNA, 33 bp, Homo sapien
tggttgtgaccaggacagaggagtgtgttaaca

SEQ ID NO: 271526 - DNA, 33 bp, Homo sapien
tggttgtgaccaggacggaggagtgtgttaaca

SEQ ID NO: 271527 - DNA, 33 bp, Homo sapien
aagagatagttgcataacgtgttcatggcagca

SEQ ID NO: 271528 - DNA, 33 bp, Homo sapien
aagagatagttgcataccgtgttcatggcagca

SEQ ID NO: 271529 - DNA, 33 bp, Homo sapien
agatgatcttaggtagaacgttttatcttttct

SEQ ID NO: 271530 - DNA, 33 bp, Homo sapien
agatgatcttaggtagtacgttttatcttttct

SEQ ID NO: 271531 - DNA, 33 bp, Homo sapien
ctgtcattggaaaaaaatatttggcagaacatt

SEQ ID NO: 271532 - DNA, 33 bp, Homo sapien
ctgtcattggaaaaaattatttggcagaacatt

SEQ ID NO: 271533 - DNA, 33 bp, Homo sapien
ccagagatgaatacaacgtgggaagcactgatg

SEQ ID NO: 271534 - DNA, 33 bp, Homo sapien
ccagagatgaatacaatgtgggaagcactgatg

SEQ ID NO: 271535 - DNA, 33 bp, Homo sapien
cacactgtcttctaaaagtcacttggtatctct

SEQ ID NO: 271536 - DNA, 33 bp, Homo sapien
cacactgtcttctaaatgtcacttggtatctct

SEQ ID NO: 271537 - DNA, 33 bp, Homo sapien
catgaaattttgcttcactgtctccactttcag

SEQ ID NO: 271538 - DNA, 33 bp, Homo sapien
catgaaattttgcttcgctgtctccactttcag

SEQ ID NO: 271539 - DNA, 33 bp, Homo sapien
tgacatggactgagatcaggaaagatgtgggtg

SEQ ID NO: 271540 - DNA, 33 bp, Homo sapien
tgacatggactgagatgaggaaagatgtgggtg

SEQ ID NO: 271541 - DNA, 33 bp, Homo sapien
atggccaatatttgtcaagggctaagattaaaa

SEQ ID NO: 271542 - DNA, 33 bp, Homo sapien
atggccaatatttgtcgagggctaagattaaaa

SEQ ID NO: 271543 - DNA, 33 bp, Homo sapien
gcatgtgcttctctaacacacattacttcatca

SEQ ID NO: 271544 - DNA, 33 bp, Homo sapien
gcatgtgcttctctaatacacattacttcatca

SEQ ID NO: 271545 - DNA, 33 bp, Homo sapien
taacccatctttgtcccctacactagatttcaa

SEQ ID NO: 271546 - DNA, 33 bp, Homo sapien
taacccatctttgtcctctacactagatttcaa

SEQ ID NO: 271547 - DNA, 33 bp, Homo sapien
catgtatagaggtagacactggattggaaatgt

SEQ ID NO: 271548 - DNA, 33 bp, Homo sapien
catgtatagaggtagagactggattggaaatgt

SEQ ID NO: 271549 - DNA, 33 bp, Homo sapien
aattttgcagtgggaaaggactcagatagatgg

SEQ ID NO: 271550 - DNA, 33 bp, Homo sapien
aattttgcagtgggaacggactcagatagatgg

SEQ ID NO: 271551 - DNA, 33 bp, Homo sapien
tcatgacaaaagccaaccctatatccagcagaa

SEQ ID NO: 271552 - DNA, 33 bp, Homo sapien
tcatgacaaaagccaatcctatatccagcagaa

SEQ ID NO: 271553 - DNA, 33 bp, Homo sapien
ggtaaattggagtacactgaaattacaagcttc

SEQ ID NO: 271554 - DNA, 33 bp, Homo sapien
ggtaaattggagtacattgaaattacaagcttc

SEQ ID NO: 271555 - DNA, 33 bp, Homo sapien
actattagaagcagctaaaaaatggggtcaacc

SEQ ID NO: 271556 - DNA, 33 bp, Homo sapien
actattagaagcagcttaaaaatggggtcaacc

SEQ ID NO: 271557 - DNA, 33 bp, Homo sapien
ctgagaatcgggtaacagagaggtttattgatt

SEQ ID NO: 271558 - DNA, 33 bp, Homo sapien
ctgagaatcgggtaacggagaggtttattgatt

SEQ ID NO: 271559 - DNA, 33 bp, Homo sapien
ttggttaatgcactaccggcttcttaactcact

SEQ ID NO: 271560 - DNA, 33 bp, Homo sapien
ttggttaatgcactactggcttcttaactcact

SEQ ID NO: 271561 - DNA, 33 bp, Homo sapien
acactgcctttgaagccatatcatgtgggaggc

SEQ ID NO: 271562 - DNA, 33 bp, Homo sapien
acactgcctttgaagctatatcatgtgggaggc

SEQ ID NO: 271563 - DNA, 33 bp, Homo sapien
gaatgtggaaaccttcacagctgaggttccctc

SEQ ID NO: 271564 - DNA, 33 bp, Homo sapien
gaatgtggaaaccttcgcagctgaggttccctc

SEQ ID NO: 271565 - DNA, 33 bp, Homo sapien
ctaatataattgtaaggattcctcccacgagct

SEQ ID NO: 271566 - DNA, 33 bp, Homo sapien
ctaatataattgtaagtattcctcccacgagct

SEQ ID NO: 271567 - DNA, 33 bp, Homo sapien
ttttaccataattcaacaggtgctcgctaggtc

SEQ ID NO: 271568 - DNA, 33 bp, Homo sapien
ttttaccataattcaataggtgctcgctaggtc

SEQ ID NO: 271569 - DNA, 33 bp, Homo sapien
ttttactggagttactcactggcagaaaatttc

SEQ ID NO: 271570 - DNA, 33 bp, Homo sapien
ttttactggagttactgactggcagaaaatttc

SEQ ID NO: 271571 - DNA, 33 bp, Homo sapien
atcagataactgcataaaaatgagaatatgatc

SEQ ID NO: 271572 - DNA, 33 bp, Homo sapien
atcagataactgcatacaaatgagaatatgatc

SEQ ID NO: 271573 - DNA, 33 bp, Homo sapien
ttctgtcttttcccacaaatctgcccttcttcc

SEQ ID NO: 271574 - DNA, 33 bp, Homo sapien
ttctgtcttttcccacgaatctgcccttcttcc

SEQ ID NO: 271575 - DNA, 33 bp, Homo sapien
catgcttggaattcaacagtttcaggtgttccg

SEQ ID NO: 271576 - DNA, 33 bp, Homo sapien
catgcttggaattcaatagtttcaggtgttccg

SEQ ID NO: 271577 - DNA, 33 bp, Homo sapien
ttatgattatttcattaaagtgtccagtgatga

SEQ ID NO: 271578 - DNA, 33 bp, Homo sapien
ttatgattatttcattgaagtgtccagtgatga

SEQ ID NO: 271579 - DNA, 33 bp, Homo sapien
gtccccagtattccagcaatgatggcccagtca

SEQ ID NO: 271580 - DNA, 33 bp, Homo sapien
gtccccagtattccaggaatgatggcccagtca

SEQ ID NO: 271581 - DNA, 33 bp, Homo sapien
attgaagaggcatttacatacccacgttcatag

SEQ ID NO: 271582 - DNA, 33 bp, Homo sapien
attgaagaggcatttatatacccacgttcatag

SEQ ID NO: 271583 - DNA, 33 bp, Homo sapien
gttcctcagatgcagcaaactcatttctgcctc

SEQ ID NO: 271584 - DNA, 33 bp, Homo sapien
gttcctcagatgcagcgaactcatttctgcctc

SEQ ID NO: 271585 - DNA, 33 bp, Homo sapien
gggctgtctcaagaaaattgggcaacgggttca

SEQ ID NO: 271586 - DNA, 33 bp, Homo sapien
gggctgtctcaagaaagttgggcaacgggttca

SEQ ID NO: 271587 - DNA, 33 bp, Homo sapien
attagcaacttttgtagaaatccagatttgcag

SEQ ID NO: 271588 - DNA, 33 bp, Homo sapien
attagcaacttttgtataaatccagatttgcag

SEQ ID NO: 271589 - DNA, 33 bp, Homo sapien
tggtgtgtcatgccaaaaaagtgggctactcag

SEQ ID NO: 271590 - DNA, 33 bp, Homo sapien
tggtgtgtcatgccaagaaagtgggctactcag

SEQ ID NO: 271591 - DNA, 33 bp, Homo sapien
ggctttccaggaatcacctctgcagaaagaagc

SEQ ID NO: 271592 - DNA, 33 bp, Homo sapien
ggctttccaggaatcagctctgcagaaagaagc

SEQ ID NO: 271593 - DNA, 33 bp, Homo sapien
ctcacctggcaagtcccacagaaatcatcttgg

SEQ ID NO: 271594 - DNA, 33 bp, Homo sapien
ctcacctggcaagtcctacagaaatcatcttgg

SEQ ID NO: 271595 - DNA, 33 bp, Homo sapien
ctgtcactcacaatcaagagctgaattcttcca

SEQ ID NO: 271596 - DNA, 33 bp, Homo sapien
ctgtcactcacaatcaggagctgaattcttcca

SEQ ID NO: 271597 - DNA, 33 bp, Homo sapien
ttttgttcacttattgaaagtttggtttttagc

SEQ ID NO: 271598 - DNA, 33 bp, Homo sapien
ttttgttcacttattggaagtttggtttttagc

SEQ ID NO: 271599 - DNA, 33 bp, Homo sapien
cccaccttcagggcccactgcatcacaccttgg

SEQ ID NO: 271600 - DNA, 33 bp, Homo sapien
cccaccttcagggcccgctgcatcacaccttgg

SEQ ID NO: 271601 - DNA, 33 bp, Homo sapien
tgcccagcgtgtcatccagtagccagtggagtc

SEQ ID NO: 271602 - DNA, 33 bp, Homo sapien
tgcccagcgtgtcatctagtagccagtggagtc

SEQ ID NO: 271603 - DNA, 33 bp, Homo sapien; identical to SEQ ID NO: 271601

SEQ ID NO: 271604 - DNA, 33 bp, Homo sapien; identical to SEQ ID NO: 271602

SEQ ID NO: 271605 - DNA, 33 bp, Homo sapien
agagactaagtaataaaccaaagagatggaagg

SEQ ID NO: 271606 - DNA, 33 bp, Homo sapien
agagactaagtaataagccaaagagatggaagg

SEQ ID NO: 271607 - DNA, 33 bp, Homo sapien
aaatacacggctagaaagtttggaagaagaacc

SEQ ID NO: 271608 - DNA, 33 bp, Homo sapien
aaatacacggctagaacgtttggaagaagaacc

SEQ ID NO: 271609 - DNA, 33 bp, Homo sapien
atcatgagcgctgctgaagaaatagggcccagc

SEQ ID NO: 271610 - DNA, 33 bp, Homo sapien
atcatgagcgctgctggagaaatagggcccagc

SEQ ID NO: 271611 - DNA, 33 bp, Homo sapien
ttttaacctgtttaaccatcctagccaaaacca

SEQ ID NO: 271612 - DNA, 33 bp, Homo sapien
ttttaacctgtttaactatcctagccaaaacca

SEQ ID NO: 271613 - DNA, 33 bp, Homo sapien
ctgtgtctaagccacaatagccttctttcagtt

SEQ ID NO: 271614 - DNA, 33 bp, Homo sapien
ctgtgtctaagccacagtagccttctttcagtt

SEQ ID NO: 271615 - DNA, 33 bp, Homo sapien
attctcaattctgtgacggtgaggaaaatgtct

SEQ ID NO: 271616 - DNA, 33 bp, Homo sapien
attctcaattctgtgatggtgaggaaaatgtct

SEQ ID NO: 271617 - DNA, 33 bp, Homo sapien
tcaaatgcatcacctcacacataagaatacttt

SEQ ID NO: 271618 - DNA, 33 bp, Homo sapien
tcaaatgcatcacctcgcacataagaatacttt

SEQ ID NO: 271619 - DNA, 33 bp, Homo sapien
agtttactgctagaaactagataaacaaagact

SEQ ID NO: 271620 - DNA, 33 bp, Homo sapien
agtttactgctagaaagtagataaacaaagact

SEQ ID NO: 271621 - DNA, 33 bp, Homo sapien
aagaaaagatatagaacgacacataaactaaac

SEQ ID NO: 271622 - DNA, 33 bp, Homo sapien
aagaaaagatatagaatgacacataaactaaac

SEQ ID NO: 271623 - DNA, 33 bp, Homo sapien
gctaatcagtttctaacgtatccttcagagatc

SEQ ID NO: 271624 - DNA, 33 bp, Homo sapien
gctaatcagtttctaatgtatccttcagagatc

SEQ ID NO: 271625 - DNA, 33 bp, Homo sapien
atgtagtttgcttttacactctgttgtttcttc

SEQ ID NO: 271626 - DNA, 33 bp, Homo sapien
atgtagtttgcttttatactctgttgtttcttc

SEQ ID NO: 271627 - DNA, 33 bp, Homo sapien
tgaatgaacatttctccaaagacagtgtacaaa

SEQ ID NO: 271628 - DNA, 33 bp, Homo sapien
tgaatgaacatttctcgaaagacagtgtacaaa

SEQ ID NO: 271629 - DNA, 33 bp, Homo sapien
tgaagaaaggaagttaagacagcattgctgagg

SEQ ID NO: 271630 - DNA, 33 bp, Homo sapien
tgaagaaaggaagttaggacagcattgctgagg

SEQ ID NO: 271631 - DNA, 33 bp, Homo sapien
attgcgttgctaagtacaagcaatgtttgaaag

SEQ ID NO: 271632 - DNA, 33 bp, Homo sapien
attgcgttgctaagtagaagcaatgtttgaaag

SEQ ID NO: 271633 - DNA, 33 bp, Homo sapien
agattaacatgcgttcacaatgaccttacctat

SEQ ID NO: 271634 - DNA, 33 bp, Homo sapien
agattaacatgcgttcgcaatgaccttacctat

SEQ ID NO: 271635 - DNA, 33 bp, Homo sapien
gacaaagttgtgaaataagccaagtttattatt

SEQ ID NO: 271636 - DNA, 33 bp, Homo sapien
gacaaagttgtgaaatcagccaagtttattatt

SEQ ID NO: 271637 - DNA, 33 bp, Homo sapien
gttgagcacatgaaacccttcttgacatggccc

SEQ ID NO: 271638 - DNA, 33 bp, Homo sapien
gttgagcacatgaaactcttcttgacatggccc

SEQ ID NO: 271639 - DNA, 33 bp, Homo sapien
acttaagtatgccctgaaaggagatgaagtaaa

SEQ ID NO: 271640 - DNA, 33 bp, Homo sapien
acttaagtatgccctggaaggagatgaagtaaa

SEQ ID NO: 271641 - DNA, 33 bp, Homo sapien
gagactcttggtgtcaaagatcagagagaaatt

SEQ ID NO: 271642 - DNA, 33 bp, Homo sapien
gagactcttggtgtcatagatcagagagaaatt

SEQ ID NO: 271643 - DNA, 33 bp, Homo sapien; identical to SEQ ID NO: 271641

SEQ ID NO: 271644 - DNA, 33 bp, Homo sapien; identical to SEQ ID NO: 271642

SEQ ID NO: 271645 - DNA, 33 bp, Homo sapien
tctgatttgccaactacatcacgtggccatttc

SEQ ID NO: 271646 - DNA, 33 bp, Homo sapien
tctgatttgccaactatatcacgtggccatttc

SEQ ID NO: 271647 - DNA, 33 bp, Homo sapien
tttgttgaaaactccaaacttccatgaggtctg

SEQ ID NO: 271648 - DNA, 33 bp, Homo sapien
tttgttgaaaactccacacttccatgaggtctg

SEQ ID NO: 271649 - DNA, 33 bp, Homo sapien
tatgtgctttagatacactatttcatgtaatgc

SEQ ID NO: 271650 - DNA, 33 bp, Homo sapien
tatgtgctttagatacgctatttcatgtaatgc

SEQ ID NO: 271651 - DNA, 33 bp, Homo sapien
tgcagtcattgacgaaatcagttaccagttgca

SEQ ID NO: 271652 - DNA, 33 bp, Homo sapien
tgcagtcattgacgaagtcagttaccagttgca

SEQ ID NO: 271653 - DNA, 33 bp, Homo sapien
aaaggtcatctttaaggcctctgattctgaacc

SEQ ID NO: 271654 - DNA, 33 bp, Homo sapien
aaaggtcatctttaagtcctctgattctgaacc

SEQ ID NO: 271655 - DNA, 33 bp, Homo sapien
cagctaaagctctatacgccacatcagcaaatg

SEQ ID NO: 271656 - DNA, 33 bp, Homo sapien
cagctaaagctctatatgccacatcagcaaatg

SEQ ID NO: 271657 - DNA, 33 bp, Homo sapien
gaggtaaaatgacacaataccatgctcaggtac

SEQ ID NO: 271658 - DNA, 33 bp, Homo sapien
gaggtaaaatgacacattaccatgctcaggtac

SEQ ID NO: 271659 - DNA, 33 bp, Homo sapien
taatgcttaggacataataggccttcatttgtt

SEQ ID NO: 271660 - DNA, 33 bp, Homo sapien
taatgcttaggacatattaggccttcatttgtt

SEQ ID NO: 271661 - DNA, 33 bp, Homo sapien
tgggatagacttagagaaggtaggttggttacc

SEQ ID NO: 271662 - DNA, 33 bp, Homo sapien
tgggatagacttagagcaggtaggttggttacc

SEQ ID NO: 271663 - DNA, 33 bp, Homo sapien
gtgggcttttcagataaactgacttgggcttca

SEQ ID NO: 271664 - DNA, 33 bp, Homo sapien
gtgggcttttcagatagactgacttgggcttca

SEQ ID NO: 271665 - DNA, 33 bp, Homo sapien
attgtttaaaagatcaaatgaatgacttgcaac

SEQ ID NO: 271666 - DNA, 33 bp, Homo sapien
attgtttaaaagatcagatgaatgacttgcaac

SEQ ID NO: 271667 - DNA, 33 bp, Homo sapien
taaatgagccatcaagccatgaaaaacatggag

SEQ ID NO: 271668 - DNA, 33 bp, Homo sapien
taaatgagccatcaagtcatgaaaaacatggag

SEQ ID NO: 271669 - DNA, 33 bp, Homo sapien
ttcaggttctcaggccaagctcctgcaaaacca

SEQ ID NO: 271670 - DNA, 33 bp, Homo sapien
ttcaggttctcaggccgagctcctgcaaaacca

SEQ ID NO: 271671 - DNA, 33 bp, Homo sapien
gaccgtaggttttataacataaggattttgtga

SEQ ID NO: 271672 - DNA, 33 bp, Homo sapien
gaccgtaggttttataccataaggattttgtga

SEQ ID NO: 271673 - DNA, 33 bp, Homo sapien
gagaacttttctggaccgcttcttctccgtata

SEQ ID NO: 271674 - DNA, 33 bp, Homo sapien
gagaacttttctggactgcttcttctccgtata

SEQ ID NO: 271675 - DNA, 33 bp, Homo sapien
cagtaacttcagcagacagcaatacaaaaacat

SEQ ID NO: 271676 - DNA, 33 bp, Homo sapien
cagtaacttcagcagagagcaatacaaaaacat

SEQ ID NO: 271677 - DNA, 33 bp, Homo sapien
aagagttgagagagaaattatgacgtgatcatc

SEQ ID NO: 271678 - DNA, 33 bp, Homo sapien
aagagttgagagagaagttatgacgtgatcatc

SEQ ID NO: 271679 - DNA, 33 bp, Homo sapien
aatctttcaagaaataccaccaattacctaatg

SEQ ID NO: 271680 - DNA, 33 bp, Homo sapien
aatctttcaagaaatatcaccaattacctaatg

SEQ ID NO: 271681 - DNA, 33 bp, Homo sapien
gctgtccctgaggtcgcacttgtcctggttaag

SEQ ID NO: 271682 - DNA, 33 bp, Homo sapien
gctgtccctgaggtcgtacttgtcctggttaag

SEQ ID NO: 271683 - DNA, 33 bp, Homo sapien
cacctcccaggattaaatgattgtcctgcttca

SEQ ID NO: 271684 - DNA, 33 bp, Homo sapien
cacctcccaggattaagtgattgtcctgcttca

SEQ ID NO: 271685 - DNA, 33 bp, Homo sapien
gatctataaatggttagcactcagaatagtgat

SEQ ID NO: 271686 - DNA, 33 bp, Homo sapien
gatctataaatggttatcactcagaatagtgat

SEQ ID NO: 271687 - DNA, 33 bp, Homo sapien
agactgtctctccagcagagtgaactaactgta

SEQ ID NO: 271688 - DNA, 33 bp, Homo sapien
agactgtctctccagcggagtgaactaactgta

SEQ ID NO: 271689 - DNA, 33 bp, Homo sapien
acagatcaccctcaatcaacagtgagtaaactg

SEQ ID NO: 271690 - DNA, 33 bp, Homo sapien
acagatcaccctcaatgaacagtgagtaaactg

SEQ ID NO: 271691 - DNA, 33 bp, Homo sapien
taaatttaaatgtgaaacctaatactgtatggc

SEQ ID NO: 271692 - DNA, 33 bp, Homo sapien
taaatttaaatgtgaaccctaatactgtatggc

SEQ ID NO: 271693 - DNA, 33 bp, Homo sapien
gccaacttcgtaagccaactttcagaggatcac

SEQ ID NO: 271694 - DNA, 33 bp, Homo sapien
gccaacttcgtaagccgactttcagaggatcac

SEQ ID NO: 271695 - DNA, 33 bp, Homo sapien
gaaccatatgtggctgacaagagtgcttagaag

SEQ ID NO: 271696 - DNA, 33 bp, Homo sapien
gaaccatatgtggctggcaagagtgcttagaag

SEQ ID NO: 271697 - DNA, 33 bp, Homo sapien
aaattctcctctgttcaagttactttacgactt

SEQ ID NO: 271698 - DNA, 33 bp, Homo sapien
aaattctcctctgttcgagttactttacgactt

SEQ ID NO: 271699 - DNA, 33 bp, Homo sapien
ttcttggcagattaaacaggcatatgacatcta

SEQ ID NO: 271700 - DNA, 33 bp, Homo sapien
ttcttggcagattaaagaggcatatgacatcta

SEQ ID NO: 271701 - DNA, 33 bp, Homo sapien
taagctgctgaatccagtcttggtggagggttc

SEQ ID NO: 271702 - DNA, 33 bp, Homo sapien
taagctgctgaatccattcttggtggagggttc

SEQ ID NO: 271703 - DNA, 33 bp, Homo sapien
actgttagaaggtgggaaatggtagaacattgc

SEQ ID NO: 271704 - DNA, 33 bp, Homo sapien
actgttagaaggtggggaatggtagaacattgc

SEQ ID NO: 271705 - DNA, 33 bp, Homo sapien
acagcacttatcataaccacgaagcagctccac

SEQ ID NO: 271706 - DNA, 33 bp, Homo sapien
acagcacttatcataatcacgaagcagctccac

SEQ ID NO: 271707 - DNA, 33 bp, Homo sapien
ttcctgaatgtgattaggtggtaatgagcaaga

SEQ ID NO: 271708 - DNA, 33 bp, Homo sapien
ttcctgaatgtgattatgtggtaatgagcaaga

SEQ ID NO: 271709 - DNA, 33 bp, Homo sapien
aagtttactaagcacaagaaaaagctgacttac

SEQ ID NO: 271710 - DNA, 33 bp, Homo sapien
aagtttactaagcacaggaaaaagctgacttac

SEQ ID NO: 271711 - DNA, 33 bp, Homo sapien
accattgtcatttccacgtcagacaggaatgag

SEQ ID NO: 271712 - DNA, 33 bp, Homo sapien
accattgtcatttccaggtcagacaggaatgag

SEQ ID NO: 271713 - DNA, 33 bp, Homo sapien
taaatggaaatgaagccactcctcagtcctcat

SEQ ID NO: 271714 - DNA, 33 bp, Homo sapien
taaatggaaatgaagctactcctcagtcctcat

SEQ ID NO: 271715 - DNA, 33 bp, Homo sapien
tggaggaagtgctgtgcaggcttttctccaggg

SEQ ID NO: 271716 - DNA, 33 bp, Homo sapien
tggaggaagtgctgtggaggcttttctccaggg

SEQ ID NO: 271717 - DNA, 33 bp, Homo sapien
acatatttggaacaaactcagtgatgaaaatat

SEQ ID NO: 271718 - DNA, 33 bp, Homo sapien
acatatttggaacaaagtcagtgatgaaaatat

SEQ ID NO: 271719 - DNA, 33 bp, Homo sapien
aaaaagaaacagttaaagaactcacaattgcat

SEQ ID NO: 271720 - DNA, 33 bp, Homo sapien
aaaaagaaacagttaaggaactcacaattgcat

SEQ ID NO: 271721 - DNA, 33 bp, Homo sapien
cctgcctactgactcacaagtgattgcttggca

SEQ ID NO: 271722 - DNA, 33 bp, Homo sapien
cctgcctactgactcagaagtgattgcttggca

SEQ ID NO: 271723 - DNA, 33 bp, Homo sapien
ctcaaagctaaaaatacagtccagattttagca

SEQ ID NO: 271724 - DNA, 33 bp, Homo sapien
ctcaaagctaaaaatatagtccagattttagca

SEQ ID NO: 271725 - DNA, 33 bp, Homo sapien
gtggcacctgcttaaccgtgcttctctcagcca

SEQ ID NO: 271726 - DNA, 33 bp, Homo sapien
gtggcacctgcttaactgtgcttctctcagcca

SEQ ID NO: 271727 - DNA, 33 bp, Homo sapien
ttcatggagctaccagaaagaactgagggtcat

SEQ ID NO: 271728 - DNA, 33 bp, Homo sapien
ttcatggagctaccaggaagaactgagggtcat

SEQ ID NO: 271729 - DNA, 33 bp, Homo sapien
gcaattggtagccacaagctcaactctgtcgtg

SEQ ID NO: 271730 - DNA, 33 bp, Homo sapien
gcaattggtagccacaggctcaactctgtcgtg

SEQ ID NO: 271731 - DNA, 33 bp, Homo sapien
gcccagataaacaagccactcctctgaggccgc

SEQ ID NO: 271732 - DNA, 33 bp, Homo sapien
gcccagataaacaagctactcctctgaggccgc

SEQ ID NO: 271733 - DNA, 33 bp, Homo sapien
cctagactggacccaaaggctttattaggtcat

SEQ ID NO: 271734 - DNA, 33 bp, Homo sapien
cctagactggacccaagggctttattaggtcat

SEQ ID NO: 271735 - DNA, 33 bp, Homo sapien
gggaaaccctgagcataatacttcctctcttgc

SEQ ID NO: 271736 - DNA, 33 bp, Homo sapien
gggaaaccctgagcatgatacttcctctcttgc

SEQ ID NO: 271737 - DNA, 33 bp, Homo sapien
atagataagcagaaaaagagtaagtccaccagg

SEQ ID NO: 271738 - DNA, 33 bp, Homo sapien
atagataagcagaaaaggagtaagtccaccagg

SEQ ID NO: 271739 - DNA, 33 bp, Homo sapien
atataattcagctgtgaaaatgagagttctgaa

SEQ ID NO: 271740 - DNA, 33 bp, Homo sapien
atataattcagctgtgcaaatgagagttctgaa

SEQ ID NO: 271741 - DNA, 33 bp, Homo sapien
atttgaactctaaaaccgggaatgttagacaga

SEQ ID NO: 271742 - DNA, 33 bp, Homo sapien
atttgaactctaaaactgggaatgttagacaga

SEQ ID NO: 271743 - DNA, 33 bp, Homo sapien
acacagtcctttcttacctgtagctctctgtgt

SEQ ID NO: 271744 - DNA, 33 bp, Homo sapien
acacagtcctttcttatctgtagctctctgtgt

SEQ ID NO: 271745 - DNA, 33 bp, Homo sapien
gtgttacaactgcctacattattcaatacagta

SEQ ID NO: 271746 - DNA, 33 bp, Homo sapien
gtgttacaactgcctatattattcaatacagta

SEQ ID NO: 271747 - DNA, 33 bp, Homo sapien
tgtgtgaaggtcatagaatgtattcacacaaac

SEQ ID NO: 271748 - DNA, 33 bp, Homo sapien
tgtgtgaaggtcataggatgtattcacacaaac

SEQ ID NO: 271749 - DNA, 33 bp, Homo sapien
gaatagatggtaaatagagaaacggtgactcaa

SEQ ID NO: 271750 - DNA, 33 bp, Homo sapien
gaatagatggtaaatatagaaacggtgactcaa

SEQ ID NO: 271751 - DNA, 33 bp, Homo sapien
tccgatgaataacctacacaagtatctttctgt

SEQ ID NO: 271752 - DNA, 33 bp, Homo sapien
tccgatgaataacctatacaagtatctttctgt

SEQ ID NO: 271753 - DNA, 33 bp, Homo sapien
gcagtaaatagtttaactgacaagaggtcagct

SEQ ID NO: 271754 - DNA, 33 bp, Homo sapien
gcagtaaatagtttaattgacaagaggtcagct

SEQ ID NO: 271755 - DNA, 33 bp, Homo sapien
attctgcctagccttcacttccttcttgtgaga

SEQ ID NO: 271756 - DNA, 33 bp, Homo sapien
attctgcctagccttcgcttccttcttgtgaga

SEQ ID NO: 271757 - DNA, 33 bp, Homo sapien
aaagagccatacaacacagaaaatcaaatttcc

SEQ ID NO: 271758 - DNA, 33 bp, Homo sapien
aaagagccatacaacatagaaaatcaaatttcc

SEQ ID NO: 271759 - DNA, 33 bp, Homo sapien
agctatcataatataaagccgcctatataggag

SEQ ID NO: 271760 - DNA, 33 bp, Homo sapien
agctatcataatataacgccgcctatataggag

SEQ ID NO: 271761 - DNA, 33 bp, Homo sapien
taacatttcctgaaaccatgcccctgttccatc

SEQ ID NO: 271762 - DNA, 33 bp, Homo sapien
taacatttcctgaaactatgcccctgttccatc

SEQ ID NO: 271763 - DNA, 33 bp, Homo sapien
tttctggaaaaagtaccgcactttctggaagga

SEQ ID NO: 271764 - DNA, 33 bp, Homo sapien
tttctggaaaaagtactgcactttctggaagga

SEQ ID NO: 271765 - DNA, 33 bp, Homo sapien
ctcctggttgtgctcacgtaggttcggatcctt

SEQ ID NO: 271766 - DNA, 33 bp, Homo sapien
ctcctggttgtgctcatgtaggttcggatcctt

SEQ ID NO: 271767 - DNA, 33 bp, Homo sapien
ggtagaagagggaccccagaaggatcgcgaggt

SEQ ID NO: 271768 - DNA, 33 bp, Homo sapien
ggtagaagagggaccctagaaggatcgcgaggt

SEQ ID NO: 271769 - DNA, 33 bp, Homo sapien
catgaggatataagacaacataataataaaatc

SEQ ID NO: 271770 - DNA, 33 bp, Homo sapien
catgaggatataagaccacataataataaaatc

SEQ ID NO: 271771 - DNA, 33 bp, Homo sapien
taatccatcaaactcaaggctgagaacattgca

SEQ ID NO: 271772 - DNA, 33 bp, Homo sapien
taatccatcaaactcagggctgagaacattgca

SEQ ID NO: 271773 - DNA, 33 bp, Homo sapien
cttccacttccaccagaaatttcagatcacctg

SEQ ID NO: 271774 - DNA, 33 bp, Homo sapien
cttccacttccaccaggaatttcagatcacctg

SEQ ID NO: 271775 - DNA, 33 bp, Homo sapien
aacggtgacttgcaaacgggcatcgtcctcaaa

SEQ ID NO: 271776 - DNA, 33 bp, Homo sapien
aacggtgacttgcaaatgggcatcgtcctcaaa

SEQ ID NO: 271777 - DNA, 33 bp, Homo sapien
ggatgcctcaagttgacaccctggttgacagca

SEQ ID NO: 271778 - DNA, 33 bp, Homo sapien
ggatgcctcaagttgataccctggttgacagca

SEQ ID NO: 271779 - DNA, 33 bp, Homo sapien
caatggcagttcacctaacttttcagtgtaggc

SEQ ID NO: 271780 - DNA, 33 bp, Homo sapien
caatggcagttcacctgacttttcagtgtaggc

SEQ ID NO: 271781 - DNA, 33 bp, Homo sapien
ataatgagaaatgaagaaaggactagaaaggcg

SEQ ID NO: 271782 - DNA, 33 bp, Homo sapien
ataatgagaaatgaaggaaggactagaaaggcg

SEQ ID NO: 271783 - DNA, 33 bp, Homo sapien
tttacacttttacagactagatagaaccatcac

SEQ ID NO: 271784 - DNA, 33 bp, Homo sapien
tttacacttttacagagtagatagaaccatcac

SEQ ID NO: 271785 - DNA, 33 bp, Homo sapien
gagaccaacaggaaaacactcatttgtgtctgg

SEQ ID NO: 271786 - DNA, 33 bp, Homo sapien
gagaccaacaggaaaagactcatttgtgtctgg

SEQ ID NO: 271787 - DNA, 33 bp, Homo sapien
agaactgcaaagaaagaaaactaagctaatctc

SEQ ID NO: 271788 - DNA, 33 bp, Homo sapien
agaactgcaaagaaagcaaactaagctaatctc

SEQ ID NO: 271789 - DNA, 33 bp, Homo sapien
gaatacagagcacacactgggttcatcacagca

SEQ ID NO: 271790 - DNA, 33 bp, Homo sapien
gaatacagagcacacattgggttcatcacagca

SEQ ID NO: 271791 - DNA, 33 bp, Homo sapien
ctttttcctgctaagaaggcactgttggaagga

SEQ ID NO: 271792 - DNA, 33 bp, Homo sapien
ctttttcctgctaagacggcactgttggaagga

SEQ ID NO: 271793 - DNA, 33 bp, Homo sapien
gttgaatctgttcatcaatttgggaaatattgc

SEQ ID NO: 271794 - DNA, 33 bp, Homo sapien
gttgaatctgttcatcgatttgggaaatattgc

SEQ ID NO: 271795 - DNA, 33 bp, Homo sapien
actggatattcacctacaaaagaatgaagttgg

SEQ ID NO: 271796 - DNA, 33 bp, Homo sapien
actggatattcacctataaaagaatgaagttgg

SEQ ID NO: 271797 - DNA, 33 bp, Homo sapien
aaaatccaagagaggacagtttcaaggaggagg

SEQ ID NO: 271798 - DNA, 33 bp, Homo sapien
aaaatccaagagaggagagtttcaaggaggagg

SEQ ID NO: 271799 - DNA, 33 bp, Homo sapien
cacatagccaataaccaattgctgtcagggctg

SEQ ID NO: 271800 - DNA, 33 bp, Homo sapien
cacatagccaataaccgattgctgtcagggctg

SEQ ID NO: 271801 - DNA, 33 bp, Homo sapien
cccgagccccaagtcaccactgggtacagtgca

SEQ ID NO: 271802 - DNA, 33 bp, Homo sapien
cccgagccccaagtcatcactgggtacagtgca

SEQ ID NO: 271803 - DNA, 33 bp, Homo sapien
ggacacagagcaggtacgtttgatggacagtta

SEQ ID NO: 271804 - DNA, 33 bp, Homo sapien
ggacacagagcaggtatgtttgatggacagtta

SEQ ID NO: 271805 - DNA, 33 bp, Homo sapien
aacactggcgtttccagtgcgacagacatacct

SEQ ID NO: 271806 - DNA, 33 bp, Homo sapien
aacactggcgtttccattgcgacagacatacct

SEQ ID NO: 271807 - DNA, 33 bp, Homo sapien
tgcatgggaatgctcacggggtggaggaagagt

SEQ ID NO: 271808 - DNA, 33 bp, Homo sapien
tgcatgggaatgctcagggggtggaggaagagt

SEQ ID NO: 271809 - DNA, 33 bp, Homo sapien
gccactgccaggtaaacagatgctcccttcggg

SEQ ID NO: 271810 - DNA, 33 bp, Homo sapien
gccactgccaggtaaatagatgctcccttcggg

SEQ ID NO: 271811 - DNA, 33 bp, Homo sapien
aacagtctctgtgctacgaggattcaaggcttg

SEQ ID NO: 271812 - DNA, 33 bp, Homo sapien
aacagtctctgtgctatgaggattcaaggcttg

SEQ ID NO: 271813 - DNA, 33 bp, Homo sapien
ctcattctcaaacctacgtctagatcccagaga

SEQ ID NO: 271814 - DNA, 33 bp, Homo sapien
ctcattctcaaacctatgtctagatcccagaga

SEQ ID NO: 271815 - DNA, 33 bp, Homo sapien
tgatctttgcccaaaccaagtatctgtagagca

SEQ ID NO: 271816 - DNA, 33 bp, Homo sapien
tgatctttgcccaaacgaagtatctgtagagca

SEQ ID NO: 271817 - DNA, 33 bp, Homo sapien
cttgtaccctgggagacgagtttgaagaaacca

SEQ ID NO: 271818 - DNA, 33 bp, Homo sapien
cttgtaccctgggagatgagtttgaagaaacca

SEQ ID NO: 271819 - DNA, 33 bp, Homo sapien; identical to SEQ ID NO: 271817

SEQ ID NO: 271820 - DNA, 33 bp, Homo sapien; identical to SEQ ID NO: 271818

SEQ ID NO: 271821 - DNA, 33 bp, Homo sapien
cggtgggagccgggacaatgaaccctcaccaag

SEQ ID NO: 271822 - DNA, 33 bp, Homo sapien
cggtgggagccgggaccatgaaccctcaccaag

SEQ ID NO: 271823 - DNA, 33 bp, Homo sapien
attcaagaatccacttcaaatggtctctacaaa

SEQ ID NO: 271824 - DNA, 33 bp, Homo sapien
attcaagaatccacttgaaatggtctctacaaa

SEQ ID NO: 271825 - DNA, 33 bp, Homo sapien
acctgggccaaagcacagagcccctgacttcta

SEQ ID NO: 271826 - DNA, 33 bp, Homo sapien
acctgggccaaagcacggagcccctgacttcta

SEQ ID NO: 271827 - DNA, 33 bp, Homo sapien
ctgagagcctcttttcactctgtacatattccc

SEQ ID NO: 271828 - DNA, 33 bp, Homo sapien
ctgagagcctcttttcgctctgtacatattccc

SEQ ID NO: 271829 - DNA, 33 bp, Homo sapien
tgaccctatgaaatcgaaaaaaaagttgttgag

SEQ ID NO: 271830 - DNA, 33 bp, Homo sapien
tgaccctatgaaatcgcaaaaaaagttgttgag

SEQ ID NO: 271831 - DNA, 33 bp, Homo sapien
agatcaatttcagcagcatggtagctctactca

SEQ ID NO: 271832 - DNA, 33 bp, Homo sapien
agatcaatttcagcagtatggtagctctactca

SEQ ID NO: 271833 - DNA, 33 bp, Homo sapien
gatttttctgtataggaaaagtgagtaacatag

SEQ ID NO: 271834 - DNA, 33 bp, Homo sapien
gatttttctgtatagggaaagtgagtaacatag

SEQ ID NO: 271835 - DNA, 33 bp, Homo sapien
tcacatccatatttgacaaactggaatcacact

SEQ ID NO: 271836 - DNA, 33 bp, Homo sapien
tcacatccatatttgagaaactggaatcacact

SEQ ID NO: 271837 - DNA, 33 bp, Homo sapien
tttcctgataacctggaagccattggttcttcc

SEQ ID NO: 271838 - DNA, 33 bp, Homo sapien
tttcctgataacctgggagccattggttcttcc

SEQ ID NO: 271839 - DNA, 33 bp, Homo sapien
ttggtagattcagtccagaacaagtttgcaatt

SEQ ID NO: 271840 - DNA, 33 bp, Homo sapien
ttggtagattcagtccggaacaagtttgcaatt

SEQ ID NO: 271841 - DNA, 33 bp, Homo sapien
cattgaagctcagtcagtaaaaggtctgccaca

SEQ ID NO: 271842 - DNA, 33 bp, Homo sapien
cattgaagctcagtcattaaaaggtctgccaca

SEQ ID NO: 271843 - DNA, 33 bp, Homo sapien
tccattgtcacctaaactgccccacttcagtgt

SEQ ID NO: 271844 - DNA, 33 bp, Homo sapien
tccattgtcacctaaattgccccacttcagtgt

SEQ ID NO: 271845 - DNA, 33 bp, Homo sapien
ttatctgtggccacaaagaaagttatttgtctc

SEQ ID NO: 271846 - DNA, 33 bp, Homo sapien
ttatctgtggccacaaggaaagttatttgtctc

SEQ ID NO: 271847 - DNA, 33 bp, Homo sapien
tcagtagcactaagtacgtcacattgttgtaca

SEQ ID NO: 271848 - DNA, 33 bp, Homo sapien
tcagtagcactaagtatgtcacattgttgtaca

SEQ ID NO: 271849 - DNA, 33 bp, Homo sapien
atggggaagctttttaccattcatgtttaactt

SEQ ID NO: 271850 - DNA, 33 bp, Homo sapien
atggggaagctttttatcattcatgtttaactt

SEQ ID NO: 271851 - DNA, 33 bp, Homo sapien
ttgggcacaggctgaaagttagcttttttacag

SEQ ID NO: 271852 - DNA, 33 bp, Homo sapien
ttgggcacaggctgaaggttagcttttttacag

SEQ ID NO: 271853 - DNA, 33 bp, Homo sapien
aataagtacgtgaggcaacagatatgttaatta

SEQ ID NO: 271854 - DNA, 33 bp, Homo sapien
aataagtacgtgaggcgacagatatgttaatta

SEQ ID NO: 271855 - DNA, 33 bp, Homo sapien
aacttaagttgagccaaagtgtgttataaaact

SEQ ID NO: 271856 - DNA, 33 bp, Homo sapien
aacttaagttgagccacagtgtgttataaaact

SEQ ID NO: 271857 - DNA, 33 bp, Homo sapien
cagtggcttgcggaaaataccaagcgccctgca

SEQ ID NO: 271858 - DNA, 33 bp, Homo sapien
cagtggcttgcggaaagtaccaagcgccctgca

SEQ ID NO: 271859 - DNA, 33 bp, Homo sapien
gtataaagttcaatgaacattcacagtgtaaat

SEQ ID NO: 271860 - DNA, 33 bp, Homo sapien
gtataaagttcaatgagcattcacagtgtaaat

SEQ ID NO: 271861 - DNA, 33 bp, Homo sapien
tgtccatgtgatctcaccattcagcgcccactt

SEQ ID NO: 271862 - DNA, 33 bp, Homo sapien
tgtccatgtgatctcatcattcagcgcccactt

SEQ ID NO: 271863 - DNA, 33 bp, Homo sapien
ccaaaagcctagtggactagcacagaatataga

SEQ ID NO: 271864 - DNA, 33 bp, Homo sapien
ccaaaagcctagtggagtagcacagaatataga

SEQ ID NO: 271865 - DNA, 33 bp, Homo sapien
ctgactgaacttagcaaaaatgaatcaaaggaa

SEQ ID NO: 271866 - DNA, 33 bp, Homo sapien
ctgactgaacttagcagaaatgaatcaaaggaa

SEQ ID NO: 271867 - DNA, 33 bp, Homo sapien
tctcactaaaaaggccccattcctataatgaat

SEQ ID NO: 271868 - DNA, 33 bp, Homo sapien
tctcactaaaaaggccgcattcctataatgaat

SEQ ID NO: 271869 - DNA, 33 bp, Homo sapien
agatgacatccactacaatgttgggcttgtcca

SEQ ID NO: 271870 - DNA, 33 bp, Homo sapien
agatgacatccactacgatgttgggcttgtcca

SEQ ID NO: 271871 - DNA, 33 bp, Homo sapien
gaacagctgaagaataaccactgctgataccca

SEQ ID NO: 271872 - DNA, 33 bp, Homo sapien
gaacagctgaagaatagccactgctgataccca

SEQ ID NO: 271873 - DNA, 33 bp, Homo sapien
tgtgcaaatgtattagaagcgtcttatccaaca

SEQ ID NO: 271874 - DNA, 33 bp, Homo sapien
tgtgcaaatgtattaggagcgtcttatccaaca

SEQ ID NO: 271875 - DNA, 33 bp, Homo sapien
gagaggacaacattagccaacagagagggcaga

SEQ ID NO: 271876 - DNA, 33 bp, Homo sapien
gagaggacaacattaggcaacagagagggcaga

SEQ ID NO: 271877 - DNA, 33 bp, Homo sapien
cccattcatacaagtaaattcatacaagtaacc

SEQ ID NO: 271878 - DNA, 33 bp, Homo sapien
cccattcatacaagtacattcatacaagtaacc

SEQ ID NO: 271879 - DNA, 33 bp, Homo sapien
cttcgggacttgagaaagaaagtgcagagagaa

SEQ ID NO: 271880 - DNA, 33 bp, Homo sapien
cttcgggacttgagaaggaaagtgcagagagaa

SEQ ID NO: 271881 - DNA, 33 bp, Homo sapien
cggggttgaattcacacgggcagacagaatgca

SEQ ID NO: 271882 - DNA, 33 bp, Homo sapien
cggggttgaattcacatgggcagacagaatgca

SEQ ID NO: 271883 - DNA, 33 bp, Homo sapien
ttctgagttggacagaactttattgagtccccg

SEQ ID NO: 271884 - DNA, 33 bp, Homo sapien
ttctgagttggacagagctttattgagtccccg

SEQ ID NO: 271885 - DNA, 33 bp, Homo sapien
cactctacctgtttacacacttttgtcaagccc

SEQ ID NO: 271886 - DNA, 33 bp, Homo sapien
cactctacctgtttacgcacttttgtcaagccc

SEQ ID NO: 271887 - DNA, 33 bp, Homo sapien
atttattcattcaaccaacatgtattgggtaag

SEQ ID NO: 271888 - DNA, 33 bp, Homo sapien
atttattcattcaaccgacatgtattgggtaag

SEQ ID NO: 271889 - DNA, 33 bp, Homo sapien
ccatctctgttgcttacgactaagaatccaaac

SEQ ID NO: 271890 - DNA, 33 bp, Homo sapien
ccatctctgttgcttatgactaagaatccaaac

SEQ ID NO: 271891 - DNA, 33 bp, Homo sapien
tagttattagctaacaaaaagcttctgtgaata

SEQ ID NO: 271892 - DNA, 33 bp, Homo sapien
tagttattagctaacataaagcttctgtgaata

SEQ ID NO: 271893 - DNA, 33 bp, Homo sapien
aggcaatctaatgtagcatctctgtaccgtaaa

SEQ ID NO: 271894 - DNA, 33 bp, Homo sapien
aggcaatctaatgtagtatctctgtaccgtaaa

SEQ ID NO: 271895 - DNA, 33 bp, Homo sapien
tagcagaggataaggacagagttaagaggctct

SEQ ID NO: 271896 - DNA, 33 bp, Homo sapien
tagcagaggataaggatagagttaagaggctct

SEQ ID NO: 271897 - DNA, 33 bp, Homo sapien
tttacttgaagttcataactgggcatggtggct

SEQ ID NO: 271898 - DNA, 33 bp, Homo sapien
tttacttgaagttcatgactgggcatggtggct

SEQ ID NO: 271899 - DNA, 33 bp, Homo sapien
cttctggattaagataactgtggagttacatga

SEQ ID NO: 271900 - DNA, 33 bp, Homo sapien
cttctggattaagatacctgtggagttacatga

SEQ ID NO: 271901 - DNA, 33 bp, Homo sapien
tgatgaaagaaaatcaaatgtttgtttcaatca

SEQ ID NO: 271902 - DNA, 33 bp, Homo sapien
tgatgaaagaaaatcagatgtttgtttcaatca

SEQ ID NO: 271903 - DNA, 33 bp, Homo sapien
tatcactgctaagatactactagaactgagcag

SEQ ID NO: 271904 - DNA, 33 bp, Homo sapien
tatcactgctaagatattactagaactgagcag

SEQ ID NO: 271905 - DNA, 33 bp, Homo sapien
tatgaatgacagcagtaaacatgaattatgaat

SEQ ID NO: 271906 - DNA, 33 bp, Homo sapien
tatgaatgacagcagtgaacatgaattatgaat

SEQ ID NO: 271907 - DNA, 33 bp, Homo sapien
ttgtaatactaattgaagatgacattgtaagat

SEQ ID NO: 271908 - DNA, 33 bp, Homo sapien
ttgtaatactaattgaggatgacattgtaagat

SEQ ID NO: 271909 - DNA, 33 bp, Homo sapien
cctctttgctcaaatgcaatcgtttttactttc

SEQ ID NO: 271910 - DNA, 33 bp, Homo sapien
cctctttgctcaaatggaatcgtttttactttc

SEQ ID NO: 271911 - DNA, 33 bp, Homo sapien
gtgcttcttttagttcactctgtttaatctctt

SEQ ID NO: 271912 - DNA, 33 bp, Homo sapien
gtgcttcttttagttccctctgtttaatctctt

SEQ ID NO: 271913 - DNA, 33 bp, Homo sapien
aacagcaagagtataccgatttttggctccaag

SEQ ID NO: 271914 - DNA, 33 bp, Homo sapien
aacagcaagagtatactgatttttggctccaag

SEQ ID NO: 271915 - DNA, 33 bp, Homo sapien
aagctcataaaataccacaaaggctacaatgtt

SEQ ID NO: 271916 - DNA, 33 bp, Homo sapien
aagctcataaaataccgcaaaggctacaatgtt

SEQ ID NO: 271917 - DNA, 33 bp, Homo sapien
gacgcaataagcttagacaagagataatgaggg

SEQ ID NO: 271918 - DNA, 33 bp, Homo sapien
gacgcaataagcttaggcaagagataatgaggg

SEQ ID NO: 271919 - DNA, 33 bp, Homo sapien
ccccagagtccaggaccagggaactgactgcag

SEQ ID NO: 271920 - DNA, 33 bp, Homo sapien
ccccagagtccaggacgagggaactgactgcag

SEQ ID NO: 271921 - DNA, 33 bp, Homo sapien
aaattgcagattagccacctagtttctgctctt

SEQ ID NO: 271922 - DNA, 33 bp, Homo sapien
aaattgcagattagccccctagtttctgctctt

SEQ ID NO: 271923 - DNA, 33 bp, Homo sapien
ttagactggaaatgcacgtggtatttagtacct

SEQ ID NO: 271924 - DNA, 33 bp, Homo sapien
ttagactggaaatgcatgtggtatttagtacct

SEQ ID NO: 271925 - DNA, 33 bp, Homo sapien
gagaaagggagaactacaaatgctagccattcc

SEQ ID NO: 271926 - DNA, 33 bp, Homo sapien
gagaaagggagaactataaatgctagccattcc

SEQ ID NO: 271927 - DNA, 33 bp, Homo sapien
ttttttgtgtttgaaaattgcctaaactttaac

SEQ ID NO: 271928 - DNA, 33 bp, Homo sapien
ttttttgtgtttgaaacttgcctaaactttaac

SEQ ID NO: 271929 - DNA, 33 bp, Homo sapien
attcaaaacttaattcacattgtttccatattg

SEQ ID NO: 271930 - DNA, 33 bp, Homo sapien
attcaaaacttaattcgcattgtttccatattg

SEQ ID NO: 271931 - DNA, 33 bp, Homo sapien
tgtggctcccggaaagccctgaagacactgaga

SEQ ID NO: 271932 - DNA, 33 bp, Homo sapien
tgtggctcccggaaaggcctgaagacactgaga

SEQ ID NO: 271933 - DNA, 33 bp, Homo sapien
tgattctgcaatgtcaacagggtcagagcaggc

SEQ ID NO: 271934 - DNA, 33 bp, Homo sapien
tgattctgcaatgtcaccagggtcagagcaggc

SEQ ID NO: 271935 - DNA, 33 bp, Homo sapien
cctccgcattcttctccagtcaataggtcatgg

SEQ ID NO: 271936 - DNA, 33 bp, Homo sapien
cctccgcattcttctctagtcaataggtcatgg

SEQ ID NO: 271937 - DNA, 33 bp, Homo sapien
acagattaggtcatcccaggtttattgtcatgg

SEQ ID NO: 271938 - DNA, 33 bp, Homo sapien
acagattaggtcatcctaggtttattgtcatgg

SEQ ID NO: 271939 - DNA, 33 bp, Homo sapien
aagggtaaatagatccaatatagggaacctctg

SEQ ID NO: 271940 - DNA, 33 bp, Homo sapien
aagggtaaatagatccgatatagggaacctctg

SEQ ID NO: 271941 - DNA, 33 bp, Homo sapien
caagttgcaactcttactaaacctctggccaaa

SEQ ID NO: 271942 - DNA, 33 bp, Homo sapien
caagttgcaactcttattaaacctctggccaaa

SEQ ID NO: 271943 - DNA, 33 bp, Homo sapien
gatatcctctgaatacacatctataatggaatg

SEQ ID NO: 271944 - DNA, 33 bp, Homo sapien
gatatcctctgaatacgcatctataatggaatg

SEQ ID NO: 271945 - DNA, 33 bp, Homo sapien
tctaatattgaaagtaggaactgtctggatcta

SEQ ID NO: 271946 - DNA, 33 bp, Homo sapien
tctaatattgaaagtatgaactgtctggatcta

SEQ ID NO: 271947 - DNA, 33 bp, Homo sapien
ccttctaatattcggaagtgttgagtttcttcc

SEQ ID NO: 271948 - DNA, 33 bp, Homo sapien
ccttctaatattcggacgtgttgagtttcttcc

SEQ ID NO: 271949 - DNA, 33 bp, Homo sapien
tgtaacactcttgaaaattattgaaaactctga

SEQ ID NO: 271950 - DNA, 33 bp, Homo sapien
tgtaacactcttgaaacttattgaaaactctga

SEQ ID NO: 271951 - DNA, 33 bp, Homo sapien
aaacctgaccaaatcacagcaagtcagaaggta

SEQ ID NO: 271952 - DNA, 33 bp, Homo sapien
aaacctgaccaaatcatagcaagtcagaaggta

SEQ ID NO: 271953 - DNA, 33 bp, Homo sapien
gagagttacaagatcaagtgtttagaaaaagat

SEQ ID NO: 271954 - DNA, 33 bp, Homo sapien
gagagttacaagatcaggtgtttagaaaaagat

SEQ ID NO: 271955 - DNA, 33 bp, Homo sapien
ctgctgtctctgtgtccactgcctgtctccctc

SEQ ID NO: 271956 - DNA, 33 bp, Homo sapien
ctgctgtctctgtgtctactgcctgtctccctc

SEQ ID NO: 271957 - DNA, 33 bp, Homo sapien
tttcttcctcctcaaaacattgttctgtaagtg

SEQ ID NO: 271958 - DNA, 33 bp, Homo sapien
tttcttcctcctcaaagcattgttctgtaagtg

SEQ ID NO: 271959 - DNA, 33 bp, Homo sapien
atgtcctctcacttgcacttggggaaaacttgc

SEQ ID NO: 271960 - DNA, 33 bp, Homo sapien
atgtcctctcacttgcgcttggggaaaacttgc

SEQ ID NO: 271961 - DNA, 33 bp, Homo sapien
aagtatacaaacaagaagcccaagtaaaacaga

SEQ ID NO: 271962 - DNA, 33 bp, Homo sapien
aagtatacaaacaagatgcccaagtaaaacaga

SEQ ID NO: 271963 - DNA, 33 bp, Homo sapien
ggatttttaaacaaaactgtatgcctaccttaa

SEQ ID NO: 271964 - DNA, 33 bp, Homo sapien
ggatttttaaacaaaattgtatgcctaccttaa

SEQ ID NO: 271965 - DNA, 33 bp, Homo sapien
gtaagagagagacctgaagaaagctttaaggta

SEQ ID NO: 271966 - DNA, 33 bp, Homo sapien
gtaagagagagacctggagaaagctttaaggta

SEQ ID NO: 271967 - DNA, 33 bp, Homo sapien
ctcttctgtcatttcacatgttctgagaattta

SEQ ID NO: 271968 - DNA, 33 bp, Homo sapien
ctcttctgtcatttcatatgttctgagaattta

SEQ ID NO: 271969 - DNA, 33 bp, Homo sapien
caaaagcaacagttataaaaacaatgtaaagtg

SEQ ID NO: 271970 - DNA, 33 bp, Homo sapien
caaaagcaacagttatgaaaacaatgtaaagtg

SEQ ID NO: 271971 - DNA, 33 bp, Homo sapien
gcacacatctgctttgaacataaaattgtcatt

SEQ ID NO: 271972 - DNA, 33 bp, Homo sapien
gcacacatctgctttgcacataaaattgtcatt

SEQ ID NO: 271973 - DNA, 33 bp, Homo sapien
tctctttccttgaggaactctcacagtgactct

SEQ ID NO: 271974 - DNA, 33 bp, Homo sapien
tctctttccttgaggagctctcacagtgactct

SEQ ID NO: 271975 - DNA, 33 bp, Homo sapien
tggtcatgttatttaaactcagtgtcctcattt

SEQ ID NO: 271976 - DNA, 33 bp, Homo sapien
tggtcatgttatttaatctcagtgtcctcattt

SEQ ID NO: 271977 - DNA, 33 bp, Homo sapien
catgaccaaagttaaacagtcattgggcagaga

SEQ ID NO: 271978 - DNA, 33 bp, Homo sapien
catgaccaaagttaaatagtcattgggcagaga

SEQ ID NO: 271979 - DNA, 33 bp, Homo sapien
agaacttaataagagcaacatactatagtggga

SEQ ID NO: 271980 - DNA, 33 bp, Homo sapien
agaacttaataagagccacatactatagtggga

SEQ ID NO: 271981 - DNA, 33 bp, Homo sapien
acacccatccattaaccgtatacagtctctgtg

SEQ ID NO: 271982 - DNA, 33 bp, Homo sapien
acacccatccattaacggtatacagtctctgtg

SEQ ID NO: 271983 - DNA, 33 bp, Homo sapien
acactcaacataaaagaatgtccttctaagagg

SEQ ID NO: 271984 - DNA, 33 bp, Homo sapien
acactcaacataaaaggatgtccttctaagagg

SEQ ID NO: 271985 - DNA, 33 bp, Homo sapien
gccaggaaaacgataaactcaaacagtcacagg

SEQ ID NO: 271986 - DNA, 33 bp, Homo sapien
gccaggaaaacgataatctcaaacagtcacagg

SEQ ID NO: 271987 - DNA, 33 bp, Homo sapien
gccaagttgatacataaaactgaccatcatggg

SEQ ID NO: 271988 - DNA, 33 bp, Homo sapien
gccaagttgatacatagaactgaccatcatggg

SEQ ID NO: 271989 - DNA, 33 bp, Homo sapien
ccatcatcataacaacaaaaaatcccccacaac

SEQ ID NO: 271990 - DNA, 33 bp, Homo sapien
ccatcatcataacaaccaaaaatcccccacaac

SEQ ID NO: 271991 - DNA, 33 bp, Homo sapien
agggttcagagttggacgagagaacagacagtt

SEQ ID NO: 271992 - DNA, 33 bp, Homo sapien
agggttcagagttggatgagagaacagacagtt

SEQ ID NO: 271993 - DNA, 33 bp, Homo sapien
ggaaggatggaggaaacgagggaagaagaaatt

SEQ ID NO: 271994 - DNA, 33 bp, Homo sapien
ggaaggatggaggaaatgagggaagaagaaatt

SEQ ID NO: 271995 - DNA, 33 bp, Homo sapien
ttttccagcttctaaaatctgcttctaatccct

SEQ ID NO: 271996 - DNA, 33 bp, Homo sapien
ttttccagcttctaaagtctgcttctaatccct

SEQ ID NO: 271997 - DNA, 33 bp, Homo sapien
ttagaacttgattcagccatcctatcttctgag

SEQ ID NO: 271998 - DNA, 33 bp, Homo sapien
ttagaacttgattcaggcatcctatcttctgag

SEQ ID NO: 271999 - DNA, 33 bp, Homo sapien
cagcagagatttgtgcaaaacagatgccaggca

SEQ ID NO: 272000 - DNA, 33 bp, Homo sapien
cagcagagatttgtgcgaaacagatgccaggca

SEQ ID NO: 272001 - DNA, 33 bp, Homo sapien
aagccatatgaaggtaaagtctgtgtctatctt

SEQ ID NO: 272002 - DNA, 33 bp, Homo sapien
aagccatatgaaggtagagtctgtgtctatctt

SEQ ID NO: 272003 - DNA, 33 bp, Homo sapien
aaacttctcaaagtccataacatttatctgaca

SEQ ID NO: 272004 - DNA, 33 bp, Homo sapien
aaacttctcaaagtccctaacatttatctgaca

SEQ ID NO: 272005 - DNA, 33 bp, Homo sapien
ttaactttgactgataaaggtagcaatgggagg

SEQ ID NO: 272006 - DNA, 33 bp, Homo sapien
ttaactttgactgatagaggtagcaatgggagg

SEQ ID NO: 272007 - DNA, 33 bp, Homo sapien
tactgctctcttgtcaactaagggtataccttt

SEQ ID NO: 272008 - DNA, 33 bp, Homo sapien
tactgctctcttgtcacctaagggtataccttt

SEQ ID NO: 272009 - DNA, 33 bp, Homo sapien
cctcaatggcattgtcaaccttagtgcttatat

SEQ ID NO: 272010 - DNA, 33 bp, Homo sapien
cctcaatggcattgtccaccttagtgcttatat

SEQ ID NO: 272011 - DNA, 33 bp, Homo sapien
gatattaacagtaccaacttcatatgttcaagg

SEQ ID NO: 272012 - DNA, 33 bp, Homo sapien
gatattaacagtaccaccttcatatgttcaagg

SEQ ID NO: 272013 - DNA, 33 bp, Homo sapien
aagaacttgcagagcaatgctcctcaccagttt

SEQ ID NO: 272014 - DNA, 33 bp, Homo sapien
aagaacttgcagagcactgctcctcaccagttt

SEQ ID NO: 272015 - DNA, 33 bp, Homo sapien
tctgttgataaacattaaagttgctgccaaact

SEQ ID NO: 272016 - DNA, 33 bp, Homo sapien
tctgttgataaacatttaagttgctgccaaact

SEQ ID NO: 272017 - DNA, 33 bp, Homo sapien
tgcctcacgaattaaacgagcagttacatacaa

SEQ ID NO: 272018 - DNA, 33 bp, Homo sapien
tgcctcacgaattaaatgagcagttacatacaa

SEQ ID NO: 272019 - DNA, 33 bp, Homo sapien
actagtgagggttagaaagaaagaagagaaata

SEQ ID NO: 272020 - DNA, 33 bp, Homo sapien
actagtgagggttagagagaaagaagagaaata

SEQ ID NO: 272021 - DNA, 33 bp, Homo sapien
tagctattatctgtccaccaaaatccaacacag

SEQ ID NO: 272022 - DNA, 33 bp, Homo sapien
tagctattatctgtccgccaaaatccaacacag

SEQ ID NO: 272023 - DNA, 33 bp, Homo sapien
ggggcgctgctggtcaataggtgcagggttccc

SEQ ID NO: 272024 - DNA, 33 bp, Homo sapien
ggggcgctgctggtcattaggtgcagggttccc

SEQ ID NO: 272025 - DNA, 33 bp, Homo sapien
tgtgcacggttcttatcacgctgccactgcctc

SEQ ID NO: 272026 - DNA, 33 bp, Homo sapien
tgtgcacggttcttattacgctgccactgcctc

SEQ ID NO: 272027 - DNA, 33 bp, Homo sapien
ttctgagcaggttgaaagttgattattactgac

SEQ ID NO: 272028 - DNA, 33 bp, Homo sapien
ttctgagcaggttgaaggttgattattactgac

SEQ ID NO: 272029 - DNA, 33 bp, Homo sapien
acaccgtggaattacccattatggccatgaatt

SEQ ID NO: 272030 - DNA, 33 bp, Homo sapien
acaccgtggaattacctattatggccatgaatt

SEQ ID NO: 272031 - DNA, 33 bp, Homo sapien
tttaagtctgtaaatacaggggtcaggacaaga

SEQ ID NO: 272032 - DNA, 33 bp, Homo sapien
tttaagtctgtaaatataggggtcaggacaaga

SEQ ID NO: 272033 - DNA, 33 bp, Homo sapien
gaaggcccagattaaaggaccccttgttgggcc

SEQ ID NO: 272034 - DNA, 33 bp, Homo sapien
gaaggcccagattaaatgaccccttgttgggcc

SEQ ID NO: 272035 - DNA, 33 bp, Homo sapien
atgagtcacagttttaagtttaggggatacagc

SEQ ID NO: 272036 - DNA, 33 bp, Homo sapien
atgagtcacagttttaggtttaggggatacagc

SEQ ID NO: 272037 - DNA, 33 bp, Homo sapien
aagtgctaaaagtgagaactagcaggaacctaa

SEQ ID NO: 272038 - DNA, 33 bp, Homo sapien
aagtgctaaaagtgaggactagcaggaacctaa

SEQ ID NO: 272039 - DNA, 33 bp, Homo sapien
ataagggttaaagatcaatggttcattagcaca

SEQ ID NO: 272040 - DNA, 33 bp, Homo sapien
ataagggttaaagatcgatggttcattagcaca

SEQ ID NO: 272041 - DNA, 33 bp, Homo sapien
ggaggtatgggaggaactaagatctgtgatgaa

SEQ ID NO: 272042 - DNA, 33 bp, Homo sapien
ggaggtatgggaggaagtaagatctgtgatgaa

SEQ ID NO: 272043 - DNA, 33 bp, Homo sapien
tgactaaatttgaaaacgcttcaaatcgctgca

SEQ ID NO: 272044 - DNA, 33 bp, Homo sapien
tgactaaatttgaaaatgcttcaaatcgctgca

SEQ ID NO: 272045 - DNA, 33 bp, Homo sapien
taaggaacaggtcaacaacaacttgggcaatag

SEQ ID NO: 272046 - DNA, 33 bp, Homo sapien
taaggaacaggtcaacgacaacttgggcaatag

SEQ ID NO: 272047 - DNA, 33 bp, Homo sapien
aggctgagaaacctataagtcttgattcaaatt

SEQ ID NO: 272048 - DNA, 33 bp, Homo sapien
aggctgagaaacctattagtcttgattcaaatt

SEQ ID NO: 272049 - DNA, 33 bp, Homo sapien
cataatgtgattatagactagcttggacttcac

SEQ ID NO: 272050 - DNA, 33 bp, Homo sapien
cataatgtgattatagcctagcttggacttcac

SEQ ID NO: 272051 - DNA, 33 bp, Homo sapien
ttcatagccttattccagcataatcaagtacag

SEQ ID NO: 272052 - DNA, 33 bp, Homo sapien
ttcatagccttattccggcataatcaagtacag

SEQ ID NO: 272053 - DNA, 33 bp, Homo sapien
gctgacacttaaaggacgctcagtggtgttcag

SEQ ID NO: 272054 - DNA, 33 bp, Homo sapien
gctgacacttaaaggatgctcagtggtgttcag

SEQ ID NO: 272055 - DNA, 33 bp, Homo sapien
gagttttttcctcaaacggatctttacagaccc

SEQ ID NO: 272056 - DNA, 33 bp, Homo sapien
gagttttttcctcaaatggatctttacagaccc

SEQ ID NO: 272057 - DNA, 33 bp, Homo sapien
ggaacaaatgaaacaccctcagcttctctggaa

SEQ ID NO: 272058 - DNA, 33 bp, Homo sapien
ggaacaaatgaaacacgctcagcttctctggaa

SEQ ID NO: 272059 - DNA, 33 bp, Homo sapien
caaggactgttttttcaactttcattaaaatcc

SEQ ID NO: 272060 - DNA, 33 bp, Homo sapien
caaggactgttttttcgactttcattaaaatcc

SEQ ID NO: 272061 - DNA, 33 bp, Homo sapien
tttacaaagtggcataaagatccaacctactac

SEQ ID NO: 272062 - DNA, 33 bp, Homo sapien
tttacaaagtggcatagagatccaacctactac

SEQ ID NO: 272063 - DNA, 33 bp, Homo sapien
ccctgcaagtatttcaagccaaatccaacaatt

SEQ ID NO: 272064 - DNA, 33 bp, Homo sapien
ccctgcaagtatttcaggccaaatccaacaatt

SEQ ID NO: 272065 - DNA, 33 bp, Homo sapien
attgtcacaatgtgtacaatcaagtgggacaag

SEQ ID NO: 272066 - DNA, 33 bp, Homo sapien
attgtcacaatgtgtagaatcaagtgggacaag

SEQ ID NO: 272067 - DNA, 33 bp, Homo sapien
gtctcaatgcaaacccaatgtcagctctacaga

SEQ ID NO: 272068 - DNA, 33 bp, Homo sapien
gtctcaatgcaaacccgatgtcagctctacaga

SEQ ID NO: 272069 - DNA, 33 bp, Homo sapien
attgtggtagcctttacatgactatacacttgt

SEQ ID NO: 272070 - DNA, 33 bp, Homo sapien
attgtggtagcctttatatgactatacacttgt

SEQ ID NO: 272071 - DNA, 33 bp, Homo sapien
aggagtaaagattggaaaacaaaccttcaacaa

SEQ ID NO: 272072 - DNA, 33 bp, Homo sapien
aggagtaaagattggagaacaaaccttcaacaa

SEQ ID NO: 272073 - DNA, 33 bp, Homo sapien
tgttggtcacaaccaaaaagaacacatgagttg

SEQ ID NO: 272074 - DNA, 33 bp, Homo sapien
tgttggtcacaaccaagaagaacacatgagttg

SEQ ID NO: 272075 - DNA, 33 bp, Homo sapien
ctgtagtgatttagcacgggtgtttgtctttca

SEQ ID NO: 272076 - DNA, 33 bp, Homo sapien
ctgtagtgatttagcatgggtgtttgtctttca

SEQ ID NO: 272077 - DNA, 33 bp, Homo sapien
tacccacgtcttctgcaagcatctttgcaaatg

SEQ ID NO: 272078 - DNA, 33 bp, Homo sapien
tacccacgtcttctgccagcatctttgcaaatg

SEQ ID NO: 272079 - DNA, 33 bp, Homo sapien
agagccatttgcaaagaaaatagatacaaatat

SEQ ID NO: 272080 - DNA, 33 bp, Homo sapien
agagccatttgcaaaggaaatagatacaaatat

SEQ ID NO: 272081 - DNA, 33 bp, Homo sapien
atggagcacaaaggaaatctcataaccagttag

SEQ ID NO: 272082 - DNA, 33 bp, Homo sapien
atggagcacaaaggaattctcataaccagttag

SEQ ID NO: 272083 - DNA, 33 bp, Homo sapien
tgtagcttccaccttacccccaagtccagaatc

SEQ ID NO: 272084 - DNA, 33 bp, Homo sapien
tgtagcttccaccttatccccaagtccagaatc

SEQ ID NO: 272085 - DNA, 33 bp, Homo sapien
attgactttcccataaatgtgtggttttgagtg

SEQ ID NO: 272086 - DNA, 33 bp, Homo sapien
attgactttcccataagtgtgtggttttgagtg

SEQ ID NO: 272087 - DNA, 33 bp, Homo sapien
ttccatgtgacaaagcagagacccagccataaa

SEQ ID NO: 272088 - DNA, 33 bp, Homo sapien
ttccatgtgacaaagcggagacccagccataaa

SEQ ID NO: 272089 - DNA, 33 bp, Homo sapien
gttacaccaggaagaaagcctaatcaagtgcca

SEQ ID NO: 272090 - DNA, 33 bp, Homo sapien
gttacaccaggaagaaggcctaatcaagtgcca

SEQ ID NO: 272091 - DNA, 33 bp, Homo sapien
attcattaaaaaatcaactcataggctctgctc

SEQ ID NO: 272092 - DNA, 33 bp, Homo sapien
attcattaaaaaatcacctcataggctctgctc

SEQ ID NO: 272093 - DNA, 33 bp, Homo sapien
gttcttgcacaaggaacattgaacaacataatg

SEQ ID NO: 272094 - DNA, 33 bp, Homo sapien
gttcttgcacaaggaatattgaacaacataatg

SEQ ID NO: 272095 - DNA, 33 bp, Homo sapien
agctccgaatgaaagtaaatgttgtatcataag

SEQ ID NO: 272096 - DNA, 33 bp, Homo sapien
agctccgaatgaaagtcaatgttgtatcataag

SEQ ID NO: 272097 - DNA, 33 bp, Homo sapien
ttcttcgagaggaccacgggaagcggctgccct

SEQ ID NO: 272098 - DNA, 33 bp, Homo sapien
ttcttcgagaggaccatgggaagcggctgccct

SEQ ID NO: 272099 - DNA, 33 bp, Homo sapien
aggggaagggcagtcaaataatggtgatggagt

SEQ ID NO: 272100 - DNA, 33 bp, Homo sapien
aggggaagggcagtcagataatggtgatggagt

SEQ ID NO: 272101 - DNA, 33 bp, Homo sapien
acatagactgaactaaacctacttaagataaat

SEQ ID NO: 272102 - DNA, 33 bp, Homo sapien
acatagactgaactaagcctacttaagataaat

SEQ ID NO: 272103 - DNA, 33 bp, Homo sapien
atgaattagataagcaacaatgggctatgattt

SEQ ID NO: 272104 - DNA, 33 bp, Homo sapien
atgaattagataagcatcaatgggctatgattt

SEQ ID NO: 272105 - DNA, 33 bp, Homo sapien
tgttctgacagcaacagctaaatgaaagacaaa

SEQ ID NO: 272106 - DNA, 33 bp, Homo sapien
tgttctgacagcaacatctaaatgaaagacaaa

SEQ ID NO: 272107 - DNA, 33 bp, Homo sapien
ccttattagctttctacggtgtgaaaagtctta

SEQ ID NO: 272108 - DNA, 33 bp, Homo sapien
ccttattagctttctatggtgtgaaaagtctta

SEQ ID NO: 272109 - DNA, 33 bp, Homo sapien
ggaggtcagatgtccaagatggcgaggttctat

SEQ ID NO: 272110 - DNA, 33 bp, Homo sapien
ggaggtcagatgtccaggatggcgaggttctat

SEQ ID NO: 272111 - DNA, 33 bp, Homo sapien
tttagttcaatctggcaatgtttgtgctagtac

SEQ ID NO: 272112 - DNA, 33 bp, Homo sapien
tttagttcaatctggcgatgtttgtgctagtac

SEQ ID NO: 272113 - DNA, 33 bp, Homo sapien
gaaatttccaagtagcaaagcattcaagagatg

SEQ ID NO: 272114 - DNA, 33 bp, Homo sapien
gaaatttccaagtagcgaagcattcaagagatg

SEQ ID NO: 272115 - DNA, 33 bp, Homo sapien
taagcaaagtgacatagatttgcatggattgaa

SEQ ID NO: 272116 - DNA, 33 bp, Homo sapien
taagcaaagtgacatatatttgcatggattgaa

SEQ ID NO: 272117 - DNA, 33 bp, Homo sapien
gttagagaagccataccgagaaacttccaggcc

SEQ ID NO: 272118 - DNA, 33 bp, Homo sapien
gttagagaagccatactgagaaacttccaggcc

SEQ ID NO: 272119 - DNA, 33 bp, Homo sapien
caggtaatagctattccgaaaaggatctctctt

SEQ ID NO: 272120 - DNA, 33 bp, Homo sapien
caggtaatagctattctgaaaaggatctctctt

SEQ ID NO: 272121 - DNA, 33 bp, Homo sapien
gcagcagcagaaattcaacaattcctgtaaaat

SEQ ID NO: 272122 - DNA, 33 bp, Homo sapien
gcagcagcagaaattcgacaattcctgtaaaat

SEQ ID NO: 272123 - DNA, 33 bp, Homo sapien
ctgaagtggttctgagacacatattagtaggta

SEQ ID NO: 272124 - DNA, 33 bp, Homo sapien
ctgaagtggttctgaggcacatattagtaggta

SEQ ID NO: 272125 - DNA, 33 bp, Homo sapien
tgttagaattttcatgacaaccttaaagaactg

SEQ ID NO: 272126 - DNA, 33 bp, Homo sapien
tgttagaattttcatggcaaccttaaagaactg

SEQ ID NO: 272127 - DNA, 33 bp, Homo sapien
agagaatagtttaaaactgaatgctacatagaa

SEQ ID NO: 272128 - DNA, 33 bp, Homo sapien
agagaatagtttaaaattgaatgctacatagaa

SEQ ID NO: 272129 - DNA, 33 bp, Homo sapien
tctatgacagagttcaaaactgcagaccagcaa

SEQ ID NO: 272130 - DNA, 33 bp, Homo sapien
tctatgacagagttcagaactgcagaccagcaa

SEQ ID NO: 272131 - DNA, 33 bp, Homo sapien
taattcttttcctctgaacctgctggatgagaa

SEQ ID NO: 272132 - DNA, 33 bp, Homo sapien
taattcttttcctctgtacctgctggatgagaa

SEQ ID NO: 272133 - DNA, 33 bp, Homo sapien
cttttctcactaacagccacagttgtaccaagg

SEQ ID NO: 272134 - DNA, 33 bp, Homo sapien
cttttctcactaacagtcacagttgtaccaagg

SEQ ID NO: 272135 - DNA, 33 bp, Homo sapien
aatcgtgcagccttcaatctgaggtcgaaggcc

SEQ ID NO: 272136 - DNA, 33 bp, Homo sapien
aatcgtgcagccttcagtctgaggtcgaaggcc

SEQ ID NO: 272137 - DNA, 33 bp, Homo sapien
aagtgataaagaatagcaggctactttatgtgg

SEQ ID NO: 272138 - DNA, 33 bp, Homo sapien
aagtgataaagaataggaggctactttatgtgg

SEQ ID NO: 272139 - DNA, 33 bp, Homo sapien
tgttaattgctcaatcgaaattagtcagatatt

SEQ ID NO: 272140 - DNA, 33 bp, Homo sapien
tgttaattgctcaatctaaattagtcagatatt

SEQ ID NO: 272141 - DNA, 33 bp, Homo sapien
cttaaatgagttttccgacgtttacctacagtc

SEQ ID NO: 272142 - DNA, 33 bp, Homo sapien
cttaaatgagttttcctacgtttacctacagtc

SEQ ID NO: 272143 - DNA, 33 bp, Homo sapien
acaaagctcagaaatacagtgtcagaaatgtct

SEQ ID NO: 272144 - DNA, 33 bp, Homo sapien
acaaagctcagaaatatagtgtcagaaatgtct

SEQ ID NO: 272145 - DNA, 33 bp, Homo sapien
tatgttgttcatgggaaatctggttatgaatag

SEQ ID NO: 272146 - DNA, 33 bp, Homo sapien
tatgttgttcatgggagatctggttatgaatag

SEQ ID NO: 272147 - DNA, 33 bp, Homo sapien
aaataaatccaagaacacgtggtgaacaggtgg

SEQ ID NO: 272148 - DNA, 33 bp, Homo sapien
aaataaatccaagaacgcgtggtgaacaggtgg

SEQ ID NO: 272149 - DNA, 33 bp, Homo sapien
tgcaatgctcagtgtacctttccagtcttcagg

SEQ ID NO: 272150 - DNA, 33 bp, Homo sapien
tgcaatgctcagtgtatctttccagtcttcagg

SEQ ID NO: 272151 - DNA, 33 bp, Homo sapien
ctaacattaagcatcaatgacatgaacaactaa

SEQ ID NO: 272152 - DNA, 33 bp, Homo sapien
ctaacattaagcatcagtgacatgaacaactaa

SEQ ID NO: 272153 - DNA, 33 bp, Homo sapien
tcatcatcttttaagaagtaattagccatgaat

SEQ ID NO: 272154 - DNA, 33 bp, Homo sapien
tcatcatcttttaagaggtaattagccatgaat

SEQ ID NO: 272155 - DNA, 33 bp, Homo sapien
cctaaagatctcctcaactgaaaagataggtat

SEQ ID NO: 272156 - DNA, 33 bp, Homo sapien
cctaaagatctcctcagctgaaaagataggtat

SEQ ID NO: 272157 - DNA, 33 bp, Homo sapien
cctggataaaacaatcacatcagaatggctgtg

SEQ ID NO: 272158 - DNA, 33 bp, Homo sapien
cctggataaaacaatcgcatcagaatggctgtg

SEQ ID NO: 272159 - DNA, 33 bp, Homo sapien
tgtgctctctatggcaaataaagaaaagacact

SEQ ID NO: 272160 - DNA, 33 bp, Homo sapien
tgtgctctctatggcagataaagaaaagacact

SEQ ID NO: 272161 - DNA, 33 bp, Homo sapien
tctggctagaaaacgaataagcttcacacatca

SEQ ID NO: 272162 - DNA, 33 bp, Homo sapien
tctggctagaaaacgagtaagcttcacacatca

SEQ ID NO: 272163 - DNA, 33 bp, Homo sapien
tagaggcgaccctccccattgaagtatatccag

SEQ ID NO: 272164 - DNA, 33 bp, Homo sapien
tagaggcgaccctccctattgaagtatatccag

SEQ ID NO: 272165 - DNA, 33 bp, Homo sapien
gtagttccagacatcaaccatgttgacaagaca

SEQ ID NO: 272166 - DNA, 33 bp, Homo sapien
gtagttccagacatcacccatgttgacaagaca

SEQ ID NO: 272167 - DNA, 33 bp, Homo sapien
ggaagtaggagccaagactataatgttattctg

SEQ ID NO: 272168 - DNA, 33 bp, Homo sapien
ggaagtaggagccaaggctataatgttattctg

SEQ ID NO: 272169 - DNA, 33 bp, Homo sapien
tggagtggagggaataagagaaagtaagagaga

SEQ ID NO: 272170 - DNA, 33 bp, Homo sapien
tggagtggagggaataggagaaagtaagagaga

SEQ ID NO: 272171 - DNA, 33 bp, Homo sapien
gcacatcaaagtagaaaagcaaataggagttca

SEQ ID NO: 272172 - DNA, 33 bp, Homo sapien
gcacatcaaagtagaagagcaaataggagttca

SEQ ID NO: 272173 - DNA, 33 bp, Homo sapien
gttttcttggcatagcaaaaagcatctgtgaag

SEQ ID NO: 272174 - DNA, 33 bp, Homo sapien
gttttcttggcatagcgaaaagcatctgtgaag

SEQ ID NO: 272175 - DNA, 33 bp, Homo sapien
gtggatacacatccaacgtccccacttagcatg

SEQ ID NO: 272176 - DNA, 33 bp, Homo sapien
gtggatacacatccaatgtccccacttagcatg

SEQ ID NO: 272177 - DNA, 33 bp, Homo sapien
ggagggtagcaagaacagaaaaggcaagcaggc

SEQ ID NO: 272178 - DNA, 33 bp, Homo sapien
ggagggtagcaagaacggaaaaggcaagcaggc

SEQ ID NO: 272179 - DNA, 33 bp, Homo sapien
gcattatatgtcatgaccagggaaatgttagct

SEQ ID NO: 272180 - DNA, 33 bp, Homo sapien
gcattatatgtcatgatcagggaaatgttagct

SEQ ID NO: 272181 - DNA, 33 bp, Homo sapien
atattcaagactaataacctctgcactcagggg

SEQ ID NO: 272182 - DNA, 33 bp, Homo sapien
atattcaagactaatatcctctgcactcagggg

SEQ ID NO: 272183 - DNA, 33 bp, Homo sapien
gctctctgcttggtgactagacccaacttagaa

SEQ ID NO: 272184 - DNA, 33 bp, Homo sapien
gctctctgcttggtgagtagacccaacttagaa

SEQ ID NO: 272185 - DNA, 33 bp, Homo sapien
tcatactgcaacacaccaacgatctgtataatg

SEQ ID NO: 272186 - DNA, 33 bp, Homo sapien
tcatactgcaacacactaacgatctgtataatg

SEQ ID NO: 272187 - DNA, 33 bp, Homo sapien
ctcaacactcctaggcacaatcaatggcttcct

SEQ ID NO: 272188 - DNA, 33 bp, Homo sapien
ctcaacactcctaggcgcaatcaatggcttcct

SEQ ID NO: 272189 - DNA, 33 bp, Homo sapien
tctgcactgatagcagcaatagcaatatcgatt

SEQ ID NO: 272190 - DNA, 33 bp, Homo sapien
tctgcactgatagcagtaatagcaatatcgatt

SEQ ID NO: 272191 - DNA, 33 bp, Homo sapien
gctttgttaaagatcaaagaaaacctggcagat

SEQ ID NO: 272192 - DNA, 33 bp, Homo sapien
gctttgttaaagatcacagaaaacctggcagat

SEQ ID NO: 272193 - DNA, 33 bp, Homo sapien
gctctactaagttcaaatgagttcccattggcc

SEQ ID NO: 272194 - DNA, 33 bp, Homo sapien
gctctactaagttcaactgagttcccattggcc

SEQ ID NO: 272195 - DNA, 33 bp, Homo sapien
aaggagagtctgttcactccttgatgtcatttg

SEQ ID NO: 272196 - DNA, 33 bp, Homo sapien
aaggagagtctgttcattccttgatgtcatttg

SEQ ID NO: 272197 - DNA, 33 bp, Homo sapien
tagttagcaaatggtcaatctattctccttgta

SEQ ID NO: 272198 - DNA, 33 bp, Homo sapien
tagttagcaaatggtcgatctattctccttgta

SEQ ID NO: 272199 - DNA, 33 bp, Homo sapien
attgataacttagatgaaatggagaatcatatc

SEQ ID NO: 272200 - DNA, 33 bp, Homo sapien
attgataacttagatgtaatggagaatcatatc

SEQ ID NO: 272201 - DNA, 33 bp, Homo sapien
tttctcattaagacccagaatcacaagaatgtc

SEQ ID NO: 272202 - DNA, 33 bp, Homo sapien
tttctcattaagaccccgaatcacaagaatgtc

SEQ ID NO: 272203 - DNA, 33 bp, Homo sapien
acacaattatcatgccgctacacaatgttttgt

SEQ ID NO: 272204 - DNA, 33 bp, Homo sapien
acacaattatcatgcctctacacaatgttttgt

SEQ ID NO: 272205 - DNA, 33 bp, Homo sapien
tcctattgacttcccactgagttgcaagtgaca

SEQ ID NO: 272206 - DNA, 33 bp, Homo sapien
tcctattgacttcccattgagttgcaagtgaca

SEQ ID NO: 272207 - DNA, 33 bp, Homo sapien
acttatatacagaatacggattactgggctaag

SEQ ID NO: 272208 - DNA, 33 bp, Homo sapien
acttatatacagaatatggattactgggctaag

SEQ ID NO: 272209 - DNA, 33 bp, Homo sapien
tgagttaatatgtgtaacttgcttagcatgatt

SEQ ID NO: 272210 - DNA, 33 bp, Homo sapien
tgagttaatatgtgtagcttgcttagcatgatt

SEQ ID NO: 272211 - DNA, 33 bp, Homo sapien
gtaaacacacacagtaaaagagagaatcactcg

SEQ ID NO: 272212 - DNA, 33 bp, Homo sapien
gtaaacacacacagtagaagagagaatcactcg

SEQ ID NO: 272213 - DNA, 33 bp, Homo sapien
caatagactccaattccccaactttgtgtagta

SEQ ID NO: 272214 - DNA, 33 bp, Homo sapien
caatagactccaattctccaactttgtgtagta

SEQ ID NO: 272215 - DNA, 33 bp, Homo sapien
tgctgagcagcaacatcaactgctttttttccc

SEQ ID NO: 272216 - DNA, 33 bp, Homo sapien
tgctgagcagcaacatgaactgctttttttccc

SEQ ID NO: 272217 - DNA, 33 bp, Homo sapien
taccacctttgaaaaaaacaggaacaattattg

SEQ ID NO: 272218 - DNA, 33 bp, Homo sapien
taccacctttgaaaaacacaggaacaattattg

SEQ ID NO: 272219 - DNA, 33 bp, Homo sapien
gtgattattcaacaccacttctccaacctcttg

SEQ ID NO: 272220 - DNA, 33 bp, Homo sapien
gtgattattcaacacctcttctccaacctcttg

SEQ ID NO: 272221 - DNA, 33 bp, Homo sapien
gaaaaggcaatggctacgtctgtcagtttttat

SEQ ID NO: 272222 - DNA, 33 bp, Homo sapien
gaaaaggcaatggctatgtctgtcagtttttat

SEQ ID NO: 272223 - DNA, 33 bp, Homo sapien
gactccaaggaaagcactgaagctgtgatcaca

SEQ ID NO: 272224 - DNA, 33 bp, Homo sapien
gactccaaggaaagcattgaagctgtgatcaca

SEQ ID NO: 272225 - DNA, 33 bp, Homo sapien
ttgagccatttaagtacaatccatctgtaagta

SEQ ID NO: 272226 - DNA, 33 bp, Homo sapien
ttgagccatttaagtataatccatctgtaagta

SEQ ID NO: 272227 - DNA, 33 bp, Homo sapien
ataaaagtggtgttcaaaatgattaaatggcaa

SEQ ID NO: 272228 - DNA, 33 bp, Homo sapien
ataaaagtggtgttcagaatgattaaatggcaa

SEQ ID NO: 272229 - DNA, 33 bp, Homo sapien
cactagaacaacttggaaatgtgctatgcttat

SEQ ID NO: 272230 - DNA, 33 bp, Homo sapien
cactagaacaacttgggaatgtgctatgcttat

SEQ ID NO: 272231 - DNA, 33 bp, Homo sapien
ttggatagacagagaacggaatgtaaagaatag

SEQ ID NO: 272232 - DNA, 33 bp, Homo sapien
ttggatagacagagaatggaatgtaaagaatag

SEQ ID NO: 272233 - DNA, 33 bp, Homo sapien
atctctagttagtatacagtcaggatgtctaag

SEQ ID NO: 272234 - DNA, 33 bp, Homo sapien
atctctagttagtatatagtcaggatgtctaag

SEQ ID NO: 272235 - DNA, 33 bp, Homo sapien
ttgctattctgaccatcatattgcatagtggag

SEQ ID NO: 272236 - DNA, 33 bp, Homo sapien
ttgctattctgaccattatattgcatagtggag

SEQ ID NO: 272237 - DNA, 33 bp, Homo sapien
acaacaaaaaaattgacggtgctttgactaaaa

SEQ ID NO: 272238 - DNA, 33 bp, Homo sapien
acaacaaaaaaattgatggtgctttgactaaaa

SEQ ID NO: 272239 - DNA, 33 bp, Homo sapien
tagtaaaaactaacccaagaaatcatgtatgtg

SEQ ID NO: 272240 - DNA, 33 bp, Homo sapien
tagtaaaaactaacccgagaaatcatgtatgtg

SEQ ID NO: 272241 - DNA, 33 bp, Homo sapien
gtcaccttcctgaacaggagatgagattaggac

SEQ ID NO: 272242 - DNA, 33 bp, Homo sapien
gtcaccttcctgaacatgagatgagattaggac

SEQ ID NO: 272243 - DNA, 33 bp, Homo sapien
ctattattctcccccaatgagtactgcttttct

SEQ ID NO: 272244 - DNA, 33 bp, Homo sapien
ctattattctcccccagtgagtactgcttttct

SEQ ID NO: 272245 - DNA, 33 bp, Homo sapien
acacggctatagaaacaaacaaaattatgccct

SEQ ID NO: 272246 - DNA, 33 bp, Homo sapien
acacggctatagaaacgaacaaaattatgccct

SEQ ID NO: 272247 - DNA, 33 bp, Homo sapien
aattatttgcaattacaaatatcatgggaataa

SEQ ID NO: 272248 - DNA, 33 bp, Homo sapien
aattatttgcaattactaatatcatgggaataa

SEQ ID NO: 272249 - DNA, 33 bp, Homo sapien
tccctgtggtgagaaaatacgccaggattcact

SEQ ID NO: 272250 - DNA, 33 bp, Homo sapien
tccctgtggtgagaaagtacgccaggattcact

SEQ ID NO: 272251 - DNA, 33 bp, Homo sapien
ttgtgtgtaactagaaactacactcctaggtct

SEQ ID NO: 272252 - DNA, 33 bp, Homo sapien
ttgtgtgtaactagaatctacactcctaggtct

SEQ ID NO: 272253 - DNA, 33 bp, Homo sapien
tgagaacccttgggtaacttgcaaactctgtgc

SEQ ID NO: 272254 - DNA, 33 bp, Homo sapien
tgagaacccttgggtagcttgcaaactctgtgc

SEQ ID NO: 272255 - DNA, 33 bp, Homo sapien
tactaattaaattaacaaaggctcaggacatat

SEQ ID NO: 272256 - DNA, 33 bp, Homo sapien
tactaattaaattaacgaaggctcaggacatat

SEQ ID NO: 272257 - DNA, 33 bp, Homo sapien
ttaatgattagctagcagcattcagttataaac

SEQ ID NO: 272258 - DNA, 33 bp, Homo sapien
ttaatgattagctagccgcattcagttataaac

SEQ ID NO: 272259 - DNA, 33 bp, Homo sapien
tgaccccctcatttaactattcgctggagcatg

SEQ ID NO: 272260 - DNA, 33 bp, Homo sapien
tgaccccctcatttaagtattcgctggagcatg

SEQ ID NO: 272261 - DNA, 33 bp, Homo sapien
tcactaattcctataaacactgacatttttcca

SEQ ID NO: 272262 - DNA, 33 bp, Homo sapien
tcactaattcctataaccactgacatttttcca

SEQ ID NO: 272263 - DNA, 33 bp, Homo sapien
atcttctggctttaaaagttgatatgaacatgt

SEQ ID NO: 272264 - DNA, 33 bp, Homo sapien
atcttctggctttaaacgttgatatgaacatgt

SEQ ID NO: 272265 - DNA, 33 bp, Homo sapien
caggggtttcgtcctacgcaggataggaagtct

SEQ ID NO: 272266 - DNA, 33 bp, Homo sapien
caggggtttcgtcctaggcaggataggaagtct

SEQ ID NO: 272267 - DNA, 33 bp, Homo sapien
ttggattagaacttcaagaattgttcactattg

SEQ ID NO: 272268 - DNA, 33 bp, Homo sapien
ttggattagaacttcaggaattgttcactattg

SEQ ID NO: 272269 - DNA, 33 bp, Homo sapien
tagctcagtgttcagggatttaagttttgttgt

SEQ ID NO: 272270 - DNA, 33 bp, Homo sapien
tagctcagtgttcaggtatttaagttttgttgt

SEQ ID NO: 272271 - DNA, 33 bp, Homo sapien
aatgactacatcctaacggacccataaatttaa

SEQ ID NO: 272272 - DNA, 33 bp, Homo sapien
aatgactacatcctaatggacccataaatttaa

SEQ ID NO: 272273 - DNA, 33 bp, Homo sapien
agttctgtgtggaaaaccagaatgccctgggga

SEQ ID NO: 272274 - DNA, 33 bp, Homo sapien
agttctgtgtggaaaatcagaatgccctgggga

SEQ ID NO: 272275 - DNA, 33 bp, Homo sapien
gatttgacctccaaaggctataggaaaatagag

SEQ ID NO: 272276 - DNA, 33 bp, Homo sapien
gatttgacctccaaagtctataggaaaatagag

SEQ ID NO: 272277 - DNA, 33 bp, Homo sapien
agcctgtgcaacctccaattttattcaagagct

SEQ ID NO: 272278 - DNA, 33 bp, Homo sapien
agcctgtgcaacctccgattttattcaagagct

SEQ ID NO: 272279 - DNA, 33 bp, Homo sapien
gctgtatgtaggaaccaacaaactcttctcaag

SEQ ID NO: 272280 - DNA, 33 bp, Homo sapien
gctgtatgtaggaaccgacaaactcttctcaag

SEQ ID NO: 272281 - DNA, 33 bp, Homo sapien
cttgcttgtctccaaccgaactgtaagctccct

SEQ ID NO: 272282 - DNA, 33 bp, Homo sapien
cttgcttgtctccaactgaactgtaagctccct

SEQ ID NO: 272283 - DNA, 33 bp, Homo sapien
acctcagcctctaaaacagtggggactacaggt

SEQ ID NO: 272284 - DNA, 33 bp, Homo sapien
acctcagcctctaaaatagtggggactacaggt

SEQ ID NO: 272285 - DNA, 33 bp, Homo sapien
tttgctataaaattgcaaagtagtttatttaat

SEQ ID NO: 272286 - DNA, 33 bp, Homo sapien
tttgctataaaattgcgaagtagtttatttaat

SEQ ID NO: 272287 - DNA, 33 bp, Homo sapien
ccattggaactgctacacctgtgttttctccta

SEQ ID NO: 272288 - DNA, 33 bp, Homo sapien
ccattggaactgctacgcctgtgttttctccta

SEQ ID NO: 272289 - DNA, 33 bp, Homo sapien
cttctatctaatataaaggcttacgtagaagga

SEQ ID NO: 272290 - DNA, 33 bp, Homo sapien
cttctatctaatataagggcttacgtagaagga

SEQ ID NO: 272291 - DNA, 33 bp, Homo sapien
catatgggcatgatgcggagttttgatgatcca

SEQ ID NO: 272292 - DNA, 33 bp, Homo sapien
catatgggcatgatgctgagttttgatgatcca

SEQ ID NO: 272293 - DNA, 33 bp, Homo sapien
gtagaattcaaggcataaagtaaagagacaata

SEQ ID NO: 272294 - DNA, 33 bp, Homo sapien
gtagaattcaaggcatgaagtaaagagacaata

SEQ ID NO: 272295 - DNA, 33 bp, Homo sapien
ctaccttgatatgccaagagcaaacagagaact

SEQ ID NO: 272296 - DNA, 33 bp, Homo sapien
ctaccttgatatgccaggagcaaacagagaact

SEQ ID NO: 272297 - DNA, 33 bp, Homo sapien
atacagttatcagggtcaagaaaaaggcaccaa

SEQ ID NO: 272298 - DNA, 33 bp, Homo sapien
atacagttatcagggtgaagaaaaaggcaccaa

SEQ ID NO: 272299 - DNA, 33 bp, Homo sapien
cccggtgagcgtagcacctgtatcttgacaaaa

SEQ ID NO: 272300 - DNA, 33 bp, Homo sapien
cccggtgagcgtagcatctgtatcttgacaaaa

SEQ ID NO: 272301 - DNA, 33 bp, Homo sapien
atactgaatatcactaacctaacaaatcttaat

SEQ ID NO: 272302 - DNA, 33 bp, Homo sapien
atactgaatatcactatcctaacaaatcttaat

SEQ ID NO: 272303 - DNA, 33 bp, Homo sapien
ttaaacaacaattcacaggaaaggaagcataga

SEQ ID NO: 272304 - DNA, 33 bp, Homo sapien
ttaaacaacaattcacgggaaaggaagcataga

SEQ ID NO: 272305 - DNA, 33 bp, Homo sapien
aaaagaatgtatgttcaaaggctttagctgtgt

SEQ ID NO: 272306 - DNA, 33 bp, Homo sapien
aaaagaatgtatgttcgaaggctttagctgtgt

SEQ ID NO: 272307 - DNA, 33 bp, Homo sapien
atccccaatcagaataaaggtgccgtgaaaggt

SEQ ID NO: 272308 - DNA, 33 bp, Homo sapien
atccccaatcagaatagaggtgccgtgaaaggt

SEQ ID NO: 272309 - DNA, 33 bp, Homo sapien
taaaaacttctgcagcaattggattatttgttc

SEQ ID NO: 272310 - DNA, 33 bp, Homo sapien
taaaaacttctgcagcgattggattatttgttc

SEQ ID NO: 272311 - DNA, 33 bp, Homo sapien
tatcagtgattatgtcacctttttgtttctaac

SEQ ID NO: 272312 - DNA, 33 bp, Homo sapien
tatcagtgattatgtctcctttttgtttctaac

SEQ ID NO: 272313 - DNA, 33 bp, Homo sapien
gatagacagacagacaaatagatgttattaaaa

SEQ ID NO: 272314 - DNA, 33 bp, Homo sapien
gatagacagacagacagatagatgttattaaaa

SEQ ID NO: 272315 - DNA, 33 bp, Homo sapien
tctgtattagtcaagacgataggtaggtagtta

SEQ ID NO: 272316 - DNA, 33 bp, Homo sapien
tctgtattagtcaagatgataggtaggtagtta

SEQ ID NO: 272317 - DNA, 33 bp, Homo sapien
tttttgctgtccaactaacattttgatctctta

SEQ ID NO: 272318 - DNA, 33 bp, Homo sapien
tttttgctgtccaactgacattttgatctctta

SEQ ID NO: 272319 - DNA, 33 bp, Homo sapien
caaacagtagaggtgacggatcaattaaaatta

SEQ ID NO: 272320 - DNA, 33 bp, Homo sapien
caaacagtagaggtgatggatcaattaaaatta

SEQ ID NO: 272321 - DNA, 33 bp, Homo sapien
aattaagttttattcaccttattcggtaaatgc

SEQ ID NO: 272322 - DNA, 33 bp, Homo sapien
aattaagttttattcatcttattcggtaaatgc

SEQ ID NO: 272323 - DNA, 33 bp, Homo sapien
tgcattattcacactgaaattactccaaagatt

SEQ ID NO: 272324 - DNA, 33 bp, Homo sapien
tgcattattcacactggaattactccaaagatt

SEQ ID NO: 272325 - DNA, 33 bp, Homo sapien
tctgcatttgtaacaaactttcaggtgacattg

SEQ ID NO: 272326 - DNA, 33 bp, Homo sapien
tctgcatttgtaacaagctttcaggtgacattg

SEQ ID NO: 272327 - DNA, 33 bp, Homo sapien
ggaccacactttaagaaacactgacctaaagaa

SEQ ID NO: 272328 - DNA, 33 bp, Homo sapien
ggaccacactttaagagacactgacctaaagaa

SEQ ID NO: 272329 - DNA, 33 bp, Homo sapien
ttgcctctcttatcaacataaaccctgagaaac

SEQ ID NO: 272330 - DNA, 33 bp, Homo sapien
ttgcctctcttatcaatataaaccctgagaaac

SEQ ID NO: 272331 - DNA, 33 bp, Homo sapien
catgtgtactttccaactgagtgttatgctaag

SEQ ID NO: 272332 - DNA, 33 bp, Homo sapien
catgtgtactttccaattgagtgttatgctaag

SEQ ID NO: 272333 - DNA, 33 bp, Homo sapien
gtacggcagaacagggaagagataaactctggt

SEQ ID NO: 272334 - DNA, 33 bp, Homo sapien
gtacggcagaacaggggagagataaactctggt

SEQ ID NO: 272335 - DNA, 33 bp, Homo sapien
cctaatttacttataccattagccatggaaatt

SEQ ID NO: 272336 - DNA, 33 bp, Homo sapien
cctaatttacttatacgattagccatggaaatt

SEQ ID NO: 272337 - DNA, 33 bp, Homo sapien
tcctatcttccctgtaactggcacaagtctcat

SEQ ID NO: 272338 - DNA, 33 bp, Homo sapien
tcctatcttccctgtagctggcacaagtctcat

SEQ ID NO: 272339 - DNA, 33 bp, Homo sapien
cccatatggtcctgagaataccaatgagtgttg

SEQ ID NO: 272340 - DNA, 33 bp, Homo sapien
cccatatggtcctgaggataccaatgagtgttg

SEQ ID NO: 272341 - DNA, 33 bp, Homo sapien
gtatataacagaagaaactcaacctagctgctg

SEQ ID NO: 272342 - DNA, 33 bp, Homo sapien
gtatataacagaagaatctcaacctagctgctg

SEQ ID NO: 272343 - DNA, 33 bp, Homo sapien
ttaggacagtacatggaaacaggagctttcaag

SEQ ID NO: 272344 - DNA, 33 bp, Homo sapien
ttaggacagtacatgggaacaggagctttcaag

SEQ ID NO: 272345 - DNA, 33 bp, Homo sapien
gctttaagcaacatcaaaaagatctgcaaccat

SEQ ID NO: 272346 - DNA, 33 bp, Homo sapien
gctttaagcaacatcagaaagatctgcaaccat

SEQ ID NO: 272347 - DNA, 33 bp, Homo sapien
gacttactgacgctaacacttagtccttgaagc

SEQ ID NO: 272348 - DNA, 33 bp, Homo sapien
gacttactgacgctaatacttagtccttgaagc

SEQ ID NO: 272349 - DNA, 33 bp, Homo sapien
gatgtgtgctagaatcccagttcttcttgttta

SEQ ID NO: 272350 - DNA, 33 bp, Homo sapien
gatgtgtgctagaatctcagttcttcttgttta

SEQ ID NO: 272351 - DNA, 33 bp, Homo sapien
tttcacacactttttccaggtttgtattcttac

SEQ ID NO: 272352 - DNA, 33 bp, Homo sapien
tttcacacactttttcgaggtttgtattcttac

SEQ ID NO: 272353 - DNA, 33 bp, Homo sapien
cctcataaatgccacgcagttttccaaactgta

SEQ ID NO: 272354 - DNA, 33 bp, Homo sapien
cctcataaatgccacgtagttttccaaactgta

SEQ ID NO: 272355 - DNA, 33 bp, Homo sapien
ttgtttaatagttgtaaaagagaaataccatcc

SEQ ID NO: 272356 - DNA, 33 bp, Homo sapien
ttgtttaatagttgtagaagagaaataccatcc

SEQ ID NO: 272357 - DNA, 33 bp, Homo sapien
attactgtagttacaccattattccaatagtct

SEQ ID NO: 272358 - DNA, 33 bp, Homo sapien
attactgtagttacacgattattccaatagtct

SEQ ID NO: 272359 - DNA, 33 bp, Homo sapien
aatgcataatgaaaaactgagtaatacattagt

SEQ ID NO: 272360 - DNA, 33 bp, Homo sapien
aatgcataatgaaaaattgagtaatacattagt

SEQ ID NO: 272361 - DNA, 33 bp, Homo sapien
gggaatcacaactgaaaagaccttaagaacctg

SEQ ID NO: 272362 - DNA, 33 bp, Homo sapien
gggaatcacaactgaagagaccttaagaacctg

SEQ ID NO: 272363 - DNA, 33 bp, Homo sapien
catgctcatgatccaaagtaaggactcaataga

SEQ ID NO: 272364 - DNA, 33 bp, Homo sapien
catgctcatgatccaatgtaaggactcaataga

SEQ ID NO: 272365 - DNA, 33 bp, Homo sapien
tatgaagtccttccaacggttttaaactgtgat

SEQ ID NO: 272366 - DNA, 33 bp, Homo sapien
tatgaagtccttccaatggttttaaactgtgat

SEQ ID NO: 272367 - DNA, 33 bp, Homo sapien
accagctatttcaaaactcatgctcttaattat

SEQ ID NO: 272368 - DNA, 33 bp, Homo sapien
accagctatttcaaaagtcatgctcttaattat

SEQ ID NO: 272369 - DNA, 33 bp, Homo sapien
aagaaacattaaacacacattacagctattcac

SEQ ID NO: 272370 - DNA, 33 bp, Homo sapien
aagaaacattaaacacgcattacagctattcac

SEQ ID NO: 272371 - DNA, 33 bp, Homo sapien
aggttagaattcatcaaatcagcttcttccttt

SEQ ID NO: 272372 - DNA, 33 bp, Homo sapien
aggttagaattcatcagatcagcttcttccttt

SEQ ID NO: 272373 - DNA, 33 bp, Homo sapien
taaagctagagatatcagaagtaattacaattt

SEQ ID NO: 272374 - DNA, 33 bp, Homo sapien
taaagctagagatatcggaagtaattacaattt

SEQ ID NO: 272375 - DNA, 33 bp, Homo sapien
gaggagagctagtgaaataaaagcctaagtata

SEQ ID NO: 272376 - DNA, 33 bp, Homo sapien
gaggagagctagtgaactaaaagcctaagtata

SEQ ID NO: 272377 - DNA, 33 bp, Homo sapien
tgtatatttcaagtgaacttggatgtcaaattt

SEQ ID NO: 272378 - DNA, 33 bp, Homo sapien
tgtatatttcaagtgaccttggatgtcaaattt

SEQ ID NO: 272379 - DNA, 33 bp, Homo sapien
tgatgcacaacctcatcataaaaaagttccaga

SEQ ID NO: 272380 - DNA, 33 bp, Homo sapien
tgatgcacaacctcatgataaaaaagttccaga

SEQ ID NO: 272381 - DNA, 33 bp, Homo sapien
ctgaacaatcatttggacaaagaggaatcaaaa

SEQ ID NO: 272382 - DNA, 33 bp, Homo sapien
ctgaacaatcatttggtcaaagaggaatcaaaa

SEQ ID NO: 272383 - DNA, 33 bp, Homo sapien
tgtactaaaaatatccaaaagtattcaggtatg

SEQ ID NO: 272384 - DNA, 33 bp, Homo sapien
tgtactaaaaatatccgaaagtattcaggtatg

SEQ ID NO: 272385 - DNA, 33 bp, Homo sapien
aatcagattaagatacaaagattatctggattg

SEQ ID NO: 272386 - DNA, 33 bp, Homo sapien
aatcagattaagatacgaagattatctggattg

SEQ ID NO: 272387 - DNA, 33 bp, Homo sapien
gtgaagatgaactctacaatcaggtactgcaat

SEQ ID NO: 272388 - DNA, 33 bp, Homo sapien
gtgaagatgaactctagaatcaggtactgcaat

SEQ ID NO: 272389 - DNA, 33 bp, Homo sapien
ggttatttgcataaaacgttcagcaaaatgtgt

SEQ ID NO: 272390 - DNA, 33 bp, Homo sapien
ggttatttgcataaaaggttcagcaaaatgtgt

SEQ ID NO: 272391 - DNA, 33 bp, Homo sapien
catactaattccttgcccaccattttcctgtgt

SEQ ID NO: 272392 - DNA, 33 bp, Homo sapien
catactaattccttgctcaccattttcctgtgt

SEQ ID NO: 272393 - DNA, 33 bp, Homo sapien
atctccaatattgcaaccaaacaaaactttgga

SEQ ID NO: 272394 - DNA, 33 bp, Homo sapien
atctccaatattgcaatcaaacaaaactttgga

SEQ ID NO: 272395 - DNA, 33 bp, Homo sapien
ctataagggcagaatcccaactttctctgggag

SEQ ID NO: 272396 - DNA, 33 bp, Homo sapien
ctataagggcagaatcgcaactttctctgggag

SEQ ID NO: 272397 - DNA, 33 bp, Homo sapien
atgtgcatattaaacactgagatattagctaat

SEQ ID NO: 272398 - DNA, 33 bp, Homo sapien
atgtgcatattaaacattgagatattagctaat

SEQ ID NO: 272399 - DNA, 33 bp, Homo sapien
ggttaatagttggcacccttcatcataaaatct

SEQ ID NO: 272400 - DNA, 33 bp, Homo sapien
ggttaatagttggcactcttcatcataaaatct

SEQ ID NO: 272401 - DNA, 33 bp, Homo sapien
ataaggcagattataaaaagcaagtatagtgtt

SEQ ID NO: 272402 - DNA, 33 bp, Homo sapien
ataaggcagattataacaagcaagtatagtgtt

SEQ ID NO: 272403 - DNA, 33 bp, Homo sapien
catcactgactatactcagaaggaaataaacca

SEQ ID NO: 272404 - DNA, 33 bp, Homo sapien
catcactgactatacttagaaggaaataaacca

SEQ ID NO: 272405 - DNA, 33 bp, Homo sapien
gatatatatgtgaaaccacacgtgctcatgtgt

SEQ ID NO: 272406 - DNA, 33 bp, Homo sapien
gatatatatgtgaaactacacgtgctcatgtgt

SEQ ID NO: 272407 - DNA, 33 bp, Homo sapien
acagcccttagaccaaagtttacacaaatcaga

SEQ ID NO: 272408 - DNA, 33 bp, Homo sapien
acagcccttagaccaacgtttacacaaatcaga

SEQ ID NO: 272409 - DNA, 33 bp, Homo sapien
aatcattgtagttaaaaagagaatgtttggtga

SEQ ID NO: 272410 - DNA, 33 bp, Homo sapien
aatcattgtagttaaagagagaatgtttggtga

SEQ ID NO: 272411 - DNA, 33 bp, Homo sapien
agtgtttcctgtagtaaaacatcactctctatt

SEQ ID NO: 272412 - DNA, 33 bp, Homo sapien
agtgtttcctgtagtacaacatcactctctatt

SEQ ID NO: 272413 - DNA, 33 bp, Homo sapien
tcacggtcagcttctacgtctaatctaaattta

SEQ ID NO: 272414 - DNA, 33 bp, Homo sapien
tcacggtcagcttctatgtctaatctaaattta

SEQ ID NO: 272415 - DNA, 33 bp, Homo sapien
catttgtcagttctgtaaacccttcccccaaat

SEQ ID NO: 272416 - DNA, 33 bp, Homo sapien
catttgtcagttctgtgaacccttcccccaaat

SEQ ID NO: 272417 - DNA, 33 bp, Homo sapien
aaaatggaagggaaacaaaatggcaaaggttgg

SEQ ID NO: 272418 - DNA, 33 bp, Homo sapien
aaaatggaagggaaacgaaatggcaaaggttgg

SEQ ID NO: 272419 - DNA, 33 bp, Homo sapien
gtactctaccgatagcaaggaagaggacaacag

SEQ ID NO: 272420 - DNA, 33 bp, Homo sapien
gtactctaccgatagcgaggaagaggacaacag

SEQ ID NO: 272421 - DNA, 33 bp, Homo sapien
atcatacttaactgcacacatctgatggcatca

SEQ ID NO: 272422 - DNA, 33 bp, Homo sapien
atcatacttaactgcatacatctgatggcatca

SEQ ID NO: 272423 - DNA, 33 bp, Homo sapien
ttttttggctgagggaaggtcaagagtatccca

SEQ ID NO: 272424 - DNA, 33 bp, Homo sapien
ttttttggctgagggagggtcaagagtatccca

SEQ ID NO: 272425 - DNA, 33 bp, Homo sapien
cttgaaatagctctgaagtgagtatgggtcatt

SEQ ID NO: 272426 - DNA, 33 bp, Homo sapien
cttgaaatagctctgaggtgagtatgggtcatt

SEQ ID NO: 272427 - DNA, 33 bp, Homo sapien
aaaaaggaaccatgaacagatctgatgaagaag

SEQ ID NO: 272428 - DNA, 33 bp, Homo sapien
aaaaaggaaccatgaatagatctgatgaagaag

SEQ ID NO: 272429 - DNA, 33 bp, Homo sapien
atgtggtctgctaatacattggaacacaactca

SEQ ID NO: 272430 - DNA, 33 bp, Homo sapien
atgtggtctgctaatatattggaacacaactca

SEQ ID NO: 272431 - DNA, 33 bp, Homo sapien
tggcagtactggctacagatcttgggtaatcca

SEQ ID NO: 272432 - DNA, 33 bp, Homo sapien
tggcagtactggctaccgatcttgggtaatcca

SEQ ID NO: 272433 - DNA, 33 bp, Homo sapien
taagcagcaaaattcacaggaagcacatagggt

SEQ ID NO: 272434 - DNA, 33 bp, Homo sapien
taagcagcaaaattcataggaagcacatagggt

SEQ ID NO: 272435 - DNA, 33 bp, Homo sapien
cagctaaggaagaagaaaacttgaatagccaca

SEQ ID NO: 272436 - DNA, 33 bp, Homo sapien
cagctaaggaagaagacaacttgaatagccaca

SEQ ID NO: 272437 - DNA, 33 bp, Homo sapien
tgtcagtaaaagaaaaatatgccagggactcat

SEQ ID NO: 272438 - DNA, 33 bp, Homo sapien
tgtcagtaaaagaaaattatgccagggactcat

SEQ ID NO: 272439 - DNA, 33 bp, Homo sapien
ccaagctgtgcaccaaggctcagttatgcagca

SEQ ID NO: 272440 - DNA, 33 bp, Homo sapien
ccaagctgtgcaccaatgctcagttatgcagca

SEQ ID NO: 272441 - DNA, 33 bp, Homo sapien
actttccctgtgtggcaaatttacaggtgactc

SEQ ID NO: 272442 - DNA, 33 bp, Homo sapien
actttccctgtgtggcgaatttacaggtgactc

SEQ ID NO: 272443 - DNA, 33 bp, Homo sapien
cactggaaaggaagtaactatcacaggtgacac

SEQ ID NO: 272444 - DNA, 33 bp, Homo sapien
cactggaaaggaagtatctatcacaggtgacac

SEQ ID NO: 272445 - DNA, 33 bp, Homo sapien
gatttttgtctttgaacggaatgcaaaagatga

SEQ ID NO: 272446 - DNA, 33 bp, Homo sapien
gatttttgtctttgaatggaatgcaaaagatga

SEQ ID NO: 272447 - DNA, 33 bp, Homo sapien
ggttttaaaagaaagacatagtttgcctggaga

SEQ ID NO: 272448 - DNA, 33 bp, Homo sapien
ggttttaaaagaaagatatagtttgcctggaga

SEQ ID NO: 272449 - DNA, 33 bp, Homo sapien
atgaacaaggaaatagccaaaatagtgttaagt

SEQ ID NO: 272450 - DNA, 33 bp, Homo sapien
atgaacaaggaaatagtcaaaatagtgttaagt

SEQ ID NO: 272451 - DNA, 33 bp, Homo sapien
tacttacccctacacacaaatttgtcttttaac

SEQ ID NO: 272452 - DNA, 33 bp, Homo sapien
tacttacccctacacagaaatttgtcttttaac

SEQ ID NO: 272453 - DNA, 33 bp, Homo sapien
gactcaacttaagcagaacttcctcagtaaggc

SEQ ID NO: 272454 - DNA, 33 bp, Homo sapien
gactcaacttaagcaggacttcctcagtaaggc

SEQ ID NO: 272455 - DNA, 33 bp, Homo sapien
ctgctttttaacagctgaagtgaggtatcattt

SEQ ID NO: 272456 - DNA, 33 bp, Homo sapien
ctgctttttaacagcttaagtgaggtatcattt

SEQ ID NO: 272457 - DNA, 33 bp, Homo sapien
taaaatcctgtacagacaagaaaatactgagag

SEQ ID NO: 272458 - DNA, 33 bp, Homo sapien
taaaatcctgtacagagaagaaaatactgagag

SEQ ID NO: 272459 - DNA, 33 bp, Homo sapien
tcactcaggaggaatacagatgagcggtttatt

SEQ ID NO: 272460 - DNA, 33 bp, Homo sapien
tcactcaggaggaatatagatgagcggtttatt

SEQ ID NO: 272461 - DNA, 33 bp, Homo sapien
ccagctaacaacatcacgacaagatcaagtctg

SEQ ID NO: 272462 - DNA, 33 bp, Homo sapien
ccagctaacaacatcatgacaagatcaagtctg

SEQ ID NO: 272463 - DNA, 33 bp, Homo sapien
tctgagttttctcttacgttgcattgatctgtg

SEQ ID NO: 272464 - DNA, 33 bp, Homo sapien
tctgagttttctcttatgttgcattgatctgtg

SEQ ID NO: 272465 - DNA, 33 bp, Homo sapien
ctgttctataggcaaaatggctcttatttaatt

SEQ ID NO: 272466 - DNA, 33 bp, Homo sapien
ctgttctataggcaaagtggctcttatttaatt

SEQ ID NO: 272467 - DNA, 33 bp, Homo sapien
ggaccaaacatgacgaagaggagagactatggt

SEQ ID NO: 272468 - DNA, 33 bp, Homo sapien
ggaccaaacatgacgaggaggagagactatggt

SEQ ID NO: 272469 - DNA, 33 bp, Homo sapien
ctacagtgtcagcagcaactctagacctgtcaa

SEQ ID NO: 272470 - DNA, 33 bp, Homo sapien
ctacagtgtcagcagcgactctagacctgtcaa

SEQ ID NO: 272471 - DNA, 33 bp, Homo sapien
tgcaagcacttagttacctggactcaatctttc

SEQ ID NO: 272472 - DNA, 33 bp, Homo sapien
tgcaagcacttagttatctggactcaatctttc

SEQ ID NO: 272473 - DNA, 33 bp, Homo sapien
agattctgcatgattcaaagttcatctaggaaa

SEQ ID NO: 272474 - DNA, 33 bp, Homo sapien
agattctgcatgattcgaagttcatctaggaaa

SEQ ID NO: 272475 - DNA, 33 bp, Homo sapien
cactatcaaaatgaaaccctgagcttagggaac

SEQ ID NO: 272476 - DNA, 33 bp, Homo sapien
cactatcaaaatgaaatcctgagcttagggaac

SEQ ID NO: 272477 - DNA, 33 bp, Homo sapien
attatctgagcattagaaagatgataatatgtt

SEQ ID NO: 272478 - DNA, 33 bp, Homo sapien
attatctgagcattaggaagatgataatatgtt

SEQ ID NO: 272479 - DNA, 33 bp, Homo sapien
ccatgacctggtctcaatatacctctgcaattc

SEQ ID NO: 272480 - DNA, 33 bp, Homo sapien
ccatgacctggtctcagtatacctctgcaattc

SEQ ID NO: 272481 - DNA, 33 bp, Homo sapien
gaagggaatagtatctcagagatgggaaagtat

SEQ ID NO: 272482 - DNA, 33 bp, Homo sapien
gaagggaatagtatcttagagatgggaaagtat

SEQ ID NO: 272483 - DNA, 33 bp, Homo sapien
aatatgaagtagaagaacatttcatgtgaaggg

SEQ ID NO: 272484 - DNA, 33 bp, Homo sapien
aatatgaagtagaagagcatttcatgtgaaggg

SEQ ID NO: 272485 - DNA, 33 bp, Homo sapien
actctaatactgttgagcagagctgtacaatac

SEQ ID NO: 272486 - DNA, 33 bp, Homo sapien
actctaatactgttgatcagagctgtacaatac

SEQ ID NO: 272487 - DNA, 33 bp, Homo sapien
aatactagttattccaaatttacatagaaaaag

SEQ ID NO: 272488 - DNA, 33 bp, Homo sapien
aatactagttattccagatttacatagaaaaag

SEQ ID NO: 272489 - DNA, 33 bp, Homo sapien
gcagactggtttcatacgtacatacaacctact

SEQ ID NO: 272490 - DNA, 33 bp, Homo sapien
gcagactggtttcataggtacatacaacctact

SEQ ID NO: 272491 - DNA, 33 bp, Homo sapien
tgtaaaggtgaagctaaattatgagaagcggtt

SEQ ID NO: 272492 - DNA, 33 bp, Homo sapien
tgtaaaggtgaagctacattatgagaagcggtt

SEQ ID NO: 272493 - DNA, 33 bp, Homo sapien
atgattctaaaaagaactctgggcttgatgtgg

SEQ ID NO: 272494 - DNA, 33 bp, Homo sapien
atgattctaaaaagaagtctgggcttgatgtgg

SEQ ID NO: 272495 - DNA, 33 bp, Homo sapien
caactggggtgagttaaatagcagttgtatata

SEQ ID NO: 272496 - DNA, 33 bp, Homo sapien
caactggggtgagttagatagcagttgtatata

SEQ ID NO: 272497 - DNA, 33 bp, Homo sapien
agataagaaagcaaagcccaagtctcatagctg

SEQ ID NO: 272498 - DNA, 33 bp, Homo sapien
agataagaaagcaaaggccaagtctcatagctg

SEQ ID NO: 272499 - DNA, 33 bp, Homo sapien
gaggggaataaggcaaaaaaagagacagaggca

SEQ ID NO: 272500 - DNA, 33 bp, Homo sapien
gaggggaataaggcaagaaaagagacagaggca

SEQ ID NO: 272501 - DNA, 33 bp, Homo sapien
gggggaatgattggaaatagtcagtgtgttggc

SEQ ID NO: 272502 - DNA, 33 bp, Homo sapien
gggggaatgattggaagtagtcagtgtgttggc

SEQ ID NO: 272503 - DNA, 33 bp, Homo sapien
cagggggaaaaatcacaacttgtatattctcct

SEQ ID NO: 272504 - DNA, 33 bp, Homo sapien
cagggggaaaaatcaccacttgtatattctcct

SEQ ID NO: 272505 - DNA, 33 bp, Homo sapien
aacccaccagtaagtaaaagccaagtaagatgt

SEQ ID NO: 272506 - DNA, 33 bp, Homo sapien
aacccaccagtaagtagaagccaagtaagatgt

SEQ ID NO: 272507 - DNA, 33 bp, Homo sapien
gttatgagtaaacatacgagcgtttttacaagt

SEQ ID NO: 272508 - DNA, 33 bp, Homo sapien
gttatgagtaaacatatgagcgtttttacaagt

SEQ ID NO: 272509 - DNA, 33 bp, Homo sapien
ttttttagatttcacaacaaataacttccaaag

SEQ ID NO: 272510 - DNA, 33 bp, Homo sapien
ttttttagatttcacagcaaataacttccaaag

SEQ ID NO: 272511 - DNA, 33 bp, Homo sapien
cattctcttaccaacaatatgtgaaaatatgtg

SEQ ID NO: 272512 - DNA, 33 bp, Homo sapien
cattctcttaccaacagtatgtgaaaatatgtg

SEQ ID NO: 272513 - DNA, 33 bp, Homo sapien
agattagggcactaaacgtgaacaagaattttc

SEQ ID NO: 272514 - DNA, 33 bp, Homo sapien
agattagggcactaaatgtgaacaagaattttc

SEQ ID NO: 272515 - DNA, 33 bp, Homo sapien
agaagtttgttattacggatcatccaaagcctt

SEQ ID NO: 272516 - DNA, 33 bp, Homo sapien
agaagtttgttattactgatcatccaaagcctt

SEQ ID NO: 272517 - DNA, 33 bp, Homo sapien
aggatttgatgaaaccagcaattatcacagcaa

SEQ ID NO: 272518 - DNA, 33 bp, Homo sapien
aggatttgatgaaaccggcaattatcacagcaa

SEQ ID NO: 272519 - DNA, 33 bp, Homo sapien
ctctagggatcaagctcaaaaccaatggaaaaa

SEQ ID NO: 272520 - DNA, 33 bp, Homo sapien
ctctagggatcaagcttaaaaccaatggaaaaa

SEQ ID NO: 272521 - DNA, 33 bp, Homo sapien
ggtcaggaatctgcacagcattaaatctggaat

SEQ ID NO: 272522 - DNA, 33 bp, Homo sapien
ggtcaggaatctgcacggcattaaatctggaat

SEQ ID NO: 272523 - DNA, 33 bp, Homo sapien
gagaagtgagattgccaaacacttatattttga

SEQ ID NO: 272524 - DNA, 33 bp, Homo sapien
gagaagtgagattgcccaacacttatattttga

SEQ ID NO: 272525 - DNA, 33 bp, Homo sapien
ggtaaaatgttgccaactatgaagagaagtgag

SEQ ID NO: 272526 - DNA, 33 bp, Homo sapien
ggtaaaatgttgccaattatgaagagaagtgag

SEQ ID NO: 272527 - DNA, 33 bp, Homo sapien
tatgtctccatcacaaataccagcttaaggtag

SEQ ID NO: 272528 - DNA, 33 bp, Homo sapien
tatgtctccatcacaattaccagcttaaggtag

SEQ ID NO: 272529 - DNA, 33 bp, Homo sapien
cttactttcagcaatgaacagagcatccagaca

SEQ ID NO: 272530 - DNA, 33 bp, Homo sapien
cttactttcagcaatggacagagcatccagaca

SEQ ID NO: 272531 - DNA, 33 bp, Homo sapien
taaatgctccacttaaatgatacagaattgcag

SEQ ID NO: 272532 - DNA, 33 bp, Homo sapien
taaatgctccacttaattgatacagaattgcag

SEQ ID NO: 272533 - DNA, 33 bp, Homo sapien
aaaactagttagcttaagtcaaaggatagaaaa

SEQ ID NO: 272534 - DNA, 33 bp, Homo sapien
aaaactagttagcttaggtcaaaggatagaaaa

SEQ ID NO: 272535 - DNA, 33 bp, Homo sapien
ctggtcaaaacaacaccagtgcatcccttgcac

SEQ ID NO: 272536 - DNA, 33 bp, Homo sapien
ctggtcaaaacaacactagtgcatcccttgcac

SEQ ID NO: 272537 - DNA, 33 bp, Homo sapien
tggtgaaagaagagacagaaaaataaatgaaac

SEQ ID NO: 272538 - DNA, 33 bp, Homo sapien
tggtgaaagaagagacggaaaaataaatgaaac

SEQ ID NO: 272539 - DNA, 33 bp, Homo sapien
cctatctttcttttcacgttgtatgaacacatg

SEQ ID NO: 272540 - DNA, 33 bp, Homo sapien
cctatctttcttttcatgttgtatgaacacatg

SEQ ID NO: 272541 - DNA, 33 bp, Homo sapien
agcatagtgtgctatagaattagatgctgtctt

SEQ ID NO: 272542 - DNA, 33 bp, Homo sapien
agcatagtgtgctatataattagatgctgtctt

SEQ ID NO: 272543 - DNA, 33 bp, Homo sapien
gtgtgttattgcattaaaagtaccttgacacgc

SEQ ID NO: 272544 - DNA, 33 bp, Homo sapien
gtgtgttattgcattagaagtaccttgacacgc

SEQ ID NO: 272545 - DNA, 33 bp, Homo sapien
acttaacctcaaacccagagtcacatattttat

SEQ ID NO: 272546 - DNA, 33 bp, Homo sapien
acttaacctcaaaccctgagtcacatattttat

SEQ ID NO: 272547 - DNA, 33 bp, Homo sapien
aaagcacagtacaaatgacaagtgtctgcagaa

SEQ ID NO: 272548 - DNA, 33 bp, Homo sapien
aaagcacagtacaaattacaagtgtctgcagaa

SEQ ID NO: 272549 - DNA, 33 bp, Homo sapien
ttataagccaagttaaggatgttagaactttac

SEQ ID NO: 272550 - DNA, 33 bp, Homo sapien
ttataagccaagttaatgatgttagaactttac

SEQ ID NO: 272551 - DNA, 33 bp, Homo sapien
tatcttcatgtgcaaaatcaaaagctgtcccat

SEQ ID NO: 272552 - DNA, 33 bp, Homo sapien
tatcttcatgtgcaaagtcaaaagctgtcccat

SEQ ID NO: 272553 - DNA, 33 bp, Homo sapien
ctagtgatttgtaggcgccattacagcccaaat

SEQ ID NO: 272554 - DNA, 33 bp, Homo sapien
ctagtgatttgtaggctccattacagcccaaat

SEQ ID NO: 272555 - DNA, 33 bp, Homo sapien
agatgcagtccatcacggtctgacaaagttgac

SEQ ID NO: 272556 - DNA, 33 bp, Homo sapien
agatgcagtccatcactgtctgacaaagttgac

SEQ ID NO: 272557 - DNA, 33 bp, Homo sapien
aaacttctatgcagagacctctaaatacaggca

SEQ ID NO: 272558 - DNA, 33 bp, Homo sapien
aaacttctatgcagagtcctctaaatacaggca

SEQ ID NO: 272559 - DNA, 33 bp, Homo sapien
atggtacaaatcacaaactgaggccaggagaag

SEQ ID NO: 272560 - DNA, 33 bp, Homo sapien
atggtacaaatcacaatctgaggccaggagaag

SEQ ID NO: 272561 - DNA, 33 bp, Homo sapien
tacaatcattcccataacatctcataatattca

SEQ ID NO: 272562 - DNA, 33 bp, Homo sapien
tacaatcattcccatagcatctcataatattca

SEQ ID NO: 272563 - DNA, 33 bp, Homo sapien
aatctaaattgactgaaatacttacacatctag

SEQ ID NO: 272564 - DNA, 33 bp, Homo sapien
aatctaaattgactgatatacttacacatctag

SEQ ID NO: 272565 - DNA, 33 bp, Homo sapien
tacgagggaaaaactgaattggcaaaaatttac

SEQ ID NO: 272566 - DNA, 33 bp, Homo sapien
tacgagggaaaaactggattggcaaaaatttac

SEQ ID NO: 272567 - DNA, 33 bp, Homo sapien
tcatttagtctcattcaatatagttataacgag

SEQ ID NO: 272568 - DNA, 33 bp, Homo sapien
tcatttagtctcattccatatagttataacgag

SEQ ID NO: 272569 - DNA, 33 bp, Homo sapien
agtttcaaataattcaataccgtgctgaaaaac

SEQ ID NO: 272570 - DNA, 33 bp, Homo sapien
agtttcaaataattcactaccgtgctgaaaaac

SEQ ID NO: 272571 - DNA, 33 bp, Homo sapien
tgctgatgagatgctgaactttgaatctaagcc

SEQ ID NO: 272572 - DNA, 33 bp, Homo sapien
tgctgatgagatgctggactttgaatctaagcc

SEQ ID NO: 272573 - DNA, 33 bp, Homo sapien
agatgtctgtttaaagcacaaaagtgccacttg

SEQ ID NO: 272574 - DNA, 33 bp, Homo sapien
agatgtctgtttaaagtacaaaagtgccacttg

SEQ ID NO: 272575 - DNA, 33 bp, Homo sapien
tagcctggcatcatatcaccttgagtaggattg

SEQ ID NO: 272576 - DNA, 33 bp, Homo sapien
tagcctggcatcatattaccttgagtaggattg

SEQ ID NO: 272577 - DNA, 33 bp, Homo sapien
ccatgagtctctcggaaatagttgcatgatatt

SEQ ID NO: 272578 - DNA, 33 bp, Homo sapien
ccatgagtctctcggacatagttgcatgatatt

SEQ ID NO: 272579 - DNA, 33 bp, Homo sapien
atcaccaaagtattcaagatagtatgcactagt

SEQ ID NO: 272580 - DNA, 33 bp, Homo sapien
atcaccaaagtattcaggatagtatgcactagt

SEQ ID NO: 272581 - DNA, 33 bp, Homo sapien
aatgccaaacaatcataagtacagaatagtcaa

SEQ ID NO: 272582 - DNA, 33 bp, Homo sapien
aatgccaaacaatcatgagtacagaatagtcaa

SEQ ID NO: 272583 - DNA, 33 bp, Homo sapien
acaactttcagtttgaaaagcactcttctccag

SEQ ID NO: 272584 - DNA, 33 bp, Homo sapien
acaactttcagtttgacaagcactcttctccag

SEQ ID NO: 272585 - DNA, 33 bp, Homo sapien
atggacagtgactgaacgctgtcaggacccagt

SEQ ID NO: 272586 - DNA, 33 bp, Homo sapien
atggacagtgactgaatgctgtcaggacccagt

SEQ ID NO: 272587 - DNA, 33 bp, Homo sapien
aagaagtggtagaaaaataagtgaaatgtggag

SEQ ID NO: 272588 - DNA, 33 bp, Homo sapien
aagaagtggtagaaaagtaagtgaaatgtggag

SEQ ID NO: 272589 - DNA, 33 bp, Homo sapien
aggacctaatgtcaacaaatatgatctaaggcc

SEQ ID NO: 272590 - DNA, 33 bp, Homo sapien
aggacctaatgtcaacgaatatgatctaaggcc

SEQ ID NO: 272591 - DNA, 33 bp, Homo sapien
ataatttctgttccataaagtcaaaaccctaat

SEQ ID NO: 272592 - DNA, 33 bp, Homo sapien
ataatttctgttccatgaagtcaaaaccctaat

SEQ ID NO: 272593 - DNA, 33 bp, Homo sapien
gacagtatcacatggggagtagacatccataaa

SEQ ID NO: 272594 - DNA, 33 bp, Homo sapien
gacagtatcacatgggtagtagacatccataaa

SEQ ID NO: 272595 - DNA, 33 bp, Homo sapien
ctagcttacctaaaaccgaggtatgtcttactg

SEQ ID NO: 272596 - DNA, 33 bp, Homo sapien
ctagcttacctaaaactgaggtatgtcttactg

SEQ ID NO: 272597 - DNA, 33 bp, Homo sapien
ccaccgactccatcaacaagtattgctgtgatt

SEQ ID NO: 272598 - DNA, 33 bp, Homo sapien
ccaccgactccatcaagaagtattgctgtgatt

SEQ ID NO: 272599 - DNA, 33 bp, Homo sapien
gtaataaaagtctacacattgcatacagtgtac

SEQ ID NO: 272600 - DNA, 33 bp, Homo sapien
gtaataaaagtctacatattgcatacagtgtac

SEQ ID NO: 272601 - DNA, 33 bp, Homo sapien
atggtgaagccagatacatgggattaaacataa

SEQ ID NO: 272602 - DNA, 33 bp, Homo sapien
atggtgaagccagatagatgggattaaacataa

SEQ ID NO: 272603 - DNA, 33 bp, Homo sapien
tttcctaagacaaatgaaacatgagaaaaatat

SEQ ID NO: 272604 - DNA, 33 bp, Homo sapien
tttcctaagacaaatggaacatgagaaaaatat

SEQ ID NO: 272605 - DNA, 33 bp, Homo sapien
tataggtaggagaatacaatgataatgaactcg

SEQ ID NO: 272606 - DNA, 33 bp, Homo sapien
tataggtaggagaatataatgataatgaactcg

SEQ ID NO: 272607 - DNA, 33 bp, Homo sapien
tcatttgccttatacccaatctagaataatagc

SEQ ID NO: 272608 - DNA, 33 bp, Homo sapien
tcatttgccttatacctaatctagaataatagc

SEQ ID NO: 272609 - DNA, 33 bp, Homo sapien
gaactgagatgaggcaagagtgtaaaaacactg

SEQ ID NO: 272610 - DNA, 33 bp, Homo sapien
gaactgagatgaggcaggagtgtaaaaacactg

SEQ ID NO: 272611 - DNA, 33 bp, Homo sapien
tgtccttgacataagcgaaaaaaactttcaaaa

SEQ ID NO: 272612 - DNA, 33 bp, Homo sapien
tgtccttgacataagctaaaaaaactttcaaaa

SEQ ID NO: 272613 - DNA, 33 bp, Homo sapien
atcagaaataatgatccctattgaataccaagt

SEQ ID NO: 272614 - DNA, 33 bp, Homo sapien
atcagaaataatgatctctattgaataccaagt

SEQ ID NO: 272615 - DNA, 33 bp, Homo sapien
gtcagatactagaggaatcaaagaaagatgtga

SEQ ID NO: 272616 - DNA, 33 bp, Homo sapien
gtcagatactagaggagtcaaagaaagatgtga

SEQ ID NO: 272617 - DNA, 33 bp, Homo sapien
ggaagcgctcaaaacaaactaaccacattgatg

SEQ ID NO: 272618 - DNA, 33 bp, Homo sapien
ggaagcgctcaaaacagactaaccacattgatg

SEQ ID NO: 272619 - DNA, 33 bp, Homo sapien
tgtaatataagtggagacatacagtgtttgcct

SEQ ID NO: 272620 - DNA, 33 bp, Homo sapien
tgtaatataagtggagtcatacagtgtttgcct

SEQ ID NO: 272621 - DNA, 33 bp, Homo sapien
attttctgagatcctcaacccttttttctgtct

SEQ ID NO: 272622 - DNA, 33 bp, Homo sapien
attttctgagatcctccacccttttttctgtct

SEQ ID NO: 272623 - DNA, 33 bp, Homo sapien
atttgagtttattccaagtatgctaggtatgtt

SEQ ID NO: 272624 - DNA, 33 bp, Homo sapien
atttgagtttattccaggtatgctaggtatgtt

SEQ ID NO: 272625 - DNA, 33 bp, Homo sapien
cacagagactgcagtaagaaatgcatgttgctg

SEQ ID NO: 272626 - DNA, 33 bp, Homo sapien
cacagagactgcagtaggaaatgcatgttgctg

SEQ ID NO: 272627 - DNA, 33 bp, Homo sapien
ttatagaagatggtacaatctgatttttgaagt

SEQ ID NO: 272628 - DNA, 33 bp, Homo sapien
ttatagaagatggtacgatctgatttttgaagt

SEQ ID NO: 272629 - DNA, 33 bp, Homo sapien
tagagctaaatagaaaacatttcccataaggct

SEQ ID NO: 272630 - DNA, 33 bp, Homo sapien
tagagctaaatagaaagcatttcccataaggct

SEQ ID NO: 272631 - DNA, 33 bp, Homo sapien
tgacgaaatcacctaacgaagcatatatcagaa

SEQ ID NO: 272632 - DNA, 33 bp, Homo sapien
tgacgaaatcacctaaggaagcatatatcagaa

SEQ ID NO: 272633 - DNA, 33 bp, Homo sapien
ctcatgctttcattcccaataatcctgatctgc

SEQ ID NO: 272634 - DNA, 33 bp, Homo sapien
ctcatgctttcattccgaataatcctgatctgc

SEQ ID NO: 272635 - DNA, 33 bp, Homo sapien
acaacatttttaagcacgggccttagtgataaa

SEQ ID NO: 272636 - DNA, 33 bp, Homo sapien
acaacatttttaagcatgggccttagtgataaa

SEQ ID NO: 272637 - DNA, 33 bp, Homo sapien
atagtgttaagaacaaaggaagcgtcgagaagg

SEQ ID NO: 272638 - DNA, 33 bp, Homo sapien
atagtgttaagaacaacggaagcgtcgagaagg

SEQ ID NO: 272639 - DNA, 33 bp, Homo sapien
tttttgtttctatggacgagtggtgatttttca

SEQ ID NO: 272640 - DNA, 33 bp, Homo sapien
tttttgtttctatggatgagtggtgatttttca

SEQ ID NO: 272641 - DNA, 33 bp, Homo sapien
atgctgggccagaatgacagtgaagtttttggg

SEQ ID NO: 272642 - DNA, 33 bp, Homo sapien
atgctgggccagaatggcagtgaagtttttggg

SEQ ID NO: 272643 - DNA, 33 bp, Homo sapien
aagtgttcaaccattaacaatacaaaatgtgat

SEQ ID NO: 272644 - DNA, 33 bp, Homo sapien
aagtgttcaaccattatcaatacaaaatgtgat

SEQ ID NO: 272645 - DNA, 33 bp, Homo sapien
ttgaggcaatatgcaacgggcacagtaatgcac

SEQ ID NO: 272646 - DNA, 33 bp, Homo sapien
ttgaggcaatatgcaatgggcacagtaatgcac

SEQ ID NO: 272647 - DNA, 33 bp, Homo sapien
caggaattaatacttaaaaggtactcaagaatt

SEQ ID NO: 272648 - DNA, 33 bp, Homo sapien
caggaattaatacttagaaggtactcaagaatt

SEQ ID NO: 272649 - DNA, 33 bp, Homo sapien
tgattcatttttgtgcccattatttatcttctt

SEQ ID NO: 272650 - DNA, 33 bp, Homo sapien
tgattcatttttgtgctcattatttatcttctt

SEQ ID NO: 272651 - DNA, 33 bp, Homo sapien
ataaataagcaatcataagcgttcgttttgtaa

SEQ ID NO: 272652 - DNA, 33 bp, Homo sapien
ataaataagcaatcatgagcgttcgttttgtaa

SEQ ID NO: 272653 - DNA, 33 bp, Homo sapien
ctgaaacaaatgctaaccaaaatcatctccaaa

SEQ ID NO: 272654 - DNA, 33 bp, Homo sapien
ctgaaacaaatgctaatcaaaatcatctccaaa

SEQ ID NO: 272655 - DNA, 33 bp, Homo sapien
gatttattaattaacacagtgtggaagctaaat

SEQ ID NO: 272656 - DNA, 33 bp, Homo sapien
gatttattaattaacagagtgtggaagctaaat

SEQ ID NO: 272657 - DNA, 33 bp, Homo sapien
atgtggggatacagggaattaaatgcattggtt

SEQ ID NO: 272658 - DNA, 33 bp, Homo sapien
atgtggggatacagggtattaaatgcattggtt

SEQ ID NO: 272659 - DNA, 33 bp, Homo sapien
cagtcctttccaaccaagaagtgtattcatctc

SEQ ID NO: 272660 - DNA, 33 bp, Homo sapien
cagtcctttccaaccaggaagtgtattcatctc

SEQ ID NO: 272661 - DNA, 33 bp, Homo sapien
tccatcgtggcgcttacgttcaggtaaatgtag

SEQ ID NO: 272662 - DNA, 33 bp, Homo sapien
tccatcgtggcgcttatgttcaggtaaatgtag

SEQ ID NO: 272663 - DNA, 33 bp, Homo sapien
ttgttcactcacatcactgacaaacataattct

SEQ ID NO: 272664 - DNA, 33 bp, Homo sapien
ttgttcactcacatcattgacaaacataattct

SEQ ID NO: 272665 - DNA, 33 bp, Homo sapien
agaaggtggtcagttacaatcacattaggtaaa

SEQ ID NO: 272666 - DNA, 33 bp, Homo sapien
agaaggtggtcagttataatcacattaggtaaa

SEQ ID NO: 272667 - DNA, 33 bp, Homo sapien
gcaatttttccagtcaccaaaggtatgattgaa

SEQ ID NO: 272668 - DNA, 33 bp, Homo sapien
gcaatttttccagtcatcaaaggtatgattgaa

SEQ ID NO: 272669 - DNA, 33 bp, Homo sapien
cttaaaatctgatcccaggagtaccaccttgct

SEQ ID NO: 272670 - DNA, 33 bp, Homo sapien
cttaaaatctgatcccgggagtaccaccttgct

SEQ ID NO: 272671 - DNA, 33 bp, Homo sapien
aggatatgtgccagaactgagtctccaggccca

SEQ ID NO: 272672 - DNA, 33 bp, Homo sapien
aggatatgtgccagaagtgagtctccaggccca

SEQ ID NO: 272673 - DNA, 33 bp, Homo sapien
gacgaatctaaatacaagccttcttctttgaaa

SEQ ID NO: 272674 - DNA, 33 bp, Homo sapien
gacgaatctaaatacaggccttcttctttgaaa

SEQ ID NO: 272675 - DNA, 33 bp, Homo sapien
atcaagaagattaagcacagtacccaagggtgg

SEQ ID NO: 272676 - DNA, 33 bp, Homo sapien
atcaagaagattaagcgcagtacccaagggtgg

SEQ ID NO: 272677 - DNA, 33 bp, Homo sapien
gcatatatgatcgatccatttatccactttttc

SEQ ID NO: 272678 - DNA, 33 bp, Homo sapien
gcatatatgatcgatcgatttatccactttttc

SEQ ID NO: 272679 - DNA, 33 bp, Homo sapien
tccttaaccagagtaagtcctctatctgttaaa

SEQ ID NO: 272680 - DNA, 33 bp, Homo sapien
tccttaaccagagtaattcctctatctgttaaa

SEQ ID NO: 272681 - DNA, 33 bp, Homo sapien
agggtgaagtcataacaaaggcaaaatatagtg

SEQ ID NO: 272682 - DNA, 33 bp, Homo sapien
agggtgaagtcataaccaaggcaaaatatagtg

SEQ ID NO: 272683 - DNA, 33 bp, Homo sapien
cctcacataactctaccaactctcgtctatatt

SEQ ID NO: 272684 - DNA, 33 bp, Homo sapien
cctcacataactctacgaactctcgtctatatt

SEQ ID NO: 272685 - DNA, 33 bp, Homo sapien
tgtcttaaagaactacacgtgttaattatttac

SEQ ID NO: 272686 - DNA, 33 bp, Homo sapien
tgtcttaaagaactacgcgtgttaattatttac

SEQ ID NO: 272687 - DNA, 33 bp, Homo sapien
aggggaaagcagttaacatttctactgatacta

SEQ ID NO: 272688 - DNA, 33 bp, Homo sapien
aggggaaagcagttaatatttctactgatacta

SEQ ID NO: 272689 - DNA, 33 bp, Homo sapien
aatcaacccactgctcactaagataaatgcata

SEQ ID NO: 272690 - DNA, 33 bp, Homo sapien
aatcaacccactgctcgctaagataaatgcata

SEQ ID NO: 272691 - DNA, 33 bp, Homo sapien
agcgtcaggcagccgcccaacatgacaatgtgt

SEQ ID NO: 272692 - DNA, 33 bp, Homo sapien
agcgtcaggcagccgcgcaacatgacaatgtgt

SEQ ID NO: 272693 - DNA, 33 bp, Homo sapien
aattgttgtatgccacagaatagtcaaatttcc

SEQ ID NO: 272694 - DNA, 33 bp, Homo sapien
aattgttgtatgccacggaatagtcaaatttcc

SEQ ID NO: 272695 - DNA, 33 bp, Homo sapien
gtgagaaatgagacatcaacggtggagaaagca

SEQ ID NO: 272696 - DNA, 33 bp, Homo sapien
gtgagaaatgagacattaacggtggagaaagca

SEQ ID NO: 272697 - DNA, 33 bp, Homo sapien
tcttctaactatagaaaaagaaactgctattag

SEQ ID NO: 272698 - DNA, 33 bp, Homo sapien
tcttctaactatagaacaagaaactgctattag

SEQ ID NO: 272699 - DNA, 33 bp, Homo sapien
tttatacacaagtggcgaaaatcaaagataatg

SEQ ID NO: 272700 - DNA, 33 bp, Homo sapien
tttatacacaagtggctaaaatcaaagataatg

SEQ ID NO: 272701 - DNA, 33 bp, Homo sapien
cgtgctctttaatgaaaacttgtcacttcctct

SEQ ID NO: 272702 - DNA, 33 bp, Homo sapien
cgtgctctttaatgaagacttgtcacttcctct

SEQ ID NO: 272703 - DNA, 33 bp, Homo sapien
ctcacttaaccacaatgataaattcagtaatcc

SEQ ID NO: 272704 - DNA, 33 bp, Homo sapien
ctcacttaaccacaattataaattcagtaatcc

SEQ ID NO: 272705 - DNA, 33 bp, Homo sapien
taaaaacagaaaataccactggattatacgtat

SEQ ID NO: 272706 - DNA, 33 bp, Homo sapien
taaaaacagaaaatactactggattatacgtat

SEQ ID NO: 272707 - DNA, 33 bp, Homo sapien
tagcttagacttgttacgaatgtttcaactact

SEQ ID NO: 272708 - DNA, 33 bp, Homo sapien
tagcttagacttgttatgaatgtttcaactact

SEQ ID NO: 272709 - DNA, 33 bp, Homo sapien
attaataatgattttacggagatttgtgagcaa

SEQ ID NO: 272710 - DNA, 33 bp, Homo sapien
attaataatgattttagggagatttgtgagcaa

SEQ ID NO: 272711 - DNA, 33 bp, Homo sapien
ctgttctggtgcattcaattttgttttacgttg

SEQ ID NO: 272712 - DNA, 33 bp, Homo sapien
ctgttctggtgcattccattttgttttacgttg

SEQ ID NO: 272713 - DNA, 33 bp, Homo sapien
ctatgagcttgctttcaaatatataaaacgtat

SEQ ID NO: 272714 - DNA, 33 bp, Homo sapien
ctatgagcttgctttctaatatataaaacgtat

SEQ ID NO: 272715 - DNA, 33 bp, Homo sapien
aggatagggtaccacacagaagttctgaatcct

SEQ ID NO: 272716 - DNA, 33 bp, Homo sapien
aggatagggtaccacagagaagttctgaatcct

SEQ ID NO: 272717 - DNA, 33 bp, Homo sapien
tataatagttttgccaatcttttactgacctct

SEQ ID NO: 272718 - DNA, 33 bp, Homo sapien
tataatagttttgccagtcttttactgacctct

SEQ ID NO: 272719 - DNA, 33 bp, Homo sapien
ttatttattgttgttacggaaatcgttggtaaa

SEQ ID NO: 272720 - DNA, 33 bp, Homo sapien
ttatttattgttgttatggaaatcgttggtaaa

SEQ ID NO: 272721 - DNA, 33 bp, Homo sapien
tcagagtgcatatcaaagtttgaacaatttaag

SEQ ID NO: 272722 - DNA, 33 bp, Homo sapien
tcagagtgcatatcaaggtttgaacaatttaag

SEQ ID NO: 272723 - DNA, 33 bp, Homo sapien
catagtgcaaagagcaaattggctaatatcagg

SEQ ID NO: 272724 - DNA, 33 bp, Homo sapien
catagtgcaaagagcagattggctaatatcagg

SEQ ID NO: 272725 - DNA, 33 bp, Homo sapien
aatgatcagaaatacaatagtaataagagcaat

SEQ ID NO: 272726 - DNA, 33 bp, Homo sapien
aatgatcagaaatacagtagtaataagagcaat

SEQ ID NO: 272727 - DNA, 33 bp, Homo sapien
tccaagcaattcttcacggatacccattgctct

SEQ ID NO: 272728 - DNA, 33 bp, Homo sapien
tccaagcaattcttcatggatacccattgctct

SEQ ID NO: 272729 - DNA, 33 bp, Homo sapien
gaaagtagagttgctagcctaaagctctgaaga

SEQ ID NO: 272730 - DNA, 33 bp, Homo sapien
gaaagtagagttgctatcctaaagctctgaaga

SEQ ID NO: 272731 - DNA, 33 bp, Homo sapien
tcatcctcaggagaaaaaatcttgccataatga

SEQ ID NO: 272732 - DNA, 33 bp, Homo sapien
tcatcctcaggagaaagaatcttgccataatga

SEQ ID NO: 272733 - DNA, 33 bp, Homo sapien
tattgttatcattagcaatgaagaagtcaaaca

SEQ ID NO: 272734 - DNA, 33 bp, Homo sapien
tattgttatcattagcgatgaagaagtcaaaca

SEQ ID NO: 272735 - DNA, 33 bp, Homo sapien
aacttataccagtatcaccatttcctaaacctt

SEQ ID NO: 272736 - DNA, 33 bp, Homo sapien
aacttataccagtatcgccatttcctaaacctt

SEQ ID NO: 272737 - DNA, 33 bp, Homo sapien
taacagattatttgtaaatgttttctaaggcag

SEQ ID NO: 272738 - DNA, 33 bp, Homo sapien
taacagattatttgtagatgttttctaaggcag

SEQ ID NO: 272739 - DNA, 33 bp, Homo sapien
attgaaaacctctgtacgtcttatcagtatctc

SEQ ID NO: 272740 - DNA, 33 bp, Homo sapien
attgaaaacctctgtatgtcttatcagtatctc

SEQ ID NO: 272741 - DNA, 33 bp, Homo sapien
attcaaggtgcttgcacaatctttctgcagtct

SEQ ID NO: 272742 - DNA, 33 bp, Homo sapien
attcaaggtgcttgcataatctttctgcagtct

SEQ ID NO: 272743 - DNA, 33 bp, Homo sapien
gtggtgtcaagacttacagaagctttgtctaga

SEQ ID NO: 272744 - DNA, 33 bp, Homo sapien
gtggtgtcaagacttatagaagctttgtctaga

SEQ ID NO: 272745 - DNA, 33 bp, Homo sapien
atagaacagtcatatcaaccccatcaaaacata

SEQ ID NO: 272746 - DNA, 33 bp, Homo sapien
atagaacagtcatatcgaccccatcaaaacata

SEQ ID NO: 272747 - DNA, 33 bp, Homo sapien
aaaatctgtatcctcacaacatggcttaatata

SEQ ID NO: 272748 - DNA, 33 bp, Homo sapien
aaaatctgtatcctcataacatggcttaatata

SEQ ID NO: 272749 - DNA, 33 bp, Homo sapien
atcaataattataataccaaaactgcaactgga

SEQ ID NO: 272750 - DNA, 33 bp, Homo sapien
atcaataattataatatcaaaactgcaactgga

SEQ ID NO: 272751 - DNA, 33 bp, Homo sapien
aaaaggcacatcaataaagacctctgacatcta

SEQ ID NO: 272752 - DNA, 33 bp, Homo sapien
aaaaggcacatcaatagagacctctgacatcta

SEQ ID NO: 272753 - DNA, 33 bp, Homo sapien
aatatagtacacaaacacatatgcatatatgtg

SEQ ID NO: 272754 - DNA, 33 bp, Homo sapien
aatatagtacacaaactcatatgcatatatgtg

SEQ ID NO: 272755 - DNA, 33 bp, Homo sapien
tctgatcctactagaacatattttgcttctatt

SEQ ID NO: 272756 - DNA, 33 bp, Homo sapien
tctgatcctactagaatatattttgcttctatt

SEQ ID NO: 272757 - DNA, 33 bp, Homo sapien
cttcaagagagtaacacaggctcctagaagatg

SEQ ID NO: 272758 - DNA, 33 bp, Homo sapien
cttcaagagagtaacataggctcctagaagatg

SEQ ID NO: 272759 - DNA, 33 bp, Homo sapien
gttatagtgggactggaaaggcaaacttatggt

SEQ ID NO: 272760 - DNA, 33 bp, Homo sapien
gttatagtgggactgggaaggcaaacttatggt

SEQ ID NO: 272761 - DNA, 33 bp, Homo sapien
catataaaatactagaaaatcaatcagaaactt

SEQ ID NO: 272762 - DNA, 33 bp, Homo sapien
catataaaatactagagaatcaatcagaaactt

SEQ ID NO: 272763 - DNA, 33 bp, Homo sapien
ataccaggatctctgcacagaaaggaggaggtg

SEQ ID NO: 272764 - DNA, 33 bp, Homo sapien
ataccaggatctctgcgcagaaaggaggaggtg

SEQ ID NO: 272765 - DNA, 33 bp, Homo sapien
aaaatgaaactagaggccaatattcctgaggat

SEQ ID NO: 272766 - DNA, 33 bp, Homo sapien
aaaatgaaactagaggtcaatattcctgaggat

SEQ ID NO: 272767 - DNA, 33 bp, Homo sapien
gaatttttctcctgtagagacctgtacatggag

SEQ ID NO: 272768 - DNA, 33 bp, Homo sapien
gaatttttctcctgtatagacctgtacatggag

SEQ ID NO: 272769 - DNA, 33 bp, Homo sapien
gggaagcataagcaaactttacctacatcctcc

SEQ ID NO: 272770 - DNA, 33 bp, Homo sapien
gggaagcataagcaaagtttacctacatcctcc

SEQ ID NO: 272771 - DNA, 33 bp, Homo sapien; identical to SEQ ID NO: 272769

SEQ ID NO: 272772 - DNA, 33 bp, Homo sapien; identical to SEQ ID NO: 272770

SEQ ID NO: 272773 - DNA, 33 bp, Homo sapien
ggtttgcaggcgttcccgcgggttttgctcctg

SEQ ID NO: 272774 - DNA, 33 bp, Homo sapien
ggtttgcaggcgttcctgcgggttttgctcctg

SEQ ID NO: 272775 - DNA, 33 bp, Homo sapien
attgctaacaagagtacaattttgctctattta

SEQ ID NO: 272776 - DNA, 33 bp, Homo sapien
attgctaacaagagtataattttgctctattta

SEQ ID NO: 272777 - DNA, 33 bp, Homo sapien
attcaaaatctatgaaaatattattgttttgaa

SEQ ID NO: 272778 - DNA, 33 bp, Homo sapien
attcaaaatctatgaagatattattgttttgaa

SEQ ID NO: 272779 - DNA, 33 bp, Homo sapien
ttttttgggcagatgacagtagcacattttggg

SEQ ID NO: 272780 - DNA, 33 bp, Homo sapien
ttttttgggcagatgatagtagcacattttggg

SEQ ID NO: 272781 - DNA, 33 bp, Homo sapien
cccttacttcttctgaaccctactaagagtatc

SEQ ID NO: 272782 - DNA, 33 bp, Homo sapien
cccttacttcttctgacccctactaagagtatc

SEQ ID NO: 272783 - DNA, 33 bp, Homo sapien
ttcttctatgctataaagacaaagtgaatatag

SEQ ID NO: 272784 - DNA, 33 bp, Homo sapien
ttcttctatgctataatgacaaagtgaatatag

SEQ ID NO: 272785 - DNA, 33 bp, Homo sapien
tttggctcaccttgtaccagtctttaatagaca

SEQ ID NO: 272786 - DNA, 33 bp, Homo sapien
tttggctcaccttgtatcagtctttaatagaca

SEQ ID NO: 272787 - DNA, 33 bp, Homo sapien
gtagccatgaatgatacgttttaagtaatggtt

SEQ ID NO: 272788 - DNA, 33 bp, Homo sapien
gtagccatgaatgatatgttttaagtaatggtt

SEQ ID NO: 272789 - DNA, 33 bp, Homo sapien
cttatttccttgacacaactcactgaaatacat

SEQ ID NO: 272790 - DNA, 33 bp, Homo sapien
cttatttccttgacactactcactgaaatacat

SEQ ID NO: 272791 - DNA, 33 bp, Homo sapien
tcattagcatgtttgaactccatagctaaactg

SEQ ID NO: 272792 - DNA, 33 bp, Homo sapien
tcattagcatgtttgatctccatagctaaactg

SEQ ID NO: 272793 - DNA, 33 bp, Homo sapien
atcatgtttgtgataaaagcatataacatccac

SEQ ID NO: 272794 - DNA, 33 bp, Homo sapien
atcatgtttgtgataagagcatataacatccac

SEQ ID NO: 272795 - DNA, 33 bp, Homo sapien
ttgattggagatttaaagctgttgggctaaaag

SEQ ID NO: 272796 - DNA, 33 bp, Homo sapien
ttgattggagatttaacgctgttgggctaaaag

SEQ ID NO: 272797 - DNA, 33 bp, Homo sapien
agctagaaaaattgctaaacaattggtctcctc

SEQ ID NO: 272798 - DNA, 33 bp, Homo sapien
agctagaaaaattgcttaacaattggtctcctc

SEQ ID NO: 272799 - DNA, 33 bp, Homo sapien
gagtgcaaacagctcgcacgtttgaggagacca

SEQ ID NO: 272800 - DNA, 33 bp, Homo sapien
gagtgcaaacagctcgtacgtttgaggagacca

SEQ ID NO: 272801 - DNA, 33 bp, Homo sapien
tagtcaaacatccacaatcctcttaatgttgac

SEQ ID NO: 272802 - DNA, 33 bp, Homo sapien
tagtcaaacatccacagtcctcttaatgttgac

SEQ ID NO: 272803 - DNA, 33 bp, Homo sapien
tatcctgttcccattaaaagttgtagggtaggg

SEQ ID NO: 272804 - DNA, 33 bp, Homo sapien
tatcctgttcccattataagttgtagggtaggg

SEQ ID NO: 272805 - DNA, 33 bp, Homo sapien
cccacgagttacagaacaaaatgattgttgatc

SEQ ID NO: 272806 - DNA, 33 bp, Homo sapien
cccacgagttacagaagaaaatgattgttgatc

SEQ ID NO: 272807 - DNA, 33 bp, Homo sapien
aaaattattcgcttggaaaccctggaaagcaaa

SEQ ID NO: 272808 - DNA, 33 bp, Homo sapien
aaaattattcgcttgggaaccctggaaagcaaa

SEQ ID NO: 272809 - DNA, 33 bp, Homo sapien
ctcaggaagcttagaccagagaatcacttgaac

SEQ ID NO: 272810 - DNA, 33 bp, Homo sapien
ctcaggaagcttagacgagagaatcacttgaac

SEQ ID NO: 272811 - DNA, 33 bp, Homo sapien
aacaaaacaggctgaaatacccaaagagaaaat

SEQ ID NO: 272812 - DNA, 33 bp, Homo sapien
aacaaaacaggctgaagtacccaaagagaaaat

SEQ ID NO: 272813 - DNA, 33 bp, Homo sapien
aaaaaaaactccttccacactggagcatacgtt

SEQ ID NO: 272814 - DNA, 33 bp, Homo sapien
aaaaaaaactccttccgcactggagcatacgtt

SEQ ID NO: 272815 - DNA, 33 bp, Homo sapien
ttggacaaataacaaggattgagagcaaaatac

SEQ ID NO: 272816 - DNA, 33 bp, Homo sapien
ttggacaaataacaagtattgagagcaaaatac

SEQ ID NO: 272817 - DNA, 33 bp, Homo sapien
aagagttagcagcaaaattcagactatatgtga

SEQ ID NO: 272818 - DNA, 33 bp, Homo sapien
aagagttagcagcaaagttcagactatatgtga

SEQ ID NO: 272819 - DNA, 33 bp, Homo sapien
caatagttatggggacaacgtcaacgaggtttt

SEQ ID NO: 272820 - DNA, 33 bp, Homo sapien
caatagttatggggacgacgtcaacgaggtttt

SEQ ID NO: 272821 - DNA, 33 bp, Homo sapien
tttctttgctcacgcacataagcctgtgttgtt

SEQ ID NO: 272822 - DNA, 33 bp, Homo sapien
tttctttgctcacgcatataagcctgtgttgtt

SEQ ID NO: 272823 - DNA, 33 bp, Homo sapien
gcctgcgcttgcacacagtacaagatttgaggc

SEQ ID NO: 272824 - DNA, 33 bp, Homo sapien
gcctgcgcttgcacacggtacaagatttgaggc

SEQ ID NO: 272825 - DNA, 33 bp, Homo sapien
ctgtgagggctccaataatgcagtaggcttatt

SEQ ID NO: 272826 - DNA, 33 bp, Homo sapien
ctgtgagggctccaatcatgcagtaggcttatt

SEQ ID NO: 272827 - DNA, 33 bp, Homo sapien
gagccctcacagagaaactatactaggccagtg

SEQ ID NO: 272828 - DNA, 33 bp, Homo sapien
gagccctcacagagaacctatactaggccagtg

SEQ ID NO: 272829 - DNA, 33 bp, Homo sapien
gtagacatagagtcaaagtaaattattttggag

SEQ ID NO: 272830 - DNA, 33 bp, Homo sapien
gtagacatagagtcaaggtaaattattttggag

SEQ ID NO: 272831 - DNA, 33 bp, Homo sapien
cattctgtatagcctagggaaccacctattttc

SEQ ID NO: 272832 - DNA, 33 bp, Homo sapien
cattctgtatagcctatggaaccacctattttc

SEQ ID NO: 272833 - DNA, 33 bp, Homo sapien
gggctggtgtatgtcagcagaggctggactact

SEQ ID NO: 272834 - DNA, 33 bp, Homo sapien
gggctggtgtatgtcatcagaggctggactact

SEQ ID NO: 272835 - DNA, 33 bp, Homo sapien
tgtgttggggcagtggcagtgagatacattctt

SEQ ID NO: 272836 - DNA, 33 bp, Homo sapien
tgtgttggggcagtggtagtgagatacattctt

SEQ ID NO: 272837 - DNA, 33 bp, Homo sapien
aatctgttcatcatagcagtgcaagtcctgagg

SEQ ID NO: 272838 - DNA, 33 bp, Homo sapien
aatctgttcatcatagtagtgcaagtcctgagg

SEQ ID NO: 272839 - DNA, 33 bp, Homo sapien
tgaataagttctgaagacctaatgtgtagcatg

SEQ ID NO: 272840 - DNA, 33 bp, Homo sapien
tgaataagttctgaagtcctaatgtgtagcatg

SEQ ID NO: 272841 - DNA, 33 bp, Homo sapien
gcatcaatcaatataacatggaagtgttttaaa

SEQ ID NO: 272842 - DNA, 33 bp, Homo sapien
gcatcaatcaatataatatggaagtgttttaaa

SEQ ID NO: 272843 - DNA, 33 bp, Homo sapien
aaccaacaataatttccaagggttcatactgaa

SEQ ID NO: 272844 - DNA, 33 bp, Homo sapien
aaccaacaataatttcgaagggttcatactgaa

SEQ ID NO: 272845 - DNA, 33 bp, Homo sapien
ataatggagtacttcaaaacccaacttacagcg

SEQ ID NO: 272846 - DNA, 33 bp, Homo sapien
ataatggagtacttcacaacccaacttacagcg

SEQ ID NO: 272847 - DNA, 33 bp, Homo sapien
gtattcttcttgcttgaaatatgaaagaataaa

SEQ ID NO: 272848 - DNA, 33 bp, Homo sapien
gtattcttcttgcttgtaatatgaaagaataaa

SEQ ID NO: 272849 - DNA, 33 bp, Homo sapien
cttgttacctgaatgacgaagtaatctgtacac

SEQ ID NO: 272850 - DNA, 33 bp, Homo sapien
cttgttacctgaatgatgaagtaatctgtacac

SEQ ID NO: 272851 - DNA, 33 bp, Homo sapien
gttccagtacttgagaacttaggagatgaggaa

SEQ ID NO: 272852 - DNA, 33 bp, Homo sapien
gttccagtacttgagaccttaggagatgaggaa

SEQ ID NO: 272853 - DNA, 33 bp, Homo sapien
tgatttactatcacacactcagagggtctacat

SEQ ID NO: 272854 - DNA, 33 bp, Homo sapien
tgatttactatcacacgctcagagggtctacat

SEQ ID NO: 272855 - DNA, 33 bp, Homo sapien
gtttttccctatactaactcaaccttttattgt

SEQ ID NO: 272856 - DNA, 33 bp, Homo sapien
gtttttccctatactacctcaaccttttattgt

SEQ ID NO: 272857 - DNA, 33 bp, Homo sapien
ctaccatctctgatataaaataaccactgtgct

SEQ ID NO: 272858 - DNA, 33 bp, Homo sapien
ctaccatctctgatattaaataaccactgtgct

SEQ ID NO: 272859 - DNA, 33 bp, Homo sapien
taacataatcctagcacaatttttagtcctacg

SEQ ID NO: 272860 - DNA, 33 bp, Homo sapien
taacataatcctagcataatttttagtcctacg

SEQ ID NO: 272861 - DNA, 33 bp, Homo sapien
aaaatacaacacaataaaaagtcaatgtaaaaa

SEQ ID NO: 272862 - DNA, 33 bp, Homo sapien
aaaatacaacacaatacaaagtcaatgtaaaaa

SEQ ID NO: 272863 - DNA, 33 bp, Homo sapien
gtggctagtagagtagcaagagacaacaaagta

SEQ ID NO: 272864 - DNA, 33 bp, Homo sapien
gtggctagtagagtaggaagagacaacaaagta

SEQ ID NO: 272865 - DNA, 33 bp, Homo sapien
cagaccattgactgaacagcattcacgtagtct

SEQ ID NO: 272866 - DNA, 33 bp, Homo sapien
cagaccattgactgaagagcattcacgtagtct

SEQ ID NO: 272867 - DNA, 33 bp, Homo sapien
aatgcatgctgatttggaaagaaaatgccaaaa

SEQ ID NO: 272868 - DNA, 33 bp, Homo sapien
aatgcatgctgatttgtaaagaaaatgccaaaa

SEQ ID NO: 272869 - DNA, 33 bp, Homo sapien
aaaattccatcatgagaattagccatcatcatt

SEQ ID NO: 272870 - DNA, 33 bp, Homo sapien
aaaattccatcatgagcattagccatcatcatt

SEQ ID NO: 272871 - DNA, 33 bp, Homo sapien
gtatccaaatgtggttcaacaaaagttggccta

SEQ ID NO: 272872 - DNA, 33 bp, Homo sapien
gtatccaaatgtggtttaacaaaagttggccta

SEQ ID NO: 272873 - DNA, 33 bp, Homo sapien
ttatttgaatttgttacgaagacaatgtgccaa

SEQ ID NO: 272874 - DNA, 33 bp, Homo sapien
ttatttgaatttgttatgaagacaatgtgccaa

SEQ ID NO: 272875 - DNA, 33 bp, Homo sapien
tacccaatagctataaacattagaaaatcattc

SEQ ID NO: 272876 - DNA, 33 bp, Homo sapien
tacccaatagctataaccattagaaaatcattc

SEQ ID NO: 272877 - DNA, 33 bp, Homo sapien
actttatgatgcaggaaaaatacccaatagcta

SEQ ID NO: 272878 - DNA, 33 bp, Homo sapien
actttatgatgcaggagaaatacccaatagcta

SEQ ID NO: 272879 - DNA, 33 bp, Homo sapien
tagtctgaagtccgaactcctcatattatagta

SEQ ID NO: 272880 - DNA, 33 bp, Homo sapien
tagtctgaagtccgaattcctcatattatagta

SEQ ID NO: 272881 - DNA, 33 bp, Homo sapien
aacttaaaatattcaaaggcatggctttttcat

SEQ ID NO: 272882 - DNA, 33 bp, Homo sapien
aacttaaaatattcaagggcatggctttttcat

SEQ ID NO: 272883 - DNA, 33 bp, Homo sapien
atctggaataaaagcgcaaggttatggagaagg

SEQ ID NO: 272884 - DNA, 33 bp, Homo sapien
atctggaataaaagcggaaggttatggagaagg

SEQ ID NO: 272885 - DNA, 33 bp, Homo sapien
ataaactgctcacatgaagttaaactacacagg

SEQ ID NO: 272886 - DNA, 33 bp, Homo sapien
ataaactgctcacatggagttaaactacacagg

SEQ ID NO: 272887 - DNA, 33 bp, Homo sapien
caggacaacataagaccgcaatgaatgagttat

SEQ ID NO: 272888 - DNA, 33 bp, Homo sapien
caggacaacataagactgcaatgaatgagttat

SEQ ID NO: 272889 - DNA, 33 bp, Homo sapien
ttattccttgtccataactttggctttcatgct

SEQ ID NO: 272890 - DNA, 33 bp, Homo sapien
ttattccttgtccatatctttggctttcatgct

SEQ ID NO: 272891 - DNA, 33 bp, Homo sapien
tttaggggctattaccaggaccaaagttttgag

SEQ ID NO: 272892 - DNA, 33 bp, Homo sapien
tttaggggctattacctggaccaaagttttgag

SEQ ID NO: 272893 - DNA, 33 bp, Homo sapien
ctggaggctacataagaagaggaaggccatatg

SEQ ID NO: 272894 - DNA, 33 bp, Homo sapien
ctggaggctacataagcagaggaaggccatatg

SEQ ID NO: 272895 - DNA, 33 bp, Homo sapien
gacaagaaagaagaaaactgcaactctttgtta

SEQ ID NO: 272896 - DNA, 33 bp, Homo sapien
gacaagaaagaagaaacctgcaactctttgtta

SEQ ID NO: 272897 - DNA, 33 bp, Homo sapien
tatacaaaccttaagacggaattagactttata

SEQ ID NO: 272898 - DNA, 33 bp, Homo sapien
tatacaaaccttaagatggaattagactttata

SEQ ID NO: 272899 - DNA, 33 bp, Homo sapien
cagggaataaagcaccccaatattgtaaataaa

SEQ ID NO: 272900 - DNA, 33 bp, Homo sapien
cagggaataaagcacctcaatattgtaaataaa

SEQ ID NO: 272901 - DNA, 33 bp, Homo sapien
aattacaataggacaacttatctctttcctaaa

SEQ ID NO: 272902 - DNA, 33 bp, Homo sapien
aattacaataggacaatttatctctttcctaaa

SEQ ID NO: 272903 - DNA, 33 bp, Homo sapien
ttctgaaaaattcttacagttaggacagaaaca

SEQ ID NO: 272904 - DNA, 33 bp, Homo sapien
ttctgaaaaattcttatagttaggacagaaaca

SEQ ID NO: 272905 - DNA, 33 bp, Homo sapien
gagtaatgacctagtgcatctgacagaagaaac

SEQ ID NO: 272906 - DNA, 33 bp, Homo sapien
gagtaatgacctagtgtatctgacagaagaaac

SEQ ID NO: 272907 - DNA, 33 bp, Homo sapien
attattccaatggaaaaagataatggtaagctt

SEQ ID NO: 272908 - DNA, 33 bp, Homo sapien
attattccaatggaaacagataatggtaagctt

SEQ ID NO: 272909 - DNA, 33 bp, Homo sapien
cagtctcttacttgcaacttttttagggggagg

SEQ ID NO: 272910 - DNA, 33 bp, Homo sapien
cagtctcttacttgcagcttttttagggggagg

SEQ ID NO: 272911 - DNA, 33 bp, Homo sapien
ttctttttcatgagcaacaaaaaataagcaaaa

SEQ ID NO: 272912 - DNA, 33 bp, Homo sapien
ttctttttcatgagcagcaaaaaataagcaaaa

SEQ ID NO: 272913 - DNA, 33 bp, Homo sapien
gcattgaggtttaccactcaacatcagatttgg

SEQ ID NO: 272914 - DNA, 33 bp, Homo sapien
gcattgaggtttaccattcaacatcagatttgg

SEQ ID NO: 272915 - DNA, 33 bp, Homo sapien
tgagtacaaataagagaaaattccagaaagggg

SEQ ID NO: 272916 - DNA, 33 bp, Homo sapien
tgagtacaaataagagtaaattccagaaagggg

SEQ ID NO: 272917 - DNA, 33 bp, Homo sapien
aataacataagaaaaaactgaagtcataaatgg

SEQ ID NO: 272918 - DNA, 33 bp, Homo sapien
aataacataagaaaaacctgaagtcataaatgg

SEQ ID NO: 272919 - DNA, 33 bp, Homo sapien
tcaagtaactgtggctcaataaatgttcattaa

SEQ ID NO: 272920 - DNA, 33 bp, Homo sapien
tcaagtaactgtggctgaataaatgttcattaa

SEQ ID NO: 272921 - DNA, 33 bp, Homo sapien
gagctatttttaacaaccaacacttgtggtaac

SEQ ID NO: 272922 - DNA, 33 bp, Homo sapien
gagctatttttaacaagcaacacttgtggtaac

SEQ ID NO: 272923 - DNA, 33 bp, Homo sapien
tcccttgataatcttacagacttcaatttgatt

SEQ ID NO: 272924 - DNA, 33 bp, Homo sapien
tcccttgataatcttatagacttcaatttgatt

SEQ ID NO: 272925 - DNA, 33 bp, Homo sapien
gcttcgtgctcagtgaagtggttggaaattcta

SEQ ID NO: 272926 - DNA, 33 bp, Homo sapien
gcttcgtgctcagtgacgtggttggaaattcta

SEQ ID NO: 272927 - DNA, 33 bp, Homo sapien
cattgcctttctcagacgatttaatcttattgc

SEQ ID NO: 272928 - DNA, 33 bp, Homo sapien
cattgcctttctcagatgatttaatcttattgc

SEQ ID NO: 272929 - DNA, 33 bp, Homo sapien
ggttaattgggccggaaaaataaggagccatga

SEQ ID NO: 272930 - DNA, 33 bp, Homo sapien
ggttaattgggccggacaaataaggagccatga

SEQ ID NO: 272931 - DNA, 33 bp, Homo sapien
ttatgaacccagctcaatgagagagactgcaca

SEQ ID NO: 272932 - DNA, 33 bp, Homo sapien
ttatgaacccagctcagtgagagagactgcaca

SEQ ID NO: 272933 - DNA, 33 bp, Homo sapien
actcaatagcataaacaaaaaagctaataacgc

SEQ ID NO: 272934 - DNA, 33 bp, Homo sapien
actcaatagcataaacgaaaaagctaataacgc

SEQ ID NO: 272935 - DNA, 33 bp, Homo sapien
ggagtttaatataacacggatgtcagattgttg

SEQ ID NO: 272936 - DNA, 33 bp, Homo sapien
ggagtttaatataacatggatgtcagattgttg

SEQ ID NO: 272937 - DNA, 33 bp, Homo sapien
tgttaattacacagaaaggcgcataagctagac

SEQ ID NO: 272938 - DNA, 33 bp, Homo sapien
tgttaattacacagaagggcgcataagctagac

SEQ ID NO: 272939 - DNA, 33 bp, Homo sapien
tctccatttgctggtaccctcttcggtttcttt

SEQ ID NO: 272940 - DNA, 33 bp, Homo sapien
tctccatttgctggtatcctcttcggtttcttt

SEQ ID NO: 272941 - DNA, 33 bp, Homo sapien
aacggttcactgtgaaaaagtaatcactgactc

SEQ ID NO: 272942 - DNA, 33 bp, Homo sapien
aacggttcactgtgaagaagtaatcactgactc

SEQ ID NO: 272943 - DNA, 33 bp, Homo sapien
cttgcagtttcagtcacacgaagcaacttgcta

SEQ ID NO: 272944 - DNA, 33 bp, Homo sapien
cttgcagtttcagtcatacgaagcaacttgcta

SEQ ID NO: 272945 - DNA, 33 bp, Homo sapien
agatgcatttgctgtaaatattatatggcaaat

SEQ ID NO: 272946 - DNA, 33 bp, Homo sapien
agatgcatttgctgtacatattatatggcaaat

SEQ ID NO: 272947 - DNA, 33 bp, Homo sapien
attatataatgataaagtgacttgtctaacaga

SEQ ID NO: 272948 - DNA, 33 bp, Homo sapien
attatataatgataaattgacttgtctaacaga

SEQ ID NO: 272949 - DNA, 33 bp, Homo sapien
atgaaggtagattcaaatgtaaagccagattga

SEQ ID NO: 272950 - DNA, 33 bp, Homo sapien
atgaaggtagattcaagtgtaaagccagattga

SEQ ID NO: 272951 - DNA, 33 bp, Homo sapien
gatgcagaggcaatcaatacatgtatcctttgg

SEQ ID NO: 272952 - DNA, 33 bp, Homo sapien
gatgcagaggcaatcagtacatgtatcctttgg

SEQ ID NO: 272953 - DNA, 33 bp, Homo sapien
gtgatagaagaaggtaagaatttgtgtcaccaa

SEQ ID NO: 272954 - DNA, 33 bp, Homo sapien
gtgatagaagaaggtaggaatttgtgtcaccaa

SEQ ID NO: 272955 - DNA, 33 bp, Homo sapien
aaaaaaaagaagtaaccattcctcttgccctgt

SEQ ID NO: 272956 - DNA, 33 bp, Homo sapien
aaaaaaaagaagtaactattcctcttgccctgt

SEQ ID NO: 272957 - DNA, 33 bp, Homo sapien
acttcctttttatgaacacgcataactctgtgc

SEQ ID NO: 272958 - DNA, 33 bp, Homo sapien
acttcctttttatgaatacgcataactctgtgc

SEQ ID NO: 272959 - DNA, 33 bp, Homo sapien
tatccttagcaaactaacatgaaaacagaaaac

SEQ ID NO: 272960 - DNA, 33 bp, Homo sapien
tatccttagcaaactatcatgaaaacagaaaac

SEQ ID NO: 272961 - DNA, 33 bp, Homo sapien
aagctgaaataatagaatcactgaagcagcttc

SEQ ID NO: 272962 - DNA, 33 bp, Homo sapien
aagctgaaataatagactcactgaagcagcttc

SEQ ID NO: 272963 - DNA, 33 bp, Homo sapien
tttattgttaagtatgaatctatcgacgttatc

SEQ ID NO: 272964 - DNA, 33 bp, Homo sapien
tttattgttaagtatgtatctatcgacgttatc

SEQ ID NO: 272965 - DNA, 33 bp, Homo sapien
ttctactttacttccccaccactcaaagctttt

SEQ ID NO: 272966 - DNA, 33 bp, Homo sapien
ttctactttacttccctaccactcaaagctttt

SEQ ID NO: 272967 - DNA, 33 bp, Homo sapien
ccttttttgttcactcaagatatggttgatttt

SEQ ID NO: 272968 - DNA, 33 bp, Homo sapien
ccttttttgttcactcgagatatggttgatttt

SEQ ID NO: 272969 - DNA, 33 bp, Homo sapien
ttgtgtaagcaattcaagacttattaaataatt

SEQ ID NO: 272970 - DNA, 33 bp, Homo sapien
ttgtgtaagcaattcaggacttattaaataatt

SEQ ID NO: 272971 - DNA, 33 bp, Homo sapien
ctttctaggtgtggtacaaatgaaatagaatga

SEQ ID NO: 272972 - DNA, 33 bp, Homo sapien
ctttctaggtgtggtataaatgaaatagaatga

SEQ ID NO: 272973 - DNA, 33 bp, Homo sapien
cttttgttttagctaactgtctattttttgttt

SEQ ID NO: 272974 - DNA, 33 bp, Homo sapien
cttttgttttagctaattgtctattttttgttt

SEQ ID NO: 272975 - DNA, 33 bp, Homo sapien
aaacaaagtaaacccactgattatgtgtgctgc

SEQ ID NO: 272976 - DNA, 33 bp, Homo sapien
aaacaaagtaaacccattgattatgtgtgctgc

SEQ ID NO: 272977 - DNA, 33 bp, Homo sapien
gaggaaatgcccaagactaagcaattttcaaaa

SEQ ID NO: 272978 - DNA, 33 bp, Homo sapien
gaggaaatgcccaagagtaagcaattttcaaaa

SEQ ID NO: 272979 - DNA, 33 bp, Homo sapien
actacaaaggagagaaaggcttaaggcagtaaa

SEQ ID NO: 272980 - DNA, 33 bp, Homo sapien
actacaaaggagagaatggcttaaggcagtaaa

SEQ ID NO: 272981 - DNA, 33 bp, Homo sapien
ggccctaacattgactcaacaccacttatatcc

SEQ ID NO: 272982 - DNA, 33 bp, Homo sapien
ggccctaacattgactgaacaccacttatatcc

SEQ ID NO: 272983 - DNA, 33 bp, Homo sapien
aaccaacattttgtaaccatctaaatcttctca

SEQ ID NO: 272984 - DNA, 33 bp, Homo sapien
aaccaacattttgtaatcatctaaatcttctca

SEQ ID NO: 272985 - DNA, 33 bp, Homo sapien
ttgctactgattcctacagtctaatacttgatt

SEQ ID NO: 272986 - DNA, 33 bp, Homo sapien
ttgctactgattcctatagtctaatacttgatt

SEQ ID NO: 272987 - DNA, 33 bp, Homo sapien
ttaagtgttttcatcacaaataaatggtaagta

SEQ ID NO: 272988 - DNA, 33 bp, Homo sapien
ttaagtgttttcatcataaataaatggtaagta

SEQ ID NO: 272989 - DNA, 33 bp, Homo sapien
cataatccaggccatacattcggcttaagggcc

SEQ ID NO: 272990 - DNA, 33 bp, Homo sapien
cataatccaggccatatattcggcttaagggcc

SEQ ID NO: 272991 - DNA, 33 bp, Homo sapien
atgagaataacaaaaactttcagcaataatttt

SEQ ID NO: 272992 - DNA, 33 bp, Homo sapien
atgagaataacaaaaagtttcagcaataatttt

SEQ ID NO: 272993 - DNA, 33 bp, Homo sapien
ctaggatgtctttgacaattttaacaacattag

SEQ ID NO: 272994 - DNA, 33 bp, Homo sapien
ctaggatgtctttgactattttaacaacattag

SEQ ID NO: 272995 - DNA, 33 bp, Homo sapien
gaataaaatcctctcactcacagaaacatggat

SEQ ID NO: 272996 - DNA, 33 bp, Homo sapien
gaataaaatcctctcattcacagaaacatggat

SEQ ID NO: 272997 - DNA, 33 bp, Homo sapien
acctgctagctggctacccaccctgaggaatgg

SEQ ID NO: 272998 - DNA, 33 bp, Homo sapien
acctgctagctggctatccaccctgaggaatgg

SEQ ID NO: 272999 - DNA, 33 bp, Homo sapien
acacaggttctaactacgtacatctctcatgtc

SEQ ID NO: 273000 - DNA, 33 bp, Homo sapien
acacaggttctaactatgtacatctctcatgtc

SEQ ID NO: 273001 - DNA, 33 bp, Homo sapien
tagtcaccaaattctgaatcctcctcctaaggc

SEQ ID NO: 273002 - DNA, 33 bp, Homo sapien
tagtcaccaaattctggatcctcctcctaaggc

SEQ ID NO: 273003 - DNA, 33 bp, Homo sapien
gagattatagaaaaaaagcaatgaagagtgaag

SEQ ID NO: 273004 - DNA, 33 bp, Homo sapien
gagattatagaaaaaacgcaatgaagagtgaag

SEQ ID NO: 273005 - DNA, 33 bp, Homo sapien
ataaaaagaaaaaggaaagcctgtaagacaaat

SEQ ID NO: 273006 - DNA, 33 bp, Homo sapien
ataaaaagaaaaaggagagcctgtaagacaaat

SEQ ID NO: 273007 - DNA, 33 bp, Homo sapien
tgaccggaggttagaacttagaagcaactctcc

SEQ ID NO: 273008 - DNA, 33 bp, Homo sapien
tgaccggaggttagaatttagaagcaactctcc

SEQ ID NO: 273009 - DNA, 33 bp, Homo sapien
aagagtcatcaataacactgaatacttatgact

SEQ ID NO: 273010 - DNA, 33 bp, Homo sapien
aagagtcatcaataacgctgaatacttatgact

SEQ ID NO: 273011 - DNA, 33 bp, Homo sapien
cttccttaggaaataaaggccataatgtgttat

SEQ ID NO: 273012 - DNA, 33 bp, Homo sapien
cttccttaggaaataatggccataatgtgttat

SEQ ID NO: 273013 - DNA, 33 bp, Homo sapien
aaaaataatttgcataaatagtggaaagtgcaa

SEQ ID NO: 273014 - DNA, 33 bp, Homo sapien
aaaaataatttgcatagatagtggaaagtgcaa

SEQ ID NO: 273015 - DNA, 33 bp, Homo sapien
caattcttacctcttcagaagaaatgattcaac

SEQ ID NO: 273016 - DNA, 33 bp, Homo sapien
caattcttacctcttccgaagaaatgattcaac

SEQ ID NO: 273017 - DNA, 33 bp, Homo sapien
catgtttatgacatcaataagaaatacatgaaa

SEQ ID NO: 273018 - DNA, 33 bp, Homo sapien
catgtttatgacatcagtaagaaatacatgaaa

SEQ ID NO: 273019 - DNA, 33 bp, Homo sapien
actccttttgttgttcaccaggaaacatcaatg

SEQ ID NO: 273020 - DNA, 33 bp, Homo sapien
actccttttgttgttcgccaggaaacatcaatg

SEQ ID NO: 273021 - DNA, 33 bp, Homo sapien
gctgccagacagattgaagctctattatatgtt

SEQ ID NO: 273022 - DNA, 33 bp, Homo sapien
gctgccagacagattggagctctattatatgtt

SEQ ID NO: 273023 - DNA, 33 bp, Homo sapien
caattattttttgaagaacaggctgaccgtggt

SEQ ID NO: 273024 - DNA, 33 bp, Homo sapien
caattattttttgaaggacaggctgaccgtggt

SEQ ID NO: 273025 - DNA, 33 bp, Homo sapien
tccattgcaagaacccaataagtcactcaacac

SEQ ID NO: 273026 - DNA, 33 bp, Homo sapien
tccattgcaagaacccgataagtcactcaacac

SEQ ID NO: 273027 - DNA, 33 bp, Homo sapien
gaaacactattgcccaacttgcctcaattttaa

SEQ ID NO: 273028 - DNA, 33 bp, Homo sapien
gaaacactattgcccagcttgcctcaattttaa

SEQ ID NO: 273029 - DNA, 33 bp, Homo sapien
attgatttttgtattccgaaaatttgctgagtt

SEQ ID NO: 273030 - DNA, 33 bp, Homo sapien
attgatttttgtattctgaaaatttgctgagtt

SEQ ID NO: 273031 - DNA, 33 bp, Homo sapien
caaaatggaatggtacaagcttcgggtagatca

SEQ ID NO: 273032 - DNA, 33 bp, Homo sapien
caaaatggaatggtacgagcttcgggtagatca

SEQ ID NO: 273033 - DNA, 33 bp, Homo sapien
aaactccattttcctaccagtgatgtgaatcta

SEQ ID NO: 273034 - DNA, 33 bp, Homo sapien
aaactccattttcctatcagtgatgtgaatcta

SEQ ID NO: 273035 - DNA, 33 bp, Homo sapien
ctagatggctggtaaaacattgtttccgggtat

SEQ ID NO: 273036 - DNA, 33 bp, Homo sapien
ctagatggctggtaaagcattgtttccgggtat

SEQ ID NO: 273037 - DNA, 33 bp, Homo sapien
gaggaagatggaataaccttgcttggcaagtct

SEQ ID NO: 273038 - DNA, 33 bp, Homo sapien
gaggaagatggaataatcttgcttggcaagtct

SEQ ID NO: 273039 - DNA, 33 bp, Homo sapien
ttgtgtgttacacaaccggaaaaactatataaa

SEQ ID NO: 273040 - DNA, 33 bp, Homo sapien
ttgtgtgttacacaacgggaaaaactatataaa

SEQ ID NO: 273041 - DNA, 33 bp, Homo sapien
taaaagatcaaattccaatgagtatctgaatca

SEQ ID NO: 273042 - DNA, 33 bp, Homo sapien
taaaagatcaaattccgatgagtatctgaatca

SEQ ID NO: 273043 - DNA, 33 bp, Homo sapien
tttatggaatatctgacgttcaaggggtagatg

SEQ ID NO: 273044 - DNA, 33 bp, Homo sapien
tttatggaatatctgatgttcaaggggtagatg

SEQ ID NO: 273045 - DNA, 33 bp, Homo sapien
gttccaaagtgttatgcagtactcaagtgttgg

SEQ ID NO: 273046 - DNA, 33 bp, Homo sapien
gttccaaagtgttatgtagtactcaagtgttgg

SEQ ID NO: 273047 - DNA, 33 bp, Homo sapien
tatatcccgttattcaaagtaaacactgtcacc

SEQ ID NO: 273048 - DNA, 33 bp, Homo sapien
tatatcccgttattcagagtaaacactgtcacc

SEQ ID NO: 273049 - DNA, 33 bp, Homo sapien
aagccattcattaaagccaaagagaaagaagat

SEQ ID NO: 273050 - DNA, 33 bp, Homo sapien
aagccattcattaaagtcaaagagaaagaagat

SEQ ID NO: 273051 - DNA, 33 bp, Homo sapien
atttaaatgggttacccagtacacaagcaatta

SEQ ID NO: 273052 - DNA, 33 bp, Homo sapien
atttaaatgggttacctagtacacaagcaatta

SEQ ID NO: 273053 - DNA, 33 bp, Homo sapien
agaaaatgttttcaaacgatgcatcaaagaaag

SEQ ID NO: 273054 - DNA, 33 bp, Homo sapien
agaaaatgttttcaaatgatgcatcaaagaaag

SEQ ID NO: 273055 - DNA, 33 bp, Homo sapien
aaatgtcattactattaaagtctgccaaatatt

SEQ ID NO: 273056 - DNA, 33 bp, Homo sapien
aaatgtcattactattgaagtctgccaaatatt

SEQ ID NO: 273057 - DNA, 33 bp, Homo sapien
ctatttctctacactcacagaaataaaaggtca

SEQ ID NO: 273058 - DNA, 33 bp, Homo sapien
ctatttctctacactcgcagaaataaaaggtca

SEQ ID NO: 273059 - DNA, 33 bp, Homo sapien
agacagtgctatcaaagccctgccagagccatg

SEQ ID NO: 273060 - DNA, 33 bp, Homo sapien
agacagtgctatcaaatccctgccagagccatg

SEQ ID NO: 273061 - DNA, 33 bp, Homo sapien
tgccactgttattcaacgtagtaatgaaagttc

SEQ ID NO: 273062 - DNA, 33 bp, Homo sapien
tgccactgttattcaatgtagtaatgaaagttc

SEQ ID NO: 273063 - DNA, 33 bp, Homo sapien
tttaactagctgacaaaagtctgatgcttcatc

SEQ ID NO: 273064 - DNA, 33 bp, Homo sapien
tttaactagctgacaagagtctgatgcttcatc

SEQ ID NO: 273065 - DNA, 33 bp, Homo sapien
gctgggagatggttaacgaactcttggcttcta

SEQ ID NO: 273066 - DNA, 33 bp, Homo sapien
gctgggagatggttaatgaactcttggcttcta

SEQ ID NO: 273067 - DNA, 33 bp, Homo sapien; identical to SEQ ID NO: 273065

SEQ ID NO: 273068 - DNA, 33 bp, Homo sapien; identical to SEQ ID NO: 273066

SEQ ID NO: 273069 - DNA, 33 bp, Homo sapien; identical to SEQ ID NO: 273065

SEQ ID NO: 273070 - DNA, 33 bp, Homo sapien; identical to SEQ ID NO: 273066

SEQ ID NO: 273071 - DNA, 33 bp, Homo sapien
cagccgtgctggtagaagagagttgaaagctaa

SEQ ID NO: 273072 - DNA, 33 bp, Homo sapien
cagccgtgctggtagaggagagttgaaagctaa

SEQ ID NO: 273073 - DNA, 33 bp, Homo sapien; identical to SEQ ID NO: 273071

SEQ ID NO: 273074 - DNA, 33 bp, Homo sapien; identical to SEQ ID NO: 273072

SEQ ID NO: 273075 - DNA, 33 bp, Homo sapien; identical to SEQ ID NO: 273071

SEQ ID NO: 273076 - DNA, 33 bp, Homo sapien; identical to SEQ ID NO: 273072

SEQ ID NO: 273077 - DNA, 33 bp, Homo sapien
ttcaggcaacttgatcccaattaattatccatg

SEQ ID NO: 273078 - DNA, 33 bp, Homo sapien
ttcaggcaacttgatctcaattaattatccatg

SEQ ID NO: 273079 - DNA, 33 bp, Homo sapien
ctgttagcaagttggacgcaaaataacatttct

SEQ ID NO: 273080 - DNA, 33 bp, Homo sapien
ctgttagcaagttggatgcaaaataacatttct

SEQ ID NO: 273081 - DNA, 33 bp, Homo sapien
attacaaaaaaagatactagatacaggcatact

SEQ ID NO: 273082 - DNA, 33 bp, Homo sapien
attacaaaaaaagatattagatacaggcatact

SEQ ID NO: 273083 - DNA, 33 bp, Homo sapien
agaaagaaacaaggaaaatgatagtcaagaata

SEQ ID NO: 273084 - DNA, 33 bp, Homo sapien
agaaagaaacaaggaacatgatagtcaagaata

SEQ ID NO: 273085 - DNA, 33 bp, Homo sapien
ggccctctggcatatcgcacaaccgtgtcttca

SEQ ID NO: 273086 - DNA, 33 bp, Homo sapien
ggccctctggcatatctcacaaccgtgtcttca

SEQ ID NO: 273087 - DNA, 33 bp, Homo sapien
ggagaggtgtccaaagcctctaaaggaaagacg

SEQ ID NO: 273088 - DNA, 33 bp, Homo sapien
ggagaggtgtccaaagtctctaaaggaaagacg

SEQ ID NO: 273089 - DNA, 33 bp, Homo sapien
aaatatagaccactgacgtcaaagtgatagatg

SEQ ID NO: 273090 - DNA, 33 bp, Homo sapien
aaatatagaccactgatgtcaaagtgatagatg

SEQ ID NO: 273091 - DNA, 33 bp, Homo sapien
tcatttcagtggcagacaattgttctatttaat

SEQ ID NO: 273092 - DNA, 33 bp, Homo sapien
tcatttcagtggcagataattgttctatttaat

SEQ ID NO: 273093 - DNA, 33 bp, Homo sapien
ttgtgtccataaaacccgagcacttttctatta

SEQ ID NO: 273094 - DNA, 33 bp, Homo sapien
ttgtgtccataaaaccggagcacttttctatta

SEQ ID NO: 273095 - DNA, 33 bp, Homo sapien
aacataaagataaggacaatagacgttggggac

SEQ ID NO: 273096 - DNA, 33 bp, Homo sapien
aacataaagataaggataatagacgttggggac

SEQ ID NO: 273097 - DNA, 33 bp, Homo sapien
aaacagtgccatatagaaagagggggaaataca

SEQ ID NO: 273098 - DNA, 33 bp, Homo sapien
aaacagtgccatataggaagagggggaaataca

SEQ ID NO: 273099 - DNA, 33 bp, Homo sapien
actatgtgctaaccaccaatgctgcatacatta

SEQ ID NO: 273100 - DNA, 33 bp, Homo sapien
actatgtgctaaccactaatgctgcatacatta

SEQ ID NO: 273101 - DNA, 33 bp, Homo sapien
cactttcttaattgaccgtatctacattgattt

SEQ ID NO: 273102 - DNA, 33 bp, Homo sapien
cactttcttaattgactgtatctacattgattt

SEQ ID NO: 273103 - DNA, 33 bp, Homo sapien
attccttgcatcaaaaccatagtatctcgatta

SEQ ID NO: 273104 - DNA, 33 bp, Homo sapien
attccttgcatcaaaagcatagtatctcgatta

SEQ ID NO: 273105 - DNA, 33 bp, Homo sapien
gcccatgaggttagcccgaagtttacaatcaca

SEQ ID NO: 273106 - DNA, 33 bp, Homo sapien
gcccatgaggttagcctgaagtttacaatcaca

SEQ ID NO: 273107 - DNA, 33 bp, Homo sapien
ctagcctgaagctgaaagcggtcctgagctttg

SEQ ID NO: 273108 - DNA, 33 bp, Homo sapien
ctagcctgaagctgaacgcggtcctgagctttg

SEQ ID NO: 273109 - DNA, 33 bp, Homo sapien
cagggacatggagtaaagtataaggaaagaagc

SEQ ID NO: 273110 - DNA, 33 bp, Homo sapien
cagggacatggagtaatgtataaggaaagaagc

SEQ ID NO: 273111 - DNA, 33 bp, Homo sapien
tacgttcttggccttaaaatgtatcctgtatac

SEQ ID NO: 273112 - DNA, 33 bp, Homo sapien
tacgttcttggccttacaatgtatcctgtatac

SEQ ID NO: 273113 - DNA, 33 bp, Homo sapien
tgtgtcttgaagcaatcattatcttaataattg

SEQ ID NO: 273114 - DNA, 33 bp, Homo sapien
tgtgtcttgaagcaatgattatcttaataattg

SEQ ID NO: 273115 - DNA, 33 bp, Homo sapien
agaatttgtgagaccacgaaaaggtttttattt

SEQ ID NO: 273116 - DNA, 33 bp, Homo sapien
agaatttgtgagaccatgaaaaggtttttattt

SEQ ID NO: 273117 - DNA, 33 bp, Homo sapien
ggcccatgtgatactacgcctgaattttccacg

SEQ ID NO: 273118 - DNA, 33 bp, Homo sapien
ggcccatgtgatactatgcctgaattttccacg

SEQ ID NO: 273119 - DNA, 33 bp, Homo sapien
aagaacaaaacaaaataattgaaagtgcataaa

SEQ ID NO: 273120 - DNA, 33 bp, Homo sapien
aagaacaaaacaaaatgattgaaagtgcataaa

SEQ ID NO: 273121 - DNA, 33 bp, Homo sapien
caaaataataaataacacagaaaatgacaaaat

SEQ ID NO: 273122 - DNA, 33 bp, Homo sapien
caaaataataaataactcagaaaatgacaaaat

SEQ ID NO: 273123 - DNA, 33 bp, Homo sapien
ttaattattttattcaatcagaaactatctagt

SEQ ID NO: 273124 - DNA, 33 bp, Homo sapien
ttaattattttattcagtcagaaactatctagt

SEQ ID NO: 273125 - DNA, 33 bp, Homo sapien
tacttttaaagtaaacacagtgcatcataacat

SEQ ID NO: 273126 - DNA, 33 bp, Homo sapien
tacttttaaagtaaacgcagtgcatcataacat

SEQ ID NO: 273127 - DNA, 33 bp, Homo sapien
ctgttgtaagtcacagaattttatttttcatga

SEQ ID NO: 273128 - DNA, 33 bp, Homo sapien
ctgttgtaagtcacaggattttatttttcatga

SEQ ID NO: 273129 - DNA, 33 bp, Homo sapien
caataacaagagtgaaacttgaagacatatgat

SEQ ID NO: 273130 - DNA, 33 bp, Homo sapien
caataacaagagtgaaccttgaagacatatgat

SEQ ID NO: 273131 - DNA, 33 bp, Homo sapien
tgactaatacattcctcacaaatgagaacagaa

SEQ ID NO: 273132 - DNA, 33 bp, Homo sapien
tgactaatacattccttacaaatgagaacagaa

SEQ ID NO: 273133 - DNA, 33 bp, Homo sapien
atataagttatgcacactagaggtagcattatt

SEQ ID NO: 273134 - DNA, 33 bp, Homo sapien
atataagttatgcacattagaggtagcattatt

SEQ ID NO: 273135 - DNA, 33 bp, Homo sapien
ctgcattctcatcttagattttgaacaaaccac

SEQ ID NO: 273136 - DNA, 33 bp, Homo sapien
ctgcattctcatcttatattttgaacaaaccac

SEQ ID NO: 273137 - DNA, 33 bp, Homo sapien
tgttgcttgctttcaaataaaacaccactcagg

SEQ ID NO: 273138 - DNA, 33 bp, Homo sapien
tgttgcttgctttcaagtaaaacaccactcagg

SEQ ID NO: 273139 - DNA, 33 bp, Homo sapien
aaggagaggatgaaaacgagtaaatatctggcc

SEQ ID NO: 273140 - DNA, 33 bp, Homo sapien
aaggagaggatgaaaatgagtaaatatctggcc

SEQ ID NO: 273141 - DNA, 33 bp, Homo sapien
cccaactttgtaatgacagaagattcaaggtgc

SEQ ID NO: 273142 - DNA, 33 bp, Homo sapien
cccaactttgtaatgatagaagattcaaggtgc

SEQ ID NO: 273143 - DNA, 33 bp, Homo sapien
tccttcaacatgacaccaattcttataattccc

SEQ ID NO: 273144 - DNA, 33 bp, Homo sapien
tccttcaacatgacactaattcttataattccc

SEQ ID NO: 273145 - DNA, 33 bp, Homo sapien
tcatatgttttgaatacgtgagacagctgttgt

SEQ ID NO: 273146 - DNA, 33 bp, Homo sapien
tcatatgttttgaatatgtgagacagctgttgt

SEQ ID NO: 273147 - DNA, 33 bp, Homo sapien
cactacaacacttatgaagtatagcacatttac

SEQ ID NO: 273148 - DNA, 33 bp, Homo sapien
cactacaacacttatggagtatagcacatttac

SEQ ID NO: 273149 - DNA, 33 bp, Homo sapien
acctccataaaaagtcaatttagcaagtatatt

SEQ ID NO: 273150 - DNA, 33 bp, Homo sapien
acctccataaaaagtcgatttagcaagtatatt

SEQ ID NO: 273151 - DNA, 33 bp, Homo sapien
atgtaatttgccaaaccaaaatatgtgtgtatt

SEQ ID NO: 273152 - DNA, 33 bp, Homo sapien
atgtaatttgccaaactaaaatatgtgtgtatt

SEQ ID NO: 273153 - DNA, 33 bp, Homo sapien
aaggagaaagaatcaaatgtatcaaaaaagaag

SEQ ID NO: 273154 - DNA, 33 bp, Homo sapien
aaggagaaagaatcaagtgtatcaaaaaagaag

SEQ ID NO: 273155 - DNA, 33 bp, Homo sapien
aaccacagtacttacacaagagagagtcatatc

SEQ ID NO: 273156 - DNA, 33 bp, Homo sapien
aaccacagtacttacataagagagagtcatatc

SEQ ID NO: 273157 - DNA, 33 bp, Homo sapien
catatataaaaggatactaaaacacgtcacttg

SEQ ID NO: 273158 - DNA, 33 bp, Homo sapien
catatataaaaggatattaaaacacgtcacttg

SEQ ID NO: 273159 - DNA, 33 bp, Homo sapien
ctataagtataacaagacatcatctctcaatat

SEQ ID NO: 273160 - DNA, 33 bp, Homo sapien
ctataagtataacaaggcatcatctctcaatat

SEQ ID NO: 273161 - DNA, 33 bp, Homo sapien
atacagagtgtattacaaaggaagcattttgtg

SEQ ID NO: 273162 - DNA, 33 bp, Homo sapien
atacagagtgtattacgaaggaagcattttgtg

SEQ ID NO: 273163 - DNA, 33 bp, Homo sapien
tcatagttaaagaagaaatggagtactgaactt

SEQ ID NO: 273164 - DNA, 33 bp, Homo sapien
tcatagttaaagaagatatggagtactgaactt

SEQ ID NO: 273165 - DNA, 33 bp, Homo sapien
ctttaactatgagagaagctttaataacagagg

SEQ ID NO: 273166 - DNA, 33 bp, Homo sapien
ctttaactatgagagacgctttaataacagagg

SEQ ID NO: 273167 - DNA, 33 bp, Homo sapien
tttttgtcttggagaagaggtaaacataggagt

SEQ ID NO: 273168 - DNA, 33 bp, Homo sapien
tttttgtcttggagaataggtaaacataggagt

SEQ ID NO: 273169 - DNA, 33 bp, Homo sapien
aattcatggaggaggaaaatgaatcattgacag

SEQ ID NO: 273170 - DNA, 33 bp, Homo sapien
aattcatggaggaggagaatgaatcattgacag

SEQ ID NO: 273171 - DNA, 33 bp, Homo sapien
gcttctagattcaaagacttgctgtcaatgatt

SEQ ID NO: 273172 - DNA, 33 bp, Homo sapien
gcttctagattcaaagtcttgctgtcaatgatt

SEQ ID NO: 273173 - DNA, 33 bp, Homo sapien
ctttaatcacagaatacgtttgcaaagattgtg

SEQ ID NO: 273174 - DNA, 33 bp, Homo sapien
ctttaatcacagaatatgtttgcaaagattgtg

SEQ ID NO: 273175 - DNA, 33 bp, Homo sapien
tgaaatcagccaaaccgcctgtaagaaaatgcc

SEQ ID NO: 273176 - DNA, 33 bp, Homo sapien
tgaaatcagccaaacctcctgtaagaaaatgcc

SEQ ID NO: 273177 - DNA, 33 bp, Homo sapien
gtactctgagttttaaaggagcctcccatatga

SEQ ID NO: 273178 - DNA, 33 bp, Homo sapien
gtactctgagttttaatggagcctcccatatga

SEQ ID NO: 273179 - DNA, 33 bp, Homo sapien
cctgtggagcagttgaatatactgtctaaggcc

SEQ ID NO: 273180 - DNA, 33 bp, Homo sapien
cctgtggagcagttgagtatactgtctaaggcc

SEQ ID NO: 273181 - DNA, 33 bp, Homo sapien
gatatctcttggttcacgagccctttatacaaa

SEQ ID NO: 273182 - DNA, 33 bp, Homo sapien
gatatctcttggttcatgagccctttatacaaa

SEQ ID NO: 273183 - DNA, 33 bp, Homo sapien
ataattaacaccttccccatagctgatggctgt

SEQ ID NO: 273184 - DNA, 33 bp, Homo sapien
ataattaacaccttccgcatagctgatggctgt

SEQ ID NO: 273185 - DNA, 33 bp, Homo sapien
atctacaaaatgtctacggtaagtattatattt

SEQ ID NO: 273186 - DNA, 33 bp, Homo sapien
atctacaaaatgtctatggtaagtattatattt

SEQ ID NO: 273187 - DNA, 33 bp, Homo sapien
ttttacctttaaaccactgcttatagtagttaa

SEQ ID NO: 273188 - DNA, 33 bp, Homo sapien
ttttacctttaaaccattgcttatagtagttaa

SEQ ID NO: 273189 - DNA, 33 bp, Homo sapien
tttatttaattgtgtaaccaaattcattcagga

SEQ ID NO: 273190 - DNA, 33 bp, Homo sapien
tttatttaattgtgtatccaaattcattcagga

SEQ ID NO: 273191 - DNA, 33 bp, Homo sapien
cttactgagaaaaggcaccaacggttttaggtt

SEQ ID NO: 273192 - DNA, 33 bp, Homo sapien
cttactgagaaaaggcgccaacggttttaggtt

SEQ ID NO: 273193 - DNA, 33 bp, Homo sapien
gagaaaatcgtgtactaaggtcttcaggaatca

SEQ ID NO: 273194 - DNA, 33 bp, Homo sapien
gagaaaatcgtgtactgaggtcttcaggaatca

SEQ ID NO: 273195 - DNA, 33 bp, Homo sapien
agacagcatgatagaaaaaacgactactaagtt

SEQ ID NO: 273196 - DNA, 33 bp, Homo sapien
agacagcatgatagaacaaacgactactaagtt

SEQ ID NO: 273197 - DNA, 33 bp, Homo sapien
cttgaaatatgcctaaacggagttaatgtatgt

SEQ ID NO: 273198 - DNA, 33 bp, Homo sapien
cttgaaatatgcctaatcggagttaatgtatgt

SEQ ID NO: 273199 - DNA, 33 bp, Homo sapien
gtccaatcaagggtccacttatcagctataatc

SEQ ID NO: 273200 - DNA, 33 bp, Homo sapien
gtccaatcaagggtccgcttatcagctataatc

SEQ ID NO: 273201 - DNA, 33 bp, Homo sapien
tgttgtttgttcttgacgaaggttttaagtgaa

SEQ ID NO: 273202 - DNA, 33 bp, Homo sapien
tgttgtttgttcttgatgaaggttttaagtgaa

SEQ ID NO: 273203 - DNA, 33 bp, Homo sapien
tgtttcatagcccagaatcaaactcaggctttc

SEQ ID NO: 273204 - DNA, 33 bp, Homo sapien
tgtttcatagcccagattcaaactcaggctttc

SEQ ID NO: 273205 - DNA, 33 bp, Homo sapien
attcgtatgggctatcacgatgacatttagatt

SEQ ID NO: 273206 - DNA, 33 bp, Homo sapien
attcgtatgggctatcccgatgacatttagatt

SEQ ID NO: 273207 - DNA, 33 bp, Homo sapien
tttgttgtcatggcaaatctgtaagaaatctca

SEQ ID NO: 273208 - DNA, 33 bp, Homo sapien
tttgttgtcatggcaactctgtaagaaatctca

SEQ ID NO: 273209 - DNA, 33 bp, Homo sapien
aaactcataccagtacagaaaaaaaatgaaatg

SEQ ID NO: 273210 - DNA, 33 bp, Homo sapien
aaactcataccagtacggaaaaaaaatgaaatg

SEQ ID NO: 273211 - DNA, 33 bp, Homo sapien
taattgagtgtcattacgatcagagaaaaacag

SEQ ID NO: 273212 - DNA, 33 bp, Homo sapien
taattgagtgtcattatgatcagagaaaaacag

SEQ ID NO: 273213 - DNA, 33 bp, Homo sapien
taaaggcaactttaaaatatccaagtatctttt

SEQ ID NO: 273214 - DNA, 33 bp, Homo sapien
taaaggcaactttaaattatccaagtatctttt

SEQ ID NO: 273215 - DNA, 33 bp, Homo sapien
agtctttaagctagaaaaaatggtgtaaccaaa

SEQ ID NO: 273216 - DNA, 33 bp, Homo sapien
agtctttaagctagaagaaatggtgtaaccaaa

SEQ ID NO: 273217 - DNA, 33 bp, Homo sapien
agcactattcatgatgccaccataaaagggaaa

SEQ ID NO: 273218 - DNA, 33 bp, Homo sapien
agcactattcatgatggcaccataaaagggaaa

SEQ ID NO: 273219 - DNA, 33 bp, Homo sapien
ttgccattgtatttcccgagctactcactaggt

SEQ ID NO: 273220 - DNA, 33 bp, Homo sapien
ttgccattgtatttcctgagctactcactaggt

SEQ ID NO: 273221 - DNA, 33 bp, Homo sapien
ttcaaatcataatgacccaaaacaacaattgtc

SEQ ID NO: 273222 - DNA, 33 bp, Homo sapien
ttcaaatcataatgactcaaaacaacaattgtc

SEQ ID NO: 273223 - DNA, 33 bp, Homo sapien
tttttgttttatggaaaagtgtgtggtaacttg

SEQ ID NO: 273224 - DNA, 33 bp, Homo sapien
tttttgttttatggaatagtgtgtggtaacttg

SEQ ID NO: 273225 - DNA, 33 bp, Homo sapien
atgattgactctcccacgtgaactttcaggatt

SEQ ID NO: 273226 - DNA, 33 bp, Homo sapien
atgattgactctcccatgtgaactttcaggatt

SEQ ID NO: 273227 - DNA, 33 bp, Homo sapien
cttctcgaaaggtgcacggttttttgatttttg

SEQ ID NO: 273228 - DNA, 33 bp, Homo sapien
cttctcgaaaggtgcatggttttttgatttttg

SEQ ID NO: 273229 - DNA, 33 bp, Homo sapien
cctcacacaggaacaccaatttaacagctgtct

SEQ ID NO: 273230 - DNA, 33 bp, Homo sapien
cctcacacaggaacacgaatttaacagctgtct

SEQ ID NO: 273231 - DNA, 33 bp, Homo sapien
ggatctattttcattcaagagcagccatattga

SEQ ID NO: 273232 - DNA, 33 bp, Homo sapien
ggatctattttcattcgagagcagccatattga

SEQ ID NO: 273233 - DNA, 33 bp, Homo sapien
ttctctcagttgctgtaaagttttgactatttt

SEQ ID NO: 273234 - DNA, 33 bp, Homo sapien
ttctctcagttgctgtcaagttttgactatttt

SEQ ID NO: 273235 - DNA, 33 bp, Homo sapien
tcaagattaatgctgacccagggatcctggtag

SEQ ID NO: 273236 - DNA, 33 bp, Homo sapien
tcaagattaatgctgagccagggatcctggtag

SEQ ID NO: 273237 - DNA, 33 bp, Homo sapien
tcaaaattcagaaaaaattgtgtccttaattga

SEQ ID NO: 273238 - DNA, 33 bp, Homo sapien
tcaaaattcagaaaaatttgtgtccttaattga

SEQ ID NO: 273239 - DNA, 33 bp, Homo sapien
ggtaatggatagaggccaaaaagatgccaatgt

SEQ ID NO: 273240 - DNA, 33 bp, Homo sapien
ggtaatggatagaggctaaaaagatgccaatgt

SEQ ID NO: 273241 - DNA, 33 bp, Homo sapien
atatgtcttcaaaaatgagataggtgcatacat

SEQ ID NO: 273242 - DNA, 33 bp, Homo sapien
atatgtcttcaaaaattagataggtgcatacat

SEQ ID NO: 273243 - DNA, 33 bp, Homo sapien
attgtgacgagtgtaacataacaatgtaagatg

SEQ ID NO: 273244 - DNA, 33 bp, Homo sapien
attgtgacgagtgtaatataacaatgtaagatg

SEQ ID NO: 273245 - DNA, 33 bp, Homo sapien
taaaaattgggcaaaaggtctgaagtgatacat

SEQ ID NO: 273246 - DNA, 33 bp, Homo sapien
taaaaattgggcaaaatgtctgaagtgatacat

SEQ ID NO: 273247 - DNA, 33 bp, Homo sapien
ccccaatgggccataaaagaattgtcctttggc

SEQ ID NO: 273248 - DNA, 33 bp, Homo sapien
ccccaatgggccataagagaattgtcctttggc

SEQ ID NO: 273249 - DNA, 33 bp, Homo sapien
gagaagacagacagtccataaacacataaaaac

SEQ ID NO: 273250 - DNA, 33 bp, Homo sapien
gagaagacagacagtcgataaacacataaaaac

SEQ ID NO: 273251 - DNA, 33 bp, Homo sapien
agctataacaaattatcagaagaatgactttac

SEQ ID NO: 273252 - DNA, 33 bp, Homo sapien
agctataacaaattatgagaagaatgactttac

SEQ ID NO: 273253 - DNA, 33 bp, Homo sapien
gtaaatctttctaccaatctgtatcattgcaca

SEQ ID NO: 273254 - DNA, 33 bp, Homo sapien
gtaaatctttctaccagtctgtatcattgcaca

SEQ ID NO: 273255 - DNA, 33 bp, Homo sapien
tcaacattaaccatcaaaatgtggtatctttaa

SEQ ID NO: 273256 - DNA, 33 bp, Homo sapien
tcaacattaaccatcacaatgtggtatctttaa

SEQ ID NO: 273257 - DNA, 33 bp, Homo sapien
taaaaggacaaaaaaaattagctcagcatggtg

SEQ ID NO: 273258 - DNA, 33 bp, Homo sapien
taaaaggacaaaaaaatttagctcagcatggtg

SEQ ID NO: 273259 - DNA, 33 bp, Homo sapien
gattactatctttcccaaattccactgtcagtc

SEQ ID NO: 273260 - DNA, 33 bp, Homo sapien
gattactatctttcccgaattccactgtcagtc

SEQ ID NO: 273261 - DNA, 33 bp, Homo sapien
aggaacagggtcatataaagaagtcacaagttt

SEQ ID NO: 273262 - DNA, 33 bp, Homo sapien
aggaacagggtcatatgaagaagtcacaagttt

SEQ ID NO: 273263 - DNA, 33 bp, Homo sapien
tctttcttgcttaaggaattgttgaccacaaaa

SEQ ID NO: 273264 - DNA, 33 bp, Homo sapien
tctttcttgcttaagggattgttgaccacaaaa

SEQ ID NO: 273265 - DNA, 33 bp, Homo sapien
tatctgagatgttacacagatccgagttgcaca

SEQ ID NO: 273266 - DNA, 33 bp, Homo sapien
tatctgagatgttacagagatccgagttgcaca

SEQ ID NO: 273267 - DNA, 33 bp, Homo sapien
ctcctacactcaactaaaacaattgagatgaaa

SEQ ID NO: 273268 - DNA, 33 bp, Homo sapien
ctcctacactcaactataacaattgagatgaaa

SEQ ID NO: 273269 - DNA, 33 bp, Homo sapien
gagtctaggcttagaacacttcacttaccctaa

SEQ ID NO: 273270 - DNA, 33 bp, Homo sapien
gagtctaggcttagaatacttcacttaccctaa

SEQ ID NO: 273271 - DNA, 33 bp, Homo sapien
aaaacataccattaacacagtgaaaatatacat

SEQ ID NO: 273272 - DNA, 33 bp, Homo sapien
aaaacataccattaacgcagtgaaaatatacat

SEQ ID NO: 273273 - DNA, 33 bp, Homo sapien
ataatcagtgacaaaacataagttgacttcttt

SEQ ID NO: 273274 - DNA, 33 bp, Homo sapien
ataatcagtgacaaaagataagttgacttcttt

SEQ ID NO: 273275 - DNA, 33 bp, Homo sapien
ttttaacatctgcataataatccattaaggtat

SEQ ID NO: 273276 - DNA, 33 bp, Homo sapien
ttttaacatctgcatagtaatccattaaggtat

SEQ ID NO: 273277 - DNA, 33 bp, Homo sapien
tttgtttacagtagaactattttccatctgaat

SEQ ID NO: 273278 - DNA, 33 bp, Homo sapien
tttgtttacagtagaagtattttccatctgaat

SEQ ID NO: 273279 - DNA, 33 bp, Homo sapien
agcaaggagatggagaaatagggagtcctgtat

SEQ ID NO: 273280 - DNA, 33 bp, Homo sapien
agcaaggagatggagagatagggagtcctgtat

SEQ ID NO: 273281 - DNA, 33 bp, Homo sapien
accaaaattccacatcaaaatttagggcacttc

SEQ ID NO: 273282 - DNA, 33 bp, Homo sapien
accaaaattccacatcgaaatttagggcacttc

SEQ ID NO: 273283 - DNA, 33 bp, Homo sapien
atgtcctgatacaacaccgaggtcgtaaaccct

SEQ ID NO: 273284 - DNA, 33 bp, Homo sapien
atgtcctgatacaacatcgaggtcgtaaaccct

SEQ ID NO: 273285 - DNA, 33 bp, Homo sapien; identical to SEQ ID NO: 273283

SEQ ID NO: 273286 - DNA, 33 bp, Homo sapien; identical to SEQ ID NO: 273284

SEQ ID NO: 273287 - DNA, 33 bp, Homo sapien
tgtatactttggatcacagtccgttatgtaata

SEQ ID NO: 273288 - DNA, 33 bp, Homo sapien
tgtatactttggatcatagtccgttatgtaata

SEQ ID NO: 273289 - DNA, 33 bp, Homo sapien
ggatcagatctgcaatgaattattttctgactt

SEQ ID NO: 273290 - DNA, 33 bp, Homo sapien
ggatcagatctgcaattaattattttctgactt

SEQ ID NO: 273291 - DNA, 33 bp, Homo sapien
tagaaaaccaaaaagcactaaatctattccata

SEQ ID NO: 273292 - DNA, 33 bp, Homo sapien
tagaaaaccaaaaagcgctaaatctattccata

SEQ ID NO: 273293 - DNA, 33 bp, Homo sapien
ctacaatattgcccaaaaagcacacatctaaga

SEQ ID NO: 273294 - DNA, 33 bp, Homo sapien
ctacaatattgcccaacaagcacacatctaaga

SEQ ID NO: 273295 - DNA, 33 bp, Homo sapien
catggcctcttcaacacagaataaatattgaac

SEQ ID NO: 273296 - DNA, 33 bp, Homo sapien
catggcctcttcaacagagaataaatattgaac

SEQ ID NO: 273297 - DNA, 33 bp, Homo sapien
agaaatgtgcatcctcaatatgattttcctgtg

SEQ ID NO: 273298 - DNA, 33 bp, Homo sapien
agaaatgtgcatcctcgatatgattttcctgtg

SEQ ID NO: 273299 - DNA, 33 bp, Homo sapien
tagggatgctgttgaaataattggagtgaaaga

SEQ ID NO: 273300 - DNA, 33 bp, Homo sapien
tagggatgctgttgaagtaattggagtgaaaga

SEQ ID NO: 273301 - DNA, 33 bp, Homo sapien
cacactgggctactggaaatattaaaagaagta

SEQ ID NO: 273302 - DNA, 33 bp, Homo sapien
cacactgggctactgggaatattaaaagaagta

SEQ ID NO: 273303 - DNA, 33 bp, Homo sapien
ataaaagtagtaatcacaactctagacctcaag

SEQ ID NO: 273304 - DNA, 33 bp, Homo sapien
ataaaagtagtaatcataactctagacctcaag

SEQ ID NO: 273305 - DNA, 33 bp, Homo sapien
taagctctgagtcaacggccataccctcttgtc

SEQ ID NO: 273306 - DNA, 33 bp, Homo sapien
taagctctgagtcaactgccataccctcttgtc

SEQ ID NO: 273307 - DNA, 33 bp, Homo sapien
aatcttaacaatgtacactgtgagttcagtatt

SEQ ID NO: 273308 - DNA, 33 bp, Homo sapien
aatcttaacaatgtaccctgtgagttcagtatt

SEQ ID NO: 273309 - DNA, 33 bp, Homo sapien
aagacctaaattttgacagtggaataaatgtaa

SEQ ID NO: 273310 - DNA, 33 bp, Homo sapien
aagacctaaattttgatagtggaataaatgtaa

SEQ ID NO: 273311 - DNA, 33 bp, Homo sapien
aggcaaaacagatcagaaattaatggtcccatc

SEQ ID NO: 273312 - DNA, 33 bp, Homo sapien
aggcaaaacagatcagcaattaatggtcccatc

SEQ ID NO: 273313 - DNA, 33 bp, Homo sapien
gttgttatttttagcacagatgtagactacatt

SEQ ID NO: 273314 - DNA, 33 bp, Homo sapien
gttgttatttttagcagagatgtagactacatt

SEQ ID NO: 273315 - DNA, 33 bp, Homo sapien
tcattttttgttcagagagctggacagcattcc

SEQ ID NO: 273316 - DNA, 33 bp, Homo sapien
tcattttttgttcagatagctggacagcattcc

SEQ ID NO: 273317 - DNA, 33 bp, Homo sapien
ttgcaaagttgacacacagctatcaaattaaag

SEQ ID NO: 273318 - DNA, 33 bp, Homo sapien
ttgcaaagttgacacagagctatcaaattaaag

SEQ ID NO: 273319 - DNA, 33 bp, Homo sapien
tgaacttgtgtaataaccattatgctattaggt

SEQ ID NO: 273320 - DNA, 33 bp, Homo sapien
tgaacttgtgtaataatcattatgctattaggt

SEQ ID NO: 273321 - DNA, 33 bp, Homo sapien
caggagagaggaatcacagcgaggtacactctg

SEQ ID NO: 273322 - DNA, 33 bp, Homo sapien
caggagagaggaatcatagcgaggtacactctg

SEQ ID NO: 273323 - DNA, 33 bp, Homo sapien
ggaagaactcacttccaatttgacacagttttg

SEQ ID NO: 273324 - DNA, 33 bp, Homo sapien
ggaagaactcacttccgatttgacacagttttg

SEQ ID NO: 273325 - DNA, 33 bp, Homo sapien
ttgttaccttgattaaagctctgaattcttctg

SEQ ID NO: 273326 - DNA, 33 bp, Homo sapien
ttgttaccttgattaacgctctgaattcttctg

SEQ ID NO: 273327 - DNA, 33 bp, Homo sapien
actgattttgctacaaacagtggcatatttaat

SEQ ID NO: 273328 - DNA, 33 bp, Homo sapien
actgattttgctacaagcagtggcatatttaat

SEQ ID NO: 273329 - DNA, 33 bp, Homo sapien
ctgatagatatttaccaaacatttcaggtaaga

SEQ ID NO: 273330 - DNA, 33 bp, Homo sapien
ctgatagatatttaccgaacatttcaggtaaga

SEQ ID NO: 273331 - DNA, 33 bp, Homo sapien
actctattaacacacactgggctgttgatgatc

SEQ ID NO: 273332 - DNA, 33 bp, Homo sapien
actctattaacacacattgggctgttgatgatc

SEQ ID NO: 273333 - DNA, 33 bp, Homo sapien
ctggatggcagaacaagtagaggagaataaatt

SEQ ID NO: 273334 - DNA, 33 bp, Homo sapien
ctggatggcagaacaattagaggagaataaatt

SEQ ID NO: 273335 - DNA, 33 bp, Homo sapien
aaactgatgattaacccatgcttggagaatctg

SEQ ID NO: 273336 - DNA, 33 bp, Homo sapien
aaactgatgattaacctatgcttggagaatctg

SEQ ID NO: 273337 - DNA, 33 bp, Homo sapien
cagatttgaacaccacagatttatagtaatgga

SEQ ID NO: 273338 - DNA, 33 bp, Homo sapien
cagatttgaacaccaccgatttatagtaatgga

SEQ ID NO: 273339 - DNA, 33 bp, Homo sapien
ttatgtgaatttattacggcaatcctagaaaac

SEQ ID NO: 273340 - DNA, 33 bp, Homo sapien
ttatgtgaatttattatggcaatcctagaaaac

SEQ ID NO: 273341 - DNA, 33 bp, Homo sapien
tgtatcctttaactaaacaattttgtctgaaaa

SEQ ID NO: 273342 - DNA, 33 bp, Homo sapien
tgtatcctttaactaatcaattttgtctgaaaa

SEQ ID NO: 273343 - DNA, 33 bp, Homo sapien
tgttttgtgaggtcttaaaagcgaaatatttgg

SEQ ID NO: 273344 - DNA, 33 bp, Homo sapien
tgttttgtgaggtcttcaaagcgaaatatttgg

SEQ ID NO: 273345 - DNA, 33 bp, Homo sapien
tattttttcatgctgaccctgtgtaagtctttg

SEQ ID NO: 273346 - DNA, 33 bp, Homo sapien
tattttttcatgctgatcctgtgtaagtctttg

SEQ ID NO: 273347 - DNA, 33 bp, Homo sapien
cctcatatacataataaatgaataccgtgattc

SEQ ID NO: 273348 - DNA, 33 bp, Homo sapien
cctcatatacataatacatgaataccgtgattc

SEQ ID NO: 273349 - DNA, 33 bp, Homo sapien; identical to SEQ ID NO: 273347

SEQ ID NO: 273350 - DNA, 33 bp, Homo sapien; identical to SEQ ID NO: 273348

SEQ ID NO: 273351 - DNA, 33 bp, Homo sapien
tggagcctggactttacattgaacattcaaaat

SEQ ID NO: 273352 - DNA, 33 bp, Homo sapien
tggagcctggactttatattgaacattcaaaat

SEQ ID NO: 273353 - DNA, 33 bp, Homo sapien
ctctgcatatagcataaggagcacagtgcagct

SEQ ID NO: 273354 - DNA, 33 bp, Homo sapien
ctctgcatatagcatacggagcacagtgcagct

SEQ ID NO: 273355 - DNA, 33 bp, Homo sapien
gcagacaaaaatgccacagaattcaagcaagaa

SEQ ID NO: 273356 - DNA, 33 bp, Homo sapien
gcagacaaaaatgccagagaattcaagcaagaa

SEQ ID NO: 273357 - DNA, 33 bp, Homo sapien
ttgacttgactgacataataaggacaattcttt

SEQ ID NO: 273358 - DNA, 33 bp, Homo sapien
ttgacttgactgacatcataaggacaattcttt

SEQ ID NO: 273359 - DNA, 33 bp, Homo sapien
gttcttgtttttcttccatgagccaaataaatg

SEQ ID NO: 273360 - DNA, 33 bp, Homo sapien
gttcttgtttttcttctatgagccaaataaatg

SEQ ID NO: 273361 - DNA, 33 bp, Homo sapien
ataattctcagcctggacatgcaaagaatataa

SEQ ID NO: 273362 - DNA, 33 bp, Homo sapien
ataattctcagcctggccatgcaaagaatataa

SEQ ID NO: 273363 - DNA, 33 bp, Homo sapien
tcaaggatgtggccaaataaccatttaataaag

SEQ ID NO: 273364 - DNA, 33 bp, Homo sapien
tcaaggatgtggccaagtaaccatttaataaag

SEQ ID NO: 273365 - DNA, 33 bp, Homo sapien
tcacaatgaaattcaactggaaatcaacccctg

SEQ ID NO: 273366 - DNA, 33 bp, Homo sapien
tcacaatgaaattcaattggaaatcaacccctg

SEQ ID NO: 273367 - DNA, 33 bp, Homo sapien
tctctgcaaaaaaggaaacattgaagcagaaaa

SEQ ID NO: 273368 - DNA, 33 bp, Homo sapien
tctctgcaaaaaaggagacattgaagcagaaaa

SEQ ID NO: 273369 - DNA, 33 bp, Homo sapien
gagactgatatttaaaaagtggaaaaatgaatg

SEQ ID NO: 273370 - DNA, 33 bp, Homo sapien
gagactgatatttaaacagtggaaaaatgaatg

SEQ ID NO: 273371 - DNA, 33 bp, Homo sapien
ttcatagaaatagtcaactcattgctgaagata

SEQ ID NO: 273372 - DNA, 33 bp, Homo sapien
ttcatagaaatagtcagctcattgctgaagata

SEQ ID NO: 273373 - DNA, 33 bp, Homo sapien
attgtaaggatcatcacatgaaaacttttgtct

SEQ ID NO: 273374 - DNA, 33 bp, Homo sapien
attgtaaggatcatcatatgaaaacttttgtct

SEQ ID NO: 273375 - DNA, 33 bp, Homo sapien
atattttggatcatcacgaattcctgtcccaaa

SEQ ID NO: 273376 - DNA, 33 bp, Homo sapien
atattttggatcatcatgaattcctgtcccaaa

SEQ ID NO: 273377 - DNA, 33 bp, Homo sapien
gtgagaacggtcactaaaaaatttcccacaaac

SEQ ID NO: 273378 - DNA, 33 bp, Homo sapien
gtgagaacggtcactacaaaatttcccacaaac

SEQ ID NO: 273379 - DNA, 33 bp, Homo sapien
agacagacatacagcaagaagatagtggcacat

SEQ ID NO: 273380 - DNA, 33 bp, Homo sapien
agacagacatacagcaggaagatagtggcacat

SEQ ID NO: 273381 - DNA, 33 bp, Homo sapien
ggccgcctgggactaacttaatcggttcataca

SEQ ID NO: 273382 - DNA, 33 bp, Homo sapien
ggccgcctgggactaatttaatcggttcataca

SEQ ID NO: 273383 - DNA, 33 bp, Homo sapien
gtctaggccatgaggactacactttctgagcaa

SEQ ID NO: 273384 - DNA, 33 bp, Homo sapien
gtctaggccatgaggattacactttctgagcaa

SEQ ID NO: 273385 - DNA, 33 bp, Homo sapien
aaaataataagcttcccagacccatcatcatga

SEQ ID NO: 273386 - DNA, 33 bp, Homo sapien
aaaataataagcttcctagacccatcatcatga

SEQ ID NO: 273387 - DNA, 33 bp, Homo sapien
agaaaaaactctgaaaatgctgtaaaaagccct

SEQ ID NO: 273388 - DNA, 33 bp, Homo sapien
agaaaaaactctgaaattgctgtaaaaagccct

SEQ ID NO: 273389 - DNA, 33 bp, Homo sapien
agtggagttcagcagacagcttctgaaattccc

SEQ ID NO: 273390 - DNA, 33 bp, Homo sapien
agtggagttcagcagagagcttctgaaattccc

SEQ ID NO: 273391 - DNA, 33 bp, Homo sapien
aggctcagtgtcattcaaggcaattatttcaaa

SEQ ID NO: 273392 - DNA, 33 bp, Homo sapien
aggctcagtgtcattcgaggcaattatttcaaa

SEQ ID NO: 273393 - DNA, 33 bp, Homo sapien
aaaaaggtgaaacttaataagaaatctgtatga

SEQ ID NO: 273394 - DNA, 33 bp, Homo sapien
aaaaaggtgaaacttagtaagaaatctgtatga

SEQ ID NO: 273395 - DNA, 33 bp, Homo sapien
gataattttgactacaataactatcaataacca

SEQ ID NO: 273396 - DNA, 33 bp, Homo sapien
gataattttgactacattaactatcaataacca

SEQ ID NO: 273397 - DNA, 33 bp, Homo sapien
cctagtctatacaaaaatcacttcttcagtatg

SEQ ID NO: 273398 - DNA, 33 bp, Homo sapien
cctagtctatacaaaagtcacttcttcagtatg

SEQ ID NO: 273399 - DNA, 33 bp, Homo sapien
tccaatactacatgacaatcctaagcctgtatg

SEQ ID NO: 273400 - DNA, 33 bp, Homo sapien
tccaatactacatgacgatcctaagcctgtatg

SEQ ID NO: 273401 - DNA, 33 bp, Homo sapien
agaagtgaggtaactgcatgacataatggccat

SEQ ID NO: 273402 - DNA, 33 bp, Homo sapien
agaagtgaggtaactgtatgacataatggccat

SEQ ID NO: 273403 - DNA, 33 bp, Homo sapien
aaacacttatcgaaatcagataaaggtcaataa

SEQ ID NO: 273404 - DNA, 33 bp, Homo sapien
aaacacttatcgaaatgagataaaggtcaataa

SEQ ID NO: 273405 - DNA, 33 bp, Homo sapien
ctagagccaatgattcaaagattttaaatatgt

SEQ ID NO: 273406 - DNA, 33 bp, Homo sapien
ctagagccaatgattccaagattttaaatatgt

SEQ ID NO: 273407 - DNA, 33 bp, Homo sapien
tctcaattaattccaaacaaggacagtaaagag

SEQ ID NO: 273408 - DNA, 33 bp, Homo sapien
tctcaattaattccaagcaaggacagtaaagag

SEQ ID NO: 273409 - DNA, 33 bp, Homo sapien
aacaatagataccagaaagcttgttccttctct

SEQ ID NO: 273410 - DNA, 33 bp, Homo sapien
aacaatagataccagacagcttgttccttctct

SEQ ID NO: 273411 - DNA, 33 bp, Homo sapien
agtgatatagttttggccatttgagtagaatat

SEQ ID NO: 273412 - DNA, 33 bp, Homo sapien
agtgatatagttttgggcatttgagtagaatat

SEQ ID NO: 273413 - DNA, 33 bp, Homo sapien
atctatttactcttacaatgcctggagtatcag

SEQ ID NO: 273414 - DNA, 33 bp, Homo sapien
atctatttactcttacgatgcctggagtatcag

SEQ ID NO: 273415 - DNA, 33 bp, Homo sapien
tatactggataatttacaagtcagaaatttgcg

SEQ ID NO: 273416 - DNA, 33 bp, Homo sapien
tatactggataatttataagtcagaaatttgcg

SEQ ID NO: 273417 - DNA, 33 bp, Homo sapien
tttttagatggtgttgaaaaactcttaaagctt

SEQ ID NO: 273418 - DNA, 33 bp, Homo sapien
tttttagatggtgttgcaaaactcttaaagctt

SEQ ID NO: 273419 - DNA, 33 bp, Homo sapien
aattctccattatgaaagtgaatgtccaattaa

SEQ ID NO: 273420 - DNA, 33 bp, Homo sapien
aattctccattatgaatgtgaatgtccaattaa

SEQ ID NO: 273421 - DNA, 33 bp, Homo sapien
agacctgaaggaggcaagggagtaagtcatgaa

SEQ ID NO: 273422 - DNA, 33 bp, Homo sapien
agacctgaaggaggcaggggagtaagtcatgaa

SEQ ID NO: 273423 - DNA, 33 bp, Homo sapien
aaaaatgaacaaacggaatcacatcaagttaca

SEQ ID NO: 273424 - DNA, 33 bp, Homo sapien
aaaaatgaacaaacgggatcacatcaagttaca

SEQ ID NO: 273425 - DNA, 33 bp, Homo sapien
ttggtaacaaagatgacagtcagcaaaataatc

SEQ ID NO: 273426 - DNA, 33 bp, Homo sapien
ttggtaacaaagatgagagtcagcaaaataatc

SEQ ID NO: 273427 - DNA, 33 bp, Homo sapien
ctcctttaattctagccgctaagttatattcta

SEQ ID NO: 273428 - DNA, 33 bp, Homo sapien
ctcctttaattctagctgctaagttatattcta

SEQ ID NO: 273429 - DNA, 33 bp, Homo sapien
aaatagcttatagttaaacaccaaatatcttct

SEQ ID NO: 273430 - DNA, 33 bp, Homo sapien
aaatagcttatagttatacaccaaatatcttct

SEQ ID NO: 273431 - DNA, 33 bp, Homo sapien
gttacttgacaatacagtagtcttcctttatct

SEQ ID NO: 273432 - DNA, 33 bp, Homo sapien
gttacttgacaatacattagtcttcctttatct

SEQ ID NO: 273433 - DNA, 33 bp, Homo sapien
ggttagtggttgtcacacagatcaaatggccca

SEQ ID NO: 273434 - DNA, 33 bp, Homo sapien
ggttagtggttgtcacgcagatcaaatggccca

SEQ ID NO: 273435 - DNA, 33 bp, Homo sapien
atatcctacacatagacggttgtgttatgtatg

SEQ ID NO: 273436 - DNA, 33 bp, Homo sapien
atatcctacacatagatggttgtgttatgtatg

SEQ ID NO: 273437 - DNA, 33 bp, Homo sapien
actaagttctattgcccctgggactaagttcaa

SEQ ID NO: 273438 - DNA, 33 bp, Homo sapien
actaagttctattgcctctgggactaagttcaa

SEQ ID NO: 273439 - DNA, 33 bp, Homo sapien
cctcatcttgaaccaccctttcccttaatgtgc

SEQ ID NO: 273440 - DNA, 33 bp, Homo sapien
cctcatcttgaaccacgctttcccttaatgtgc

SEQ ID NO: 273441 - DNA, 33 bp, Homo sapien
ttaacatggttaacaacatcctgaatgacatat

SEQ ID NO: 273442 - DNA, 33 bp, Homo sapien
ttaacatggttaacaatatcctgaatgacatat

SEQ ID NO: 273443 - DNA, 33 bp, Homo sapien
tgtgatggtacttgtacagaacaatggtcaagt

SEQ ID NO: 273444 - DNA, 33 bp, Homo sapien
tgtgatggtacttgtatagaacaatggtcaagt

SEQ ID NO: 273445 - DNA, 33 bp, Homo sapien
ataatagacaggcgaaaaaatttatgtccatat

SEQ ID NO: 273446 - DNA, 33 bp, Homo sapien
ataatagacaggcgaagaaatttatgtccatat

SEQ ID NO: 273447 - DNA, 33 bp, Homo sapien
caccttgaattgtaataatcctaacgtgtcatg

SEQ ID NO: 273448 - DNA, 33 bp, Homo sapien
caccttgaattgtaatgatcctaacgtgtcatg

SEQ ID NO: 273449 - DNA, 33 bp, Homo sapien
tggtctatctctggaaatacaggaacaagctgt

SEQ ID NO: 273450 - DNA, 33 bp, Homo sapien
tggtctatctctggaactacaggaacaagctgt

SEQ ID NO: 273451 - DNA, 33 bp, Homo sapien
ctttttttctggtataaattcacctcagatgta

SEQ ID NO: 273452 - DNA, 33 bp, Homo sapien
ctttttttctggtatacattcacctcagatgta

SEQ ID NO: 273453 - DNA, 33 bp, Homo sapien
ttagtgtaaatatgagcattagttataggcact

SEQ ID NO: 273454 - DNA, 33 bp, Homo sapien
ttagtgtaaatatgaggattagttataggcact

SEQ ID NO: 273455 - DNA, 33 bp, Homo sapien
tattttagcttttttaccataatcaataacatt

SEQ ID NO: 273456 - DNA, 33 bp, Homo sapien
tattttagcttttttatcataatcaataacatt

SEQ ID NO: 273457 - DNA, 33 bp, Homo sapien
ctgaagttttcaggtaaattttattttggaact

SEQ ID NO: 273458 - DNA, 33 bp, Homo sapien
ctgaagttttcaggtagattttattttggaact

SEQ ID NO: 273459 - DNA, 33 bp, Homo sapien
tttgaagtgagtcagacaaaagaaggctataaa

SEQ ID NO: 273460 - DNA, 33 bp, Homo sapien
tttgaagtgagtcagataaaagaaggctataaa

SEQ ID NO: 273461 - DNA, 33 bp, Homo sapien
aactttctatcttgccactttagttggtaagtc

SEQ ID NO: 273462 - DNA, 33 bp, Homo sapien
aactttctatcttgccgctttagttggtaagtc

SEQ ID NO: 273463 - DNA, 33 bp, Homo sapien
ctcaggttttcaccaacagaagtggaattaaca

SEQ ID NO: 273464 - DNA, 33 bp, Homo sapien
ctcaggttttcaccaatagaagtggaattaaca

SEQ ID NO: 273465 - DNA, 33 bp, Homo sapien
tacctctgtttttaagcattggttttgagagat

SEQ ID NO: 273466 - DNA, 33 bp, Homo sapien
tacctctgtttttaaggattggttttgagagat

SEQ ID NO: 273467 - DNA, 33 bp, Homo sapien
taaatagtctgcctatcaggtgtcatgtgagaa

SEQ ID NO: 273468 - DNA, 33 bp, Homo sapien
taaatagtctgcctattaggtgtcatgtgagaa

SEQ ID NO: 273469 - DNA, 33 bp, Homo sapien
aggctaggaatgagagcccaaatactttacaag

SEQ ID NO: 273470 - DNA, 33 bp, Homo sapien
aggctaggaatgagagtccaaatactttacaag

SEQ ID NO: 273471 - DNA, 33 bp, Homo sapien
ggtatagattacagcaagaaagtgtttactttt

SEQ ID NO: 273472 - DNA, 33 bp, Homo sapien
ggtatagattacagcacgaaagtgtttactttt

SEQ ID NO: 273473 - DNA, 33 bp, Homo sapien
tctgtgtctatgtctacgtgatatttcactata

SEQ ID NO: 273474 - DNA, 33 bp, Homo sapien
tctgtgtctatgtctatgtgatatttcactata

SEQ ID NO: 273475 - DNA, 33 bp, Homo sapien
tagagaacgggttcaactggtctagtgagtatt

SEQ ID NO: 273476 - DNA, 33 bp, Homo sapien
tagagaacgggttcaattggtctagtgagtatt

SEQ ID NO: 273477 - DNA, 33 bp, Homo sapien
gcttagaatctagcaccgtagacacgagagtaa

SEQ ID NO: 273478 - DNA, 33 bp, Homo sapien
gcttagaatctagcactgtagacacgagagtaa

SEQ ID NO: 273479 - DNA, 33 bp, Homo sapien
gaggctgaattgaaagaatcacttgagatcagg

SEQ ID NO: 273480 - DNA, 33 bp, Homo sapien
gaggctgaattgaaaggatcacttgagatcagg

SEQ ID NO: 273481 - DNA, 33 bp, Homo sapien
agttctgcactcaaaacggtaaaattcctctag

SEQ ID NO: 273482 - DNA, 33 bp, Homo sapien
agttctgcactcaaaatggtaaaattcctctag

SEQ ID NO: 273483 - DNA, 33 bp, Homo sapien
ccttggtttttcttcacggcagtaaatctaaca

SEQ ID NO: 273484 - DNA, 33 bp, Homo sapien
ccttggtttttcttcatggcagtaaatctaaca

SEQ ID NO: 273485 - DNA, 33 bp, Homo sapien
ctgattcccagctgtacgactcttggacttcct

SEQ ID NO: 273486 - DNA, 33 bp, Homo sapien
ctgattcccagctgtatgactcttggacttcct

SEQ ID NO: 273487 - DNA, 33 bp, Homo sapien
gtgtgatgttttgtgacgatgaggaagatgata

SEQ ID NO: 273488 - DNA, 33 bp, Homo sapien
gtgtgatgttttgtgatgatgaggaagatgata

SEQ ID NO: 273489 - DNA, 33 bp, Homo sapien
tgttttgaaatgttcaatcacacttttaggggc

SEQ ID NO: 273490 - DNA, 33 bp, Homo sapien
tgttttgaaatgttcagtcacacttttaggggc

SEQ ID NO: 273491 - DNA, 33 bp, Homo sapien
caacaaaccgtggatcaaaatacagcattttct

SEQ ID NO: 273492 - DNA, 33 bp, Homo sapien
caacaaaccgtggatcgaaatacagcattttct

SEQ ID NO: 273493 - DNA, 33 bp, Homo sapien
gagataaatttgcttacgacccctccagagtaa

SEQ ID NO: 273494 - DNA, 33 bp, Homo sapien
gagataaatttgcttatgacccctccagagtaa

SEQ ID NO: 273495 - DNA, 33 bp, Homo sapien
gtaaagccattagggaaggattttttgtgtatt

SEQ ID NO: 273496 - DNA, 33 bp, Homo sapien
gtaaagccattagggagggattttttgtgtatt

SEQ ID NO: 273497 - DNA, 33 bp, Homo sapien
gttaatgcaggtctgacgaagtttaaaagtgct

SEQ ID NO: 273498 - DNA, 33 bp, Homo sapien
gttaatgcaggtctgatgaagtttaaaagtgct

SEQ ID NO: 273499 - DNA, 33 bp, Homo sapien
tttatgtttgacgtaaaaaatggccaggttgtt

SEQ ID NO: 273500 - DNA, 33 bp, Homo sapien
tttatgtttgacgtaagaaatggccaggttgtt

SEQ ID NO: 273501 - DNA, 33 bp, Homo sapien
agttggagtttatgaaattagaaatgttgattt

SEQ ID NO: 273502 - DNA, 33 bp, Homo sapien
agttggagtttatgaagttagaaatgttgattt

SEQ ID NO: 273503 - DNA, 33 bp, Homo sapien
ttgtcatatgtattcactcgtttggcaatactg

SEQ ID NO: 273504 - DNA, 33 bp, Homo sapien
ttgtcatatgtattcattcgtttggcaatactg

SEQ ID NO: 273505 - DNA, 33 bp, Homo sapien
atcttctttttctctaaaatttgaggttatggg

SEQ ID NO: 273506 - DNA, 33 bp, Homo sapien
atcttctttttctctacaatttgaggttatggg

SEQ ID NO: 273507 - DNA, 33 bp, Homo sapien
aaagcaaaagtctatcaagcgtttttccctttg

SEQ ID NO: 273508 - DNA, 33 bp, Homo sapien
aaagcaaaagtctatcgagcgtttttccctttg

SEQ ID NO: 273509 - DNA, 33 bp, Homo sapien
gatccttcctcagtaactccatctctaatccta

SEQ ID NO: 273510 - DNA, 33 bp, Homo sapien
gatccttcctcagtaattccatctctaatccta

SEQ ID NO: 273511 - DNA, 33 bp, Homo sapien
tgaaagtcttgccaacaaaaaatgcctgttggt

SEQ ID NO: 273512 - DNA, 33 bp, Homo sapien
tgaaagtcttgccaacgaaaaatgcctgttggt

SEQ ID NO: 273513 - DNA, 33 bp, Homo sapien
acacacacatatgtaacgtctatataaagtctt

SEQ ID NO: 273514 - DNA, 33 bp, Homo sapien
acacacacatatgtaaggtctatataaagtctt

SEQ ID NO: 273515 - DNA, 33 bp, Homo sapien
tgcttgcttcttacaacgagtttggtttaatag

SEQ ID NO: 273516 - DNA, 33 bp, Homo sapien
tgcttgcttcttacaatgagtttggtttaatag

SEQ ID NO: 273517 - DNA, 33 bp, Homo sapien
tgtccaaagggtcacaaacacttaaaaccatcc

SEQ ID NO: 273518 - DNA, 33 bp, Homo sapien
tgtccaaagggtcacagacacttaaaaccatcc

SEQ ID NO: 273519 - DNA, 33 bp, Homo sapien
tgtctgcctgaggccaataaaagtcaggcaggc

SEQ ID NO: 273520 - DNA, 33 bp, Homo sapien
tgtctgcctgaggccagtaaaagtcaggcaggc

SEQ ID NO: 273521 - DNA, 33 bp, Homo sapien
ataacaatctgtgggacgaaatttttcactgtg

SEQ ID NO: 273522 - DNA, 33 bp, Homo sapien
ataacaatctgtgggatgaaatttttcactgtg

SEQ ID NO: 273523 - DNA, 33 bp, Homo sapien
gggggagagggagcaccatcacttcagctgcct

SEQ ID NO: 273524 - DNA, 33 bp, Homo sapien
gggggagagggagcactatcacttcagctgcct

SEQ ID NO: 273525 - DNA, 33 bp, Homo sapien
ttctggcaatttccagaagtaaattgttgcaga

SEQ ID NO: 273526 - DNA, 33 bp, Homo sapien
ttctggcaatttccaggagtaaattgttgcaga

SEQ ID NO: 273527 - DNA, 33 bp, Homo sapien
atcatgctatatcaacacatagtttccaactta

SEQ ID NO: 273528 - DNA, 33 bp, Homo sapien
atcatgctatatcaacgcatagtttccaactta

SEQ ID NO: 273529 - DNA, 33 bp, Homo sapien
tttttccctaaccaaaagtatatgagagcttat

SEQ ID NO: 273530 - DNA, 33 bp, Homo sapien
tttttccctaaccaaaggtatatgagagcttat

SEQ ID NO: 273531 - DNA, 33 bp, Homo sapien
ttctttttgtctgctgcaatacctggttgctgc

SEQ ID NO: 273532 - DNA, 33 bp, Homo sapien
ttctttttgtctgctgtaatacctggttgctgc

SEQ ID NO: 273533 - DNA, 33 bp, Homo sapien
attgtgcaaaataaagaatctgactctattcct

SEQ ID NO: 273534 - DNA, 33 bp, Homo sapien
attgtgcaaaataaaggatctgactctattcct

SEQ ID NO: 273535 - DNA, 33 bp, Homo sapien
tgaacaaggaggtctacggatgctcagggtcca

SEQ ID NO: 273536 - DNA, 33 bp, Homo sapien
tgaacaaggaggtctatggatgctcagggtcca

SEQ ID NO: 273537 - DNA, 33 bp, Homo sapien
atttaaaatagtcaagcctctttgttgaattga

SEQ ID NO: 273538 - DNA, 33 bp, Homo sapien
atttaaaatagtcaagtctctttgttgaattga

SEQ ID NO: 273539 - DNA, 33 bp, Homo sapien
atacaggaatgtatcaagtggaccaataattgg

SEQ ID NO: 273540 - DNA, 33 bp, Homo sapien
atacaggaatgtatcatgtggaccaataattgg

SEQ ID NO: 273541 - DNA, 33 bp, Homo sapien
atcattaagaattatgacaagtggaaagtgtta

SEQ ID NO: 273542 - DNA, 33 bp, Homo sapien
atcattaagaattatgtcaagtggaaagtgtta

SEQ ID NO: 273543 - DNA, 33 bp, Homo sapien
aattatccttttgagccaatgccctataaactg

SEQ ID NO: 273544 - DNA, 33 bp, Homo sapien
aattatccttttgagctaatgccctataaactg

SEQ ID NO: 273545 - DNA, 33 bp, Homo sapien
tttgtttttttcctccccctgacttatgattaa

SEQ ID NO: 273546 - DNA, 33 bp, Homo sapien
tttgtttttttcctcctcctgacttatgattaa

SEQ ID NO: 273547 - DNA, 33 bp, Homo sapien
tgaaatttattctgcacgaaatgggcaaaccaa

SEQ ID NO: 273548 - DNA, 33 bp, Homo sapien
tgaaatttattctgcaggaaatgggcaaaccaa

SEQ ID NO: 273549 - DNA, 33 bp, Homo sapien
tagggacacactcatgaattggatagaaaaaaa

SEQ ID NO: 273550 - DNA, 33 bp, Homo sapien
tagggacacactcatggattggatagaaaaaaa

SEQ ID NO: 273551 - DNA, 33 bp, Homo sapien
aggattggaatccagcaaacaagatttgaaagt

SEQ ID NO: 273552 - DNA, 33 bp, Homo sapien
aggattggaatccagccaacaagatttgaaagt

SEQ ID NO: 273553 - DNA, 33 bp, Homo sapien
gaggaccctgactaaaagacaaagaaaatagca

SEQ ID NO: 273554 - DNA, 33 bp, Homo sapien
gaggaccctgactaaaggacaaagaaaatagca

SEQ ID NO: 273555 - DNA, 33 bp, Homo sapien
tgagggacataatcccacacttatttattgtct

SEQ ID NO: 273556 - DNA, 33 bp, Homo sapien
tgagggacataatcccgcacttatttattgtct

SEQ ID NO: 273557 - DNA, 33 bp, Homo sapien
gggctagggtttcctgcagtatgcaataacatt

SEQ ID NO: 273558 - DNA, 33 bp, Homo sapien
gggctagggtttcctgtagtatgcaataacatt

SEQ ID NO: 273559 - DNA, 33 bp, Homo sapien
acctgtaggtagcatacacagcatgaatacact

SEQ ID NO: 273560 - DNA, 33 bp, Homo sapien
acctgtaggtagcatatacagcatgaatacact

SEQ ID NO: 273561 - DNA, 33 bp, Homo sapien
aacttcatttgttgaactctggtttgattttca

SEQ ID NO: 273562 - DNA, 33 bp, Homo sapien
aacttcatttgttgaattctggtttgattttca

SEQ ID NO: 273563 - DNA, 33 bp, Homo sapien
catcatgtactatggcagcaaatcctgcaaaat

SEQ ID NO: 273564 - DNA, 33 bp, Homo sapien
catcatgtactatggcggcaaatcctgcaaaat

SEQ ID NO: 273565 - DNA, 33 bp, Homo sapien
ttgttacacttcacatcatactccagtacctca

SEQ ID NO: 273566 - DNA, 33 bp, Homo sapien
ttgttacacttcacattatactccagtacctca

SEQ ID NO: 273567 - DNA, 33 bp, Homo sapien
ctgttctcctaatagcaaatgagtcctgtgaga

SEQ ID NO: 273568 - DNA, 33 bp, Homo sapien
ctgttctcctaatagcgaatgagtcctgtgaga

SEQ ID NO: 273569 - DNA, 33 bp, Homo sapien
attttaaagtatggcacgacccttattgtgtgc

SEQ ID NO: 273570 - DNA, 33 bp, Homo sapien
attttaaagtatggcatgacccttattgtgtgc

SEQ ID NO: 273571 - DNA, 33 bp, Homo sapien
tgcctcttgggtattcaagtttctcactgatga

SEQ ID NO: 273572 - DNA, 33 bp, Homo sapien
tgcctcttgggtattctagtttctcactgatga

SEQ ID NO: 273573 - DNA, 33 bp, Homo sapien
taccccagattttcacactatcttgcatataat

SEQ ID NO: 273574 - DNA, 33 bp, Homo sapien
taccccagattttcacgctatcttgcatataat

SEQ ID NO: 273575 - DNA, 33 bp, Homo sapien
caaattatattgctgacgaaaatgggacaagat

SEQ ID NO: 273576 - DNA, 33 bp, Homo sapien
caaattatattgctgatgaaaatgggacaagat

SEQ ID NO: 273577 - DNA, 33 bp, Homo sapien
ttcttgttatcttgcacgcttatttttaaaacc

SEQ ID NO: 273578 - DNA, 33 bp, Homo sapien
ttcttgttatcttgcaggcttatttttaaaacc

SEQ ID NO: 273579 - DNA, 33 bp, Homo sapien
ctttagaaaacagagacggtgtgcttccagcac

SEQ ID NO: 273580 - DNA, 33 bp, Homo sapien
ctttagaaaacagagatggtgtgcttccagcac

SEQ ID NO: 273581 - DNA, 33 bp, Homo sapien
tggcttcaaagaaaaacgataatatcaaggtct

SEQ ID NO: 273582 - DNA, 33 bp, Homo sapien
tggcttcaaagaaaaatgataatatcaaggtct

SEQ ID NO: 273583 - DNA, 33 bp, Homo sapien
aaaaaaaacacatatgaaagtgcagcttttaac

SEQ ID NO: 273584 - DNA, 33 bp, Homo sapien
aaaaaaaacacatatggaagtgcagcttttaac

SEQ ID NO: 273585 - DNA, 33 bp, Homo sapien
atatatggtctatagaataaagtttggaattca

SEQ ID NO: 273586 - DNA, 33 bp, Homo sapien
atatatggtctatagagtaaagtttggaattca

SEQ ID NO: 273587 - DNA, 33 bp, Homo sapien
ccttctctatctgcttaaaagaaatatgcttac

SEQ ID NO: 273588 - DNA, 33 bp, Homo sapien
ccttctctatctgcttgaaagaaatatgcttac

SEQ ID NO: 273589 - DNA, 33 bp, Homo sapien
gaaacattgtctacaaatgaggtaaatgtaatg

SEQ ID NO: 273590 - DNA, 33 bp, Homo sapien
gaaacattgtctacaactgaggtaaatgtaatg

SEQ ID NO: 273591 - DNA, 33 bp, Homo sapien
agttgttaaaattaaactgcacttgtcaaaata

SEQ ID NO: 273592 - DNA, 33 bp, Homo sapien
agttgttaaaattaaattgcacttgtcaaaata

SEQ ID NO: 273593 - DNA, 33 bp, Homo sapien
tattctgtcattcaaagaagacattgtgtaaat

SEQ ID NO: 273594 - DNA, 33 bp, Homo sapien
tattctgtcattcaaataagacattgtgtaaat

SEQ ID NO: 273595 - DNA, 33 bp, Homo sapien
ccatctctattgacagcctgtactttgaggcaa

SEQ ID NO: 273596 - DNA, 33 bp, Homo sapien
ccatctctattgacagtctgtactttgaggcaa

SEQ ID NO: 273597 - DNA, 33 bp, Homo sapien
gggcttagaggcctacaaggacagaatggtttc

SEQ ID NO: 273598 - DNA, 33 bp, Homo sapien
gggcttagaggcctaccaggacagaatggtttc

SEQ ID NO: 273599 - DNA, 33 bp, Homo sapien
cattcactatcacaagaactgtaacaaggagac

SEQ ID NO: 273600 - DNA, 33 bp, Homo sapien
cattcactatcacaaggactgtaacaaggagac

SEQ ID NO: 273601 - DNA, 33 bp, Homo sapien
tgggggtggtggttaaagttcaaccgaatgagt

SEQ ID NO: 273602 - DNA, 33 bp, Homo sapien
tgggggtggtggttaaggttcaaccgaatgagt

SEQ ID NO: 273603 - DNA, 33 bp, Homo sapien
acataaggagaaatgaaggatgtgacaatatat

SEQ ID NO: 273604 - DNA, 33 bp, Homo sapien
acataaggagaaatgatggatgtgacaatatat

SEQ ID NO: 273605 - DNA, 33 bp, Homo sapien
gtgtcagtctatataacagaggaagagagtcct

SEQ ID NO: 273606 - DNA, 33 bp, Homo sapien
gtgtcagtctatataagagaggaagagagtcct

SEQ ID NO: 273607 - DNA, 33 bp, Homo sapien
tactgctatggaagataaagtgatagactgcaa

SEQ ID NO: 273608 - DNA, 33 bp, Homo sapien
tactgctatggaagatcaagtgatagactgcaa

SEQ ID NO: 273609 - DNA, 33 bp, Homo sapien
tttgcatagaaattgaaataataacagtgatgt

SEQ ID NO: 273610 - DNA, 33 bp, Homo sapien
tttgcatagaaattgagataataacagtgatgt

SEQ ID NO: 273611 - DNA, 33 bp, Homo sapien
aattttgagttgtccactctgccttctttataa

SEQ ID NO: 273612 - DNA, 33 bp, Homo sapien
aattttgagttgtccattctgccttctttataa

SEQ ID NO: 273613 - DNA, 33 bp, Homo sapien
ctttatgacatcatgaaaaagaagaccagtttg

SEQ ID NO: 273614 - DNA, 33 bp, Homo sapien
ctttatgacatcatgagaaagaagaccagtttg

SEQ ID NO: 273615 - DNA, 33 bp, Homo sapien
catgtcctggcacatactaataactctatattt

SEQ ID NO: 273616 - DNA, 33 bp, Homo sapien
catgtcctggcacatagtaataactctatattt

SEQ ID NO: 273617 - DNA, 33 bp, Homo sapien
gagtctagctcaataacaaaccctgatactctc

SEQ ID NO: 273618 - DNA, 33 bp, Homo sapien
gagtctagctcaataataaaccctgatactctc

SEQ ID NO: 273619 - DNA, 33 bp, Homo sapien
cttagtttctggatagcccatgatatagcagtc

SEQ ID NO: 273620 - DNA, 33 bp, Homo sapien
cttagtttctggatagtccatgatatagcagtc

SEQ ID NO: 273621 - DNA, 33 bp, Homo sapien
gctgctgtcagtgatacgcacttacaaaatgca

SEQ ID NO: 273622 - DNA, 33 bp, Homo sapien
gctgctgtcagtgatatgcacttacaaaatgca

SEQ ID NO: 273623 - DNA, 33 bp, Homo sapien
ctgattggtaacaacaccctatattcatagaaa

SEQ ID NO: 273624 - DNA, 33 bp, Homo sapien
ctgattggtaacaacatcctatattcatagaaa

SEQ ID NO: 273625 - DNA, 33 bp, Homo sapien
atggtgcaaatcatcactgaaatccatgatcag

SEQ ID NO: 273626 - DNA, 33 bp, Homo sapien
atggtgcaaatcatcattgaaatccatgatcag

SEQ ID NO: 273627 - DNA, 33 bp, Homo sapien
cagggattgtgtcagcaacaattcaagatgaga

SEQ ID NO: 273628 - DNA, 33 bp, Homo sapien
cagggattgtgtcagcgacaattcaagatgaga

SEQ ID NO: 273629 - DNA, 33 bp, Homo sapien
gccaattctatttaagcctcttactttcctctc

SEQ ID NO: 273630 - DNA, 33 bp, Homo sapien
gccaattctatttaaggctcttactttcctctc

SEQ ID NO: 273631 - DNA, 33 bp, Homo sapien
tgaccaccaattctaactctgcttggaatcttc

SEQ ID NO: 273632 - DNA, 33 bp, Homo sapien
tgaccaccaattctaattctgcttggaatcttc

SEQ ID NO: 273633 - DNA, 33 bp, Homo sapien
aattacgtattagcagacccagaattcaagttc

SEQ ID NO: 273634 - DNA, 33 bp, Homo sapien
aattacgtattagcaggcccagaattcaagttc

SEQ ID NO: 273635 - DNA, 33 bp, Homo sapien
tttttcaatggcaacacaattttctatggatca

SEQ ID NO: 273636 - DNA, 33 bp, Homo sapien
tttttcaatggcaacagaattttctatggatca

SEQ ID NO: 273637 - DNA, 33 bp, Homo sapien
aaagctctttgtttcacaagaatcactggattg

SEQ ID NO: 273638 - DNA, 33 bp, Homo sapien
aaagctctttgtttcataagaatcactggattg

SEQ ID NO: 273639 - DNA, 33 bp, Homo sapien
agttgtgcagggaagtaaaattgatcatagcac

SEQ ID NO: 273640 - DNA, 33 bp, Homo sapien
agttgtgcagggaagtgaaattgatcatagcac

SEQ ID NO: 273641 - DNA, 33 bp, Homo sapien
atggcttgggtgccaaatcatctgcagcagaat

SEQ ID NO: 273642 - DNA, 33 bp, Homo sapien
atggcttgggtgccaactcatctgcagcagaat

SEQ ID NO: 273643 - DNA, 33 bp, Homo sapien
aaggcaaaggtgctaaatgacttcactatatct

SEQ ID NO: 273644 - DNA, 33 bp, Homo sapien
aaggcaaaggtgctaactgacttcactatatct

SEQ ID NO: 273645 - DNA, 33 bp, Homo sapien
ttcaataaacattttgcaatgagtctcagatag

SEQ ID NO: 273646 - DNA, 33 bp, Homo sapien
ttcaataaacattttgtaatgagtctcagatag

SEQ ID NO: 273647 - DNA, 33 bp, Homo sapien
ttgaaagtttaatgtacgtagttaatgtagtat

SEQ ID NO: 273648 - DNA, 33 bp, Homo sapien
ttgaaagtttaatgtatgtagttaatgtagtat

SEQ ID NO: 273649 - DNA, 33 bp, Homo sapien
tccctcctgctcactgaactatgggaacaaaaa

SEQ ID NO: 273650 - DNA, 33 bp, Homo sapien
tccctcctgctcactggactatgggaacaaaaa

SEQ ID NO: 273651 - DNA, 33 bp, Homo sapien
tgaagctacaggaaggaaaatgaataggagaga

SEQ ID NO: 273652 - DNA, 33 bp, Homo sapien
tgaagctacaggaaggtaaatgaataggagaga

SEQ ID NO: 273653 - DNA, 33 bp, Homo sapien
tttcccctcgtcaacgaagactatttggaaagg

SEQ ID NO: 273654 - DNA, 33 bp, Homo sapien
tttcccctcgtcaacgtagactatttggaaagg

SEQ ID NO: 273655 - DNA, 33 bp, Homo sapien
ttagattctaacaaggcatacatatgcgttttc

SEQ ID NO: 273656 - DNA, 33 bp, Homo sapien
ttagattctaacaaggtatacatatgcgttttc

SEQ ID NO: 273657 - DNA, 33 bp, Homo sapien
cactctgtcactccaaataatgacaccattttt

SEQ ID NO: 273658 - DNA, 33 bp, Homo sapien
cactctgtcactccaagtaatgacaccattttt

SEQ ID NO: 273659 - DNA, 33 bp, Homo sapien
tttctaagtccaatacaaacacacactttatga

SEQ ID NO: 273660 - DNA, 33 bp, Homo sapien
tttctaagtccaatacgaacacacactttatga

SEQ ID NO: 273661 - DNA, 33 bp, Homo sapien
atttgcgtacatatgactcaaaaaaattctaca

SEQ ID NO: 273662 - DNA, 33 bp, Homo sapien
atttgcgtacatatgattcaaaaaaattctaca

SEQ ID NO: 273663 - DNA, 33 bp, Homo sapien
aaaagttcacagggtaaagaaacttccaaatgt

SEQ ID NO: 273664 - DNA, 33 bp, Homo sapien
aaaagttcacagggtagagaaacttccaaatgt

SEQ ID NO: 273665 - DNA, 33 bp, Homo sapien
tgactcttttctccaaatgtataaaccattatc

SEQ ID NO: 273666 - DNA, 33 bp, Homo sapien
tgactcttttctccaagtgtataaaccattatc

SEQ ID NO: 273667 - DNA, 33 bp, Homo sapien
ctagaatacccctttcccacgatacttgcagtt

SEQ ID NO: 273668 - DNA, 33 bp, Homo sapien
ctagaatacccctttctcacgatacttgcagtt

SEQ ID NO: 273669 - DNA, 33 bp, Homo sapien
accctttttgcaagtcagaagtcttttaacaaa

SEQ ID NO: 273670 - DNA, 33 bp, Homo sapien
accctttttgcaagtcggaagtcttttaacaaa

SEQ ID NO: 273671 - DNA, 33 bp, Homo sapien
tttcttttttcttcctaaactttagctgagatc

SEQ ID NO: 273672 - DNA, 33 bp, Homo sapien
tttcttttttcttcctgaactttagctgagatc

SEQ ID NO: 273673 - DNA, 33 bp, Homo sapien
tatggtttctgactaactgtgtctaatctgaaa

SEQ ID NO: 273674 - DNA, 33 bp, Homo sapien
tatggtttctgactaattgtgtctaatctgaaa

SEQ ID NO: 273675 - DNA, 33 bp, Homo sapien
gtctttcttattctccaacaaactttctatacc

SEQ ID NO: 273676 - DNA, 33 bp, Homo sapien
gtctttcttattctccgacaaactttctatacc

SEQ ID NO: 273677 - DNA, 33 bp, Homo sapien
tctggattcaactaccacagatcagcaacacac

SEQ ID NO: 273678 - DNA, 33 bp, Homo sapien
tctggattcaactaccgcagatcagcaacacac

SEQ ID NO: 273679 - DNA, 33 bp, Homo sapien
cattatcttgtaatcactcgtttgtaaagtagc

SEQ ID NO: 273680 - DNA, 33 bp, Homo sapien
cattatcttgtaatcattcgtttgtaaagtagc

SEQ ID NO: 273681 - DNA, 33 bp, Homo sapien
taaataaaaagacacaaagaggtacagagtaaa

SEQ ID NO: 273682 - DNA, 33 bp, Homo sapien
taaataaaaagacacagagaggtacagagtaaa

SEQ ID NO: 273683 - DNA, 33 bp, Homo sapien
cacactgtgttgcttaaggttgacaacggtatt

SEQ ID NO: 273684 - DNA, 33 bp, Homo sapien
cacactgtgttgcttacggttgacaacggtatt

SEQ ID NO: 273685 - DNA, 33 bp, Homo sapien
caacagattgactttacgaagcatagagctgtt

SEQ ID NO: 273686 - DNA, 33 bp, Homo sapien
caacagattgactttatgaagcatagagctgtt

SEQ ID NO: 273687 - DNA, 33 bp, Homo sapien
aggtaaagacagaaaaagcaaaaaatggctaaa

SEQ ID NO: 273688 - DNA, 33 bp, Homo sapien
aggtaaagacagaaaaggcaaaaaatggctaaa

SEQ ID NO: 273689 - DNA, 33 bp, Homo sapien
ccttctagtgtttccaatgcagtgggtgaagct

SEQ ID NO: 273690 - DNA, 33 bp, Homo sapien
ccttctagtgtttccagtgcagtgggtgaagct

SEQ ID NO: 273691 - DNA, 33 bp, Homo sapien
ttatcatccccaaatacaaaaagtgacacaata

SEQ ID NO: 273692 - DNA, 33 bp, Homo sapien
ttatcatccccaaatataaaaagtgacacaata

SEQ ID NO: 273693 - DNA, 33 bp, Homo sapien
caaactattatctgacccagcaaggaatggcat

SEQ ID NO: 273694 - DNA, 33 bp, Homo sapien
caaactattatctgactcagcaaggaatggcat

SEQ ID NO: 273695 - DNA, 33 bp, Homo sapien
tcctcgaaattgacacagtataatttactaagg

SEQ ID NO: 273696 - DNA, 33 bp, Homo sapien
tcctcgaaattgacactgtataatttactaagg

SEQ ID NO: 273697 - DNA, 33 bp, Homo sapien
tctcagagaaagcatcagatagtaaaagaaatt

SEQ ID NO: 273698 - DNA, 33 bp, Homo sapien
tctcagagaaagcatcggatagtaaaagaaatt

SEQ ID NO: 273699 - DNA, 33 bp, Homo sapien
atgaagtgagaaaagccatgaaaagttctttca

SEQ ID NO: 273700 - DNA, 33 bp, Homo sapien
atgaagtgagaaaagctatgaaaagttctttca

SEQ ID NO: 273701 - DNA, 33 bp, Homo sapien
gactatgctactgtaacaacaatgccctaaata

SEQ ID NO: 273702 - DNA, 33 bp, Homo sapien
gactatgctactgtaataacaatgccctaaata

SEQ ID NO: 273703 - DNA, 33 bp, Homo sapien
ccagactcttgtgtaaaacatgaataaacttct

SEQ ID NO: 273704 - DNA, 33 bp, Homo sapien
ccagactcttgtgtaagacatgaataaacttct

SEQ ID NO: 273705 - DNA, 33 bp, Homo sapien
atggtgcaaatataaacgtgatagcatcttaga

SEQ ID NO: 273706 - DNA, 33 bp, Homo sapien
atggtgcaaatataaatgtgatagcatcttaga

SEQ ID NO: 273707 - DNA, 33 bp, Homo sapien
gagcaagcacaatgtaaaaacaataaacagtat

SEQ ID NO: 273708 - DNA, 33 bp, Homo sapien
gagcaagcacaatgtacaaacaataaacagtat

SEQ ID NO: 273709 - DNA, 33 bp, Homo sapien
tcatgtaccttctgccacacagtcattagagca

SEQ ID NO: 273710 - DNA, 33 bp, Homo sapien
tcatgtaccttctgccgcacagtcattagagca

SEQ ID NO: 273711 - DNA, 33 bp, Homo sapien
agctggagaaaaggaacgtatctctatatatgc

SEQ ID NO: 273712 - DNA, 33 bp, Homo sapien
agctggagaaaaggaatgtatctctatatatgc

SEQ ID NO: 273713 - DNA, 33 bp, Homo sapien
taaccaggcacactttaaaaataggaaatttaa

SEQ ID NO: 273714 - DNA, 33 bp, Homo sapien
taaccaggcacactttcaaaataggaaatttaa

SEQ ID NO: 273715 - DNA, 33 bp, Homo sapien
taagtaaacttgtccacatattggtacccctgg

SEQ ID NO: 273716 - DNA, 33 bp, Homo sapien
taagtaaacttgtccagatattggtacccctgg

SEQ ID NO: 273717 - DNA, 33 bp, Homo sapien
agtttacttaaccccaagaatacattacagttg

SEQ ID NO: 273718 - DNA, 33 bp, Homo sapien
agtttacttaaccccaggaatacattacagttg

SEQ ID NO: 273719 - DNA, 33 bp, Homo sapien
cactgaactctctgtaactaatctgcataaatc

SEQ ID NO: 273720 - DNA, 33 bp, Homo sapien
cactgaactctctgtagctaatctgcataaatc

SEQ ID NO: 273721 - DNA, 33 bp, Homo sapien
ataatgttaatttcaacaggattgatgacaagt

SEQ ID NO: 273722 - DNA, 33 bp, Homo sapien
ataatgttaatttcaagaggattgatgacaagt

SEQ ID NO: 273723 - DNA, 33 bp, Homo sapien
gaagaatttcagagaactattcatgtttatcaa

SEQ ID NO: 273724 - DNA, 33 bp, Homo sapien
gaagaatttcagagaagtattcatgtttatcaa

SEQ ID NO: 273725 - DNA, 33 bp, Homo sapien
gctaaaagatgattaaaaatgctttgatgaccc

SEQ ID NO: 273726 - DNA, 33 bp, Homo sapien
gctaaaagatgattaataatgctttgatgaccc

SEQ ID NO: 273727 - DNA, 33 bp, Homo sapien
aagaacatttttggataagaatttctgctacaa

SEQ ID NO: 273728 - DNA, 33 bp, Homo sapien
aagaacatttttggattagaatttctgctacaa

SEQ ID NO: 273729 - DNA, 33 bp, Homo sapien
ataaagtctactaaataaaaatgcagcagtgat

SEQ ID NO: 273730 - DNA, 33 bp, Homo sapien
ataaagtctactaaatgaaaatgcagcagtgat

SEQ ID NO: 273731 - DNA, 33 bp, Homo sapien
aatgtaattgtgataacgttttttagacacata

SEQ ID NO: 273732 - DNA, 33 bp, Homo sapien
aatgtaattgtgataatgttttttagacacata

SEQ ID NO: 273733 - DNA, 33 bp, Homo sapien
gagagacatagagactcagagtaattagagccg

SEQ ID NO: 273734 - DNA, 33 bp, Homo sapien
gagagacatagagactgagagtaattagagccg

SEQ ID NO: 273735 - DNA, 33 bp, Homo sapien
gattatggccatatataagtgatcatactttta

SEQ ID NO: 273736 - DNA, 33 bp, Homo sapien
gattatggccatatatgagtgatcatactttta

SEQ ID NO: 273737 - DNA, 33 bp, Homo sapien
ggccataatcttacaaaaaggaaaagagaaacc

SEQ ID NO: 273738 - DNA, 33 bp, Homo sapien
ggccataatcttacaagaaggaaaagagaaacc

SEQ ID NO: 273739 - DNA, 33 bp, Homo sapien
aatataagatgtgtaaggttttcaaagataaaa

SEQ ID NO: 273740 - DNA, 33 bp, Homo sapien
aatataagatgtgtaatgttttcaaagataaaa

SEQ ID NO: 273741 - DNA, 33 bp, Homo sapien
tgacattacacattccaagatgtatttttatgt

SEQ ID NO: 273742 - DNA, 33 bp, Homo sapien
tgacattacacattccgagatgtatttttatgt

SEQ ID NO: 273743 - DNA, 33 bp, Homo sapien
acttattttccaagaacggcgctatatttgggg

SEQ ID NO: 273744 - DNA, 33 bp, Homo sapien
acttattttccaagaatggcgctatatttgggg

SEQ ID NO: 273745 - DNA, 33 bp, Homo sapien
attgaggaacattagaactattaccaagcaaaa

SEQ ID NO: 273746 - DNA, 33 bp, Homo sapien
attgaggaacattagagctattaccaagcaaaa

SEQ ID NO: 273747 - DNA, 33 bp, Homo sapien
aataaatggtaagaggcatggcaagaatggcca

SEQ ID NO: 273748 - DNA, 33 bp, Homo sapien
aataaatggtaagaggtatggcaagaatggcca

SEQ ID NO: 273749 - DNA, 33 bp, Homo sapien
ctatattctttctacaacaatttggagccctac

SEQ ID NO: 273750 - DNA, 33 bp, Homo sapien
ctatattctttctacagcaatttggagccctac

SEQ ID NO: 273751 - DNA, 33 bp, Homo sapien
ctctttaacgcctcaaacaacaccataagtgct

SEQ ID NO: 273752 - DNA, 33 bp, Homo sapien
ctctttaacgcctcaaccaacaccataagtgct

SEQ ID NO: 273753 - DNA, 33 bp, Homo sapien
aaagtttgcctctgaactgatatttttaagcat

SEQ ID NO: 273754 - DNA, 33 bp, Homo sapien
aaagtttgcctctgaattgatatttttaagcat

SEQ ID NO: 273755 - DNA, 33 bp, Homo sapien
ccatattactctaagcaatttcgtgcactgtga

SEQ ID NO: 273756 - DNA, 33 bp, Homo sapien
ccatattactctaagccatttcgtgcactgtga

SEQ ID NO: 273757 - DNA, 33 bp, Homo sapien
ttcactctacgattagaaatatgttctctcagt

SEQ ID NO: 273758 - DNA, 33 bp, Homo sapien
ttcactctacgattagtaatatgttctctcagt

SEQ ID NO: 273759 - DNA, 33 bp, Homo sapien
gcggtcccagccacaacgttgcagccagtggtg

SEQ ID NO: 273760 - DNA, 33 bp, Homo sapien
gcggtcccagccacaatgttgcagccagtggtg

SEQ ID NO: 273761 - DNA, 33 bp, Homo sapien
taggaaacttgaaaataaactggccttttctca

SEQ ID NO: 273762 - DNA, 33 bp, Homo sapien
taggaaacttgaaaatcaactggccttttctca

SEQ ID NO: 273763 - DNA, 33 bp, Homo sapien
tcatatgcacacaggaagagtttgttacctatg

SEQ ID NO: 273764 - DNA, 33 bp, Homo sapien
tcatatgcacacaggacgagtttgttacctatg

SEQ ID NO: 273765 - DNA, 33 bp, Homo sapien
tataacatggccttcaacaagtgccactggaac

SEQ ID NO: 273766 - DNA, 33 bp, Homo sapien
tataacatggccttcagcaagtgccactggaac

SEQ ID NO: 273767 - DNA, 33 bp, Homo sapien
ctcccaagctggaatgacatgatgcgatcttga

SEQ ID NO: 273768 - DNA, 33 bp, Homo sapien
ctcccaagctggaatgccatgatgcgatcttga

SEQ ID NO: 273769 - DNA, 33 bp, Homo sapien
taaattcctctgtgatgagtcgtattatttttt

SEQ ID NO: 273770 - DNA, 33 bp, Homo sapien
taaattcctctgtgattagtcgtattatttttt

SEQ ID NO: 273771 - DNA, 33 bp, Homo sapien
tatataaaatgagatccaaccacttatacagat

SEQ ID NO: 273772 - DNA, 33 bp, Homo sapien
tatataaaatgagatcgaaccacttatacagat

SEQ ID NO: 273773 - DNA, 33 bp, Homo sapien
gatgtaacttgaccacactaaagtagatcagag

SEQ ID NO: 273774 - DNA, 33 bp, Homo sapien
gatgtaacttgaccacgctaaagtagatcagag

SEQ ID NO: 273775 - DNA, 33 bp, Homo sapien
catactggtcaaaggaatatcttctacttgtga

SEQ ID NO: 273776 - DNA, 33 bp, Homo sapien
catactggtcaaaggactatcttctacttgtga

SEQ ID NO: 273777 - DNA, 33 bp, Homo sapien
gtaaattcaacagtgaataattacgggacaaac

SEQ ID NO: 273778 - DNA, 33 bp, Homo sapien
gtaaattcaacagtgagtaattacgggacaaac

SEQ ID NO: 273779 - DNA, 33 bp, Homo sapien
tgttatggcttaaaagaccatcattactagtat

SEQ ID NO: 273780 - DNA, 33 bp, Homo sapien
tgttatggcttaaaagtccatcattactagtat

SEQ ID NO: 273781 - DNA, 33 bp, Homo sapien
ttcagatgtcagcaatcaggaagtgatgaagat

SEQ ID NO: 273782 - DNA, 33 bp, Homo sapien
ttcagatgtcagcaatgaggaagtgatgaagat

SEQ ID NO: 273783 - DNA, 33 bp, Homo sapien
aatgattattttattaacctttctgtgtatatg

SEQ ID NO: 273784 - DNA, 33 bp, Homo sapien
aatgattattttattatcctttctgtgtatatg

SEQ ID NO: 273785 - DNA, 33 bp, Homo sapien
atgtttgccttacatacaaagaagcttaaatgc

SEQ ID NO: 273786 - DNA, 33 bp, Homo sapien
atgtttgccttacatataaagaagcttaaatgc

SEQ ID NO: 273787 - DNA, 33 bp, Homo sapien
cataatgtagtatagaaaggtttgaaccatcag

SEQ ID NO: 273788 - DNA, 33 bp, Homo sapien
cataatgtagtatagagaggtttgaaccatcag

SEQ ID NO: 273789 - DNA, 33 bp, Homo sapien
tctgttcctggaatcccaagttgatttgttatt

SEQ ID NO: 273790 - DNA, 33 bp, Homo sapien
tctgttcctggaatccgaagttgatttgttatt

SEQ ID NO: 273791 - DNA, 33 bp, Homo sapien
gtaaggttgagaaaaacttgagtaacactttag

SEQ ID NO: 273792 - DNA, 33 bp, Homo sapien
gtaaggttgagaaaaagttgagtaacactttag

SEQ ID NO: 273793 - DNA, 33 bp, Homo sapien
attggtcttgtaagaactggcgatgagcaattg

SEQ ID NO: 273794 - DNA, 33 bp, Homo sapien
attggtcttgtaagaattggcgatgagcaattg

SEQ ID NO: 273795 - DNA, 33 bp, Homo sapien
cttaagaaaacttctccatttccaccagaattc

SEQ ID NO: 273796 - DNA, 33 bp, Homo sapien
cttaagaaaacttctctatttccaccagaattc

SEQ ID NO: 273797 - DNA, 33 bp, Homo sapien
tgacaaaacacagtaacacagagacaaggcaga

SEQ ID NO: 273798 - DNA, 33 bp, Homo sapien
tgacaaaacacagtaagacagagacaaggcaga

SEQ ID NO: 273799 - DNA, 33 bp, Homo sapien
aagccaagttctcaacaacataaaataaaacga

SEQ ID NO: 273800 - DNA, 33 bp, Homo sapien
aagccaagttctcaacgacataaaataaaacga

SEQ ID NO: 273801 - DNA, 33 bp, Homo sapien
cttggcttgtgacaaaatgggaacattctctct

SEQ ID NO: 273802 - DNA, 33 bp, Homo sapien
cttggcttgtgacaaagtgggaacattctctct

SEQ ID NO: 273803 - DNA, 33 bp, Homo sapien
ggtgagtggatgaggcaaacatcttcccaggtc

SEQ ID NO: 273804 - DNA, 33 bp, Homo sapien
ggtgagtggatgaggcgaacatcttcccaggtc

SEQ ID NO: 273805 - DNA, 33 bp, Homo sapien
aattatacaggcttaaagaaatttggggggatg

SEQ ID NO: 273806 - DNA, 33 bp, Homo sapien
aattatacaggcttaaggaaatttggggggatg

SEQ ID NO: 273807 - DNA, 33 bp, Homo sapien
gggtcaatccactgtacctattattctttccaa

SEQ ID NO: 273808 - DNA, 33 bp, Homo sapien
gggtcaatccactgtagctattattctttccaa

SEQ ID NO: 273809 - DNA, 33 bp, Homo sapien
tatgcaaactatttcaagataaccaaatagatc

SEQ ID NO: 273810 - DNA, 33 bp, Homo sapien
tatgcaaactatttcaggataaccaaatagatc

SEQ ID NO: 273811 - DNA, 33 bp, Homo sapien
ccacttataaactatacgaatttggacaagttg

SEQ ID NO: 273812 - DNA, 33 bp, Homo sapien
ccacttataaactatatgaatttggacaagttg

SEQ ID NO: 273813 - DNA, 33 bp, Homo sapien
ctattattctgtttcaactggtaaggacctgaa

SEQ ID NO: 273814 - DNA, 33 bp, Homo sapien
ctattattctgtttcagctggtaaggacctgaa

SEQ ID NO: 273815 - DNA, 33 bp, Homo sapien
tagttttgcttgaaatcacattcaattaagtga

SEQ ID NO: 273816 - DNA, 33 bp, Homo sapien
tagttttgcttgaaattacattcaattaagtga

SEQ ID NO: 273817 - DNA, 33 bp, Homo sapien
ttaagccatataacaaaaaaggtaggatagttt

SEQ ID NO: 273818 - DNA, 33 bp, Homo sapien
ttaagccatataacaataaaggtaggatagttt

SEQ ID NO: 273819 - DNA, 33 bp, Homo sapien
taagttgtctgcataacatcatgaaatccagac

SEQ ID NO: 273820 - DNA, 33 bp, Homo sapien
taagttgtctgcataagatcatgaaatccagac

SEQ ID NO: 273821 - DNA, 33 bp, Homo sapien
agactatattatctaaactcgccaaacctcaat

SEQ ID NO: 273822 - DNA, 33 bp, Homo sapien
agactatattatctaacctcgccaaacctcaat

SEQ ID NO: 273823 - DNA, 33 bp, Homo sapien
ttcttggctttacgtaaggcttctgataatggg

SEQ ID NO: 273824 - DNA, 33 bp, Homo sapien
ttcttggctttacgtagggcttctgataatggg

SEQ ID NO: 273825 - DNA, 33 bp, Homo sapien
aattcaggaagttcaaatcactggcagattcag

SEQ ID NO: 273826 - DNA, 33 bp, Homo sapien
aattcaggaagttcaagtcactggcagattcag

SEQ ID NO: 273827 - DNA, 33 bp, Homo sapien
gtaggttgattaatcactctgagttttaatttc

SEQ ID NO: 273828 - DNA, 33 bp, Homo sapien
gtaggttgattaatcattctgagttttaatttc

SEQ ID NO: 273829 - DNA, 33 bp, Homo sapien
tgagtcgtatgatagacgtgttcaattatttta

SEQ ID NO: 273830 - DNA, 33 bp, Homo sapien
tgagtcgtatgatagatgtgttcaattatttta

SEQ ID NO: 273831 - DNA, 33 bp, Homo sapien
ttcatgaaagaaaatacatgaatggctaataag

SEQ ID NO: 273832 - DNA, 33 bp, Homo sapien
ttcatgaaagaaaatatatgaatggctaataag

SEQ ID NO: 273833 - DNA, 33 bp, Homo sapien
atggaaacagcttatacctattgtcccggtatc

SEQ ID NO: 273834 - DNA, 33 bp, Homo sapien
atggaaacagcttatagctattgtcccggtatc

SEQ ID NO: 273835 - DNA, 33 bp, Homo sapien
ttcaattgatcttggccattaacataataaaaa

SEQ ID NO: 273836 - DNA, 33 bp, Homo sapien
ttcaattgatcttggctattaacataataaaaa

SEQ ID NO: 273837 - DNA, 33 bp, Homo sapien
tctgcattgctcctaacatagttgctgttacat

SEQ ID NO: 273838 - DNA, 33 bp, Homo sapien
tctgcattgctcctaatatagttgctgttacat

SEQ ID NO: 273839 - DNA, 33 bp, Homo sapien
cagaaatactggatacacttatgctttggttta

SEQ ID NO: 273840 - DNA, 33 bp, Homo sapien
cagaaatactggatacgcttatgctttggttta

SEQ ID NO: 273841 - DNA, 33 bp, Homo sapien
attcctcaaagacctacaggcaaaaatacaatt

SEQ ID NO: 273842 - DNA, 33 bp, Homo sapien
attcctcaaagacctagaggcaaaaatacaatt

SEQ ID NO: 273843 - DNA, 33 bp, Homo sapien
agttcccaacataaagaaataatacacgtttga

SEQ ID NO: 273844 - DNA, 33 bp, Homo sapien
agttcccaacataaagcaataatacacgtttga

SEQ ID NO: 273845 - DNA, 33 bp, Homo sapien
tgggagctaaaaaaaacgatttcatagaggcag

SEQ ID NO: 273846 - DNA, 33 bp, Homo sapien
tgggagctaaaaaaaatgatttcatagaggcag

SEQ ID NO: 273847 - DNA, 33 bp, Homo sapien
attagctggttccttccgaaatcaatcttagag

SEQ ID NO: 273848 - DNA, 33 bp, Homo sapien
attagctggttccttctgaaatcaatcttagag

SEQ ID NO: 273849 - DNA, 33 bp, Homo sapien
ttctctgccatccatactaaagaggttcaaatt

SEQ ID NO: 273850 - DNA, 33 bp, Homo sapien
ttctctgccatccatattaaagaggttcaaatt

SEQ ID NO: 273851 - DNA, 33 bp, Homo sapien
agtgtctgcctttagagaggagagtagggtcag

SEQ ID NO: 273852 - DNA, 33 bp, Homo sapien
agtgtctgcctttagataggagagtagggtcag

SEQ ID NO: 273853 - DNA, 33 bp, Homo sapien
ttaataagacctttaccgctcactgttgcctaa

SEQ ID NO: 273854 - DNA, 33 bp, Homo sapien
ttaataagacctttactgctcactgttgcctaa

SEQ ID NO: 273855 - DNA, 33 bp, Homo sapien
agttttggtttggcagccactttatttgatcag

SEQ ID NO: 273856 - DNA, 33 bp, Homo sapien
agttttggtttggcaggcactttatttgatcag

SEQ ID NO: 273857 - DNA, 33 bp, Homo sapien
gaattcttagatctcacagggttgagagaattc

SEQ ID NO: 273858 - DNA, 33 bp, Homo sapien
gaattcttagatctcatagggttgagagaattc

SEQ ID NO: 273859 - DNA, 33 bp, Homo sapien
aggagcaaaatagggacgcaaaacgatctaatt

SEQ ID NO: 273860 - DNA, 33 bp, Homo sapien
aggagcaaaatagggaggcaaaacgatctaatt

SEQ ID NO: 273861 - DNA, 33 bp, Homo sapien
ttcatgtaatgttttacgcgaaatgttaaagga

SEQ ID NO: 273862 - DNA, 33 bp, Homo sapien
ttcatgtaatgttttatgcgaaatgttaaagga

SEQ ID NO: 273863 - DNA, 33 bp, Homo sapien
acatttcaaatggctacgaaacacttaggaaaa

SEQ ID NO: 273864 - DNA, 33 bp, Homo sapien
acatttcaaatggctatgaaacacttaggaaaa

SEQ ID NO: 273865 - DNA, 33 bp, Homo sapien
ttatgtcttcttctaacagttttatagctctga

SEQ ID NO: 273866 - DNA, 33 bp, Homo sapien
ttatgtcttcttctaatagttttatagctctga

SEQ ID NO: 273867 - DNA, 33 bp, Homo sapien
ctgtgatggtattaaactaacttcatgcttcta

SEQ ID NO: 273868 - DNA, 33 bp, Homo sapien
ctgtgatggtattaaattaacttcatgcttcta

SEQ ID NO: 273869 - DNA, 33 bp, Homo sapien
ataaattatactttgactatcaacccatttgaa

SEQ ID NO: 273870 - DNA, 33 bp, Homo sapien
ataaattatactttgattatcaacccatttgaa

SEQ ID NO: 273871 - DNA, 33 bp, Homo sapien
ttaggatgggaaatggaatagcagaaaggtatt

SEQ ID NO: 273872 - DNA, 33 bp, Homo sapien
ttaggatgggaaatgggatagcagaaaggtatt

SEQ ID NO: 273873 - DNA, 33 bp, Homo sapien
cagacagtacaaataaaaaacgaacacaacttc

SEQ ID NO: 273874 - DNA, 33 bp, Homo sapien
cagacagtacaaataataaacgaacacaacttc

SEQ ID NO: 273875 - DNA, 33 bp, Homo sapien
gtctcttctctcaaaaactatagatcttagtta

SEQ ID NO: 273876 - DNA, 33 bp, Homo sapien
gtctcttctctcaaaatctatagatcttagtta

SEQ ID NO: 273877 - DNA, 33 bp, Homo sapien
ggtgggtcaaaagccccagaccttgtctctttt

SEQ ID NO: 273878 - DNA, 33 bp, Homo sapien
ggtgggtcaaaagccctagaccttgtctctttt

SEQ ID NO: 273879 - DNA, 33 bp, Homo sapien
aattctaattgagaccaaatctgtgtgacatat

SEQ ID NO: 273880 - DNA, 33 bp, Homo sapien
aattctaattgagacctaatctgtgtgacatat

SEQ ID NO: 273881 - DNA, 33 bp, Homo sapien
gttggtgtaattccaggcaaagtctgaaggctg

SEQ ID NO: 273882 - DNA, 33 bp, Homo sapien
gttggtgtaattccagtcaaagtctgaaggctg

SEQ ID NO: 273883 - DNA, 33 bp, Homo sapien
ccttggttaaagaaagccacaatgatagaaatc

SEQ ID NO: 273884 - DNA, 33 bp, Homo sapien
ccttggttaaagaaagtcacaatgatagaaatc

SEQ ID NO: 273885 - DNA, 33 bp, Homo sapien
cacgttcaggtaataccaaatgtgagaaatatc

SEQ ID NO: 273886 - DNA, 33 bp, Homo sapien
cacgttcaggtaatactaaatgtgagaaatatc

SEQ ID NO: 273887 - DNA, 33 bp, Homo sapien
agaaagcccctcttgcccttatttgccaacctc

SEQ ID NO: 273888 - DNA, 33 bp, Homo sapien
agaaagcccctcttgcgcttatttgccaacctc

SEQ ID NO: 273889 - DNA, 33 bp, Homo sapien
gaatgcagagtgaactcaatacagtgtgacaga

SEQ ID NO: 273890 - DNA, 33 bp, Homo sapien
gaatgcagagtgaactgaatacagtgtgacaga

SEQ ID NO: 273891 - DNA, 33 bp, Homo sapien
ttctgtctcacttcaacatctgtagtgccaagt

SEQ ID NO: 273892 - DNA, 33 bp, Homo sapien
ttctgtctcacttcaatatctgtagtgccaagt

SEQ ID NO: 273893 - DNA, 33 bp, Homo sapien
acatccaactctgtaacgattaggccagatttg

SEQ ID NO: 273894 - DNA, 33 bp, Homo sapien
acatccaactctgtaatgattaggccagatttg

SEQ ID NO: 273895 - DNA, 33 bp, Homo sapien
gcaaacaaaaaaagaccaggtgtatgatactga

SEQ ID NO: 273896 - DNA, 33 bp, Homo sapien
gcaaacaaaaaaagactaggtgtatgatactga

SEQ ID NO: 273897 - DNA, 33 bp, Homo sapien
tgccaatgtcagtgcagactgcttgaaagtgag

SEQ ID NO: 273898 - DNA, 33 bp, Homo sapien
tgccaatgtcagtgcatactgcttgaaagtgag

SEQ ID NO: 273899 - DNA, 33 bp, Homo sapien
atggttactgtaatacacattcttcccagtgta

SEQ ID NO: 273900 - DNA, 33 bp, Homo sapien
atggttactgtaatacccattcttcccagtgta

SEQ ID NO: 273901 - DNA, 33 bp, Homo sapien
agtgccgtgaagtaaaatgatactctcctggtt

SEQ ID NO: 273902 - DNA, 33 bp, Homo sapien
agtgccgtgaagtaaactgatactctcctggtt

SEQ ID NO: 273903 - DNA, 33 bp, Homo sapien
tgtcatgcaaatcctacctgcacaaggactgta

SEQ ID NO: 273904 - DNA, 33 bp, Homo sapien
tgtcatgcaaatcctatctgcacaaggactgta

SEQ ID NO: 273905 - DNA, 33 bp, Homo sapien
tgaacaaagggacagcaaatgtaccaaaagaac

SEQ ID NO: 273906 - DNA, 33 bp, Homo sapien
tgaacaaagggacagcgaatgtaccaaaagaac

SEQ ID NO: 273907 - DNA, 33 bp, Homo sapien
tcctccaacaaataaaatcaatgtgtcatttgc

SEQ ID NO: 273908 - DNA, 33 bp, Homo sapien
tcctccaacaaataaagtcaatgtgtcatttgc

SEQ ID NO: 273909 - DNA, 33 bp, Homo sapien
ctagcagccctcacaaataagtgtgaccatgtg

SEQ ID NO: 273910 - DNA, 33 bp, Homo sapien
ctagcagccctcacaagtaagtgtgaccatgtg

SEQ ID NO: 273911 - DNA, 33 bp, Homo sapien
attacaccatttgagacatttccaaaggcagat

SEQ ID NO: 273912 - DNA, 33 bp, Homo sapien
attacaccatttgagatatttccaaaggcagat

SEQ ID NO: 273913 - DNA, 33 bp, Homo sapien
agccaagagcctactgcatcaacttggaggtgc

SEQ ID NO: 273914 - DNA, 33 bp, Homo sapien
agccaagagcctactggatcaacttggaggtgc

SEQ ID NO: 273915 - DNA, 33 bp, Homo sapien
ctttcctttttctttaacgtctatgtggcatct

SEQ ID NO: 273916 - DNA, 33 bp, Homo sapien
ctttcctttttctttatcgtctatgtggcatct

SEQ ID NO: 273917 - DNA, 33 bp, Homo sapien
agctctcaacatgtgaagggacctgaagcaggt

SEQ ID NO: 273918 - DNA, 33 bp, Homo sapien
agctctcaacatgtgaggggacctgaagcaggt

SEQ ID NO: 273919 - DNA, 33 bp, Homo sapien
aaggtataacatcacacaatcctcacacaagaa

SEQ ID NO: 273920 - DNA, 33 bp, Homo sapien
aaggtataacatcacagaatcctcacacaagaa

SEQ ID NO: 273921 - DNA, 33 bp, Homo sapien
gatattttagagcaaaagtcctctcataaatga

SEQ ID NO: 273922 - DNA, 33 bp, Homo sapien
gatattttagagcaaaggtcctctcataaatga

SEQ ID NO: 273923 - DNA, 33 bp, Homo sapien
gttacagtcattttgaatatatactttaacata

SEQ ID NO: 273924 - DNA, 33 bp, Homo sapien
gttacagtcattttgagtatatactttaacata

SEQ ID NO: 273925 - DNA, 33 bp, Homo sapien
gcttttttcccttcacaaagtccacacatccat

SEQ ID NO: 273926 - DNA, 33 bp, Homo sapien
gcttttttcccttcacgaagtccacacatccat

SEQ ID NO: 273927 - DNA, 33 bp, Homo sapien
tgtgcatgattgaggactatctctgtgttaatt

SEQ ID NO: 273928 - DNA, 33 bp, Homo sapien
tgtgcatgattgaggattatctctgtgttaatt

SEQ ID NO: 273929 - DNA, 33 bp, Homo sapien
tacagaatttgtagataacaaccggagctggta

SEQ ID NO: 273930 - DNA, 33 bp, Homo sapien
tacagaatttgtagattacaaccggagctggta

SEQ ID NO: 273931 - DNA, 33 bp, Homo sapien
gcctttcttggcaaaacgaatagaaagccatct

SEQ ID NO: 273932 - DNA, 33 bp, Homo sapien
gcctttcttggcaaaatgaatagaaagccatct

SEQ ID NO: 273933 - DNA, 33 bp, Homo sapien
ccctcctacacagtgcaactatctgctttcctt

SEQ ID NO: 273934 - DNA, 33 bp, Homo sapien
ccctcctacacagtgcgactatctgctttcctt

SEQ ID NO: 273935 - DNA, 33 bp, Homo sapien
gaatgagtggattcacaaaagtctatataaacc

SEQ ID NO: 273936 - DNA, 33 bp, Homo sapien
gaatgagtggattcacgaaagtctatataaacc

SEQ ID NO: 273937 - DNA, 33 bp, Homo sapien
ctgtccagggctttaacaggtgaaggccaggta

SEQ ID NO: 273938 - DNA, 33 bp, Homo sapien
ctgtccagggctttaataggtgaaggccaggta

SEQ ID NO: 273939 - DNA, 33 bp, Homo sapien
aacaatctgcagtacaagacaaaaaattgagaa

SEQ ID NO: 273940 - DNA, 33 bp, Homo sapien
aacaatctgcagtacaggacaaaaaattgagaa

SEQ ID NO: 273941 - DNA, 33 bp, Homo sapien
gagagattgtgactctcaacataacagagtttt

SEQ ID NO: 273942 - DNA, 33 bp, Homo sapien
gagagattgtgactcttaacataacagagtttt

SEQ ID NO: 273943 - DNA, 33 bp, Homo sapien
gggactggtcaggaggacaatggagccaataca

SEQ ID NO: 273944 - DNA, 33 bp, Homo sapien
gggactggtcaggagggcaatggagccaataca

SEQ ID NO: 273945 - DNA, 33 bp, Homo sapien
gtatcagcttcacacacgaaacttttgcttcct

SEQ ID NO: 273946 - DNA, 33 bp, Homo sapien
gtatcagcttcacacatgaaacttttgcttcct

SEQ ID NO: 273947 - DNA, 33 bp, Homo sapien
gtggctgatgttagtcaagaagtgaggggcatg

SEQ ID NO: 273948 - DNA, 33 bp, Homo sapien
gtggctgatgttagtcgagaagtgaggggcatg

SEQ ID NO: 273949 - DNA, 33 bp, Homo sapien
tgcatcccttaagtcacctcaattacctcatat

SEQ ID NO: 273950 - DNA, 33 bp, Homo sapien
tgcatcccttaagtcatctcaattacctcatat

SEQ ID NO: 273951 - DNA, 33 bp, Homo sapien
agtcattgcaaaatcaatactcctaccctgaat

SEQ ID NO: 273952 - DNA, 33 bp, Homo sapien
agtcattgcaaaatcagtactcctaccctgaat

SEQ ID NO: 273953 - DNA, 33 bp, Homo sapien
tttagaatccaaaacactgatattaacaaataa

SEQ ID NO: 273954 - DNA, 33 bp, Homo sapien
tttagaatccaaaacattgatattaacaaataa

SEQ ID NO: 273955 - DNA, 33 bp, Homo sapien
ccaaataatttcggcacaaaatgatagtatcat

SEQ ID NO: 273956 - DNA, 33 bp, Homo sapien
ccaaataatttcggcataaaatgatagtatcat

SEQ ID NO: 273957 - DNA, 33 bp, Homo sapien
caggcttggtagattactaaggcatctcctgca

SEQ ID NO: 273958 - DNA, 33 bp, Homo sapien
caggcttggtagattattaaggcatctcctgca

SEQ ID NO: 273959 - DNA, 33 bp, Homo sapien
gtttttttaggcagcaataaataacatacatgt

SEQ ID NO: 273960 - DNA, 33 bp, Homo sapien
gtttttttaggcagcactaaataacatacatgt

SEQ ID NO: 273961 - DNA, 33 bp, Homo sapien
tggacaacccagtccacgtagtacaggatctgc

SEQ ID NO: 273962 - DNA, 33 bp, Homo sapien
tggacaacccagtccaggtagtacaggatctgc

SEQ ID NO: 273963 - DNA, 33 bp, Homo sapien
ccacatacatacacaaaaaaatattttcatctc

SEQ ID NO: 273964 - DNA, 33 bp, Homo sapien
ccacatacatacacaacaaaatattttcatctc

SEQ ID NO: 273965 - DNA, 33 bp, Homo sapien
gaggtctgttgaaaataattcaggtcctttaga

SEQ ID NO: 273966 - DNA, 33 bp, Homo sapien
gaggtctgttgaaaatcattcaggtcctttaga

SEQ ID NO: 273967 - DNA, 33 bp, Homo sapien
tctatttcttgttgccaccaataccatgatcga

SEQ ID NO: 273968 - DNA, 33 bp, Homo sapien
tctatttcttgttgccgccaataccatgatcga

SEQ ID NO: 273969 - DNA, 33 bp, Homo sapien
aaagcttgaataatgcacggtactttataaaat

SEQ ID NO: 273970 - DNA, 33 bp, Homo sapien
aaagcttgaataatgcgcggtactttataaaat

SEQ ID NO: 273971 - DNA, 33 bp, Homo sapien
tgtttggcttttgagagaaactatatgtgctgg

SEQ ID NO: 273972 - DNA, 33 bp, Homo sapien
tgtttggcttttgagataaactatatgtgctgg

SEQ ID NO: 273973 - DNA, 33 bp, Homo sapien
accttccttgtttcccaggagcatgagacagct

SEQ ID NO: 273974 - DNA, 33 bp, Homo sapien
accttccttgtttcccgggagcatgagacagct

SEQ ID NO: 273975 - DNA, 33 bp, Homo sapien
gtttctgtctttttgaatattgatttttgacta

SEQ ID NO: 273976 - DNA, 33 bp, Homo sapien
gtttctgtctttttgagtattgatttttgacta

SEQ ID NO: 273977 - DNA, 33 bp, Homo sapien
tgtctcacaaactaacacatactggcagggata

SEQ ID NO: 273978 - DNA, 33 bp, Homo sapien
tgtctcacaaactaacgcatactggcagggata

SEQ ID NO: 273979 - DNA, 33 bp, Homo sapien
aatggtctgactttggaagttgcctcaaacatt

SEQ ID NO: 273980 - DNA, 33 bp, Homo sapien
aatggtctgactttggcagttgcctcaaacatt

SEQ ID NO: 273981 - DNA, 33 bp, Homo sapien
taattgtacagagaaacaatatttagcaaaaca

SEQ ID NO: 273982 - DNA, 33 bp, Homo sapien
taattgtacagagaaagaatatttagcaaaaca

SEQ ID NO: 273983 - DNA, 33 bp, Homo sapien
aataaaatgtagatagaaactgtagaaaagtct

SEQ ID NO: 273984 - DNA, 33 bp, Homo sapien
aataaaatgtagataggaactgtagaaaagtct

SEQ ID NO: 273985 - DNA, 33 bp, Homo sapien
tgaatatccaggttaccgatggcaaatccatac

SEQ ID NO: 273986 - DNA, 33 bp, Homo sapien
tgaatatccaggttactgatggcaaatccatac

SEQ ID NO: 273987 - DNA, 33 bp, Homo sapien
ttagccattggttataccatacatatattttat

SEQ ID NO: 273988 - DNA, 33 bp, Homo sapien
ttagccattggttatatcatacatatattttat

SEQ ID NO: 273989 - DNA, 33 bp, Homo sapien
tcttgttctgagtgtgcagagtccttcaggcaa

SEQ ID NO: 273990 - DNA, 33 bp, Homo sapien
tcttgttctgagtgtgtagagtccttcaggcaa

SEQ ID NO: 273991 - DNA, 33 bp, Homo sapien
actcccttaaggatcaaataaagatgaataagc

SEQ ID NO: 273992 - DNA, 33 bp, Homo sapien
actcccttaaggatcacataaagatgaataagc

SEQ ID NO: 273993 - DNA, 33 bp, Homo sapien
ctgcgctcagtgagtacccctagcctgaagtcc

SEQ ID NO: 273994 - DNA, 33 bp, Homo sapien
ctgcgctcagtgagtatccctagcctgaagtcc

SEQ ID NO: 273995 - DNA, 33 bp, Homo sapien
gaatggatatagaaaacgtatacactggtgcaa

SEQ ID NO: 273996 - DNA, 33 bp, Homo sapien
gaatggatatagaaaatgtatacactggtgcaa

SEQ ID NO: 273997 - DNA, 33 bp, Homo sapien
ccagtatttaattgcaaaactgaggtattaatt

SEQ ID NO: 273998 - DNA, 33 bp, Homo sapien
ccagtatttaattgcataactgaggtattaatt

SEQ ID NO: 273999 - DNA, 33 bp, Homo sapien
taaaagtccaagtttaactatacctaaccagaa

SEQ ID NO: 274000 - DNA, 33 bp, Homo sapien
taaaagtccaagtttatctatacctaaccagaa

SEQ ID NO: 274001 - DNA, 33 bp, Homo sapien
gaaagccctcgggaccaagaatcaatcaatcct

SEQ ID NO: 274002 - DNA, 33 bp, Homo sapien
gaaagccctcgggaccgagaatcaatcaatcct

SEQ ID NO: 274003 - DNA, 33 bp, Homo sapien
tcatggggctttgcatcaggagtgagaataatc

SEQ ID NO: 274004 - DNA, 33 bp, Homo sapien
tcatggggctttgcattaggagtgagaataatc

SEQ ID NO: 274005 - DNA, 33 bp, Homo sapien
acatgatagaaggaaacgaaaacacaaagaagt

SEQ ID NO: 274006 - DNA, 33 bp, Homo sapien
acatgatagaaggaaatgaaaacacaaagaagt

SEQ ID NO: 274007 - DNA, 33 bp, Homo sapien
cacacattgtttgacacggaaagtgagtatttt

SEQ ID NO: 274008 - DNA, 33 bp, Homo sapien
cacacattgtttgacatggaaagtgagtatttt

SEQ ID NO: 274009 - DNA, 33 bp, Homo sapien
cataaagcaacttctcaagactttttgcccttg

SEQ ID NO: 274010 - DNA, 33 bp, Homo sapien
cataaagcaacttctccagactttttgcccttg

SEQ ID NO: 274011 - DNA, 33 bp, Homo sapien
ccctttccaagcaacaactgcagagtgcatttt

SEQ ID NO: 274012 - DNA, 33 bp, Homo sapien
ccctttccaagcaacacctgcagagtgcatttt

SEQ ID NO: 274013 - DNA, 33 bp, Homo sapien
aaaaaaagtgtcctgacaaatgttaccagcagc

SEQ ID NO: 274014 - DNA, 33 bp, Homo sapien
aaaaaaagtgtcctgagaaatgttaccagcagc

SEQ ID NO: 274015 - DNA, 33 bp, Homo sapien
ggaatgcactgttttccagctctgggcaatacc

SEQ ID NO: 274016 - DNA, 33 bp, Homo sapien
ggaatgcactgttttctagctctgggcaatacc

SEQ ID NO: 274017 - DNA, 33 bp, Homo sapien
tcttaagctgggtgaacctaagcatggttagtt

SEQ ID NO: 274018 - DNA, 33 bp, Homo sapien
tcttaagctgggtgaatctaagcatggttagtt

SEQ ID NO: 274019 - DNA, 33 bp, Homo sapien
aggagcaggcagtgtaaataggaggctgtttag

SEQ ID NO: 274020 - DNA, 33 bp, Homo sapien
aggagcaggcagtgtatataggaggctgtttag

SEQ ID NO: 274021 - DNA, 33 bp, Homo sapien
agggaacggaagcttacaccattttaagggatg

SEQ ID NO: 274022 - DNA, 33 bp, Homo sapien
agggaacggaagcttataccattttaagggatg

SEQ ID NO: 274023 - DNA, 33 bp, Homo sapien
atttgaaaggctctcaatagcttctgtttcctc

SEQ ID NO: 274024 - DNA, 33 bp, Homo sapien
atttgaaaggctctcattagcttctgtttcctc

SEQ ID NO: 274025 - DNA, 33 bp, Homo sapien
aaaggaggattgaatcagaagaccctcagactg

SEQ ID NO: 274026 - DNA, 33 bp, Homo sapien
aaaggaggattgaatcggaagaccctcagactg

SEQ ID NO: 274027 - DNA, 33 bp, Homo sapien
ttatcagatatgctatcaagagtttttaatcta

SEQ ID NO: 274028 - DNA, 33 bp, Homo sapien
ttatcagatatgctatgaagagtttttaatcta

SEQ ID NO: 274029 - DNA, 33 bp, Homo sapien
agctagatttgtagaccaggctgctggctggag

SEQ ID NO: 274030 - DNA, 33 bp, Homo sapien
agctagatttgtagactaggctgctggctggag

SEQ ID NO: 274031 - DNA, 33 bp, Homo sapien
agctctctatctctacactcatttcaattgcct

SEQ ID NO: 274032 - DNA, 33 bp, Homo sapien
agctctctatctctacgctcatttcaattgcct

SEQ ID NO: 274033 - DNA, 33 bp, Homo sapien
ccactttgaatattacacattagtacttagttt

SEQ ID NO: 274034 - DNA, 33 bp, Homo sapien
ccactttgaatattactcattagtacttagttt

SEQ ID NO: 274035 - DNA, 33 bp, Homo sapien
cagagaagtgccaagacacttatttttgtgagt

SEQ ID NO: 274036 - DNA, 33 bp, Homo sapien
cagagaagtgccaagatacttatttttgtgagt

SEQ ID NO: 274037 - DNA, 33 bp, Homo sapien
taaatgtggccaattcaagtcagtttcttacca

SEQ ID NO: 274038 - DNA, 33 bp, Homo sapien
taaatgtggccaattcgagtcagtttcttacca

SEQ ID NO: 274039 - DNA, 33 bp, Homo sapien
tcccaagcaagaataaaggaataaggcaagtca

SEQ ID NO: 274040 - DNA, 33 bp, Homo sapien
tcccaagcaagaataagggaataaggcaagtca

SEQ ID NO: 274041 - DNA, 33 bp, Homo sapien
aagtcgtacaaatagccagtgctaggttctgaa

SEQ ID NO: 274042 - DNA, 33 bp, Homo sapien
aagtcgtacaaatagctagtgctaggttctgaa

SEQ ID NO: 274043 - DNA, 33 bp, Homo sapien
tctccaggataacatcaaaatgcctgtcagtgt

SEQ ID NO: 274044 - DNA, 33 bp, Homo sapien
tctccaggataacatccaaatgcctgtcagtgt

SEQ ID NO: 274045 - DNA, 33 bp, Homo sapien
gaaaacatctctgtaacgcaagaactccaaagg

SEQ ID NO: 274046 - DNA, 33 bp, Homo sapien
gaaaacatctctgtaatgcaagaactccaaagg

SEQ ID NO: 274047 - DNA, 33 bp, Homo sapien
ttttgttcagcaaatgaatgatgatgctaaaaa

SEQ ID NO: 274048 - DNA, 33 bp, Homo sapien
ttttgttcagcaaatggatgatgatgctaaaaa

SEQ ID NO: 274049 - DNA, 33 bp, Homo sapien
tcctttttcatactaaatctttgcaatctcatt

SEQ ID NO: 274050 - DNA, 33 bp, Homo sapien
tcctttttcatactaagtctttgcaatctcatt

SEQ ID NO: 274051 - DNA, 33 bp, Homo sapien
gttgcatcttttattaagctatttgcgtctcaa

SEQ ID NO: 274052 - DNA, 33 bp, Homo sapien
gttgcatcttttattaggctatttgcgtctcaa

SEQ ID NO: 274053 - DNA, 33 bp, Homo sapien
ctgcatctcatggagaaacattgccacgattac

SEQ ID NO: 274054 - DNA, 33 bp, Homo sapien
ctgcatctcatggagacacattgccacgattac

SEQ ID NO: 274055 - DNA, 33 bp, Homo sapien
aattgttactttgactcagatcctggtctccat

SEQ ID NO: 274056 - DNA, 33 bp, Homo sapien
aattgttactttgactgagatcctggtctccat

SEQ ID NO: 274057 - DNA, 33 bp, Homo sapien
ctgacacattccctgtcaatttcttgagtttct

SEQ ID NO: 274058 - DNA, 33 bp, Homo sapien
ctgacacattccctgttaatttcttgagtttct

SEQ ID NO: 274059 - DNA, 33 bp, Homo sapien
cagtgttagtaattatgaagagggcaggagaaa

SEQ ID NO: 274060 - DNA, 33 bp, Homo sapien
cagtgttagtaattattaagagggcaggagaaa

SEQ ID NO: 274061 - DNA, 33 bp, Homo sapien
tccctgttctaagtgacaagccttcaattaccc

SEQ ID NO: 274062 - DNA, 33 bp, Homo sapien
tccctgttctaagtgataagccttcaattaccc

SEQ ID NO: 274063 - DNA, 33 bp, Homo sapien
agctgtacattcttgacagtcccattacttgag

SEQ ID NO: 274064 - DNA, 33 bp, Homo sapien
agctgtacattcttgatagtcccattacttgag

SEQ ID NO: 274065 - DNA, 33 bp, Homo sapien
tgaagaaacaaagtcacagagaagttagatgat

SEQ ID NO: 274066 - DNA, 33 bp, Homo sapien
tgaagaaacaaagtcagagagaagttagatgat

SEQ ID NO: 274067 - DNA, 33 bp, Homo sapien
catgcttcctaaaggacggcaacatttggagct

SEQ ID NO: 274068 - DNA, 33 bp, Homo sapien
catgcttcctaaaggatggcaacatttggagct

SEQ ID NO: 274069 - DNA, 33 bp, Homo sapien
tatctggagagtaaagaaagccccagatatact

SEQ ID NO: 274070 - DNA, 33 bp, Homo sapien
tatctggagagtaaagcaagccccagatatact

SEQ ID NO: 274071 - DNA, 33 bp, Homo sapien
cttatgtctgttttaacacttgaaaggttacag

SEQ ID NO: 274072 - DNA, 33 bp, Homo sapien
cttatgtctgttttaatacttgaaaggttacag

SEQ ID NO: 274073 - DNA, 33 bp, Homo sapien
gctgttctgcagcttccacttgtgatacccagg

SEQ ID NO: 274074 - DNA, 33 bp, Homo sapien
gctgttctgcagcttctacttgtgatacccagg

SEQ ID NO: 274075 - DNA, 33 bp, Homo sapien
ataaccacaagtcctagccttccagctgtctca

SEQ ID NO: 274076 - DNA, 33 bp, Homo sapien
ataaccacaagtcctatccttccagctgtctca

SEQ ID NO: 274077 - DNA, 33 bp, Homo sapien
acatctagttacttcactcttccactttcttct

SEQ ID NO: 274078 - DNA, 33 bp, Homo sapien
acatctagttacttcattcttccactttcttct

SEQ ID NO: 274079 - DNA, 33 bp, Homo sapien
gcaggggagagactcacggatgattcaaggctg

SEQ ID NO: 274080 - DNA, 33 bp, Homo sapien
gcaggggagagactcatggatgattcaaggctg

SEQ ID NO: 274081 - DNA, 33 bp, Homo sapien
actacatgcttgccaaaacttgctactgtctat

SEQ ID NO: 274082 - DNA, 33 bp, Homo sapien
actacatgcttgccaacacttgctactgtctat

SEQ ID NO: 274083 - DNA, 33 bp, Homo sapien
ctcattgtggtttggaataccctaatgactaat

SEQ ID NO: 274084 - DNA, 33 bp, Homo sapien
ctcattgtggtttggagtaccctaatgactaat

SEQ ID NO: 274085 - DNA, 33 bp, Homo sapien
ggcagaaggacatccacgaaagctgccactgga

SEQ ID NO: 274086 - DNA, 33 bp, Homo sapien
ggcagaaggacatccatgaaagctgccactgga

SEQ ID NO: 274087 - DNA, 33 bp, Homo sapien
cttgactggtgcacaaacatcactcacagcttt

SEQ ID NO: 274088 - DNA, 33 bp, Homo sapien
cttgactggtgcacaatcatcactcacagcttt

SEQ ID NO: 274089 - DNA, 33 bp, Homo sapien
agagttccgttgtccactactgaaccttgacca

SEQ ID NO: 274090 - DNA, 33 bp, Homo sapien
agagttccgttgtccattactgaaccttgacca

SEQ ID NO: 274091 - DNA, 33 bp, Homo sapien
attggcattataaagaagtgatgaatgggaact

SEQ ID NO: 274092 - DNA, 33 bp, Homo sapien
attggcattataaagaggtgatgaatgggaact

SEQ ID NO: 274093 - DNA, 33 bp, Homo sapien
tctccatgagagttccactcctgcagcaaactt

SEQ ID NO: 274094 - DNA, 33 bp, Homo sapien
tctccatgagagttccgctcctgcagcaaactt

SEQ ID NO: 274095 - DNA, 33 bp, Homo sapien
tgaaaccgatcttttacacctggcatacatacc

SEQ ID NO: 274096 - DNA, 33 bp, Homo sapien
tgaaaccgatcttttatacctggcatacatacc

SEQ ID NO: 274097 - DNA, 33 bp, Homo sapien
gccaagtaagggaggaaataaagatgcataaag

SEQ ID NO: 274098 - DNA, 33 bp, Homo sapien
gccaagtaagggaggacataaagatgcataaag

SEQ ID NO: 274099 - DNA, 33 bp, Homo sapien
atcctattgtatagaccggaaaatagctataaa

SEQ ID NO: 274100 - DNA, 33 bp, Homo sapien
atcctattgtatagactggaaaatagctataaa

SEQ ID NO: 274101 - DNA, 33 bp, Homo sapien
tagcatgggctaggataatagctaaagcatgta

SEQ ID NO: 274102 - DNA, 33 bp, Homo sapien
tagcatgggctaggatgatagctaaagcatgta

SEQ ID NO: 274103 - DNA, 33 bp, Homo sapien
ggtgtatatacttgcaaacagacctaagagtta

SEQ ID NO: 274104 - DNA, 33 bp, Homo sapien
ggtgtatatacttgcagacagacctaagagtta

SEQ ID NO: 274105 - DNA, 33 bp, Homo sapien
cacaaaccagcccccaactgatcaacaaattca

SEQ ID NO: 274106 - DNA, 33 bp, Homo sapien
cacaaaccagcccccagctgatcaacaaattca

SEQ ID NO: 274107 - DNA, 33 bp, Homo sapien
gtcagagatgaagttacagtatggacgcagaga

SEQ ID NO: 274108 - DNA, 33 bp, Homo sapien
gtcagagatgaagttagagtatggacgcagaga

SEQ ID NO: 274109 - DNA, 33 bp, Homo sapien
aagtgtaggtagaaacaagtaaggatgaaagag

SEQ ID NO: 274110 - DNA, 33 bp, Homo sapien
aagtgtaggtagaaacgagtaaggatgaaagag

SEQ ID NO: 274111 - DNA, 33 bp, Homo sapien
aattggaaaaatgcccagcatagacaataactc

SEQ ID NO: 274112 - DNA, 33 bp, Homo sapien
aattggaaaaatgcccggcatagacaataactc

SEQ ID NO: 274113 - DNA, 33 bp, Homo sapien
ttgacctggtattctcaaggctggaaaatattt

SEQ ID NO: 274114 - DNA, 33 bp, Homo sapien
ttgacctggtattctcgaggctggaaaatattt

SEQ ID NO: 274115 - DNA, 33 bp, Homo sapien
actgctgatttccatccccttagttgacagtca

SEQ ID NO: 274116 - DNA, 33 bp, Homo sapien
actgctgatttccatcgccttagttgacagtca

SEQ ID NO: 274117 - DNA, 33 bp, Homo sapien
ctgtaagttcttatcaaagcaatttagggcaaa

SEQ ID NO: 274118 - DNA, 33 bp, Homo sapien
ctgtaagttcttatcatagcaatttagggcaaa

SEQ ID NO: 274119 - DNA, 33 bp, Homo sapien
gatcactcatttctggaaaaagcgtccttggaa

SEQ ID NO: 274120 - DNA, 33 bp, Homo sapien
gatcactcatttctggcaaaagcgtccttggaa

SEQ ID NO: 274121 - DNA, 33 bp, Homo sapien
ccccttggcagtattacggtggctctgtcccag

SEQ ID NO: 274122 - DNA, 33 bp, Homo sapien
ccccttggcagtattatggtggctctgtcccag

SEQ ID NO: 274123 - DNA, 33 bp, Homo sapien
ctttcagagtcctacaacatacaagcttctcgt

SEQ ID NO: 274124 - DNA, 33 bp, Homo sapien
ctttcagagtcctacagcatacaagcttctcgt

SEQ ID NO: 274125 - DNA, 33 bp, Homo sapien
acgaactgagaaatgacaacttatgagtgtctg

SEQ ID NO: 274126 - DNA, 33 bp, Homo sapien
acgaactgagaaatgagaacttatgagtgtctg

SEQ ID NO: 274127 - DNA, 33 bp, Homo sapien
ccaagtcattaaagcaaagccggatagttgaaa

SEQ ID NO: 274128 - DNA, 33 bp, Homo sapien
ccaagtcattaaagcagagccggatagttgaaa

SEQ ID NO: 274129 - DNA, 33 bp, Homo sapien
attgtctattgtcttccatgttcccatgcctag

SEQ ID NO: 274130 - DNA, 33 bp, Homo sapien
attgtctattgtcttcgatgttcccatgcctag

SEQ ID NO: 274131 - DNA, 33 bp, Homo sapien
taactgaacaatacaaacccagatggattgggt

SEQ ID NO: 274132 - DNA, 33 bp, Homo sapien
taactgaacaatacaagcccagatggattgggt

SEQ ID NO: 274133 - DNA, 33 bp, Homo sapien
ccatacctcttctcaactcaaccccatccttta

SEQ ID NO: 274134 - DNA, 33 bp, Homo sapien
ccatacctcttctcaattcaaccccatccttta

SEQ ID NO: 274135 - DNA, 33 bp, Homo sapien
agtaagtggtctacaacacacagaatatcaaca

SEQ ID NO: 274136 - DNA, 33 bp, Homo sapien
agtaagtggtctacaatacacagaatatcaaca

SEQ ID NO: 274137 - DNA, 33 bp, Homo sapien
aaaacttgcgttgagaatagaagtgcccataca

SEQ ID NO: 274138 - DNA, 33 bp, Homo sapien
aaaacttgcgttgagagtagaagtgcccataca

SEQ ID NO: 274139 - DNA, 33 bp, Homo sapien
tgaaaatcatgagtcaaacccaagtaacacttt

SEQ ID NO: 274140 - DNA, 33 bp, Homo sapien
tgaaaatcatgagtcacacccaagtaacacttt

SEQ ID NO: 274141 - DNA, 33 bp, Homo sapien
aaaacttgggtttcaaacatgatctatcaacca

SEQ ID NO: 274142 - DNA, 33 bp, Homo sapien
aaaacttgggtttcaatcatgatctatcaacca

SEQ ID NO: 274143 - DNA, 33 bp, Homo sapien
cacaacagtactaaaacggtaggtagatattat

SEQ ID NO: 274144 - DNA, 33 bp, Homo sapien
cacaacagtactaaaatggtaggtagatattat

SEQ ID NO: 274145 - DNA, 33 bp, Homo sapien
ttgtattaatagcttccaattccataattagcc

SEQ ID NO: 274146 - DNA, 33 bp, Homo sapien
ttgtattaatagcttcgaattccataattagcc

SEQ ID NO: 274147 - DNA, 33 bp, Homo sapien
gtcagtctttccattacgtagctaaagcaacta

SEQ ID NO: 274148 - DNA, 33 bp, Homo sapien
gtcagtctttccattatgtagctaaagcaacta

SEQ ID NO: 274149 - DNA, 33 bp, Homo sapien
tattgatcagaactgaaaaccctgacttgagaa

SEQ ID NO: 274150 - DNA, 33 bp, Homo sapien
tattgatcagaactgagaaccctgacttgagaa

SEQ ID NO: 274151 - DNA, 33 bp, Homo sapien
tgtcactgagtgccaaccatgtggtgctgagca

SEQ ID NO: 274152 - DNA, 33 bp, Homo sapien
tgtcactgagtgccaatcatgtggtgctgagca

SEQ ID NO: 274153 - DNA, 33 bp, Homo sapien
aaattcatctccttaccaactaaaatcaagggt

SEQ ID NO: 274154 - DNA, 33 bp, Homo sapien
aaattcatctccttactaactaaaatcaagggt

SEQ ID NO: 274155 - DNA, 33 bp, Homo sapien
tccttatgcaaatagaagtctgaaaacagacaa

SEQ ID NO: 274156 - DNA, 33 bp, Homo sapien
tccttatgcaaatagaggtctgaaaacagacaa

SEQ ID NO: 274157 - DNA, 33 bp, Homo sapien
tgaaactgtgtactacaagcagtgcaagaatgt

SEQ ID NO: 274158 - DNA, 33 bp, Homo sapien
tgaaactgtgtactacgagcagtgcaagaatgt

SEQ ID NO: 274159 - DNA, 33 bp, Homo sapien
gaaaacaatctcttccacttgatggagtatcca

SEQ ID NO: 274160 - DNA, 33 bp, Homo sapien
gaaaacaatctcttccccttgatggagtatcca

SEQ ID NO: 274161 - DNA, 33 bp, Homo sapien
tgtgaagagttcatgaacatttttaatccacca

SEQ ID NO: 274162 - DNA, 33 bp, Homo sapien
tgtgaagagttcatgatcatttttaatccacca

SEQ ID NO: 274163 - DNA, 33 bp, Homo sapien
ctcactgatgcaaagacgtaattttctctctcc

SEQ ID NO: 274164 - DNA, 33 bp, Homo sapien
ctcactgatgcaaagatgtaattttctctctcc

SEQ ID NO: 274165 - DNA, 33 bp, Homo sapien
gtaatgtttgagtaaacggatcaatgtggtctg

SEQ ID NO: 274166 - DNA, 33 bp, Homo sapien
gtaatgtttgagtaaatggatcaatgtggtctg

SEQ ID NO: 274167 - DNA, 33 bp, Homo sapien
ttctgtctttggatgcacctaactgctcagaag

SEQ ID NO: 274168 - DNA, 33 bp, Homo sapien
ttctgtctttggatgcccctaactgctcagaag

SEQ ID NO: 274169 - DNA, 33 bp, Homo sapien
ggtttcatttagagcagtaataaatacctggca

SEQ ID NO: 274170 - DNA, 33 bp, Homo sapien
ggtttcatttagagcattaataaatacctggca

SEQ ID NO: 274171 - DNA, 33 bp, Homo sapien
tctagattttcccttacaacacttgtactggat

SEQ ID NO: 274172 - DNA, 33 bp, Homo sapien
tctagattttcccttataacacttgtactggat

SEQ ID NO: 274173 - DNA, 33 bp, Homo sapien
tgtgcgtcagttctagcaatgccaaaaagagga

SEQ ID NO: 274174 - DNA, 33 bp, Homo sapien
tgtgcgtcagttctagtaatgccaaaaagagga

SEQ ID NO: 274175 - DNA, 33 bp, Homo sapien
taccaaaacctgcatccgaaataacttctaaga

SEQ ID NO: 274176 - DNA, 33 bp, Homo sapien
taccaaaacctgcatctgaaataacttctaaga

SEQ ID NO: 274177 - DNA, 33 bp, Homo sapien
ctttgctacattaaaacgatggaaggcaaaaat

SEQ ID NO: 274178 - DNA, 33 bp, Homo sapien
ctttgctacattaaaatgatggaaggcaaaaat

SEQ ID NO: 274179 - DNA, 33 bp, Homo sapien
aataggctacgataaaccagtttgcaaaattcc

SEQ ID NO: 274180 - DNA, 33 bp, Homo sapien
aataggctacgataaatcagtttgcaaaattcc

SEQ ID NO: 274181 - DNA, 33 bp, Homo sapien
tcaaagccggagctaaccttgtattttatggat

SEQ ID NO: 274182 - DNA, 33 bp, Homo sapien
tcaaagccggagctaatcttgtattttatggat

SEQ ID NO: 274183 - DNA, 33 bp, Homo sapien
gagtgcttagttacacagatcctctttattttt

SEQ ID NO: 274184 - DNA, 33 bp, Homo sapien
gagtgcttagttacacggatcctctttattttt

SEQ ID NO: 274185 - DNA, 33 bp, Homo sapien
atctctgacttgggcactattttctcctcctta

SEQ ID NO: 274186 - DNA, 33 bp, Homo sapien
atctctgacttgggcattattttctcctcctta

SEQ ID NO: 274187 - DNA, 33 bp, Homo sapien
agcaacacagttgtacacctgagagccccaaag

SEQ ID NO: 274188 - DNA, 33 bp, Homo sapien
agcaacacagttgtacccctgagagccccaaag

SEQ ID NO: 274189 - DNA, 33 bp, Homo sapien
attcttctgatcaaaccgctaacattgggctga

SEQ ID NO: 274190 - DNA, 33 bp, Homo sapien
attcttctgatcaaactgctaacattgggctga

SEQ ID NO: 274191 - DNA, 33 bp, Homo sapien
caatccaccactatgaaaatgggatatctgtct

SEQ ID NO: 274192 - DNA, 33 bp, Homo sapien
caatccaccactatgagaatgggatatctgtct

SEQ ID NO: 274193 - DNA, 33 bp, Homo sapien
gatagaattgggctcacgtccaatcagacccat

SEQ ID NO: 274194 - DNA, 33 bp, Homo sapien
gatagaattgggctcatgtccaatcagacccat

SEQ ID NO: 274195 - DNA, 33 bp, Homo sapien
ttgtggaggcagcaaagggtacttaaatgaagt

SEQ ID NO: 274196 - DNA, 33 bp, Homo sapien
ttgtggaggcagcaaatggtacttaaatgaagt

SEQ ID NO: 274197 - DNA, 33 bp, Homo sapien
aaaatgaaaagtgcaaagtgaagaaggagaaga

SEQ ID NO: 274198 - DNA, 33 bp, Homo sapien
aaaatgaaaagtgcaaggtgaagaaggagaaga

SEQ ID NO: 274199 - DNA, 33 bp, Homo sapien
cagtctttcctactcaaggatgttgcatcatca

SEQ ID NO: 274200 - DNA, 33 bp, Homo sapien
cagtctttcctactcagggatgttgcatcatca

SEQ ID NO: 274201 - DNA, 33 bp, Homo sapien
tttttgcaattgaaatgaagacctattggttag

SEQ ID NO: 274202 - DNA, 33 bp, Homo sapien
tttttgcaattgaaattaagacctattggttag

SEQ ID NO: 274203 - DNA, 33 bp, Homo sapien
gtgttcaatatttcccacagatgctttttacct

SEQ ID NO: 274204 - DNA, 33 bp, Homo sapien
gtgttcaatatttcccgcagatgctttttacct

SEQ ID NO: 274205 - DNA, 33 bp, Homo sapien
agtccgttctctgtagccaaaaaaccaggaaag

SEQ ID NO: 274206 - DNA, 33 bp, Homo sapien
agtccgttctctgtagtcaaaaaaccaggaaag

SEQ ID NO: 274207 - DNA, 33 bp, Homo sapien
gaatggattttaaaaaatgatccaactatgtac

SEQ ID NO: 274208 - DNA, 33 bp, Homo sapien
gaatggattttaaaaagtgatccaactatgtac

SEQ ID NO: 274209 - DNA, 33 bp, Homo sapien
cagtatatgctgaagaagaatttgataaaaatt

SEQ ID NO: 274210 - DNA, 33 bp, Homo sapien
cagtatatgctgaagaggaatttgataaaaatt

SEQ ID NO: 274211 - DNA, 33 bp, Homo sapien
gaggaacctgtgctaactgcaagcccattgcaa

SEQ ID NO: 274212 - DNA, 33 bp, Homo sapien
gaggaacctgtgctaattgcaagcccattgcaa

SEQ ID NO: 274213 - DNA, 33 bp, Homo sapien
aaattcttggaaactccccaaactgggctcaga

SEQ ID NO: 274214 - DNA, 33 bp, Homo sapien
aaattcttggaaactctccaaactgggctcaga

SEQ ID NO: 274215 - DNA, 33 bp, Homo sapien
acagccctgtgcctacactcggggcctgagaaa

SEQ ID NO: 274216 - DNA, 33 bp, Homo sapien
acagccctgtgcctacgctcggggcctgagaaa

SEQ ID NO: 274217 - DNA, 33 bp, Homo sapien
cgcacactggcacttacgttctgagaaaaagac

SEQ ID NO: 274218 - DNA, 33 bp, Homo sapien
cgcacactggcacttatgttctgagaaaaagac

SEQ ID NO: 274219 - DNA, 33 bp, Homo sapien
agcacagagatgctaaacaacagctagaccttg

SEQ ID NO: 274220 - DNA, 33 bp, Homo sapien
agcacagagatgctaagcaacagctagaccttg

SEQ ID NO: 274221 - DNA, 33 bp, Homo sapien
cttttctgagtttggcaattttactataaaata

SEQ ID NO: 274222 - DNA, 33 bp, Homo sapien
cttttctgagtttggcgattttactataaaata

SEQ ID NO: 274223 - DNA, 33 bp, Homo sapien
aaaatgtcaccacatcaattcaattgcctaaac

SEQ ID NO: 274224 - DNA, 33 bp, Homo sapien
aaaatgtcaccacatcgattcaattgcctaaac

SEQ ID NO: 274225 - DNA, 33 bp, Homo sapien
gcccaaagttgggaagaaagtaagtgaatggga

SEQ ID NO: 274226 - DNA, 33 bp, Homo sapien
gcccaaagttgggaaggaagtaagtgaatggga

SEQ ID NO: 274227 - DNA, 33 bp, Homo sapien
ataaagcagaagcttaagcaccaaagtaaaatc

SEQ ID NO: 274228 - DNA, 33 bp, Homo sapien
ataaagcagaagcttaggcaccaaagtaaaatc

SEQ ID NO: 274229 - DNA, 33 bp, Homo sapien
ggtagcggttaaaagcagatggtcaagtcccat

SEQ ID NO: 274230 - DNA, 33 bp, Homo sapien
ggtagcggttaaaagcggatggtcaagtcccat

SEQ ID NO: 274231 - DNA, 33 bp, Homo sapien
aaaataaactgaacagcctcaaagcaggctttt

SEQ ID NO: 274232 - DNA, 33 bp, Homo sapien
aaaataaactgaacaggctcaaagcaggctttt

SEQ ID NO: 274233 - DNA, 33 bp, Homo sapien
tgttgtgtgaaatagcagccctactgaagctta

SEQ ID NO: 274234 - DNA, 33 bp, Homo sapien
tgttgtgtgaaatagcggccctactgaagctta

SEQ ID NO: 274235 - DNA, 33 bp, Homo sapien
gcatactgtttggaaaatggcaaaaaataaggg

SEQ ID NO: 274236 - DNA, 33 bp, Homo sapien
gcatactgtttggaaagtggcaaaaaataaggg

SEQ ID NO: 274237 - DNA, 33 bp, Homo sapien
atagtcaaaacagcaggctcgttctggaggaga

SEQ ID NO: 274238 - DNA, 33 bp, Homo sapien
atagtcaaaacagcagtctcgttctggaggaga

SEQ ID NO: 274239 - DNA, 33 bp, Homo sapien
catctgagataggctcacgaagaatagtcaaaa

SEQ ID NO: 274240 - DNA, 33 bp, Homo sapien
catctgagataggctcccgaagaatagtcaaaa

SEQ ID NO: 274241 - DNA, 33 bp, Homo sapien
gacttgccctttcgcacacttacgcagttcatt

SEQ ID NO: 274242 - DNA, 33 bp, Homo sapien
gacttgccctttcgcagacttacgcagttcatt

SEQ ID NO: 274243 - DNA, 33 bp, Homo sapien
aatcagataatgggtacgtatggtgctagatca

SEQ ID NO: 274244 - DNA, 33 bp, Homo sapien
aatcagataatgggtatgtatggtgctagatca

SEQ ID NO: 274245 - DNA, 33 bp, Homo sapien
ccacccatctaaaataacatttgccctttgcac

SEQ ID NO: 274246 - DNA, 33 bp, Homo sapien
ccacccatctaaaatagcatttgccctttgcac

SEQ ID NO: 274247 - DNA, 33 bp, Homo sapien
catgactatgaacttcaaaagcatgacctttaa

SEQ ID NO: 274248 - DNA, 33 bp, Homo sapien
catgactatgaacttcgaaagcatgacctttaa

SEQ ID NO: 274249 - DNA, 33 bp, Homo sapien
gatacctgcactttggaattgttgtaaaaattt

SEQ ID NO: 274250 - DNA, 33 bp, Homo sapien
gatacctgcactttgggattgttgtaaaaattt

SEQ ID NO: 274251 - DNA, 33 bp, Homo sapien
taattgtattgttttacagtactgcacacccta

SEQ ID NO: 274252 - DNA, 33 bp, Homo sapien
taattgtattgttttatagtactgcacacccta

SEQ ID NO: 274253 - DNA, 33 bp, Homo sapien
tatagggtggtcagtacattggagaaaaaggca

SEQ ID NO: 274254 - DNA, 33 bp, Homo sapien
tatagggtggtcagtatattggagaaaaaggca

SEQ ID NO: 274255 - DNA, 33 bp, Homo sapien
aatcttgctaaaactgaaacttagcctggggtt

SEQ ID NO: 274256 - DNA, 33 bp, Homo sapien
aatcttgctaaaactgcaacttagcctggggtt

SEQ ID NO: 274257 - DNA, 33 bp, Homo sapien
aacattcctgccaagaacaactagaataccaga

SEQ ID NO: 274258 - DNA, 33 bp, Homo sapien
aacattcctgccaagagcaactagaataccaga

SEQ ID NO: 274259 - DNA, 33 bp, Homo sapien
tgggttggaaaatgctcaattggaaagaacatg

SEQ ID NO: 274260 - DNA, 33 bp, Homo sapien
tgggttggaaaatgctgaattggaaagaacatg

SEQ ID NO: 274261 - DNA, 33 bp, Homo sapien
ctaaattgcttaagaactgtcttactcctttag

SEQ ID NO: 274262 - DNA, 33 bp, Homo sapien
ctaaattgcttaagaattgtcttactcctttag

SEQ ID NO: 274263 - DNA, 33 bp, Homo sapien
tgaattggaactcagaactttctgactcaaaaa

SEQ ID NO: 274264 - DNA, 33 bp, Homo sapien
tgaattggaactcagatctttctgactcaaaaa

SEQ ID NO: 274265 - DNA, 33 bp, Homo sapien
tgtggttattttctcaatcattttcagccaaat

SEQ ID NO: 274266 - DNA, 33 bp, Homo sapien
tgtggttattttctcagtcattttcagccaaat

SEQ ID NO: 274267 - DNA, 33 bp, Homo sapien
aagggggcaaaggaaccagaaacggagtaggag

SEQ ID NO: 274268 - DNA, 33 bp, Homo sapien
aagggggcaaaggaacgagaaacggagtaggag

SEQ ID NO: 274269 - DNA, 33 bp, Homo sapien
cacctggacagttacaaaggaaggatgtttgaa

SEQ ID NO: 274270 - DNA, 33 bp, Homo sapien
cacctggacagttacagaggaaggatgtttgaa

SEQ ID NO: 274271 - DNA, 33 bp, Homo sapien
atacccgagtccttcaatccaatctgtgctcgg

SEQ ID NO: 274272 - DNA, 33 bp, Homo sapien
atacccgagtccttcagtccaatctgtgctcgg

SEQ ID NO: 274273 - DNA, 33 bp, Homo sapien
ctgtagattcaccaagaatttgacatgcccatg

SEQ ID NO: 274274 - DNA, 33 bp, Homo sapien
ctgtagattcaccaagcatttgacatgcccatg

SEQ ID NO: 274275 - DNA, 33 bp, Homo sapien
aaggtatttctaactgcactggcaaatgtggga

SEQ ID NO: 274276 - DNA, 33 bp, Homo sapien
aaggtatttctaactgtactggcaaatgtggga

SEQ ID NO: 274277 - DNA, 33 bp, Homo sapien
tcaagatacaatttgaagtattaaatctgtcat

SEQ ID NO: 274278 - DNA, 33 bp, Homo sapien
tcaagatacaatttgaggtattaaatctgtcat

SEQ ID NO: 274279 - DNA, 33 bp, Homo sapien
cttatttccttcctacatatttgacctgttttc

SEQ ID NO: 274280 - DNA, 33 bp, Homo sapien
cttatttccttcctacgtatttgacctgttttc

SEQ ID NO: 274281 - DNA, 33 bp, Homo sapien
tatgttagaaatgaacaaagaacttgagcctgg

SEQ ID NO: 274282 - DNA, 33 bp, Homo sapien
tatgttagaaatgaaccaagaacttgagcctgg

SEQ ID NO: 274283 - DNA, 33 bp, Homo sapien
tcattcttagacaacaatgtccttctgatcttt

SEQ ID NO: 274284 - DNA, 33 bp, Homo sapien
tcattcttagacaacagtgtccttctgatcttt

SEQ ID NO: 274285 - DNA, 33 bp, Homo sapien
ctgtggtattgtttctcaccggcactactcagc

SEQ ID NO: 274286 - DNA, 33 bp, Homo sapien
ctgtggtattgtttcttaccggcactactcagc

SEQ ID NO: 274287 - DNA, 33 bp, Homo sapien
gtgtgtatgtatatggacaactcttttcattta

SEQ ID NO: 274288 - DNA, 33 bp, Homo sapien
gtgtgtatgtatatgggcaactcttttcattta

SEQ ID NO: 274289 - DNA, 33 bp, Homo sapien
agaattatggtctgaaactaactggcctgctat

SEQ ID NO: 274290 - DNA, 33 bp, Homo sapien
agaattatggtctgaagctaactggcctgctat

SEQ ID NO: 274291 - DNA, 33 bp, Homo sapien
agagggcagaattccactagggaggtgtaagag

SEQ ID NO: 274292 - DNA, 33 bp, Homo sapien
agagggcagaattccagtagggaggtgtaagag

SEQ ID NO: 274293 - DNA, 33 bp, Homo sapien
cctgtttcatttttaacgctcttatctggcgag

SEQ ID NO: 274294 - DNA, 33 bp, Homo sapien
cctgtttcatttttaatgctcttatctggcgag

SEQ ID NO: 274295 - DNA, 33 bp, Homo sapien
cagtgctatctccatgcagttataggacttatg

SEQ ID NO: 274296 - DNA, 33 bp, Homo sapien
cagtgctatctccatgtagttataggacttatg

SEQ ID NO: 274297 - DNA, 33 bp, Homo sapien
gaggttaacaggctgaaagtgtcatcaatacat

SEQ ID NO: 274298 - DNA, 33 bp, Homo sapien
gaggttaacaggctgagagtgtcatcaatacat

SEQ ID NO: 274299 - DNA, 33 bp, Homo sapien
cttattttctaatataggcacttgatgctataa

SEQ ID NO: 274300 - DNA, 33 bp, Homo sapien
cttattttctaatatatgcacttgatgctataa

SEQ ID NO: 274301 - DNA, 33 bp, Homo sapien
tggcaatggaaagccaaatttaaagtagaataa

SEQ ID NO: 274302 - DNA, 33 bp, Homo sapien
tggcaatggaaagccacatttaaagtagaataa

SEQ ID NO: 274303 - DNA, 33 bp, Homo sapien
cattactgaagttttacgttttggacaaatgga

SEQ ID NO: 274304 - DNA, 33 bp, Homo sapien
cattactgaagttttatgttttggacaaatgga

SEQ ID NO: 274305 - DNA, 33 bp, Homo sapien
agcaatttttaccttccagactttctatacttt

SEQ ID NO: 274306 - DNA, 33 bp, Homo sapien
agcaatttttaccttcgagactttctatacttt

SEQ ID NO: 274307 - DNA, 33 bp, Homo sapien
ttattgctgaatcaagaagacaaagtatttgaa

SEQ ID NO: 274308 - DNA, 33 bp, Homo sapien
ttattgctgaatcaaggagacaaagtatttgaa

SEQ ID NO: 274309 - DNA, 33 bp, Homo sapien
tcaaaataatgtgtaactgattcattgatttaa

SEQ ID NO: 274310 - DNA, 33 bp, Homo sapien
tcaaaataatgtgtaattgattcattgatttaa

SEQ ID NO: 274311 - DNA, 33 bp, Homo sapien
accaaatggtggtagaccaaaatacagcacaca

SEQ ID NO: 274312 - DNA, 33 bp, Homo sapien
accaaatggtggtagatcaaaatacagcacaca

SEQ ID NO: 274313 - DNA, 33 bp, Homo sapien
attttttcacctggacaacagccggtttctaac

SEQ ID NO: 274314 - DNA, 33 bp, Homo sapien
attttttcacctggaccacagccggtttctaac

SEQ ID NO: 274315 - DNA, 33 bp, Homo sapien
caaacctgttcctcaactgttgctgaattaaat

SEQ ID NO: 274316 - DNA, 33 bp, Homo sapien
caaacctgttcctcaattgttgctgaattaaat

SEQ ID NO: 274317 - DNA, 33 bp, Homo sapien
ctgtggtgacaaagaacagtacgatcagagtcc

SEQ ID NO: 274318 - DNA, 33 bp, Homo sapien
ctgtggtgacaaagaagagtacgatcagagtcc

SEQ ID NO: 274319 - DNA, 33 bp, Homo sapien
gctcttggcaacatagaaacttttgtcatcttt

SEQ ID NO: 274320 - DNA, 33 bp, Homo sapien
gctcttggcaacataggaacttttgtcatcttt

SEQ ID NO: 274321 - DNA, 33 bp, Homo sapien
cttttatgcctatactaactactaaaacattta

SEQ ID NO: 274322 - DNA, 33 bp, Homo sapien
cttttatgcctatactgactactaaaacattta

SEQ ID NO: 274323 - DNA, 33 bp, Homo sapien
cttcaaagttagcttgaaagagaagtatctgag

SEQ ID NO: 274324 - DNA, 33 bp, Homo sapien
cttcaaagttagcttgcaagagaagtatctgag

SEQ ID NO: 274325 - DNA, 33 bp, Homo sapien
aacttttgtaatatgagtagcttcttgaaatta

SEQ ID NO: 274326 - DNA, 33 bp, Homo sapien
aacttttgtaatatgattagcttcttgaaatta

SEQ ID NO: 274327 - DNA, 33 bp, Homo sapien
catgtttcctaagtaaatcagcataaagagtaa

SEQ ID NO: 274328 - DNA, 33 bp, Homo sapien
catgtttcctaagtaattcagcataaagagtaa

SEQ ID NO: 274329 - DNA, 33 bp, Homo sapien
atcaaccttcttgtacagatgcactaatacatt

SEQ ID NO: 274330 - DNA, 33 bp, Homo sapien
atcaaccttcttgtacggatgcactaatacatt

SEQ ID NO: 274331 - DNA, 33 bp, Homo sapien
cattttttgagtatgaatatctccagttgacag

SEQ ID NO: 274332 - DNA, 33 bp, Homo sapien
cattttttgagtatgagtatctccagttgacag

SEQ ID NO: 274333 - DNA, 33 bp, Homo sapien
aatacaggcctagatactagcacttagttcata

SEQ ID NO: 274334 - DNA, 33 bp, Homo sapien
aatacaggcctagatattagcacttagttcata

SEQ ID NO: 274335 - DNA, 33 bp, Homo sapien
tcctaataaatctgggaattgagtaaagcttgc

SEQ ID NO: 274336 - DNA, 33 bp, Homo sapien
tcctaataaatctgggtattgagtaaagcttgc

SEQ ID NO: 274337 - DNA, 33 bp, Homo sapien
aggaaagatacatcctcagacctttcaaaattt

SEQ ID NO: 274338 - DNA, 33 bp, Homo sapien
aggaaagatacatccttagacctttcaaaattt

SEQ ID NO: 274339 - DNA, 33 bp, Homo sapien
ctgatttcaagctacccacgtgatgtccctaaa

SEQ ID NO: 274340 - DNA, 33 bp, Homo sapien
ctgatttcaagctaccgacgtgatgtccctaaa

SEQ ID NO: 274341 - DNA, 33 bp, Homo sapien
taaaatcactgttcatcaaactgcctcacacca

SEQ ID NO: 274342 - DNA, 33 bp, Homo sapien
taaaatcactgttcatgaaactgcctcacacca

SEQ ID NO: 274343 - DNA, 33 bp, Homo sapien
cccagcacttttggaagctaaggtgagaggatt

SEQ ID NO: 274344 - DNA, 33 bp, Homo sapien
cccagcacttttggaatctaaggtgagaggatt

SEQ ID NO: 274345 - DNA, 33 bp, Homo sapien
gaatgaaaatccaataaccctaccacgagcttt

SEQ ID NO: 274346 - DNA, 33 bp, Homo sapien
gaatgaaaatccaatatccctaccacgagcttt

SEQ ID NO: 274347 - DNA, 33 bp, Homo sapien
ccactcttctctaaaccagttccttgtcctttg

SEQ ID NO: 274348 - DNA, 33 bp, Homo sapien
ccactcttctctaaactagttccttgtcctttg

SEQ ID NO: 274349 - DNA, 33 bp, Homo sapien
taggtaccacagtaaaagagaagcatataggag

SEQ ID NO: 274350 - DNA, 33 bp, Homo sapien
taggtaccacagtaaatgagaagcatataggag

SEQ ID NO: 274351 - DNA, 33 bp, Homo sapien
gatggcagtgtcaaaacaataaagaacaatatt

SEQ ID NO: 274352 - DNA, 33 bp, Homo sapien
gatggcagtgtcaaaataataaagaacaatatt

SEQ ID NO: 274353 - DNA, 33 bp, Homo sapien
atatatattgtccaaaatggtagccactaacta

SEQ ID NO: 274354 - DNA, 33 bp, Homo sapien
atatatattgtccaaagtggtagccactaacta

SEQ ID NO: 274355 - DNA, 33 bp, Homo sapien
ttgttattatacttaacgtctcaaaatatctat

SEQ ID NO: 274356 - DNA, 33 bp, Homo sapien
ttgttattatacttaatgtctcaaaatatctat

SEQ ID NO: 274357 - DNA, 33 bp, Homo sapien
ttacttaatgatattacaggtctaacaatgatc

SEQ ID NO: 274358 - DNA, 33 bp, Homo sapien
ttacttaatgatattagaggtctaacaatgatc

SEQ ID NO: 274359 - DNA, 33 bp, Homo sapien
cttgtgtacttaaaaaagagtagtgagattatg

SEQ ID NO: 274360 - DNA, 33 bp, Homo sapien
cttgtgtacttaaaaaggagtagtgagattatg

SEQ ID NO: 274361 - DNA, 33 bp, Homo sapien
tggtttgagaagtcaaggtgggaggacctcttg

SEQ ID NO: 274362 - DNA, 33 bp, Homo sapien
tggtttgagaagtcaatgtgggaggacctcttg

SEQ ID NO: 274363 - DNA, 33 bp, Homo sapien
atctgaatgaggttaaaatttccatggatatat

SEQ ID NO: 274364 - DNA, 33 bp, Homo sapien
atctgaatgaggttaacatttccatggatatat

SEQ ID NO: 274365 - DNA, 33 bp, Homo sapien
gcttatgaatgtttagcacagtgcctggctcaa

SEQ ID NO: 274366 - DNA, 33 bp, Homo sapien
gcttatgaatgtttagtacagtgcctggctcaa

SEQ ID NO: 274367 - DNA, 33 bp, Homo sapien
gcagaactagacaaaccaactgatggacaaaaa

SEQ ID NO: 274368 - DNA, 33 bp, Homo sapien
gcagaactagacaaacgaactgatggacaaaaa

SEQ ID NO: 274369 - DNA, 33 bp, Homo sapien
actactgtgctttgaaaatatctgatttctgtt

SEQ ID NO: 274370 - DNA, 33 bp, Homo sapien
actactgtgctttgaacatatctgatttctgtt

SEQ ID NO: 274371 - DNA, 33 bp, Homo sapien
ttattcctttaacaagacagtgaaattcaattc

SEQ ID NO: 274372 - DNA, 33 bp, Homo sapien
ttattcctttaacaagtcagtgaaattcaattc

SEQ ID NO: 274373 - DNA, 33 bp, Homo sapien
ttgagagaggcatataagaatagcaatgtgctg

SEQ ID NO: 274374 - DNA, 33 bp, Homo sapien
ttgagagaggcatatacgaatagcaatgtgctg

SEQ ID NO: 274375 - DNA, 33 bp, Homo sapien
ccaaaaccagcttgaactgcctcaggaaaatgc

SEQ ID NO: 274376 - DNA, 33 bp, Homo sapien
ccaaaaccagcttgaattgcctcaggaaaatgc

SEQ ID NO: 274377 - DNA, 33 bp, Homo sapien
cacagtaagatccatacaggcatcacctgggtt

SEQ ID NO: 274378 - DNA, 33 bp, Homo sapien
cacagtaagatccatataggcatcacctgggtt

SEQ ID NO: 274379 - DNA, 33 bp, Homo sapien
tatggagctaccctcaataagtttacgagtgaa

SEQ ID NO: 274380 - DNA, 33 bp, Homo sapien
tatggagctaccctcagtaagtttacgagtgaa

SEQ ID NO: 274381 - DNA, 33 bp, Homo sapien
aaactcttttacccaaatcacaagtgacttgaa

SEQ ID NO: 274382 - DNA, 33 bp, Homo sapien
aaactcttttacccaactcacaagtgacttgaa

SEQ ID NO: 274383 - DNA, 33 bp, Homo sapien
ctctgaggagtttggcacagaggttcaaaaaat

SEQ ID NO: 274384 - DNA, 33 bp, Homo sapien
ctctgaggagtttggcccagaggttcaaaaaat

SEQ ID NO: 274385 - DNA, 33 bp, Homo sapien
aaatgcccctctttcacaggtattagtataatt

SEQ ID NO: 274386 - DNA, 33 bp, Homo sapien
aaatgcccctctttcataggtattagtataatt

SEQ ID NO: 274387 - DNA, 33 bp, Homo sapien
tgaagtctacataaaacgcagggttcagagagc

SEQ ID NO: 274388 - DNA, 33 bp, Homo sapien
tgaagtctacataaaaggcagggttcagagagc

SEQ ID NO: 274389 - DNA, 33 bp, Homo sapien
gatgtttgcgtaatgacgaaatcacctataatg

SEQ ID NO: 274390 - DNA, 33 bp, Homo sapien
gatgtttgcgtaatgatgaaatcacctataatg

SEQ ID NO: 274391 - DNA, 33 bp, Homo sapien
ttgccatataaaagcaaggttcatttacatatg

SEQ ID NO: 274392 - DNA, 33 bp, Homo sapien
ttgccatataaaagcatggttcatttacatatg

SEQ ID NO: 274393 - DNA, 33 bp, Homo sapien
agagatgtatttgtcagaactgcttcattgcaa

SEQ ID NO: 274394 - DNA, 33 bp, Homo sapien
agagatgtatttgtcataactgcttcattgcaa

SEQ ID NO: 274395 - DNA, 33 bp, Homo sapien
aaaaaactacaaccagaagggtggcaaatcaaa

SEQ ID NO: 274396 - DNA, 33 bp, Homo sapien
aaaaaactacaaccagtagggtggcaaatcaaa

SEQ ID NO: 274397 - DNA, 33 bp, Homo sapien
ataatagccaattaaactaacaatgagatataa

SEQ ID NO: 274398 - DNA, 33 bp, Homo sapien
ataatagccaattaaattaacaatgagatataa

SEQ ID NO: 274399 - DNA, 33 bp, Homo sapien
tacactctattacctgaaagtaagttaaagtaa

SEQ ID NO: 274400 - DNA, 33 bp, Homo sapien
tacactctattacctgtaagtaagttaaagtaa

SEQ ID NO: 274401 - DNA, 33 bp, Homo sapien
ttgggaggcccaggagcacaaattgcttgagtt

SEQ ID NO: 274402 - DNA, 33 bp, Homo sapien
ttgggaggcccaggaggacaaattgcttgagtt

SEQ ID NO: 274403 - DNA, 33 bp, Homo sapien
catgtactatttgaataatcagtaaaaacagca

SEQ ID NO: 274404 - DNA, 33 bp, Homo sapien
catgtactatttgaatcatcagtaaaaacagca

SEQ ID NO: 274405 - DNA, 33 bp, Homo sapien
aagaaagacacaaaaaactatgataactaataa

SEQ ID NO: 274406 - DNA, 33 bp, Homo sapien
aagaaagacacaaaaacctatgataactaataa

SEQ ID NO: 274407 - DNA, 33 bp, Homo sapien
taaatttaataaaatacgtgcaagacttgtaca

SEQ ID NO: 274408 - DNA, 33 bp, Homo sapien
taaatttaataaaatatgtgcaagacttgtaca

SEQ ID NO: 274409 - DNA, 33 bp, Homo sapien
taaaaaggcagcttgaggtttttataggcattg

SEQ ID NO: 274410 - DNA, 33 bp, Homo sapien
taaaaaggcagcttgatgtttttataggcattg

SEQ ID NO: 274411 - DNA, 33 bp, Homo sapien
ttactgttaatgtaaggctaagtccaatatcaa

SEQ ID NO: 274412 - DNA, 33 bp, Homo sapien
ttactgttaatgtaagtctaagtccaatatcaa

SEQ ID NO: 274413 - DNA, 33 bp, Homo sapien
taccgtggaggaaggcactaggatgattttaat

SEQ ID NO: 274414 - DNA, 33 bp, Homo sapien
taccgtggaggaaggcgctaggatgattttaat

SEQ ID NO: 274415 - DNA, 33 bp, Homo sapien
gagaaaggatcacaaaaaataaagaagtggagg

SEQ ID NO: 274416 - DNA, 33 bp, Homo sapien
gagaaaggatcacaaagaataaagaagtggagg

SEQ ID NO: 274417 - DNA, 33 bp, Homo sapien
gagttgcacacttttacatgatatttctaccat

SEQ ID NO: 274418 - DNA, 33 bp, Homo sapien
gagttgcacacttttatatgatatttctaccat

SEQ ID NO: 274419 - DNA, 33 bp, Homo sapien
cttccctccaggtaaactgcagacgtgatgctc

SEQ ID NO: 274420 - DNA, 33 bp, Homo sapien
cttccctccaggtaaattgcagacgtgatgctc

SEQ ID NO: 274421 - DNA, 33 bp, Homo sapien
ctgattccagagttgacgaaaaaaaaatacaag

SEQ ID NO: 274422 - DNA, 33 bp, Homo sapien
ctgattccagagttgaggaaaaaaaaatacaag

SEQ ID NO: 274423 - DNA, 33 bp, Homo sapien
gcacctagaaacaacaccaccttggcaaatgag

SEQ ID NO: 274424 - DNA, 33 bp, Homo sapien
gcacctagaaacaacatcaccttggcaaatgag

SEQ ID NO: 274425 - DNA, 33 bp, Homo sapien
tttggtatcatgatcacattagtcatactgaat

SEQ ID NO: 274426 - DNA, 33 bp, Homo sapien
tttggtatcatgatcatattagtcatactgaat

SEQ ID NO: 274427 - DNA, 33 bp, Homo sapien
aggaaaggagtacaaaatcggtcctgaaggatt

SEQ ID NO: 274428 - DNA, 33 bp, Homo sapien
aggaaaggagtacaaattcggtcctgaaggatt

SEQ ID NO: 274429 - DNA, 33 bp, Homo sapien
atagtagcaatgtgtgcagtagcaaaaaaaaaa

SEQ ID NO: 274430 - DNA, 33 bp, Homo sapien
atagtagcaatgtgtgtagtagcaaaaaaaaaa

SEQ ID NO: 274431 - DNA, 33 bp, Homo sapien
actgagaccactactacgtgacttacacgtggg

SEQ ID NO: 274432 - DNA, 33 bp, Homo sapien
actgagaccactactatgtgacttacacgtggg

SEQ ID NO: 274433 - DNA, 33 bp, Homo sapien
actgacttatgtcagacgctggcaaaatggagt

SEQ ID NO: 274434 - DNA, 33 bp, Homo sapien
actgacttatgtcagatgctggcaaaatggagt

SEQ ID NO: 274435 - DNA, 33 bp, Homo sapien
ttggaaccgattaacacgtgcaaaaatttccct

SEQ ID NO: 274436 - DNA, 33 bp, Homo sapien
ttggaaccgattaacaggtgcaaaaatttccct

SEQ ID NO: 274437 - DNA, 33 bp, Homo sapien
acaaatcatctcccaacgtagtgactgaaaaca

SEQ ID NO: 274438 - DNA, 33 bp, Homo sapien
acaaatcatctcccaatgtagtgactgaaaaca

SEQ ID NO: 274439 - DNA, 33 bp, Homo sapien
tttgacaggagaaaaaatgccactgtcaatgcc

SEQ ID NO: 274440 - DNA, 33 bp, Homo sapien
tttgacaggagaaaaagtgccactgtcaatgcc

SEQ ID NO: 274441 - DNA, 33 bp, Homo sapien
ttaccaacttataccaaactcccaggacagtgc

SEQ ID NO: 274442 - DNA, 33 bp, Homo sapien
ttaccaacttataccagactcccaggacagtgc

SEQ ID NO: 274443 - DNA, 33 bp, Homo sapien
acaaaatccaaatgctcaagggcccctgcttca

SEQ ID NO: 274444 - DNA, 33 bp, Homo sapien
acaaaatccaaatgcttaagggcccctgcttca

SEQ ID NO: 274445 - DNA, 33 bp, Homo sapien
ctacatgtgcagaagcccaggagttaggaagaa

SEQ ID NO: 274446 - DNA, 33 bp, Homo sapien
ctacatgtgcagaagctcaggagttaggaagaa

SEQ ID NO: 274447 - DNA, 33 bp, Homo sapien
cctgggcagcaaagtaagactcgtatcaaaaac

SEQ ID NO: 274448 - DNA, 33 bp, Homo sapien
cctgggcagcaaagtacgactcgtatcaaaaac

SEQ ID NO: 274449 - DNA, 33 bp, Homo sapien
gtgatggttaattatacgttgacttgactgggg

SEQ ID NO: 274450 - DNA, 33 bp, Homo sapien
gtgatggttaattatatgttgacttgactgggg

SEQ ID NO: 274451 - DNA, 33 bp, Homo sapien
tcaagaaagatactaacactggtcattcaaaga

SEQ ID NO: 274452 - DNA, 33 bp, Homo sapien
tcaagaaagatactaagactggtcattcaaaga

SEQ ID NO: 274453 - DNA, 33 bp, Homo sapien
ttcatatatccaatgcagaacctaagcacaaca

SEQ ID NO: 274454 - DNA, 33 bp, Homo sapien
ttcatatatccaatgccgaacctaagcacaaca

SEQ ID NO: 274455 - DNA, 33 bp, Homo sapien
ttgctccaacacacaagggggagaggaggacag

SEQ ID NO: 274456 - DNA, 33 bp, Homo sapien
ttgctccaacacacaatggggagaggaggacag

SEQ ID NO: 274457 - DNA, 33 bp, Homo sapien
tggaaaattggctgcgacaatgtttaatgaaag

SEQ ID NO: 274458 - DNA, 33 bp, Homo sapien
tggaaaattggctgcggcaatgtttaatgaaag

SEQ ID NO: 274459 - DNA, 33 bp, Homo sapien
tggagaatatgcttggcatgataattattcagg

SEQ ID NO: 274460 - DNA, 33 bp, Homo sapien
tggagaatatgcttggtatgataattattcagg

SEQ ID NO: 274461 - DNA, 33 bp, Homo sapien
ggtgtattcccattaactgacaatgtaaacttt

SEQ ID NO: 274462 - DNA, 33 bp, Homo sapien
ggtgtattcccattaattgacaatgtaaacttt

SEQ ID NO: 274463 - DNA, 33 bp, Homo sapien
caaccacagaataacaacatgctctctcaccac

SEQ ID NO: 274464 - DNA, 33 bp, Homo sapien
caaccacagaataacagcatgctctctcaccac

SEQ ID NO: 274465 - DNA, 33 bp, Homo sapien
atattttatttccctacatcttgctcataacta

SEQ ID NO: 274466 - DNA, 33 bp, Homo sapien
atattttatttccctatatcttgctcataacta

SEQ ID NO: 274467 - DNA, 33 bp, Homo sapien
ataagaaggaaaggaaaacaggtagtgcaggag

SEQ ID NO: 274468 - DNA, 33 bp, Homo sapien
ataagaaggaaaggaagacaggtagtgcaggag

SEQ ID NO: 274469 - DNA, 33 bp, Homo sapien
gagtacaatacagaggaataagcgagaaaatag

SEQ ID NO: 274470 - DNA, 33 bp, Homo sapien
gagtacaatacagagggataagcgagaaaatag

SEQ ID NO: 274471 - DNA, 33 bp, Homo sapien
aaggaaggcaaacacaaaaggtcatatgttgta

SEQ ID NO: 274472 - DNA, 33 bp, Homo sapien
aaggaaggcaaacacagaaggtcatatgttgta

SEQ ID NO: 274473 - DNA, 33 bp, Homo sapien
cagtggaagaaccttgaaaatactgtactaagt

SEQ ID NO: 274474 - DNA, 33 bp, Homo sapien
cagtggaagaaccttggaaatactgtactaagt

SEQ ID NO: 274475 - DNA, 33 bp, Homo sapien
agtaatctgtttaaagacaaattggatccttta

SEQ ID NO: 274476 - DNA, 33 bp, Homo sapien
agtaatctgtttaaaggcaaattggatccttta

SEQ ID NO: 274477 - DNA, 33 bp, Homo sapien
ggagaggaattagggacaccagttaggagggca

SEQ ID NO: 274478 - DNA, 33 bp, Homo sapien
ggagaggaattagggataccagttaggagggca

SEQ ID NO: 274479 - DNA, 33 bp, Homo sapien
agtcaatcacattctgcagttagcctaaatata

SEQ ID NO: 274480 - DNA, 33 bp, Homo sapien
agtcaatcacattctgtagttagcctaaatata

SEQ ID NO: 274481 - DNA, 33 bp, Homo sapien
aattttagacctctccccctttctgtagctttc

SEQ ID NO: 274482 - DNA, 33 bp, Homo sapien
aattttagacctctcctcctttctgtagctttc

SEQ ID NO: 274483 - DNA, 33 bp, Homo sapien
gtttgcattttgagacacttgactgagaggctt

SEQ ID NO: 274484 - DNA, 33 bp, Homo sapien
gtttgcattttgagacgcttgactgagaggctt

SEQ ID NO: 274485 - DNA, 33 bp, Homo sapien
gcttaataccaccacactggcagttaagtttca

SEQ ID NO: 274486 - DNA, 33 bp, Homo sapien
gcttaataccaccacattggcagttaagtttca

SEQ ID NO: 274487 - DNA, 33 bp, Homo sapien
acattactcatctaacaagaccatttctgttgt

SEQ ID NO: 274488 - DNA, 33 bp, Homo sapien
acattactcatctaacgagaccatttctgttgt

SEQ ID NO: 274489 - DNA, 33 bp, Homo sapien
gagacctagctcttcacaaaaacccattgtctt

SEQ ID NO: 274490 - DNA, 33 bp, Homo sapien
gagacctagctcttcataaaaacccattgtctt

SEQ ID NO: 274491 - DNA, 33 bp, Homo sapien
tgcatcctctttgtagcagcttctttgaatgtt

SEQ ID NO: 274492 - DNA, 33 bp, Homo sapien
tgcatcctctttgtagtagcttctttgaatgtt

SEQ ID NO: 274493 - DNA, 33 bp, Homo sapien
ttcctctcccctggtcaacatcgcccatccaca

SEQ ID NO: 274494 - DNA, 33 bp, Homo sapien
ttcctctcccctggtcgacatcgcccatccaca

SEQ ID NO: 274495 - DNA, 33 bp, Homo sapien
aaggctaaatatcttgcacgttattctgcagag

SEQ ID NO: 274496 - DNA, 33 bp, Homo sapien
aaggctaaatatcttggacgttattctgcagag

SEQ ID NO: 274497 - DNA, 33 bp, Homo sapien
cagcatcgtagtctcaaaataagaaactactgg

SEQ ID NO: 274498 - DNA, 33 bp, Homo sapien
cagcatcgtagtctcagaataagaaactactgg

SEQ ID NO: 274499 - DNA, 33 bp, Homo sapien
gtttcctggttatagactcctactccatgaatt

SEQ ID NO: 274500 - DNA, 33 bp, Homo sapien
gtttcctggttatagagtcctactccatgaatt

SEQ ID NO: 274501 - DNA, 33 bp, Homo sapien
agataatagcaacatccagagctaatgtaacac

SEQ ID NO: 274502 - DNA, 33 bp, Homo sapien
agataatagcaacatctagagctaatgtaacac

SEQ ID NO: 274503 - DNA, 33 bp, Homo sapien
attccatttaattaaacaagtagattgtggtta

SEQ ID NO: 274504 - DNA, 33 bp, Homo sapien
attccatttaattaaagaagtagattgtggtta

SEQ ID NO: 274505 - DNA, 33 bp, Homo sapien
ctgggagacaaaggccaagataaaggtcctgaa

SEQ ID NO: 274506 - DNA, 33 bp, Homo sapien
ctgggagacaaaggccgagataaaggtcctgaa

SEQ ID NO: 274507 - DNA, 33 bp, Homo sapien
ttttcttcctacaagaaagagaacaacttcata

SEQ ID NO: 274508 - DNA, 33 bp, Homo sapien
ttttcttcctacaagagagagaacaacttcata

SEQ ID NO: 274509 - DNA, 33 bp, Homo sapien
aaataattcttaaacaccatattgtggcaggca

SEQ ID NO: 274510 - DNA, 33 bp, Homo sapien
aaataattcttaaacagcatattgtggcaggca

SEQ ID NO: 274511 - DNA, 33 bp, Homo sapien
ccagtagctatccaaaccagtttcctaatcagc

SEQ ID NO: 274512 - DNA, 33 bp, Homo sapien
ccagtagctatccaaatcagtttcctaatcagc

SEQ ID NO: 274513 - DNA, 33 bp, Homo sapien
ctatgatgccatatgacaggaaaaaaaaccatt

SEQ ID NO: 274514 - DNA, 33 bp, Homo sapien
ctatgatgccatatgataggaaaaaaaaccatt

SEQ ID NO: 274515 - DNA, 33 bp, Homo sapien
aataaactaagattgacagactgtggaccgggc

SEQ ID NO: 274516 - DNA, 33 bp, Homo sapien
aataaactaagattgatagactgtggaccgggc

SEQ ID NO: 274517 - DNA, 33 bp, Homo sapien
agagagagcttagaaaaatagtctgtttcaaag

SEQ ID NO: 274518 - DNA, 33 bp, Homo sapien
agagagagcttagaaagatagtctgtttcaaag

SEQ ID NO: 274519 - DNA, 33 bp, Homo sapien
gttaattttaactaaacggatggcttcagccat

SEQ ID NO: 274520 - DNA, 33 bp, Homo sapien
gttaattttaactaaatggatggcttcagccat

SEQ ID NO: 274521 - DNA, 33 bp, Homo sapien
ttacctcagctccagcaatatgttcatttttac

SEQ ID NO: 274522 - DNA, 33 bp, Homo sapien
ttacctcagctccagctatatgttcatttttac

SEQ ID NO: 274523 - DNA, 33 bp, Homo sapien
agttctctcaccacaacgaggaagtatatgtgt

SEQ ID NO: 274524 - DNA, 33 bp, Homo sapien
agttctctcaccacaatgaggaagtatatgtgt

SEQ ID NO: 274525 - DNA, 33 bp, Homo sapien
acagcattaagcctaaaatggacactcaataaa

SEQ ID NO: 274526 - DNA, 33 bp, Homo sapien
acagcattaagcctaagatggacactcaataaa

SEQ ID NO: 274527 - DNA, 33 bp, Homo sapien
ataataaattatagaaaagctgtagtaaggaaa

SEQ ID NO: 274528 - DNA, 33 bp, Homo sapien
ataataaattatagaagagctgtagtaaggaaa

SEQ ID NO: 274529 - DNA, 33 bp, Homo sapien
atgtggtgacattccaacttcaggtagcaaggt

SEQ ID NO: 274530 - DNA, 33 bp, Homo sapien
atgtggtgacattccagcttcaggtagcaaggt

SEQ ID NO: 274531 - DNA, 33 bp, Homo sapien
tgtatgaataagtgtccattttgtcctaacctg

SEQ ID NO: 274532 - DNA, 33 bp, Homo sapien
tgtatgaataagtgtcgattttgtcctaacctg

SEQ ID NO: 274533 - DNA, 33 bp, Homo sapien
gtctctggtttattcacgtaatttcaagtaaaa

SEQ ID NO: 274534 - DNA, 33 bp, Homo sapien
gtctctggtttattcatgtaatttcaagtaaaa

SEQ ID NO: 274535 - DNA, 33 bp, Homo sapien
gaccatgaggatgaaacatcaagcgaaaatagt

SEQ ID NO: 274536 - DNA, 33 bp, Homo sapien
gaccatgaggatgaaatatcaagcgaaaatagt

SEQ ID NO: 274537 - DNA, 33 bp, Homo sapien
acaacatattattttaccatcctgcccacacag

SEQ ID NO: 274538 - DNA, 33 bp, Homo sapien
acaacatattattttatcatcctgcccacacag

SEQ ID NO: 274539 - DNA, 33 bp, Homo sapien
ctactacttgctcccccgcttagtccccgccag

SEQ ID NO: 274540 - DNA, 33 bp, Homo sapien
ctactacttgctccccggcttagtccccgccag

SEQ ID NO: 274541 - DNA, 33 bp, Homo sapien
caaaattaaattggtaaggctgtctaactgtat

SEQ ID NO: 274542 - DNA, 33 bp, Homo sapien
caaaattaaattggtatggctgtctaactgtat

SEQ ID NO: 274543 - DNA, 33 bp, Homo sapien
ttcatactctacaacacagtgtcttcaaggacc

SEQ ID NO: 274544 - DNA, 33 bp, Homo sapien
ttcatactctacaacatagtgtcttcaaggacc

SEQ ID NO: 274545 - DNA, 33 bp, Homo sapien
tgacttaattaaggtaaggatatataaacagct

SEQ ID NO: 274546 - DNA, 33 bp, Homo sapien
tgacttaattaaggtagggatatataaacagct

SEQ ID NO: 274547 - DNA, 33 bp, Homo sapien
gtccagactccaattgcaacatcacctgaagca

SEQ ID NO: 274548 - DNA, 33 bp, Homo sapien
gtccagactccaattgtaacatcacctgaagca

SEQ ID NO: 274549 - DNA, 33 bp, Homo sapien
ggtttccccagaagtaccccaatcatgggctgg

SEQ ID NO: 274550 - DNA, 33 bp, Homo sapien
ggtttccccagaagtatcccaatcatgggctgg

SEQ ID NO: 274551 - DNA, 33 bp, Homo sapien
aggtagtgcttgcagaagaagtaatctaaccaa

SEQ ID NO: 274552 - DNA, 33 bp, Homo sapien
aggtagtgcttgcagaggaagtaatctaaccaa

SEQ ID NO: 274553 - DNA, 33 bp, Homo sapien
aggtagtgttaagcccagagcatggctatgttg

SEQ ID NO: 274554 - DNA, 33 bp, Homo sapien
aggtagtgttaagcccggagcatggctatgttg

SEQ ID NO: 274555 - DNA, 33 bp, Homo sapien
agtactaagcctgtaacgaatggtttatagtgg

SEQ ID NO: 274556 - DNA, 33 bp, Homo sapien
agtactaagcctgtaatgaatggtttatagtgg

SEQ ID NO: 274557 - DNA, 33 bp, Homo sapien
gagtgaaggaaatgacaagagggagggctgcca

SEQ ID NO: 274558 - DNA, 33 bp, Homo sapien
gagtgaaggaaatgaccagagggagggctgcca

SEQ ID NO: 274559 - DNA, 33 bp, Homo sapien
ctcattctctatcataacaccttactttcttca

SEQ ID NO: 274560 - DNA, 33 bp, Homo sapien
ctcattctctatcatagcaccttactttcttca

SEQ ID NO: 274561 - DNA, 33 bp, Homo sapien
cactttgagatggatacaagccaaaattccatt

SEQ ID NO: 274562 - DNA, 33 bp, Homo sapien
cactttgagatggatataagccaaaattccatt

SEQ ID NO: 274563 - DNA, 33 bp, Homo sapien
gagcagctgattcactcagttgaaacatctgaa

SEQ ID NO: 274564 - DNA, 33 bp, Homo sapien
gagcagctgattcacttagttgaaacatctgaa

SEQ ID NO: 274565 - DNA, 33 bp, Homo sapien
gagaccttgtggagagcagacttgtcaattttt

SEQ ID NO: 274566 - DNA, 33 bp, Homo sapien
gagaccttgtggagagtagacttgtcaattttt

SEQ ID NO: 274567 - DNA, 33 bp, Homo sapien
gtgaagccctaagagacaagtgaaagcccccct

SEQ ID NO: 274568 - DNA, 33 bp, Homo sapien
gtgaagccctaagagataagtgaaagcccccct

SEQ ID NO: 274569 - DNA, 33 bp, Homo sapien
atactatagaaaatgaacatcacaaatacatgt

SEQ ID NO: 274570 - DNA, 33 bp, Homo sapien
atactatagaaaatgatcatcacaaatacatgt

SEQ ID NO: 274571 - DNA, 33 bp, Homo sapien
gtgaagtagggtctaaccatcaatactgacatt

SEQ ID NO: 274572 - DNA, 33 bp, Homo sapien
gtgaagtagggtctaatcatcaatactgacatt

SEQ ID NO: 274573 - DNA, 33 bp, Homo sapien
tctctgcttggacagaaacttcactgggggcta

SEQ ID NO: 274574 - DNA, 33 bp, Homo sapien
tctctgcttggacagagacttcactgggggcta

SEQ ID NO: 274575 - DNA, 33 bp, Homo sapien
catgcaagatttcacaatgctactcagaatgct

SEQ ID NO: 274576 - DNA, 33 bp, Homo sapien
catgcaagatttcacactgctactcagaatgct

SEQ ID NO: 274577 - DNA, 33 bp, Homo sapien
gtcagagtggagaaaactgtcttcaaatctccc

SEQ ID NO: 274578 - DNA, 33 bp, Homo sapien
gtcagagtggagaaaagtgtcttcaaatctccc

SEQ ID NO: 274579 - DNA, 33 bp, Homo sapien
acaataacaaccagaacgtgtcaaggctgggat

SEQ ID NO: 274580 - DNA, 33 bp, Homo sapien
acaataacaaccagaatgtgtcaaggctgggat

SEQ ID NO: 274581 - DNA, 33 bp, Homo sapien
tctagggattccctgcaaagaagtcacaatcct

SEQ ID NO: 274582 - DNA, 33 bp, Homo sapien
tctagggattccctgccaagaagtcacaatcct

SEQ ID NO: 274583 - DNA, 33 bp, Homo sapien
aactgcaaatgcttaacataggaggaagatggg

SEQ ID NO: 274584 - DNA, 33 bp, Homo sapien
aactgcaaatgcttaatataggaggaagatggg

SEQ ID NO: 274585 - DNA, 33 bp, Homo sapien
ctggaacactcaattccagcttcttgtttttta

SEQ ID NO: 274586 - DNA, 33 bp, Homo sapien
ctggaacactcaattctagcttcttgtttttta

SEQ ID NO: 274587 - DNA, 33 bp, Homo sapien
gttataggacattagaaattattcctcctacct

SEQ ID NO: 274588 - DNA, 33 bp, Homo sapien
gttataggacattagagattattcctcctacct

SEQ ID NO: 274589 - DNA, 33 bp, Homo sapien
gcaataccattactggccattcatccaaagaaa

SEQ ID NO: 274590 - DNA, 33 bp, Homo sapien
gcaataccattactgggcattcatccaaagaaa

SEQ ID NO: 274591 - DNA, 33 bp, Homo sapien
gtaatccagaggaaacacactagttagaaataa

SEQ ID NO: 274592 - DNA, 33 bp, Homo sapien
gtaatccagaggaaacgcactagttagaaataa

SEQ ID NO: 274593 - DNA, 33 bp, Homo sapien
attcaattgacaatacaagttgcccgttctgtg

SEQ ID NO: 274594 - DNA, 33 bp, Homo sapien
attcaattgacaatacgagttgcccgttctgtg

SEQ ID NO: 274595 - DNA, 33 bp, Homo sapien
gctggcaaagaggataaagaggttgttttgggt

SEQ ID NO: 274596 - DNA, 33 bp, Homo sapien
gctggcaaagaggatagagaggttgttttgggt

SEQ ID NO: 274597 - DNA, 33 bp, Homo sapien
taacctctgtcttctcaactagactatgagcta

SEQ ID NO: 274598 - DNA, 33 bp, Homo sapien
taacctctgtcttctctactagactatgagcta

SEQ ID NO: 274599 - DNA, 33 bp, Homo sapien
gatgtttaaaggaagaataatgatgaaacagga

SEQ ID NO: 274600 - DNA, 33 bp, Homo sapien
gatgtttaaaggaagagtaatgatgaaacagga

SEQ ID NO: 274601 - DNA, 33 bp, Homo sapien
cctatagtcttgccaacggtcctgtagtgtagg

SEQ ID NO: 274602 - DNA, 33 bp, Homo sapien
cctatagtcttgccaatggtcctgtagtgtagg

SEQ ID NO: 274603 - DNA, 33 bp, Homo sapien
caccctgtcaacctagaatcgtgtgcacaaggg

SEQ ID NO: 274604 - DNA, 33 bp, Homo sapien
caccctgtcaacctagcatcgtgtgcacaaggg

SEQ ID NO: 274605 - DNA, 33 bp, Homo sapien
tacttgaatcatgtaactctagctttttaacat

SEQ ID NO: 274606 - DNA, 33 bp, Homo sapien
tacttgaatcatgtaagtctagctttttaacat

SEQ ID NO: 274607 - DNA, 33 bp, Homo sapien
tcacttgtgttcatcaaaatggattagcctccc

SEQ ID NO: 274608 - DNA, 33 bp, Homo sapien
tcacttgtgttcatcagaatggattagcctccc

SEQ ID NO: 274609 - DNA, 33 bp, Homo sapien
ttcttgtagtcttaggaatgattttgatatgca

SEQ ID NO: 274610 - DNA, 33 bp, Homo sapien
ttcttgtagtcttagggatgattttgatatgca

SEQ ID NO: 274611 - DNA, 33 bp, Homo sapien
atttacttgttcatacggaggtatattaataat

SEQ ID NO: 274612 - DNA, 33 bp, Homo sapien
atttacttgttcatactgaggtatattaataat

SEQ ID NO: 274613 - DNA, 33 bp, Homo sapien
ttaataatcttctcatcactacagcttgcccat

SEQ ID NO: 274614 - DNA, 33 bp, Homo sapien
ttaataatcttctcattactacagcttgcccat

SEQ ID NO: 274615 - DNA, 33 bp, Homo sapien
acaagaaaaaacacaaaactagatgtgatcact

SEQ ID NO: 274616 - DNA, 33 bp, Homo sapien
acaagaaaaaacacaagactagatgtgatcact

SEQ ID NO: 274617 - DNA, 33 bp, Homo sapien
cagtcatgacatttgaaccatcatacagtgtgt

SEQ ID NO: 274618 - DNA, 33 bp, Homo sapien
cagtcatgacatttgagccatcatacagtgtgt

SEQ ID NO: 274619 - DNA, 33 bp, Homo sapien
tcctccttcccagccaagtaaagtaaagcaaaa

SEQ ID NO: 274620 - DNA, 33 bp, Homo sapien
tcctccttcccagccaggtaaagtaaagcaaaa

SEQ ID NO: 274621 - DNA, 33 bp, Homo sapien
tattcatcttaacatacggagatttactgcata

SEQ ID NO: 274622 - DNA, 33 bp, Homo sapien
tattcatcttaacatatggagatttactgcata

SEQ ID NO: 274623 - DNA, 33 bp, Homo sapien
agacaaggattcacctcaatccattggcactct

SEQ ID NO: 274624 - DNA, 33 bp, Homo sapien
agacaaggattcaccttaatccattggcactct

SEQ ID NO: 274625 - DNA, 33 bp, Homo sapien
acagaagaggggcatgcaggtataacactcact

SEQ ID NO: 274626 - DNA, 33 bp, Homo sapien
acagaagaggggcatgtaggtataacactcact

SEQ ID NO: 274627 - DNA, 33 bp, Homo sapien
tgctttattatctgtgaagcaataggtaaaagt

SEQ ID NO: 274628 - DNA, 33 bp, Homo sapien
tgctttattatctgtgcagcaataggtaaaagt

SEQ ID NO: 274629 - DNA, 33 bp, Homo sapien
aggctagctgctatgacgtttctaccttgaacc

SEQ ID NO: 274630 - DNA, 33 bp, Homo sapien
aggctagctgctatgatgtttctaccttgaacc

SEQ ID NO: 274631 - DNA, 33 bp, Homo sapien
tggtaaccagttatcaaactcagactaagacca

SEQ ID NO: 274632 - DNA, 33 bp, Homo sapien
tggtaaccagttatcagactcagactaagacca

SEQ ID NO: 274633 - DNA, 33 bp, Homo sapien
ggaggaagacaacagacctcaaacagaacaatc

SEQ ID NO: 274634 - DNA, 33 bp, Homo sapien
ggaggaagacaacagatctcaaacagaacaatc

SEQ ID NO: 274635 - DNA, 33 bp, Homo sapien
ataggcttacagttgacagaatatacagttctt

SEQ ID NO: 274636 - DNA, 33 bp, Homo sapien
ataggcttacagttgatagaatatacagttctt

SEQ ID NO: 274637 - DNA, 33 bp, Homo sapien
aggtctcacggcagaaaaaaggactgatgtttg

SEQ ID NO: 274638 - DNA, 33 bp, Homo sapien
aggtctcacggcagaagaaaggactgatgtttg

SEQ ID NO: 274639 - DNA, 33 bp, Homo sapien
agagtagagtttgataagcagggcagagatctg

SEQ ID NO: 274640 - DNA, 33 bp, Homo sapien
agagtagagtttgataggcagggcagagatctg

SEQ ID NO: 274641 - DNA, 33 bp, Homo sapien
tgtagtctctccatcaacagtgtcatcagtgca

SEQ ID NO: 274642 - DNA, 33 bp, Homo sapien
tgtagtctctccatcagcagtgtcatcagtgca

SEQ ID NO: 274643 - DNA, 33 bp, Homo sapien
aaagaaccactaagaactaggtagaggaagatg

SEQ ID NO: 274644 - DNA, 33 bp, Homo sapien
aaagaaccactaagaagtaggtagaggaagatg

SEQ ID NO: 274645 - DNA, 33 bp, Homo sapien
atggaaggaagcagaactgaacagacacagaag

SEQ ID NO: 274646 - DNA, 33 bp, Homo sapien
atggaaggaagcagaattgaacagacacagaag

SEQ ID NO: 274647 - DNA, 33 bp, Homo sapien
gggtgtctacggacataaggttaaggaaatctg

SEQ ID NO: 274648 - DNA, 33 bp, Homo sapien
gggtgtctacggacatgaggttaaggaaatctg

SEQ ID NO: 274649 - DNA, 33 bp, Homo sapien
ggatagaaatcaaaacaacttggtaaataatca

SEQ ID NO: 274650 - DNA, 33 bp, Homo sapien
ggatagaaatcaaaaccacttggtaaataatca

SEQ ID NO: 274651 - DNA, 33 bp, Homo sapien
aaaaagataatcagtaaagccagaatgtttgag

SEQ ID NO: 274652 - DNA, 33 bp, Homo sapien
aaaaagataatcagtacagccagaatgtttgag

SEQ ID NO: 274653 - DNA, 33 bp, Homo sapien
cccattatcgataagcacctggtttgatttcat

SEQ ID NO: 274654 - DNA, 33 bp, Homo sapien
cccattatcgataagcgcctggtttgatttcat

SEQ ID NO: 274655 - DNA, 33 bp, Homo sapien
gtaaacaatgataaacacaagaaacgatctcat

SEQ ID NO: 274656 - DNA, 33 bp, Homo sapien
gtaaacaatgataaacgcaagaaacgatctcat

SEQ ID NO: 274657 - DNA, 33 bp, Homo sapien
actctttttggcttgaaaaaatgtttggccttc

SEQ ID NO: 274658 - DNA, 33 bp, Homo sapien
actctttttggcttgagaaaatgtttggccttc

SEQ ID NO: 274659 - DNA, 33 bp, Homo sapien
aggtttgtagacataacagttaagtttatgtgt

SEQ ID NO: 274660 - DNA, 33 bp, Homo sapien
aggtttgtagacataatagttaagtttatgtgt

SEQ ID NO: 274661 - DNA, 33 bp, Homo sapien
tatgttgtcagatataccacagcaacttttact

SEQ ID NO: 274662 - DNA, 33 bp, Homo sapien
tatgttgtcagatatagcacagcaacttttact

SEQ ID NO: 274663 - DNA, 33 bp, Homo sapien
caactgtaatgccatcagaatttcagcttctgg

SEQ ID NO: 274664 - DNA, 33 bp, Homo sapien
caactgtaatgccatcggaatttcagcttctgg

SEQ ID NO: 274665 - DNA, 33 bp, Homo sapien
attgaactcagctaaaacaaaaggcaggaaatt

SEQ ID NO: 274666 - DNA, 33 bp, Homo sapien
attgaactcagctaaagcaaaaggcaggaaatt

SEQ ID NO: 274667 - DNA, 33 bp, Homo sapien
tacttattagcaaacacagatgacctaaccaca

SEQ ID NO: 274668 - DNA, 33 bp, Homo sapien
tacttattagcaaacatagatgacctaaccaca

SEQ ID NO: 274669 - DNA, 33 bp, Homo sapien
aactaggcctacctaaacaatggcttactctga

SEQ ID NO: 274670 - DNA, 33 bp, Homo sapien
aactaggcctacctaaccaatggcttactctga

SEQ ID NO: 274671 - DNA, 33 bp, Homo sapien
acttgtcctatgtgtacactatttaagaacagg

SEQ ID NO: 274672 - DNA, 33 bp, Homo sapien
acttgtcctatgtgtatactatttaagaacagg

SEQ ID NO: 274673 - DNA, 33 bp, Homo sapien
gacgtgttggaactcaagtctacttgaatgcaa

SEQ ID NO: 274674 - DNA, 33 bp, Homo sapien
gacgtgttggaactcatgtctacttgaatgcaa

SEQ ID NO: 274675 - DNA, 33 bp, Homo sapien
cagtaatgaaaaaacagggttcttaggagacaa

SEQ ID NO: 274676 - DNA, 33 bp, Homo sapien
cagtaatgaaaaaacatggttcttaggagacaa

SEQ ID NO: 274677 - DNA, 33 bp, Homo sapien
aaagcactgttacatacagaaatccctccaaaa

SEQ ID NO: 274678 - DNA, 33 bp, Homo sapien
aaagcactgttacatagagaaatccctccaaaa

SEQ ID NO: 274679 - DNA, 33 bp, Homo sapien
cagctatgaattgattcaaaagtaaccacaatt

SEQ ID NO: 274680 - DNA, 33 bp, Homo sapien
cagctatgaattgattgaaaagtaaccacaatt

SEQ ID NO: 274681 - DNA, 33 bp, Homo sapien
ccacaattgtcttagacgtaattttgagttttt

SEQ ID NO: 274682 - DNA, 33 bp, Homo sapien
ccacaattgtcttagatgtaattttgagttttt

SEQ ID NO: 274683 - DNA, 33 bp, Homo sapien
ctgtgaagtctatccacggcttttcattctgtc

SEQ ID NO: 274684 - DNA, 33 bp, Homo sapien
ctgtgaagtctatccatggcttttcattctgtc

SEQ ID NO: 274685 - DNA, 33 bp, Homo sapien
acttatgtagtcccaaaagacagaatgaaaagc

SEQ ID NO: 274686 - DNA, 33 bp, Homo sapien
acttatgtagtcccaagagacagaatgaaaagc

SEQ ID NO: 274687 - DNA, 33 bp, Homo sapien
taaaccctacctgttcactctggacagcagcac

SEQ ID NO: 274688 - DNA, 33 bp, Homo sapien
taaaccctacctgttcgctctggacagcagcac

SEQ ID NO: 274689 - DNA, 33 bp, Homo sapien
aaacaagacccatataggtacgtgtcaaaaaca

SEQ ID NO: 274690 - DNA, 33 bp, Homo sapien
aaacaagacccatatatgtacgtgtcaaaaaca

SEQ ID NO: 274691 - DNA, 33 bp, Homo sapien
cacatttattctaaaccacacatgaaccgagaa

SEQ ID NO: 274692 - DNA, 33 bp, Homo sapien
cacatttattctaaacgacacatgaaccgagaa

SEQ ID NO: 274693 - DNA, 33 bp, Homo sapien
aattattctttgatctcacctctatctgtcagc

SEQ ID NO: 274694 - DNA, 33 bp, Homo sapien
aattattctttgatcttacctctatctgtcagc

SEQ ID NO: 274695 - DNA, 33 bp, Homo sapien
acctatatttttgcgaataccacattgttttaa

SEQ ID NO: 274696 - DNA, 33 bp, Homo sapien
acctatatttttgcgagtaccacattgttttaa

SEQ ID NO: 274697 - DNA, 33 bp, Homo sapien
gtttatgaatgacaaaagggtcaatgaagaaat

SEQ ID NO: 274698 - DNA, 33 bp, Homo sapien
gtttatgaatgacaaacgggtcaatgaagaaat

SEQ ID NO: 274699 - DNA, 33 bp, Homo sapien
tgaccagataccatcacagtatacagtcagtga

SEQ ID NO: 274700 - DNA, 33 bp, Homo sapien
tgaccagataccatcatagtatacagtcagtga

SEQ ID NO: 274701 - DNA, 33 bp, Homo sapien
aatttcagaaaagcataagtgctagacctcctt

SEQ ID NO: 274702 - DNA, 33 bp, Homo sapien
aatttcagaaaagcatgagtgctagacctcctt

SEQ ID NO: 274703 - DNA, 33 bp, Homo sapien
tatattattgaatgacaaatcactttcataaac

SEQ ID NO: 274704 - DNA, 33 bp, Homo sapien
tatattattgaatgactaatcactttcataaac

SEQ ID NO: 274705 - DNA, 33 bp, Homo sapien
aattgctttatttctcaatcttgtaactattag

SEQ ID NO: 274706 - DNA, 33 bp, Homo sapien
aattgctttatttctctatcttgtaactattag

SEQ ID NO: 274707 - DNA, 33 bp, Homo sapien
aatatctgttctaatacccagaatatcagctag

SEQ ID NO: 274708 - DNA, 33 bp, Homo sapien
aatatctgttctaatatccagaatatcagctag

SEQ ID NO: 274709 - DNA, 33 bp, Homo sapien
tcagaaaattaacagaaggtcagatattacatc

SEQ ID NO: 274710 - DNA, 33 bp, Homo sapien
tcagaaaattaacagagggtcagatattacatc

SEQ ID NO: 274711 - DNA, 33 bp, Homo sapien
gctgcatttcatgtcactcgttctttcactcat

SEQ ID NO: 274712 - DNA, 33 bp, Homo sapien
gctgcatttcatgtcattcgttctttcactcat

SEQ ID NO: 274713 - DNA, 33 bp, Homo sapien
ttgtctttccatgatagcaataacttttaacat

SEQ ID NO: 274714 - DNA, 33 bp, Homo sapien
ttgtctttccatgatatcaataacttttaacat

SEQ ID NO: 274715 - DNA, 33 bp, Homo sapien
ggatacacaaaagtcaaaaccttagcatatgtg

SEQ ID NO: 274716 - DNA, 33 bp, Homo sapien
ggatacacaaaagtcagaaccttagcatatgtg

SEQ ID NO: 274717 - DNA, 33 bp, Homo sapien
acttatactcccacaaaaatgacagtgagagac

SEQ ID NO: 274718 - DNA, 33 bp, Homo sapien
acttatactcccacaacaatgacagtgagagac

SEQ ID NO: 274719 - DNA, 33 bp, Homo sapien
ctgccacgccatgttccatttggtaaacaccag

SEQ ID NO: 274720 - DNA, 33 bp, Homo sapien
ctgccacgccatgttctatttggtaaacaccag

SEQ ID NO: 274721 - DNA, 33 bp, Homo sapien
cttgtttttctacttaactctccctactagaaa

SEQ ID NO: 274722 - DNA, 33 bp, Homo sapien
cttgtttttctacttacctctccctactagaaa

SEQ ID NO: 274723 - DNA, 33 bp, Homo sapien
aatatgttaggggtgaaggtggaagacaacctc

SEQ ID NO: 274724 - DNA, 33 bp, Homo sapien
aatatgttaggggtgagggtggaagacaacctc

SEQ ID NO: 274725 - DNA, 33 bp, Homo sapien
aaggggtactcttaaagagacttgtggtgtaag

SEQ ID NO: 274726 - DNA, 33 bp, Homo sapien
aaggggtactcttaaatagacttgtggtgtaag

SEQ ID NO: 274727 - DNA, 33 bp, Homo sapien
ttcaaaaaccactcctcaactgcattttagtga

SEQ ID NO: 274728 - DNA, 33 bp, Homo sapien
ttcaaaaaccactccttaactgcattttagtga

SEQ ID NO: 274729 - DNA, 33 bp, Homo sapien
taaggaatgtgaagtccattttgagaaacacta

SEQ ID NO: 274730 - DNA, 33 bp, Homo sapien
taaggaatgtgaagtcgattttgagaaacacta

SEQ ID NO: 274731 - DNA, 33 bp, Homo sapien
ttggacgtccgatgcacaggtatggctttcaag

SEQ ID NO: 274732 - DNA, 33 bp, Homo sapien
ttggacgtccgatgcagaggtatggctttcaag

SEQ ID NO: 274733 - DNA, 33 bp, Homo sapien
ttgtcatcgtcacctaacaacaggcctaccttc

SEQ ID NO: 274734 - DNA, 33 bp, Homo sapien
ttgtcatcgtcacctagcaacaggcctaccttc

SEQ ID NO: 274735 - DNA, 33 bp, Homo sapien
gaagatgcttatgctggatgaagtttgtgtcta

SEQ ID NO: 274736 - DNA, 33 bp, Homo sapien
gaagatgcttatgctgtatgaagtttgtgtcta

SEQ ID NO: 274737 - DNA, 33 bp, Homo sapien
gtaagagacacacaaaacaacattaaagtctgc

SEQ ID NO: 274738 - DNA, 33 bp, Homo sapien
gtaagagacacacaaagcaacattaaagtctgc

SEQ ID NO: 274739 - DNA, 33 bp, Homo sapien
caggacttcctcctaaatgagaataggttggca

SEQ ID NO: 274740 - DNA, 33 bp, Homo sapien
caggacttcctcctaactgagaataggttggca

SEQ ID NO: 274741 - DNA, 33 bp, Homo sapien
tgacaaggagttaatacattgaaccaaatgata

SEQ ID NO: 274742 - DNA, 33 bp, Homo sapien
tgacaaggagttaatatattgaaccaaatgata

SEQ ID NO: 274743 - DNA, 33 bp, Homo sapien
atcttaaccaatactccagctcatcaatcaaat

SEQ ID NO: 274744 - DNA, 33 bp, Homo sapien
atcttaaccaatactctagctcatcaatcaaat

SEQ ID NO: 274745 - DNA, 33 bp, Homo sapien
tcgtgctaagaactagacatttctgtgctttct

SEQ ID NO: 274746 - DNA, 33 bp, Homo sapien
tcgtgctaagaactaggcatttctgtgctttct

SEQ ID NO: 274747 - DNA, 33 bp, Homo sapien
taccacaatgattttcgcatcctaattccaatg

SEQ ID NO: 274748 - DNA, 33 bp, Homo sapien
taccacaatgattttctcatcctaattccaatg

SEQ ID NO: 274749 - DNA, 33 bp, Homo sapien
gtatcctaatgctaccgatccaactagattgca

SEQ ID NO: 274750 - DNA, 33 bp, Homo sapien
gtatcctaatgctacctatccaactagattgca

SEQ ID NO: 274751 - DNA, 33 bp, Homo sapien
ttaccttttcactgcaagctagaaacagttgtt

SEQ ID NO: 274752 - DNA, 33 bp, Homo sapien
ttaccttttcactgcaggctagaaacagttgtt

SEQ ID NO: 274753 - DNA, 33 bp, Homo sapien
agagattacgtctttcaaatctgtctctcagag

SEQ ID NO: 274754 - DNA, 33 bp, Homo sapien
agagattacgtctttcgaatctgtctctcagag

SEQ ID NO: 274755 - DNA, 33 bp, Homo sapien
gttctctacaaattctgaccctcatcttctcaa

SEQ ID NO: 274756 - DNA, 33 bp, Homo sapien
gttctctacaaattcttaccctcatcttctcaa

SEQ ID NO: 274757 - DNA, 33 bp, Homo sapien
ctgatcttttcatctacggaatttaatctaccc

SEQ ID NO: 274758 - DNA, 33 bp, Homo sapien
ctgatcttttcatctatggaatttaatctaccc

SEQ ID NO: 274759 - DNA, 33 bp, Homo sapien
ctaggtgataagctgacctacgtgtgtggcatt

SEQ ID NO: 274760 - DNA, 33 bp, Homo sapien
ctaggtgataagctgagctacgtgtgtggcatt

SEQ ID NO: 274761 - DNA, 33 bp, Homo sapien
gatccacagtccaaaacctcaacatttctatta

SEQ ID NO: 274762 - DNA, 33 bp, Homo sapien
gatccacagtccaaaatctcaacatttctatta

SEQ ID NO: 274763 - DNA, 33 bp, Homo sapien
ttgtgtagatatttaagggctcaattttgaatc

SEQ ID NO: 274764 - DNA, 33 bp, Homo sapien
ttgtgtagatatttaatggctcaattttgaatc

SEQ ID NO: 274765 - DNA, 33 bp, Homo sapien
ggtttcttgccatctaccctagagatactttgg

SEQ ID NO: 274766 - DNA, 33 bp, Homo sapien
ggtttcttgccatctatcctagagatactttgg

SEQ ID NO: 274767 - DNA, 33 bp, Homo sapien
tcaacacagtaagaaaaagaaaggcaataatgg

SEQ ID NO: 274768 - DNA, 33 bp, Homo sapien
tcaacacagtaagaaagagaaaggcaataatgg

SEQ ID NO: 274769 - DNA, 33 bp, Homo sapien
agtacagtgatgaccacaatgaaactttttttc

SEQ ID NO: 274770 - DNA, 33 bp, Homo sapien
agtacagtgatgaccagaatgaaactttttttc

SEQ ID NO: 274771 - DNA, 33 bp, Homo sapien
gacagttggatattaaacaatgaattccatgaa

SEQ ID NO: 274772 - DNA, 33 bp, Homo sapien
gacagttggatattaagcaatgaattccatgaa

SEQ ID NO: 274773 - DNA, 33 bp, Homo sapien
tgactttctcactgcaatcaacctagtaaacgg

SEQ ID NO: 274774 - DNA, 33 bp, Homo sapien
tgactttctcactgcagtcaacctagtaaacgg

SEQ ID NO: 274775 - DNA, 33 bp, Homo sapien
ggggacatgggatgaaaaactacctcttgggta

SEQ ID NO: 274776 - DNA, 33 bp, Homo sapien
ggggacatgggatgaacaactacctcttgggta

SEQ ID NO: 274777 - DNA, 33 bp, Homo sapien
actgctattctagaaaacatctggcaaagagac

SEQ ID NO: 274778 - DNA, 33 bp, Homo sapien
actgctattctagaaagcatctggcaaagagac

SEQ ID NO: 274779 - DNA, 33 bp, Homo sapien
taaaagtcgaacatatcaaacttgacaatagct

SEQ ID NO: 274780 - DNA, 33 bp, Homo sapien
taaaagtcgaacatatgaaacttgacaatagct

SEQ ID NO: 274781 - DNA, 33 bp, Homo sapien
caggattgaagtggagaataccgaatgctggtg

SEQ ID NO: 274782 - DNA, 33 bp, Homo sapien
caggattgaagtggaggataccgaatgctggtg

SEQ ID NO: 274783 - DNA, 33 bp, Homo sapien
ttatgtcacctattccaagaagggtgataacct

SEQ ID NO: 274784 - DNA, 33 bp, Homo sapien
ttatgtcacctattccgagaagggtgataacct

SEQ ID NO: 274785 - DNA, 33 bp, Homo sapien
aagaaaaaatatgccaataagtcagccccacta

SEQ ID NO: 274786 - DNA, 33 bp, Homo sapien
aagaaaaaatatgccagtaagtcagccccacta

SEQ ID NO: 274787 - DNA, 33 bp, Homo sapien
ctgatgtgattattaaactttacttgcctgtat

SEQ ID NO: 274788 - DNA, 33 bp, Homo sapien
ctgatgtgattattaagctttacttgcctgtat

SEQ ID NO: 274789 - DNA, 33 bp, Homo sapien
aatgttctgggtctcaactcaagcatgcgcatc

SEQ ID NO: 274790 - DNA, 33 bp, Homo sapien
aatgttctgggtctcagctcaagcatgcgcatc

SEQ ID NO: 274791 - DNA, 33 bp, Homo sapien
atgtcctagtactctgaaagactgaatttaaga

SEQ ID NO: 274792 - DNA, 33 bp, Homo sapien
atgtcctagtactctggaagactgaatttaaga

SEQ ID NO: 274793 - DNA, 33 bp, Homo sapien
attcagtgttgcaaaccgtaaccatttcttctt

SEQ ID NO: 274794 - DNA, 33 bp, Homo sapien
attcagtgttgcaaactgtaaccatttcttctt

SEQ ID NO: 274795 - DNA, 33 bp, Homo sapien
gcacaggcttatataacggtaaaagagaaataa

SEQ ID NO: 274796 - DNA, 33 bp, Homo sapien
gcacaggcttatataatggtaaaagagaaataa

SEQ ID NO: 274797 - DNA, 33 bp, Homo sapien
gaaataaagccaaaaaactcctcataatattat

SEQ ID NO: 274798 - DNA, 33 bp, Homo sapien
gaaataaagccaaaaagctcctcataatattat

SEQ ID NO: 274799 - DNA, 33 bp, Homo sapien
tactattcgcatttgccgattaaccaagctttt

SEQ ID NO: 274800 - DNA, 33 bp, Homo sapien
tactattcgcatttgctgattaaccaagctttt

SEQ ID NO: 274801 - DNA, 33 bp, Homo sapien
gagaagcaagtttttacgatatctgcctcacta

SEQ ID NO: 274802 - DNA, 33 bp, Homo sapien
gagaagcaagtttttatgatatctgcctcacta

SEQ ID NO: 274803 - DNA, 33 bp, Homo sapien
aggaatcaggaatacaagaagttataaaaattt

SEQ ID NO: 274804 - DNA, 33 bp, Homo sapien
aggaatcaggaatacatgaagttataaaaattt

SEQ ID NO: 274805 - DNA, 33 bp, Homo sapien
gtgttgggatgaagtacaagcaaaaagcaggag

SEQ ID NO: 274806 - DNA, 33 bp, Homo sapien
gtgttgggatgaagtataagcaaaaagcaggag

SEQ ID NO: 274807 - DNA, 33 bp, Homo sapien
tcagagtctgtagtaacatggaagccaagtgaa

SEQ ID NO: 274808 - DNA, 33 bp, Homo sapien
tcagagtctgtagtaatatggaagccaagtgaa

SEQ ID NO: 274809 - DNA, 33 bp, Homo sapien
agttgagaacctgtcacgtgcaagaggctgttt

SEQ ID NO: 274810 - DNA, 33 bp, Homo sapien
agttgagaacctgtcatgtgcaagaggctgttt

SEQ ID NO: 274811 - DNA, 33 bp, Homo sapien
actcatttagactttcccattactgcttgcagc

SEQ ID NO: 274812 - DNA, 33 bp, Homo sapien
actcatttagactttctcattactgcttgcagc

SEQ ID NO: 274813 - DNA, 33 bp, Homo sapien
gtgatgagaggtgaaacttagagattcattgta

SEQ ID NO: 274814 - DNA, 33 bp, Homo sapien
gtgatgagaggtgaaatttagagattcattgta

SEQ ID NO: 274815 - DNA, 33 bp, Homo sapien
gtttgataaagagtggacaatcatacagaagtg

SEQ ID NO: 274816 - DNA, 33 bp, Homo sapien
gtttgataaagagtggtcaatcatacagaagtg

SEQ ID NO: 274817 - DNA, 33 bp, Homo sapien
attgggtctctcttcccggaaagttcaagtatt

SEQ ID NO: 274818 - DNA, 33 bp, Homo sapien
attgggtctctcttcctggaaagttcaagtatt

SEQ ID NO: 274819 - DNA, 33 bp, Homo sapien
ctcttactggccaaaaatttctgcaaggttcac

SEQ ID NO: 274820 - DNA, 33 bp, Homo sapien
ctcttactggccaaaactttctgcaaggttcac

SEQ ID NO: 274821 - DNA, 33 bp, Homo sapien
gtgtggtggaagctagcagggagagaaggcaat

SEQ ID NO: 274822 - DNA, 33 bp, Homo sapien
gtgtggtggaagctaggagggagagaaggcaat

SEQ ID NO: 274823 - DNA, 33 bp, Homo sapien
ctatataaatgagcccaaaagatgacctctgtg

SEQ ID NO: 274824 - DNA, 33 bp, Homo sapien
ctatataaatgagcccgaaagatgacctctgtg

SEQ ID NO: 274825 - DNA, 33 bp, Homo sapien
ggaactcaaagagagccgagtggtctggacaag

SEQ ID NO: 274826 - DNA, 33 bp, Homo sapien
ggaactcaaagagagctgagtggtctggacaag

SEQ ID NO: 274827 - DNA, 33 bp, Homo sapien
actgatggctataaacactccagctcaaaatga

SEQ ID NO: 274828 - DNA, 33 bp, Homo sapien
actgatggctataaacgctccagctcaaaatga

SEQ ID NO: 274829 - DNA, 33 bp, Homo sapien
tgaagccacagagtacaagggattgatttgcag

SEQ ID NO: 274830 - DNA, 33 bp, Homo sapien
tgaagccacagagtacgagggattgatttgcag

SEQ ID NO: 274831 - DNA, 33 bp, Homo sapien
tcatcaccttcaactcaccgaattttaattatc

SEQ ID NO: 274832 - DNA, 33 bp, Homo sapien
tcatcaccttcaactcgccgaattttaattatc

SEQ ID NO: 274833 - DNA, 33 bp, Homo sapien
aggagcataacttcaaaaagagtcaatcagaaa

SEQ ID NO: 274834 - DNA, 33 bp, Homo sapien
aggagcataacttcaataagagtcaatcagaaa

SEQ ID NO: 274835 - DNA, 33 bp, Homo sapien
atggatagcctgatcacgttgaccaacttcctc

SEQ ID NO: 274836 - DNA, 33 bp, Homo sapien
atggatagcctgatcatgttgaccaacttcctc

SEQ ID NO: 274837 - DNA, 33 bp, Homo sapien
agttactgaagttactcaatctggaaatctggg

SEQ ID NO: 274838 - DNA, 33 bp, Homo sapien
agttactgaagttactgaatctggaaatctggg

SEQ ID NO: 274839 - DNA, 33 bp, Homo sapien
atttttaaaaattgtccatgtataatggtagct

SEQ ID NO: 274840 - DNA, 33 bp, Homo sapien
atttttaaaaattgtctatgtataatggtagct

SEQ ID NO: 274841 - DNA, 33 bp, Homo sapien
gatgttaagtggtagaacaaacatcattttaaa

SEQ ID NO: 274842 - DNA, 33 bp, Homo sapien
gatgttaagtggtagaccaaacatcattttaaa

SEQ ID NO: 274843 - DNA, 33 bp, Homo sapien
cctcaaattgtataaagcctgtctcagtaaaac

SEQ ID NO: 274844 - DNA, 33 bp, Homo sapien
cctcaaattgtataaatcctgtctcagtaaaac

SEQ ID NO: 274845 - DNA, 33 bp, Homo sapien
agaccaggaagagtgacaacagatgcaaggaca

SEQ ID NO: 274846 - DNA, 33 bp, Homo sapien
agaccaggaagagtgagaacagatgcaaggaca

SEQ ID NO: 274847 - DNA, 33 bp, Homo sapien
atgagacagtagaacacagagcaagaaaaagag

SEQ ID NO: 274848 - DNA, 33 bp, Homo sapien
atgagacagtagaacatagagcaagaaaaagag

SEQ ID NO: 274849 - DNA, 33 bp, Homo sapien
gtactgaacacatgataagaaagtcaatacgca

SEQ ID NO: 274850 - DNA, 33 bp, Homo sapien
gtactgaacacatgatgagaaagtcaatacgca

SEQ ID NO: 274851 - DNA, 33 bp, Homo sapien
aaaacccagaaaagcacaacccattcaatggaa

SEQ ID NO: 274852 - DNA, 33 bp, Homo sapien
aaaacccagaaaagcataacccattcaatggaa

SEQ ID NO: 274853 - DNA, 33 bp, Homo sapien
aggtgacagctttttacagtgggtgcctgttgc

SEQ ID NO: 274854 - DNA, 33 bp, Homo sapien
aggtgacagctttttatagtgggtgcctgttgc

SEQ ID NO: 274855 - DNA, 33 bp, Homo sapien
atgtgttgatttctcacgtcaatactttactac

SEQ ID NO: 274856 - DNA, 33 bp, Homo sapien
atgtgttgatttctcatgtcaatactttactac

SEQ ID NO: 274857 - DNA, 33 bp, Homo sapien
agataaattggctcagaatcttgaatggattcc

SEQ ID NO: 274858 - DNA, 33 bp, Homo sapien
agataaattggctcagcatcttgaatggattcc

SEQ ID NO: 274859 - DNA, 33 bp, Homo sapien
tctaaacatggaggaaatgctgttaaaacaagt

SEQ ID NO: 274860 - DNA, 33 bp, Homo sapien
tctaaacatggaggaagtgctgttaaaacaagt

SEQ ID NO: 274861 - DNA, 33 bp, Homo sapien
tctgggtgttgcttgacagactctccatttcgc

SEQ ID NO: 274862 - DNA, 33 bp, Homo sapien
tctgggtgttgcttgatagactctccatttcgc

SEQ ID NO: 274863 - DNA, 33 bp, Homo sapien
ctttgttttttgtgaacttaacacatttgaaga

SEQ ID NO: 274864 - DNA, 33 bp, Homo sapien
ctttgttttttgtgaagttaacacatttgaaga

SEQ ID NO: 274865 - DNA, 33 bp, Homo sapien
aacacatatccaggaaagccacttggaaatcag

SEQ ID NO: 274866 - DNA, 33 bp, Homo sapien
aacacatatccaggaaggccacttggaaatcag

SEQ ID NO: 274867 - DNA, 33 bp, Homo sapien
agtgagctagtaaacaatatataatcacatcat

SEQ ID NO: 274868 - DNA, 33 bp, Homo sapien
agtgagctagtaaacagtatataatcacatcat

SEQ ID NO: 274869 - DNA, 33 bp, Homo sapien
gaataagtgagtcgtagccatgttattctgaaa

SEQ ID NO: 274870 - DNA, 33 bp, Homo sapien
gaataagtgagtcgtatccatgttattctgaaa

SEQ ID NO: 274871 - DNA, 33 bp, Homo sapien
tataaaacttatcagcaaaagtactaaatgtta

SEQ ID NO: 274872 - DNA, 33 bp, Homo sapien
tataaaacttatcagcgaaagtactaaatgtta

SEQ ID NO: 274873 - DNA, 33 bp, Homo sapien
tgaggaaaaaccatgaggagtaagaagagagta

SEQ ID NO: 274874 - DNA, 33 bp, Homo sapien
tgaggaaaaaccatgatgagtaagaagagagta

SEQ ID NO: 274875 - DNA, 33 bp, Homo sapien
tgaaaataaaccacgcagaaatttatgtgtgga

SEQ ID NO: 274876 - DNA, 33 bp, Homo sapien
tgaaaataaaccacgcggaaatttatgtgtgga

SEQ ID NO: 274877 - DNA, 33 bp, Homo sapien
aagtagcatggaaaaacttgtttatgtgaaaat

SEQ ID NO: 274878 - DNA, 33 bp, Homo sapien
aagtagcatggaaaaagttgtttatgtgaaaat

SEQ ID NO: 274879 - DNA, 33 bp, Homo sapien
aaagctgatggtgtcaccctgtctccaaagttt

SEQ ID NO: 274880 - DNA, 33 bp, Homo sapien
aaagctgatggtgtcatcctgtctccaaagttt

SEQ ID NO: 274881 - DNA, 33 bp, Homo sapien
agtgacatgataaaaaacagacgtagaagacac

SEQ ID NO: 274882 - DNA, 33 bp, Homo sapien
agtgacatgataaaaaccagacgtagaagacac

SEQ ID NO: 274883 - DNA, 33 bp, Homo sapien
cccacctgtatattaaaaacagtatcacaggag

SEQ ID NO: 274884 - DNA, 33 bp, Homo sapien
cccacctgtatattaagaacagtatcacaggag

SEQ ID NO: 274885 - DNA, 33 bp, Homo sapien
tctcaccccgtggataatacaaacaataagacg

SEQ ID NO: 274886 - DNA, 33 bp, Homo sapien
tctcaccccgtggatagtacaaacaataagacg

SEQ ID NO: 274887 - DNA, 33 bp, Homo sapien
aagacctggattttaaatgttgtcaaatttggc

SEQ ID NO: 274888 - DNA, 33 bp, Homo sapien
aagacctggattttaagtgttgtcaaatttggc

SEQ ID NO: 274889 - DNA, 33 bp, Homo sapien
ttcatacatttcaaaactgaggctgtttagtca

SEQ ID NO: 274890 - DNA, 33 bp, Homo sapien
ttcatacatttcaaaattgaggctgtttagtca

SEQ ID NO: 274891 - DNA, 33 bp, Homo sapien
aattgttctttcctgagaatcttgaggccaaaa

SEQ ID NO: 274892 - DNA, 33 bp, Homo sapien
aattgttctttcctgataatcttgaggccaaaa

SEQ ID NO: 274893 - DNA, 33 bp, Homo sapien
cctctctagcaagatcaaataatttttcataga

SEQ ID NO: 274894 - DNA, 33 bp, Homo sapien
cctctctagcaagatcgaataatttttcataga

SEQ ID NO: 274895 - DNA, 33 bp, Homo sapien
cttccaactgcgttacaaaattattatagaaaa

SEQ ID NO: 274896 - DNA, 33 bp, Homo sapien
cttccaactgcgttacgaaattattatagaaaa

SEQ ID NO: 274897 - DNA, 33 bp, Homo sapien
atgatccaagagctgacagtcaaaagaactgtt

SEQ ID NO: 274898 - DNA, 33 bp, Homo sapien
atgatccaagagctgatagtcaaaagaactgtt

SEQ ID NO: 274899 - DNA, 33 bp, Homo sapien
gcatactacagaaatacaaaagagccacatggc

SEQ ID NO: 274900 - DNA, 33 bp, Homo sapien
gcatactacagaaatagaaaagagccacatggc

SEQ ID NO: 274901 - DNA, 33 bp, Homo sapien
ctgttctgatgcagtaagttgataatgagggag

SEQ ID NO: 274902 - DNA, 33 bp, Homo sapien
ctgttctgatgcagtaggttgataatgagggag

SEQ ID NO: 274903 - DNA, 33 bp, Homo sapien
ggttgaggagacagagcatgaatatgtggaacc

SEQ ID NO: 274904 - DNA, 33 bp, Homo sapien
ggttgaggagacagaggatgaatatgtggaacc

SEQ ID NO: 274905 - DNA, 33 bp, Homo sapien
gaatcatagacctaaaagtaaagtgcaaattat

SEQ ID NO: 274906 - DNA, 33 bp, Homo sapien
gaatcatagacctaaacgtaaagtgcaaattat

SEQ ID NO: 274907 - DNA, 33 bp, Homo sapien
tacaccttttgtctggacatatttgctgaaatt

SEQ ID NO: 274908 - DNA, 33 bp, Homo sapien
tacaccttttgtctgggcatatttgctgaaatt

SEQ ID NO: 274909 - DNA, 33 bp, Homo sapien
aattatagggggtacaagtagtatgatttcttt

SEQ ID NO: 274910 - DNA, 33 bp, Homo sapien
aattatagggggtacaggtagtatgatttcttt

SEQ ID NO: 274911 - DNA, 33 bp, Homo sapien
ctgttattgagtaaaaactgaagatatttagtc

SEQ ID NO: 274912 - DNA, 33 bp, Homo sapien
ctgttattgagtaaaagctgaagatatttagtc

SEQ ID NO: 274913 - DNA, 33 bp, Homo sapien
ttatgttctgagacaaatgacctacctagctgc

SEQ ID NO: 274914 - DNA, 33 bp, Homo sapien
ttatgttctgagacaagtgacctacctagctgc

SEQ ID NO: 274915 - DNA, 33 bp, Homo sapien
agctgctctgctgatacactacacagctctgtg

SEQ ID NO: 274916 - DNA, 33 bp, Homo sapien
agctgctctgctgatatactacacagctctgtg

SEQ ID NO: 274917 - DNA, 33 bp, Homo sapien
ataaagaagcagtgtaaccaatactgaacaaaa

SEQ ID NO: 274918 - DNA, 33 bp, Homo sapien
ataaagaagcagtgtagccaatactgaacaaaa

SEQ ID NO: 274919 - DNA, 33 bp, Homo sapien
gacactcttagtacagaacttctttccactggg

SEQ ID NO: 274920 - DNA, 33 bp, Homo sapien
gacactcttagtacagcacttctttccactggg

SEQ ID NO: 274921 - DNA, 33 bp, Homo sapien
aatctgaaatgtgaacaaatggtatgtagttgt

SEQ ID NO: 274922 - DNA, 33 bp, Homo sapien
aatctgaaatgtgaacgaatggtatgtagttgt

SEQ ID NO: 274923 - DNA, 33 bp, Homo sapien
gctaagcattatggcactaccaaaaaattatgt

SEQ ID NO: 274924 - DNA, 33 bp, Homo sapien
gctaagcattatggcagtaccaaaaaattatgt

SEQ ID NO: 274925 - DNA, 33 bp, Homo sapien
atagatttagtttataagccattttaacatgta

SEQ ID NO: 274926 - DNA, 33 bp, Homo sapien
atagatttagtttatatgccattttaacatgta

SEQ ID NO: 274927 - DNA, 33 bp, Homo sapien
tacttgacagataccccagcctagtgccttcct

SEQ ID NO: 274928 - DNA, 33 bp, Homo sapien
tacttgacagataccctagcctagtgccttcct

SEQ ID NO: 274929 - DNA, 33 bp, Homo sapien
ttcttcctgacttctacacaatggagtgtccca

SEQ ID NO: 274930 - DNA, 33 bp, Homo sapien
ttcttcctgacttctatacaatggagtgtccca

SEQ ID NO: 274931 - DNA, 33 bp, Homo sapien
ttgatctagcagcaaaaaagtcattgtggctta

SEQ ID NO: 274932 - DNA, 33 bp, Homo sapien
ttgatctagcagcaaacaagtcattgtggctta

SEQ ID NO: 274933 - DNA, 33 bp, Homo sapien
atggcctacattgataacagaggccattgtatc

SEQ ID NO: 274934 - DNA, 33 bp, Homo sapien
atggcctacattgatagcagaggccattgtatc

SEQ ID NO: 274935 - DNA, 33 bp, Homo sapien
gctgattgaggatctcactacttatcttcctat

SEQ ID NO: 274936 - DNA, 33 bp, Homo sapien
gctgattgaggatctccctacttatcttcctat

SEQ ID NO: 274937 - DNA, 33 bp, Homo sapien
taagtcagcaatgaaaatatcggagccataacc

SEQ ID NO: 274938 - DNA, 33 bp, Homo sapien
taagtcagcaatgaaagtatcggagccataacc

SEQ ID NO: 274939 - DNA, 33 bp, Homo sapien
aaaacagcaggatacaatagacggtgcactgag

SEQ ID NO: 274940 - DNA, 33 bp, Homo sapien
aaaacagcaggatacagtagacggtgcactgag

SEQ ID NO: 274941 - DNA, 33 bp, Homo sapien
cacatttagaataagaatagttgctcctatata

SEQ ID NO: 274942 - DNA, 33 bp, Homo sapien
cacatttagaataagagtagttgctcctatata

SEQ ID NO: 274943 - DNA, 33 bp, Homo sapien
cagggaaagtggactaggaatgtgaaaaggact

SEQ ID NO: 274944 - DNA, 33 bp, Homo sapien
cagggaaagtggactatgaatgtgaaaaggact

SEQ ID NO: 274945 - DNA, 33 bp, Homo sapien
agtctataggctgaaaaattgaatttggggaag

SEQ ID NO: 274946 - DNA, 33 bp, Homo sapien
agtctataggctgaaagattgaatttggggaag

SEQ ID NO: 274947 - DNA, 33 bp, Homo sapien
ttttggatgagctactgaaactttcttctaaaa

SEQ ID NO: 274948 - DNA, 33 bp, Homo sapien
ttttggatgagctacttaaactttcttctaaaa

SEQ ID NO: 274949 - DNA, 33 bp, Homo sapien
tccctcacaattcgtgcactaggaaattccttg

SEQ ID NO: 274950 - DNA, 33 bp, Homo sapien
tccctcacaattcgtgtactaggaaattccttg

SEQ ID NO: 274951 - DNA, 33 bp, Homo sapien
cattcagaaaattctgcaatttttggcctgggc

SEQ ID NO: 274952 - DNA, 33 bp, Homo sapien
cattcagaaaattctgtaatttttggcctgggc

SEQ ID NO: 274953 - DNA, 33 bp, Homo sapien
tatatatgcgggaaaagatatatggattacgta

SEQ ID NO: 274954 - DNA, 33 bp, Homo sapien
tatatatgcgggaaaatatatatggattacgta

SEQ ID NO: 274955 - DNA, 33 bp, Homo sapien
tcacaccagtccaaacagctattactaaataaa

SEQ ID NO: 274956 - DNA, 33 bp, Homo sapien
tcacaccagtccaaacggctattactaaataaa

SEQ ID NO: 274957 - DNA, 33 bp, Homo sapien
agaggaaatctggacacgcaaagactccagtga

SEQ ID NO: 274958 - DNA, 33 bp, Homo sapien
agaggaaatctggacatgcaaagactccagtga

SEQ ID NO: 274959 - DNA, 33 bp, Homo sapien
caccctactgcattaacaagacaataatgtgga

SEQ ID NO: 274960 - DNA, 33 bp, Homo sapien
caccctactgcattaataagacaataatgtgga

SEQ ID NO: 274961 - DNA, 33 bp, Homo sapien
tgtgctgacaatgtaacagacactggtaacatg

SEQ ID NO: 274962 - DNA, 33 bp, Homo sapien
tgtgctgacaatgtaatagacactggtaacatg

SEQ ID NO: 274963 - DNA, 33 bp, Homo sapien
ggtggcacaaatgaacaaaaacacagtaagcct

SEQ ID NO: 274964 - DNA, 33 bp, Homo sapien
ggtggcacaaatgaacgaaaacacagtaagcct

SEQ ID NO: 274965 - DNA, 33 bp, Homo sapien
tatcacttccatttgacgagggagtattgctga

SEQ ID NO: 274966 - DNA, 33 bp, Homo sapien
tatcacttccatttgatgagggagtattgctga

SEQ ID NO: 274967 - DNA, 33 bp, Homo sapien
ttaggttttccaaacacaggatttctcaactat

SEQ ID NO: 274968 - DNA, 33 bp, Homo sapien
ttaggttttccaaacataggatttctcaactat

SEQ ID NO: 274969 - DNA, 33 bp, Homo sapien
cctcgtattcacttaaagtagaaattttgcaca

SEQ ID NO: 274970 - DNA, 33 bp, Homo sapien
cctcgtattcacttaaggtagaaattttgcaca

SEQ ID NO: 274971 - DNA, 33 bp, Homo sapien
gggaagaacctaattaacatttaacaagctcta

SEQ ID NO: 274972 - DNA, 33 bp, Homo sapien
gggaagaacctaattaccatttaacaagctcta

SEQ ID NO: 274973 - DNA, 33 bp, Homo sapien
atacaagaagagacaaattaggaaactagaagc

SEQ ID NO: 274974 - DNA, 33 bp, Homo sapien
atacaagaagagacaagttaggaaactagaagc

SEQ ID NO: 274975 - DNA, 33 bp, Homo sapien
ttcaagctccttttcaggtcagaacccttgact

SEQ ID NO: 274976 - DNA, 33 bp, Homo sapien
ttcaagctccttttcatgtcagaacccttgact

SEQ ID NO: 274977 - DNA, 33 bp, Homo sapien
tgctgcacactgtctcaaggatatctggtgagt

SEQ ID NO: 274978 - DNA, 33 bp, Homo sapien
tgctgcacactgtctcgaggatatctggtgagt

SEQ ID NO: 274979 - DNA, 33 bp, Homo sapien
gtgtcaccctgaatgaaacaaatggggtaaagt

SEQ ID NO: 274980 - DNA, 33 bp, Homo sapien
gtgtcaccctgaatgagacaaatggggtaaagt

SEQ ID NO: 274981 - DNA, 33 bp, Homo sapien
gtgtcatttgaagagccatgcttgaaattatta

SEQ ID NO: 274982 - DNA, 33 bp, Homo sapien
gtgtcatttgaagagctatgcttgaaattatta

SEQ ID NO: 274983 - DNA, 33 bp, Homo sapien
tacatactattcaaacagtaagcataaaagagc

SEQ ID NO: 274984 - DNA, 33 bp, Homo sapien
tacatactattcaaacggtaagcataaaagagc

SEQ ID NO: 274985 - DNA, 33 bp, Homo sapien
catgtctagatgtagaaaaataacttatccatc

SEQ ID NO: 274986 - DNA, 33 bp, Homo sapien
catgtctagatgtagagaaataacttatccatc

SEQ ID NO: 274987 - DNA, 33 bp, Homo sapien
gagctatagaattttaacaggtgctctcaaaca

SEQ ID NO: 274988 - DNA, 33 bp, Homo sapien
gagctatagaattttagcaggtgctctcaaaca

SEQ ID NO: 274989 - DNA, 33 bp, Homo sapien
gttaaaggattgtttaaagttaaatgagatagc

SEQ ID NO: 274990 - DNA, 33 bp, Homo sapien
gttaaaggattgtttagagttaaatgagatagc

SEQ ID NO: 274991 - DNA, 33 bp, Homo sapien
atccagtataattccactcctgtaaacttgaaa

SEQ ID NO: 274992 - DNA, 33 bp, Homo sapien
atccagtataattccattcctgtaaacttgaaa

SEQ ID NO: 274993 - DNA, 33 bp, Homo sapien
cagtcagaaagctatacggatactaagattgca

SEQ ID NO: 274994 - DNA, 33 bp, Homo sapien
cagtcagaaagctatatggatactaagattgca

SEQ ID NO: 274995 - DNA, 33 bp, Homo sapien
tgatgaaggtttgaggaaaaaggataaggtata

SEQ ID NO: 274996 - DNA, 33 bp, Homo sapien
tgatgaaggtttgagggaaaaggataaggtata

SEQ ID NO: 274997 - DNA, 33 bp, Homo sapien
aatgttagtgagagaaatgtaaattccagtgga

SEQ ID NO: 274998 - DNA, 33 bp, Homo sapien
aatgttagtgagagaactgtaaattccagtgga

SEQ ID NO: 274999 - DNA, 33 bp, Homo sapien
agtttatctgagaatacgtatgttttgtcttca

SEQ ID NO: 275000 - DNA, 33 bp, Homo sapien
agtttatctgagaatatgtatgttttgtcttca

SEQ ID NO: 275001 - DNA, 33 bp, Homo sapien
gggtgtagataagttacaatattcatgacaatt

SEQ ID NO: 275002 - DNA, 33 bp, Homo sapien
gggtgtagataagttataatattcatgacaatt

SEQ ID NO: 275003 - DNA, 33 bp, Homo sapien
atggttggacttttcaacatatcactgaaatag

SEQ ID NO: 275004 - DNA, 33 bp, Homo sapien
atggttggacttttcagcatatcactgaaatag

SEQ ID NO: 275005 - DNA, 33 bp, Homo sapien
ggttaataagctgataacagtaccaaaaaaaat

SEQ ID NO: 275006 - DNA, 33 bp, Homo sapien
ggttaataagctgatagcagtaccaaaaaaaat

SEQ ID NO: 275007 - DNA, 33 bp, Homo sapien
gctaccagatgagaaacgtgaccacttgagacc

SEQ ID NO: 275008 - DNA, 33 bp, Homo sapien
gctaccagatgagaaatgtgaccacttgagacc

SEQ ID NO: 275009 - DNA, 33 bp, Homo sapien
caactaagatgtttaaaaaggtatcagtactca

SEQ ID NO: 275010 - DNA, 33 bp, Homo sapien
caactaagatgtttaataaggtatcagtactca

SEQ ID NO: 275011 - DNA, 33 bp, Homo sapien
ataatcctttaggcaacgtaactaggaaaaaag

SEQ ID NO: 275012 - DNA, 33 bp, Homo sapien
ataatcctttaggcaaggtaactaggaaaaaag

SEQ ID NO: 275013 - DNA, 33 bp, Homo sapien
aggtctttagacgtagaaatcagaatgatataa

SEQ ID NO: 275014 - DNA, 33 bp, Homo sapien
aggtctttagacgtaggaatcagaatgatataa

SEQ ID NO: 275015 - DNA, 33 bp, Homo sapien
actatgcaccaaaaaaatgaatgaattcatgtc

SEQ ID NO: 275016 - DNA, 33 bp, Homo sapien
actatgcaccaaaaaagtgaatgaattcatgtc

SEQ ID NO: 275017 - DNA, 33 bp, Homo sapien
tacactgaattatagccctgtcattcatctttt

SEQ ID NO: 275018 - DNA, 33 bp, Homo sapien
tacactgaattatagctctgtcattcatctttt

SEQ ID NO: 275019 - DNA, 33 bp, Homo sapien
gtcagaacattccaccactgtgcctgtgccttg

SEQ ID NO: 275020 - DNA, 33 bp, Homo sapien
gtcagaacattccaccgctgtgcctgtgccttg

SEQ ID NO: 275021 - DNA, 33 bp, Homo sapien
attcctatggtgacttaaaacaccgtagacagt

SEQ ID NO: 275022 - DNA, 33 bp, Homo sapien
attcctatggtgactttaaacaccgtagacagt

SEQ ID NO: 275023 - DNA, 33 bp, Homo sapien
tcagtcggtgcttatccacagttctgaaaacca

SEQ ID NO: 275024 - DNA, 33 bp, Homo sapien
tcagtcggtgcttatctacagttctgaaaacca

SEQ ID NO: 275025 - DNA, 33 bp, Homo sapien
aaaaatcaagtttttaactcgctttcagaaatg

SEQ ID NO: 275026 - DNA, 33 bp, Homo sapien
aaaaatcaagtttttatctcgctttcagaaatg

SEQ ID NO: 275027 - DNA, 33 bp, Homo sapien
gcagcatctacaaagacaagggttgcccataaa

SEQ ID NO: 275028 - DNA, 33 bp, Homo sapien
gcagcatctacaaagagaagggttgcccataaa

SEQ ID NO: 275029 - DNA, 33 bp, Homo sapien
aatctgtttcattttaccatctgttgataaaat

SEQ ID NO: 275030 - DNA, 33 bp, Homo sapien
aatctgtttcattttagcatctgttgataaaat

SEQ ID NO: 275031 - DNA, 33 bp, Homo sapien
caaggtttattaccacaatcatctgcaaaactt

SEQ ID NO: 275032 - DNA, 33 bp, Homo sapien
caaggtttattaccacgatcatctgcaaaactt

SEQ ID NO: 275033 - DNA, 33 bp, Homo sapien
atatgttagcctggaacagcgatctcagataga

SEQ ID NO: 275034 - DNA, 33 bp, Homo sapien
atatgttagcctggaatagcgatctcagataga

SEQ ID NO: 275035 - DNA, 33 bp, Homo sapien
tacttatacaccatacaatactacacagttatt

SEQ ID NO: 275036 - DNA, 33 bp, Homo sapien
tacttatacaccatacgatactacacagttatt

SEQ ID NO: 275037 - DNA, 33 bp, Homo sapien
aaataaacttcatcaactggaacattggtgaat

SEQ ID NO: 275038 - DNA, 33 bp, Homo sapien
aaataaacttcatcaattggaacattggtgaat

SEQ ID NO: 275039 - DNA, 33 bp, Homo sapien
gaggtagggagccactcaaaattcagaagtcct

SEQ ID NO: 275040 - DNA, 33 bp, Homo sapien
gaggtagggagccacttaaaattcagaagtcct

SEQ ID NO: 275041 - DNA, 33 bp, Homo sapien
attaattgtgaaagaaacgtatatcattgtgtt

SEQ ID NO: 275042 - DNA, 33 bp, Homo sapien
attaattgtgaaagaagcgtatatcattgtgtt

SEQ ID NO: 275043 - DNA, 33 bp, Homo sapien
gagcgttctcatgataaagcagctggattcttt

SEQ ID NO: 275044 - DNA, 33 bp, Homo sapien
gagcgttctcatgatatagcagctggattcttt

SEQ ID NO: 275045 - DNA, 33 bp, Homo sapien
ctgagagaaactaataagcatttcataaacatg

SEQ ID NO: 275046 - DNA, 33 bp, Homo sapien
ctgagagaaactaataggcatttcataaacatg

SEQ ID NO: 275047 - DNA, 33 bp, Homo sapien
tcatttagtcaaaggcccaatgatctggaatca

SEQ ID NO: 275048 - DNA, 33 bp, Homo sapien
tcatttagtcaaaggctcaatgatctggaatca

SEQ ID NO: 275049 - DNA, 33 bp, Homo sapien
taaactaatcctcacaaagcggaagataaagca

SEQ ID NO: 275050 - DNA, 33 bp, Homo sapien
taaactaatcctcacagagcggaagataaagca

SEQ ID NO: 275051 - DNA, 33 bp, Homo sapien
ccacagctcatagccaaagaaaagttcatggtt

SEQ ID NO: 275052 - DNA, 33 bp, Homo sapien
ccacagctcatagccagagaaaagttcatggtt

SEQ ID NO: 275053 - DNA, 33 bp, Homo sapien
aaggtttgataaaatacggagctgctattcaga

SEQ ID NO: 275054 - DNA, 33 bp, Homo sapien
aaggtttgataaaatagggagctgctattcaga

SEQ ID NO: 275055 - DNA, 33 bp, Homo sapien
tcactcatcatttcagaccaaatagcagacatg

SEQ ID NO: 275056 - DNA, 33 bp, Homo sapien
tcactcatcatttcagcccaaatagcagacatg

SEQ ID NO: 275057 - DNA, 33 bp, Homo sapien
atcagtgtttttctccacttagcttcctcgtgt

SEQ ID NO: 275058 - DNA, 33 bp, Homo sapien
atcagtgtttttctccgcttagcttcctcgtgt

SEQ ID NO: 275059 - DNA, 33 bp, Homo sapien
agccaagatctctaagcataagaagttacagtc

SEQ ID NO: 275060 - DNA, 33 bp, Homo sapien
agccaagatctctaagtataagaagttacagtc

SEQ ID NO: 275061 - DNA, 33 bp, Homo sapien
cataacaccttacaaaatagaaaatagactaat

SEQ ID NO: 275062 - DNA, 33 bp, Homo sapien
cataacaccttacaaactagaaaatagactaat

SEQ ID NO: 275063 - DNA, 33 bp, Homo sapien
ttaagctgttttccgagctgggtgagagaggtg

SEQ ID NO: 275064 - DNA, 33 bp, Homo sapien
ttaagctgttttccgatctgggtgagagaggtg

SEQ ID NO: 275065 - DNA, 33 bp, Homo sapien
attaaagatgcacacacggaaatttagaggtgt

SEQ ID NO: 275066 - DNA, 33 bp, Homo sapien
attaaagatgcacacatggaaatttagaggtgt

SEQ ID NO: 275067 - DNA, 33 bp, Homo sapien
aatcttccttgttccaccatgatactattttgg

SEQ ID NO: 275068 - DNA, 33 bp, Homo sapien
aatcttccttgttccatcatgatactattttgg

SEQ ID NO: 275069 - DNA, 33 bp, Homo sapien
agtaatgccttgatctaacctgctttgagtctg

SEQ ID NO: 275070 - DNA, 33 bp, Homo sapien
agtaatgccttgatctgacctgctttgagtctg

SEQ ID NO: 275071 - DNA, 33 bp, Homo sapien
ctttatggtatgaaggaaggtagtcacaaatga

SEQ ID NO: 275072 - DNA, 33 bp, Homo sapien
ctttatggtatgaagggaggtagtcacaaatga

SEQ ID NO: 275073 - DNA, 33 bp, Homo sapien
gtcgtcttctgtgtaaacatcccatgtccattt

SEQ ID NO: 275074 - DNA, 33 bp, Homo sapien
gtcgtcttctgtgtaatcatcccatgtccattt

SEQ ID NO: 275075 - DNA, 33 bp, Homo sapien
tagaatctcaggtcccacggcaaaagtactgaa

SEQ ID NO: 275076 - DNA, 33 bp, Homo sapien
tagaatctcaggtcccgcggcaaaagtactgaa

SEQ ID NO: 275077 - DNA, 33 bp, Homo sapien
aactaaccatacgtatcagcagaattctggccc

SEQ ID NO: 275078 - DNA, 33 bp, Homo sapien
aactaaccatacgtattagcagaattctggccc

SEQ ID NO: 275079 - DNA, 33 bp, Homo sapien
taagaattttcagtaccaatttggcactctttc

SEQ ID NO: 275080 - DNA, 33 bp, Homo sapien
taagaattttcagtactaatttggcactctttc

SEQ ID NO: 275081 - DNA, 33 bp, Homo sapien
ctttttactccatgaaaattacatatgcctttt

SEQ ID NO: 275082 - DNA, 33 bp, Homo sapien
ctttttactccatgaacattacatatgcctttt

SEQ ID NO: 275083 - DNA, 33 bp, Homo sapien
tttgatttactgatcacaaagaagcaaaacatg

SEQ ID NO: 275084 - DNA, 33 bp, Homo sapien
tttgatttactgatcataaagaagcaaaacatg

SEQ ID NO: 275085 - DNA, 33 bp, Homo sapien
caatttttgactctccacttcttcttcttctta

SEQ ID NO: 275086 - DNA, 33 bp, Homo sapien
caatttttgactctccccttcttcttcttctta

SEQ ID NO: 275087 - DNA, 33 bp, Homo sapien
ctgaaactgctcagggaacttggctttaaaaat

SEQ ID NO: 275088 - DNA, 33 bp, Homo sapien
ctgaaactgctcaggggacttggctttaaaaat

SEQ ID NO: 275089 - DNA, 33 bp, Homo sapien
gaaatgctatagcagaagtctgtaaaggatttg

SEQ ID NO: 275090 - DNA, 33 bp, Homo sapien
gaaatgctatagcagaggtctgtaaaggatttg

SEQ ID NO: 275091 - DNA, 33 bp, Homo sapien
attgtaattactgctaagaaatgcaaacttctc

SEQ ID NO: 275092 - DNA, 33 bp, Homo sapien
attgtaattactgctaggaaatgcaaacttctc

SEQ ID NO: 275093 - DNA, 33 bp, Homo sapien
tgtaaattctgctccaataaaatacctacctat

SEQ ID NO: 275094 - DNA, 33 bp, Homo sapien
tgtaaattctgctccagtaaaatacctacctat

SEQ ID NO: 275095 - DNA, 33 bp, Homo sapien
gaataaatgtgaggaactgatgtttgttttaaa

SEQ ID NO: 275096 - DNA, 33 bp, Homo sapien
gaataaatgtgaggaattgatgtttgttttaaa

SEQ ID NO: 275097 - DNA, 33 bp, Homo sapien
ttctaggtgaagtggcaagacagaatggggctg

SEQ ID NO: 275098 - DNA, 33 bp, Homo sapien
ttctaggtgaagtggcgagacagaatggggctg

SEQ ID NO: 275099 - DNA, 33 bp, Homo sapien
taaagaattgtaaaaaggcaactgtgtgagtgt

SEQ ID NO: 275100 - DNA, 33 bp, Homo sapien
taaagaattgtaaaaatgcaactgtgtgagtgt

SEQ ID NO: 275101 - DNA, 33 bp, Homo sapien
actgcaagaccgggtacaccgaaagtcattttc

SEQ ID NO: 275102 - DNA, 33 bp, Homo sapien
actgcaagaccgggtataccgaaagtcattttc

SEQ ID NO: 275103 - DNA, 33 bp, Homo sapien
tctcaagcaggactaacacgaccttaagattct

SEQ ID NO: 275104 - DNA, 33 bp, Homo sapien
tctcaagcaggactaatacgaccttaagattct

SEQ ID NO: 275105 - DNA, 33 bp, Homo sapien
ttggttgatggaacacagcctacagcgaacaag

SEQ ID NO: 275106 - DNA, 33 bp, Homo sapien
ttggttgatggaacacggcctacagcgaacaag

SEQ ID NO: 275107 - DNA, 33 bp, Homo sapien
gtggctttaattttgcactaatctggtggtgat

SEQ ID NO: 275108 - DNA, 33 bp, Homo sapien
gtggctttaattttgcgctaatctggtggtgat

SEQ ID NO: 275109 - DNA, 33 bp, Homo sapien
ataaaaagacatacaacattggacatgaagagc

SEQ ID NO: 275110 - DNA, 33 bp, Homo sapien
ataaaaagacatacaagattggacatgaagagc

SEQ ID NO: 275111 - DNA, 33 bp, Homo sapien
aactgatcgttggaaacagggctagaaactctc

SEQ ID NO: 275112 - DNA, 33 bp, Homo sapien
aactgatcgttggaaatagggctagaaactctc

SEQ ID NO: 275113 - DNA, 33 bp, Homo sapien
ctgccctttcaacctggaacatatgacacatta

SEQ ID NO: 275114 - DNA, 33 bp, Homo sapien
ctgccctttcaacctgtaacatatgacacatta

SEQ ID NO: 275115 - DNA, 33 bp, Homo sapien
ttacagggacaaaaaaatctagcctaaactcta

SEQ ID NO: 275116 - DNA, 33 bp, Homo sapien
ttacagggacaaaaaattctagcctaaactcta

SEQ ID NO: 275117 - DNA, 33 bp, Homo sapien
tagggcagtcagaatgccaaaactgattaatgt

SEQ ID NO: 275118 - DNA, 33 bp, Homo sapien
tagggcagtcagaatgtcaaaactgattaatgt

SEQ ID NO: 275119 - DNA, 33 bp, Homo sapien
tacaaataccattaacagaagcaaagttacaaa

SEQ ID NO: 275120 - DNA, 33 bp, Homo sapien
tacaaataccattaacggaagcaaagttacaaa

SEQ ID NO: 275121 - DNA, 33 bp, Homo sapien
agagtacaggagaaaacgttttgatgtagaaca

SEQ ID NO: 275122 - DNA, 33 bp, Homo sapien
agagtacaggagaaaaggttttgatgtagaaca

SEQ ID NO: 275123 - DNA, 33 bp, Homo sapien
tgttaaggctcatataactgaagtggtaagttt

SEQ ID NO: 275124 - DNA, 33 bp, Homo sapien
tgttaaggctcatatacctgaagtggtaagttt

SEQ ID NO: 275125 - DNA, 33 bp, Homo sapien
accacagaccctcaaacagatgtcatggctctg

SEQ ID NO: 275126 - DNA, 33 bp, Homo sapien
accacagaccctcaaagagatgtcatggctctg

SEQ ID NO: 275127 - DNA, 33 bp, Homo sapien
ttagcaaatatctatgcaacctgcacagaataa

SEQ ID NO: 275128 - DNA, 33 bp, Homo sapien
ttagcaaatatctatgtaacctgcacagaataa

SEQ ID NO: 275129 - DNA, 33 bp, Homo sapien
acttgaataagttacactacacagttgaattgc

SEQ ID NO: 275130 - DNA, 33 bp, Homo sapien
acttgaataagttacattacacagttgaattgc

SEQ ID NO: 275131 - DNA, 33 bp, Homo sapien
tgtcatcttgacagtaaccaggctgtagattat

SEQ ID NO: 275132 - DNA, 33 bp, Homo sapien
tgtcatcttgacagtagccaggctgtagattat

SEQ ID NO: 275133 - DNA, 33 bp, Homo sapien
cttaacgttttttccgcaggtcactgatgcatt

SEQ ID NO: 275134 - DNA, 33 bp, Homo sapien
cttaacgttttttccggaggtcactgatgcatt

SEQ ID NO: 275135 - DNA, 33 bp, Homo sapien
ctacacaatatattcaagtaacgaaactgcact

SEQ ID NO: 275136 - DNA, 33 bp, Homo sapien
ctacacaatatattcacgtaacgaaactgcact

SEQ ID NO: 275137 - DNA, 33 bp, Homo sapien
aatatcacagactgaacgaaccaatgtataatt

SEQ ID NO: 275138 - DNA, 33 bp, Homo sapien
aatatcacagactgaatgaaccaatgtataatt

SEQ ID NO: 275139 - DNA, 33 bp, Homo sapien
aggtgtcaggcctctacgtccaagcctgcacat

SEQ ID NO: 275140 - DNA, 33 bp, Homo sapien
aggtgtcaggcctctatgtccaagcctgcacat

SEQ ID NO: 275141 - DNA, 33 bp, Homo sapien
agtccaagcatgttataagttatttgtatcaag

SEQ ID NO: 275142 - DNA, 33 bp, Homo sapien
agtccaagcatgttatgagttatttgtatcaag

SEQ ID NO: 275143 - DNA, 33 bp, Homo sapien
cctttgcctggaaaaaccacaagcactcaactc

SEQ ID NO: 275144 - DNA, 33 bp, Homo sapien
cctttgcctggaaaaatcacaagcactcaactc

SEQ ID NO: 275145 - DNA, 33 bp, Homo sapien
taatggagctatgggaaggagaccactgccctc

SEQ ID NO: 275146 - DNA, 33 bp, Homo sapien
taatggagctatgggatggagaccactgccctc

SEQ ID NO: 275147 - DNA, 33 bp, Homo sapien
ggaaatgaaggccccacagaggaactttcctag

SEQ ID NO: 275148 - DNA, 33 bp, Homo sapien
ggaaatgaaggccccagagaggaactttcctag

SEQ ID NO: 275149 - DNA, 33 bp, Homo sapien
gtgggtgataaaagataagggtgcaggaatgga

SEQ ID NO: 275150 - DNA, 33 bp, Homo sapien
gtgggtgataaaagatgagggtgcaggaatgga

SEQ ID NO: 275151 - DNA, 33 bp, Homo sapien
aaggttgtataagtgaagtcaacttacagatta

SEQ ID NO: 275152 - DNA, 33 bp, Homo sapien
aaggttgtataagtgatgtcaacttacagatta

SEQ ID NO: 275153 - DNA, 33 bp, Homo sapien
gaggacagattcttaccgaacctatgtaataaa

SEQ ID NO: 275154 - DNA, 33 bp, Homo sapien
gaggacagattcttactgaacctatgtaataaa

SEQ ID NO: 275155 - DNA, 33 bp, Homo sapien
acaccctttattgtcacattgtgggtgaagaga

SEQ ID NO: 275156 - DNA, 33 bp, Homo sapien
acaccctttattgtcatattgtgggtgaagaga

SEQ ID NO: 275157 - DNA, 33 bp, Homo sapien
aaagattctataacagacaaaccgtatttggaa

SEQ ID NO: 275158 - DNA, 33 bp, Homo sapien
aaagattctataacagccaaaccgtatttggaa

SEQ ID NO: 275159 - DNA, 33 bp, Homo sapien
atcatttatttagcttaaaatcgtctgacagct

SEQ ID NO: 275160 - DNA, 33 bp, Homo sapien
atcatttatttagcttgaaatcgtctgacagct

SEQ ID NO: 275161 - DNA, 33 bp, Homo sapien
atgcataagtactgtgaaatactatgccgtttt

SEQ ID NO: 275162 - DNA, 33 bp, Homo sapien
atgcataagtactgtgcaatactatgccgtttt

SEQ ID NO: 275163 - DNA, 33 bp, Homo sapien
atgggaattgattccacggcctctgcaaataca

SEQ ID NO: 275164 - DNA, 33 bp, Homo sapien
atgggaattgattccagggcctctgcaaataca

SEQ ID NO: 275165 - DNA, 33 bp, Homo sapien
tggataatataaatccccaactctctactaccc

SEQ ID NO: 275166 - DNA, 33 bp, Homo sapien
tggataatataaatcctcaactctctactaccc

SEQ ID NO: 275167 - DNA, 33 bp, Homo sapien
aaatagcactaataccaaaggactcaagaaagt

SEQ ID NO: 275168 - DNA, 33 bp, Homo sapien
aaatagcactaataccgaaggactcaagaaagt

SEQ ID NO: 275169 - DNA, 33 bp, Homo sapien
ctcaccattttaagcaaggtggtcttgagcaag

SEQ ID NO: 275170 - DNA, 33 bp, Homo sapien
ctcaccattttaagcacggtggtcttgagcaag

SEQ ID NO: 275171 - DNA, 33 bp, Homo sapien
ttcatgttgacaaacaccaaaacaccattacaa

SEQ ID NO: 275172 - DNA, 33 bp, Homo sapien
ttcatgttgacaaacagcaaaacaccattacaa

SEQ ID NO: 275173 - DNA, 33 bp, Homo sapien
tttcactacaaggtcaagatacagagtctaaac

SEQ ID NO: 275174 - DNA, 33 bp, Homo sapien
tttcactacaaggtcaggatacagagtctaaac

SEQ ID NO: 275175 - DNA, 33 bp, Homo sapien
ggaatgtgtcaaagaaattctagtcatctttat

SEQ ID NO: 275176 - DNA, 33 bp, Homo sapien
ggaatgtgtcaaagaagttctagtcatctttat

SEQ ID NO: 275177 - DNA, 33 bp, Homo sapien
aaaatttgagcacacactgcatttgagtatgta

SEQ ID NO: 275178 - DNA, 33 bp, Homo sapien
aaaatttgagcacacattgcatttgagtatgta

SEQ ID NO: 275179 - DNA, 33 bp, Homo sapien
agtcagaatgatctaccgaaaatacaaccacaa

SEQ ID NO: 275180 - DNA, 33 bp, Homo sapien
agtcagaatgatctactgaaaatacaaccacaa

SEQ ID NO: 275181 - DNA, 33 bp, Homo sapien
catgtatcccagcactgaaagtataataaaaaa

SEQ ID NO: 275182 - DNA, 33 bp, Homo sapien
catgtatcccagcacttaaagtataataaaaaa

SEQ ID NO: 275183 - DNA, 33 bp, Homo sapien
cacactttggtctgaaggtagtctattagagtg

SEQ ID NO: 275184 - DNA, 33 bp, Homo sapien
cacactttggtctgaatgtagtctattagagtg

SEQ ID NO: 275185 - DNA, 33 bp, Homo sapien
acaattatacactttaagggactgaacccttct

SEQ ID NO: 275186 - DNA, 33 bp, Homo sapien
acaattatacactttatgggactgaacccttct

SEQ ID NO: 275187 - DNA, 33 bp, Homo sapien
aatgtcaataagcacactacaggaaaactggct

SEQ ID NO: 275188 - DNA, 33 bp, Homo sapien
aatgtcaataagcacattacaggaaaactggct

SEQ ID NO: 275189 - DNA, 33 bp, Homo sapien
ccttgcttttgtgaacaagataagttccctttt

SEQ ID NO: 275190 - DNA, 33 bp, Homo sapien
ccttgcttttgtgaaccagataagttccctttt

SEQ ID NO: 275191 - DNA, 33 bp, Homo sapien
tgttggagattccagacgagtaggcaacaaata

SEQ ID NO: 275192 - DNA, 33 bp, Homo sapien
tgttggagattccagatgagtaggcaacaaata

SEQ ID NO: 275193 - DNA, 33 bp, Homo sapien
tggttccagactttggcaacaactgaaatatcc

SEQ ID NO: 275194 - DNA, 33 bp, Homo sapien
tggttccagactttggtaacaactgaaatatcc

SEQ ID NO: 275195 - DNA, 33 bp, Homo sapien
cctagagtaaaaatacaatgcagagttggaaag

SEQ ID NO: 275196 - DNA, 33 bp, Homo sapien
cctagagtaaaaatacgatgcagagttggaaag

SEQ ID NO: 275197 - DNA, 33 bp, Homo sapien
tatatcatcacacataccaagttagcaaatgaa

SEQ ID NO: 275198 - DNA, 33 bp, Homo sapien
tatatcatcacacatatcaagttagcaaatgaa

SEQ ID NO: 275199 - DNA, 33 bp, Homo sapien
agtttgcatagacaaaagttacaacaaaaatcc

SEQ ID NO: 275200 - DNA, 33 bp, Homo sapien
agtttgcatagacaaaggttacaacaaaaatcc

SEQ ID NO: 275201 - DNA, 33 bp, Homo sapien
taataaaatgctcacaatgcagacttgtaataa

SEQ ID NO: 275202 - DNA, 33 bp, Homo sapien
taataaaatgctcacagtgcagacttgtaataa

SEQ ID NO: 275203 - DNA, 33 bp, Homo sapien
gtggctaatatgaaaaacaccattagtagtagt

SEQ ID NO: 275204 - DNA, 33 bp, Homo sapien
gtggctaatatgaaaagcaccattagtagtagt

SEQ ID NO: 275205 - DNA, 33 bp, Homo sapien
aaagttttcttgtccacgaagttatcaattttc

SEQ ID NO: 275206 - DNA, 33 bp, Homo sapien
aaagttttcttgtccatgaagttatcaattttc

SEQ ID NO: 275207 - DNA, 33 bp, Homo sapien
actgtgaaagacggtaaatttagtaacaacatc

SEQ ID NO: 275208 - DNA, 33 bp, Homo sapien
actgtgaaagacggtagatttagtaacaacatc

SEQ ID NO: 275209 - DNA, 33 bp, Homo sapien
ctgagttacatttaggacatgatgttgttacta

SEQ ID NO: 275210 - DNA, 33 bp, Homo sapien
ctgagttacatttagggcatgatgttgttacta

SEQ ID NO: 275211 - DNA, 33 bp, Homo sapien
acattatagaaactgaaaacagattagtggttg

SEQ ID NO: 275212 - DNA, 33 bp, Homo sapien
acattatagaaactgagaacagattagtggttg

SEQ ID NO: 275213 - DNA, 33 bp, Homo sapien
tggtgtgacatgattaaatttgcgttttttttt

SEQ ID NO: 275214 - DNA, 33 bp, Homo sapien
tggtgtgacatgattacatttgcgttttttttt

SEQ ID NO: 275215 - DNA, 33 bp, Homo sapien
gctttgatcttacaaccatgtggcaaatatcat

SEQ ID NO: 275216 - DNA, 33 bp, Homo sapien
gctttgatcttacaactatgtggcaaatatcat

SEQ ID NO: 275217 - DNA, 33 bp, Homo sapien
ggttgaagcatactataaaacattttaaagcct

SEQ ID NO: 275218 - DNA, 33 bp, Homo sapien
ggttgaagcatactatgaaacattttaaagcct

SEQ ID NO: 275219 - DNA, 33 bp, Homo sapien
tattacttttagcaaacgtatagctacctgtta

SEQ ID NO: 275220 - DNA, 33 bp, Homo sapien
tattacttttagcaaatgtatagctacctgtta

SEQ ID NO: 275221 - DNA, 33 bp, Homo sapien
gatagttggaaattagaagatagcaggtgaaaa

SEQ ID NO: 275222 - DNA, 33 bp, Homo sapien
gatagttggaaattaggagatagcaggtgaaaa

SEQ ID NO: 275223 - DNA, 33 bp, Homo sapien
tagaaatttacatgacacgcagaattaagacta

SEQ ID NO: 275224 - DNA, 33 bp, Homo sapien
tagaaatttacatgacgcgcagaattaagacta

SEQ ID NO: 275225 - DNA, 33 bp, Homo sapien
catatcattagtgaaactctaggtcttaaaata

SEQ ID NO: 275226 - DNA, 33 bp, Homo sapien
catatcattagtgaaagtctaggtcttaaaata

SEQ ID NO: 275227 - DNA, 33 bp, Homo sapien
aacttaatttgccttaagatggcagtattgttc

SEQ ID NO: 275228 - DNA, 33 bp, Homo sapien
aacttaatttgccttaggatggcagtattgttc

SEQ ID NO: 275229 - DNA, 33 bp, Homo sapien
tatattcatttgttccacatactgttgcttttt

SEQ ID NO: 275230 - DNA, 33 bp, Homo sapien
tatattcatttgttccgcatactgttgcttttt

SEQ ID NO: 275231 - DNA, 33 bp, Homo sapien
aaagacagaaccaatcaagaaaaagtgggcaaa

SEQ ID NO: 275232 - DNA, 33 bp, Homo sapien
aaagacagaaccaatcgagaaaaagtgggcaaa

SEQ ID NO: 275233 - DNA, 33 bp, Homo sapien
actgacaggacaactcaaaacgggactgccagg

SEQ ID NO: 275234 - DNA, 33 bp, Homo sapien
actgacaggacaactcgaaacgggactgccagg

SEQ ID NO: 275235 - DNA, 33 bp, Homo sapien
tgccattgacccttccactgagtttgctgaggt

SEQ ID NO: 275236 - DNA, 33 bp, Homo sapien
tgccattgacccttccgctgagtttgctgaggt

SEQ ID NO: 275237 - DNA, 33 bp, Homo sapien
atcattgtactgttgactatatgttgcctttat

SEQ ID NO: 275238 - DNA, 33 bp, Homo sapien
atcattgtactgttgattatatgttgcctttat

SEQ ID NO: 275239 - DNA, 33 bp, Homo sapien
acagctgtcggagaataaggctcagaactgcag

SEQ ID NO: 275240 - DNA, 33 bp, Homo sapien
acagctgtcggagaatgaggctcagaactgcag

SEQ ID NO: 275241 - DNA, 33 bp, Homo sapien
ttgatcctgacaataaaactataaggtaggaat

SEQ ID NO: 275242 - DNA, 33 bp, Homo sapien
ttgatcctgacaataacactataaggtaggaat

SEQ ID NO: 275243 - DNA, 33 bp, Homo sapien
tattttatcttgaaaaatgataaagccaactgc

SEQ ID NO: 275244 - DNA, 33 bp, Homo sapien
tattttatcttgaaaagtgataaagccaactgc

SEQ ID NO: 275245 - DNA, 33 bp, Homo sapien
tgtgatgtctccattaaaatcttcagagttctg

SEQ ID NO: 275246 - DNA, 33 bp, Homo sapien
tgtgatgtctccattacaatcttcagagttctg

SEQ ID NO: 275247 - DNA, 33 bp, Homo sapien
aagcttccacaacataagtgaggtcctgttggc

SEQ ID NO: 275248 - DNA, 33 bp, Homo sapien
aagcttccacaacataggtgaggtcctgttggc

SEQ ID NO: 275249 - DNA, 33 bp, Homo sapien
ttatttagtctagagaagtgtgaaggagaaaca

SEQ ID NO: 275250 - DNA, 33 bp, Homo sapien
ttatttagtctagagaggtgtgaaggagaaaca

SEQ ID NO: 275251 - DNA, 33 bp, Homo sapien
aaaagaacatcaaatgacaatgtagctaaagat

SEQ ID NO: 275252 - DNA, 33 bp, Homo sapien
aaaagaacatcaaatggcaatgtagctaaagat

SEQ ID NO: 275253 - DNA, 33 bp, Homo sapien
ggtagcacctatatttcgaaggtgacacattaa

SEQ ID NO: 275254 - DNA, 33 bp, Homo sapien
ggtagcacctatattttgaaggtgacacattaa

SEQ ID NO: 275255 - DNA, 33 bp, Homo sapien
gtaacttagactaaaactgttgtccacaagatt

SEQ ID NO: 275256 - DNA, 33 bp, Homo sapien
gtaacttagactaaaagtgttgtccacaagatt

SEQ ID NO: 275257 - DNA, 33 bp, Homo sapien
ttatttcataaaatgcaaacaatttagagtatt

SEQ ID NO: 275258 - DNA, 33 bp, Homo sapien
ttatttcataaaatgcgaacaatttagagtatt

SEQ ID NO: 275259 - DNA, 33 bp, Homo sapien
cttatccgtttacccaaatttctgcctttcttc

SEQ ID NO: 275260 - DNA, 33 bp, Homo sapien
cttatccgtttacccacatttctgcctttcttc

SEQ ID NO: 275261 - DNA, 33 bp, Homo sapien
ttaagcaggaaaacaacgtattgctttggtgtt

SEQ ID NO: 275262 - DNA, 33 bp, Homo sapien
ttaagcaggaaaacaatgtattgctttggtgtt

SEQ ID NO: 275263 - DNA, 33 bp, Homo sapien
gaacaattgagaatcgcattatacaatggttgc

SEQ ID NO: 275264 - DNA, 33 bp, Homo sapien
gaacaattgagaatcgtattatacaatggttgc

SEQ ID NO: 275265 - DNA, 33 bp, Homo sapien
gtttgtacatagccccagcaaaaataatggaag

SEQ ID NO: 275266 - DNA, 33 bp, Homo sapien
gtttgtacatagccccggcaaaaataatggaag

SEQ ID NO: 275267 - DNA, 33 bp, Homo sapien
cagtcctgtattgtaaactaagtaatatgagca

SEQ ID NO: 275268 - DNA, 33 bp, Homo sapien
cagtcctgtattgtaacctaagtaatatgagca

SEQ ID NO: 275269 - DNA, 33 bp, Homo sapien
cgggtttgtaggcttgcatgttggccattaaag

SEQ ID NO: 275270 - DNA, 33 bp, Homo sapien
cgggtttgtaggcttgtatgttggccattaaag

SEQ ID NO: 275271 - DNA, 33 bp, Homo sapien
gagtgtcctccaattcaattgtcacactatcta

SEQ ID NO: 275272 - DNA, 33 bp, Homo sapien
gagtgtcctccaattctattgtcacactatcta

SEQ ID NO: 275273 - DNA, 33 bp, Homo sapien
tcctaaaatttctgggaattaagttgtctttca

SEQ ID NO: 275274 - DNA, 33 bp, Homo sapien
tcctaaaatttctggggattaagttgtctttca

SEQ ID NO: 275275 - DNA, 33 bp, Homo sapien
ttgagaaaagcagaaaatctagagtgtactcat

SEQ ID NO: 275276 - DNA, 33 bp, Homo sapien
ttgagaaaagcagaaagtctagagtgtactcat

SEQ ID NO: 275277 - DNA, 33 bp, Homo sapien
gttctatcaagtcagaaaaatttataatcttat

SEQ ID NO: 275278 - DNA, 33 bp, Homo sapien
gttctatcaagtcagacaaatttataatcttat

SEQ ID NO: 275279 - DNA, 33 bp, Homo sapien
acatatttctgaaactcactcaccactgataaa

SEQ ID NO: 275280 - DNA, 33 bp, Homo sapien
acatatttctgaaacttactcaccactgataaa

SEQ ID NO: 275281 - DNA, 33 bp, Homo sapien
attgttctggtgatcaataaggacactgctgtg

SEQ ID NO: 275282 - DNA, 33 bp, Homo sapien
attgttctggtgatcagtaaggacactgctgtg

SEQ ID NO: 275283 - DNA, 33 bp, Homo sapien
gggagcaaggctttcacgtttctcagggatgct

SEQ ID NO: 275284 - DNA, 33 bp, Homo sapien
gggagcaaggctttcatgtttctcagggatgct

SEQ ID NO: 275285 - DNA, 33 bp, Homo sapien
gcaggagatgattaggacattgttatctaaaat

SEQ ID NO: 275286 - DNA, 33 bp, Homo sapien
gcaggagatgattagggcattgttatctaaaat

SEQ ID NO: 275287 - DNA, 33 bp, Homo sapien
taatatattgagagcgcatcttaaacactggga

SEQ ID NO: 275288 - DNA, 33 bp, Homo sapien
taatatattgagagcgtatcttaaacactggga

SEQ ID NO: 275289 - DNA, 33 bp, Homo sapien
agtatgtagctactaaacatatagaatctataa

SEQ ID NO: 275290 - DNA, 33 bp, Homo sapien
agtatgtagctactaagcatatagaatctataa

SEQ ID NO: 275291 - DNA, 33 bp, Homo sapien
aaagtgagccattttacaactttaacagggcca

SEQ ID NO: 275292 - DNA, 33 bp, Homo sapien
aaagtgagccattttagaactttaacagggcca

SEQ ID NO: 275293 - DNA, 33 bp, Homo sapien
ttaccttatagtaataagcaaaacacagagtat

SEQ ID NO: 275294 - DNA, 33 bp, Homo sapien
ttaccttatagtaataggcaaaacacagagtat

SEQ ID NO: 275295 - DNA, 33 bp, Homo sapien
agaaccttacaggacactgggaagatgcaacat

SEQ ID NO: 275296 - DNA, 33 bp, Homo sapien
agaaccttacaggacattgggaagatgcaacat

SEQ ID NO: 275297 - DNA, 33 bp, Homo sapien
ttcaagccagctagggccccaataatgtgaaaa

SEQ ID NO: 275298 - DNA, 33 bp, Homo sapien
ttcaagccagctagggtcccaataatgtgaaaa

SEQ ID NO: 275299 - DNA, 33 bp, Homo sapien
tatctatggcagagggacattccaatttcaatg

SEQ ID NO: 275300 - DNA, 33 bp, Homo sapien
tatctatggcagaggggcattccaatttcaatg

SEQ ID NO: 275301 - DNA, 33 bp, Homo sapien
tgatacccacatgagagaatgcaagatattact

SEQ ID NO: 275302 - DNA, 33 bp, Homo sapien
tgatacccacatgagataatgcaagatattact

SEQ ID NO: 275303 - DNA, 33 bp, Homo sapien
aatagccaaaaaccttcaaatagttgaaatctt

SEQ ID NO: 275304 - DNA, 33 bp, Homo sapien
aatagccaaaaaccttgaaatagttgaaatctt

SEQ ID NO: 275305 - DNA, 33 bp, Homo sapien
aacaaatgttggtaaaggtgtagagaaaaaaga

SEQ ID NO: 275306 - DNA, 33 bp, Homo sapien
aacaaatgttggtaaatgtgtagagaaaaaaga

SEQ ID NO: 275307 - DNA, 33 bp, Homo sapien
tgaaggtgataaatggccaattagtcaaccaga

SEQ ID NO: 275308 - DNA, 33 bp, Homo sapien
tgaaggtgataaatggtcaattagtcaaccaga

SEQ ID NO: 275309 - DNA, 33 bp, Homo sapien
ttggatccagtttcaacattgactagctctacg

SEQ ID NO: 275310 - DNA, 33 bp, Homo sapien
ttggatccagtttcaatattgactagctctacg

SEQ ID NO: 275311 - DNA, 33 bp, Homo sapien
taatctgaccttgccaatagtctagctggaggc

SEQ ID NO: 275312 - DNA, 33 bp, Homo sapien
taatctgaccttgccattagtctagctggaggc

SEQ ID NO: 275313 - DNA, 33 bp, Homo sapien
ataatttttttgtaccacatggaaattttattt

SEQ ID NO: 275314 - DNA, 33 bp, Homo sapien
ataatttttttgtacctcatggaaattttattt

SEQ ID NO: 275315 - DNA, 33 bp, Homo sapien
gtacgtagttggggaagaagtgggtatgtatgt

SEQ ID NO: 275316 - DNA, 33 bp, Homo sapien
gtacgtagttggggaataagtgggtatgtatgt

SEQ ID NO: 275317 - DNA, 33 bp, Homo sapien
tgttgaagagttcctgaactgctggccacaaca

SEQ ID NO: 275318 - DNA, 33 bp, Homo sapien
tgttgaagagttcctggactgctggccacaaca

SEQ ID NO: 275319 - DNA, 33 bp, Homo sapien
tagacatatctagaaaatgacattcttaaacat

SEQ ID NO: 275320 - DNA, 33 bp, Homo sapien
tagacatatctagaaagtgacattcttaaacat

SEQ ID NO: 275321 - DNA, 33 bp, Homo sapien
atccagaggaacgaacagtactatctaggtgac

SEQ ID NO: 275322 - DNA, 33 bp, Homo sapien
atccagaggaacgaacggtactatctaggtgac

SEQ ID NO: 275323 - DNA, 33 bp, Homo sapien
ttacaactacacgagaagttattgaggaactca

SEQ ID NO: 275324 - DNA, 33 bp, Homo sapien
ttacaactacacgagaggttattgaggaactca

SEQ ID NO: 275325 - DNA, 33 bp, Homo sapien
acatgaattttagctcaatgtgatgggaaatta

SEQ ID NO: 275326 - DNA, 33 bp, Homo sapien
acatgaattttagctccatgtgatgggaaatta

SEQ ID NO: 275327 - DNA, 33 bp, Homo sapien
cagaaaggcaaaagccaatttcattctactaac

SEQ ID NO: 275328 - DNA, 33 bp, Homo sapien
cagaaaggcaaaagccgatttcattctactaac

SEQ ID NO: 275329 - DNA, 33 bp, Homo sapien
accaggttctgtcaataaagtgaaacaacatcg

SEQ ID NO: 275330 - DNA, 33 bp, Homo sapien
accaggttctgtcaatgaagtgaaacaacatcg

SEQ ID NO: 275331 - DNA, 33 bp, Homo sapien
agcctcagttgtccaacgggggcactttccggt

SEQ ID NO: 275332 - DNA, 33 bp, Homo sapien
agcctcagttgtccaatgggggcactttccggt

SEQ ID NO: 275333 - DNA, 33 bp, Homo sapien
actacatcgcaataaaatagaaatttataccaa

SEQ ID NO: 275334 - DNA, 33 bp, Homo sapien
actacatcgcaataaagtagaaatttataccaa

SEQ ID NO: 275335 - DNA, 33 bp, Homo sapien
ttctctctcagcttccagagatgctgttgagaa

SEQ ID NO: 275336 - DNA, 33 bp, Homo sapien
ttctctctcagcttcccgagatgctgttgagaa

SEQ ID NO: 275337 - DNA, 33 bp, Homo sapien
ggggacacagtgaaacaataacaaatgtggtca

SEQ ID NO: 275338 - DNA, 33 bp, Homo sapien
ggggacacagtgaaacgataacaaatgtggtca

SEQ ID NO: 275339 - DNA, 33 bp, Homo sapien
atttgtacattccggacagaagtgttttttttg

SEQ ID NO: 275340 - DNA, 33 bp, Homo sapien
atttgtacattccggatagaagtgttttttttg

SEQ ID NO: 275341 - DNA, 33 bp, Homo sapien
agaggacccactgggccaatgcctagtggagct

SEQ ID NO: 275342 - DNA, 33 bp, Homo sapien
agaggacccactgggctaatgcctagtggagct

SEQ ID NO: 275343 - DNA, 33 bp, Homo sapien
cagttggactttatgaaccagagaaatcatttg

SEQ ID NO: 275344 - DNA, 33 bp, Homo sapien
cagttggactttatgagccagagaaatcatttg

SEQ ID NO: 275345 - DNA, 33 bp, Homo sapien
attaatgtatttcagaaccacatcctctgactt

SEQ ID NO: 275346 - DNA, 33 bp, Homo sapien
attaatgtatttcagatccacatcctctgactt

SEQ ID NO: 275347 - DNA, 33 bp, Homo sapien
ttctctttaaagccagaaggataaccattctca

SEQ ID NO: 275348 - DNA, 33 bp, Homo sapien
ttctctttaaagccagcaggataaccattctca

SEQ ID NO: 275349 - DNA, 33 bp, Homo sapien
gaagagtcacaagtgccatgctgggctcagtag

SEQ ID NO: 275350 - DNA, 33 bp, Homo sapien
gaagagtcacaagtgctatgctgggctcagtag

SEQ ID NO: 275351 - DNA, 33 bp, Homo sapien
ttcttacattttgaaacatgattatgccttctt

SEQ ID NO: 275352 - DNA, 33 bp, Homo sapien
ttcttacattttgaaatatgattatgccttctt

SEQ ID NO: 275353 - DNA, 33 bp, Homo sapien
cttaatttcatatgtcaaaatcttgtaaacttg

SEQ ID NO: 275354 - DNA, 33 bp, Homo sapien
cttaatttcatatgtcgaaatcttgtaaacttg

SEQ ID NO: 275355 - DNA, 33 bp, Homo sapien
atcatggattcagagaaccagcgcattcagcta

SEQ ID NO: 275356 - DNA, 33 bp, Homo sapien
atcatggattcagagagccagcgcattcagcta

SEQ ID NO: 275357 - DNA, 33 bp, Homo sapien
tacacaggatatgccaataagtggagcatctag

SEQ ID NO: 275358 - DNA, 33 bp, Homo sapien
tacacaggatatgccattaagtggagcatctag

SEQ ID NO: 275359 - DNA, 33 bp, Homo sapien; identical to SEQ ID NO: 275357

SEQ ID NO: 275360 - DNA, 33 bp, Homo sapien; identical to SEQ ID NO: 275358

SEQ ID NO: 275361 - DNA, 33 bp, Homo sapien
gagtgttgtcacaagagtaggacctataccagt

SEQ ID NO: 275362 - DNA, 33 bp, Homo sapien
gagtgttgtcacaagattaggacctataccagt

SEQ ID NO: 275363 - DNA, 33 bp, Homo sapien
ttcaaccaccatttgaagtgatttgttgcttca

SEQ ID NO: 275364 - DNA, 33 bp, Homo sapien
ttcaaccaccatttgacgtgatttgttgcttca

SEQ ID NO: 275365 - DNA, 33 bp, Homo sapien
taaggagagtccttcaaagaagataggcaaaaa

SEQ ID NO: 275366 - DNA, 33 bp, Homo sapien
taaggagagtccttcagagaagataggcaaaaa

SEQ ID NO: 275367 - DNA, 33 bp, Homo sapien; identical to SEQ ID NO: 275365

SEQ ID NO: 275368 - DNA, 33 bp, Homo sapien; identical to SEQ ID NO: 275366

SEQ ID NO: 275369 - DNA, 33 bp, Homo sapien
gaatatttattcataccgctatgcctgaaggga

SEQ ID NO: 275370 - DNA, 33 bp, Homo sapien
gaatatttattcatactgctatgcctgaaggga

SEQ ID NO: 275371 - DNA, 33 bp, Homo sapien
aattaagatcacaaagaagttgagtaaattgtt

SEQ ID NO: 275372 - DNA, 33 bp, Homo sapien
aattaagatcacaaaggagttgagtaaattgtt

SEQ ID NO: 275373 - DNA, 33 bp, Homo sapien
atccccataagtaaacagctatgttaaatccct

SEQ ID NO: 275374 - DNA, 33 bp, Homo sapien
atccccataagtaaaccgctatgttaaatccct

SEQ ID NO: 275375 - DNA, 33 bp, Homo sapien
taaaaaataggtaaaaattgatgaagtcattaa

SEQ ID NO: 275376 - DNA, 33 bp, Homo sapien
taaaaaataggtaaaagttgatgaagtcattaa

SEQ ID NO: 275377 - DNA, 33 bp, Homo sapien
acaacatggaagaaaacggcaacttcccaggca

SEQ ID NO: 275378 - DNA, 33 bp, Homo sapien
acaacatggaagaaaatggcaacttcccaggca

SEQ ID NO: 275379 - DNA, 33 bp, Homo sapien
atatgtactgtttagaaggtcacattgaggagc

SEQ ID NO: 275380 - DNA, 33 bp, Homo sapien
atatgtactgtttagagggtcacattgaggagc

SEQ ID NO: 275381 - DNA, 33 bp, Homo sapien
ataggacaatcctaccaagtgatatttatgata

SEQ ID NO: 275382 - DNA, 33 bp, Homo sapien
ataggacaatcctaccgagtgatatttatgata

SEQ ID NO: 275383 - DNA, 33 bp, Homo sapien
aatggatcttaactcacgctttgttaaaatgtt

SEQ ID NO: 275384 - DNA, 33 bp, Homo sapien
aatggatcttaactcatgctttgttaaaatgtt

SEQ ID NO: 275385 - DNA, 33 bp, Homo sapien
tatgttgagtaaaggaccatgtcacaagggatt

SEQ ID NO: 275386 - DNA, 33 bp, Homo sapien
tatgttgagtaaaggagcatgtcacaagggatt

SEQ ID NO: 275387 - DNA, 33 bp, Homo sapien
agctggcactaaaagacgccaaagtatagctca

SEQ ID NO: 275388 - DNA, 33 bp, Homo sapien
agctggcactaaaagaggccaaagtatagctca

SEQ ID NO: 275389 - DNA, 33 bp, Homo sapien
ttttgcatttgcatctcacacttggctaaacta

SEQ ID NO: 275390 - DNA, 33 bp, Homo sapien
ttttgcatttgcatcttacacttggctaaacta

SEQ ID NO: 275391 - DNA, 33 bp, Homo sapien
gcaattgctttgagaacttagccaaaaattact

SEQ ID NO: 275392 - DNA, 33 bp, Homo sapien
gcaattgctttgagaagttagccaaaaattact

SEQ ID NO: 275393 - DNA, 33 bp, Homo sapien
ttctctgtttcagatacgagttcaattaaaaca

SEQ ID NO: 275394 - DNA, 33 bp, Homo sapien
ttctctgtttcagatatgagttcaattaaaaca

SEQ ID NO: 275395 - DNA, 33 bp, Homo sapien
cataaatcacaatgtagaatggtatttgtaagg

SEQ ID NO: 275396 - DNA, 33 bp, Homo sapien
cataaatcacaatgtataatggtatttgtaagg

SEQ ID NO: 275397 - DNA, 33 bp, Homo sapien
ctgatgcagaccgtaaggcaatgtgagtatatt

SEQ ID NO: 275398 - DNA, 33 bp, Homo sapien
ctgatgcagaccgtaatgcaatgtgagtatatt

SEQ ID NO: 275399 - DNA, 33 bp, Homo sapien
tgtgtgaacaaaaacacgaagtaggtcaggaag

SEQ ID NO: 275400 - DNA, 33 bp, Homo sapien
tgtgtgaacaaaaacatgaagtaggtcaggaag

SEQ ID NO: 275401 - DNA, 33 bp, Homo sapien
atcaggaaaaattaggaatgcaggcgtcctgca

SEQ ID NO: 275402 - DNA, 33 bp, Homo sapien
atcaggaaaaattaggcatgcaggcgtcctgca

SEQ ID NO: 275403 - DNA, 33 bp, Homo sapien
attaattagtgtcttgaaataatttggaggaat

SEQ ID NO: 275404 - DNA, 33 bp, Homo sapien
attaattagtgtcttgcaataatttggaggaat

SEQ ID NO: 275405 - DNA, 33 bp, Homo sapien
cacaaatataccacccaagttaatagcaaaagc

SEQ ID NO: 275406 - DNA, 33 bp, Homo sapien
cacaaatataccacccgagttaatagcaaaagc

SEQ ID NO: 275407 - DNA, 33 bp, Homo sapien
tgtatttaggagtgaaatcatcttcaggagaag

SEQ ID NO: 275408 - DNA, 33 bp, Homo sapien
tgtatttaggagtgaactcatcttcaggagaag

SEQ ID NO: 275409 - DNA, 33 bp, Homo sapien
tcatctataaacctacagaaactcaaggtgctt

SEQ ID NO: 275410 - DNA, 33 bp, Homo sapien
tcatctataaacctacggaaactcaaggtgctt

SEQ ID NO: 275411 - DNA, 33 bp, Homo sapien
tggacttccatgtgagcatttatctccctacgt

SEQ ID NO: 275412 - DNA, 33 bp, Homo sapien
tggacttccatgtgagtatttatctccctacgt

SEQ ID NO: 275413 - DNA, 33 bp, Homo sapien
ataataacaatccaacaatttgctgcttacaag

SEQ ID NO: 275414 - DNA, 33 bp, Homo sapien
ataataacaatccaaccatttgctgcttacaag

SEQ ID NO: 275415 - DNA, 33 bp, Homo sapien
gtagatctggaatccaagacttttgaatgtcaa

SEQ ID NO: 275416 - DNA, 33 bp, Homo sapien
gtagatctggaatccacgacttttgaatgtcaa

SEQ ID NO: 275417 - DNA, 33 bp, Homo sapien
tgagatcctgtggatacgttcttgggtgacaaa

SEQ ID NO: 275418 - DNA, 33 bp, Homo sapien
tgagatcctgtggatatgttcttgggtgacaaa

SEQ ID NO: 275419 - DNA, 33 bp, Homo sapien
actccttgagggaaacagaagtaaaatattcct

SEQ ID NO: 275420 - DNA, 33 bp, Homo sapien
actccttgagggaaacggaagtaaaatattcct

SEQ ID NO: 275421 - DNA, 33 bp, Homo sapien
ttaataatcaaattccaaaaggtcaaggataaa

SEQ ID NO: 275422 - DNA, 33 bp, Homo sapien
ttaataatcaaattcccaaaggtcaaggataaa

SEQ ID NO: 275423 - DNA, 33 bp, Homo sapien
tctttgaaccactgaaaaattaccacaaatctc

SEQ ID NO: 275424 - DNA, 33 bp, Homo sapien
tctttgaaccactgaagaattaccacaaatctc

SEQ ID NO: 275425 - DNA, 33 bp, Homo sapien
gggaattcactcagccaagaaatactatgaaat

SEQ ID NO: 275426 - DNA, 33 bp, Homo sapien
gggaattcactcagcctagaaatactatgaaat

SEQ ID NO: 275427 - DNA, 33 bp, Homo sapien
ttcatcacttttgaaaaacagccaattccacaa

SEQ ID NO: 275428 - DNA, 33 bp, Homo sapien
ttcatcacttttgaaacacagccaattccacaa

SEQ ID NO: 275429 - DNA, 33 bp, Homo sapien
aaaccagttaagaagcgattggaataaaacagt

SEQ ID NO: 275430 - DNA, 33 bp, Homo sapien
aaaccagttaagaagctattggaataaaacagt

SEQ ID NO: 275431 - DNA, 33 bp, Homo sapien
tttccattgacagaaacttgtttttatctctcc

SEQ ID NO: 275432 - DNA, 33 bp, Homo sapien
tttccattgacagaaatttgtttttatctctcc

SEQ ID NO: 275433 - DNA, 33 bp, Homo sapien
tataaagttatggaaacatccaggtgtgatgta

SEQ ID NO: 275434 - DNA, 33 bp, Homo sapien
tataaagttatggaaatatccaggtgtgatgta

SEQ ID NO: 275435 - DNA, 33 bp, Homo sapien
actctccagaaattcacaaaatccactgtaatt

SEQ ID NO: 275436 - DNA, 33 bp, Homo sapien
actctccagaaattcataaaatccactgtaatt

SEQ ID NO: 275437 - DNA, 33 bp, Homo sapien
ctttcccatcaattcaaaagctgtctgtagtca

SEQ ID NO: 275438 - DNA, 33 bp, Homo sapien
ctttcccatcaattcagaagctgtctgtagtca

SEQ ID NO: 275439 - DNA, 33 bp, Homo sapien
atatacatagcaaaatcaagcaaataaaaatca

SEQ ID NO: 275440 - DNA, 33 bp, Homo sapien
atatacatagcaaaatgaagcaaataaaaatca

SEQ ID NO: 275441 - DNA, 33 bp, Homo sapien
gtatctaatgatggaaattatatgtctcagctt

SEQ ID NO: 275442 - DNA, 33 bp, Homo sapien
gtatctaatgatggaatttatatgtctcagctt

SEQ ID NO: 275443 - DNA, 33 bp, Homo sapien
gagctgttttctcactcaataaaactcttctcc

SEQ ID NO: 275444 - DNA, 33 bp, Homo sapien
gagctgttttctcacttaataaaactcttctcc

SEQ ID NO: 275445 - DNA, 33 bp, Homo sapien
acaagtatttgtatcactaaagtcaattctcat

SEQ ID NO: 275446 - DNA, 33 bp, Homo sapien
acaagtatttgtatcattaaagtcaattctcat

SEQ ID NO: 275447 - DNA, 33 bp, Homo sapien
gaataccatattgacaataattcttaattgaac

SEQ ID NO: 275448 - DNA, 33 bp, Homo sapien
gaataccatattgacagtaattcttaattgaac

SEQ ID NO: 275449 - DNA, 33 bp, Homo sapien
gatcactttaagatgaagacaaaatgctcttga

SEQ ID NO: 275450 - DNA, 33 bp, Homo sapien
gatcactttaagatgaggacaaaatgctcttga

SEQ ID NO: 275451 - DNA, 33 bp, Homo sapien
gtaaaaagaaaatcaaacataatatctcatgaa

SEQ ID NO: 275452 - DNA, 33 bp, Homo sapien
gtaaaaagaaaatcaagcataatatctcatgaa

SEQ ID NO: 275453 - DNA, 33 bp, Homo sapien
gctagtgcatatgaacaagaattacacacacac

SEQ ID NO: 275454 - DNA, 33 bp, Homo sapien
gctagtgcatatgaacgagaattacacacacac

SEQ ID NO: 275455 - DNA, 33 bp, Homo sapien
ccagactaccaaaggactccgtggcacaagaaa

SEQ ID NO: 275456 - DNA, 33 bp, Homo sapien
ccagactaccaaaggattccgtggcacaagaaa

SEQ ID NO: 275457 - DNA, 33 bp, Homo sapien
gggttgtaaacaagaacgtacaacaggaaggca

SEQ ID NO: 275458 - DNA, 33 bp, Homo sapien
gggttgtaaacaagaaggtacaacaggaaggca

SEQ ID NO: 275459 - DNA, 33 bp, Homo sapien
ctttcatcccattcacaaaggaagagcactcac

SEQ ID NO: 275460 - DNA, 33 bp, Homo sapien
ctttcatcccattcacgaaggaagagcactcac

SEQ ID NO: 275461 - DNA, 33 bp, Homo sapien
atcatgagaacagtacaggggaaagtgccccta

SEQ ID NO: 275462 - DNA, 33 bp, Homo sapien
atcatgagaacagtaccggggaaagtgccccta

SEQ ID NO: 275463 - DNA, 33 bp, Homo sapien
ggtggttactgtgaataaattctgcaggttctg

SEQ ID NO: 275464 - DNA, 33 bp, Homo sapien
ggtggttactgtgaatgaattctgcaggttctg

SEQ ID NO: 275465 - DNA, 33 bp, Homo sapien
attgtctaggctattaaaatcagaagcagaggc

SEQ ID NO: 275466 - DNA, 33 bp, Homo sapien
attgtctaggctattacaatcagaagcagaggc

SEQ ID NO: 275467 - DNA, 33 bp, Homo sapien
gcacccattggcttaacctgtgtgaagctctgg

SEQ ID NO: 275468 - DNA, 33 bp, Homo sapien
gcacccattggcttaatctgtgtgaagctctgg

SEQ ID NO: 275469 - DNA, 33 bp, Homo sapien
gtactgatcgagtaaaatgttgctaatctattg

SEQ ID NO: 275470 - DNA, 33 bp, Homo sapien
gtactgatcgagtaaagtgttgctaatctattg

SEQ ID NO: 275471 - DNA, 33 bp, Homo sapien
gtaaagtggttaagaacatagagacatacataa

SEQ ID NO: 275472 - DNA, 33 bp, Homo sapien
gtaaagtggttaagaatatagagacatacataa

SEQ ID NO: 275473 - DNA, 33 bp, Homo sapien
aacatattgtctgagacggagaataaaactata

SEQ ID NO: 275474 - DNA, 33 bp, Homo sapien
aacatattgtctgagagggagaataaaactata

SEQ ID NO: 275475 - DNA, 33 bp, Homo sapien
tggaatatggactcacagagtttttaacaacat

SEQ ID NO: 275476 - DNA, 33 bp, Homo sapien
tggaatatggactcacggagtttttaacaacat

SEQ ID NO: 275477 - DNA, 33 bp, Homo sapien
tattatggttatatacaatcaggcaatcattgc

SEQ ID NO: 275478 - DNA, 33 bp, Homo sapien
tattatggttatatacgatcaggcaatcattgc

SEQ ID NO: 275479 - DNA, 33 bp, Homo sapien
tcaaacagacaaaaaacggtttcatcaaattgt

SEQ ID NO: 275480 - DNA, 33 bp, Homo sapien
tcaaacagacaaaaaatggtttcatcaaattgt

SEQ ID NO: 275481 - DNA, 33 bp, Homo sapien
gagtcatttgcatacactgtaaggataataacc

SEQ ID NO: 275482 - DNA, 33 bp, Homo sapien
gagtcatttgcatacattgtaaggataataacc

SEQ ID NO: 275483 - DNA, 33 bp, Homo sapien
gaatgtgaaaaatttacagaacactgtctctca

SEQ ID NO: 275484 - DNA, 33 bp, Homo sapien
gaatgtgaaaaatttatagaacactgtctctca

SEQ ID NO: 275485 - DNA, 33 bp, Homo sapien
tgtttttcctaacagcccattttcactgcagaa

SEQ ID NO: 275486 - DNA, 33 bp, Homo sapien
tgtttttcctaacagcgcattttcactgcagaa

SEQ ID NO: 275487 - DNA, 33 bp, Homo sapien
aattaagccacagttcaagctctcagtttatgt

SEQ ID NO: 275488 - DNA, 33 bp, Homo sapien
aattaagccacagttcgagctctcagtttatgt

SEQ ID NO: 275489 - DNA, 33 bp, Homo sapien
cactccagccttctcaaagtaaaacgttgccat

SEQ ID NO: 275490 - DNA, 33 bp, Homo sapien
cactccagccttctcagagtaaaacgttgccat

SEQ ID NO: 275491 - DNA, 33 bp, Homo sapien
ggtgttcagcttctacacttcatctgtgtatcc

SEQ ID NO: 275492 - DNA, 33 bp, Homo sapien
ggtgttcagcttctactcttcatctgtgtatcc

SEQ ID NO: 275493 - DNA, 33 bp, Homo sapien
attagtcatgcagaaaggttatgaaaatacaca

SEQ ID NO: 275494 - DNA, 33 bp, Homo sapien
attagtcatgcagaaatgttatgaaaatacaca

SEQ ID NO: 275495 - DNA, 33 bp, Homo sapien
aggtcttttgaaccaacagttagccaaattgtg

SEQ ID NO: 275496 - DNA, 33 bp, Homo sapien
aggtcttttgaaccaatagttagccaaattgtg

SEQ ID NO: 275497 - DNA, 33 bp, Homo sapien
cccacgtcttccttggaaaattcttttgccacc

SEQ ID NO: 275498 - DNA, 33 bp, Homo sapien
cccacgtcttccttggtaaattcttttgccacc

SEQ ID NO: 275499 - DNA, 33 bp, Homo sapien
atctttggagatagtaaaagtttctgctaaggt

SEQ ID NO: 275500 - DNA, 33 bp, Homo sapien
atctttggagatagtagaagtttctgctaaggt

SEQ ID NO: 275501 - DNA, 33 bp, Homo sapien
aactgcctcaagtctgaaagttaattgaggggc

SEQ ID NO: 275502 - DNA, 33 bp, Homo sapien
aactgcctcaagtctggaagttaattgaggggc

SEQ ID NO: 275503 - DNA, 33 bp, Homo sapien
cagtttgctttgtaaaggactgaatagtctaaa

SEQ ID NO: 275504 - DNA, 33 bp, Homo sapien
cagtttgctttgtaaatgactgaatagtctaaa

SEQ ID NO: 275505 - DNA, 33 bp, Homo sapien
caggactgcaaggaaacgaagaagagaaaatag

SEQ ID NO: 275506 - DNA, 33 bp, Homo sapien
caggactgcaaggaaatgaagaagagaaaatag

SEQ ID NO: 275507 - DNA, 33 bp, Homo sapien
atctttcagcttgtcccaactattttctcttct

SEQ ID NO: 275508 - DNA, 33 bp, Homo sapien
atctttcagcttgtccgaactattttctcttct

SEQ ID NO: 275509 - DNA, 33 bp, Homo sapien
ttactactctttactacacaatgtcataacatt

SEQ ID NO: 275510 - DNA, 33 bp, Homo sapien
ttactactctttactatacaatgtcataacatt

SEQ ID NO: 275511 - DNA, 33 bp, Homo sapien
gcctaatttaaatcacaagaaatatgacctcag

SEQ ID NO: 275512 - DNA, 33 bp, Homo sapien
gcctaatttaaatcacgagaaatatgacctcag

SEQ ID NO: 275513 - DNA, 33 bp, Homo sapien
caccaagaacacattcccttctgctgtatctct

SEQ ID NO: 275514 - DNA, 33 bp, Homo sapien
caccaagaacacattctcttctgctgtatctct

SEQ ID NO: 275515 - DNA, 33 bp, Homo sapien
tcaaggttgtccaaaacagtacaaataaatgtg

SEQ ID NO: 275516 - DNA, 33 bp, Homo sapien
tcaaggttgtccaaaagagtacaaataaatgtg

SEQ ID NO: 275517 - DNA, 33 bp, Homo sapien
caaacataaggcccaacaaaaatcatcccaatt

SEQ ID NO: 275518 - DNA, 33 bp, Homo sapien
caaacataaggcccaagaaaaatcatcccaatt

SEQ ID NO: 275519 - DNA, 33 bp, Homo sapien
tgcaagataaatagaccgtactaaggtatcttc

SEQ ID NO: 275520 - DNA, 33 bp, Homo sapien
tgcaagataaatagactgtactaaggtatcttc

SEQ ID NO: 275521 - DNA, 33 bp, Homo sapien
ctgtaaacaaataggagtattcatgcttacata

SEQ ID NO: 275522 - DNA, 33 bp, Homo sapien
ctgtaaacaaataggattattcatgcttacata

SEQ ID NO: 275523 - DNA, 33 bp, Homo sapien
aatctccaatgacttcacttcaactagaatgct

SEQ ID NO: 275524 - DNA, 33 bp, Homo sapien
aatctccaatgacttcgcttcaactagaatgct

SEQ ID NO: 275525 - DNA, 33 bp, Homo sapien
gaccatttgagttcaggagtttcatactagcct

SEQ ID NO: 275526 - DNA, 33 bp, Homo sapien
gaccatttgagttcagtagtttcatactagcct

SEQ ID NO: 275527 - DNA, 33 bp, Homo sapien
gaactcatgtgaaggaacaaaatacaactgaag

SEQ ID NO: 275528 - DNA, 33 bp, Homo sapien
gaactcatgtgaaggagcaaaatacaactgaag

SEQ ID NO: 275529 - DNA, 33 bp, Homo sapien
gacacagacctcaatgaaatgcctgaatactca

SEQ ID NO: 275530 - DNA, 33 bp, Homo sapien
gacacagacctcaatgtaatgcctgaatactca

SEQ ID NO: 275531 - DNA, 33 bp, Homo sapien
gtggtggatagcgaccaaaagctcagctcaagc

SEQ ID NO: 275532 - DNA, 33 bp, Homo sapien
gtggtggatagcgaccgaaagctcagctcaagc

SEQ ID NO: 275533 - DNA, 33 bp, Homo sapien
cataataaaatgtcacaaactgagcagtttaaa

SEQ ID NO: 275534 - DNA, 33 bp, Homo sapien
cataataaaatgtcacgaactgagcagtttaaa

SEQ ID NO: 275535 - DNA, 33 bp, Homo sapien
cactcctgcggtccaacaaacaggagcatggca

SEQ ID NO: 275536 - DNA, 33 bp, Homo sapien
cactcctgcggtccaataaacaggagcatggca

SEQ ID NO: 275537 - DNA, 33 bp, Homo sapien
ttattaaccttgacaaaaacaatttcagataaa

SEQ ID NO: 275538 - DNA, 33 bp, Homo sapien
ttattaaccttgacaagaacaatttcagataaa

SEQ ID NO: 275539 - DNA, 33 bp, Homo sapien
gaattaacgcaactaaaatgataaagtcctgac

SEQ ID NO: 275540 - DNA, 33 bp, Homo sapien
gaattaacgcaactaagatgataaagtcctgac

SEQ ID NO: 275541 - DNA, 33 bp, Homo sapien
tacaatgggtaaatgacagtattttcaataaat

SEQ ID NO: 275542 - DNA, 33 bp, Homo sapien
tacaatgggtaaatgagagtattttcaataaat

SEQ ID NO: 275543 - DNA, 33 bp, Homo sapien
tgaattttgtatatgacatgacatgaggtctaa

SEQ ID NO: 275544 - DNA, 33 bp, Homo sapien
tgaattttgtatatgatatgacatgaggtctaa

SEQ ID NO: 275545 - DNA, 33 bp, Homo sapien
tacaaaaagtacagaagagttacaagtgatagg

SEQ ID NO: 275546 - DNA, 33 bp, Homo sapien
tacaaaaagtacagaatagttacaagtgatagg

SEQ ID NO: 275547 - DNA, 33 bp, Homo sapien
gttcctgcacggctaagtggctgggttcgtctt

SEQ ID NO: 275548 - DNA, 33 bp, Homo sapien
gttcctgcacggctaattggctgggttcgtctt

SEQ ID NO: 275549 - DNA, 33 bp, Homo sapien
gaatcatgaataattaacatgtcagttttaaat

SEQ ID NO: 275550 - DNA, 33 bp, Homo sapien
gaatcatgaataattaccatgtcagttttaaat

SEQ ID NO: 275551 - DNA, 33 bp, Homo sapien
caacaacattgaaacaagctagatccatggcac

SEQ ID NO: 275552 - DNA, 33 bp, Homo sapien
caacaacattgaaacaggctagatccatggcac

SEQ ID NO: 275553 - DNA, 33 bp, Homo sapien
aaaattggcatatttgcagttcatattgtatgc

SEQ ID NO: 275554 - DNA, 33 bp, Homo sapien
aaaattggcatatttgtagttcatattgtatgc

SEQ ID NO: 275555 - DNA, 33 bp, Homo sapien
aacactcttcaccaaacgaataggaagcaaaaa

SEQ ID NO: 275556 - DNA, 33 bp, Homo sapien
aacactcttcaccaaatgaataggaagcaaaaa

SEQ ID NO: 275557 - DNA, 33 bp, Homo sapien
tttgatttttgagcataaataaaacagctctct

SEQ ID NO: 275558 - DNA, 33 bp, Homo sapien
tttgatttttgagcatgaataaaacagctctct

SEQ ID NO: 275559 - DNA, 33 bp, Homo sapien
gtacaaaaagacaacaaacagtcaaaactgtgc

SEQ ID NO: 275560 - DNA, 33 bp, Homo sapien
gtacaaaaagacaacagacagtcaaaactgtgc

SEQ ID NO: 275561 - DNA, 33 bp, Homo sapien
aggtccccagtcaagaacaagatcttcagacct

SEQ ID NO: 275562 - DNA, 33 bp, Homo sapien
aggtccccagtcaagaccaagatcttcagacct

SEQ ID NO: 275563 - DNA, 33 bp, Homo sapien
tataaaggatctctcaaaaggctatcagtggac

SEQ ID NO: 275564 - DNA, 33 bp, Homo sapien
tataaaggatctctcagaaggctatcagtggac

SEQ ID NO: 275565 - DNA, 33 bp, Homo sapien
cctttctactgcaggaacactgtataacttctg

SEQ ID NO: 275566 - DNA, 33 bp, Homo sapien
cctttctactgcaggagcactgtataacttctg

SEQ ID NO: 275567 - DNA, 33 bp, Homo sapien
ctcctgacacattctcaattaaaatatgaagca

SEQ ID NO: 275568 - DNA, 33 bp, Homo sapien
ctcctgacacattctctattaaaatatgaagca

SEQ ID NO: 275569 - DNA, 33 bp, Homo sapien
tcaatgaaagtttgtcacaaatgattccctgtt

SEQ ID NO: 275570 - DNA, 33 bp, Homo sapien
tcaatgaaagtttgtctcaaatgattccctgtt

SEQ ID NO: 275571 - DNA, 33 bp, Homo sapien
ttatttagggtaaatacggtcaagcaatgagga

SEQ ID NO: 275572 - DNA, 33 bp, Homo sapien
ttatttagggtaaatatggtcaagcaatgagga

SEQ ID NO: 275573 - DNA, 33 bp, Homo sapien
taccctccaaaactccagctttcatttgtcaac

SEQ ID NO: 275574 - DNA, 33 bp, Homo sapien
taccctccaaaactccggctttcatttgtcaac

SEQ ID NO: 275575 - DNA, 33 bp, Homo sapien
gatgtgccactgctacagagaaattccatctag

SEQ ID NO: 275576 - DNA, 33 bp, Homo sapien
gatgtgccactgctacggagaaattccatctag

SEQ ID NO: 275577 - DNA, 33 bp, Homo sapien
actctgctaagaaatacggtgtttgcttactag

SEQ ID NO: 275578 - DNA, 33 bp, Homo sapien
actctgctaagaaatatggtgtttgcttactag

SEQ ID NO: 275579 - DNA, 33 bp, Homo sapien
tgcaatattagctacacgagtttaggagtcatg

SEQ ID NO: 275580 - DNA, 33 bp, Homo sapien
tgcaatattagctacatgagtttaggagtcatg

SEQ ID NO: 275581 - DNA, 33 bp, Homo sapien
tttttaaatttccagaacctagcatagaaacag

SEQ ID NO: 275582 - DNA, 33 bp, Homo sapien
tttttaaatttccagagcctagcatagaaacag

SEQ ID NO: 275583 - DNA, 33 bp, Homo sapien
agaataattttctcacaaagtgataggtaagca

SEQ ID NO: 275584 - DNA, 33 bp, Homo sapien
agaataattttctcaccaagtgataggtaagca

SEQ ID NO: 275585 - DNA, 33 bp, Homo sapien
actgtcttcaatgaaacgataactgcagtggag

SEQ ID NO: 275586 - DNA, 33 bp, Homo sapien
actgtcttcaatgaaatgataactgcagtggag

SEQ ID NO: 275587 - DNA, 33 bp, Homo sapien
tagctctactgaggaaagaaactgcagaattta

SEQ ID NO: 275588 - DNA, 33 bp, Homo sapien
tagctctactgaggaaggaaactgcagaattta

SEQ ID NO: 275589 - DNA, 33 bp, Homo sapien
ctgaacaggagcatatcaattaatttgttttcc

SEQ ID NO: 275590 - DNA, 33 bp, Homo sapien
ctgaacaggagcatatgaattaatttgttttcc

SEQ ID NO: 275591 - DNA, 33 bp, Homo sapien
atcaaattgatcaagacgccataggatcaattg

SEQ ID NO: 275592 - DNA, 33 bp, Homo sapien
atcaaattgatcaagaggccataggatcaattg

SEQ ID NO: 275593 - DNA, 33 bp, Homo sapien
atgtccagagaatagcaaggaagagaattgtag

SEQ ID NO: 275594 - DNA, 33 bp, Homo sapien
atgtccagagaatagcgaggaagagaattgtag

SEQ ID NO: 275595 - DNA, 33 bp, Homo sapien
atttatgcattgtaaaataatcaccacgttcaa

SEQ ID NO: 275596 - DNA, 33 bp, Homo sapien
atttatgcattgtaaagtaatcaccacgttcaa

SEQ ID NO: 275597 - DNA, 33 bp, Homo sapien
gtgatatcaaaattgaagtttgcttatttgaaa

SEQ ID NO: 275598 - DNA, 33 bp, Homo sapien
gtgatatcaaaattgaggtttgcttatttgaaa

SEQ ID NO: 275599 - DNA, 33 bp, Homo sapien
agaattgagaaacaataagaagattctgtgaca

SEQ ID NO: 275600 - DNA, 33 bp, Homo sapien
agaattgagaaacaatgagaagattctgtgaca

SEQ ID NO: 275601 - DNA, 33 bp, Homo sapien
gaacttaaaatgacttcaaatagttgttaggct

SEQ ID NO: 275602 - DNA, 33 bp, Homo sapien
gaacttaaaatgacttgaaatagttgttaggct

SEQ ID NO: 275603 - DNA, 33 bp, Homo sapien
tcattcatttaagcaacctatcatcgaataaat

SEQ ID NO: 275604 - DNA, 33 bp, Homo sapien
tcattcatttaagcaatctatcatcgaataaat

SEQ ID NO: 275605 - DNA, 33 bp, Homo sapien
gtctacttctctaagaaattttgcaaacatcat

SEQ ID NO: 275606 - DNA, 33 bp, Homo sapien
gtctacttctctaagatattttgcaaacatcat

SEQ ID NO: 275607 - DNA, 33 bp, Homo sapien
gaccaagtcacttttcaataaagcccacttatc

SEQ ID NO: 275608 - DNA, 33 bp, Homo sapien
gaccaagtcacttttcgataaagcccacttatc

SEQ ID NO: 275609 - DNA, 33 bp, Homo sapien
aggtatttttaaattaagaatctgtcttagctg

SEQ ID NO: 275610 - DNA, 33 bp, Homo sapien
aggtatttttaaattaggaatctgtcttagctg

SEQ ID NO: 275611 - DNA, 33 bp, Homo sapien
ccttccagatgctaccaattttactccccaggt

SEQ ID NO: 275612 - DNA, 33 bp, Homo sapien
ccttccagatgctaccgattttactccccaggt

SEQ ID NO: 275613 - DNA, 33 bp, Homo sapien
ctgaaaagttttgatagataaggcttggtcaca

SEQ ID NO: 275614 - DNA, 33 bp, Homo sapien
ctgaaaagttttgatatataaggcttggtcaca

SEQ ID NO: 275615 - DNA, 33 bp, Homo sapien
cctgatactgctgtaccgagtaccttgcctata

SEQ ID NO: 275616 - DNA, 33 bp, Homo sapien
cctgatactgctgtactgagtaccttgcctata

SEQ ID NO: 275617 - DNA, 33 bp, Homo sapien
tcatttaatgacttgcaaggtactctcattgtg

SEQ ID NO: 275618 - DNA, 33 bp, Homo sapien
tcatttaatgacttgcgaggtactctcattgtg

SEQ ID NO: 275619 - DNA, 33 bp, Homo sapien
aggatttcaagatctcaaaacacatattttcaa

SEQ ID NO: 275620 - DNA, 33 bp, Homo sapien
aggatttcaagatctcgaaacacatattttcaa

SEQ ID NO: 275621 - DNA, 33 bp, Homo sapien
ctaaaaaaagtacaaactctggcagggttctat

SEQ ID NO: 275622 - DNA, 33 bp, Homo sapien
ctaaaaaaagtacaaattctggcagggttctat

SEQ ID NO: 275623 - DNA, 33 bp, Homo sapien
ttctgcttaggcccaaacttcagtgatcctttg

SEQ ID NO: 275624 - DNA, 33 bp, Homo sapien
ttctgcttaggcccaagcttcagtgatcctttg

SEQ ID NO: 275625 - DNA, 33 bp, Homo sapien
aaatatcgcaggcatgaaaaaagtacatttcac

SEQ ID NO: 275626 - DNA, 33 bp, Homo sapien
aaatatcgcaggcatgcaaaaagtacatttcac

SEQ ID NO: 275627 - DNA, 33 bp, Homo sapien
tttgaacataatatcacaaaggattaagttgga

SEQ ID NO: 275628 - DNA, 33 bp, Homo sapien
tttgaacataatatcataaaggattaagttgga

SEQ ID NO: 275629 - DNA, 33 bp, Homo sapien
cacaacttcataggacaacacattacttacatg

SEQ ID NO: 275630 - DNA, 33 bp, Homo sapien
cacaacttcataggacgacacattacttacatg

SEQ ID NO: 275631 - DNA, 33 bp, Homo sapien
tgttctttcactcacccgcaatgattctaccag

SEQ ID NO: 275632 - DNA, 33 bp, Homo sapien
tgttctttcactcacctgcaatgattctaccag

SEQ ID NO: 275633 - DNA, 33 bp, Homo sapien
tggaatttcaacccataaatttaactcaattat

SEQ ID NO: 275634 - DNA, 33 bp, Homo sapien
tggaatttcaacccatgaatttaactcaattat

SEQ ID NO: 275635 - DNA, 33 bp, Homo sapien
aatgctgctttatttaagaacctctgctacaaa

SEQ ID NO: 275636 - DNA, 33 bp, Homo sapien
aatgctgctttatttacgaacctctgctacaaa

SEQ ID NO: 275637 - DNA, 33 bp, Homo sapien
actgctagatcagaaaatgaatatgcctttctc

SEQ ID NO: 275638 - DNA, 33 bp, Homo sapien
actgctagatcagaaagtgaatatgcctttctc

SEQ ID NO: 275639 - DNA, 33 bp, Homo sapien
tgttggtagcataatcaatgtttccaattgtac

SEQ ID NO: 275640 - DNA, 33 bp, Homo sapien
tgttggtagcataatcgatgtttccaattgtac

SEQ ID NO: 275641 - DNA, 33 bp, Homo sapien
tatcaaaaattagtagccatgtcataaaatcag

SEQ ID NO: 275642 - DNA, 33 bp, Homo sapien
tatcaaaaattagtagtcatgtcataaaatcag

SEQ ID NO: 275643 - DNA, 33 bp, Homo sapien
ttcattctactgaaaccggacttttttttctgg

SEQ ID NO: 275644 - DNA, 33 bp, Homo sapien
ttcattctactgaaactggacttttttttctgg

SEQ ID NO: 275645 - DNA, 33 bp, Homo sapien
ttgcatctatcaaaacacaatgaagcataacct

SEQ ID NO: 275646 - DNA, 33 bp, Homo sapien
ttgcatctatcaaaacgcaatgaagcataacct

SEQ ID NO: 275647 - DNA, 33 bp, Homo sapien
ttgctatataggtgaactgtatgtcacaagggt

SEQ ID NO: 275648 - DNA, 33 bp, Homo sapien
ttgctatataggtgaattgtatgtcacaagggt

SEQ ID NO: 275649 - DNA, 33 bp, Homo sapien
tattttctaaggtgtacgatgaggttaccaaaa

SEQ ID NO: 275650 - DNA, 33 bp, Homo sapien
tattttctaaggtgtatgatgaggttaccaaaa

SEQ ID NO: 275651 - DNA, 33 bp, Homo sapien
agcacacatttttaccaataggaatctaatact

SEQ ID NO: 275652 - DNA, 33 bp, Homo sapien
agcacacatttttaccgataggaatctaatact

SEQ ID NO: 275653 - DNA, 33 bp, Homo sapien
aaataaatagatcccaagtcactgagatattag

SEQ ID NO: 275654 - DNA, 33 bp, Homo sapien
aaataaatagatcccaggtcactgagatattag

SEQ ID NO: 275655 - DNA, 33 bp, Homo sapien
taataagtttatgcaaacaaaaagattttctgc

SEQ ID NO: 275656 - DNA, 33 bp, Homo sapien
taataagtttatgcaatcaaaaagattttctgc

SEQ ID NO: 275657 - DNA, 33 bp, Homo sapien
gcttgctaattcttcccattatgattaatgcag

SEQ ID NO: 275658 - DNA, 33 bp, Homo sapien
gcttgctaattcttcctattatgattaatgcag

SEQ ID NO: 275659 - DNA, 33 bp, Homo sapien
cagaatgcactaaaaaattacaacctaccatct

SEQ ID NO: 275660 - DNA, 33 bp, Homo sapien
cagaatgcactaaaaagttacaacctaccatct

SEQ ID NO: 275661 - DNA, 33 bp, Homo sapien
aaatggtactgacacactggttatctatttaaa

SEQ ID NO: 275662 - DNA, 33 bp, Homo sapien
aaatggtactgacacattggttatctatttaaa

SEQ ID NO: 275663 - DNA, 33 bp, Homo sapien
ggctttgctaccataaatccaataactccagcc

SEQ ID NO: 275664 - DNA, 33 bp, Homo sapien
ggctttgctaccataactccaataactccagcc

SEQ ID NO: 275665 - DNA, 33 bp, Homo sapien
ctgtcatattaatgtggcaaggttttatacaaa

SEQ ID NO: 275666 - DNA, 33 bp, Homo sapien
ctgtcatattaatgtgtcaaggttttatacaaa

SEQ ID NO: 275667 - DNA, 33 bp, Homo sapien
acatgagggtcttcataagtgacggagaagaca

SEQ ID NO: 275668 - DNA, 33 bp, Homo sapien
acatgagggtcttcatgagtgacggagaagaca

SEQ ID NO: 275669 - DNA, 33 bp, Homo sapien
ttcttccaatttttgaaaactgccattccattc

SEQ ID NO: 275670 - DNA, 33 bp, Homo sapien
ttcttccaatttttgataactgccattccattc

SEQ ID NO: 275671 - DNA, 33 bp, Homo sapien
taggttttctggcaagcataactgctacttctg

SEQ ID NO: 275672 - DNA, 33 bp, Homo sapien
taggttttctggcaagtataactgctacttctg

SEQ ID NO: 275673 - DNA, 33 bp, Homo sapien
tttccctgtggccagaagcaaaaaaagattaaa

SEQ ID NO: 275674 - DNA, 33 bp, Homo sapien
tttccctgtggccagaggcaaaaaaagattaaa

SEQ ID NO: 275675 - DNA, 33 bp, Homo sapien
gatatgcaatgaaccaaaaaaaagagaggcaga

SEQ ID NO: 275676 - DNA, 33 bp, Homo sapien
gatatgcaatgaaccagaaaaaagagaggcaga

SEQ ID NO: 275677 - DNA, 33 bp, Homo sapien
cacatatatatacacaaacacgaagggaaaaca

SEQ ID NO: 275678 - DNA, 33 bp, Homo sapien
cacatatatatacacacacacgaagggaaaaca

SEQ ID NO: 275679 - DNA, 33 bp, Homo sapien
ttgctgcccttggatagcaatctgcttctttgt

SEQ ID NO: 275680 - DNA, 33 bp, Homo sapien
ttgctgcccttggatatcaatctgcttctttgt

SEQ ID NO: 275681 - DNA, 33 bp, Homo sapien
atttgcttaaatctggaaaaatatttcatgcac

SEQ ID NO: 275682 - DNA, 33 bp, Homo sapien
atttgcttaaatctgggaaaatatttcatgcac

SEQ ID NO: 275683 - DNA, 33 bp, Homo sapien
ccttgagcccagataccgtagcaaatgctatac

SEQ ID NO: 275684 - DNA, 33 bp, Homo sapien
ccttgagcccagatactgtagcaaatgctatac

SEQ ID NO: 275685 - DNA, 33 bp, Homo sapien
atcatctaagcctttagcacgttgtaatccttt

SEQ ID NO: 275686 - DNA, 33 bp, Homo sapien
atcatctaagcctttatcacgttgtaatccttt

SEQ ID NO: 275687 - DNA, 33 bp, Homo sapien
tttatgatacccaaaacaattacaatcataaca

SEQ ID NO: 275688 - DNA, 33 bp, Homo sapien
tttatgatacccaaaagaattacaatcataaca

SEQ ID NO: 275689 - DNA, 33 bp, Homo sapien
ctatactggttgcaaagaaatattatactgacc

SEQ ID NO: 275690 - DNA, 33 bp, Homo sapien
ctatactggttgcaaataaatattatactgacc

SEQ ID NO: 275691 - DNA, 33 bp, Homo sapien
ataaagtggcacagcaataaattcaggtaaaga

SEQ ID NO: 275692 - DNA, 33 bp, Homo sapien
ataaagtggcacagcattaaattcaggtaaaga

SEQ ID NO: 275693 - DNA, 33 bp, Homo sapien
atatctcttaccatgcagattagaacttttcct

SEQ ID NO: 275694 - DNA, 33 bp, Homo sapien
atatctcttaccatgcggattagaacttttcct

SEQ ID NO: 275695 - DNA, 33 bp, Homo sapien
aactgtgcgctaaaaacggtcagtgttgttgta

SEQ ID NO: 275696 - DNA, 33 bp, Homo sapien
aactgtgcgctaaaaatggtcagtgttgttgta

SEQ ID NO: 275697 - DNA, 33 bp, Homo sapien
tgtggccacagtatataacaagtgcttagttaa

SEQ ID NO: 275698 - DNA, 33 bp, Homo sapien
tgtggccacagtatatgacaagtgcttagttaa

SEQ ID NO: 275699 - DNA, 33 bp, Homo sapien
gcagatcaaaaatacaatacgataggatgtaaa

SEQ ID NO: 275700 - DNA, 33 bp, Homo sapien
gcagatcaaaaatacagtacgataggatgtaaa

SEQ ID NO: 275701 - DNA, 33 bp, Homo sapien
caaggtggcaagatatcagtctttttgttaatt

SEQ ID NO: 275702 - DNA, 33 bp, Homo sapien
caaggtggcaagatattagtctttttgttaatt

SEQ ID NO: 275703 - DNA, 33 bp, Homo sapien
atagcacttttactcacggcagatgaagatacc

SEQ ID NO: 275704 - DNA, 33 bp, Homo sapien
atagcacttttactcatggcagatgaagatacc

SEQ ID NO: 275705 - DNA, 33 bp, Homo sapien
acttcagcaaaattccccaaatgttaacacttt

SEQ ID NO: 275706 - DNA, 33 bp, Homo sapien
acttcagcaaaattcctcaaatgttaacacttt

SEQ ID NO: 275707 - DNA, 33 bp, Homo sapien
ggagatgcaacatagagagaagtaattttctgc

SEQ ID NO: 275708 - DNA, 33 bp, Homo sapien
ggagatgcaacatagatagaagtaattttctgc

SEQ ID NO: 275709 - DNA, 33 bp, Homo sapien
catagcaactgtacagaacatattaaagaggaa

SEQ ID NO: 275710 - DNA, 33 bp, Homo sapien
catagcaactgtacaggacatattaaagaggaa

SEQ ID NO: 275711 - DNA, 33 bp, Homo sapien
tttttctaaaacacaaatctgactaagttatga

SEQ ID NO: 275712 - DNA, 33 bp, Homo sapien
tttttctaaaacacaagtctgactaagttatga

SEQ ID NO: 275713 - DNA, 33 bp, Homo sapien
taaatccaagtagtcaccagaatagccttgata

SEQ ID NO: 275714 - DNA, 33 bp, Homo sapien
taaatccaagtagtcatcagaatagccttgata

SEQ ID NO: 275715 - DNA, 33 bp, Homo sapien
ttattacggcccctgaaaatttactcacataat

SEQ ID NO: 275716 - DNA, 33 bp, Homo sapien
ttattacggcccctgagaatttactcacataat

SEQ ID NO: 275717 - DNA, 33 bp, Homo sapien
attttgttatattggacaatttgacatttacca

SEQ ID NO: 275718 - DNA, 33 bp, Homo sapien
attttgttatattggagaatttgacatttacca

SEQ ID NO: 275719 - DNA, 33 bp, Homo sapien
aaggaccaaaatcttcaaggttatctcctctac

SEQ ID NO: 275720 - DNA, 33 bp, Homo sapien
aaggaccaaaatcttcgaggttatctcctctac

SEQ ID NO: 275721 - DNA, 33 bp, Homo sapien
gtactttgccaagaagaataaagtgttttgctt

SEQ ID NO: 275722 - DNA, 33 bp, Homo sapien
gtactttgccaagaaggataaagtgttttgctt

SEQ ID NO: 275723 - DNA, 33 bp, Homo sapien
tgaaaagagaaatgacacattttatgcagtgta

SEQ ID NO: 275724 - DNA, 33 bp, Homo sapien
tgaaaagagaaatgacgcattttatgcagtgta

SEQ ID NO: 275725 - DNA, 33 bp, Homo sapien
tttcttcttggtcatacattcagtaacagttcc

SEQ ID NO: 275726 - DNA, 33 bp, Homo sapien
tttcttcttggtcatatattcagtaacagttcc

SEQ ID NO: 275727 - DNA, 33 bp, Homo sapien
acaaaagacaaagtaaaacattatccctgacct

SEQ ID NO: 275728 - DNA, 33 bp, Homo sapien
acaaaagacaaagtaagacattatccctgacct

SEQ ID NO: 275729 - DNA, 33 bp, Homo sapien
tacaaaaaattgggtgaaacatacagtgtgatg

SEQ ID NO: 275730 - DNA, 33 bp, Homo sapien
tacaaaaaattgggtggaacatacagtgtgatg

SEQ ID NO: 275731 - DNA, 33 bp, Homo sapien
tttttgataccttacagccatcttgtaattctg

SEQ ID NO: 275732 - DNA, 33 bp, Homo sapien
tttttgataccttacatccatcttgtaattctg

SEQ ID NO: 275733 - DNA, 33 bp, Homo sapien
ccattcttgaaaatcacacaataaggcagcatt

SEQ ID NO: 275734 - DNA, 33 bp, Homo sapien
ccattcttgaaaatcatacaataaggcagcatt

SEQ ID NO: 275735 - DNA, 33 bp, Homo sapien
ggaaattagggtgatgaaatgtgagtagaactc

SEQ ID NO: 275736 - DNA, 33 bp, Homo sapien
ggaaattagggtgatgcaatgtgagtagaactc

SEQ ID NO: 275737 - DNA, 33 bp, Homo sapien
tcttttcctggatggaagttgaatggttatatg

SEQ ID NO: 275738 - DNA, 33 bp, Homo sapien
tcttttcctggatggaggttgaatggttatatg

SEQ ID NO: 275739 - DNA, 33 bp, Homo sapien
tctgacattgccatacagacatacccaagactg

SEQ ID NO: 275740 - DNA, 33 bp, Homo sapien
tctgacattgccatacggacatacccaagactg

SEQ ID NO: 275741 - DNA, 33 bp, Homo sapien
ccagtacctaaaacaaccattggtcataagaat

SEQ ID NO: 275742 - DNA, 33 bp, Homo sapien
ccagtacctaaaacaatcattggtcataagaat

SEQ ID NO: 275743 - DNA, 33 bp, Homo sapien
tgttttaaagctctaaagcacagtaaaactggc

SEQ ID NO: 275744 - DNA, 33 bp, Homo sapien
tgttttaaagctctaaggcacagtaaaactggc

SEQ ID NO: 275745 - DNA, 33 bp, Homo sapien
gatccaaagttatttacctgcacatattccatt

SEQ ID NO: 275746 - DNA, 33 bp, Homo sapien
gatccaaagttatttatctgcacatattccatt

SEQ ID NO: 275747 - DNA, 33 bp, Homo sapien
attaaccctatgccaaacaattctagacaatac

SEQ ID NO: 275748 - DNA, 33 bp, Homo sapien
attaaccctatgccaagcaattctagacaatac

SEQ ID NO: 275749 - DNA, 33 bp, Homo sapien
ttttgcttaatacttcactcttgtgcaatttat

SEQ ID NO: 275750 - DNA, 33 bp, Homo sapien
ttttgcttaatacttccctcttgtgcaatttat

SEQ ID NO: 275751 - DNA, 33 bp, Homo sapien
acatgacaattaggacaaattcagattactaaa

SEQ ID NO: 275752 - DNA, 33 bp, Homo sapien
acatgacaattaggaccaattcagattactaaa

SEQ ID NO: 275753 - DNA, 33 bp, Homo sapien
acttagggtcccaaaacgctttagcctgcagca

SEQ ID NO: 275754 - DNA, 33 bp, Homo sapien
acttagggtcccaaaatgctttagcctgcagca

SEQ ID NO: 275755 - DNA, 33 bp, Homo sapien
tttctaattctacttacatggtgtatcacattt

SEQ ID NO: 275756 - DNA, 33 bp, Homo sapien
tttctaattctacttatatggtgtatcacattt

SEQ ID NO: 275757 - DNA, 33 bp, Homo sapien
atgagaacaagcactacggaaaacagtgtggag

SEQ ID NO: 275758 - DNA, 33 bp, Homo sapien
atgagaacaagcactatggaaaacagtgtggag

SEQ ID NO: 275759 - DNA, 33 bp, Homo sapien
tcttaattattgctgaatagtatccaatagctt

SEQ ID NO: 275760 - DNA, 33 bp, Homo sapien
tcttaattattgctgattagtatccaatagctt

SEQ ID NO: 275761 - DNA, 33 bp, Homo sapien
tcctgatagaaaagacagacagcttggacatca

SEQ ID NO: 275762 - DNA, 33 bp, Homo sapien
tcctgatagaaaagaccgacagcttggacatca

SEQ ID NO: 275763 - DNA, 33 bp, Homo sapien
aacttaatggaatgtacggagatttcccatata

SEQ ID NO: 275764 - DNA, 33 bp, Homo sapien
aacttaatggaatgtatggagatttcccatata

SEQ ID NO: 275765 - DNA, 33 bp, Homo sapien
taaataaataaaaatgcacaggaaatctaaata

SEQ ID NO: 275766 - DNA, 33 bp, Homo sapien
taaataaataaaaatggacaggaaatctaaata

SEQ ID NO: 275767 - DNA, 33 bp, Homo sapien
gatatttgtgcatttaaaatttagtcctttctt

SEQ ID NO: 275768 - DNA, 33 bp, Homo sapien
gatatttgtgcatttagaatttagtcctttctt

SEQ ID NO: 275769 - DNA, 33 bp, Homo sapien
agactgtttctccaaaataattcagtcagacaa

SEQ ID NO: 275770 - DNA, 33 bp, Homo sapien
agactgtttctccaaagtaattcagtcagacaa

SEQ ID NO: 275771 - DNA, 33 bp, Homo sapien
aatagccaacaccgcaaatatctcaattgtctc

SEQ ID NO: 275772 - DNA, 33 bp, Homo sapien
aatagccaacaccgcagatatctcaattgtctc

SEQ ID NO: 275773 - DNA, 33 bp, Homo sapien
agtatatcttcaaagaactgaaacaacagaagg

SEQ ID NO: 275774 - DNA, 33 bp, Homo sapien
agtatatcttcaaagagctgaaacaacagaagg

SEQ ID NO: 275775 - DNA, 33 bp, Homo sapien
gaataataactggaacgaattgaaacaaacaaa

SEQ ID NO: 275776 - DNA, 33 bp, Homo sapien
gaataataactggaactaattgaaacaaacaaa

SEQ ID NO: 275777 - DNA, 33 bp, Homo sapien
caaacttgaatctaatcaaacctaaatctgact

SEQ ID NO: 275778 - DNA, 33 bp, Homo sapien
caaacttgaatctaatgaaacctaaatctgact

SEQ ID NO: 275779 - DNA, 33 bp, Homo sapien
gagaaaaagtgtgcaaaagtagtaccagagcag

SEQ ID NO: 275780 - DNA, 33 bp, Homo sapien
gagaaaaagtgtgcaacagtagtaccagagcag

SEQ ID NO: 275781 - DNA, 33 bp, Homo sapien
tcaactgcaacaatatgaatacgctaatcaaaa

SEQ ID NO: 275782 - DNA, 33 bp, Homo sapien
tcaactgcaacaatattaatacgctaatcaaaa

SEQ ID NO: 275783 - DNA, 33 bp, Homo sapien
ctgcttacacaagacaatcaattggtaacacgg

SEQ ID NO: 275784 - DNA, 33 bp, Homo sapien
ctgcttacacaagacattcaattggtaacacgg

SEQ ID NO: 275785 - DNA, 33 bp, Homo sapien
taatctaacctaaacaactttcattgcaatttc

SEQ ID NO: 275786 - DNA, 33 bp, Homo sapien
taatctaacctaaacacctttcattgcaatttc

SEQ ID NO: 275787 - DNA, 33 bp, Homo sapien
ctgataagctatttcactaaagtctcatgatac

SEQ ID NO: 275788 - DNA, 33 bp, Homo sapien
ctgataagctatttcagtaaagtctcatgatac

SEQ ID NO: 275789 - DNA, 33 bp, Homo sapien
tttttctctttgatcacaggttagcattatagc

SEQ ID NO: 275790 - DNA, 33 bp, Homo sapien
tttttctctttgatcataggttagcattatagc

SEQ ID NO: 275791 - DNA, 33 bp, Homo sapien
tcacaaataatagcaacagctcacaactgagca

SEQ ID NO: 275792 - DNA, 33 bp, Homo sapien
tcacaaataatagcaagagctcacaactgagca

SEQ ID NO: 275793 - DNA, 33 bp, Homo sapien
ggcaaaaacaatcagcaataattataaaggtca

SEQ ID NO: 275794 - DNA, 33 bp, Homo sapien
ggcaaaaacaatcagcgataattataaaggtca

SEQ ID NO: 275795 - DNA, 33 bp, Homo sapien
tgagtttcagaagtaaaataagccacccattta

SEQ ID NO: 275796 - DNA, 33 bp, Homo sapien
tgagtttcagaagtaagataagccacccattta

SEQ ID NO: 275797 - DNA, 33 bp, Homo sapien
ttgaatggatttgaagaacattttgttaagcaa

SEQ ID NO: 275798 - DNA, 33 bp, Homo sapien
ttgaatggatttgaaggacattttgttaagcaa

SEQ ID NO: 275799 - DNA, 33 bp, Homo sapien
agaggatatcatgagaaaacttttgctgtccca

SEQ ID NO: 275800 - DNA, 33 bp, Homo sapien
agaggatatcatgagacaacttttgctgtccca

SEQ ID NO: 275801 - DNA, 33 bp, Homo sapien
atatcctctaccatcaactctatctgatcttgg

SEQ ID NO: 275802 - DNA, 33 bp, Homo sapien
atatcctctaccatcatctctatctgatcttgg

SEQ ID NO: 275803 - DNA, 33 bp, Homo sapien
cataaggcacgaaaaaatggttagggctgggtt

SEQ ID NO: 275804 - DNA, 33 bp, Homo sapien
cataaggcacgaaaaactggttagggctgggtt

SEQ ID NO: 275805 - DNA, 33 bp, Homo sapien
ttaataagtgaaagacaaaaggtctccacagtg

SEQ ID NO: 275806 - DNA, 33 bp, Homo sapien
ttaataagtgaaagacgaaaggtctccacagtg

SEQ ID NO: 275807 - DNA, 33 bp, Homo sapien
ccctagactgcttccaagtaaacatactatttt

SEQ ID NO: 275808 - DNA, 33 bp, Homo sapien
ccctagactgcttccaggtaaacatactatttt

SEQ ID NO: 275809 - DNA, 33 bp, Homo sapien
tcaactttgtcaaagaagattagatggttgtag

SEQ ID NO: 275810 - DNA, 33 bp, Homo sapien
tcaactttgtcaaagaggattagatggttgtag

SEQ ID NO: 275811 - DNA, 33 bp, Homo sapien
cattgtggacacaggcactggcaaatatttcat

SEQ ID NO: 275812 - DNA, 33 bp, Homo sapien
cattgtggacacaggcgctggcaaatatttcat

SEQ ID NO: 275813 - DNA, 33 bp, Homo sapien
accccttactcctactaaactggcacatatact

SEQ ID NO: 275814 - DNA, 33 bp, Homo sapien
accccttactcctactgaactggcacatatact

SEQ ID NO: 275815 - DNA, 33 bp, Homo sapien
ccaagtaatttttaccacataccattgcaaaga

SEQ ID NO: 275816 - DNA, 33 bp, Homo sapien
ccaagtaatttttaccgcataccattgcaaaga

SEQ ID NO: 275817 - DNA, 33 bp, Homo sapien
tgcaatacaaactaacactcacagagactaaaa

SEQ ID NO: 275818 - DNA, 33 bp, Homo sapien
tgcaatacaaactaactctcacagagactaaaa

SEQ ID NO: 275819 - DNA, 33 bp, Homo sapien
atacaagggtacaacaatagagcaacttgacca

SEQ ID NO: 275820 - DNA, 33 bp, Homo sapien
atacaagggtacaacagtagagcaacttgacca

SEQ ID NO: 275821 - DNA, 33 bp, Homo sapien
gtatcccagtatctaacgttatcaagcctatga

SEQ ID NO: 275822 - DNA, 33 bp, Homo sapien
gtatcccagtatctaaggttatcaagcctatga

SEQ ID NO: 275823 - DNA, 33 bp, Homo sapien
gtgtcttagagtcaaactgtgtctatgaggtca

SEQ ID NO: 275824 - DNA, 33 bp, Homo sapien
gtgtcttagagtcaaattgtgtctatgaggtca

SEQ ID NO: 275825 - DNA, 33 bp, Homo sapien
agctctattttcactgacaacagaacattgtaa

SEQ ID NO: 275826 - DNA, 33 bp, Homo sapien
agctctattttcactgtcaacagaacattgtaa

SEQ ID NO: 275827 - DNA, 33 bp, Homo sapien
ttaattctccatgtaaccctgctagctaaattc

SEQ ID NO: 275828 - DNA, 33 bp, Homo sapien
ttaattctccatgtaagcctgctagctaaattc

SEQ ID NO: 275829 - DNA, 33 bp, Homo sapien
cacatggagattactacaattgaagatgagatt

SEQ ID NO: 275830 - DNA, 33 bp, Homo sapien
cacatggagattactataattgaagatgagatt

SEQ ID NO: 275831 - DNA, 33 bp, Homo sapien
cattgttcttaaaatgccattgattttagttac

SEQ ID NO: 275832 - DNA, 33 bp, Homo sapien
cattgttcttaaaatgtcattgattttagttac

SEQ ID NO: 275833 - DNA, 33 bp, Homo sapien
ggagctccacacagataatatgtcttgtttcac

SEQ ID NO: 275834 - DNA, 33 bp, Homo sapien
ggagctccacacagatgatatgtcttgtttcac

SEQ ID NO: 275835 - DNA, 33 bp, Homo sapien
aaatgactttggaaaaagcaagtatcctaacat

SEQ ID NO: 275836 - DNA, 33 bp, Homo sapien
aaatgactttggaaaaggcaagtatcctaacat

SEQ ID NO: 275837 - DNA, 33 bp, Homo sapien
gatggtcaaatacaaaattaggtcccagagtgc

SEQ ID NO: 275838 - DNA, 33 bp, Homo sapien
gatggtcaaatacaaacttaggtcccagagtgc

SEQ ID NO: 275839 - DNA, 33 bp, Homo sapien
tgaaggcttttaaataccaagctgagaactgca

SEQ ID NO: 275840 - DNA, 33 bp, Homo sapien
tgaaggcttttaaatatcaagctgagaactgca

SEQ ID NO: 275841 - DNA, 33 bp, Homo sapien
gcactcaatttgcttcgaatgtgttaattctgt

SEQ ID NO: 275842 - DNA, 33 bp, Homo sapien
gcactcaatttgcttctaatgtgttaattctgt

SEQ ID NO: 275843 - DNA, 33 bp, Homo sapien
agttccacacttcaaaagtttttcttctaaatg

SEQ ID NO: 275844 - DNA, 33 bp, Homo sapien
agttccacacttcaaaggtttttcttctaaatg

SEQ ID NO: 275845 - DNA, 33 bp, Homo sapien
ggcttcaaaagaacaaatctaagagttattgac

SEQ ID NO: 275846 - DNA, 33 bp, Homo sapien
ggcttcaaaagaacaagtctaagagttattgac

SEQ ID NO: 275847 - DNA, 33 bp, Homo sapien
ccaaaggaactaaataaggcaccagagaccaat

SEQ ID NO: 275848 - DNA, 33 bp, Homo sapien
ccaaaggaactaaatacggcaccagagaccaat

SEQ ID NO: 275849 - DNA, 33 bp, Homo sapien
aggaccactaaattcaacaaccatctacatgaa

SEQ ID NO: 275850 - DNA, 33 bp, Homo sapien
aggaccactaaattcagcaaccatctacatgaa

SEQ ID NO: 275851 - DNA, 33 bp, Homo sapien
agaagaaatttgaggaaaatatgggtgagttat

SEQ ID NO: 275852 - DNA, 33 bp, Homo sapien
agaagaaatttgaggagaatatgggtgagttat

SEQ ID NO: 275853 - DNA, 33 bp, Homo sapien
agaattcccagtctcaaatatgccgttatagta

SEQ ID NO: 275854 - DNA, 33 bp, Homo sapien
agaattcccagtctcagatatgccgttatagta

SEQ ID NO: 275855 - DNA, 33 bp, Homo sapien
gtagtgccccattcccagaaccaatttactgta

SEQ ID NO: 275856 - DNA, 33 bp, Homo sapien
gtagtgccccattcccggaaccaatttactgta

SEQ ID NO: 275857 - DNA, 33 bp, Homo sapien
ggagtccgacatgttacaagtagaaatttttta

SEQ ID NO: 275858 - DNA, 33 bp, Homo sapien
ggagtccgacatgttataagtagaaatttttta

SEQ ID NO: 275859 - DNA, 33 bp, Homo sapien
cagatggacttacccaatgaattattttattga

SEQ ID NO: 275860 - DNA, 33 bp, Homo sapien
cagatggacttacccagtgaattattttattga

SEQ ID NO: 275861 - DNA, 33 bp, Homo sapien
atcatcttgttttctcaagtagctaatcataac

SEQ ID NO: 275862 - DNA, 33 bp, Homo sapien
atcatcttgttttctctagtagctaatcataac

SEQ ID NO: 275863 - DNA, 33 bp, Homo sapien
aataaaagtgactagcacaaaatatctgagatt

SEQ ID NO: 275864 - DNA, 33 bp, Homo sapien
aataaaagtgactagcgcaaaatatctgagatt

SEQ ID NO: 275865 - DNA, 33 bp, Homo sapien
cagattttcctttccaacttctggtagaaattt

SEQ ID NO: 275866 - DNA, 33 bp, Homo sapien
cagattttcctttccatcttctggtagaaattt

SEQ ID NO: 275867 - DNA, 33 bp, Homo sapien
gatgggggcgggaagtgaactgttcaatgaata

SEQ ID NO: 275868 - DNA, 33 bp, Homo sapien
gatgggggcgggaagttaactgttcaatgaata

SEQ ID NO: 275869 - DNA, 33 bp, Homo sapien
aagaaagctaacctacagagaaagagacaaatt

SEQ ID NO: 275870 - DNA, 33 bp, Homo sapien
aagaaagctaacctacggagaaagagacaaatt

SEQ ID NO: 275871 - DNA, 33 bp, Homo sapien
gtaattctacacagtaacaggtaacatacatat

SEQ ID NO: 275872 - DNA, 33 bp, Homo sapien
gtaattctacacagtagcaggtaacatacatat

SEQ ID NO: 275873 - DNA, 33 bp, Homo sapien
aatgtgggcaaagtataaagaaatagcaaagat

SEQ ID NO: 275874 - DNA, 33 bp, Homo sapien
aatgtgggcaaagtatgaagaaatagcaaagat

SEQ ID NO: 275875 - DNA, 33 bp, Homo sapien
cattatattcaagctcacctgccattagccaaa

SEQ ID NO: 275876 - DNA, 33 bp, Homo sapien
cattatattcaagctcgcctgccattagccaaa

SEQ ID NO: 275877 - DNA, 33 bp, Homo sapien
aacatcaaaataacagcaaatattagggcaatt

SEQ ID NO: 275878 - DNA, 33 bp, Homo sapien
aacatcaaaataacaggaaatattagggcaatt

SEQ ID NO: 275879 - DNA, 33 bp, Homo sapien
agagggatttttatcacgtaggcaaagtgttaa

SEQ ID NO: 275880 - DNA, 33 bp, Homo sapien
agagggatttttatcatgtaggcaaagtgttaa

SEQ ID NO: 275881 - DNA, 33 bp, Homo sapien
catatagctacttcacaacataactagacagga

SEQ ID NO: 275882 - DNA, 33 bp, Homo sapien
catatagctacttcacgacataactagacagga

SEQ ID NO: 275883 - DNA, 33 bp, Homo sapien
tgtaaatgaagtagaaagtgactcaaaatttta

SEQ ID NO: 275884 - DNA, 33 bp, Homo sapien
tgtaaatgaagtagaaggtgactcaaaatttta

SEQ ID NO: 275885 - DNA, 33 bp, Homo sapien
aagcactcacaaaggaagtagttcaacacttaa

SEQ ID NO: 275886 - DNA, 33 bp, Homo sapien
aagcactcacaaaggaggtagttcaacacttaa

SEQ ID NO: 275887 - DNA, 33 bp, Homo sapien
gatggtgggtcaattacgtgagatgtttttgag

SEQ ID NO: 275888 - DNA, 33 bp, Homo sapien
gatggtgggtcaattatgtgagatgtttttgag

SEQ ID NO: 275889 - DNA, 33 bp, Homo sapien
tgcaatggagagattcacaacaatgggttatgc

SEQ ID NO: 275890 - DNA, 33 bp, Homo sapien
tgcaatggagagattcgcaacaatgggttatgc

SEQ ID NO: 275891 - DNA, 33 bp, Homo sapien
tttggcaatctttcaactcccttccttaaattc

SEQ ID NO: 275892 - DNA, 33 bp, Homo sapien
tttggcaatctttcaattcccttccttaaattc

SEQ ID NO: 275893 - DNA, 33 bp, Homo sapien
gtaatttggtgacttacaagatcagtttcagtt

SEQ ID NO: 275894 - DNA, 33 bp, Homo sapien
gtaatttggtgacttataagatcagtttcagtt

SEQ ID NO: 275895 - DNA, 33 bp, Homo sapien
ccttcatggttctgtaaagtgtttgcacaatct

SEQ ID NO: 275896 - DNA, 33 bp, Homo sapien
ccttcatggttctgtacagtgtttgcacaatct

SEQ ID NO: 275897 - DNA, 33 bp, Homo sapien
ttcaaacagacttggaatattggaagcaatgtc

SEQ ID NO: 275898 - DNA, 33 bp, Homo sapien
ttcaaacagacttggagtattggaagcaatgtc

SEQ ID NO: 275899 - DNA, 33 bp, Homo sapien
catgcaagtaggaaaaatatcactaaattattt

SEQ ID NO: 275900 - DNA, 33 bp, Homo sapien
catgcaagtaggaaaactatcactaaattattt

SEQ ID NO: 275901 - DNA, 33 bp, Homo sapien
acagccactctgggaaagcctgtcttgtgcagt

SEQ ID NO: 275902 - DNA, 33 bp, Homo sapien
acagccactctgggaatgcctgtcttgtgcagt

SEQ ID NO: 275903 - DNA, 33 bp, Homo sapien
gatattggatttccgaaacacataattctaatt

SEQ ID NO: 275904 - DNA, 33 bp, Homo sapien
gatattggatttccgagacacataattctaatt

SEQ ID NO: 275905 - DNA, 33 bp, Homo sapien
atcatacctatttcaaaactgtgtaaaacaagt

SEQ ID NO: 275906 - DNA, 33 bp, Homo sapien
atcatacctatttcaagactgtgtaaaacaagt

SEQ ID NO: 275907 - DNA, 33 bp, Homo sapien
acaacacgtggagagccactgagactactgaaa

SEQ ID NO: 275908 - DNA, 33 bp, Homo sapien
acaacacgtggagagctactgagactactgaaa

SEQ ID NO: 275909 - DNA, 33 bp, Homo sapien
gtaacacagaaaatacaccaataaccaataata

SEQ ID NO: 275910 - DNA, 33 bp, Homo sapien
gtaacacagaaaatacgccaataaccaataata

SEQ ID NO: 275911 - DNA, 33 bp, Homo sapien
acattaaagggaacataaggaacatttgtccag

SEQ ID NO: 275912 - DNA, 33 bp, Homo sapien
acattaaagggaacatgaggaacatttgtccag

SEQ ID NO: 275913 - DNA, 33 bp, Homo sapien
ccaggtgaatgtcaaaacacctacatgtagaac

SEQ ID NO: 275914 - DNA, 33 bp, Homo sapien
ccaggtgaatgtcaaaccacctacatgtagaac

SEQ ID NO: 275915 - DNA, 33 bp, Homo sapien
atgtttagttcatagccgacagaagcatcatta

SEQ ID NO: 275916 - DNA, 33 bp, Homo sapien
atgtttagttcatagctgacagaagcatcatta

SEQ ID NO: 275917 - DNA, 33 bp, Homo sapien
attattgaatgccatgaatatagtaataggagg

SEQ ID NO: 275918 - DNA, 33 bp, Homo sapien
attattgaatgccatgtatatagtaataggagg

SEQ ID NO: 275919 - DNA, 33 bp, Homo sapien
gtgaaccaaggtttaacacctctcataggatct

SEQ ID NO: 275920 - DNA, 33 bp, Homo sapien
gtgaaccaaggtttaatacctctcataggatct

SEQ ID NO: 275921 - DNA, 33 bp, Homo sapien
ttaagtatgtttgaccacacggttcttattaaa

SEQ ID NO: 275922 - DNA, 33 bp, Homo sapien
ttaagtatgtttgaccgcacggttcttattaaa

SEQ ID NO: 275923 - DNA, 33 bp, Homo sapien
acagcactcatttgaacaaattaaatcaaagtg

SEQ ID NO: 275924 - DNA, 33 bp, Homo sapien
acagcactcatttgaagaaattaaatcaaagtg

SEQ ID NO: 275925 - DNA, 33 bp, Homo sapien
ctaaaaacacaaccaacataatagtgaagaaca

SEQ ID NO: 275926 - DNA, 33 bp, Homo sapien
ctaaaaacacaaccaatataatagtgaagaaca

SEQ ID NO: 275927 - DNA, 33 bp, Homo sapien
ttctagttagagacaaagtttgttggggtgaag

SEQ ID NO: 275928 - DNA, 33 bp, Homo sapien
ttctagttagagacaacgtttgttggggtgaag

SEQ ID NO: 275929 - DNA, 33 bp, Homo sapien
ttaacataatcacaaacgtcttagaggctttgt

SEQ ID NO: 275930 - DNA, 33 bp, Homo sapien
ttaacataatcacaaatgtcttagaggctttgt

SEQ ID NO: 275931 - DNA, 33 bp, Homo sapien
ccttaaagagttagccacaaaacagagtagaat

SEQ ID NO: 275932 - DNA, 33 bp, Homo sapien
ccttaaagagttagccgcaaaacagagtagaat

SEQ ID NO: 275933 - DNA, 33 bp, Homo sapien
tttactaagtgctttcaaaaaatagaatcatag

SEQ ID NO: 275934 - DNA, 33 bp, Homo sapien
tttactaagtgctttcgaaaaatagaatcatag

SEQ ID NO: 275935 - DNA, 33 bp, Homo sapien
attcatatctccattaccatcatgtaataatag

SEQ ID NO: 275936 - DNA, 33 bp, Homo sapien
attcatatctccattatcatcatgtaataatag

SEQ ID NO: 275937 - DNA, 33 bp, Homo sapien
aagcaaattatgctagaaaatgtttaggagcta

SEQ ID NO: 275938 - DNA, 33 bp, Homo sapien
aagcaaattatgctaggaaatgtttaggagcta

SEQ ID NO: 275939 - DNA, 33 bp, Homo sapien
caagaccgcctctaaacgaaaagttgtgatttc

SEQ ID NO: 275940 - DNA, 33 bp, Homo sapien
caagaccgcctctaaaggaaaagttgtgatttc

SEQ ID NO: 275941 - DNA, 33 bp, Homo sapien
accatagaaacaaaacaattcctgatcttaagt

SEQ ID NO: 275942 - DNA, 33 bp, Homo sapien
accatagaaacaaaacgattcctgatcttaagt

SEQ ID NO: 275943 - DNA, 33 bp, Homo sapien
ggctcaaaatgtttgacggtcatgattcacgta

SEQ ID NO: 275944 - DNA, 33 bp, Homo sapien
ggctcaaaatgtttgatggtcatgattcacgta

SEQ ID NO: 275945 - DNA, 33 bp, Homo sapien
tccaacaacttttcatcagtgaaatacaagcag

SEQ ID NO: 275946 - DNA, 33 bp, Homo sapien
tccaacaacttttcattagtgaaatacaagcag

SEQ ID NO: 275947 - DNA, 33 bp, Homo sapien
cggtggttcacttagacgtaataatggctttaa

SEQ ID NO: 275948 - DNA, 33 bp, Homo sapien
cggtggttcacttagatgtaataatggctttaa

SEQ ID NO: 275949 - DNA, 33 bp, Homo sapien
aatatcagataaagaacgtggaataggaaataa

SEQ ID NO: 275950 - DNA, 33 bp, Homo sapien
aatatcagataaagaatgtggaataggaaataa

SEQ ID NO: 275951 - DNA, 33 bp, Homo sapien
tgtcataattgacccaacaactaggcaattagg

SEQ ID NO: 275952 - DNA, 33 bp, Homo sapien
tgtcataattgacccagcaactaggcaattagg

SEQ ID NO: 275953 - DNA, 33 bp, Homo sapien
ctctagtctataaacaataatgctgcttgactc

SEQ ID NO: 275954 - DNA, 33 bp, Homo sapien
ctctagtctataaacagtaatgctgcttgactc

SEQ ID NO: 275955 - DNA, 33 bp, Homo sapien
cctgggaaatctgcagacccgactccaacttga

SEQ ID NO: 275956 - DNA, 33 bp, Homo sapien
cctgggaaatctgcaggcccgactccaacttga

SEQ ID NO: 275957 - DNA, 33 bp, Homo sapien
gttatttgcctgatgacgatgattgtatcaggt

SEQ ID NO: 275958 - DNA, 33 bp, Homo sapien
gttatttgcctgatgatgatgattgtatcaggt

SEQ ID NO: 275959 - DNA, 33 bp, Homo sapien
tggtgtcagttaaatcaaaccaagaacaacaat

SEQ ID NO: 275960 - DNA, 33 bp, Homo sapien
tggtgtcagttaaatccaaccaagaacaacaat

SEQ ID NO: 275961 - DNA, 33 bp, Homo sapien
aaagctgccataactactactgactacagaact

SEQ ID NO: 275962 - DNA, 33 bp, Homo sapien
aaagctgccataactattactgactacagaact

SEQ ID NO: 275963 - DNA, 33 bp, Homo sapien
tgctgggatataaacaatgcaggaaaacagaca

SEQ ID NO: 275964 - DNA, 33 bp, Homo sapien
tgctgggatataaacattgcaggaaaacagaca

SEQ ID NO: 275965 - DNA, 33 bp, Homo sapien
ttgactcaatgaatagcatctggcatctttcta

SEQ ID NO: 275966 - DNA, 33 bp, Homo sapien
ttgactcaatgaatagtatctggcatctttcta

SEQ ID NO: 275967 - DNA, 33 bp, Homo sapien
attgttcgacacagtacacattgcagttctcac

SEQ ID NO: 275968 - DNA, 33 bp, Homo sapien
attgttcgacacagtagacattgcagttctcac

SEQ ID NO: 275969 - DNA, 33 bp, Homo sapien
agaggtaatttatcccaggaattagttaatact

SEQ ID NO: 275970 - DNA, 33 bp, Homo sapien
agaggtaatttatccctggaattagttaatact

SEQ ID NO: 275971 - DNA, 33 bp, Homo sapien
atcttcaggttattagacaaattcagttccata

SEQ ID NO: 275972 - DNA, 33 bp, Homo sapien
atcttcaggttattagccaaattcagttccata

SEQ ID NO: 275973 - DNA, 33 bp, Homo sapien
tagtagctaagaaaaacttccagtagataacca

SEQ ID NO: 275974 - DNA, 33 bp, Homo sapien
tagtagctaagaaaaatttccagtagataacca

SEQ ID NO: 275975 - DNA, 33 bp, Homo sapien
ccctaacaaactctcaactgactgcctccattt

SEQ ID NO: 275976 - DNA, 33 bp, Homo sapien
ccctaacaaactctcagctgactgcctccattt

SEQ ID NO: 275977 - DNA, 33 bp, Homo sapien
tccacagacattaaaaaggttatcttcaatctg

SEQ ID NO: 275978 - DNA, 33 bp, Homo sapien
tccacagacattaaaagggttatcttcaatctg

SEQ ID NO: 275979 - DNA, 33 bp, Homo sapien
acgaaagaggcagaaacggagttaacaaatgct

SEQ ID NO: 275980 - DNA, 33 bp, Homo sapien
acgaaagaggcagaaatggagttaacaaatgct

SEQ ID NO: 275981 - DNA, 33 bp, Homo sapien; identical to SEQ ID NO: 275979

SEQ ID NO: 275982 - DNA, 33 bp, Homo sapien; identical to SEQ ID NO: 275980

SEQ ID NO: 275983 - DNA, 33 bp, Homo sapien
aggtagcctttttcggcagttggagctgacggg

SEQ ID NO: 275984 - DNA, 33 bp, Homo sapien
aggtagcctttttcgggagttggagctgacggg

SEQ ID NO: 275985 - DNA, 33 bp, Homo sapien
attgtcttcccaattgaatgtatttttttttgc

SEQ ID NO: 275986 - DNA, 33 bp, Homo sapien
attgtcttcccaattggatgtatttttttttgc

SEQ ID NO: 275987 - DNA, 33 bp, Homo sapien
aatactaaatcagtaccaaattggttatgtcag

SEQ ID NO: 275988 - DNA, 33 bp, Homo sapien
aatactaaatcagtactaaattggttatgtcag

SEQ ID NO: 275989 - DNA, 33 bp, Homo sapien
agaagtatcatcacccaattcaaaagtaaaata

SEQ ID NO: 275990 - DNA, 33 bp, Homo sapien
agaagtatcatcacccgattcaaaagtaaaata

SEQ ID NO: 275991 - DNA, 33 bp, Homo sapien
taattaaaaaaatctgacacctatgactaatca

SEQ ID NO: 275992 - DNA, 33 bp, Homo sapien
taattaaaaaaatctggcacctatgactaatca

SEQ ID NO: 275993 - DNA, 33 bp, Homo sapien
cctacagaaagtgaccaacttgttcatagttat

SEQ ID NO: 275994 - DNA, 33 bp, Homo sapien
cctacagaaagtgaccgacttgttcatagttat

SEQ ID NO: 275995 - DNA, 33 bp, Homo sapien
agagtatttaaggtacagaggagaatgaagaaa

SEQ ID NO: 275996 - DNA, 33 bp, Homo sapien
agagtatttaaggtacggaggagaatgaagaaa

SEQ ID NO: 275997 - DNA, 33 bp, Homo sapien
ttgccacaagtcttccaaagtggctgtagcatt

SEQ ID NO: 275998 - DNA, 33 bp, Homo sapien
ttgccacaagtcttccgaagtggctgtagcatt

SEQ ID NO: 275999 - DNA, 33 bp, Homo sapien
attcatttaatcaacaccttttaccaaagtcta

SEQ ID NO: 276000 - DNA, 33 bp, Homo sapien
attcatttaatcaacatcttttaccaaagtcta

SEQ ID NO: 276001 - DNA, 33 bp, Homo sapien
attataaatatggggaaaagtggtatggctttt

SEQ ID NO: 276002 - DNA, 33 bp, Homo sapien
attataaatatggggagaagtggtatggctttt

SEQ ID NO: 276003 - DNA, 33 bp, Homo sapien
tcataatatcagggcaccacatggttattttgt

SEQ ID NO: 276004 - DNA, 33 bp, Homo sapien
tcataatatcagggcatcacatggttattttgt

SEQ ID NO: 276005 - DNA, 33 bp, Homo sapien
tgttccagacataacactgacccatctttgcca

SEQ ID NO: 276006 - DNA, 33 bp, Homo sapien
tgttccagacataacagtgacccatctttgcca

SEQ ID NO: 276007 - DNA, 33 bp, Homo sapien
gtctgccatatcaatacgctagattattttcca

SEQ ID NO: 276008 - DNA, 33 bp, Homo sapien
gtctgccatatcaatatgctagattattttcca

SEQ ID NO: 276009 - DNA, 33 bp, Homo sapien
agcaggaaggcaaagtaaaaaatgttcaccaat

SEQ ID NO: 276010 - DNA, 33 bp, Homo sapien
agcaggaaggcaaagttaaaaatgttcaccaat

SEQ ID NO: 276011 - DNA, 33 bp, Homo sapien
gggtctaacgtaatcaacttaccaacaagtgac

SEQ ID NO: 276012 - DNA, 33 bp, Homo sapien
gggtctaacgtaatcagcttaccaacaagtgac

SEQ ID NO: 276013 - DNA, 33 bp, Homo sapien
gaaatatgtgttcttccaagcttgatgttcctc

SEQ ID NO: 276014 - DNA, 33 bp, Homo sapien
gaaatatgtgttcttctaagcttgatgttcctc

SEQ ID NO: 276015 - DNA, 33 bp, Homo sapien
gcaagcaaaggtatgcaaactactcagtatcag

SEQ ID NO: 276016 - DNA, 33 bp, Homo sapien
gcaagcaaaggtatgcgaactactcagtatcag

SEQ ID NO: 276017 - DNA, 33 bp, Homo sapien
cgtaaatgaccagatcgcgggagaactcactat

SEQ ID NO: 276018 - DNA, 33 bp, Homo sapien
cgtaaatgaccagatctcgggagaactcactat

SEQ ID NO: 276019 - DNA, 33 bp, Homo sapien
tattgatgttagcctacgcaatttgacacttta

SEQ ID NO: 276020 - DNA, 33 bp, Homo sapien
tattgatgttagcctatgcaatttgacacttta

SEQ ID NO: 276021 - DNA, 33 bp, Homo sapien
aggacttgtaaatttgcaggttgtctagcattt

SEQ ID NO: 276022 - DNA, 33 bp, Homo sapien
aggacttgtaaatttgtaggttgtctagcattt

SEQ ID NO: 276023 - DNA, 33 bp, Homo sapien
atactcactgtaagacaacatttcctctgctct

SEQ ID NO: 276024 - DNA, 33 bp, Homo sapien
atactcactgtaagacgacatttcctctgctct

SEQ ID NO: 276025 - DNA, 33 bp, Homo sapien
gggacattcccttttacaagaccatcagatctc

SEQ ID NO: 276026 - DNA, 33 bp, Homo sapien
gggacattcccttttataagaccatcagatctc

SEQ ID NO: 276027 - DNA, 33 bp, Homo sapien
atattataaccattacaagcacatcctgccttc

SEQ ID NO: 276028 - DNA, 33 bp, Homo sapien
atattataaccattacgagcacatcctgccttc

SEQ ID NO: 276029 - DNA, 33 bp, Homo sapien
ctgctctgctaaggggcatttggttataagagg

SEQ ID NO: 276030 - DNA, 33 bp, Homo sapien
ctgctctgctaaggggtatttggttataagagg

SEQ ID NO: 276031 - DNA, 33 bp, Homo sapien
atgtgaaacattctacagaacaggtcatatatt

SEQ ID NO: 276032 - DNA, 33 bp, Homo sapien
atgtgaaacattctacggaacaggtcatatatt

SEQ ID NO: 276033 - DNA, 33 bp, Homo sapien
catcatggagaaactacgagggcaatgcagagg

SEQ ID NO: 276034 - DNA, 33 bp, Homo sapien
catcatggagaaactatgagggcaatgcagagg

SEQ ID NO: 276035 - DNA, 33 bp, Homo sapien
tgctgatgagatttggaacaattatttaaaaaa

SEQ ID NO: 276036 - DNA, 33 bp, Homo sapien
tgctgatgagatttggtacaattatttaaaaaa

SEQ ID NO: 276037 - DNA, 33 bp, Homo sapien
tatggctttaaacaccacttctgcttcatttct

SEQ ID NO: 276038 - DNA, 33 bp, Homo sapien
tatggctttaaacaccgcttctgcttcatttct

SEQ ID NO: 276039 - DNA, 33 bp, Homo sapien
atgtgagttcatctgacgtccctaaaccctaat

SEQ ID NO: 276040 - DNA, 33 bp, Homo sapien
atgtgagttcatctgatgtccctaaaccctaat

SEQ ID NO: 276041 - DNA, 33 bp, Homo sapien
ttcatagggtatactaccacttaggagctgacc

SEQ ID NO: 276042 - DNA, 33 bp, Homo sapien
ttcatagggtatactatcacttaggagctgacc

SEQ ID NO: 276043 - DNA, 33 bp, Homo sapien
caacaataaatgctgtaaaaggactagaatata

SEQ ID NO: 276044 - DNA, 33 bp, Homo sapien
caacaataaatgctgtcaaaggactagaatata

SEQ ID NO: 276045 - DNA, 33 bp, Homo sapien
ccatatggcaaggtcaagaggtagatttcaaat

SEQ ID NO: 276046 - DNA, 33 bp, Homo sapien
ccatatggcaaggtcaggaggtagatttcaaat

SEQ ID NO: 276047 - DNA, 33 bp, Homo sapien
tttagcaagtaccagaaaccgcaaatcacagct

SEQ ID NO: 276048 - DNA, 33 bp, Homo sapien
tttagcaagtaccagataccgcaaatcacagct

SEQ ID NO: 276049 - DNA, 33 bp, Homo sapien
gccataaaaaaatcaacctgcaggctaagtcta

SEQ ID NO: 276050 - DNA, 33 bp, Homo sapien
gccataaaaaaatcaatctgcaggctaagtcta

SEQ ID NO: 276051 - DNA, 33 bp, Homo sapien
tttctatgcctttagcaatcaactcttaacact

SEQ ID NO: 276052 - DNA, 33 bp, Homo sapien
tttctatgcctttagccatcaactcttaacact

SEQ ID NO: 276053 - DNA, 33 bp, Homo sapien
gtatatctaatagacacgatgaacaaaagcccc

SEQ ID NO: 276054 - DNA, 33 bp, Homo sapien
gtatatctaatagacaggatgaacaaaagcccc

SEQ ID NO: 276055 - DNA, 33 bp, Homo sapien
gctgcttccatgaaaacatccaaaataatcatc

SEQ ID NO: 276056 - DNA, 33 bp, Homo sapien
gctgcttccatgaaaatatccaaaataatcatc

SEQ ID NO: 276057 - DNA, 33 bp, Homo sapien
tttgttttgtgtttaactatagtcaccatgctg

SEQ ID NO: 276058 - DNA, 33 bp, Homo sapien
tttgttttgtgtttaagtatagtcaccatgctg

SEQ ID NO: 276059 - DNA, 33 bp, Homo sapien
tagtcaccatgctgcaaaatagttatcttgaac

SEQ ID NO: 276060 - DNA, 33 bp, Homo sapien
tagtcaccatgctgcacaatagttatcttgaac

SEQ ID NO: 276061 - DNA, 33 bp, Homo sapien
tcccagcattctggaaagtcgaggtggacagat

SEQ ID NO: 276062 - DNA, 33 bp, Homo sapien
tcccagcattctggaaggtcgaggtggacagat

SEQ ID NO: 276063 - DNA, 33 bp, Homo sapien
tacagctttgttagcacggaatgtattgaagcc

SEQ ID NO: 276064 - DNA, 33 bp, Homo sapien
tacagctttgttagcatggaatgtattgaagcc

SEQ ID NO: 276065 - DNA, 33 bp, Homo sapien
gacattgtcatgagaaaatgatgcctgacttcc

SEQ ID NO: 276066 - DNA, 33 bp, Homo sapien
gacattgtcatgagaacatgatgcctgacttcc

SEQ ID NO: 276067 - DNA, 33 bp, Homo sapien
gaacgtagtagcggaaccactgacactagaaaa

SEQ ID NO: 276068 - DNA, 33 bp, Homo sapien
gaacgtagtagcggaatcactgacactagaaaa

SEQ ID NO: 276069 - DNA, 33 bp, Homo sapien
gagaggtgtcctgaaacagcaaaggttattttg

SEQ ID NO: 276070 - DNA, 33 bp, Homo sapien
gagaggtgtcctgaaagagcaaaggttattttg

SEQ ID NO: 276071 - DNA, 33 bp, Homo sapien
acaagaattcagaacacgaaatggaattccaaa

SEQ ID NO: 276072 - DNA, 33 bp, Homo sapien
acaagaattcagaacaggaaatggaattccaaa

SEQ ID NO: 276073 - DNA, 33 bp, Homo sapien
atctgtaattcaactaaaacgatggttataaca

SEQ ID NO: 276074 - DNA, 33 bp, Homo sapien
atctgtaattcaactacaacgatggttataaca

SEQ ID NO: 276075 - DNA, 33 bp, Homo sapien
gaatactcacaccagaagtttcagtacttttag

SEQ ID NO: 276076 - DNA, 33 bp, Homo sapien
gaatactcacaccagaggtttcagtacttttag

SEQ ID NO: 276077 - DNA, 33 bp, Homo sapien
attggtgaccatcagacaacttcatgccttgat

SEQ ID NO: 276078 - DNA, 33 bp, Homo sapien
attggtgaccatcagataacttcatgccttgat

SEQ ID NO: 276079 - DNA, 33 bp, Homo sapien
ataaaacctgaaaatacgtgtttgcatcaatgc

SEQ ID NO: 276080 - DNA, 33 bp, Homo sapien
ataaaacctgaaaatatgtgtttgcatcaatgc

SEQ ID NO: 276081 - DNA, 33 bp, Homo sapien
atttacagaaaaccaaattctctacttcttctg

SEQ ID NO: 276082 - DNA, 33 bp, Homo sapien
atttacagaaaaccaagttctctacttcttctg

SEQ ID NO: 276083 - DNA, 33 bp, Homo sapien
tatatactgctcatgaatatgtaaatttgttca

SEQ ID NO: 276084 - DNA, 33 bp, Homo sapien
tatatactgctcatgagtatgtaaatttgttca

SEQ ID NO: 276085 - DNA, 33 bp, Homo sapien
acttttgtatatgtgtaaaaaagtggttaagtt

SEQ ID NO: 276086 - DNA, 33 bp, Homo sapien
acttttgtatatgtgtgaaaaagtggttaagtt

SEQ ID NO: 276087 - DNA, 33 bp, Homo sapien
ctcccaaatatctggaacttggctgttgcttgg

SEQ ID NO: 276088 - DNA, 33 bp, Homo sapien
ctcccaaatatctggaccttggctgttgcttgg

SEQ ID NO: 276089 - DNA, 33 bp, Homo sapien
tatctctgcactattacgtcaaatgcctccctt

SEQ ID NO: 276090 - DNA, 33 bp, Homo sapien
tatctctgcactattatgtcaaatgcctccctt

SEQ ID NO: 276091 - DNA, 33 bp, Homo sapien
tcctgaattgatatgaaacttttcttagaagac

SEQ ID NO: 276092 - DNA, 33 bp, Homo sapien
tcctgaattgatatgatacttttcttagaagac

SEQ ID NO: 276093 - DNA, 33 bp, Homo sapien
catatcataaagacaaacctgctaattcttctc

SEQ ID NO: 276094 - DNA, 33 bp, Homo sapien
catatcataaagacaaccctgctaattcttctc

SEQ ID NO: 276095 - DNA, 33 bp, Homo sapien
ccacctcgccattgaaacaatcttcaaaactgt

SEQ ID NO: 276096 - DNA, 33 bp, Homo sapien
ccacctcgccattgaatcaatcttcaaaactgt

SEQ ID NO: 276097 - DNA, 33 bp, Homo sapien
taaatagccagcatcacataggtaagaatttca

SEQ ID NO: 276098 - DNA, 33 bp, Homo sapien
taaatagccagcatcatataggtaagaatttca

SEQ ID NO: 276099 - DNA, 33 bp, Homo sapien
aaattaagcagtgtgactaattaaattgtttga

SEQ ID NO: 276100 - DNA, 33 bp, Homo sapien
aaattaagcagtgtgattaattaaattgtttga

SEQ ID NO: 276101 - DNA, 33 bp, Homo sapien
aggatagaacttggagaatagaatttgacgata

SEQ ID NO: 276102 - DNA, 33 bp, Homo sapien
aggatagaacttggaggatagaatttgacgata

SEQ ID NO: 276103 - DNA, 33 bp, Homo sapien
aatacaggtcttaaaaataaccaatgcaacctg

SEQ ID NO: 276104 - DNA, 33 bp, Homo sapien
aatacaggtcttaaaactaaccaatgcaacctg

SEQ ID NO: 276105 - DNA, 33 bp, Homo sapien
aaaggagagacaaatcagagacaaatttctctg

SEQ ID NO: 276106 - DNA, 33 bp, Homo sapien
aaaggagagacaaatccgagacaaatttctctg

SEQ ID NO: 276107 - DNA, 33 bp, Homo sapien
tgtactttacttttccgaggacattcacataaa

SEQ ID NO: 276108 - DNA, 33 bp, Homo sapien
tgtactttacttttcctaggacattcacataaa

SEQ ID NO: 276109 - DNA, 33 bp, Homo sapien
cttctactctacagccagatttatttcagaaga

SEQ ID NO: 276110 - DNA, 33 bp, Homo sapien
cttctactctacagccggatttatttcagaaga

SEQ ID NO: 276111 - DNA, 33 bp, Homo sapien
catccagaagtgaatacgggtcatagaatgcat

SEQ ID NO: 276112 - DNA, 33 bp, Homo sapien
catccagaagtgaatatgggtcatagaatgcat

SEQ ID NO: 276113 - DNA, 33 bp, Homo sapien
tattctatgtcccataagcatttcaagacacgc

SEQ ID NO: 276114 - DNA, 33 bp, Homo sapien
tattctatgtcccataggcatttcaagacacgc

SEQ ID NO: 276115 - DNA, 33 bp, Homo sapien
aacaacaacaagaacaaaaagctgggtggcatg

SEQ ID NO: 276116 - DNA, 33 bp, Homo sapien
aacaacaacaagaacagaaagctgggtggcatg

SEQ ID NO: 276117 - DNA, 33 bp, Homo sapien
aattattagattggtaaaaaattaatcgcattt

SEQ ID NO: 276118 - DNA, 33 bp, Homo sapien
aattattagattggtacaaaattaatcgcattt

SEQ ID NO: 276119 - DNA, 33 bp, Homo sapien
ttaattattacccgatcaactgagatctatgct

SEQ ID NO: 276120 - DNA, 33 bp, Homo sapien
ttaattattacccgattaactgagatctatgct

SEQ ID NO: 276121 - DNA, 33 bp, Homo sapien
ccctatatggaacaaaagccagtgattttgact

SEQ ID NO: 276122 - DNA, 33 bp, Homo sapien
ccctatatggaacaaaggccagtgattttgact

SEQ ID NO: 276123 - DNA, 33 bp, Homo sapien
ttcagctggtagccagaatgttatcttgaacta

SEQ ID NO: 276124 - DNA, 33 bp, Homo sapien
ttcagctggtagccagtatgttatcttgaacta

SEQ ID NO: 276125 - DNA, 33 bp, Homo sapien
actgatcattggcaaaatatcaaaggaaattca

SEQ ID NO: 276126 - DNA, 33 bp, Homo sapien
actgatcattggcaaagtatcaaaggaaattca

SEQ ID NO: 276127 - DNA, 33 bp, Homo sapien
atttggatctttaacacgctaatacaccaagta

SEQ ID NO: 276128 - DNA, 33 bp, Homo sapien
atttggatctttaacaggctaatacaccaagta

SEQ ID NO: 276129 - DNA, 33 bp, Homo sapien
tgtatgttccatgagagaaaaagtgtttgtctt

SEQ ID NO: 276130 - DNA, 33 bp, Homo sapien
tgtatgttccatgagataaaaagtgtttgtctt

SEQ ID NO: 276131 - DNA, 33 bp, Homo sapien
ctaaaaacttttaccaatctgaatcctagtatc

SEQ ID NO: 276132 - DNA, 33 bp, Homo sapien
ctaaaaacttttaccagtctgaatcctagtatc

SEQ ID NO: 276133 - DNA, 33 bp, Homo sapien; identical to SEQ ID NO: 276131

SEQ ID NO: 276134 - DNA, 33 bp, Homo sapien; identical to SEQ ID NO: 276132

SEQ ID NO: 276135 - DNA, 33 bp, Homo sapien
aagaaactgagaatatcaggcctcactcttggc

SEQ ID NO: 276136 - DNA, 33 bp, Homo sapien
aagaaactgagaatattaggcctcactcttggc

SEQ ID NO: 276137 - DNA, 33 bp, Homo sapien
aaatattgctgaactaagcatcaagagaaccag

SEQ ID NO: 276138 - DNA, 33 bp, Homo sapien
aaatattgctgaactaggcatcaagagaaccag

SEQ ID NO: 276139 - DNA, 33 bp, Homo sapien
agtgaaatcaacaacaaaaggcacaaaaatgca

SEQ ID NO: 276140 - DNA, 33 bp, Homo sapien
agtgaaatcaacaacagaaggcacaaaaatgca

SEQ ID NO: 276141 - DNA, 33 bp, Homo sapien
tgactttggggttacacatacagtttggtgagt

SEQ ID NO: 276142 - DNA, 33 bp, Homo sapien
tgactttggggttacagatacagtttggtgagt

SEQ ID NO: 276143 - DNA, 33 bp, Homo sapien
agtattttgacaccaacctcttttaatgttttg

SEQ ID NO: 276144 - DNA, 33 bp, Homo sapien
agtattttgacaccaatctcttttaatgttttg

SEQ ID NO: 276145 - DNA, 33 bp, Homo sapien
cagtgcgttcctcataagtccagtcgcacgtgt

SEQ ID NO: 276146 - DNA, 33 bp, Homo sapien
cagtgcgttcctcatacgtccagtcgcacgtgt

SEQ ID NO: 276147 - DNA, 33 bp, Homo sapien
ggcaactcatagaaaacgaatccaagaggtccc

SEQ ID NO: 276148 - DNA, 33 bp, Homo sapien
ggcaactcatagaaaatgaatccaagaggtccc

SEQ ID NO: 276149 - DNA, 33 bp, Homo sapien
cagtaagaagtcaaaacgggaggaatagcagat

SEQ ID NO: 276150 - DNA, 33 bp, Homo sapien
cagtaagaagtcaaaaggggaggaatagcagat

SEQ ID NO: 276151 - DNA, 33 bp, Homo sapien
tgataaacatatgagcgcatgtttctttttggt

SEQ ID NO: 276152 - DNA, 33 bp, Homo sapien
tgataaacatatgagctcatgtttctttttggt

SEQ ID NO: 276153 - DNA, 33 bp, Homo sapien
cttttctatacaggtgaaaatcaatgatggttt

SEQ ID NO: 276154 - DNA, 33 bp, Homo sapien
cttttctatacaggtggaaatcaatgatggttt

SEQ ID NO: 276155 - DNA, 33 bp, Homo sapien
tcgaacagtcactggccgaaaattcacttgata

SEQ ID NO: 276156 - DNA, 33 bp, Homo sapien
tcgaacagtcactggctgaaaattcacttgata

SEQ ID NO: 276157 - DNA, 33 bp, Homo sapien
tggtcttgttgctacacggctaaattctgattt

SEQ ID NO: 276158 - DNA, 33 bp, Homo sapien
tggtcttgttgctacatggctaaattctgattt

SEQ ID NO: 276159 - DNA, 33 bp, Homo sapien
gacagggctaacttacacatgaggcacagaagt

SEQ ID NO: 276160 - DNA, 33 bp, Homo sapien
gacagggctaacttacgcatgaggcacagaagt

SEQ ID NO: 276161 - DNA, 33 bp, Homo sapien
gtcaggcattgcctaaacacgcagtggatattt

SEQ ID NO: 276162 - DNA, 33 bp, Homo sapien
gtcaggcattgcctaagcacgcagtggatattt

SEQ ID NO: 276163 - DNA, 33 bp, Homo sapien
ctctgcacatcaggtaagaataaatcctaaaat

SEQ ID NO: 276164 - DNA, 33 bp, Homo sapien
ctctgcacatcaggtaggaataaatcctaaaat

SEQ ID NO: 276165 - DNA, 33 bp, Homo sapien
caggcctacatggtacactgtacatttcctacc

SEQ ID NO: 276166 - DNA, 33 bp, Homo sapien
caggcctacatggtacgctgtacatttcctacc

SEQ ID NO: 276167 - DNA, 33 bp, Homo sapien
ttgaactaatttgcacgcttagcaacagtgtaa

SEQ ID NO: 276168 - DNA, 33 bp, Homo sapien
ttgaactaatttgcactcttagcaacagtgtaa

SEQ ID NO: 276169 - DNA, 33 bp, Homo sapien
ggtctacaattttgaccgctaaaagtatcttag

SEQ ID NO: 276170 - DNA, 33 bp, Homo sapien
ggtctacaattttgactgctaaaagtatcttag

SEQ ID NO: 276171 - DNA, 33 bp, Homo sapien
actttatcttgaagtacgcctttcctcagaatt

SEQ ID NO: 276172 - DNA, 33 bp, Homo sapien
actttatcttgaagtatgcctttcctcagaatt

SEQ ID NO: 276173 - DNA, 33 bp, Homo sapien
gagatatcgaattctaacctccattccactttt

SEQ ID NO: 276174 - DNA, 33 bp, Homo sapien
gagatatcgaattctatcctccattccactttt

SEQ ID NO: 276175 - DNA, 33 bp, Homo sapien
gcataattaatggtcaatataacttccaaagag

SEQ ID NO: 276176 - DNA, 33 bp, Homo sapien
gcataattaatggtcagtataacttccaaagag

SEQ ID NO: 276177 - DNA, 33 bp, Homo sapien
aagagttccagaaggacatgggcgagagaaaga

SEQ ID NO: 276178 - DNA, 33 bp, Homo sapien
aagagttccagaaggagatgggcgagagaaaga

SEQ ID NO: 276179 - DNA, 33 bp, Homo sapien
agtctagagatttggaaggtcatcaaagcacac

SEQ ID NO: 276180 - DNA, 33 bp, Homo sapien
agtctagagatttggacggtcatcaaagcacac

SEQ ID NO: 276181 - DNA, 33 bp, Homo sapien
ttatatggtctttgaacaatattttcagcctat

SEQ ID NO: 276182 - DNA, 33 bp, Homo sapien
ttatatggtctttgaataatattttcagcctat

SEQ ID NO: 276183 - DNA, 33 bp, Homo sapien
gactgagacaaatttaagtattagttggcagct

SEQ ID NO: 276184 - DNA, 33 bp, Homo sapien
gactgagacaaatttacgtattagttggcagct

SEQ ID NO: 276185 - DNA, 33 bp, Homo sapien
tctcatttttacgtacccttcagatcattaaac

SEQ ID NO: 276186 - DNA, 33 bp, Homo sapien
tctcatttttacgtactcttcagatcattaaac

SEQ ID NO: 276187 - DNA, 33 bp, Homo sapien
tttatccttcagcacaacctgaccactcggtga

SEQ ID NO: 276188 - DNA, 33 bp, Homo sapien
tttatccttcagcacagcctgaccactcggtga

SEQ ID NO: 276189 - DNA, 33 bp, Homo sapien
ggaagtatttcaggcccaaaatccattcttatg

SEQ ID NO: 276190 - DNA, 33 bp, Homo sapien
ggaagtatttcaggccgaaaatccattcttatg

SEQ ID NO: 276191 - DNA, 33 bp, Homo sapien
agaatatactattggtaaatctttgctaattct

SEQ ID NO: 276192 - DNA, 33 bp, Homo sapien
agaatatactattggtgaatctttgctaattct

SEQ ID NO: 276193 - DNA, 33 bp, Homo sapien
gtacagtgctgttatccctttttaaacattaat

SEQ ID NO: 276194 - DNA, 33 bp, Homo sapien
gtacagtgctgttatctctttttaaacattaat

SEQ ID NO: 276195 - DNA, 33 bp, Homo sapien
gctgtgtttcaactcaaaattcatgtaataata

SEQ ID NO: 276196 - DNA, 33 bp, Homo sapien
gctgtgtttcaactcagaattcatgtaataata

SEQ ID NO: 276197 - DNA, 33 bp, Homo sapien
ttgaaaaagacacaacactttcagacatattct

SEQ ID NO: 276198 - DNA, 33 bp, Homo sapien
ttgaaaaagacacaacgctttcagacatattct

SEQ ID NO: 276199 - DNA, 33 bp, Homo sapien
agaggtgagactaccaagtaagagataaatgac

SEQ ID NO: 276200 - DNA, 33 bp, Homo sapien
agaggtgagactaccaggtaagagataaatgac

SEQ ID NO: 276201 - DNA, 33 bp, Homo sapien
aaaactgaatcataaaattgcagtaactaattg

SEQ ID NO: 276202 - DNA, 33 bp, Homo sapien
aaaactgaatcataaagttgcagtaactaattg

SEQ ID NO: 276203 - DNA, 33 bp, Homo sapien
actacagatgaaatgacgattaattttgctttg

SEQ ID NO: 276204 - DNA, 33 bp, Homo sapien
actacagatgaaatgaggattaattttgctttg

SEQ ID NO: 276205 - DNA, 33 bp, Homo sapien
attcagaacaaaagaaatatcctttgatccata

SEQ ID NO: 276206 - DNA, 33 bp, Homo sapien
attcagaacaaaagaagtatcctttgatccata

SEQ ID NO: 276207 - DNA, 33 bp, Homo sapien
tgctgtacattctgtaaagactgattataacat

SEQ ID NO: 276208 - DNA, 33 bp, Homo sapien
tgctgtacattctgtagagactgattataacat

SEQ ID NO: 276209 - DNA, 33 bp, Homo sapien
tgatatttatccaagacgttagatatgtataaa

SEQ ID NO: 276210 - DNA, 33 bp, Homo sapien
tgatatttatccaagatgttagatatgtataaa

SEQ ID NO: 276211 - DNA, 33 bp, Homo sapien
tgactacctgtcttcagaaactaagtgtaagtt

SEQ ID NO: 276212 - DNA, 33 bp, Homo sapien
tgactacctgtcttcataaactaagtgtaagtt

SEQ ID NO: 276213 - DNA, 33 bp, Homo sapien
aatgatttttttaagacgcagtgacagcagtag

SEQ ID NO: 276214 - DNA, 33 bp, Homo sapien
aatgatttttttaagatgcagtgacagcagtag

SEQ ID NO: 276215 - DNA, 33 bp, Homo sapien
aagctctgtggaaccaatatcaattctcttgtt

SEQ ID NO: 276216 - DNA, 33 bp, Homo sapien
aagctctgtggaaccagtatcaattctcttgtt

SEQ ID NO: 276217 - DNA, 33 bp, Homo sapien
tctcaattctctacataaagggacagatgaata

SEQ ID NO: 276218 - DNA, 33 bp, Homo sapien
tctcaattctctacatgaagggacagatgaata

SEQ ID NO: 276219 - DNA, 33 bp, Homo sapien
ctgctgtttggattaacgtggtgtagagttata

SEQ ID NO: 276220 - DNA, 33 bp, Homo sapien
ctgctgtttggattaatgtggtgtagagttata

SEQ ID NO: 276221 - DNA, 33 bp, Homo sapien
aactgaaatctgaacaaggcaagtatatgtgaa

SEQ ID NO: 276222 - DNA, 33 bp, Homo sapien
aactgaaatctgaacagggcaagtatatgtgaa

SEQ ID NO: 276223 - DNA, 33 bp, Homo sapien
gtaatattgcatggcaaaaacaaatgaaatatc

SEQ ID NO: 276224 - DNA, 33 bp, Homo sapien
gtaatattgcatggcagaaacaaatgaaatatc

SEQ ID NO: 276225 - DNA, 33 bp, Homo sapien
cagtggcgcttgagaaatagcagtgataacctc

SEQ ID NO: 276226 - DNA, 33 bp, Homo sapien
cagtggcgcttgagaagtagcagtgataacctc

SEQ ID NO: 276227 - DNA, 33 bp, Homo sapien
attatgctgaaacacaaattaaacaagaggggc

SEQ ID NO: 276228 - DNA, 33 bp, Homo sapien
attatgctgaaacacagattaaacaagaggggc

SEQ ID NO: 276229 - DNA, 33 bp, Homo sapien
tttataggccaatggtcaagttacctagtattc

SEQ ID NO: 276230 - DNA, 33 bp, Homo sapien
tttataggccaatggttaagttacctagtattc

SEQ ID NO: 276231 - DNA, 33 bp, Homo sapien
ttccattcacttaacacgatagcccacagtgac

SEQ ID NO: 276232 - DNA, 33 bp, Homo sapien
ttccattcacttaacatgatagcccacagtgac

SEQ ID NO: 276233 - DNA, 33 bp, Homo sapien
tgtttcctttcagcaactgaaatatgccatccc

SEQ ID NO: 276234 - DNA, 33 bp, Homo sapien
tgtttcctttcagcaattgaaatatgccatccc

SEQ ID NO: 276235 - DNA, 33 bp, Homo sapien
gcagagcaggttgttccattgacttcaatatta

SEQ ID NO: 276236 - DNA, 33 bp, Homo sapien
gcagagcaggttgttctattgacttcaatatta

SEQ ID NO: 276237 - DNA, 33 bp, Homo sapien
tggtgcttttcatgaacagtggcagtaataatg

SEQ ID NO: 276238 - DNA, 33 bp, Homo sapien
tggtgcttttcatgaatagtggcagtaataatg

SEQ ID NO: 276239 - DNA, 33 bp, Homo sapien
tcccttgctctacaaccggcacattcagaagca

SEQ ID NO: 276240 - DNA, 33 bp, Homo sapien
tcccttgctctacaactggcacattcagaagca

SEQ ID NO: 276241 - DNA, 33 bp, Homo sapien
tctcaatccttcttaacgcctacaaactcaggg

SEQ ID NO: 276242 - DNA, 33 bp, Homo sapien
tctcaatccttcttaatgcctacaaactcaggg

SEQ ID NO: 276243 - DNA, 33 bp, Homo sapien
agccagaataagaagcactatgtgttaacctca

SEQ ID NO: 276244 - DNA, 33 bp, Homo sapien
agccagaataagaagcgctatgtgttaacctca

SEQ ID NO: 276245 - DNA, 33 bp, Homo sapien
ttgtggcatcttatagcaattaaatttgtagta

SEQ ID NO: 276246 - DNA, 33 bp, Homo sapien
ttgtggcatcttatagtaattaaatttgtagta

SEQ ID NO: 276247 - DNA, 33 bp, Homo sapien
ggcaataaaagaacagaaagtagcttagcaact

SEQ ID NO: 276248 - DNA, 33 bp, Homo sapien
ggcaataaaagaacagtaagtagcttagcaact

SEQ ID NO: 276249 - DNA, 33 bp, Homo sapien
agggttgtgtgaacaaatgagcacagggtccag

SEQ ID NO: 276250 - DNA, 33 bp, Homo sapien
agggttgtgtgaacaagtgagcacagggtccag

SEQ ID NO: 276251 - DNA, 33 bp, Homo sapien
catgttgactatggcacccaggttgttcgtgct

SEQ ID NO: 276252 - DNA, 33 bp, Homo sapien
catgttgactatggcagccaggttgttcgtgct

SEQ ID NO: 276253 - DNA, 33 bp, Homo sapien
aaaatgtttgacagaacgaaggtgataaaaaag

SEQ ID NO: 276254 - DNA, 33 bp, Homo sapien
aaaatgtttgacagaatgaaggtgataaaaaag

SEQ ID NO: 276255 - DNA, 33 bp, Homo sapien
gtaatgggtgtatttaaaattgttctcactcac

SEQ ID NO: 276256 - DNA, 33 bp, Homo sapien
gtaatgggtgtatttacaattgttctcactcac

SEQ ID NO: 276257 - DNA, 33 bp, Homo sapien
taataccagattgatacgcacctgtccaacata

SEQ ID NO: 276258 - DNA, 33 bp, Homo sapien
taataccagattgatatgcacctgtccaacata

SEQ ID NO: 276259 - DNA, 33 bp, Homo sapien
tttttaaggtttacaaatgattggacctgtgtg

SEQ ID NO: 276260 - DNA, 33 bp, Homo sapien
tttttaaggtttacaagtgattggacctgtgtg

SEQ ID NO: 276261 - DNA, 33 bp, Homo sapien
tccttacaaatgtagacgcagctatgtttctaa

SEQ ID NO: 276262 - DNA, 33 bp, Homo sapien
tccttacaaatgtagatgcagctatgtttctaa

SEQ ID NO: 276263 - DNA, 33 bp, Homo sapien
ctcatgtgaagtctaaagtgtattattttaagt

SEQ ID NO: 276264 - DNA, 33 bp, Homo sapien
ctcatgtgaagtctaacgtgtattattttaagt

SEQ ID NO: 276265 - DNA, 33 bp, Homo sapien
aggaacagcaattatacatattagccagaatag

SEQ ID NO: 276266 - DNA, 33 bp, Homo sapien
aggaacagcaattatagatattagccagaatag

SEQ ID NO: 276267 - DNA, 33 bp, Homo sapien
tataatgtgatacatgacaatatttgatgtagc

SEQ ID NO: 276268 - DNA, 33 bp, Homo sapien
tataatgtgatacatggcaatatttgatgtagc

SEQ ID NO: 276269 - DNA, 33 bp, Homo sapien
ttctgtgaggctaaaaattgtttctgcatgtgg

SEQ ID NO: 276270 - DNA, 33 bp, Homo sapien
ttctgtgaggctaaaagttgtttctgcatgtgg

SEQ ID NO: 276271 - DNA, 33 bp, Homo sapien
attgctgccattgtaaacttctagaatcttaag

SEQ ID NO: 276272 - DNA, 33 bp, Homo sapien
attgctgccattgtaagcttctagaatcttaag

SEQ ID NO: 276273 - DNA, 33 bp, Homo sapien
agtgttacaaagttagccagatctcaataaaaa

SEQ ID NO: 276274 - DNA, 33 bp, Homo sapien
agtgttacaaagttagtcagatctcaataaaaa

SEQ ID NO: 276275 - DNA, 33 bp, Homo sapien
ataaaatagacatttcaaaggcagattccagtc

SEQ ID NO: 276276 - DNA, 33 bp, Homo sapien
ataaaatagacatttcgaaggcagattccagtc

SEQ ID NO: 276277 - DNA, 33 bp, Homo sapien
acaaattcagaaaaagactgaccggagctcctg

SEQ ID NO: 276278 - DNA, 33 bp, Homo sapien
acaaattcagaaaaagtctgaccggagctcctg

SEQ ID NO: 276279 - DNA, 33 bp, Homo sapien
cattgttctgtcttgacgtggttttacattttc

SEQ ID NO: 276280 - DNA, 33 bp, Homo sapien
cattgttctgtcttgatgtggttttacattttc

SEQ ID NO: 276281 - DNA, 33 bp, Homo sapien
agatgacatttcaacaccatcctgaaggaactg

SEQ ID NO: 276282 - DNA, 33 bp, Homo sapien
agatgacatttcaacagcatcctgaaggaactg

SEQ ID NO: 276283 - DNA, 33 bp, Homo sapien
gttaagttcagtatacagtaacagcattagata

SEQ ID NO: 276284 - DNA, 33 bp, Homo sapien
gttaagttcagtatacggtaacagcattagata

SEQ ID NO: 276285 - DNA, 33 bp, Homo sapien
tagaaatacagtattacgtgatttttgtcattg

SEQ ID NO: 276286 - DNA, 33 bp, Homo sapien
tagaaatacagtattaggtgatttttgtcattg

SEQ ID NO: 276287 - DNA, 33 bp, Homo sapien
cttcttaataacatcaccccaaaataatacacg

SEQ ID NO: 276288 - DNA, 33 bp, Homo sapien
cttcttaataacatcagcccaaaataatacacg

SEQ ID NO: 276289 - DNA, 33 bp, Homo sapien
ggcttttttttccccccacttggagcaatggaa

SEQ ID NO: 276290 - DNA, 33 bp, Homo sapien
ggcttttttttcccccgacttggagcaatggaa

SEQ ID NO: 276291 - DNA, 33 bp, Homo sapien
atttcactctcaagaaaatttgtcataaaaatc

SEQ ID NO: 276292 - DNA, 33 bp, Homo sapien
atttcactctcaagaacatttgtcataaaaatc

SEQ ID NO: 276293 - DNA, 33 bp, Homo sapien
taactgaaagaaatgaaagcagtgatattagca

SEQ ID NO: 276294 - DNA, 33 bp, Homo sapien
taactgaaagaaatgacagcagtgatattagca

SEQ ID NO: 276295 - DNA, 33 bp, Homo sapien
ttgattaaaacttgggaactttggttgctttac

SEQ ID NO: 276296 - DNA, 33 bp, Homo sapien
ttgattaaaacttggggactttggttgctttac

SEQ ID NO: 276297 - DNA, 33 bp, Homo sapien
ttatctgaattcctaccgctagcatcctagttg

SEQ ID NO: 276298 - DNA, 33 bp, Homo sapien
ttatctgaattcctactgctagcatcctagttg

SEQ ID NO: 276299 - DNA, 33 bp, Homo sapien
cctatttactataacaaggttgaatgtttaatc

SEQ ID NO: 276300 - DNA, 33 bp, Homo sapien
cctatttactataacagggttgaatgtttaatc

SEQ ID NO: 276301 - DNA, 33 bp, Homo sapien
ctgatcatcgtcatcactattaatctcgtagta

SEQ ID NO: 276302 - DNA, 33 bp, Homo sapien
ctgatcatcgtcatcattattaatctcgtagta

SEQ ID NO: 276303 - DNA, 33 bp, Homo sapien
tacctcttcacagccccggaaatctgggatatg

SEQ ID NO: 276304 - DNA, 33 bp, Homo sapien
tacctcttcacagccctggaaatctgggatatg

SEQ ID NO: 276305 - DNA, 33 bp, Homo sapien
catcacatcctgataaagtacaaaatgtgtcca

SEQ ID NO: 276306 - DNA, 33 bp, Homo sapien
catcacatcctgataatgtacaaaatgtgtcca

SEQ ID NO: 276307 - DNA, 33 bp, Homo sapien
gaatagttatcagtcaagcacttacattctcat

SEQ ID NO: 276308 - DNA, 33 bp, Homo sapien
gaatagttatcagtcaggcacttacattctcat

SEQ ID NO: 276309 - DNA, 33 bp, Homo sapien
ttctctgcaaagctcaataagtttcactaatat

SEQ ID NO: 276310 - DNA, 33 bp, Homo sapien
ttctctgcaaagctcagtaagtttcactaatat

SEQ ID NO: 276311 - DNA, 33 bp, Homo sapien
tgaccataagcttcatgacccccagagaccatt

SEQ ID NO: 276312 - DNA, 33 bp, Homo sapien
tgaccataagcttcattacccccagagaccatt

SEQ ID NO: 276313 - DNA, 33 bp, Homo sapien
ttttttctaatgttgccctatctgtattcttga

SEQ ID NO: 276314 - DNA, 33 bp, Homo sapien
ttttttctaatgttgctctatctgtattcttga

SEQ ID NO: 276315 - DNA, 33 bp, Homo sapien
tgagagacggccatgacgtaaccaaccaggggt

SEQ ID NO: 276316 - DNA, 33 bp, Homo sapien
tgagagacggccatgatgtaaccaaccaggggt

SEQ ID NO: 276317 - DNA, 33 bp, Homo sapien
ttgcttctcactataacggcctccagagagtga

SEQ ID NO: 276318 - DNA, 33 bp, Homo sapien
ttgcttctcactataatggcctccagagagtga

SEQ ID NO: 276319 - DNA, 33 bp, Homo sapien
ggtctttatggttctacgttagaatatttcaaa

SEQ ID NO: 276320 - DNA, 33 bp, Homo sapien
ggtctttatggttctaggttagaatatttcaaa

SEQ ID NO: 276321 - DNA, 33 bp, Homo sapien
gggagagctagacaagacctctatttttgctta

SEQ ID NO: 276322 - DNA, 33 bp, Homo sapien
gggagagctagacaaggcctctatttttgctta

SEQ ID NO: 276323 - DNA, 33 bp, Homo sapien
caacatttagcaacgactaatacagattaagtt

SEQ ID NO: 276324 - DNA, 33 bp, Homo sapien
caacatttagcaacgattaatacagattaagtt

SEQ ID NO: 276325 - DNA, 33 bp, Homo sapien
aatctgaaagctaaggaactattttcaactgaa

SEQ ID NO: 276326 - DNA, 33 bp, Homo sapien
aatctgaaagctaaggtactattttcaactgaa

SEQ ID NO: 276327 - DNA, 33 bp, Homo sapien
aataaatagtaactgaacgcacccaagatgaat

SEQ ID NO: 276328 - DNA, 33 bp, Homo sapien
aataaatagtaactgaccgcacccaagatgaat

SEQ ID NO: 276329 - DNA, 33 bp, Homo sapien
attgaggcaaaacttcaagtggctgttgcaatg

SEQ ID NO: 276330 - DNA, 33 bp, Homo sapien
attgaggcaaaacttcgagtggctgttgcaatg

SEQ ID NO: 276331 - DNA, 33 bp, Homo sapien
catggctggatctggacgccataatcctaaatg

SEQ ID NO: 276332 - DNA, 33 bp, Homo sapien
catggctggatctggaggccataatcctaaatg

SEQ ID NO: 276333 - DNA, 33 bp, Homo sapien
cttctgaaatacttcccgcttaatgttaaaaaa

SEQ ID NO: 276334 - DNA, 33 bp, Homo sapien
cttctgaaatacttcctgcttaatgttaaaaaa

SEQ ID NO: 276335 - DNA, 33 bp, Homo sapien
atttgaatagtatataaaatttgttgaccttct

SEQ ID NO: 276336 - DNA, 33 bp, Homo sapien
atttgaatagtatatagaatttgttgaccttct

SEQ ID NO: 276337 - DNA, 33 bp, Homo sapien
actcaccacctcaaaactgtgtagacaactgtg

SEQ ID NO: 276338 - DNA, 33 bp, Homo sapien
actcaccacctcaaaattgtgtagacaactgtg

SEQ ID NO: 276339 - DNA, 33 bp, Homo sapien
tttcttgttttctagcacaatcatgtatttttg

SEQ ID NO: 276340 - DNA, 33 bp, Homo sapien
tttcttgttttctagcgcaatcatgtatttttg

SEQ ID NO: 276341 - DNA, 33 bp, Homo sapien
agagataatcacaacgaagtgcattttgacatg

SEQ ID NO: 276342 - DNA, 33 bp, Homo sapien
agagataatcacaacgcagtgcattttgacatg

SEQ ID NO: 276343 - DNA, 33 bp, Homo sapien
caaaccaacaccctcaaatctagaaagacaggc

SEQ ID NO: 276344 - DNA, 33 bp, Homo sapien
caaaccaacaccctcatatctagaaagacaggc

SEQ ID NO: 276345 - DNA, 33 bp, Homo sapien
gcatggccttggggtaatacactatgcctaaag

SEQ ID NO: 276346 - DNA, 33 bp, Homo sapien
gcatggccttggggtattacactatgcctaaag

SEQ ID NO: 276347 - DNA, 33 bp, Homo sapien
ttattaattatagttgaatctgacaaattttag

SEQ ID NO: 276348 - DNA, 33 bp, Homo sapien
ttattaattatagttgtatctgacaaattttag

SEQ ID NO: 276349 - DNA, 33 bp, Homo sapien
ttggccaagattgggtgaatgggctcaccagaa

SEQ ID NO: 276350 - DNA, 33 bp, Homo sapien
ttggccaagattgggttaatgggctcaccagaa

SEQ ID NO: 276351 - DNA, 33 bp, Homo sapien
aaattatttggtatgaagctcttggctacccat

SEQ ID NO: 276352 - DNA, 33 bp, Homo sapien
aaattatttggtatgacgctcttggctacccat

SEQ ID NO: 276353 - DNA, 33 bp, Homo sapien
ctaaggacaggatctacgctgactgctggagtc

SEQ ID NO: 276354 - DNA, 33 bp, Homo sapien
ctaaggacaggatctatgctgactgctggagtc

SEQ ID NO: 276355 - DNA, 33 bp, Homo sapien
tgaatacaaaatggtacgctaattcaatctttc

SEQ ID NO: 276356 - DNA, 33 bp, Homo sapien
tgaatacaaaatggtatgctaattcaatctttc

SEQ ID NO: 276357 - DNA, 33 bp, Homo sapien
ggaaagccttttttgacccagattactaaatct

SEQ ID NO: 276358 - DNA, 33 bp, Homo sapien
ggaaagccttttttgatccagattactaaatct

SEQ ID NO: 276359 - DNA, 33 bp, Homo sapien
tgttttacaaatagtaacctttacaaatagtaa

SEQ ID NO: 276360 - DNA, 33 bp, Homo sapien
tgttttacaaatagtaccctttacaaatagtaa

SEQ ID NO: 276361 - DNA, 33 bp, Homo sapien
acagccctttgctcaaactcttttcggtactgt

SEQ ID NO: 276362 - DNA, 33 bp, Homo sapien
acagccctttgctcaatctcttttcggtactgt

SEQ ID NO: 276363 - DNA, 33 bp, Homo sapien
cctcacgatgaaataccggcatatttagcttag

SEQ ID NO: 276364 - DNA, 33 bp, Homo sapien
cctcacgatgaaatactggcatatttagcttag

SEQ ID NO: 276365 - DNA, 33 bp, Homo sapien
tgagtgagttaccatacaacctgagctgcccat

SEQ ID NO: 276366 - DNA, 33 bp, Homo sapien
tgagtgagttaccatagaacctgagctgcccat

SEQ ID NO: 276367 - DNA, 33 bp, Homo sapien
ttacccttattttaccacaccattccataattc

SEQ ID NO: 276368 - DNA, 33 bp, Homo sapien
ttacccttattttaccgcaccattccataattc

SEQ ID NO: 276369 - DNA, 33 bp, Homo sapien
ttaaagtgaaatcctgaatcatgtgcagtactc

SEQ ID NO: 276370 - DNA, 33 bp, Homo sapien
ttaaagtgaaatcctgtatcatgtgcagtactc

SEQ ID NO: 276371 - DNA, 33 bp, Homo sapien
gataaatgactcgtgacattaatctgaagtaaa

SEQ ID NO: 276372 - DNA, 33 bp, Homo sapien
gataaatgactcgtgatattaatctgaagtaaa

SEQ ID NO: 276373 - DNA, 33 bp, Homo sapien
ttccctgaataatcacgcttgccattacttgtc

SEQ ID NO: 276374 - DNA, 33 bp, Homo sapien
ttccctgaataatcactcttgccattacttgtc

SEQ ID NO: 276375 - DNA, 33 bp, Homo sapien
atgcaaatggatccaacacttggttagccaata

SEQ ID NO: 276376 - DNA, 33 bp, Homo sapien
atgcaaatggatccaatacttggttagccaata

SEQ ID NO: 276377 - DNA, 33 bp, Homo sapien
ttctagtgcttcagaaggaataaaaggtcatag

SEQ ID NO: 276378 - DNA, 33 bp, Homo sapien
ttctagtgcttcagaatgaataaaaggtcatag

SEQ ID NO: 276379 - DNA, 33 bp, Homo sapien
gtatcttagcctgttgaacagttgttaatattt

SEQ ID NO: 276380 - DNA, 33 bp, Homo sapien
gtatcttagcctgttggacagttgttaatattt

SEQ ID NO: 276381 - DNA, 33 bp, Homo sapien
ggggatcttattctaaagttcccgtgtaagctc

SEQ ID NO: 276382 - DNA, 33 bp, Homo sapien
ggggatcttattctaatgttcccgtgtaagctc

SEQ ID NO: 276383 - DNA, 33 bp, Homo sapien
agttattattctctctaaaattctggccagttt

SEQ ID NO: 276384 - DNA, 33 bp, Homo sapien
agttattattctctctcaaattctggccagttt

SEQ ID NO: 276385 - DNA, 33 bp, Homo sapien
tctttccagaaatgtcaaattgcatcattataa

SEQ ID NO: 276386 - DNA, 33 bp, Homo sapien
tctttccagaaatgtccaattgcatcattataa

SEQ ID NO: 276387 - DNA, 33 bp, Homo sapien
aatgctttcttgatcacagtcattaagtggcca

SEQ ID NO: 276388 - DNA, 33 bp, Homo sapien
aatgctttcttgatcatagtcattaagtggcca

SEQ ID NO: 276389 - DNA, 33 bp, Homo sapien
tacaggaaacatttgcactgtgaagggtacatg

SEQ ID NO: 276390 - DNA, 33 bp, Homo sapien
tacaggaaacatttgcgctgtgaagggtacatg

SEQ ID NO: 276391 - DNA, 33 bp, Homo sapien
tataattaatgtggacccaacaaactacttatg

SEQ ID NO: 276392 - DNA, 33 bp, Homo sapien
tataattaatgtggactcaacaaactacttatg

SEQ ID NO: 276393 - DNA, 33 bp, Homo sapien
tcatagttgatgggaccaggtaataccacttaa

SEQ ID NO: 276394 - DNA, 33 bp, Homo sapien
tcatagttgatgggacgaggtaataccacttaa

SEQ ID NO: 276395 - DNA, 33 bp, Homo sapien
ttgcttacagggaaacactatctgagacaagct

SEQ ID NO: 276396 - DNA, 33 bp, Homo sapien
ttgcttacagggaaacgctatctgagacaagct

SEQ ID NO: 276397 - DNA, 33 bp, Homo sapien
tcagttctatgattaacgaggcatcacctctac

SEQ ID NO: 276398 - DNA, 33 bp, Homo sapien
tcagttctatgattaatgaggcatcacctctac

SEQ ID NO: 276399 - DNA, 33 bp, Homo sapien
tagaagaattttaagaaggcttgtgatataatt

SEQ ID NO: 276400 - DNA, 33 bp, Homo sapien
tagaagaattttaagacggcttgtgatataatt

SEQ ID NO: 276401 - DNA, 33 bp, Homo sapien
catagtggggacgcaaagagataatgaacaata

SEQ ID NO: 276402 - DNA, 33 bp, Homo sapien
catagtggggacgcaaggagataatgaacaata

SEQ ID NO: 276403 - DNA, 33 bp, Homo sapien
tttaaactttaatctacgactttgagaagaatg

SEQ ID NO: 276404 - DNA, 33 bp, Homo sapien
tttaaactttaatctatgactttgagaagaatg

SEQ ID NO: 276405 - DNA, 33 bp, Homo sapien
ctaccaacactgtgagaaaatttggatatggaa

SEQ ID NO: 276406 - DNA, 33 bp, Homo sapien
ctaccaacactgtgaggaaatttggatatggaa

SEQ ID NO: 276407 - DNA, 33 bp, Homo sapien
tggaaagagaaagtgaataaatatacgcagcat

SEQ ID NO: 276408 - DNA, 33 bp, Homo sapien
tggaaagagaaagtgagtaaatatacgcagcat

SEQ ID NO: 276409 - DNA, 33 bp, Homo sapien
cagagagatgttgtaccctggctagtgacacct

SEQ ID NO: 276410 - DNA, 33 bp, Homo sapien
cagagagatgttgtactctggctagtgacacct

SEQ ID NO: 276411 - DNA, 33 bp, Homo sapien
ttgcatttacagtttcaatggacagaaaattct

SEQ ID NO: 276412 - DNA, 33 bp, Homo sapien
ttgcatttacagtttcgatggacagaaaattct

SEQ ID NO: 276413 - DNA, 33 bp, Homo sapien
atctccaactacagtaaatctgcaataatttta

SEQ ID NO: 276414 - DNA, 33 bp, Homo sapien
atctccaactacagtacatctgcaataatttta

SEQ ID NO: 276415 - DNA, 33 bp, Homo sapien
aataaaaatggtgtcaaaaatgtaatatactca

SEQ ID NO: 276416 - DNA, 33 bp, Homo sapien
aataaaaatggtgtcagaaatgtaatatactca

SEQ ID NO: 276417 - DNA, 33 bp, Homo sapien
agctttagtggcagtagcacttgaccattatgg

SEQ ID NO: 276418 - DNA, 33 bp, Homo sapien
agctttagtggcagtatcacttgaccattatgg

SEQ ID NO: 276419 - DNA, 33 bp, Homo sapien
cccactatgcatttagcaggacattgaacagaa

SEQ ID NO: 276420 - DNA, 33 bp, Homo sapien
cccactatgcatttagtaggacattgaacagaa

SEQ ID NO: 276421 - DNA, 33 bp, Homo sapien
cagagccacaccccaacttctagattattttct

SEQ ID NO: 276422 - DNA, 33 bp, Homo sapien
cagagccacaccccaatttctagattattttct

SEQ ID NO: 276423 - DNA, 33 bp, Homo sapien
gtcaagttgtcattacaggaatagttaacaaag

SEQ ID NO: 276424 - DNA, 33 bp, Homo sapien
gtcaagttgtcattacgggaatagttaacaaag

SEQ ID NO: 276425 - DNA, 33 bp, Homo sapien
tgggacaatagaggtacaacccagacaactggg

SEQ ID NO: 276426 - DNA, 33 bp, Homo sapien
tgggacaatagaggtagaacccagacaactggg

SEQ ID NO: 276427 - DNA, 33 bp, Homo sapien
ctcccagtttatagcaaaaccaaaaatctccca

SEQ ID NO: 276428 - DNA, 33 bp, Homo sapien
ctcccagtttatagcacaaccaaaaatctccca

SEQ ID NO: 276429 - DNA, 33 bp, Homo sapien
atacagctggcctaataacagtgaggaactaca

SEQ ID NO: 276430 - DNA, 33 bp, Homo sapien
atacagctggcctaatcacagtgaggaactaca

SEQ ID NO: 276431 - DNA, 33 bp, Homo sapien
cccagtctctgtgaaaagtgggagcctaactta

SEQ ID NO: 276432 - DNA, 33 bp, Homo sapien
cccagtctctgtgaaaggtgggagcctaactta

SEQ ID NO: 276433 - DNA, 33 bp, Homo sapien
attaccttgagtacagccacctccaaattaaag

SEQ ID NO: 276434 - DNA, 33 bp, Homo sapien
attaccttgagtacaggcacctccaaattaaag

SEQ ID NO: 276435 - DNA, 33 bp, Homo sapien
caccagtctgtgaaagaagctagtagtgaggct

SEQ ID NO: 276436 - DNA, 33 bp, Homo sapien
caccagtctgtgaaagcagctagtagtgaggct

SEQ ID NO: 276437 - DNA, 33 bp, Homo sapien
tgaattctcttcaattaaaaaaaagtggtgcca

SEQ ID NO: 276438 - DNA, 33 bp, Homo sapien
tgaattctcttcaatttaaaaaaagtggtgcca

SEQ ID NO: 276439 - DNA, 33 bp, Homo sapien
gtttatagtctggaagaagaaaaatttcagtga

SEQ ID NO: 276440 - DNA, 33 bp, Homo sapien
gtttatagtctggaaggagaaaaatttcagtga

SEQ ID NO: 276441 - DNA, 33 bp, Homo sapien
tttattttgagaaaaccgaggaatcagaaagtt

SEQ ID NO: 276442 - DNA, 33 bp, Homo sapien
tttattttgagaaaactgaggaatcagaaagtt

SEQ ID NO: 276443 - DNA, 33 bp, Homo sapien
caggtgctagaaaaaagatcattctgtcatcat

SEQ ID NO: 276444 - DNA, 33 bp, Homo sapien
caggtgctagaaaaaatatcattctgtcatcat

SEQ ID NO: 276445 - DNA, 33 bp, Homo sapien
tactgtgtgatcactaagagtaacagtactgaa

SEQ ID NO: 276446 - DNA, 33 bp, Homo sapien
tactgtgtgatcactaggagtaacagtactgaa

SEQ ID NO: 276447 - DNA, 33 bp, Homo sapien
ctaagtgattcttaccaagtttcaaaaaggaga

SEQ ID NO: 276448 - DNA, 33 bp, Homo sapien
ctaagtgattcttaccgagtttcaaaaaggaga

SEQ ID NO: 276449 - DNA, 33 bp, Homo sapien
ttgttgttcatatttacggtttttggcattttc

SEQ ID NO: 276450 - DNA, 33 bp, Homo sapien
ttgttgttcatatttatggtttttggcattttc

SEQ ID NO: 276451 - DNA, 33 bp, Homo sapien
taaacattttcaaaacacatttacttcttttct

SEQ ID NO: 276452 - DNA, 33 bp, Homo sapien
taaacattttcaaaactcatttacttcttttct

SEQ ID NO: 276453 - DNA, 33 bp, Homo sapien
cagcgattctcttggtcaaaaagcagacaggat

SEQ ID NO: 276454 - DNA, 33 bp, Homo sapien
cagcgattctcttggtgaaaaagcagacaggat

SEQ ID NO: 276455 - DNA, 33 bp, Homo sapien
aagtaatccagacaaactgagcagttagcttct

SEQ ID NO: 276456 - DNA, 33 bp, Homo sapien
aagtaatccagacaaattgagcagttagcttct

SEQ ID NO: 276457 - DNA, 33 bp, Homo sapien
tttagatctgcttagaagtgttggatgcagaaa

SEQ ID NO: 276458 - DNA, 33 bp, Homo sapien
tttagatctgcttagaggtgttggatgcagaaa

SEQ ID NO: 276459 - DNA, 33 bp, Homo sapien
gtgcccacttaagaaacagctgggtcagccaag

SEQ ID NO: 276460 - DNA, 33 bp, Homo sapien
gtgcccacttaagaaagagctgggtcagccaag

SEQ ID NO: 276461 - DNA, 33 bp, Homo sapien
atgatgtgtatgacggacatctctgttaattat

SEQ ID NO: 276462 - DNA, 33 bp, Homo sapien
atgatgtgtatgacggtcatctctgttaattat

SEQ ID NO: 276463 - DNA, 33 bp, Homo sapien
ccatatccctgtgacgcaaaattgatacacatc

SEQ ID NO: 276464 - DNA, 33 bp, Homo sapien
ccatatccctgtgacgtaaaattgatacacatc

SEQ ID NO: 276465 - DNA, 33 bp, Homo sapien
taacatgtgtcaaggacgatactccaaatacct

SEQ ID NO: 276466 - DNA, 33 bp, Homo sapien
taacatgtgtcaaggatgatactccaaatacct

SEQ ID NO: 276467 - DNA, 33 bp, Homo sapien
tatctgcaatgtgccaagccatagaaagagatg

SEQ ID NO: 276468 - DNA, 33 bp, Homo sapien
tatctgcaatgtgccaggccatagaaagagatg

SEQ ID NO: 276469 - DNA, 33 bp, Homo sapien
tatttggaatgttcaaatgaaattaacaaaggc

SEQ ID NO: 276470 - DNA, 33 bp, Homo sapien
tatttggaatgttcaagtgaaattaacaaaggc

SEQ ID NO: 276471 - DNA, 33 bp, Homo sapien
ggccattttcaataacagagtaatggcattttc

SEQ ID NO: 276472 - DNA, 33 bp, Homo sapien
ggccattttcaataacggagtaatggcattttc

SEQ ID NO: 276473 - DNA, 33 bp, Homo sapien
atttacctttcaagaaaccatattaatgaagta

SEQ ID NO: 276474 - DNA, 33 bp, Homo sapien
atttacctttcaagaacccatattaatgaagta

SEQ ID NO: 276475 - DNA, 33 bp, Homo sapien
catgcttattctaatcaacaaaaataacccttc

SEQ ID NO: 276476 - DNA, 33 bp, Homo sapien
catgcttattctaatccacaaaaataacccttc

SEQ ID NO: 276477 - DNA, 33 bp, Homo sapien
gtcaaaaccttgtctgcagtgaaaattagccag

SEQ ID NO: 276478 - DNA, 33 bp, Homo sapien
gtcaaaaccttgtctgtagtgaaaattagccag

SEQ ID NO: 276479 - DNA, 33 bp, Homo sapien
tgaaagaagccaaaacaaagcccaataagccaa

SEQ ID NO: 276480 - DNA, 33 bp, Homo sapien
tgaaagaagccaaaacgaagcccaataagccaa

SEQ ID NO: 276481 - DNA, 33 bp, Homo sapien
atgtaaatcttctacaaatcaggaatgtcttcc

SEQ ID NO: 276482 - DNA, 33 bp, Homo sapien
atgtaaatcttctacacatcaggaatgtcttcc

SEQ ID NO: 276483 - DNA, 33 bp, Homo sapien
ttgtcagtaggcagtacatatgcagaacgtaaa

SEQ ID NO: 276484 - DNA, 33 bp, Homo sapien
ttgtcagtaggcagtatatatgcagaacgtaaa

SEQ ID NO: 276485 - DNA, 33 bp, Homo sapien
ttctctaagacttctacggtataagctaccttc

SEQ ID NO: 276486 - DNA, 33 bp, Homo sapien
ttctctaagacttctatggtataagctaccttc

SEQ ID NO: 276487 - DNA, 33 bp, Homo sapien
tgttgtagatgcctcaatgaagtgaagtgttta

SEQ ID NO: 276488 - DNA, 33 bp, Homo sapien
tgttgtagatgcctcagtgaagtgaagtgttta

SEQ ID NO: 276489 - DNA, 33 bp, Homo sapien
taaaataggattgccaagtttaacttttcagaa

SEQ ID NO: 276490 - DNA, 33 bp, Homo sapien
taaaataggattgccaggtttaacttttcagaa

SEQ ID NO: 276491 - DNA, 33 bp, Homo sapien
gtaacaaatataacagccaagtatgagaaaaat

SEQ ID NO: 276492 - DNA, 33 bp, Homo sapien
gtaacaaatataacagtcaagtatgagaaaaat

SEQ ID NO: 276493 - DNA, 33 bp, Homo sapien
acaaggcttgttaatcaaaatctctacagaccc

SEQ ID NO: 276494 - DNA, 33 bp, Homo sapien
acaaggcttgttaatccaaatctctacagaccc

SEQ ID NO: 276495 - DNA, 33 bp, Homo sapien
tgtcaaattgggcaaactaatatagattcagag

SEQ ID NO: 276496 - DNA, 33 bp, Homo sapien
tgtcaaattgggcaaagtaatatagattcagag

SEQ ID NO: 276497 - DNA, 33 bp, Homo sapien
aactgttataatgttacgaagtattggactatt

SEQ ID NO: 276498 - DNA, 33 bp, Homo sapien
aactgttataatgttatgaagtattggactatt

SEQ ID NO: 276499 - DNA, 33 bp, Homo sapien
ggcatttagcctgttaacatttcagtttaatgt

SEQ ID NO: 276500 - DNA, 33 bp, Homo sapien
ggcatttagcctgttatcatttcagtttaatgt

SEQ ID NO: 276501 - DNA, 33 bp, Homo sapien
tgatagataatcctgaagacctgaacatctatc

SEQ ID NO: 276502 - DNA, 33 bp, Homo sapien
tgatagataatcctgatgacctgaacatctatc

SEQ ID NO: 276503 - DNA, 33 bp, Homo sapien
tcaaagtaggcataaaaatctttcacttaaagt

SEQ ID NO: 276504 - DNA, 33 bp, Homo sapien
tcaaagtaggcataaagatctttcacttaaagt

SEQ ID NO: 276505 - DNA, 33 bp, Homo sapien
tgtttgatccatgcagaccaattttgaagtcac

SEQ ID NO: 276506 - DNA, 33 bp, Homo sapien
tgtttgatccatgcaggccaattttgaagtcac

SEQ ID NO: 276507 - DNA, 33 bp, Homo sapien
catcatctacaaattaaacctaatgatacctgc

SEQ ID NO: 276508 - DNA, 33 bp, Homo sapien
catcatctacaaattagacctaatgatacctgc

SEQ ID NO: 276509 - DNA, 33 bp, Homo sapien
attctaacatttgaccaatgctacaactttaag

SEQ ID NO: 276510 - DNA, 33 bp, Homo sapien
attctaacatttgaccgatgctacaactttaag

SEQ ID NO: 276511 - DNA, 33 bp, Homo sapien
tgagatgatttttgaaagagtggagtcagattt

SEQ ID NO: 276512 - DNA, 33 bp, Homo sapien
tgagatgatttttgaaggagtggagtcagattt

SEQ ID NO: 276513 - DNA, 33 bp, Homo sapien
gtggtagatgtgctcaatgaaattttatgcagc

SEQ ID NO: 276514 - DNA, 33 bp, Homo sapien
gtggtagatgtgctcagtgaaattttatgcagc

SEQ ID NO: 276515 - DNA, 33 bp, Homo sapien
agtaactttaacaagaaatagaaactcatgcag

SEQ ID NO: 276516 - DNA, 33 bp, Homo sapien
agtaactttaacaagacatagaaactcatgcag

SEQ ID NO: 276517 - DNA, 33 bp, Homo sapien
tcaacctaaaactgtgaaaaaccagagttaact

SEQ ID NO: 276518 - DNA, 33 bp, Homo sapien
tcaacctaaaactgtggaaaaccagagttaact

SEQ ID NO: 276519 - DNA, 33 bp, Homo sapien
cctcccttcctcacaacatttttggatattagt

SEQ ID NO: 276520 - DNA, 33 bp, Homo sapien
cctcccttcctcacaatatttttggatattagt

SEQ ID NO: 276521 - DNA, 33 bp, Homo sapien
aacctcttacagatgcagagattttagattttg

SEQ ID NO: 276522 - DNA, 33 bp, Homo sapien
aacctcttacagatgcggagattttagattttg

SEQ ID NO: 276523 - DNA, 33 bp, Homo sapien
cagctttcctggtgccaaaccatacacagcatc

SEQ ID NO: 276524 - DNA, 33 bp, Homo sapien
cagctttcctggtgccgaaccatacacagcatc

SEQ ID NO: 276525 - DNA, 33 bp, Homo sapien
tatgcccctagtacaacttattacttcaaacat

SEQ ID NO: 276526 - DNA, 33 bp, Homo sapien
tatgcccctagtacaagttattacttcaaacat

SEQ ID NO: 276527 - DNA, 33 bp, Homo sapien
atatatgcctccaacaacattgtctccatcacc

SEQ ID NO: 276528 - DNA, 33 bp, Homo sapien
atatatgcctccaacagcattgtctccatcacc

SEQ ID NO: 276529 - DNA, 33 bp, Homo sapien
tttaagacgttcaaaacaaaagatgctaaaaat

SEQ ID NO: 276530 - DNA, 33 bp, Homo sapien
tttaagacgttcaaaagaaaagatgctaaaaat

SEQ ID NO: 276531 - DNA, 33 bp, Homo sapien
tcagcattgtcccgaaactccttaggtcttcct

SEQ ID NO: 276532 - DNA, 33 bp, Homo sapien
tcagcattgtcccgaacctccttaggtcttcct

SEQ ID NO: 276533 - DNA, 33 bp, Homo sapien
gcatcacaggttttcacgtggctttgaacctga

SEQ ID NO: 276534 - DNA, 33 bp, Homo sapien
gcatcacaggttttcatgtggctttgaacctga

SEQ ID NO: 276535 - DNA, 33 bp, Homo sapien
cagtcatgtccaaacccggaactcatccctaag

SEQ ID NO: 276536 - DNA, 33 bp, Homo sapien
cagtcatgtccaaacctggaactcatccctaag

SEQ ID NO: 276537 - DNA, 33 bp, Homo sapien
ctgtcctgattttcaaacattttagctcagcaa

SEQ ID NO: 276538 - DNA, 33 bp, Homo sapien
ctgtcctgattttcaagcattttagctcagcaa

SEQ ID NO: 276539 - DNA, 33 bp, Homo sapien
gtctagtgacagagaaagactacatcacaaaac

SEQ ID NO: 276540 - DNA, 33 bp, Homo sapien
gtctagtgacagagaaggactacatcacaaaac

SEQ ID NO: 276541 - DNA, 33 bp, Homo sapien
gtctgcttttctagtccctcatattaaaccact

SEQ ID NO: 276542 - DNA, 33 bp, Homo sapien
gtctgcttttctagtctctcatattaaaccact

SEQ ID NO: 276543 - DNA, 33 bp, Homo sapien
tacaaaatagacatgacataaaagttgtctgaa

SEQ ID NO: 276544 - DNA, 33 bp, Homo sapien
tacaaaatagacatgatataaaagttgtctgaa

SEQ ID NO: 276545 - DNA, 33 bp, Homo sapien
cattgtccacaactagaaagttcgaggaaatta

SEQ ID NO: 276546 - DNA, 33 bp, Homo sapien
cattgtccacaactaggaagttcgaggaaatta

SEQ ID NO: 276547 - DNA, 33 bp, Homo sapien
atttcccgattcttcaatattcacatctcctgg

SEQ ID NO: 276548 - DNA, 33 bp, Homo sapien
atttcccgattcttcattattcacatctcctgg

SEQ ID NO: 276549 - DNA, 33 bp, Homo sapien
gatactgtgttaaaaacatagattaatgtagac

SEQ ID NO: 276550 - DNA, 33 bp, Homo sapien
gatactgtgttaaaaatatagattaatgtagac

SEQ ID NO: 276551 - DNA, 33 bp, Homo sapien
gtgaaggtagtggatgcaaactatttttctgag

SEQ ID NO: 276552 - DNA, 33 bp, Homo sapien
gtgaaggtagtggatgtaaactatttttctgag

SEQ ID NO: 276553 - DNA, 33 bp, Homo sapien
atttaaaggacatctaagtttgcttgaaccatt

SEQ ID NO: 276554 - DNA, 33 bp, Homo sapien
atttaaaggacatctaggtttgcttgaaccatt

SEQ ID NO: 276555 - DNA, 33 bp, Homo sapien
tcagcctgttcacaaagaggttcattttgcttt

SEQ ID NO: 276556 - DNA, 33 bp, Homo sapien
tcagcctgttcacaaataggttcattttgcttt

SEQ ID NO: 276557 - DNA, 33 bp, Homo sapien
attctccactgaactaaacactaaagcagcata

SEQ ID NO: 276558 - DNA, 33 bp, Homo sapien
attctccactgaactagacactaaagcagcata

SEQ ID NO: 276559 - DNA, 33 bp, Homo sapien
agggaccaacacaatggaaggagctggaccttg

SEQ ID NO: 276560 - DNA, 33 bp, Homo sapien
agggaccaacacaatgtaaggagctggaccttg

SEQ ID NO: 276561 - DNA, 33 bp, Homo sapien
gatataatagaatctaactatctgcttttttcc

SEQ ID NO: 276562 - DNA, 33 bp, Homo sapien
gatataatagaatctacctatctgcttttttcc

SEQ ID NO: 276563 - DNA, 33 bp, Homo sapien
aaattgaccagagaacaaacatagttgttgctc

SEQ ID NO: 276564 - DNA, 33 bp, Homo sapien
aaattgaccagagaaccaacatagttgttgctc

SEQ ID NO: 276565 - DNA, 33 bp, Homo sapien
acagcactagaagctacattgaagtctccaata

SEQ ID NO: 276566 - DNA, 33 bp, Homo sapien
acagcactagaagctatattgaagtctccaata

SEQ ID NO: 276567 - DNA, 33 bp, Homo sapien
cttctttatctcatacagcaacaaaacaaaggc

SEQ ID NO: 276568 - DNA, 33 bp, Homo sapien
cttctttatctcatacggcaacaaaacaaaggc

SEQ ID NO: 276569 - DNA, 33 bp, Homo sapien
aggggcttccattacaaatgcaatttttgtggc

SEQ ID NO: 276570 - DNA, 33 bp, Homo sapien
aggggcttccattacatatgcaatttttgtggc

SEQ ID NO: 276571 - DNA, 33 bp, Homo sapien
gtactgtattttcaggaagctactttcacatag

SEQ ID NO: 276572 - DNA, 33 bp, Homo sapien
gtactgtattttcaggcagctactttcacatag

SEQ ID NO: 276573 - DNA, 33 bp, Homo sapien
gaatggttcagcaataaaacagaagtgaacttg

SEQ ID NO: 276574 - DNA, 33 bp, Homo sapien
gaatggttcagcaatacaacagaagtgaacttg

SEQ ID NO: 276575 - DNA, 33 bp, Homo sapien
ctttacttgatgtttaaaaatatgtacttcact

SEQ ID NO: 276576 - DNA, 33 bp, Homo sapien
ctttacttgatgtttataaatatgtacttcact

SEQ ID NO: 276577 - DNA, 33 bp, Homo sapien
taatcttgatagaaaagtatccactgaaaatat

SEQ ID NO: 276578 - DNA, 33 bp, Homo sapien
taatcttgatagaaaattatccactgaaaatat

SEQ ID NO: 276579 - DNA, 33 bp, Homo sapien
acatgtttaatgtgtacgcatagtcagaactag

SEQ ID NO: 276580 - DNA, 33 bp, Homo sapien
acatgtttaatgtgtatgcatagtcagaactag

SEQ ID NO: 276581 - DNA, 33 bp, Homo sapien
actttttcaagcacaactcattattctgagaac

SEQ ID NO: 276582 - DNA, 33 bp, Homo sapien
actttttcaagcacaattcattattctgagaac

SEQ ID NO: 276583 - DNA, 33 bp, Homo sapien
tctatcagtgctaaggaaaatgcacacatctcc

SEQ ID NO: 276584 - DNA, 33 bp, Homo sapien
tctatcagtgctaaggtaaatgcacacatctcc

SEQ ID NO: 276585 - DNA, 33 bp, Homo sapien
gtgaaagaccaaacaacaatcagtgaaagacca

SEQ ID NO: 276586 - DNA, 33 bp, Homo sapien
gtgaaagaccaaacaataatcagtgaaagacca

SEQ ID NO: 276587 - DNA, 33 bp, Homo sapien
ctggtattcctacttccaccatagaaatgccag

SEQ ID NO: 276588 - DNA, 33 bp, Homo sapien
ctggtattcctacttctaccatagaaatgccag

SEQ ID NO: 276589 - DNA, 33 bp, Homo sapien
tatttcttacccattcaattttatcctgtggga

SEQ ID NO: 276590 - DNA, 33 bp, Homo sapien
tatttcttacccattccattttatcctgtggga

SEQ ID NO: 276591 - DNA, 33 bp, Homo sapien
ttttggattttattaacaggaaatgtgtgcatg

SEQ ID NO: 276592 - DNA, 33 bp, Homo sapien
ttttggattttattaagaggaaatgtgtgcatg

SEQ ID NO: 276593 - DNA, 33 bp, Homo sapien
gatttctcacgggaaaagttacctgtctcctcc

SEQ ID NO: 276594 - DNA, 33 bp, Homo sapien
gatttctcacgggaaatgttacctgtctcctcc

SEQ ID NO: 276595 - DNA, 33 bp, Homo sapien
gccacctgaacacaaaatcacttaatcatacgg

SEQ ID NO: 276596 - DNA, 33 bp, Homo sapien
gccacctgaacacaaagtcacttaatcatacgg

SEQ ID NO: 276597 - DNA, 33 bp, Homo sapien
aatccagtattgaagcaattctttggaatccag

SEQ ID NO: 276598 - DNA, 33 bp, Homo sapien
aatccagtattgaagcgattctttggaatccag

SEQ ID NO: 276599 - DNA, 33 bp, Homo sapien
ataacttaagtggaggaataaaccacattaaac

SEQ ID NO: 276600 - DNA, 33 bp, Homo sapien
ataacttaagtggagggataaaccacattaaac

SEQ ID NO: 276601 - DNA, 33 bp, Homo sapien
caatgtgcggcttcagaatcatttactaattaa

SEQ ID NO: 276602 - DNA, 33 bp, Homo sapien
caatgtgcggcttcaggatcatttactaattaa

SEQ ID NO: 276603 - DNA, 33 bp, Homo sapien
gatggaaattactgtacgccaattagtatatat

SEQ ID NO: 276604 - DNA, 33 bp, Homo sapien
gatggaaattactgtaggccaattagtatatat

SEQ ID NO: 276605 - DNA, 33 bp, Homo sapien
tataagtttctaggaggcatactgttgtctact

SEQ ID NO: 276606 - DNA, 33 bp, Homo sapien
tataagtttctaggagtcatactgttgtctact

SEQ ID NO: 276607 - DNA, 33 bp, Homo sapien
tatatgatgaaagaacaaaagaattgagaattg

SEQ ID NO: 276608 - DNA, 33 bp, Homo sapien
tatatgatgaaagaacgaaagaattgagaattg

SEQ ID NO: 276609 - DNA, 33 bp, Homo sapien
atatatttggaaaaaaattcacattatgtattt

SEQ ID NO: 276610 - DNA, 33 bp, Homo sapien
atatatttggaaaaaatttcacattatgtattt

SEQ ID NO: 276611 - DNA, 33 bp, Homo sapien
ataaaaacctatactcacattttgcaaattttt

SEQ ID NO: 276612 - DNA, 33 bp, Homo sapien
ataaaaacctatactcgcattttgcaaattttt

SEQ ID NO: 276613 - DNA, 33 bp, Homo sapien
attgattcattttccaactattcaaagtcggta

SEQ ID NO: 276614 - DNA, 33 bp, Homo sapien
attgattcattttccagctattcaaagtcggta

SEQ ID NO: 276615 - DNA, 33 bp, Homo sapien
caggtgagtcaggtgaactaactttcaaaagca

SEQ ID NO: 276616 - DNA, 33 bp, Homo sapien
caggtgagtcaggtgagctaactttcaaaagca

SEQ ID NO: 276617 - DNA, 33 bp, Homo sapien
tatgcacatgtgtttaagagttcagattcctaa

SEQ ID NO: 276618 - DNA, 33 bp, Homo sapien
tatgcacatgtgtttacgagttcagattcctaa

SEQ ID NO: 276619 - DNA, 33 bp, Homo sapien
agtatagaatgaaatcaatcaatcaactatttc

SEQ ID NO: 276620 - DNA, 33 bp, Homo sapien
agtatagaatgaaatcgatcaatcaactatttc

SEQ ID NO: 276621 - DNA, 33 bp, Homo sapien
agacatattgcactaaagttttaaattatgtta

SEQ ID NO: 276622 - DNA, 33 bp, Homo sapien
agacatattgcactaaggttttaaattatgtta

SEQ ID NO: 276623 - DNA, 33 bp, Homo sapien
ttgcctgcagcccacaaagttgtgttctgatat

SEQ ID NO: 276624 - DNA, 33 bp, Homo sapien
ttgcctgcagcccacatagttgtgttctgatat

SEQ ID NO: 276625 - DNA, 33 bp, Homo sapien
aaaaaaaagtatgtaaatgatgactatgcattt

SEQ ID NO: 276626 - DNA, 33 bp, Homo sapien
aaaaaaaagtatgtaagtgatgactatgcattt

SEQ ID NO: 276627 - DNA, 33 bp, Homo sapien
gtacaatttatctttacgtatgtgagagcctgt

SEQ ID NO: 276628 - DNA, 33 bp, Homo sapien
gtacaatttatctttatgtatgtgagagcctgt

SEQ ID NO: 276629 - DNA, 33 bp, Homo sapien
ttgttgtggtacaatacagataacatgaattta

SEQ ID NO: 276630 - DNA, 33 bp, Homo sapien
ttgttgtggtacaatatagataacatgaattta

SEQ ID NO: 276631 - DNA, 33 bp, Homo sapien
ctaggccaaacaaaaacacaatcatggtaatta

SEQ ID NO: 276632 - DNA, 33 bp, Homo sapien
ctaggccaaacaaaaagacaatcatggtaatta

SEQ ID NO: 276633 - DNA, 33 bp, Homo sapien
ttagattaatacccacccaagtcctttcactct

SEQ ID NO: 276634 - DNA, 33 bp, Homo sapien
ttagattaatacccactcaagtcctttcactct

SEQ ID NO: 276635 - DNA, 33 bp, Homo sapien
gagataggctaactagaagtgaagcatcttatg

SEQ ID NO: 276636 - DNA, 33 bp, Homo sapien
gagataggctaactagtagtgaagcatcttatg

SEQ ID NO: 276637 - DNA, 33 bp, Homo sapien
ttgggtagtcattatacagttcaaccaatgttt

SEQ ID NO: 276638 - DNA, 33 bp, Homo sapien
ttgggtagtcattatatagttcaaccaatgttt

SEQ ID NO: 276639 - DNA, 33 bp, Homo sapien
tgttctggttcttttacctgattccaaaatgtt

SEQ ID NO: 276640 - DNA, 33 bp, Homo sapien
tgttctggttcttttatctgattccaaaatgtt

SEQ ID NO: 276641 - DNA, 33 bp, Homo sapien
tgagatctttctgggaactccaagttgatattt

SEQ ID NO: 276642 - DNA, 33 bp, Homo sapien
tgagatctttctgggacctccaagttgatattt

SEQ ID NO: 276643 - DNA, 33 bp, Homo sapien
aattgcaaaatctgagaacacagtcgttaagaa

SEQ ID NO: 276644 - DNA, 33 bp, Homo sapien
aattgcaaaatctgaggacacagtcgttaagaa

SEQ ID NO: 276645 - DNA, 33 bp, Homo sapien
tcatatcttgctgtgacaattaatccgacagct

SEQ ID NO: 276646 - DNA, 33 bp, Homo sapien
tcatatcttgctgtgataattaatccgacagct

SEQ ID NO: 276647 - DNA, 33 bp, Homo sapien
ttttagccactgtgtcgctacttgatcacatga

SEQ ID NO: 276648 - DNA, 33 bp, Homo sapien
ttttagccactgtgtctctacttgatcacatga

SEQ ID NO: 276649 - DNA, 33 bp, Homo sapien
caaaccacattagagaagttgaagctctttgtg

SEQ ID NO: 276650 - DNA, 33 bp, Homo sapien
caaaccacattagagatgttgaagctctttgtg

SEQ ID NO: 276651 - DNA, 33 bp, Homo sapien
atactacatcataatcaacaatcatttatgaaa

SEQ ID NO: 276652 - DNA, 33 bp, Homo sapien
atactacatcataatcgacaatcatttatgaaa

SEQ ID NO: 276653 - DNA, 33 bp, Homo sapien
aagactctttacttcaatcatggatatggtccc

SEQ ID NO: 276654 - DNA, 33 bp, Homo sapien
aagactctttacttcactcatggatatggtccc

SEQ ID NO: 276655 - DNA, 33 bp, Homo sapien
tgagcctagagctgcaatataaaagatcatatt

SEQ ID NO: 276656 - DNA, 33 bp, Homo sapien
tgagcctagagctgcagtataaaagatcatatt

SEQ ID NO: 276657 - DNA, 33 bp, Homo sapien
atgtctggggaaacaacgatgaacaaaacaatg

SEQ ID NO: 276658 - DNA, 33 bp, Homo sapien
atgtctggggaaacaaggatgaacaaaacaatg

SEQ ID NO: 276659 - DNA, 33 bp, Homo sapien
aaatattgattaatacaaaggacccactgaagg

SEQ ID NO: 276660 - DNA, 33 bp, Homo sapien
aaatattgattaataccaaggacccactgaagg

SEQ ID NO: 276661 - DNA, 33 bp, Homo sapien
aaattcttgttgaagacggtagaactgcccttc

SEQ ID NO: 276662 - DNA, 33 bp, Homo sapien
aaattcttgttgaagatggtagaactgcccttc

SEQ ID NO: 276663 - DNA, 33 bp, Homo sapien
caaagtttgatgtagacataaaagcacagaaaa

SEQ ID NO: 276664 - DNA, 33 bp, Homo sapien
caaagtttgatgtagatataaaagcacagaaaa

SEQ ID NO: 276665 - DNA, 33 bp, Homo sapien
attcaatcataaaaaactggaagatcttgctct

SEQ ID NO: 276666 - DNA, 33 bp, Homo sapien
attcaatcataaaaaattggaagatcttgctct

SEQ ID NO: 276667 - DNA, 33 bp, Homo sapien
cattattagatgcacactgattaagaaaaccct

SEQ ID NO: 276668 - DNA, 33 bp, Homo sapien
cattattagatgcacattgattaagaaaaccct

SEQ ID NO: 276669 - DNA, 33 bp, Homo sapien
ttttgttgtatttttaacgctatttcagagttc

SEQ ID NO: 276670 - DNA, 33 bp, Homo sapien
ttttgttgtatttttagcgctatttcagagttc

SEQ ID NO: 276671 - DNA, 33 bp, Homo sapien
ctttattaagtctcaaccagccatcaaacaaac

SEQ ID NO: 276672 - DNA, 33 bp, Homo sapien
ctttattaagtctcaatcagccatcaaacaaac

SEQ ID NO: 276673 - DNA, 33 bp, Homo sapien
agatgtggtcttgttgaatttctaattgcaaag

SEQ ID NO: 276674 - DNA, 33 bp, Homo sapien
agatgtggtcttgttggatttctaattgcaaag

SEQ ID NO: 276675 - DNA, 33 bp, Homo sapien
ttttacagttgtgggagctgacgtgaagacaaa

SEQ ID NO: 276676 - DNA, 33 bp, Homo sapien
ttttacagttgtgggatctgacgtgaagacaaa

SEQ ID NO: 276677 - DNA, 33 bp, Homo sapien
agcatccatttgcatacatctcaaaatcttgtg

SEQ ID NO: 276678 - DNA, 33 bp, Homo sapien
agcatccatttgcatatatctcaaaatcttgtg

SEQ ID NO: 276679 - DNA, 33 bp, Homo sapien
tatttttagcagactaccacaatttaaattaac

SEQ ID NO: 276680 - DNA, 33 bp, Homo sapien
tatttttagcagactatcacaatttaaattaac

SEQ ID NO: 276681 - DNA, 33 bp, Homo sapien
gaaataatatttctaaatgtcacaaaggggctc

SEQ ID NO: 276682 - DNA, 33 bp, Homo sapien
gaaataatatttctaagtgtcacaaaggggctc

SEQ ID NO: 276683 - DNA, 33 bp, Homo sapien
tagaagattaaagagcagagagtatttttatta

SEQ ID NO: 276684 - DNA, 33 bp, Homo sapien
tagaagattaaagagcggagagtatttttatta

SEQ ID NO: 276685 - DNA, 33 bp, Homo sapien
catgatagaggaatgagacgcaaataattaatg

SEQ ID NO: 276686 - DNA, 33 bp, Homo sapien
catgatagaggaatgatacgcaaataattaatg

SEQ ID NO: 276687 - DNA, 33 bp, Homo sapien
tctttaatactctgcaaagcctcatatgaccat

SEQ ID NO: 276688 - DNA, 33 bp, Homo sapien
tctttaatactctgcacagcctcatatgaccat

SEQ ID NO: 276689 - DNA, 33 bp, Homo sapien
gtggtagtcacaacacacgattaatgaacattt

SEQ ID NO: 276690 - DNA, 33 bp, Homo sapien
gtggtagtcacaacacgcgattaatgaacattt

SEQ ID NO: 276691 - DNA, 33 bp, Homo sapien
ggggtaaatacttctaagatatctccacttctc

SEQ ID NO: 276692 - DNA, 33 bp, Homo sapien
ggggtaaatacttctaggatatctccacttctc

SEQ ID NO: 276693 - DNA, 33 bp, Homo sapien
gcataggagtccataaaagcaagctttccccta

SEQ ID NO: 276694 - DNA, 33 bp, Homo sapien
gcataggagtccataagagcaagctttccccta

SEQ ID NO: 276695 - DNA, 33 bp, Homo sapien
tgacagcttcctcaaactagttggcttctctgg

SEQ ID NO: 276696 - DNA, 33 bp, Homo sapien
tgacagcttcctcaaattagttggcttctctgg

SEQ ID NO: 276697 - DNA, 33 bp, Homo sapien
gaattactctttgtagccaattgttatgcaaat

SEQ ID NO: 276698 - DNA, 33 bp, Homo sapien
gaattactctttgtagtcaattgttatgcaaat

SEQ ID NO: 276699 - DNA, 33 bp, Homo sapien
tttgtctagaagcaacccattttctattcttat

SEQ ID NO: 276700 - DNA, 33 bp, Homo sapien
tttgtctagaagcaactcattttctattcttat

SEQ ID NO: 276701 - DNA, 33 bp, Homo sapien
acataaatcattcatggaaacaaagcaattcta

SEQ ID NO: 276702 - DNA, 33 bp, Homo sapien
acataaatcattcatgtaaacaaagcaattcta

SEQ ID NO: 276703 - DNA, 33 bp, Homo sapien
aacaaatgcacacatgcatccgtctttataaga

SEQ ID NO: 276704 - DNA, 33 bp, Homo sapien
aacaaatgcacacatgtatccgtctttataaga

SEQ ID NO: 276705 - DNA, 33 bp, Homo sapien
ctgctgttctaaaacactgtgtactgtctgata

SEQ ID NO: 276706 - DNA, 33 bp, Homo sapien
ctgctgttctaaaacattgtgtactgtctgata

SEQ ID NO: 276707 - DNA, 33 bp, Homo sapien
atggcattattgaaaaagaaagattctgtgggt

SEQ ID NO: 276708 - DNA, 33 bp, Homo sapien
atggcattattgaaaatgaaagattctgtgggt

SEQ ID NO: 276709 - DNA, 33 bp, Homo sapien
actttatagaacataactattgcatataacaag

SEQ ID NO: 276710 - DNA, 33 bp, Homo sapien
actttatagaacataagtattgcatataacaag

SEQ ID NO: 276711 - DNA, 33 bp, Homo sapien
tttctacaatcatataccctaataaccaggtac

SEQ ID NO: 276712 - DNA, 33 bp, Homo sapien
tttctacaatcatatatcctaataaccaggtac

SEQ ID NO: 276713 - DNA, 33 bp, Homo sapien
atggatttaccttgtacgtggggcatacactat

SEQ ID NO: 276714 - DNA, 33 bp, Homo sapien
atggatttaccttgtaggtggggcatacactat

SEQ ID NO: 276715 - DNA, 33 bp, Homo sapien
tatgggttttacattcactatttaaatgctcac

SEQ ID NO: 276716 - DNA, 33 bp, Homo sapien
tatgggttttacattcgctatttaaatgctcac

SEQ ID NO: 276717 - DNA, 33 bp, Homo sapien
tttgacctatgggatacctgtgttaaaatatca

SEQ ID NO: 276718 - DNA, 33 bp, Homo sapien
tttgacctatgggatatctgtgttaaaatatca

SEQ ID NO: 276719 - DNA, 33 bp, Homo sapien
ttgcctttactcatctcactgtttcatgctctg

SEQ ID NO: 276720 - DNA, 33 bp, Homo sapien
ttgcctttactcatctgactgtttcatgctctg

SEQ ID NO: 276721 - DNA, 33 bp, Homo sapien
aatactggcctaggtcacgcatgatcctatgtg

SEQ ID NO: 276722 - DNA, 33 bp, Homo sapien
aatactggcctaggtctcgcatgatcctatgtg

SEQ ID NO: 276723 - DNA, 33 bp, Homo sapien
tatgagggaattgaacagaaggactaaagacac

SEQ ID NO: 276724 - DNA, 33 bp, Homo sapien
tatgagggaattgaacggaaggactaaagacac

SEQ ID NO: 276725 - DNA, 33 bp, Homo sapien
tttcccgaggctaaacaaatgtacttgagcaat

SEQ ID NO: 276726 - DNA, 33 bp, Homo sapien
tttcccgaggctaaacgaatgtacttgagcaat

SEQ ID NO: 276727 - DNA, 33 bp, Homo sapien
tgtgtattctgaaacaccaattatctggagaga

SEQ ID NO: 276728 - DNA, 33 bp, Homo sapien
tgtgtattctgaaacatcaattatctggagaga

SEQ ID NO: 276729 - DNA, 33 bp, Homo sapien
ggtatgtaaagaaaccaaaagagattacagaaa

SEQ ID NO: 276730 - DNA, 33 bp, Homo sapien
ggtatgtaaagaaaccgaaagagattacagaaa

SEQ ID NO: 276731 - DNA, 33 bp, Homo sapien
tccttacattcttgaaatatatccatgtaacca

SEQ ID NO: 276732 - DNA, 33 bp, Homo sapien
tccttacattcttgaagtatatccatgtaacca

SEQ ID NO: 276733 - DNA, 33 bp, Homo sapien
agcataggtactcagaacagcattttgaagagg

SEQ ID NO: 276734 - DNA, 33 bp, Homo sapien
agcataggtactcagatcagcattttgaagagg

SEQ ID NO: 276735 - DNA, 33 bp, Homo sapien
tgaggaaatcatctaaaaccatattacacattg

SEQ ID NO: 276736 - DNA, 33 bp, Homo sapien
tgaggaaatcatctaagaccatattacacattg

SEQ ID NO: 276737 - DNA, 33 bp, Homo sapien
agtacatttcagtaaaaatagggaaacacagag

SEQ ID NO: 276738 - DNA, 33 bp, Homo sapien
agtacatttcagtaaagatagggaaacacagag

SEQ ID NO: 276739 - DNA, 33 bp, Homo sapien
gccaccactgttctaactattcaagctgacatt

SEQ ID NO: 276740 - DNA, 33 bp, Homo sapien
gccaccactgttctaattattcaagctgacatt

SEQ ID NO: 276741 - DNA, 33 bp, Homo sapien
ccactatagtgctataagactgcttcacagaca

SEQ ID NO: 276742 - DNA, 33 bp, Homo sapien
ccactatagtgctatatgactgcttcacagaca

SEQ ID NO: 276743 - DNA, 33 bp, Homo sapien
cttcctacaaaaaaaggcaagaattctagtgta

SEQ ID NO: 276744 - DNA, 33 bp, Homo sapien
cttcctacaaaaaaagtcaagaattctagtgta

SEQ ID NO: 276745 - DNA, 33 bp, Homo sapien
ctctgcacttactgcacggactcctacaatttt

SEQ ID NO: 276746 - DNA, 33 bp, Homo sapien
ctctgcacttactgcatggactcctacaatttt

SEQ ID NO: 276747 - DNA, 33 bp, Homo sapien
gtatgttcaagatgaaaaggcaccccaatttga

SEQ ID NO: 276748 - DNA, 33 bp, Homo sapien
gtatgttcaagatgaagaggcaccccaatttga

SEQ ID NO: 276749 - DNA, 33 bp, Homo sapien
aaaagtgaatttgacgcagcgtacaatatggtt

SEQ ID NO: 276750 - DNA, 33 bp, Homo sapien
aaaagtgaatttgacggagcgtacaatatggtt

SEQ ID NO: 276751 - DNA, 33 bp, Homo sapien
ttatgcaatgttttgcacctctcttcatagtac

SEQ ID NO: 276752 - DNA, 33 bp, Homo sapien
ttatgcaatgttttgcgcctctcttcatagtac

SEQ ID NO: 276753 - DNA, 33 bp, Homo sapien
agtcaacgtccaatgaaatatgggtttatcaat

SEQ ID NO: 276754 - DNA, 33 bp, Homo sapien
agtcaacgtccaatgacatatgggtttatcaat

SEQ ID NO: 276755 - DNA, 33 bp, Homo sapien
tggaattcagagcctcaaaaagtgaatgttata

SEQ ID NO: 276756 - DNA, 33 bp, Homo sapien
tggaattcagagcctcgaaaagtgaatgttata

SEQ ID NO: 276757 - DNA, 33 bp, Homo sapien
actcacccttattttcactgagataatccaatg

SEQ ID NO: 276758 - DNA, 33 bp, Homo sapien
actcacccttattttccctgagataatccaatg

SEQ ID NO: 276759 - DNA, 33 bp, Homo sapien
gctatcctgatgcctgacagaaaccaaaataca

SEQ ID NO: 276760 - DNA, 33 bp, Homo sapien
gctatcctgatgcctggcagaaaccaaaataca

SEQ ID NO: 276761 - DNA, 33 bp, Homo sapien
gtaagggctggttataagagacattgcagagac

SEQ ID NO: 276762 - DNA, 33 bp, Homo sapien
gtaagggctggttataggagacattgcagagac

SEQ ID NO: 276763 - DNA, 33 bp, Homo sapien
aaatcacccatgaaatcaccactcagaaataac

SEQ ID NO: 276764 - DNA, 33 bp, Homo sapien
aaatcacccatgaaattaccactcagaaataac

SEQ ID NO: 276765 - DNA, 33 bp, Homo sapien
taggaacatagatgaacgagagattacttttcc

SEQ ID NO: 276766 - DNA, 33 bp, Homo sapien
taggaacatagatgaatgagagattacttttcc

SEQ ID NO: 276767 - DNA, 33 bp, Homo sapien
tactcctcacaaatgcaatactcgtaccactga

SEQ ID NO: 276768 - DNA, 33 bp, Homo sapien
tactcctcacaaatgctatactcgtaccactga

SEQ ID NO: 276769 - DNA, 33 bp, Homo sapien
actttctagcataaaaacatagaccaaaacatg

SEQ ID NO: 276770 - DNA, 33 bp, Homo sapien
actttctagcataaaagcatagaccaaaacatg

SEQ ID NO: 276771 - DNA, 33 bp, Homo sapien
gattagtgggtttagaactttatgtaggaatag

SEQ ID NO: 276772 - DNA, 33 bp, Homo sapien
gattagtgggtttagagctttatgtaggaatag

SEQ ID NO: 276773 - DNA, 33 bp, Homo sapien
ttgcccacacacaatggaaagctgaacaccaaa

SEQ ID NO: 276774 - DNA, 33 bp, Homo sapien
ttgcccacacacaatgtaaagctgaacaccaaa

SEQ ID NO: 276775 - DNA, 33 bp, Homo sapien
ctggcttaaagaagacaacttgccagtttcatt

SEQ ID NO: 276776 - DNA, 33 bp, Homo sapien
ctggcttaaagaagactacttgccagtttcatt

SEQ ID NO: 276777 - DNA, 33 bp, Homo sapien
gaatactggtcttaaagaactattcctttgctc

SEQ ID NO: 276778 - DNA, 33 bp, Homo sapien
gaatactggtcttaaataactattcctttgctc

SEQ ID NO: 276779 - DNA, 33 bp, Homo sapien
gtaaaggtctggcaaacttaggtcactcaaagt

SEQ ID NO: 276780 - DNA, 33 bp, Homo sapien
gtaaaggtctggcaaatttaggtcactcaaagt

SEQ ID NO: 276781 - DNA, 33 bp, Homo sapien
agctcctaattttctaaacagactaaacattgg

SEQ ID NO: 276782 - DNA, 33 bp, Homo sapien
agctcctaattttctatacagactaaacattgg

SEQ ID NO: 276783 - DNA, 33 bp, Homo sapien
attcattgtttttacacaaatagttgatgtgtt

SEQ ID NO: 276784 - DNA, 33 bp, Homo sapien
attcattgtttttacataaatagttgatgtgtt

SEQ ID NO: 276785 - DNA, 33 bp, Homo sapien
aaaataccaaagttacaatgtggtttatgcaat

SEQ ID NO: 276786 - DNA, 33 bp, Homo sapien
aaaataccaaagttacgatgtggtttatgcaat

SEQ ID NO: 276787 - DNA, 33 bp, Homo sapien
ttaaggatagtcatgcagaagtgtgattggcag

SEQ ID NO: 276788 - DNA, 33 bp, Homo sapien
ttaaggatagtcatgcggaagtgtgattggcag

SEQ ID NO: 276789 - DNA, 33 bp, Homo sapien
atcacacataatcagacgttaaaaactgcttcc

SEQ ID NO: 276790 - DNA, 33 bp, Homo sapien
atcacacataatcagatgttaaaaactgcttcc

SEQ ID NO: 276791 - DNA, 33 bp, Homo sapien
atagtcaatcctctagaacatgaaatttttcac

SEQ ID NO: 276792 - DNA, 33 bp, Homo sapien
atagtcaatcctctaggacatgaaatttttcac

SEQ ID NO: 276793 - DNA, 33 bp, Homo sapien
cataggccaatcaacacgcatattctaaagtcc

SEQ ID NO: 276794 - DNA, 33 bp, Homo sapien
cataggccaatcaacatgcatattctaaagtcc

SEQ ID NO: 276795 - DNA, 33 bp, Homo sapien
actcaatgcatatggccgattgaattaaaaaac

SEQ ID NO: 276796 - DNA, 33 bp, Homo sapien
actcaatgcatatggctgattgaattaaaaaac

SEQ ID NO: 276797 - DNA, 33 bp, Homo sapien
ttaattagcctaaagaagtgaaggttacataat

SEQ ID NO: 276798 - DNA, 33 bp, Homo sapien
ttaattagcctaaagaggtgaaggttacataat

SEQ ID NO: 276799 - DNA, 33 bp, Homo sapien
cagtctgggcaagtaaacctacagaaaacctgt

SEQ ID NO: 276800 - DNA, 33 bp, Homo sapien
cagtctgggcaagtaaccctacagaaaacctgt

SEQ ID NO: 276801 - DNA, 33 bp, Homo sapien
actacattttctataagtacccctagctgttcc

SEQ ID NO: 276802 - DNA, 33 bp, Homo sapien
actacattttctataattacccctagctgttcc

SEQ ID NO: 276803 - DNA, 33 bp, Homo sapien
aaataaagattgtcaacgtttgctgctttcaaa

SEQ ID NO: 276804 - DNA, 33 bp, Homo sapien
aaataaagattgtcaaggtttgctgctttcaaa

SEQ ID NO: 276805 - DNA, 33 bp, Homo sapien
tgttcaactcatgaaacttctgactgggcaagt

SEQ ID NO: 276806 - DNA, 33 bp, Homo sapien
tgttcaactcatgaaatttctgactgggcaagt

SEQ ID NO: 276807 - DNA, 33 bp, Homo sapien
caagaccctgtgacaacgttaaataaaggcaaa

SEQ ID NO: 276808 - DNA, 33 bp, Homo sapien
caagaccctgtgacaatgttaaataaaggcaaa

SEQ ID NO: 276809 - DNA, 33 bp, Homo sapien
aatcatgaccactactgaccaaatatatgatgt

SEQ ID NO: 276810 - DNA, 33 bp, Homo sapien
aatcatgaccactacttaccaaatatatgatgt

SEQ ID NO: 276811 - DNA, 33 bp, Homo sapien
tgagtcagcctcttacagaagaaaagctgcctc

SEQ ID NO: 276812 - DNA, 33 bp, Homo sapien
tgagtcagcctcttacggaagaaaagctgcctc

SEQ ID NO: 276813 - DNA, 33 bp, Homo sapien
tccacctgtttttccactgagttcatcgggtca

SEQ ID NO: 276814 - DNA, 33 bp, Homo sapien
tccacctgtttttccattgagttcatcgggtca

SEQ ID NO: 276815 - DNA, 33 bp, Homo sapien
ttgtaattgaaggaaactgttaaagtggaaact

SEQ ID NO: 276816 - DNA, 33 bp, Homo sapien
ttgtaattgaaggaaagtgttaaagtggaaact

SEQ ID NO: 276817 - DNA, 33 bp, Homo sapien
aacagcagaaattctacggagtcatttgactgg

SEQ ID NO: 276818 - DNA, 33 bp, Homo sapien
aacagcagaaattctatggagtcatttgactgg

SEQ ID NO: 276819 - DNA, 33 bp, Homo sapien
attaccgtactttcccacctccaagaatgtaca

SEQ ID NO: 276820 - DNA, 33 bp, Homo sapien
attaccgtactttcccgcctccaagaatgtaca

SEQ ID NO: 276821 - DNA, 33 bp, Homo sapien
aagatgtcaacaagaacggacaaggagaatttg

SEQ ID NO: 276822 - DNA, 33 bp, Homo sapien
aagatgtcaacaagaatggacaaggagaatttg

SEQ ID NO: 276823 - DNA, 33 bp, Homo sapien
tttcagtctccatttcaaagagattagaccata

SEQ ID NO: 276824 - DNA, 33 bp, Homo sapien
tttcagtctccatttcgaagagattagaccata

SEQ ID NO: 276825 - DNA, 33 bp, Homo sapien
aaatatttaccgaacaaaatgattagattagaa

SEQ ID NO: 276826 - DNA, 33 bp, Homo sapien
aaatatttaccgaacataatgattagattagaa

SEQ ID NO: 276827 - DNA, 33 bp, Homo sapien
gataactgggtggtaaactatttaaatcatatc

SEQ ID NO: 276828 - DNA, 33 bp, Homo sapien
gataactgggtggtaatctatttaaatcatatc

SEQ ID NO: 276829 - DNA, 33 bp, Homo sapien
ttagtggtccccagtgaaaagttgagatcagca

SEQ ID NO: 276830 - DNA, 33 bp, Homo sapien
ttagtggtccccagtggaaagttgagatcagca

SEQ ID NO: 276831 - DNA, 33 bp, Homo sapien
gggtctctctccgtcccgcagtctagagtgcaa

SEQ ID NO: 276832 - DNA, 33 bp, Homo sapien
gggtctctctccgtcctgcagtctagagtgcaa

SEQ ID NO: 276833 - DNA, 33 bp, Homo sapien
aaaggaaatcatgttgcataaatgacaaaagca

SEQ ID NO: 276834 - DNA, 33 bp, Homo sapien
aaaggaaatcatgttgtataaatgacaaaagca

SEQ ID NO: 276835 - DNA, 33 bp, Homo sapien
ctttctgtaaacaggaacattttaataagcgat

SEQ ID NO: 276836 - DNA, 33 bp, Homo sapien
ctttctgtaaacaggagcattttaataagcgat

SEQ ID NO: 276837 - DNA, 33 bp, Homo sapien
gagaaattggaaaaaaactgtgtcatatgctta

SEQ ID NO: 276838 - DNA, 33 bp, Homo sapien
gagaaattggaaaaaacctgtgtcatatgctta

SEQ ID NO: 276839 - DNA, 33 bp, Homo sapien
aactaatgtgaggctaaccaaaatctttaagat

SEQ ID NO: 276840 - DNA, 33 bp, Homo sapien
aactaatgtgaggctagccaaaatctttaagat

SEQ ID NO: 276841 - DNA, 33 bp, Homo sapien
attttagagctttaaacatcctgacttttcaca

SEQ ID NO: 276842 - DNA, 33 bp, Homo sapien
attttagagctttaaatatcctgacttttcaca

SEQ ID NO: 276843 - DNA, 33 bp, Homo sapien
acaccagattcaatacaatgatgactatactag

SEQ ID NO: 276844 - DNA, 33 bp, Homo sapien
acaccagattcaatacgatgatgactatactag

SEQ ID NO: 276845 - DNA, 33 bp, Homo sapien
aaaggtcatcaaacccactgaacttttagggga

SEQ ID NO: 276846 - DNA, 33 bp, Homo sapien
aaaggtcatcaaacccgctgaacttttagggga

SEQ ID NO: 276847 - DNA, 33 bp, Homo sapien
tgctgatgagattcaaactatgagaaggcattt

SEQ ID NO: 276848 - DNA, 33 bp, Homo sapien
tgctgatgagattcaagctatgagaaggcattt

SEQ ID NO: 276849 - DNA, 33 bp, Homo sapien
acggctggcttagaacaatttaggaactatagg

SEQ ID NO: 276850 - DNA, 33 bp, Homo sapien
acggctggcttagaactatttaggaactatagg

SEQ ID NO: 276851 - DNA, 33 bp, Homo sapien
catcagcctcacaatcactctgcttgcatccta

SEQ ID NO: 276852 - DNA, 33 bp, Homo sapien
catcagcctcacaatcgctctgcttgcatccta

SEQ ID NO: 276853 - DNA, 33 bp, Homo sapien
ttgaaaaattcagctaagtacagagcgcaaatc

SEQ ID NO: 276854 - DNA, 33 bp, Homo sapien
ttgaaaaattcagctaggtacagagcgcaaatc

SEQ ID NO: 276855 - DNA, 33 bp, Homo sapien
ataggaaaggagttaaaatagagactattctga

SEQ ID NO: 276856 - DNA, 33 bp, Homo sapien
ataggaaaggagttaacatagagactattctga

SEQ ID NO: 276857 - DNA, 33 bp, Homo sapien
tcagcacaaatggagacaccggccttcaaccct

SEQ ID NO: 276858 - DNA, 33 bp, Homo sapien
tcagcacaaatggagataccggccttcaaccct

SEQ ID NO: 276859 - DNA, 33 bp, Homo sapien
agaagagtgatggggaagaagtcgaagagagtg

SEQ ID NO: 276860 - DNA, 33 bp, Homo sapien
agaagagtgatggggaggaagtcgaagagagtg

SEQ ID NO: 276861 - DNA, 33 bp, Homo sapien
tctatcaaattaagaacgcatactgacactgtc

SEQ ID NO: 276862 - DNA, 33 bp, Homo sapien
tctatcaaattaagaatgcatactgacactgtc

SEQ ID NO: 276863 - DNA, 33 bp, Homo sapien
ttgtcagcatttgcagcagtcaatgaagcaata

SEQ ID NO: 276864 - DNA, 33 bp, Homo sapien
ttgtcagcatttgcagtagtcaatgaagcaata

SEQ ID NO: 276865 - DNA, 33 bp, Homo sapien
ggaatatatgaggactaacagtaaaataaagga

SEQ ID NO: 276866 - DNA, 33 bp, Homo sapien
ggaatatatgaggactgacagtaaaataaagga

SEQ ID NO: 276867 - DNA, 33 bp, Homo sapien
ctttaatttaatgcagcatattctggaattcct

SEQ ID NO: 276868 - DNA, 33 bp, Homo sapien
ctttaatttaatgcaggatattctggaattcct

SEQ ID NO: 276869 - DNA, 33 bp, Homo sapien
caagcactgaaagataagagatagagaggagtt

SEQ ID NO: 276870 - DNA, 33 bp, Homo sapien
caagcactgaaagataggagatagagaggagtt

SEQ ID NO: 276871 - DNA, 33 bp, Homo sapien
cagttgcttatttatacgtgacactttgaagag

SEQ ID NO: 276872 - DNA, 33 bp, Homo sapien
cagttgcttatttatatgtgacactttgaagag

SEQ ID NO: 276873 - DNA, 33 bp, Homo sapien
cactctctagatttaactcctggaaaagttcaa

SEQ ID NO: 276874 - DNA, 33 bp, Homo sapien
cactctctagatttaagtcctggaaaagttcaa

SEQ ID NO: 276875 - DNA, 33 bp, Homo sapien
ataagggagaaatgaaaaacattgcagtctaat

SEQ ID NO: 276876 - DNA, 33 bp, Homo sapien
ataagggagaaatgaagaacattgcagtctaat

SEQ ID NO: 276877 - DNA, 33 bp, Homo sapien
aaaatttgttataaaacgttatcaaaggttctc

SEQ ID NO: 276878 - DNA, 33 bp, Homo sapien
aaaatttgttataaaaggttatcaaaggttctc

SEQ ID NO: 276879 - DNA, 33 bp, Homo sapien
ttttgttggtatatgaaccccctgccaaagatc

SEQ ID NO: 276880 - DNA, 33 bp, Homo sapien
ttttgttggtatatgagccccctgccaaagatc

SEQ ID NO: 276881 - DNA, 33 bp, Homo sapien
ctcatgtgattgaaaacgtcctcacagagttga

SEQ ID NO: 276882 - DNA, 33 bp, Homo sapien
ctcatgtgattgaaaatgtcctcacagagttga

SEQ ID NO: 276883 - DNA, 33 bp, Homo sapien
aacttgtgaactacaaattgaaaggtgataaat

SEQ ID NO: 276884 - DNA, 33 bp, Homo sapien
aacttgtgaactacaagttgaaaggtgataaat

SEQ ID NO: 276885 - DNA, 33 bp, Homo sapien
taggtgttggggtgtgaatcccttatgactagc

SEQ ID NO: 276886 - DNA, 33 bp, Homo sapien
taggtgttggggtgtggatcccttatgactagc

SEQ ID NO: 276887 - DNA, 33 bp, Homo sapien
catgatatacaatagagcccttgaacgtttatt

SEQ ID NO: 276888 - DNA, 33 bp, Homo sapien
catgatatacaatagatcccttgaacgtttatt

SEQ ID NO: 276889 - DNA, 33 bp, Homo sapien
cattctatgtactctacgcatttacaaatatag

SEQ ID NO: 276890 - DNA, 33 bp, Homo sapien
cattctatgtactctatgcatttacaaatatag

SEQ ID NO: 276891 - DNA, 33 bp, Homo sapien
taagtcaatagtacaaggtagtttgtgtatatt

SEQ ID NO: 276892 - DNA, 33 bp, Homo sapien
taagtcaatagtacaatgtagtttgtgtatatt

SEQ ID NO: 276893 - DNA, 33 bp, Homo sapien
gacgtccaccagcctcgcttctcgtcaactcca

SEQ ID NO: 276894 - DNA, 33 bp, Homo sapien
gacgtccaccagcctctcttctcgtcaactcca

SEQ ID NO: 276895 - DNA, 33 bp, Homo sapien
ttgtaaaattgaggacaaggcagaaatgaaaca

SEQ ID NO: 276896 - DNA, 33 bp, Homo sapien
ttgtaaaattgaggacgaggcagaaatgaaaca

SEQ ID NO: 276897 - DNA, 33 bp, Homo sapien
gggggtagagaatgaacaatcgtctccaatgaa

SEQ ID NO: 276898 - DNA, 33 bp, Homo sapien
gggggtagagaatgaataatcgtctccaatgaa

SEQ ID NO: 276899 - DNA, 33 bp, Homo sapien
agagtttgagccaaggaaccagtgaatgcttga

SEQ ID NO: 276900 - DNA, 33 bp, Homo sapien
agagtttgagccaagggaccagtgaatgcttga

SEQ ID NO: 276901 - DNA, 33 bp, Homo sapien
cccaaagaatgaatcaatattttctgcctgagg

SEQ ID NO: 276902 - DNA, 33 bp, Homo sapien
cccaaagaatgaatcagtattttctgcctgagg

SEQ ID NO: 276903 - DNA, 33 bp, Homo sapien
cctgctttagctcttccattgactgaatttcat

SEQ ID NO: 276904 - DNA, 33 bp, Homo sapien
cctgctttagctcttctattgactgaatttcat

SEQ ID NO: 276905 - DNA, 33 bp, Homo sapien
atccaaatttaagagaagaattagaacagtgta

SEQ ID NO: 276906 - DNA, 33 bp, Homo sapien
atccaaatttaagagaggaattagaacagtgta

SEQ ID NO: 276907 - DNA, 33 bp, Homo sapien
agatcccagacaagacaccaagtttgtgagaaa

SEQ ID NO: 276908 - DNA, 33 bp, Homo sapien
agatcccagacaagacgccaagtttgtgagaaa

SEQ ID NO: 276909 - DNA, 33 bp, Homo sapien
ctgctcgtaaaatttcaacgctcattgctataa

SEQ ID NO: 276910 - DNA, 33 bp, Homo sapien
ctgctcgtaaaatttcgacgctcattgctataa

SEQ ID NO: 276911 - DNA, 33 bp, Homo sapien
ggacacaaggatctcaagttctggttatagcat

SEQ ID NO: 276912 - DNA, 33 bp, Homo sapien
ggacacaaggatctcatgttctggttatagcat

SEQ ID NO: 276913 - DNA, 33 bp, Homo sapien
ataaattcaatagaaaacttccacaagccttag

SEQ ID NO: 276914 - DNA, 33 bp, Homo sapien
ataaattcaatagaaagcttccacaagccttag

SEQ ID NO: 276915 - DNA, 33 bp, Homo sapien
ggttcaactccgtggaacttggtgggtaagagg

SEQ ID NO: 276916 - DNA, 33 bp, Homo sapien
ggttcaactccgtggagcttggtgggtaagagg

SEQ ID NO: 276917 - DNA, 33 bp, Homo sapien
agagttcctccagtaacagaagggcttatgaat

SEQ ID NO: 276918 - DNA, 33 bp, Homo sapien
agagttcctccagtaatagaagggcttatgaat

SEQ ID NO: 276919 - DNA, 33 bp, Homo sapien
gaacagcttgcccaaaatgtctatcccatactc

SEQ ID NO: 276920 - DNA, 33 bp, Homo sapien
gaacagcttgcccaaagtgtctatcccatactc

SEQ ID NO: 276921 - DNA, 33 bp, Homo sapien
agccaactctccataaaattgatccagcctggt

SEQ ID NO: 276922 - DNA, 33 bp, Homo sapien
agccaactctccataacattgatccagcctggt

SEQ ID NO: 276923 - DNA, 33 bp, Homo sapien
cttcatctctccacacaaagactgaagtgttct

SEQ ID NO: 276924 - DNA, 33 bp, Homo sapien
cttcatctctccacacgaagactgaagtgttct

SEQ ID NO: 276925 - DNA, 33 bp, Homo sapien
ttttggcagaaaagtacaaagacttaaagtgag

SEQ ID NO: 276926 - DNA, 33 bp, Homo sapien
ttttggcagaaaagtagaaagacttaaagtgag

SEQ ID NO: 276927 - DNA, 33 bp, Homo sapien
tgtgtctctggcttaaaatctcaaaatattgag

SEQ ID NO: 276928 - DNA, 33 bp, Homo sapien
tgtgtctctggcttaatatctcaaaatattgag

SEQ ID NO: 276929 - DNA, 33 bp, Homo sapien
cctaattccccttgcacgtatgcctgttctgtc

SEQ ID NO: 276930 - DNA, 33 bp, Homo sapien
cctaattccccttgcatgtatgcctgttctgtc

SEQ ID NO: 276931 - DNA, 33 bp, Homo sapien
acaggaggttacatagactagaactttctgaaa

SEQ ID NO: 276932 - DNA, 33 bp, Homo sapien
acaggaggttacataggctagaactttctgaaa

SEQ ID NO: 276933 - DNA, 33 bp, Homo sapien
tgatccatcatgagaggcagtaatgtgttttcc

SEQ ID NO: 276934 - DNA, 33 bp, Homo sapien
tgatccatcatgagagtcagtaatgtgttttcc

SEQ ID NO: 276935 - DNA, 33 bp, Homo sapien
ctgaatagttaggagaaaatcaatgcttctttt

SEQ ID NO: 276936 - DNA, 33 bp, Homo sapien
ctgaatagttaggagagaatcaatgcttctttt

SEQ ID NO: 276937 - DNA, 33 bp, Homo sapien
cttggtctcaggacaaaaacccagaatacacca

SEQ ID NO: 276938 - DNA, 33 bp, Homo sapien
cttggtctcaggacaagaacccagaatacacca

SEQ ID NO: 276939 - DNA, 33 bp, Homo sapien
tgctttgtggagaaagcactgtgagtaggagac

SEQ ID NO: 276940 - DNA, 33 bp, Homo sapien
tgctttgtggagaaagtactgtgagtaggagac

SEQ ID NO: 276941 - DNA, 33 bp, Homo sapien
gttatacctgtggagaatattagaagtggaaca

SEQ ID NO: 276942 - DNA, 33 bp, Homo sapien
gttatacctgtggagagtattagaagtggaaca

SEQ ID NO: 276943 - DNA, 33 bp, Homo sapien
tgtgtttgcataataaagaaggctgagtggcat

SEQ ID NO: 276944 - DNA, 33 bp, Homo sapien
tgtgtttgcataataaggaaggctgagtggcat

SEQ ID NO: 276945 - DNA, 33 bp, Homo sapien
aatgtaatataactgcaatatgtactttttaca

SEQ ID NO: 276946 - DNA, 33 bp, Homo sapien
aatgtaatataactgcgatatgtactttttaca

SEQ ID NO: 276947 - DNA, 33 bp, Homo sapien
gagaaaaattttggaacggagcttgtgtttttc

SEQ ID NO: 276948 - DNA, 33 bp, Homo sapien
gagaaaaattttggaatggagcttgtgtttttc

SEQ ID NO: 276949 - DNA, 33 bp, Homo sapien
ctgtcataccagctagcacattagattccttat

SEQ ID NO: 276950 - DNA, 33 bp, Homo sapien
ctgtcataccagctagtacattagattccttat

SEQ ID NO: 276951 - DNA, 33 bp, Homo sapien
gatgaaaatgcaaatgaaagtaggaatgacagg

SEQ ID NO: 276952 - DNA, 33 bp, Homo sapien
gatgaaaatgcaaatgcaagtaggaatgacagg

SEQ ID NO: 276953 - DNA, 33 bp, Homo sapien
ggcaatgggtacacaaagataggaagtaatcac

SEQ ID NO: 276954 - DNA, 33 bp, Homo sapien
ggcaatgggtacacaaggataggaagtaatcac

SEQ ID NO: 276955 - DNA, 33 bp, Homo sapien
aaatatttttaaatcccgcaacattcttatttt

SEQ ID NO: 276956 - DNA, 33 bp, Homo sapien
aaatatttttaaatcctgcaacattcttatttt

SEQ ID NO: 276957 - DNA, 33 bp, Homo sapien
tatgtgcagaatggagcctagcttgcagatgcc

SEQ ID NO: 276958 - DNA, 33 bp, Homo sapien
tatgtgcagaatggagtctagcttgcagatgcc

SEQ ID NO: 276959 - DNA, 33 bp, Homo sapien
atggacatgaatgaagaaagtgatgtgatgaaa

SEQ ID NO: 276960 - DNA, 33 bp, Homo sapien
atggacatgaatgaagtaagtgatgtgatgaaa

SEQ ID NO: 276961 - DNA, 33 bp, Homo sapien
gtgatgaaaaggattaagatatcccagaggaca

SEQ ID NO: 276962 - DNA, 33 bp, Homo sapien
gtgatgaaaaggattacgatatcccagaggaca

SEQ ID NO: 276963 - DNA, 33 bp, Homo sapien
ctcaccctcacctcagaaagatcattaatctat

SEQ ID NO: 276964 - DNA, 33 bp, Homo sapien
ctcaccctcacctcaggaagatcattaatctat

SEQ ID NO: 276965 - DNA, 33 bp, Homo sapien
cttttgacatgccttaaaaatcaatgtaatgca

SEQ ID NO: 276966 - DNA, 33 bp, Homo sapien
cttttgacatgccttagaaatcaatgtaatgca

SEQ ID NO: 276967 - DNA, 33 bp, Homo sapien
catttatatatgcagaagttaaagttcagagaa

SEQ ID NO: 276968 - DNA, 33 bp, Homo sapien
catttatatatgcagatgttaaagttcagagaa

SEQ ID NO: 276969 - DNA, 33 bp, Homo sapien
cttctcttataggtcaacatctaacactttttg

SEQ ID NO: 276970 - DNA, 33 bp, Homo sapien
cttctcttataggtcagcatctaacactttttg

SEQ ID NO: 276971 - DNA, 33 bp, Homo sapien
actaaacattgctaaacgaggagcaacccatag

SEQ ID NO: 276972 - DNA, 33 bp, Homo sapien
actaaacattgctaaatgaggagcaacccatag

SEQ ID NO: 276973 - DNA, 33 bp, Homo sapien
atattacaatttactacgaagccacaagaatca

SEQ ID NO: 276974 - DNA, 33 bp, Homo sapien
atattacaatttactatgaagccacaagaatca

SEQ ID NO: 276975 - DNA, 33 bp, Homo sapien
tttaggtgtatgattcactttggattaattttt

SEQ ID NO: 276976 - DNA, 33 bp, Homo sapien
tttaggtgtatgattctctttggattaattttt

SEQ ID NO: 276977 - DNA, 33 bp, Homo sapien
cattgtatcagtatcgcattcatttgttattaa

SEQ ID NO: 276978 - DNA, 33 bp, Homo sapien
cattgtatcagtatcggattcatttgttattaa

SEQ ID NO: 276979 - DNA, 33 bp, Homo sapien
aagataccacacttaggcacgatctctctgtat

SEQ ID NO: 276980 - DNA, 33 bp, Homo sapien
aagataccacacttagtcacgatctctctgtat

SEQ ID NO: 276981 - DNA, 33 bp, Homo sapien
tacgtgggtctggtggcaacagtggaagctacg

SEQ ID NO: 276982 - DNA, 33 bp, Homo sapien
tacgtgggtctggtggtaacagtggaagctacg

SEQ ID NO: 276983 - DNA, 33 bp, Homo sapien
aaagctggagaaactagatccttccatgaacaa

SEQ ID NO: 276984 - DNA, 33 bp, Homo sapien
aaagctggagaaactatatccttccatgaacaa

SEQ ID NO: 276985 - DNA, 33 bp, Homo sapien
cattataaaaagatcacagcttgcataaggtct

SEQ ID NO: 276986 - DNA, 33 bp, Homo sapien
cattataaaaagatcatagcttgcataaggtct

SEQ ID NO: 276987 - DNA, 33 bp, Homo sapien
tgtttgagctcagaaaatgctttctcaccacag

SEQ ID NO: 276988 - DNA, 33 bp, Homo sapien
tgtttgagctcagaaagtgctttctcaccacag

SEQ ID NO: 276989 - DNA, 33 bp, Homo sapien
tgcctggcatataaccaaattccagatgcctag

SEQ ID NO: 276990 - DNA, 33 bp, Homo sapien
tgcctggcatataacccaattccagatgcctag

SEQ ID NO: 276991 - DNA, 33 bp, Homo sapien
taaattctggaaaaaaacaggcacacatttcca

SEQ ID NO: 276992 - DNA, 33 bp, Homo sapien
taaattctggaaaaaaccaggcacacatttcca

SEQ ID NO: 276993 - DNA, 33 bp, Homo sapien
ttacagctagataagacgaatactttctagtgt

SEQ ID NO: 276994 - DNA, 33 bp, Homo sapien
ttacagctagataagaggaatactttctagtgt

SEQ ID NO: 276995 - DNA, 33 bp, Homo sapien
gcctgtgctgtatcaacggaaaaacaaagcctg

SEQ ID NO: 276996 - DNA, 33 bp, Homo sapien
gcctgtgctgtatcaatggaaaaacaaagcctg

SEQ ID NO: 276997 - DNA, 33 bp, Homo sapien
tcctgacagtaactaacgcagctcgtgatttta

SEQ ID NO: 276998 - DNA, 33 bp, Homo sapien
tcctgacagtaactaatgcagctcgtgatttta

SEQ ID NO: 276999 - DNA, 33 bp, Homo sapien
acagttattgttcatacggcggtgggtttgtca

SEQ ID NO: 277000 - DNA, 33 bp, Homo sapien
acagttattgttcatatggcggtgggtttgtca

SEQ ID NO: 277001 - DNA, 33 bp, Homo sapien; identical to SEQ ID NO: 276999

SEQ ID NO: 277002 - DNA, 33 bp, Homo sapien; identical to SEQ ID NO: 277000

SEQ ID NO: 277003 - DNA, 33 bp, Homo sapien
ttgatgcgctgttaaaattgttttgctagtttt

SEQ ID NO: 277004 - DNA, 33 bp, Homo sapien
ttgatgcgctgttaaacttgttttgctagtttt

SEQ ID NO: 277005 - DNA, 33 bp, Homo sapien
agacttaacacttttcacgtgggcaaagagagt

SEQ ID NO: 277006 - DNA, 33 bp, Homo sapien
agacttaacacttttctcgtgggcaaagagagt

SEQ ID NO: 277007 - DNA, 33 bp, Homo sapien
agctacctcatttagaagaataattgtgttcct

SEQ ID NO: 277008 - DNA, 33 bp, Homo sapien
agctacctcatttagatgaataattgtgttcct

SEQ ID NO: 277009 - DNA, 33 bp, Homo sapien
atgaaccagtgcttcaactttccaaatatcttt

SEQ ID NO: 277010 - DNA, 33 bp, Homo sapien
atgaaccagtgcttcagctttccaaatatcttt

SEQ ID NO: 277011 - DNA, 33 bp, Homo sapien
gatcatcaggcattcaccatcagattactataa

SEQ ID NO: 277012 - DNA, 33 bp, Homo sapien
gatcatcaggcattcatcatcagattactataa

SEQ ID NO: 277013 - DNA, 33 bp, Homo sapien
taaaggttcaacctaacagcagtctgcctcttg

SEQ ID NO: 277014 - DNA, 33 bp, Homo sapien
taaaggttcaacctaagagcagtctgcctcttg

SEQ ID NO: 277015 - DNA, 33 bp, Homo sapien
tttggcgtgggtgctacgatgatttattttcat

SEQ ID NO: 277016 - DNA, 33 bp, Homo sapien
tttggcgtgggtgctatgatgatttattttcat

SEQ ID NO: 277017 - DNA, 33 bp, Homo sapien
atttgcacaattgtataaccagtacacctttgt

SEQ ID NO: 277018 - DNA, 33 bp, Homo sapien
atttgcacaattgtatgaccagtacacctttgt

SEQ ID NO: 277019 - DNA, 33 bp, Homo sapien
ccctttcaagtcagtgaaaaacaatcaccttgt

SEQ ID NO: 277020 - DNA, 33 bp, Homo sapien
ccctttcaagtcagtgtaaaacaatcaccttgt

SEQ ID NO: 277021 - DNA, 33 bp, Homo sapien
ttatcacatagaatacaggatgcctaacccttg

SEQ ID NO: 277022 - DNA, 33 bp, Homo sapien
ttatcacatagaatacgggatgcctaacccttg

SEQ ID NO: 277023 - DNA, 33 bp, Homo sapien
tttaccaaattcgtctcaaatatagcataaaat

SEQ ID NO: 277024 - DNA, 33 bp, Homo sapien
tttaccaaattcgtctgaaatatagcataaaat

SEQ ID NO: 277025 - DNA, 33 bp, Homo sapien
agagagttcagaatgcccatcatctactgccca

SEQ ID NO: 277026 - DNA, 33 bp, Homo sapien
agagagttcagaatgctcatcatctactgccca

SEQ ID NO: 277027 - DNA, 33 bp, Homo sapien
atatttacctgtctcacaatgatgaaagtacaa

SEQ ID NO: 277028 - DNA, 33 bp, Homo sapien
atatttacctgtctcataatgatgaaagtacaa

SEQ ID NO: 277029 - DNA, 33 bp, Homo sapien
agaggcacaattttgaggcaagtttgtccaaag

SEQ ID NO: 277030 - DNA, 33 bp, Homo sapien
agaggcacaattttgatgcaagtttgtccaaag

SEQ ID NO: 277031 - DNA, 33 bp, Homo sapien
agtaatacttaccctgacacatccagttttctc

SEQ ID NO: 277032 - DNA, 33 bp, Homo sapien
agtaatacttaccctggcacatccagttttctc

SEQ ID NO: 277033 - DNA, 33 bp, Homo sapien
agttgctctgcattagacaatgtgtggtaactt

SEQ ID NO: 277034 - DNA, 33 bp, Homo sapien
agttgctctgcattaggcaatgtgtggtaactt

SEQ ID NO: 277035 - DNA, 33 bp, Homo sapien
taggctctgctaattaaataaaggtccttgcta

SEQ ID NO: 277036 - DNA, 33 bp, Homo sapien
taggctctgctaattagataaaggtccttgcta

SEQ ID NO: 277037 - DNA, 33 bp, Homo sapien
aaactatattgtttgggagggtaacagcgaatg

SEQ ID NO: 277038 - DNA, 33 bp, Homo sapien
aaactatattgtttggtagggtaacagcgaatg

SEQ ID NO: 277039 - DNA, 33 bp, Homo sapien
ggaatatgtgcatatcacattttctattacaga

SEQ ID NO: 277040 - DNA, 33 bp, Homo sapien
ggaatatgtgcatatcgcattttctattacaga

SEQ ID NO: 277041 - DNA, 33 bp, Homo sapien
aattctctcaaactttcaaacagcttgcctttt

SEQ ID NO: 277042 - DNA, 33 bp, Homo sapien
aattctctcaaactttgaaacagcttgcctttt

SEQ ID NO: 277043 - DNA, 33 bp, Homo sapien
attgtggagagttaaacaacttgttttatgcag

SEQ ID NO: 277044 - DNA, 33 bp, Homo sapien
attgtggagagttaaataacttgttttatgcag

SEQ ID NO: 277045 - DNA, 33 bp, Homo sapien
actgctctaggctactcaataaaggtaccactt

SEQ ID NO: 277046 - DNA, 33 bp, Homo sapien
actgctctaggctactgaataaaggtaccactt

SEQ ID NO: 277047 - DNA, 33 bp, Homo sapien
gaaaaaaggaagcaaaaagaagattccctgtat

SEQ ID NO: 277048 - DNA, 33 bp, Homo sapien
gaaaaaaggaagcaaagagaagattccctgtat

SEQ ID NO: 277049 - DNA, 33 bp, Homo sapien
gtttttccagaagtaaactccatggttctctta

SEQ ID NO: 277050 - DNA, 33 bp, Homo sapien
gtttttccagaagtaagctccatggttctctta

SEQ ID NO: 277051 - DNA, 33 bp, Homo sapien
ttgatatatgtctcacaagtgcagcacaatagt

SEQ ID NO: 277052 - DNA, 33 bp, Homo sapien
ttgatatatgtctcacgagtgcagcacaatagt

SEQ ID NO: 277053 - DNA, 33 bp, Homo sapien
caacagcacgagtttaactccaggcagaccatg

SEQ ID NO: 277054 - DNA, 33 bp, Homo sapien
caacagcacgagtttatctccaggcagaccatg

SEQ ID NO: 277055 - DNA, 33 bp, Homo sapien
ccatgctctattcaacactttcacatctctatt

SEQ ID NO: 277056 - DNA, 33 bp, Homo sapien
ccatgctctattcaactctttcacatctctatt

SEQ ID NO: 277057 - DNA, 33 bp, Homo sapien
aatatattttaccaagaatgtgaaaaaatctct

SEQ ID NO: 277058 - DNA, 33 bp, Homo sapien
aatatattttaccaaggatgtgaaaaaatctct

SEQ ID NO: 277059 - DNA, 33 bp, Homo sapien
ttttgaggttatcagacagcaaaatatctttag

SEQ ID NO: 277060 - DNA, 33 bp, Homo sapien
ttttgaggttatcagagagcaaaatatctttag

SEQ ID NO: 277061 - DNA, 33 bp, Homo sapien
agaattagggcctttacgagagagactccagag

SEQ ID NO: 277062 - DNA, 33 bp, Homo sapien
agaattagggcctttatgagagagactccagag

SEQ ID NO: 277063 - DNA, 33 bp, Homo sapien
tgattaagtccactcaatatcttctaaaagggt

SEQ ID NO: 277064 - DNA, 33 bp, Homo sapien
tgattaagtccactcagtatcttctaaaagggt

SEQ ID NO: 277065 - DNA, 33 bp, Homo sapien
aactccctgtctttaccggatttaaatgacact

SEQ ID NO: 277066 - DNA, 33 bp, Homo sapien
aactccctgtctttactggatttaaatgacact

SEQ ID NO: 277067 - DNA, 33 bp, Homo sapien
tggtctaaaaaggagacaccttcagttctgaca

SEQ ID NO: 277068 - DNA, 33 bp, Homo sapien
tggtctaaaaaggagagaccttcagttctgaca

SEQ ID NO: 277069 - DNA, 33 bp, Homo sapien
ttgtgactcctctcacagagacctatgttaata

SEQ ID NO: 277070 - DNA, 33 bp, Homo sapien
ttgtgactcctctcacggagacctatgttaata

SEQ ID NO: 277071 - DNA, 33 bp, Homo sapien
agacctatgttaatacacctttaattctctgtt

SEQ ID NO: 277072 - DNA, 33 bp, Homo sapien
agacctatgttaatacgcctttaattctctgtt

SEQ ID NO: 277073 - DNA, 33 bp, Homo sapien
acagaactggatttaaatggaaagcagaattga

SEQ ID NO: 277074 - DNA, 33 bp, Homo sapien
acagaactggatttaagtggaaagcagaattga

SEQ ID NO: 277075 - DNA, 33 bp, Homo sapien
aatgaaaatgccattacgtcgaggatagcgcat

SEQ ID NO: 277076 - DNA, 33 bp, Homo sapien
aatgaaaatgccattatgtcgaggatagcgcat

SEQ ID NO: 277077 - DNA, 33 bp, Homo sapien
atcttagagaattacagaaaaaggagaaagacc

SEQ ID NO: 277078 - DNA, 33 bp, Homo sapien
atcttagagaattacataaaaaggagaaagacc

SEQ ID NO: 277079 - DNA, 33 bp, Homo sapien
tggctgttactaatgacagtagtgaaaaaaata

SEQ ID NO: 277080 - DNA, 33 bp, Homo sapien
tggctgttactaatgatagtagtgaaaaaaata

SEQ ID NO: 277081 - DNA, 33 bp, Homo sapien
caagttagtagtttggcaaagctagaatgtcaa

SEQ ID NO: 277082 - DNA, 33 bp, Homo sapien
caagttagtagtttggtaaagctagaatgtcaa

SEQ ID NO: 277083 - DNA, 33 bp, Homo sapien
gtacacaggactgaaaaagtgaatagtctatat

SEQ ID NO: 277084 - DNA, 33 bp, Homo sapien
gtacacaggactgaaacagtgaatagtctatat

SEQ ID NO: 277085 - DNA, 33 bp, Homo sapien
ggtacctcatctattacactcaggagcagctac

SEQ ID NO: 277086 - DNA, 33 bp, Homo sapien
ggtacctcatctattatactcaggagcagctac

SEQ ID NO: 277087 - DNA, 33 bp, Homo sapien
aacaagtttgacattaaccatctacgtttacca

SEQ ID NO: 277088 - DNA, 33 bp, Homo sapien
aacaagtttgacattagccatctacgtttacca

SEQ ID NO: 277089 - DNA, 33 bp, Homo sapien
gttcaaataccatgacactgccattctgaagaa

SEQ ID NO: 277090 - DNA, 33 bp, Homo sapien
gttcaaataccatgacgctgccattctgaagaa

SEQ ID NO: 277091 - DNA, 33 bp, Homo sapien
gttgttctgcaggcttaaaaggatagtttcttg

SEQ ID NO: 277092 - DNA, 33 bp, Homo sapien
gttgttctgcaggcttgaaaggatagtttcttg

SEQ ID NO: 277093 - DNA, 33 bp, Homo sapien
ttggtttccaagagaacgaaatttccaaaactt

SEQ ID NO: 277094 - DNA, 33 bp, Homo sapien
ttggtttccaagagaatgaaatttccaaaactt

SEQ ID NO: 277095 - DNA, 33 bp, Homo sapien
aagtcatgctggtatcgaggtacaagaattgaa

SEQ ID NO: 277096 - DNA, 33 bp, Homo sapien
aagtcatgctggtatctaggtacaagaattgaa

SEQ ID NO: 277097 - DNA, 33 bp, Homo sapien
gccaaagtgcacaacaaatttaaaagaatagca

SEQ ID NO: 277098 - DNA, 33 bp, Homo sapien
gccaaagtgcacaacatatttaaaagaatagca

SEQ ID NO: 277099 - DNA, 33 bp, Homo sapien
cctgttattaggtttcaacaacacctatgctgt

SEQ ID NO: 277100 - DNA, 33 bp, Homo sapien
cctgttattaggtttcgacaacacctatgctgt

SEQ ID NO: 277101 - DNA, 33 bp, Homo sapien
cctctatctggtcacaaaattaatggcattaaa

SEQ ID NO: 277102 - DNA, 33 bp, Homo sapien
cctctatctggtcacataattaatggcattaaa

SEQ ID NO: 277103 - DNA, 33 bp, Homo sapien
ataagcttatcataaacaattgcccatcaatat

SEQ ID NO: 277104 - DNA, 33 bp, Homo sapien
ataagcttatcataaataattgcccatcaatat

SEQ ID NO: 277105 - DNA, 33 bp, Homo sapien
agaaatctcatagctgaaaagtatagtcctatg

SEQ ID NO: 277106 - DNA, 33 bp, Homo sapien
agaaatctcatagctggaaagtatagtcctatg

SEQ ID NO: 277107 - DNA, 33 bp, Homo sapien
gaattgtgattaggaccctgccttttttactaa

SEQ ID NO: 277108 - DNA, 33 bp, Homo sapien
gaattgtgattaggactctgccttttttactaa

SEQ ID NO: 277109 - DNA, 33 bp, Homo sapien
ccaggattcaaatgtaacaatgcaaagttattt

SEQ ID NO: 277110 - DNA, 33 bp, Homo sapien
ccaggattcaaatgtagcaatgcaaagttattt

SEQ ID NO: 277111 - DNA, 33 bp, Homo sapien
cagcctgccaagtagacagtttcgaagttacca

SEQ ID NO: 277112 - DNA, 33 bp, Homo sapien
cagcctgccaagtagagagtttcgaagttacca

SEQ ID NO: 277113 - DNA, 33 bp, Homo sapien
atagcacctctgagtgaagacagcacaaacacc

SEQ ID NO: 277114 - DNA, 33 bp, Homo sapien
atagcacctctgagtggagacagcacaaacacc

SEQ ID NO: 277115 - DNA, 33 bp, Homo sapien
gcttatcgtttgattcaatctggcatcatcaaa

SEQ ID NO: 277116 - DNA, 33 bp, Homo sapien
gcttatcgtttgattccatctggcatcatcaaa

SEQ ID NO: 277117 - DNA, 33 bp, Homo sapien
cctgttggcttcctaactcatggacaaaatcaa

SEQ ID NO: 277118 - DNA, 33 bp, Homo sapien
cctgttggcttcctaattcatggacaaaatcaa

SEQ ID NO: 277119 - DNA, 33 bp, Homo sapien
tctgcaaccactgttacattgtataccactgga

SEQ ID NO: 277120 - DNA, 33 bp, Homo sapien
tctgcaaccactgttatattgtataccactgga

SEQ ID NO: 277121 - DNA, 33 bp, Homo sapien
aaaagtaatgtgtctaacaactacaagaaaatg

SEQ ID NO: 277122 - DNA, 33 bp, Homo sapien
aaaagtaatgtgtctagcaactacaagaaaatg

SEQ ID NO: 277123 - DNA, 33 bp, Homo sapien
gttgctagaagaaaacacggaataattttttgg

SEQ ID NO: 277124 - DNA, 33 bp, Homo sapien
gttgctagaagaaaacgcggaataattttttgg

SEQ ID NO: 277125 - DNA, 33 bp, Homo sapien
aggttgcgttttccagaaataatataaatggag

SEQ ID NO: 277126 - DNA, 33 bp, Homo sapien
aggttgcgttttccaggaataatataaatggag

SEQ ID NO: 277127 - DNA, 33 bp, Homo sapien
ccctcaagggtcctcacagagtggagtttatat

SEQ ID NO: 277128 - DNA, 33 bp, Homo sapien
ccctcaagggtcctcatagagtggagtttatat

SEQ ID NO: 277129 - DNA, 33 bp, Homo sapien
agccaatggcattatcacaagtactttcagtaa

SEQ ID NO: 277130 - DNA, 33 bp, Homo sapien
agccaatggcattatcccaagtactttcagtaa

SEQ ID NO: 277131 - DNA, 33 bp, Homo sapien
gctccactgcagagaacagcaccattccaaaag

SEQ ID NO: 277132 - DNA, 33 bp, Homo sapien
gctccactgcagagaatagcaccattccaaaag

SEQ ID NO: 277133 - DNA, 33 bp, Homo sapien
aaaactcctttctttacagtcccacttaaagca

SEQ ID NO: 277134 - DNA, 33 bp, Homo sapien
aaaactcctttctttagagtcccacttaaagca

SEQ ID NO: 277135 - DNA, 33 bp, Homo sapien
ctgaaacacacaacaggattgagattaggccaa

SEQ ID NO: 277136 - DNA, 33 bp, Homo sapien
ctgaaacacacaacagtattgagattaggccaa

SEQ ID NO: 277137 - DNA, 33 bp, Homo sapien
gcatttgctagttctcagactttatagagataa

SEQ ID NO: 277138 - DNA, 33 bp, Homo sapien
gcatttgctagttctcggactttatagagataa

SEQ ID NO: 277139 - DNA, 33 bp, Homo sapien
gacagaagtaaaatgacgttttcatgctctctt

SEQ ID NO: 277140 - DNA, 33 bp, Homo sapien
gacagaagtaaaatgatgttttcatgctctctt

SEQ ID NO: 277141 - DNA, 33 bp, Homo sapien
catatatcctatctgcccagattaccgtagagc

SEQ ID NO: 277142 - DNA, 33 bp, Homo sapien
catatatcctatctgctcagattaccgtagagc

SEQ ID NO: 277143 - DNA, 33 bp, Homo sapien
catctgctaaatatccaaggtaggcactaacaa

SEQ ID NO: 277144 - DNA, 33 bp, Homo sapien
catctgctaaatatcccaggtaggcactaacaa

SEQ ID NO: 277145 - DNA, 33 bp, Homo sapien
aggtgcaaggctcctaccttcaaggatcaatga

SEQ ID NO: 277146 - DNA, 33 bp, Homo sapien
aggtgcaaggctcctatcttcaaggatcaatga

SEQ ID NO: 277147 - DNA, 33 bp, Homo sapien
attcaagaggaatcaaaaggacaaatgtttgaa

SEQ ID NO: 277148 - DNA, 33 bp, Homo sapien
attcaagaggaatcaagaggacaaatgtttgaa

SEQ ID NO: 277149 - DNA, 33 bp, Homo sapien
gatgttaaaagccatacagagttctcattattt

SEQ ID NO: 277150 - DNA, 33 bp, Homo sapien
gatgttaaaagccatagagagttctcattattt

SEQ ID NO: 277151 - DNA, 33 bp, Homo sapien
aattcaattataataaatgtgcttagaatgcat

SEQ ID NO: 277152 - DNA, 33 bp, Homo sapien
aattcaattataataagtgtgcttagaatgcat

SEQ ID NO: 277153 - DNA, 33 bp, Homo sapien
acaacaagatgcaaataaggatgatgatacagt

SEQ ID NO: 277154 - DNA, 33 bp, Homo sapien
acaacaagatgcaaatcaggatgatgatacagt

SEQ ID NO: 277155 - DNA, 33 bp, Homo sapien
aggaagtttgtattcaataactgagttgtagat

SEQ ID NO: 277156 - DNA, 33 bp, Homo sapien
aggaagtttgtattcagtaactgagttgtagat

SEQ ID NO: 277157 - DNA, 33 bp, Homo sapien
aatgaacttgaatgaccggcaaaaataatgagc

SEQ ID NO: 277158 - DNA, 33 bp, Homo sapien
aatgaacttgaatgactggcaaaaataatgagc

SEQ ID NO: 277159 - DNA, 33 bp, Homo sapien
aaccttcaacaagataaggccataagtgaacac

SEQ ID NO: 277160 - DNA, 33 bp, Homo sapien
aaccttcaacaagatacggccataagtgaacac

SEQ ID NO: 277161 - DNA, 33 bp, Homo sapien
aaaattcattagtacaaacaaagtgcaccagga

SEQ ID NO: 277162 - DNA, 33 bp, Homo sapien
aaaattcattagtacagacaaagtgcaccagga

SEQ ID NO: 277163 - DNA, 33 bp, Homo sapien
tgtattttttatcttaaaagagaagctgtaaat

SEQ ID NO: 277164 - DNA, 33 bp, Homo sapien
tgtattttttatcttagaagagaagctgtaaat

SEQ ID NO: 277165 - DNA, 33 bp, Homo sapien
acttgaatagtcctgaatatttttaacagtgaa

SEQ ID NO: 277166 - DNA, 33 bp, Homo sapien
acttgaatagtcctgagtatttttaacagtgaa

SEQ ID NO: 277167 - DNA, 33 bp, Homo sapien
gtatacagatttattaacatgcactggagtcct

SEQ ID NO: 277168 - DNA, 33 bp, Homo sapien
gtatacagatttattagcatgcactggagtcct

SEQ ID NO: 277169 - DNA, 33 bp, Homo sapien
tgggaagaggagaagacgtgccctggatagtaa

SEQ ID NO: 277170 - DNA, 33 bp, Homo sapien
tgggaagaggagaagatgtgccctggatagtaa

SEQ ID NO: 277171 - DNA, 33 bp, Homo sapien
taaaagtcttaaagtaacatttcccatctattt

SEQ ID NO: 277172 - DNA, 33 bp, Homo sapien
taaaagtcttaaagtatcatttcccatctattt

SEQ ID NO: 277173 - DNA, 33 bp, Homo sapien
gagaagtccttggtggccatggtttatagcatg

SEQ ID NO: 277174 - DNA, 33 bp, Homo sapien
gagaagtccttggtggtcatggtttatagcatg

SEQ ID NO: 277175 - DNA, 33 bp, Homo sapien
tttattagtgcacttacgccgttataatatacc

SEQ ID NO: 277176 - DNA, 33 bp, Homo sapien
tttattagtgcacttatgccgttataatatacc

SEQ ID NO: 277177 - DNA, 33 bp, Homo sapien
tagcaggagacactctaaagtagaaaaccagat

SEQ ID NO: 277178 - DNA, 33 bp, Homo sapien
tagcaggagacactctgaagtagaaaaccagat

SEQ ID NO: 277179 - DNA, 33 bp, Homo sapien
atgatgggaatggcaaaaggtacagaatttgct

SEQ ID NO: 277180 - DNA, 33 bp, Homo sapien
atgatgggaatggcaagaggtacagaatttgct

SEQ ID NO: 277181 - DNA, 33 bp, Homo sapien
aagacagaggatggaaccaattaacttgaggaa

SEQ ID NO: 277182 - DNA, 33 bp, Homo sapien
aagacagaggatggaatcaattaacttgaggaa

SEQ ID NO: 277183 - DNA, 33 bp, Homo sapien
aatgaaagagtgagacgacctcgttgccttctg

SEQ ID NO: 277184 - DNA, 33 bp, Homo sapien
aatgaaagagtgagactacctcgttgccttctg

SEQ ID NO: 277185 - DNA, 33 bp, Homo sapien
agagaatcacttgtagaatttgatccactttcc

SEQ ID NO: 277186 - DNA, 33 bp, Homo sapien
agagaatcacttgtagcatttgatccactttcc

SEQ ID NO: 277187 - DNA, 33 bp, Homo sapien
acatattttctttctcaattattctgagcgtat

SEQ ID NO: 277188 - DNA, 33 bp, Homo sapien
acatattttctttctcgattattctgagcgtat

SEQ ID NO: 277189 - DNA, 33 bp, Homo sapien
tctatcaaagaagaaactgacaagctaggaaaa

SEQ ID NO: 277190 - DNA, 33 bp, Homo sapien
tctatcaaagaagaaattgacaagctaggaaaa

SEQ ID NO: 277191 - DNA, 33 bp, Homo sapien
ctgccttaactagtatcaatttcagaattttat

SEQ ID NO: 277192 - DNA, 33 bp, Homo sapien
ctgccttaactagtatgaatttcagaattttat

SEQ ID NO: 277193 - DNA, 33 bp, Homo sapien
ttaggataacagccaccagctctttggattatt

SEQ ID NO: 277194 - DNA, 33 bp, Homo sapien
ttaggataacagccacgagctctttggattatt

SEQ ID NO: 277195 - DNA, 33 bp, Homo sapien
attattgtccaagagactaccatttttactatt

SEQ ID NO: 277196 - DNA, 33 bp, Homo sapien
attattgtccaagagattaccatttttactatt

SEQ ID NO: 277197 - DNA, 33 bp, Homo sapien
tgactctggttggtcaaaaggaacttatgaggt

SEQ ID NO: 277198 - DNA, 33 bp, Homo sapien
tgactctggttggtcagaaggaacttatgaggt

SEQ ID NO: 277199 - DNA, 33 bp, Homo sapien
tagttctggaattagaaaatctgaaatcaagat

SEQ ID NO: 277200 - DNA, 33 bp, Homo sapien
tagttctggaattagacaatctgaaatcaagat

SEQ ID NO: 277201 - DNA, 33 bp, Homo sapien
acatgaaaacattgaacaacctaaaatgcattt

SEQ ID NO: 277202 - DNA, 33 bp, Homo sapien
acatgaaaacattgaagaacctaaaatgcattt

SEQ ID NO: 277203 - DNA, 33 bp, Homo sapien
cattatgtccatggaactatacaacacaagaca

SEQ ID NO: 277204 - DNA, 33 bp, Homo sapien
cattatgtccatggaagtatacaacacaagaca

SEQ ID NO: 277205 - DNA, 33 bp, Homo sapien
acaagacacatagaacggtccaacatggagagg

SEQ ID NO: 277206 - DNA, 33 bp, Homo sapien
acaagacacatagaactgtccaacatggagagg

SEQ ID NO: 277207 - DNA, 33 bp, Homo sapien
aggaattatagctacccctaccagtaatcccaa

SEQ ID NO: 277208 - DNA, 33 bp, Homo sapien
aggaattatagctacctctaccagtaatcccaa

SEQ ID NO: 277209 - DNA, 33 bp, Homo sapien
ggaaggaacaatagaacgaacccgctggcactg

SEQ ID NO: 277210 - DNA, 33 bp, Homo sapien
ggaaggaacaatagaatgaacccgctggcactg

SEQ ID NO: 277211 - DNA, 33 bp, Homo sapien
tttatgttccaagataagattacatttaagaat

SEQ ID NO: 277212 - DNA, 33 bp, Homo sapien
tttatgttccaagatatgattacatttaagaat

SEQ ID NO: 277213 - DNA, 33 bp, Homo sapien
ttcatgacattcaccaaaattaggacagtagtt

SEQ ID NO: 277214 - DNA, 33 bp, Homo sapien
ttcatgacattcaccagaattaggacagtagtt

SEQ ID NO: 277215 - DNA, 33 bp, Homo sapien
tgtttcatacatcataagtagcattagcttttt

SEQ ID NO: 277216 - DNA, 33 bp, Homo sapien
tgtttcatacatcatatgtagcattagcttttt

SEQ ID NO: 277217 - DNA, 33 bp, Homo sapien
aggagtcaaaacagatcacaaggagaagatgaa

SEQ ID NO: 277218 - DNA, 33 bp, Homo sapien
aggagtcaaaacagatgacaaggagaagatgaa

SEQ ID NO: 277219 - DNA, 33 bp, Homo sapien
ttccttgacttgccacaatgttgcagtagttct

SEQ ID NO: 277220 - DNA, 33 bp, Homo sapien
ttccttgacttgccacgatgttgcagtagttct

SEQ ID NO: 277221 - DNA, 33 bp, Homo sapien
atgattgttaaaaaccacaaaggcctctgctac

SEQ ID NO: 277222 - DNA, 33 bp, Homo sapien
atgattgttaaaaacctcaaaggcctctgctac

SEQ ID NO: 277223 - DNA, 33 bp, Homo sapien
cttgctatcccccaaccgcacaattcataacct

SEQ ID NO: 277224 - DNA, 33 bp, Homo sapien
cttgctatcccccaactgcacaattcataacct

SEQ ID NO: 277225 - DNA, 33 bp, Homo sapien
caatgtataattaataagtgagtcatccttgag

SEQ ID NO: 277226 - DNA, 33 bp, Homo sapien
caatgtataattaataggtgagtcatccttgag

SEQ ID NO: 277227 - DNA, 33 bp, Homo sapien
agtcatccttgagaataatagggttaaatggaa

SEQ ID NO: 277228 - DNA, 33 bp, Homo sapien
agtcatccttgagaatgatagggttaaatggaa

SEQ ID NO: 277229 - DNA, 33 bp, Homo sapien
tgaatctcattagaagaccacattggggttggt

SEQ ID NO: 277230 - DNA, 33 bp, Homo sapien
tgaatctcattagaagtccacattggggttggt

SEQ ID NO: 277231 - DNA, 33 bp, Homo sapien
cttgactcaggagatgcagataatttggaatag

SEQ ID NO: 277232 - DNA, 33 bp, Homo sapien
cttgactcaggagatgtagataatttggaatag

SEQ ID NO: 277233 - DNA, 33 bp, Homo sapien
aataattatatctgaaccctgctttacttgaat

SEQ ID NO: 277234 - DNA, 33 bp, Homo sapien
aataattatatctgaatcctgctttacttgaat

SEQ ID NO: 277235 - DNA, 33 bp, Homo sapien
ttatataaagacagaccgaataggtgacatggg

SEQ ID NO: 277236 - DNA, 33 bp, Homo sapien
ttatataaagacagactgaataggtgacatggg

SEQ ID NO: 277237 - DNA, 33 bp, Homo sapien
gtgacatgggatgtggaataaagtgtcttggcg

SEQ ID NO: 277238 - DNA, 33 bp, Homo sapien
gtgacatgggatgtgggataaagtgtcttggcg

SEQ ID NO: 277239 - DNA, 33 bp, Homo sapien
atctctggatattgctaacacatgcacaagtat

SEQ ID NO: 277240 - DNA, 33 bp, Homo sapien
atctctggatattgctgacacatgcacaagtat

SEQ ID NO: 277241 - DNA, 33 bp, Homo sapien
tcctaacagactgatacagaatggattattatt

SEQ ID NO: 277242 - DNA, 33 bp, Homo sapien
tcctaacagactgatagagaatggattattatt

SEQ ID NO: 277243 - DNA, 33 bp, Homo sapien
tgactgtgaagaccacaacagagtcaggaaaaa

SEQ ID NO: 277244 - DNA, 33 bp, Homo sapien
tgactgtgaagaccaccacagagtcaggaaaaa

SEQ ID NO: 277245 - DNA, 33 bp, Homo sapien
tatcagaaagtgacaaatgtctaaattaatccc

SEQ ID NO: 277246 - DNA, 33 bp, Homo sapien
tatcagaaagtgacaagtgtctaaattaatccc

SEQ ID NO: 277247 - DNA, 33 bp, Homo sapien
gtctcctgtcttgaaactactttgtcagttgtt

SEQ ID NO: 277248 - DNA, 33 bp, Homo sapien
gtctcctgtcttgaaattactttgtcagttgtt

SEQ ID NO: 277249 - DNA, 33 bp, Homo sapien
tttgctcattgtcttccaaacataaaattgctc

SEQ ID NO: 277250 - DNA, 33 bp, Homo sapien
tttgctcattgtcttctaaacataaaattgctc

SEQ ID NO: 277251 - DNA, 33 bp, Homo sapien
tgaatttatggcggaaattagaagcccagtgaa

SEQ ID NO: 277252 - DNA, 33 bp, Homo sapien
tgaatttatggcggaagttagaagcccagtgaa

SEQ ID NO: 277253 - DNA, 33 bp, Homo sapien
ttttttctaccaatacaaatgaagctggcactt

SEQ ID NO: 277254 - DNA, 33 bp, Homo sapien
ttttttctaccaatacgaatgaagctggcactt

SEQ ID NO: 277255 - DNA, 33 bp, Homo sapien
cattactatggctttgaattgtactctggctgt

SEQ ID NO: 277256 - DNA, 33 bp, Homo sapien
cattactatggctttgtattgtactctggctgt

SEQ ID NO: 277257 - DNA, 33 bp, Homo sapien
caggtgttgctacatcaaattaagtgacctgga

SEQ ID NO: 277258 - DNA, 33 bp, Homo sapien
caggtgttgctacatcgaattaagtgacctgga

SEQ ID NO: 277259 - DNA, 33 bp, Homo sapien
aaaaagcaacagctaacaagcagctaataggga

SEQ ID NO: 277260 - DNA, 33 bp, Homo sapien
aaaaagcaacagctaagaagcagctaataggga

SEQ ID NO: 277261 - DNA, 33 bp, Homo sapien
taatgccttcccaaaactaactctgtgagtttt

SEQ ID NO: 277262 - DNA, 33 bp, Homo sapien
taatgccttcccaaaattaactctgtgagtttt

SEQ ID NO: 277263 - DNA, 33 bp, Homo sapien
ccaaaatttatcttccaaattccagttctctaa

SEQ ID NO: 277264 - DNA, 33 bp, Homo sapien
ccaaaatttatcttccgaattccagttctctaa

SEQ ID NO: 277265 - DNA, 33 bp, Homo sapien
gctggatcatatggtacgttaaatccactgcat

SEQ ID NO: 277266 - DNA, 33 bp, Homo sapien
gctggatcatatggtatgttaaatccactgcat

SEQ ID NO: 277267 - DNA, 33 bp, Homo sapien
gattgtcaacatttcccaacacatgcattgctg

SEQ ID NO: 277268 - DNA, 33 bp, Homo sapien
gattgtcaacatttcctaacacatgcattgctg

SEQ ID NO: 277269 - DNA, 33 bp, Homo sapien
gtctgcctagctctaaatactccagttgactgg

SEQ ID NO: 277270 - DNA, 33 bp, Homo sapien
gtctgcctagctctaattactccagttgactgg

SEQ ID NO: 277271 - DNA, 33 bp, Homo sapien
acatatgtgatctcaaatggttacactatgcca

SEQ ID NO: 277272 - DNA, 33 bp, Homo sapien
acatatgtgatctcaattggttacactatgcca

SEQ ID NO: 277273 - DNA, 33 bp, Homo sapien
aggagtgtattaaataagaaggataggcataat

SEQ ID NO: 277274 - DNA, 33 bp, Homo sapien
aggagtgtattaaatacgaaggataggcataat

SEQ ID NO: 277275 - DNA, 33 bp, Homo sapien
agctcaagactgctacaatggatattttgcata

SEQ ID NO: 277276 - DNA, 33 bp, Homo sapien
agctcaagactgctaccatggatattttgcata

SEQ ID NO: 277277 - DNA, 33 bp, Homo sapien
caagctgggcttaacactgtgcaatataatttc

SEQ ID NO: 277278 - DNA, 33 bp, Homo sapien
caagctgggcttaacattgtgcaatataatttc

SEQ ID NO: 277279 - DNA, 33 bp, Homo sapien
aacaaagtttacattcacaaggaagattactgt

SEQ ID NO: 277280 - DNA, 33 bp, Homo sapien
aacaaagtttacattcgcaaggaagattactgt

SEQ ID NO: 277281 - DNA, 33 bp, Homo sapien
atgaatgacaagacaacgctgatgttggaattt

SEQ ID NO: 277282 - DNA, 33 bp, Homo sapien
atgaatgacaagacaatgctgatgttggaattt

SEQ ID NO: 277283 - DNA, 33 bp, Homo sapien
taagtctatattctctcacaaacaagtactaaa

SEQ ID NO: 277284 - DNA, 33 bp, Homo sapien
taagtctatattctcttacaaacaagtactaaa

SEQ ID NO: 277285 - DNA, 33 bp, Homo sapien
gttttcagtgtgccaaccattaatttccttggt

SEQ ID NO: 277286 - DNA, 33 bp, Homo sapien
gttttcagtgtgccaatcattaatttccttggt

SEQ ID NO: 277287 - DNA, 33 bp, Homo sapien
ctaattaagggttccaaactagatgaatcattt

SEQ ID NO: 277288 - DNA, 33 bp, Homo sapien
ctaattaagggttccagactagatgaatcattt

SEQ ID NO: 277289 - DNA, 33 bp, Homo sapien
atcagcaagatcttcccacgaaactgtttaaaa

SEQ ID NO: 277290 - DNA, 33 bp, Homo sapien
atcagcaagatcttcctacgaaactgtttaaaa

SEQ ID NO: 277291 - DNA, 33 bp, Homo sapien
ctaggcaatgtttaaaactcacaagatccaata

SEQ ID NO: 277292 - DNA, 33 bp, Homo sapien
ctaggcaatgtttaaagctcacaagatccaata

SEQ ID NO: 277293 - DNA, 33 bp, Homo sapien
acattgtaggggacacaaaagtggtgacaaaaa

SEQ ID NO: 277294 - DNA, 33 bp, Homo sapien
acattgtaggggacacgaaagtggtgacaaaaa

SEQ ID NO: 277295 - DNA, 33 bp, Homo sapien
acaattttagacgaaaaacacatggatgaaaat

SEQ ID NO: 277296 - DNA, 33 bp, Homo sapien
acaattttagacgaaatacacatggatgaaaat

SEQ ID NO: 277297 - DNA, 33 bp, Homo sapien
cacagtattcataaaacgtttgcattatgtaga

SEQ ID NO: 277298 - DNA, 33 bp, Homo sapien
cacagtattcataaaatgtttgcattatgtaga

SEQ ID NO: 277299 - DNA, 33 bp, Homo sapien
ctattccagaacatcacgtagttggcatcatac

SEQ ID NO: 277300 - DNA, 33 bp, Homo sapien
ctattccagaacatcatgtagttggcatcatac

SEQ ID NO: 277301 - DNA, 33 bp, Homo sapien
ttgatgtttcatttccactttcattcagttaaa

SEQ ID NO: 277302 - DNA, 33 bp, Homo sapien
ttgatgtttcatttccgctttcattcagttaaa

SEQ ID NO: 277303 - DNA, 33 bp, Homo sapien
ataatacgaactacaaaatacgtctaaatagtt

SEQ ID NO: 277304 - DNA, 33 bp, Homo sapien
ataatacgaactacaagatacgtctaaatagtt

SEQ ID NO: 277305 - DNA, 33 bp, Homo sapien
ccaaaggtcatgttgaagtcctgagggagcacg

SEQ ID NO: 277306 - DNA, 33 bp, Homo sapien
ccaaaggtcatgttgaggtcctgagggagcacg

SEQ ID NO: 277307 - DNA, 33 bp, Homo sapien
ggtgtaattgtgaacccgacaacatgatagaaa

SEQ ID NO: 277308 - DNA, 33 bp, Homo sapien
ggtgtaattgtgaacctgacaacatgatagaaa

SEQ ID NO: 277309 - DNA, 33 bp, Homo sapien
aatgcaactgcccgtcactctatcccattgtat

SEQ ID NO: 277310 - DNA, 33 bp, Homo sapien
aatgcaactgcccgtctctctatcccattgtat

SEQ ID NO: 277311 - DNA, 33 bp, Homo sapien
attaaaaagtcaaaaaatcactgatcctgtcaa

SEQ ID NO: 277312 - DNA, 33 bp, Homo sapien
attaaaaagtcaaaaagtcactgatcctgtcaa

SEQ ID NO: 277313 - DNA, 33 bp, Homo sapien
ttataataaaacttgacagagaatggtatataa

SEQ ID NO: 277314 - DNA, 33 bp, Homo sapien
ttataataaaacttgatagagaatggtatataa

SEQ ID NO: 277315 - DNA, 33 bp, Homo sapien
agcatctgtcacgaaacgaacctcttcctccac

SEQ ID NO: 277316 - DNA, 33 bp, Homo sapien
agcatctgtcacgaaatgaacctcttcctccac

SEQ ID NO: 277317 - DNA, 33 bp, Homo sapien
aggtggtaagatcggacgacatttactgctggg

SEQ ID NO: 277318 - DNA, 33 bp, Homo sapien
aggtggtaagatcggaggacatttactgctggg

SEQ ID NO: 277319 - DNA, 33 bp, Homo sapien
cctgatagagcaaaacaatgagcttagacagct

SEQ ID NO: 277320 - DNA, 33 bp, Homo sapien
cctgatagagcaaaactatgagcttagacagct

SEQ ID NO: 277321 - DNA, 33 bp, Homo sapien
atgacaaaacttaatacgtcctactgtaattga

SEQ ID NO: 277322 - DNA, 33 bp, Homo sapien
atgacaaaacttaatatgtcctactgtaattga

SEQ ID NO: 277323 - DNA, 33 bp, Homo sapien
cttggttctattgataaactaagactatgttgt

SEQ ID NO: 277324 - DNA, 33 bp, Homo sapien
cttggttctattgatatactaagactatgttgt

SEQ ID NO: 277325 - DNA, 33 bp, Homo sapien
tcagcttttttaagccccatggaccattcagaa

SEQ ID NO: 277326 - DNA, 33 bp, Homo sapien
tcagcttttttaagcctcatggaccattcagaa

SEQ ID NO: 277327 - DNA, 33 bp, Homo sapien
aataaacaagggtacaaagaaagagggaagcgt

SEQ ID NO: 277328 - DNA, 33 bp, Homo sapien
aataaacaagggtacagagaaagagggaagcgt

SEQ ID NO: 277329 - DNA, 33 bp, Homo sapien
acaaaatctgctgacacgagtacatagcactag

SEQ ID NO: 277330 - DNA, 33 bp, Homo sapien
acaaaatctgctgacatgagtacatagcactag

SEQ ID NO: 277331 - DNA, 33 bp, Homo sapien
acatagcactagaaaacaagctttctgacaccc

SEQ ID NO: 277332 - DNA, 33 bp, Homo sapien
acatagcactagaaaagaagctttctgacaccc

SEQ ID NO: 277333 - DNA, 33 bp, Homo sapien
tcactgatgatataaaacagctttagcattata

SEQ ID NO: 277334 - DNA, 33 bp, Homo sapien
tcactgatgatataaaccagctttagcattata

SEQ ID NO: 277335 - DNA, 33 bp, Homo sapien
acccattggaagaatacgtgtcaataaaaatac

SEQ ID NO: 277336 - DNA, 33 bp, Homo sapien
acccattggaagaatatgtgtcaataaaaatac

SEQ ID NO: 277337 - DNA, 33 bp, Homo sapien
atggtagttattccaacttatactctccttctt

SEQ ID NO: 277338 - DNA, 33 bp, Homo sapien
atggtagttattccaatttatactctccttctt

SEQ ID NO: 277339 - DNA, 33 bp, Homo sapien
attccatttttctgaaagtgagagaatcaatac

SEQ ID NO: 277340 - DNA, 33 bp, Homo sapien
attccatttttctgaaggtgagagaatcaatac

SEQ ID NO: 277341 - DNA, 33 bp, Homo sapien
attatttaacaagtaacgaatggctggatttca

SEQ ID NO: 277342 - DNA, 33 bp, Homo sapien
attatttaacaagtaatgaatggctggatttca

SEQ ID NO: 277343 - DNA, 33 bp, Homo sapien
ctaatttcatcaggaaccaccttcacaggcaca

SEQ ID NO: 277344 - DNA, 33 bp, Homo sapien
ctaatttcatcaggaatcaccttcacaggcaca

SEQ ID NO: 277345 - DNA, 33 bp, Homo sapien
agcaggtgaaaacctacgtccttatgaggcaaa

SEQ ID NO: 277346 - DNA, 33 bp, Homo sapien
agcaggtgaaaacctatgtccttatgaggcaaa

SEQ ID NO: 277347 - DNA, 33 bp, Homo sapien
gtctgtggctattttaggttgagattgaaagct

SEQ ID NO: 277348 - DNA, 33 bp, Homo sapien
gtctgtggctattttatgttgagattgaaagct

SEQ ID NO: 277349 - DNA, 33 bp, Homo sapien
ttaagatttaattaccaccttgttgggtttcag

SEQ ID NO: 277350 - DNA, 33 bp, Homo sapien
ttaagatttaattaccgccttgttgggtttcag

SEQ ID NO: 277351 - DNA, 33 bp, Homo sapien
acagtcagacaggagacgtaattctaaatttac

SEQ ID NO: 277352 - DNA, 33 bp, Homo sapien
acagtcagacaggagatgtaattctaaatttac

SEQ ID NO: 277353 - DNA, 33 bp, Homo sapien
taactaagggtgacaacatactaacaagaggaa

SEQ ID NO: 277354 - DNA, 33 bp, Homo sapien
taactaagggtgacaagatactaacaagaggaa

SEQ ID NO: 277355 - DNA, 33 bp, Homo sapien
cttagatctgtatttaacctttcataggacaac

SEQ ID NO: 277356 - DNA, 33 bp, Homo sapien
cttagatctgtatttagcctttcataggacaac

SEQ ID NO: 277357 - DNA, 33 bp, Homo sapien
ttatttacaatgaaaaactgtaggtcaatagaa

SEQ ID NO: 277358 - DNA, 33 bp, Homo sapien
ttatttacaatgaaaagctgtaggtcaatagaa

SEQ ID NO: 277359 - DNA, 33 bp, Homo sapien
gtctcttttctcaccaatactgaaaaaagatgc

SEQ ID NO: 277360 - DNA, 33 bp, Homo sapien
gtctcttttctcaccagtactgaaaaaagatgc

SEQ ID NO: 277361 - DNA, 33 bp, Homo sapien
aatagaaatgagtccaatattccccacagagaa

SEQ ID NO: 277362 - DNA, 33 bp, Homo sapien
aatagaaatgagtccactattccccacagagaa

SEQ ID NO: 277363 - DNA, 33 bp, Homo sapien
cctatctagctgtaacacttctctggatactct

SEQ ID NO: 277364 - DNA, 33 bp, Homo sapien
cctatctagctgtaacgcttctctggatactct

SEQ ID NO: 277365 - DNA, 33 bp, Homo sapien
gagacaacaattctaacggaaatcctcactttg

SEQ ID NO: 277366 - DNA, 33 bp, Homo sapien
gagacaacaattctaatggaaatcctcactttg

SEQ ID NO: 277367 - DNA, 33 bp, Homo sapien
catccatattttgtaactgcccattttagagca

SEQ ID NO: 277368 - DNA, 33 bp, Homo sapien
catccatattttgtaattgcccattttagagca

SEQ ID NO: 277369 - DNA, 33 bp, Homo sapien
tcctaagtaattttcaagtaaccttcagtaagg

SEQ ID NO: 277370 - DNA, 33 bp, Homo sapien
tcctaagtaattttcaggtaaccttcagtaagg

SEQ ID NO: 277371 - DNA, 33 bp, Homo sapien
gtattgtttgttgtgcgccacatatcctacttt

SEQ ID NO: 277372 - DNA, 33 bp, Homo sapien
gtattgtttgttgtgctccacatatcctacttt

SEQ ID NO: 277373 - DNA, 33 bp, Homo sapien
ctaatacatcaccacaaaatataagtagttgag

SEQ ID NO: 277374 - DNA, 33 bp, Homo sapien
ctaatacatcaccacagaatataagtagttgag

SEQ ID NO: 277375 - DNA, 33 bp, Homo sapien
ataaagattcagacaactcaaaagtaaagggat

SEQ ID NO: 277376 - DNA, 33 bp, Homo sapien
ataaagattcagacaattcaaaagtaaagggat

SEQ ID NO: 277377 - DNA, 33 bp, Homo sapien
ttatactcatgtaatactatcatttgtgtcgat

SEQ ID NO: 277378 - DNA, 33 bp, Homo sapien
ttatactcatgtaatagtatcatttgtgtcgat

SEQ ID NO: 277379 - DNA, 33 bp, Homo sapien
ttgtaatcctttgcccaactcagatgtgtttca

SEQ ID NO: 277380 - DNA, 33 bp, Homo sapien
ttgtaatcctttgccccactcagatgtgtttca

SEQ ID NO: 277381 - DNA, 33 bp, Homo sapien
cagatagaagtcttaacgatatggaagttaact

SEQ ID NO: 277382 - DNA, 33 bp, Homo sapien
cagatagaagtcttaatgatatggaagttaact

SEQ ID NO: 277383 - DNA, 33 bp, Homo sapien
gatttataagtaaatacagactcaggcattgaa

SEQ ID NO: 277384 - DNA, 33 bp, Homo sapien
gatttataagtaaatatagactcaggcattgaa

SEQ ID NO: 277385 - DNA, 33 bp, Homo sapien
tgctgcgttttgaataacaaacagtaagagttt

SEQ ID NO: 277386 - DNA, 33 bp, Homo sapien
tgctgcgttttgaatatcaaacagtaagagttt

SEQ ID NO: 277387 - DNA, 33 bp, Homo sapien
cacagaatttttgagaggactaaatgaaacaaa

SEQ ID NO: 277388 - DNA, 33 bp, Homo sapien
cacagaatttttgagatgactaaatgaaacaaa

SEQ ID NO: 277389 - DNA, 33 bp, Homo sapien
tatggctctcacttgaagagtcctaaggtctga

SEQ ID NO: 277390 - DNA, 33 bp, Homo sapien
tatggctctcacttgaggagtcctaaggtctga

SEQ ID NO: 277391 - DNA, 33 bp, Homo sapien
gctcatgtttgttcccactgcctgcagcacagt

SEQ ID NO: 277392 - DNA, 33 bp, Homo sapien
gctcatgtttgttcccgctgcctgcagcacagt

SEQ ID NO: 277393 - DNA, 33 bp, Homo sapien
tgggggagaaaaagcccctgggtaccacatgct

SEQ ID NO: 277394 - DNA, 33 bp, Homo sapien
tgggggagaaaaagcctctgggtaccacatgct

SEQ ID NO: 277395 - DNA, 33 bp, Homo sapien
cttaatcttaagtgtccatttgtgcagcattga

SEQ ID NO: 277396 - DNA, 33 bp, Homo sapien
cttaatcttaagtgtctatttgtgcagcattga

SEQ ID NO: 277397 - DNA, 33 bp, Homo sapien
gaatccttctgttacaaccaacaataaaaatgt

SEQ ID NO: 277398 - DNA, 33 bp, Homo sapien
gaatccttctgttacagccaacaataaaaatgt

SEQ ID NO: 277399 - DNA, 33 bp, Homo sapien
ctacaataccacaaaaatgcataatagtgaaga

SEQ ID NO: 277400 - DNA, 33 bp, Homo sapien
ctacaataccacaaaagtgcataatagtgaaga

SEQ ID NO: 277401 - DNA, 33 bp, Homo sapien
aaaagtacataatcgaactgacagagctgaaaa

SEQ ID NO: 277402 - DNA, 33 bp, Homo sapien
aaaagtacataatcgacctgacagagctgaaaa

SEQ ID NO: 277403 - DNA, 33 bp, Homo sapien
taaagaagtaccagtacattattgatcttataa

SEQ ID NO: 277404 - DNA, 33 bp, Homo sapien
taaagaagtaccagtatattattgatcttataa

SEQ ID NO: 277405 - DNA, 33 bp, Homo sapien
tccatataacatgctcagagactctacatataa

SEQ ID NO: 277406 - DNA, 33 bp, Homo sapien
tccatataacatgctcggagactctacatataa

SEQ ID NO: 277407 - DNA, 33 bp, Homo sapien
aagctacttttgtaacactttctttcatttcac

SEQ ID NO: 277408 - DNA, 33 bp, Homo sapien
aagctacttttgtaacgctttctttcatttcac

SEQ ID NO: 277409 - DNA, 33 bp, Homo sapien
agtgagactgtggccacctggattgctcacatg

SEQ ID NO: 277410 - DNA, 33 bp, Homo sapien
agtgagactgtggccatctggattgctcacatg

SEQ ID NO: 277411 - DNA, 33 bp, Homo sapien
ccacaaatttactaggacagagttgttccccac

SEQ ID NO: 277412 - DNA, 33 bp, Homo sapien
ccacaaatttactagggcagagttgttccccac

SEQ ID NO: 277413 - DNA, 33 bp, Homo sapien
tgtgaataacatttccacagagctagaggccaa

SEQ ID NO: 277414 - DNA, 33 bp, Homo sapien
tgtgaataacatttccgcagagctagaggccaa

SEQ ID NO: 277415 - DNA, 33 bp, Homo sapien
ttagaacctgaatggacagaagccaacagttcc

SEQ ID NO: 277416 - DNA, 33 bp, Homo sapien
ttagaacctgaatggagagaagccaacagttcc

SEQ ID NO: 277417 - DNA, 33 bp, Homo sapien
ttgttatctctgcttaaaaactatgatcactaa

SEQ ID NO: 277418 - DNA, 33 bp, Homo sapien
ttgttatctctgcttacaaactatgatcactaa

SEQ ID NO: 277419 - DNA, 33 bp, Homo sapien
cctatattatgaagtgaaaaaccagtcttttga

SEQ ID NO: 277420 - DNA, 33 bp, Homo sapien
cctatattatgaagtggaaaaccagtcttttga

SEQ ID NO: 277421 - DNA, 33 bp, Homo sapien
ttaatgtgttgagagaaagcaaatcacttcttt

SEQ ID NO: 277422 - DNA, 33 bp, Homo sapien
ttaatgtgttgagagagagcaaatcacttcttt

SEQ ID NO: 277423 - DNA, 33 bp, Homo sapien
aaatttctgatacttaaacactttagattttct

SEQ ID NO: 277424 - DNA, 33 bp, Homo sapien
aaatttctgatacttagacactttagattttct

SEQ ID NO: 277425 - DNA, 33 bp, Homo sapien
tttggtaccagtatcacggtttggttactgtag

SEQ ID NO: 277426 - DNA, 33 bp, Homo sapien
tttggtaccagtatcatggtttggttactgtag

SEQ ID NO: 277427 - DNA, 33 bp, Homo sapien
gtgtaaggccattttaactgtgaccaggatgta

SEQ ID NO: 277428 - DNA, 33 bp, Homo sapien
gtgtaaggccattttacctgtgaccaggatgta

SEQ ID NO: 277429 - DNA, 33 bp, Homo sapien
gcaagtgattcaagaaattacattgtgagaagg

SEQ ID NO: 277430 - DNA, 33 bp, Homo sapien
gcaagtgattcaagaagttacattgtgagaagg

SEQ ID NO: 277431 - DNA, 33 bp, Homo sapien
aggcaaaggaatatcactcagtgctaagaagga

SEQ ID NO: 277432 - DNA, 33 bp, Homo sapien
aggcaaaggaatatcattcagtgctaagaagga

SEQ ID NO: 277433 - DNA, 33 bp, Homo sapien
attcaaattttttacaactactgaagcttacac

SEQ ID NO: 277434 - DNA, 33 bp, Homo sapien
attcaaattttttacatctactgaagcttacac

SEQ ID NO: 277435 - DNA, 33 bp, Homo sapien
caggttactaaacataagcttgatttacacact

SEQ ID NO: 277436 - DNA, 33 bp, Homo sapien
caggttactaaacataggcttgatttacacact

SEQ ID NO: 277437 - DNA, 33 bp, Homo sapien
agtgagaagattagaaaaagtagtcaaattatt

SEQ ID NO: 277438 - DNA, 33 bp, Homo sapien
agtgagaagattagaagaagtagtcaaattatt

SEQ ID NO: 277439 - DNA, 33 bp, Homo sapien
aatagctattctgatcaatgttaaatggtaact

SEQ ID NO: 277440 - DNA, 33 bp, Homo sapien
aatagctattctgatcgatgttaaatggtaact

SEQ ID NO: 277441 - DNA, 33 bp, Homo sapien
gattcaatttcccaagcaacaataacagactat

SEQ ID NO: 277442 - DNA, 33 bp, Homo sapien
gattcaatttcccaaggaacaataacagactat

SEQ ID NO: 277443 - DNA, 33 bp, Homo sapien
ttgtcttttatagccacgcaatctaatgtctga

SEQ ID NO: 277444 - DNA, 33 bp, Homo sapien
ttgtcttttatagccatgcaatctaatgtctga

SEQ ID NO: 277445 - DNA, 33 bp, Homo sapien
atttggaacttcatacaaaagataaggagagag

SEQ ID NO: 277446 - DNA, 33 bp, Homo sapien
atttggaacttcataccaaagataaggagagag

SEQ ID NO: 277447 - DNA, 33 bp, Homo sapien
tacagttaaggtcatactaagcctattagtcat

SEQ ID NO: 277448 - DNA, 33 bp, Homo sapien
tacagttaaggtcatattaagcctattagtcat

SEQ ID NO: 277449 - DNA, 33 bp, Homo sapien
gggtttaaatacgagtctgtgaaattcaagctt

SEQ ID NO: 277450 - DNA, 33 bp, Homo sapien
gggtttaaatacgagtttgtgaaattcaagctt

SEQ ID NO: 277451 - DNA, 33 bp, Homo sapien
tttcccattctttgatcatagctgtttgagcac

SEQ ID NO: 277452 - DNA, 33 bp, Homo sapien
tttcccattctttgatgatagctgtttgagcac

SEQ ID NO: 277453 - DNA, 33 bp, Homo sapien
tgggtgacagaaggaccgctataatagaccctc

SEQ ID NO: 277454 - DNA, 33 bp, Homo sapien
tgggtgacagaaggactgctataatagaccctc

SEQ ID NO: 277455 - DNA, 33 bp, Homo sapien
tcagtgttttcctagtcactaaattgtgaatta

SEQ ID NO: 277456 - DNA, 33 bp, Homo sapien
tcagtgttttcctagttactaaattgtgaatta

SEQ ID NO: 277457 - DNA, 33 bp, Homo sapien
ggcccaatgaatgtccactttatctaccaaaaa

SEQ ID NO: 277458 - DNA, 33 bp, Homo sapien
ggcccaatgaatgtccgctttatctaccaaaaa

SEQ ID NO: 277459 - DNA, 33 bp, Homo sapien
acatctctttgactcactccttatcttcttctt

SEQ ID NO: 277460 - DNA, 33 bp, Homo sapien
acatctctttgactcagtccttatcttcttctt

SEQ ID NO: 277461 - DNA, 33 bp, Homo sapien
agaccttacttagtgaaaaacactgcagttccc

SEQ ID NO: 277462 - DNA, 33 bp, Homo sapien
agaccttacttagtgacaaacactgcagttccc

SEQ ID NO: 277463 - DNA, 33 bp, Homo sapien
tagggaaccgaaatcacctgctactgtgatgtt

SEQ ID NO: 277464 - DNA, 33 bp, Homo sapien
tagggaaccgaaatcatctgctactgtgatgtt

SEQ ID NO: 277465 - DNA, 33 bp, Homo sapien
cttcctataaaaaatcaataccttagaaccatg

SEQ ID NO: 277466 - DNA, 33 bp, Homo sapien
cttcctataaaaaatccataccttagaaccatg

SEQ ID NO: 277467 - DNA, 33 bp, Homo sapien
cattagaagcctctaccacaaataacatattca

SEQ ID NO: 277468 - DNA, 33 bp, Homo sapien
cattagaagcctctactacaaataacatattca

SEQ ID NO: 277469 - DNA, 33 bp, Homo sapien
taaaatttgtagcataagctagaaggaagggga

SEQ ID NO: 277470 - DNA, 33 bp, Homo sapien
taaaatttgtagcataggctagaaggaagggga

SEQ ID NO: 277471 - DNA, 33 bp, Homo sapien
tcatcttccgtgcctaaagaatgcagagcctct

SEQ ID NO: 277472 - DNA, 33 bp, Homo sapien
tcatcttccgtgcctagagaatgcagagcctct

SEQ ID NO: 277473 - DNA, 33 bp, Homo sapien
ctatttataatcaagtaaatcaagtcaccaaat

SEQ ID NO: 277474 - DNA, 33 bp, Homo sapien
ctatttataatcaagtgaatcaagtcaccaaat

SEQ ID NO: 277475 - DNA, 33 bp, Homo sapien
tattgatttccacccaataagtatgactcaaga

SEQ ID NO: 277476 - DNA, 33 bp, Homo sapien
tattgatttccacccagtaagtatgactcaaga

SEQ ID NO: 277477 - DNA, 33 bp, Homo sapien
atttataagtgctgtaatgaaaagaaagagact

SEQ ID NO: 277478 - DNA, 33 bp, Homo sapien
atttataagtgctgtattgaaaagaaagagact

SEQ ID NO: 277479 - DNA, 33 bp, Homo sapien
gacggttggttgacaacagttttaaacaaagac

SEQ ID NO: 277480 - DNA, 33 bp, Homo sapien
gacggttggttgacaatagttttaaacaaagac

SEQ ID NO: 277481 - DNA, 33 bp, Homo sapien
caatagattcttgacaaaagtgtaaatgcaatt

SEQ ID NO: 277482 - DNA, 33 bp, Homo sapien
caatagattcttgacagaagtgtaaatgcaatt

SEQ ID NO: 277483 - DNA, 33 bp, Homo sapien
ccatgttctatttccactaatacctgtacacta

SEQ ID NO: 277484 - DNA, 33 bp, Homo sapien
ccatgttctatttccagtaatacctgtacacta

SEQ ID NO: 277485 - DNA, 33 bp, Homo sapien
tttcccagttagtgcacctgtattttgaacaat

SEQ ID NO: 277486 - DNA, 33 bp, Homo sapien
tttcccagttagtgcatctgtattttgaacaat

SEQ ID NO: 277487 - DNA, 33 bp, Homo sapien
tccttctatctaaccaccaaaatatgcccctgg

SEQ ID NO: 277488 - DNA, 33 bp, Homo sapien
tccttctatctaaccatcaaaatatgcccctgg

SEQ ID NO: 277489 - DNA, 33 bp, Homo sapien
tataatatctacgttacgtaatagtcctcaaca

SEQ ID NO: 277490 - DNA, 33 bp, Homo sapien
tataatatctacgttatgtaatagtcctcaaca

SEQ ID NO: 277491 - DNA, 33 bp, Homo sapien
caccctccatcggtaacaagatcaccaggcatt

SEQ ID NO: 277492 - DNA, 33 bp, Homo sapien
caccctccatcggtaagaagatcaccaggcatt

SEQ ID NO: 277493 - DNA, 33 bp, Homo sapien
cctgtgcatatgctacaccaggggtcctcaacc

SEQ ID NO: 277494 - DNA, 33 bp, Homo sapien
cctgtgcatatgctacgccaggggtcctcaacc

SEQ ID NO: 277495 - DNA, 33 bp, Homo sapien
aaagataggttaaacaatccaatttgattccag

SEQ ID NO: 277496 - DNA, 33 bp, Homo sapien
aaagataggttaaacattccaatttgattccag

SEQ ID NO: 277497 - DNA, 33 bp, Homo sapien
actctgtcagcaacaaaatttcttatatcctca

SEQ ID NO: 277498 - DNA, 33 bp, Homo sapien
actctgtcagcaacaacatttcttatatcctca

SEQ ID NO: 277499 - DNA, 33 bp, Homo sapien
taagctctgagtctcacaatttctgggatctcc

SEQ ID NO: 277500 - DNA, 33 bp, Homo sapien
taagctctgagtctcataatttctgggatctcc

SEQ ID NO: 277501 - DNA, 33 bp, Homo sapien
gtagtacaaaaactgaaaattaggagtttgggg

SEQ ID NO: 277502 - DNA, 33 bp, Homo sapien
gtagtacaaaaactgacaattaggagtttgggg

SEQ ID NO: 277503 - DNA, 33 bp, Homo sapien
ttctgtgcctcaggaaactaaactttatggata

SEQ ID NO: 277504 - DNA, 33 bp, Homo sapien
ttctgtgcctcaggaagctaaactttatggata

SEQ ID NO: 277505 - DNA, 33 bp, Homo sapien
atactactttagacacaattatttcccagtgcc

SEQ ID NO: 277506 - DNA, 33 bp, Homo sapien
atactactttagacactattatttcccagtgcc

SEQ ID NO: 277507 - DNA, 33 bp, Homo sapien
gccacagtcatgatgcacaggagcagtaagatt

SEQ ID NO: 277508 - DNA, 33 bp, Homo sapien
gccacagtcatgatgcccaggagcagtaagatt

SEQ ID NO: 277509 - DNA, 33 bp, Homo sapien
gagtccaagacctgtgaatatccctgtggactc

SEQ ID NO: 277510 - DNA, 33 bp, Homo sapien
gagtccaagacctgtggatatccctgtggactc

SEQ ID NO: 277511 - DNA, 33 bp, Homo sapien
ttctattctggcaaaaggtatatatctccagca

SEQ ID NO: 277512 - DNA, 33 bp, Homo sapien
ttctattctggcaaaatgtatatatctccagca

SEQ ID NO: 277513 - DNA, 33 bp, Homo sapien
ctttaggagtaacagcaccatgtatgggaagtt

SEQ ID NO: 277514 - DNA, 33 bp, Homo sapien
ctttaggagtaacagcgccatgtatgggaagtt

SEQ ID NO: 277515 - DNA, 33 bp, Homo sapien
ggcagaccaaataaaactcacaccagaaaagac

SEQ ID NO: 277516 - DNA, 33 bp, Homo sapien
ggcagaccaaataaaattcacaccagaaaagac

SEQ ID NO: 277517 - DNA, 33 bp, Homo sapien
cattgctggcttaaaggctgttttatctgacac

SEQ ID NO: 277518 - DNA, 33 bp, Homo sapien
cattgctggcttaaagtctgttttatctgacac

SEQ ID NO: 277519 - DNA, 33 bp, Homo sapien
gatcagttcatcccccaattatggatggtgctt

SEQ ID NO: 277520 - DNA, 33 bp, Homo sapien
gatcagttcatccccccattatggatggtgctt

SEQ ID NO: 277521 - DNA, 33 bp, Homo sapien
gccagtaaaacatccaagtggggcagtgtaggc

SEQ ID NO: 277522 - DNA, 33 bp, Homo sapien
gccagtaaaacatccaggtggggcagtgtaggc

SEQ ID NO: 277523 - DNA, 33 bp, Homo sapien
tggctatctttccagcccttcaattttgtctga

SEQ ID NO: 277524 - DNA, 33 bp, Homo sapien
tggctatctttccagctcttcaattttgtctga

SEQ ID NO: 277525 - DNA, 33 bp, Homo sapien
aaataatacaggaagagtccatgagagatgtgg

SEQ ID NO: 277526 - DNA, 33 bp, Homo sapien
aaataatacaggaagattccatgagagatgtgg

SEQ ID NO: 277527 - DNA, 33 bp, Homo sapien
aaccataatcaagtgaaccaattgccctaatga

SEQ ID NO: 277528 - DNA, 33 bp, Homo sapien
aaccataatcaagtgagccaattgccctaatga

SEQ ID NO: 277529 - DNA, 33 bp, Homo sapien
taatacaactaccctaggtacactggaaacaca

SEQ ID NO: 277530 - DNA, 33 bp, Homo sapien
taatacaactaccctatgtacactggaaacaca

SEQ ID NO: 277531 - DNA, 33 bp, Homo sapien
tggtatttaagctaccaactatcaggagaggag

SEQ ID NO: 277532 - DNA, 33 bp, Homo sapien
tggtatttaagctaccgactatcaggagaggag

SEQ ID NO: 277533 - DNA, 33 bp, Homo sapien
tgcatccagtagaaaccgtaccttgaattttgc

SEQ ID NO: 277534 - DNA, 33 bp, Homo sapien
tgcatccagtagaaactgtaccttgaattttgc

SEQ ID NO: 277535 - DNA, 33 bp, Homo sapien
tctgtaactggtcacagtatcttacctggtatt

SEQ ID NO: 277536 - DNA, 33 bp, Homo sapien
tctgtaactggtcacattatcttacctggtatt

SEQ ID NO: 277537 - DNA, 33 bp, Homo sapien
tactcttggatggcatcaatcgtcacctcaact

SEQ ID NO: 277538 - DNA, 33 bp, Homo sapien
tactcttggatggcattaatcgtcacctcaact

SEQ ID NO: 277539 - DNA, 33 bp, Homo sapien
ctttcttcattccatcaactgtcatgttttata

SEQ ID NO: 277540 - DNA, 33 bp, Homo sapien
ctttcttcattccatcgactgtcatgttttata

SEQ ID NO: 277541 - DNA, 33 bp, Homo sapien
aatcttgaaggaaatacaaaggtaaatgaaagt

SEQ ID NO: 277542 - DNA, 33 bp, Homo sapien
aatcttgaaggaaatagaaaggtaaatgaaagt

SEQ ID NO: 277543 - DNA, 33 bp, Homo sapien
tcttgtggaggcttcacaatggctgtaagttaa

SEQ ID NO: 277544 - DNA, 33 bp, Homo sapien
tcttgtggaggcttcataatggctgtaagttaa

SEQ ID NO: 277545 - DNA, 33 bp, Homo sapien
gattatggtattcaaacgtggatagtcaaaaag

SEQ ID NO: 277546 - DNA, 33 bp, Homo sapien
gattatggtattcaaatgtggatagtcaaaaag

SEQ ID NO: 277547 - DNA, 33 bp, Homo sapien
gaaaaagtttttgcagacatgaaggttatttgt

SEQ ID NO: 277548 - DNA, 33 bp, Homo sapien
gaaaaagtttttgcaggcatgaaggttatttgt

SEQ ID NO: 277549 - DNA, 33 bp, Homo sapien
agtttctcaggtatgaagatgcaagtcatgcca

SEQ ID NO: 277550 - DNA, 33 bp, Homo sapien
agtttctcaggtatgaggatgcaagtcatgcca

SEQ ID NO: 277551 - DNA, 33 bp, Homo sapien
ctttgactggtggaccacagtgttcatcttctg

SEQ ID NO: 277552 - DNA, 33 bp, Homo sapien
ctttgactggtggaccccagtgttcatcttctg

SEQ ID NO: 277553 - DNA, 33 bp, Homo sapien
gggttatgaattatcaatatctttcaaacagtt

SEQ ID NO: 277554 - DNA, 33 bp, Homo sapien
gggttatgaattatcagtatctttcaaacagtt

SEQ ID NO: 277555 - DNA, 33 bp, Homo sapien
tagatatagtgtcaggaatgattttgtgaggaa

SEQ ID NO: 277556 - DNA, 33 bp, Homo sapien
tagatatagtgtcagggatgattttgtgaggaa

SEQ ID NO: 277557 - DNA, 33 bp, Homo sapien
gattatatgggcagtgaataattgaaaatcttt

SEQ ID NO: 277558 - DNA, 33 bp, Homo sapien
gattatatgggcagtggataattgaaaatcttt

SEQ ID NO: 277559 - DNA, 33 bp, Homo sapien
ttcagagctaagagaacggtggtgctgttcatt

SEQ ID NO: 277560 - DNA, 33 bp, Homo sapien
ttcagagctaagagaatggtggtgctgttcatt

SEQ ID NO: 277561 - DNA, 33 bp, Homo sapien
gttatcgattggtgtgcatgatagaagccacaa

SEQ ID NO: 277562 - DNA, 33 bp, Homo sapien
gttatcgattggtgtggatgatagaagccacaa

SEQ ID NO: 277563 - DNA, 33 bp, Homo sapien
ggtgcgtcattttgtccatcagaagcaggccta

SEQ ID NO: 277564 - DNA, 33 bp, Homo sapien
ggtgcgtcattttgtctatcagaagcaggccta

SEQ ID NO: 277565 - DNA, 33 bp, Homo sapien
atgtaattccctggtgaagctataatattaatg

SEQ ID NO: 277566 - DNA, 33 bp, Homo sapien
atgtaattccctggtgtagctataatattaatg

SEQ ID NO: 277567 - DNA, 33 bp, Homo sapien
tttggtatagttactacgtggaaataattctgg

SEQ ID NO: 277568 - DNA, 33 bp, Homo sapien
tttggtatagttactatgtggaaataattctgg

SEQ ID NO: 277569 - DNA, 33 bp, Homo sapien
gcatatttctaaaacacagatctgatcctttta

SEQ ID NO: 277570 - DNA, 33 bp, Homo sapien
gcatatttctaaaacatagatctgatcctttta

SEQ ID NO: 277571 - DNA, 33 bp, Homo sapien
acgaattcatactttcaccttaagaagtgtaat

SEQ ID NO: 277572 - DNA, 33 bp, Homo sapien
acgaattcatactttcgccttaagaagtgtaat

SEQ ID NO: 277573 - DNA, 33 bp, Homo sapien
tattagtcagatatacaataatgcctataaaac

SEQ ID NO: 277574 - DNA, 33 bp, Homo sapien
tattagtcagatatacgataatgcctataaaac

SEQ ID NO: 277575 - DNA, 33 bp, Homo sapien
agaaaagaatgatttacggattgcagatatttt

SEQ ID NO: 277576 - DNA, 33 bp, Homo sapien
agaaaagaatgatttatggattgcagatatttt

SEQ ID NO: 277577 - DNA, 33 bp, Homo sapien
attgctttaaaagttggactgagtggtcaatat

SEQ ID NO: 277578 - DNA, 33 bp, Homo sapien
attgctttaaaagttgtactgagtggtcaatat

SEQ ID NO: 277579 - DNA, 33 bp, Homo sapien
cccaaggtcatctaaccattttagcagcatctt

SEQ ID NO: 277580 - DNA, 33 bp, Homo sapien
cccaaggtcatctaacgattttagcagcatctt

SEQ ID NO: 277581 - DNA, 33 bp, Homo sapien
gggcttctctaaatgccccttaacattgccttc

SEQ ID NO: 277582 - DNA, 33 bp, Homo sapien
gggcttctctaaatgctccttaacattgccttc

SEQ ID NO: 277583 - DNA, 33 bp, Homo sapien
tccttctctgatttaacggatgtattggtgcag

SEQ ID NO: 277584 - DNA, 33 bp, Homo sapien
tccttctctgatttaatggatgtattggtgcag

SEQ ID NO: 277585 - DNA, 33 bp, Homo sapien
tattgttgactacaagaaataaagagaagggat

SEQ ID NO: 277586 - DNA, 33 bp, Homo sapien
tattgttgactacaaggaataaagagaagggat

SEQ ID NO: 277587 - DNA, 33 bp, Homo sapien
actaaaaatcatctacacccctgcttaaagtaa

SEQ ID NO: 277588 - DNA, 33 bp, Homo sapien
actaaaaatcatctacgcccctgcttaaagtaa

SEQ ID NO: 277589 - DNA, 33 bp, Homo sapien
cttacgcaggcatcggaccaacccacctgaaga

SEQ ID NO: 277590 - DNA, 33 bp, Homo sapien
cttacgcaggcatcgggccaacccacctgaaga

SEQ ID NO: 277591 - DNA, 33 bp, Homo sapien
tggtaggtttgtctacagagttcatagggacat

SEQ ID NO: 277592 - DNA, 33 bp, Homo sapien
tggtaggtttgtctactgagttcatagggacat

SEQ ID NO: 277593 - DNA, 33 bp, Homo sapien
ataacttcagtcactcactacttcaattagttc

SEQ ID NO: 277594 - DNA, 33 bp, Homo sapien
ataacttcagtcactcgctacttcaattagttc

SEQ ID NO: 277595 - DNA, 33 bp, Homo sapien
ataatgtttttcagccaatatatacaagaaaaa

SEQ ID NO: 277596 - DNA, 33 bp, Homo sapien
ataatgtttttcagccgatatatacaagaaaaa

SEQ ID NO: 277597 - DNA, 33 bp, Homo sapien
aatagccaagttgaataagatagttgtcctaga

SEQ ID NO: 277598 - DNA, 33 bp, Homo sapien
aatagccaagttgaatgagatagttgtcctaga

SEQ ID NO: 277599 - DNA, 33 bp, Homo sapien
aggagagctgtcctcacctaggtccgtaggcat

SEQ ID NO: 277600 - DNA, 33 bp, Homo sapien
aggagagctgtcctcatctaggtccgtaggcat

SEQ ID NO: 277601 - DNA, 33 bp, Homo sapien
ccaaagtaacataccaagaaagctaagacaatc

SEQ ID NO: 277602 - DNA, 33 bp, Homo sapien
ccaaagtaacataccaggaaagctaagacaatc

SEQ ID NO: 277603 - DNA, 33 bp, Homo sapien
gaaagaaacaacctggacacccatatccaggga

SEQ ID NO: 277604 - DNA, 33 bp, Homo sapien
gaaagaaacaacctgggcacccatatccaggga

SEQ ID NO: 277605 - DNA, 33 bp, Homo sapien
gttttgtggccgattacgtggcctatcttggac

SEQ ID NO: 277606 - DNA, 33 bp, Homo sapien
gttttgtggccgattatgtggcctatcttggac

SEQ ID NO: 277607 - DNA, 33 bp, Homo sapien
atatggatgaagcagaataaataagatagacca

SEQ ID NO: 277608 - DNA, 33 bp, Homo sapien
atatggatgaagcagagtaaataagatagacca

SEQ ID NO: 277609 - DNA, 33 bp, Homo sapien
gatccacatccaagtaaaactcatgaccattgt

SEQ ID NO: 277610 - DNA, 33 bp, Homo sapien
gatccacatccaagtacaactcatgaccattgt

SEQ ID NO: 277611 - DNA, 33 bp, Homo sapien
tttcttaggtccaaatcactaccaagcctagag

SEQ ID NO: 277612 - DNA, 33 bp, Homo sapien
tttcttaggtccaaatgactaccaagcctagag

SEQ ID NO: 277613 - DNA, 33 bp, Homo sapien
aactactctctgaaaacgtgaaattacttgtga

SEQ ID NO: 277614 - DNA, 33 bp, Homo sapien
aactactctctgaaaatgtgaaattacttgtga

SEQ ID NO: 277615 - DNA, 33 bp, Homo sapien
ataaaagttttgaaaacgcagtaatgaatggag

SEQ ID NO: 277616 - DNA, 33 bp, Homo sapien
ataaaagttttgaaaatgcagtaatgaatggag

SEQ ID NO: 277617 - DNA, 33 bp, Homo sapien
cttccaatcgtaaagccactgatatggtttatt

SEQ ID NO: 277618 - DNA, 33 bp, Homo sapien
cttccaatcgtaaagctactgatatggtttatt

SEQ ID NO: 277619 - DNA, 33 bp, Homo sapien
ttgttggagaaaaaaacctaacctgactggaga

SEQ ID NO: 277620 - DNA, 33 bp, Homo sapien
ttgttggagaaaaaaatctaacctgactggaga

SEQ ID NO: 277621 - DNA, 33 bp, Homo sapien
tttgctctcttcttggcatattcacacaggcca

SEQ ID NO: 277622 - DNA, 33 bp, Homo sapien
tttgctctcttcttggtatattcacacaggcca

SEQ ID NO: 277623 - DNA, 33 bp, Homo sapien
atacagttatacctaaatcagcctaatttagat

SEQ ID NO: 277624 - DNA, 33 bp, Homo sapien
atacagttatacctaagtcagcctaatttagat

SEQ ID NO: 277625 - DNA, 33 bp, Homo sapien
ctattcctccagtggcagacttgtagattgcct

SEQ ID NO: 277626 - DNA, 33 bp, Homo sapien
ctattcctccagtggctgacttgtagattgcct

SEQ ID NO: 277627 - DNA, 33 bp, Homo sapien
actactggacatgggaaatttgcatatatgttt

SEQ ID NO: 277628 - DNA, 33 bp, Homo sapien
actactggacatgggagatttgcatatatgttt

SEQ ID NO: 277629 - DNA, 33 bp, Homo sapien
aaattaacagtttgaacaataaggacaatgcat

SEQ ID NO: 277630 - DNA, 33 bp, Homo sapien
aaattaacagtttgaagaataaggacaatgcat

SEQ ID NO: 277631 - DNA, 33 bp, Homo sapien
atatgaaatgaatgaacttatgaaaatagcagt

SEQ ID NO: 277632 - DNA, 33 bp, Homo sapien
atatgaaatgaatgaagttatgaaaatagcagt

SEQ ID NO: 277633 - DNA, 33 bp, Homo sapien
gtatgataattaacacagaagaaatatacagta

SEQ ID NO: 277634 - DNA, 33 bp, Homo sapien
gtatgataattaacacggaagaaatatacagta

SEQ ID NO: 277635 - DNA, 33 bp, Homo sapien
acaactgaattagttcaagagaaataccaatca

SEQ ID NO: 277636 - DNA, 33 bp, Homo sapien
acaactgaattagttcgagagaaataccaatca

SEQ ID NO: 277637 - DNA, 33 bp, Homo sapien
gttttcaaactgactccgacattcacccagatt

SEQ ID NO: 277638 - DNA, 33 bp, Homo sapien
gttttcaaactgactctgacattcacccagatt

SEQ ID NO: 277639 - DNA, 33 bp, Homo sapien
ctatgcctttcaagtaagccatgacaaaaaaaa

SEQ ID NO: 277640 - DNA, 33 bp, Homo sapien
ctatgcctttcaagtaggccatgacaaaaaaaa

SEQ ID NO: 277641 - DNA, 33 bp, Homo sapien
gaattaatctatgtcaacattacaacaccaatt

SEQ ID NO: 277642 - DNA, 33 bp, Homo sapien
gaattaatctatgtcatcattacaacaccaatt

SEQ ID NO: 277643 - DNA, 33 bp, Homo sapien
tttttgagatgatctacgtgaaatcaattctcc

SEQ ID NO: 277644 - DNA, 33 bp, Homo sapien
tttttgagatgatctatgtgaaatcaattctcc

SEQ ID NO: 277645 - DNA, 33 bp, Homo sapien
cagttttcagatgaaaataacatatccagctaa

SEQ ID NO: 277646 - DNA, 33 bp, Homo sapien
cagttttcagatgaaagtaacatatccagctaa

SEQ ID NO: 277647 - DNA, 33 bp, Homo sapien
gagaacaccaaggatcaccattaaccacaaaaa

SEQ ID NO: 277648 - DNA, 33 bp, Homo sapien
gagaacaccaaggatcgccattaaccacaaaaa

SEQ ID NO: 277649 - DNA, 33 bp, Homo sapien
gttagccatcatcactcaaaagatgaacacata

SEQ ID NO: 277650 - DNA, 33 bp, Homo sapien
gttagccatcatcactgaaaagatgaacacata

SEQ ID NO: 277651 - DNA, 33 bp, Homo sapien
ccttagagagagattacagaaattgtgtaaaga

SEQ ID NO: 277652 - DNA, 33 bp, Homo sapien
ccttagagagagattatagaaattgtgtaaaga

SEQ ID NO: 277653 - DNA, 33 bp, Homo sapien
gagttagctttattacacaagtcagcagttttc

SEQ ID NO: 277654 - DNA, 33 bp, Homo sapien
gagttagctttattacgcaagtcagcagttttc

SEQ ID NO: 277655 - DNA, 33 bp, Homo sapien
ttggacttccattcacacctattatacctatac

SEQ ID NO: 277656 - DNA, 33 bp, Homo sapien
ttggacttccattcactcctattatacctatac

SEQ ID NO: 277657 - DNA, 33 bp, Homo sapien
catgctctgtgagggggaccagggaacaatcca

SEQ ID NO: 277658 - DNA, 33 bp, Homo sapien
catgctctgtgaggggtaccagggaacaatcca

SEQ ID NO: 277659 - DNA, 33 bp, Homo sapien
aatgagtccttttggacaaagagttggatgaag

SEQ ID NO: 277660 - DNA, 33 bp, Homo sapien
aatgagtccttttggataaagagttggatgaag

SEQ ID NO: 277661 - DNA, 33 bp, Homo sapien
ttgatatcttcttggtaaatagcaccacgtttt

SEQ ID NO: 277662 - DNA, 33 bp, Homo sapien
ttgatatcttcttggtgaatagcaccacgtttt

SEQ ID NO: 277663 - DNA, 33 bp, Homo sapien
tttgtggtctaacataaaatctatccttgagag

SEQ ID NO: 277664 - DNA, 33 bp, Homo sapien
tttgtggtctaacatacaatctatccttgagag

SEQ ID NO: 277665 - DNA, 33 bp, Homo sapien
tagaatatacttgaggacactactgagattaca

SEQ ID NO: 277666 - DNA, 33 bp, Homo sapien
tagaatatacttgagggcactactgagattaca

SEQ ID NO: 277667 - DNA, 33 bp, Homo sapien
tgatacacctgaactcactcagttttctctatg

SEQ ID NO: 277668 - DNA, 33 bp, Homo sapien
tgatacacctgaactccctcagttttctctatg

SEQ ID NO: 277669 - DNA, 33 bp, Homo sapien
gatgtaaagaatgatgcatttaagacgatgcct

SEQ ID NO: 277670 - DNA, 33 bp, Homo sapien
gatgtaaagaatgatgtatttaagacgatgcct

SEQ ID NO: 277671 - DNA, 33 bp, Homo sapien
tttatcacataaaggcacatttggtttaatatt

SEQ ID NO: 277672 - DNA, 33 bp, Homo sapien
tttatcacataaaggcgcatttggtttaatatt

SEQ ID NO: 277673 - DNA, 33 bp, Homo sapien
tattgtatcagctaacaattgctgcatctactt

SEQ ID NO: 277674 - DNA, 33 bp, Homo sapien
tattgtatcagctaacgattgctgcatctactt

SEQ ID NO: 277675 - DNA, 33 bp, Homo sapien
taataattctggtgtaagaaggaaacataggtt

SEQ ID NO: 277676 - DNA, 33 bp, Homo sapien
taataattctggtgtatgaaggaaacataggtt

SEQ ID NO: 277677 - DNA, 33 bp, Homo sapien
caagatgagtgtatcaagtaaacttcagcaatt

SEQ ID NO: 277678 - DNA, 33 bp, Homo sapien
caagatgagtgtatcaggtaaacttcagcaatt

SEQ ID NO: 277679 - DNA, 33 bp, Homo sapien
gataaaaactcaacaaacttggataggaagaaa

SEQ ID NO: 277680 - DNA, 33 bp, Homo sapien
gataaaaactcaacaagcttggataggaagaaa

SEQ ID NO: 277681 - DNA, 33 bp, Homo sapien
gagaattgttccttgaccagaatcataaagata

SEQ ID NO: 277682 - DNA, 33 bp, Homo sapien
gagaattgttccttgatcagaatcataaagata

SEQ ID NO: 277683 - DNA, 33 bp, Homo sapien
aaagtttatcatttgccgagcactgttatctgc

SEQ ID NO: 277684 - DNA, 33 bp, Homo sapien
aaagtttatcatttgctgagcactgttatctgc

SEQ ID NO: 277685 - DNA, 33 bp, Homo sapien
tcaatacctttgaccaagaaaattcagttaatt

SEQ ID NO: 277686 - DNA, 33 bp, Homo sapien
tcaatacctttgaccaggaaaattcagttaatt

SEQ ID NO: 277687 - DNA, 33 bp, Homo sapien
ctggtctgatatattacgctggaagaaacttac

SEQ ID NO: 277688 - DNA, 33 bp, Homo sapien
ctggtctgatatattatgctggaagaaacttac

SEQ ID NO: 277689 - DNA, 33 bp, Homo sapien
aaaacaatgaaatctacagaacagtgaggttta

SEQ ID NO: 277690 - DNA, 33 bp, Homo sapien
aaaacaatgaaatctagagaacagtgaggttta

SEQ ID NO: 277691 - DNA, 33 bp, Homo sapien
ccagtatctcttgtgaatatagatgtgaaatct

SEQ ID NO: 277692 - DNA, 33 bp, Homo sapien
ccagtatctcttgtgactatagatgtgaaatct

SEQ ID NO: 277693 - DNA, 33 bp, Homo sapien
gtgtctattttgatcaatcatgtctgccaagaa

SEQ ID NO: 277694 - DNA, 33 bp, Homo sapien
gtgtctattttgatcattcatgtctgccaagaa

SEQ ID NO: 277695 - DNA, 33 bp, Homo sapien
cataaatatttttcaacctggtattatgctaca

SEQ ID NO: 277696 - DNA, 33 bp, Homo sapien
cataaatatttttcaagctggtattatgctaca

SEQ ID NO: 277697 - DNA, 33 bp, Homo sapien
taggaatgagtgaaatcaagacttccgagcaag

SEQ ID NO: 277698 - DNA, 33 bp, Homo sapien
taggaatgagtgaaattaagacttccgagcaag

SEQ ID NO: 277699 - DNA, 33 bp, Homo sapien
gatttggatttcaaagcctcattcaaatgagct

SEQ ID NO: 277700 - DNA, 33 bp, Homo sapien
gatttggatttcaaagtctcattcaaatgagct

SEQ ID NO: 277701 - DNA, 33 bp, Homo sapien
ctactcacttatcctaatagctacagcagaaat

SEQ ID NO: 277702 - DNA, 33 bp, Homo sapien
ctactcacttatcctagtagctacagcagaaat

SEQ ID NO: 277703 - DNA, 33 bp, Homo sapien
tttttcagtagagtgggcattcttcagttaaca

SEQ ID NO: 277704 - DNA, 33 bp, Homo sapien
tttttcagtagagtggtcattcttcagttaaca

SEQ ID NO: 277705 - DNA, 33 bp, Homo sapien
gtcttgagtttaagagaaaaaacaatgtggata

SEQ ID NO: 277706 - DNA, 33 bp, Homo sapien
gtcttgagtttaagaggaaaaacaatgtggata

SEQ ID NO: 277707 - DNA, 33 bp, Homo sapien
acctcaaaatgtctcaaagaaataggaaatgtt

SEQ ID NO: 277708 - DNA, 33 bp, Homo sapien
acctcaaaatgtctcagagaaataggaaatgtt

SEQ ID NO: 277709 - DNA, 33 bp, Homo sapien
accctaattagttaaaagagccatcaaaatact

SEQ ID NO: 277710 - DNA, 33 bp, Homo sapien
accctaattagttaaaggagccatcaaaatact

SEQ ID NO: 277711 - DNA, 33 bp, Homo sapien
tttcgtctctgacaacactaatgacttcatcta

SEQ ID NO: 277712 - DNA, 33 bp, Homo sapien
tttcgtctctgacaactctaatgacttcatcta

SEQ ID NO: 277713 - DNA, 33 bp, Homo sapien
cgacccttccatttcactacttgctttccattc

SEQ ID NO: 277714 - DNA, 33 bp, Homo sapien
cgacccttccatttcattacttgctttccattc

SEQ ID NO: 277715 - DNA, 33 bp, Homo sapien
gcaagaaaggatgatccagaaacttactgtaaa

SEQ ID NO: 277716 - DNA, 33 bp, Homo sapien
gcaagaaaggatgatctagaaacttactgtaaa

SEQ ID NO: 277717 - DNA, 33 bp, Homo sapien
gatgaactgtattagccaaatggggtcttaaat

SEQ ID NO: 277718 - DNA, 33 bp, Homo sapien
gatgaactgtattagctaaatggggtcttaaat

SEQ ID NO: 277719 - DNA, 33 bp, Homo sapien
tgtcaactctgtggcagaccttttgctagtcat

SEQ ID NO: 277720 - DNA, 33 bp, Homo sapien
tgtcaactctgtggcataccttttgctagtcat

SEQ ID NO: 277721 - DNA, 33 bp, Homo sapien
atacttcagagaacaaacattcaacttatgata

SEQ ID NO: 277722 - DNA, 33 bp, Homo sapien
atacttcagagaacaagcattcaacttatgata

SEQ ID NO: 277723 - DNA, 33 bp, Homo sapien
tattagccagaaagccaatgatagttatcagtt

SEQ ID NO: 277724 - DNA, 33 bp, Homo sapien
tattagccagaaagccgatgatagttatcagtt

SEQ ID NO: 277725 - DNA, 33 bp, Homo sapien
taatttgttaattaccggaacagttatgggcat

SEQ ID NO: 277726 - DNA, 33 bp, Homo sapien
taatttgttaattacctgaacagttatgggcat

SEQ ID NO: 277727 - DNA, 33 bp, Homo sapien
acaaacaagaaaagaagtgtgaacctcttgtac

SEQ ID NO: 277728 - DNA, 33 bp, Homo sapien
acaaacaagaaaagaattgtgaacctcttgtac

SEQ ID NO: 277729 - DNA, 33 bp, Homo sapien
tatttgagtcccaacaagtttgacccacccatg

SEQ ID NO: 277730 - DNA, 33 bp, Homo sapien
tatttgagtcccaacaggtttgacccacccatg

SEQ ID NO: 277731 - DNA, 33 bp, Homo sapien
aatgattaagcgtaaactctggagccagactgt

SEQ ID NO: 277732 - DNA, 33 bp, Homo sapien
aatgattaagcgtaaattctggagccagactgt

SEQ ID NO: 277733 - DNA, 33 bp, Homo sapien
gaggtctcatacagatcaagacctttttgtttt

SEQ ID NO: 277734 - DNA, 33 bp, Homo sapien
gaggtctcatacagattaagacctttttgtttt

SEQ ID NO: 277735 - DNA, 33 bp, Homo sapien
taattacatcaatataccaacaaagcacctgag

SEQ ID NO: 277736 - DNA, 33 bp, Homo sapien
taattacatcaatatagcaacaaagcacctgag

SEQ ID NO: 277737 - DNA, 33 bp, Homo sapien
ataaaataagaacctcaatttcctcataaaaca

SEQ ID NO: 277738 - DNA, 33 bp, Homo sapien
ataaaataagaacctcgatttcctcataaaaca

SEQ ID NO: 277739 - DNA, 33 bp, Homo sapien
ttaaacattgttaaaaagtcaagccttctggtt

SEQ ID NO: 277740 - DNA, 33 bp, Homo sapien
ttaaacattgttaaaacgtcaagccttctggtt

SEQ ID NO: 277741 - DNA, 33 bp, Homo sapien
gtctcggtatcaggaactcgacttaatattatg

SEQ ID NO: 277742 - DNA, 33 bp, Homo sapien
gtctcggtatcaggaattcgacttaatattatg

SEQ ID NO: 277743 - DNA, 33 bp, Homo sapien
atatttgaaagcaaagccatctatcatccaaca

SEQ ID NO: 277744 - DNA, 33 bp, Homo sapien
atatttgaaagcaaaggcatctatcatccaaca

SEQ ID NO: 277745 - DNA, 33 bp, Homo sapien
tgttctgtgttagatgcaggcctatgcgatcaa

SEQ ID NO: 277746 - DNA, 33 bp, Homo sapien
tgttctgtgttagatggaggcctatgcgatcaa

SEQ ID NO: 277747 - DNA, 33 bp, Homo sapien
tgtgggatgtctgtataaatcatttgcccagtt

SEQ ID NO: 277748 - DNA, 33 bp, Homo sapien
tgtgggatgtctgtatgaatcatttgcccagtt

SEQ ID NO: 277749 - DNA, 33 bp, Homo sapien
gctgaatcataggagaaataaaactgcagaatt

SEQ ID NO: 277750 - DNA, 33 bp, Homo sapien
gctgaatcataggagagataaaactgcagaatt

SEQ ID NO: 277751 - DNA, 33 bp, Homo sapien
tttaaataacttctacaaccatgagttaatcat

SEQ ID NO: 277752 - DNA, 33 bp, Homo sapien
tttaaataacttctacgaccatgagttaatcat

SEQ ID NO: 277753 - DNA, 33 bp, Homo sapien
tacatgtataatggtgaattttttaaacaacta

SEQ ID NO: 277754 - DNA, 33 bp, Homo sapien
tacatgtataatggtgcattttttaaacaacta

SEQ ID NO: 277755 - DNA, 33 bp, Homo sapien
ctgataccctataaaactacacaaatctggtaa

SEQ ID NO: 277756 - DNA, 33 bp, Homo sapien
ctgataccctataaaagtacacaaatctggtaa

SEQ ID NO: 277757 - DNA, 33 bp, Homo sapien
tcctcatattaatttaaaacagaccaacacatt

SEQ ID NO: 277758 - DNA, 33 bp, Homo sapien
tcctcatattaatttagaacagaccaacacatt

SEQ ID NO: 277759 - DNA, 33 bp, Homo sapien
gccttcaattatttttaaaaaactgcagtatct

SEQ ID NO: 277760 - DNA, 33 bp, Homo sapien
gccttcaattattttttaaaaactgcagtatct

SEQ ID NO: 277761 - DNA, 33 bp, Homo sapien
ttctgaaatggagaaaatgagtggtctgggcag

SEQ ID NO: 277762 - DNA, 33 bp, Homo sapien
ttctgaaatggagaaagtgagtggtctgggcag

SEQ ID NO: 277763 - DNA, 33 bp, Homo sapien
tcagccagtgctttagaaatggaactataaagc

SEQ ID NO: 277764 - DNA, 33 bp, Homo sapien
tcagccagtgctttaggaatggaactataaagc

SEQ ID NO: 277765 - DNA, 33 bp, Homo sapien
agatttagaatgaacaaactattgactctcagg

SEQ ID NO: 277766 - DNA, 33 bp, Homo sapien
agatttagaatgaacatactattgactctcagg

SEQ ID NO: 277767 - DNA, 33 bp, Homo sapien
tcttctgcttgggtacgcagactgcatgattag

SEQ ID NO: 277768 - DNA, 33 bp, Homo sapien
tcttctgcttgggtactcagactgcatgattag

SEQ ID NO: 277769 - DNA, 33 bp, Homo sapien
ggaactgaagttaagacgtgaagacaattcttt

SEQ ID NO: 277770 - DNA, 33 bp, Homo sapien
ggaactgaagttaagatgtgaagacaattcttt

SEQ ID NO: 277771 - DNA, 33 bp, Homo sapien
ctttcagatttgcactaagtaggtaggtcataa

SEQ ID NO: 277772 - DNA, 33 bp, Homo sapien
ctttcagatttgcactcagtaggtaggtcataa

SEQ ID NO: 277773 - DNA, 33 bp, Homo sapien
tccagtgtctgggagaaccatagcagaaccacc

SEQ ID NO: 277774 - DNA, 33 bp, Homo sapien
tccagtgtctgggagagccatagcagaaccacc

SEQ ID NO: 277775 - DNA, 33 bp, Homo sapien
taaaaagtgggttttacggcagaaactcaggag

SEQ ID NO: 277776 - DNA, 33 bp, Homo sapien
taaaaagtgggttttatggcagaaactcaggag

SEQ ID NO: 277777 - DNA, 33 bp, Homo sapien
ttactatggatccaaactggcaataaatctaga

SEQ ID NO: 277778 - DNA, 33 bp, Homo sapien
ttactatggatccaaattggcaataaatctaga

SEQ ID NO: 277779 - DNA, 33 bp, Homo sapien
aaccatactttgaatacacatatgactcttccg

SEQ ID NO: 277780 - DNA, 33 bp, Homo sapien
aaccatactttgaatatacatatgactcttccg

SEQ ID NO: 277781 - DNA, 33 bp, Homo sapien
gtgatgactgcctttaggtacctgggttatctg

SEQ ID NO: 277782 - DNA, 33 bp, Homo sapien
gtgatgactgcctttatgtacctgggttatctg

SEQ ID NO: 277783 - DNA, 33 bp, Homo sapien
cccctgcttctgtgtacgtatagcctcccctat

SEQ ID NO: 277784 - DNA, 33 bp, Homo sapien
cccctgcttctgtgtatgtatagcctcccctat

SEQ ID NO: 277785 - DNA, 33 bp, Homo sapien
tagaaaaatgtgagtacgaacttaaatgatgtt

SEQ ID NO: 277786 - DNA, 33 bp, Homo sapien
tagaaaaatgtgagtatgaacttaaatgatgtt

SEQ ID NO: 277787 - DNA, 33 bp, Homo sapien
agtttgtggtaaagtccctcagcttttatctga

SEQ ID NO: 277788 - DNA, 33 bp, Homo sapien
agtttgtggtaaagtctctcagcttttatctga

SEQ ID NO: 277789 - DNA, 33 bp, Homo sapien
ttattaactttttgaaatgtaatgacactggag

SEQ ID NO: 277790 - DNA, 33 bp, Homo sapien
ttattaactttttgaagtgtaatgacactggag

SEQ ID NO: 277791 - DNA, 33 bp, Homo sapien
aaacagactccaaaagaccagtatgaactgggc

SEQ ID NO: 277792 - DNA, 33 bp, Homo sapien
aaacagactccaaaaggccagtatgaactgggc

SEQ ID NO: 277793 - DNA, 33 bp, Homo sapien
ttatcaaaggtgccgacaatatacaatggggag

SEQ ID NO: 277794 - DNA, 33 bp, Homo sapien
ttatcaaaggtgccgataatatacaatggggag

SEQ ID NO: 277795 - DNA, 33 bp, Homo sapien
aatttgttatgtttcaaaaaatacaagcgtgct

SEQ ID NO: 277796 - DNA, 33 bp, Homo sapien
aatttgttatgtttcagaaaatacaagcgtgct

SEQ ID NO: 277797 - DNA, 33 bp, Homo sapien
gctttagttagaggacagattaatggacacaaa

SEQ ID NO: 277798 - DNA, 33 bp, Homo sapien
gctttagttagaggacggattaatggacacaaa

SEQ ID NO: 277799 - DNA, 33 bp, Homo sapien
aagaacttgcctataacagatgacagtggcatc

SEQ ID NO: 277800 - DNA, 33 bp, Homo sapien
aagaacttgcctataagagatgacagtggcatc

SEQ ID NO: 277801 - DNA, 33 bp, Homo sapien
tgtaaatctgtccaaaccagaacatttgcagtt

SEQ ID NO: 277802 - DNA, 33 bp, Homo sapien
tgtaaatctgtccaaagcagaacatttgcagtt

SEQ ID NO: 277803 - DNA, 33 bp, Homo sapien
aatgtttctcattaccaacgaaggactatgaat

SEQ ID NO: 277804 - DNA, 33 bp, Homo sapien
aatgtttctcattaccgacgaaggactatgaat

SEQ ID NO: 277805 - DNA, 33 bp, Homo sapien
agtgcctagagcttacaaagtgcttgataaatt

SEQ ID NO: 277806 - DNA, 33 bp, Homo sapien
agtgcctagagcttacgaagtgcttgataaatt

SEQ ID NO: 277807 - DNA, 33 bp, Homo sapien
ataacattaagagaacaaagtcctgtactccag

SEQ ID NO: 277808 - DNA, 33 bp, Homo sapien
ataacattaagagaacgaagtcctgtactccag

SEQ ID NO: 277809 - DNA, 33 bp, Homo sapien
aacaaaagcatgaaaactgaatatgttgaaatg

SEQ ID NO: 277810 - DNA, 33 bp, Homo sapien
aacaaaagcatgaaaagtgaatatgttgaaatg

SEQ ID NO: 277811 - DNA, 33 bp, Homo sapien
gaatgaggaaacgaagaattagtgatgttaata

SEQ ID NO: 277812 - DNA, 33 bp, Homo sapien
gaatgaggaaacgaagcattagtgatgttaata

SEQ ID NO: 277813 - DNA, 33 bp, Homo sapien
atttgtggataggtaccaagatgtgttttcttg

SEQ ID NO: 277814 - DNA, 33 bp, Homo sapien
atttgtggataggtactaagatgtgttttcttg

SEQ ID NO: 277815 - DNA, 33 bp, Homo sapien
acagtagaaagttaataagccagtggtaccagt

SEQ ID NO: 277816 - DNA, 33 bp, Homo sapien
acagtagaaagttaatgagccagtggtaccagt

SEQ ID NO: 277817 - DNA, 33 bp, Homo sapien
gaaggcataataatgacgtaggagtaaaataat

SEQ ID NO: 277818 - DNA, 33 bp, Homo sapien
gaaggcataataatgatgtaggagtaaaataat

SEQ ID NO: 277819 - DNA, 33 bp, Homo sapien
aattttagactttgtaaattaactctgtgcaaa

SEQ ID NO: 277820 - DNA, 33 bp, Homo sapien
aattttagactttgtagattaactctgtgcaaa

SEQ ID NO: 277821 - DNA, 33 bp, Homo sapien
aacattgcaaatccaacgaccaaacccaatgct

SEQ ID NO: 277822 - DNA, 33 bp, Homo sapien
aacattgcaaatccaatgaccaaacccaatgct

SEQ ID NO: 277823 - DNA, 33 bp, Homo sapien
ggaattatcaattgtgccaatggtttttccata

SEQ ID NO: 277824 - DNA, 33 bp, Homo sapien
ggaattatcaattgtgtcaatggtttttccata

SEQ ID NO: 277825 - DNA, 33 bp, Homo sapien
tctttagaccaaattcgcgtgcattggtcttga

SEQ ID NO: 277826 - DNA, 33 bp, Homo sapien
tctttagaccaaattctcgtgcattggtcttga

SEQ ID NO: 277827 - DNA, 33 bp, Homo sapien
ttagaacaagaccatccaatatagacagagtta

SEQ ID NO: 277828 - DNA, 33 bp, Homo sapien
ttagaacaagaccatctaatatagacagagtta

SEQ ID NO: 277829 - DNA, 33 bp, Homo sapien
ataaagcaagcttccactatccatacagagctt

SEQ ID NO: 277830 - DNA, 33 bp, Homo sapien
ataaagcaagcttccattatccatacagagctt

SEQ ID NO: 277831 - DNA, 33 bp, Homo sapien
ataactctcaagttaaatcgtaagacaaaatgg

SEQ ID NO: 277832 - DNA, 33 bp, Homo sapien
ataactctcaagttaattcgtaagacaaaatgg

SEQ ID NO: 277833 - DNA, 33 bp, Homo sapien
tcaaccatctgtacagactagcaaaatattatt

SEQ ID NO: 277834 - DNA, 33 bp, Homo sapien
tcaaccatctgtacagtctagcaaaatattatt

SEQ ID NO: 277835 - DNA, 33 bp, Homo sapien
ataattacaccacataggttgcgatacactaaa

SEQ ID NO: 277836 - DNA, 33 bp, Homo sapien
ataattacaccacatatgttgcgatacactaaa

SEQ ID NO: 277837 - DNA, 33 bp, Homo sapien
atagaagggaaattgcacttattgggagtaaga

SEQ ID NO: 277838 - DNA, 33 bp, Homo sapien
atagaagggaaattgcgcttattgggagtaaga

SEQ ID NO: 277839 - DNA, 33 bp, Homo sapien
agaacactgaattgaccgaatatcttaaagaga

SEQ ID NO: 277840 - DNA, 33 bp, Homo sapien
agaacactgaattgactgaatatcttaaagaga

SEQ ID NO: 277841 - DNA, 33 bp, Homo sapien
taagatgaggtcctaacaatttgtggtaggtcc

SEQ ID NO: 277842 - DNA, 33 bp, Homo sapien
taagatgaggtcctaataatttgtggtaggtcc

SEQ ID NO: 277843 - DNA, 33 bp, Homo sapien
taaaatatatcgatgacgaaagaggtatttgtt

SEQ ID NO: 277844 - DNA, 33 bp, Homo sapien
taaaatatatcgatgatgaaagaggtatttgtt

SEQ ID NO: 277845 - DNA, 33 bp, Homo sapien
gtcctcattagagctacgttttagcaattgtgt

SEQ ID NO: 277846 - DNA, 33 bp, Homo sapien
gtcctcattagagctatgttttagcaattgtgt

SEQ ID NO: 277847 - DNA, 33 bp, Homo sapien
agatttaagctccttcacactttatccagatat

SEQ ID NO: 277848 - DNA, 33 bp, Homo sapien
agatttaagctccttcgcactttatccagatat

SEQ ID NO: 277849 - DNA, 33 bp, Homo sapien
accatagcgaaggttacaggataagccggtgcc

SEQ ID NO: 277850 - DNA, 33 bp, Homo sapien
accatagcgaaggttataggataagccggtgcc

SEQ ID NO: 277851 - DNA, 33 bp, Homo sapien
gggggatggaagacaacgtaatacagaaattct

SEQ ID NO: 277852 - DNA, 33 bp, Homo sapien
gggggatggaagacaaggtaatacagaaattct

SEQ ID NO: 277853 - DNA, 33 bp, Homo sapien
ctgggaagtgtttatacgcaatacattttctaa

SEQ ID NO: 277854 - DNA, 33 bp, Homo sapien
ctgggaagtgtttatatgcaatacattttctaa

SEQ ID NO: 277855 - DNA, 33 bp, Homo sapien
atcatttaacgacaacaatatgttctgagaaat

SEQ ID NO: 277856 - DNA, 33 bp, Homo sapien
atcatttaacgacaacgatatgttctgagaaat

SEQ ID NO: 277857 - DNA, 33 bp, Homo sapien
tgtgtacattttaataagactcgtggtgcagta

SEQ ID NO: 277858 - DNA, 33 bp, Homo sapien
tgtgtacattttaatatgactcgtggtgcagta

SEQ ID NO: 277859 - DNA, 33 bp, Homo sapien
agacattgtgggcaggacaattgcagataagtg

SEQ ID NO: 277860 - DNA, 33 bp, Homo sapien
agacattgtgggcaggtcaattgcagataagtg

SEQ ID NO: 277861 - DNA, 33 bp, Homo sapien
cttcaaagaaacagaaccaacagtgtgtgtgtg

SEQ ID NO: 277862 - DNA, 33 bp, Homo sapien
cttcaaagaaacagaagcaacagtgtgtgtgtg

SEQ ID NO: 277863 - DNA, 33 bp, Homo sapien
agacttgttcatatcacgttcaaatcttgttta

SEQ ID NO: 277864 - DNA, 33 bp, Homo sapien
agacttgttcatatcatgttcaaatcttgttta

SEQ ID NO: 277865 - DNA, 33 bp, Homo sapien
ttgctccaattagccacggtcgatgaaattggg

SEQ ID NO: 277866 - DNA, 33 bp, Homo sapien
ttgctccaattagccatggtcgatgaaattggg

SEQ ID NO: 277867 - DNA, 33 bp, Homo sapien
atacactttttaaccactgcttctcaaacctta

SEQ ID NO: 277868 - DNA, 33 bp, Homo sapien
atacactttttaaccattgcttctcaaacctta

SEQ ID NO: 277869 - DNA, 33 bp, Homo sapien
aggtttgttacatagacaggcatttgccatggt

SEQ ID NO: 277870 - DNA, 33 bp, Homo sapien
aggtttgttacatagataggcatttgccatggt

SEQ ID NO: 277871 - DNA, 33 bp, Homo sapien
aagtttagtccatgaacgcaagtaaagttaaat

SEQ ID NO: 277872 - DNA, 33 bp, Homo sapien
aagtttagtccatgaatgcaagtaaagttaaat

SEQ ID NO: 277873 - DNA, 33 bp, Homo sapien
ttgttctcattcacataaaggtgagcaaaagga

SEQ ID NO: 277874 - DNA, 33 bp, Homo sapien
ttgttctcattcacatgaaggtgagcaaaagga

SEQ ID NO: 277875 - DNA, 33 bp, Homo sapien
ctcatatgagagagcacaaacaaaagtgaagga

SEQ ID NO: 277876 - DNA, 33 bp, Homo sapien
ctcatatgagagagcataaacaaaagtgaagga

SEQ ID NO: 277877 - DNA, 33 bp, Homo sapien
tacatgaaactctcaaacagactgacacacatt

SEQ ID NO: 277878 - DNA, 33 bp, Homo sapien
tacatgaaactctcaagcagactgacacacatt

SEQ ID NO: 277879 - DNA, 33 bp, Homo sapien
acaaggaagctcagaacctactaccttttagaa

SEQ ID NO: 277880 - DNA, 33 bp, Homo sapien
acaaggaagctcagaatctactaccttttagaa

SEQ ID NO: 277881 - DNA, 33 bp, Homo sapien
ttcctacagctgctaccactttgtcaactataa

SEQ ID NO: 277882 - DNA, 33 bp, Homo sapien
ttcctacagctgctactactttgtcaactataa

SEQ ID NO: 277883 - DNA, 33 bp, Homo sapien
ctaatagccagtcccaaggaaatactctcaatg

SEQ ID NO: 277884 - DNA, 33 bp, Homo sapien
ctaatagccagtcccagggaaatactctcaatg

SEQ ID NO: 277885 - DNA, 33 bp, Homo sapien
tctgcctgtgtatcgccgaaactttgtttcttg

SEQ ID NO: 277886 - DNA, 33 bp, Homo sapien
tctgcctgtgtatcgctgaaactttgtttcttg

SEQ ID NO: 277887 - DNA, 33 bp, Homo sapien
taagtatagaaagatacgggacagtgttgaaag

SEQ ID NO: 277888 - DNA, 33 bp, Homo sapien
taagtatagaaagatatgggacagtgttgaaag

SEQ ID NO: 277889 - DNA, 33 bp, Homo sapien
tttgtctactacttgaacagacttattcaaaat

SEQ ID NO: 277890 - DNA, 33 bp, Homo sapien
tttgtctactacttgagcagacttattcaaaat

SEQ ID NO: 277891 - DNA, 33 bp, Homo sapien
gaaagaaattaaaccaaattatctcccaacaat

SEQ ID NO: 277892 - DNA, 33 bp, Homo sapien
gaaagaaattaaaccatattatctcccaacaat

SEQ ID NO: 277893 - DNA, 33 bp, Homo sapien
ttattctctccttgtaacctctgttaacatctt

SEQ ID NO: 277894 - DNA, 33 bp, Homo sapien
ttattctctccttgtatcctctgttaacatctt

SEQ ID NO: 277895 - DNA, 33 bp, Homo sapien
taagaattacaaaacaatgatcaaatgcataaa

SEQ ID NO: 277896 - DNA, 33 bp, Homo sapien
taagaattacaaaacagtgatcaaatgcataaa

SEQ ID NO: 277897 - DNA, 33 bp, Homo sapien
atatttgtgttttagccatgattacactacgta

SEQ ID NO: 277898 - DNA, 33 bp, Homo sapien
atatttgtgttttagctatgattacactacgta

SEQ ID NO: 277899 - DNA, 33 bp, Homo sapien
cctatagtcagtgataccagaatatttcttttt

SEQ ID NO: 277900 - DNA, 33 bp, Homo sapien
cctatagtcagtgatatcagaatatttcttttt

SEQ ID NO: 277901 - DNA, 33 bp, Homo sapien
gttatagctattggaagggaatgcactgacttt

SEQ ID NO: 277902 - DNA, 33 bp, Homo sapien
gttatagctattggaatggaatgcactgacttt

SEQ ID NO: 277903 - DNA, 33 bp, Homo sapien
agaaatcagctttagcaacctggtttctcttgt

SEQ ID NO: 277904 - DNA, 33 bp, Homo sapien
agaaatcagctttagctacctggtttctcttgt

SEQ ID NO: 277905 - DNA, 33 bp, Homo sapien
ggatgaaattgatagacggctgtataaacctat

SEQ ID NO: 277906 - DNA, 33 bp, Homo sapien
ggatgaaattgatagatggctgtataaacctat

SEQ ID NO: 277907 - DNA, 33 bp, Homo sapien
gaagcaagtcataaaacgtggccaaaccactat

SEQ ID NO: 277908 - DNA, 33 bp, Homo sapien
gaagcaagtcataaaaggtggccaaaccactat

SEQ ID NO: 277909 - DNA, 33 bp, Homo sapien
tatactgtgccaaatactaaagtagaaatagtc

SEQ ID NO: 277910 - DNA, 33 bp, Homo sapien
tatactgtgccaaatattaaagtagaaatagtc

SEQ ID NO: 277911 - DNA, 33 bp, Homo sapien
cttggatctggtgcaaaaaagagttagaggcaa

SEQ ID NO: 277912 - DNA, 33 bp, Homo sapien
cttggatctggtgcaagaaagagttagaggcaa

SEQ ID NO: 277913 - DNA, 33 bp, Homo sapien
tgagaatctaaccaacccttgctgatctgaggt

SEQ ID NO: 277914 - DNA, 33 bp, Homo sapien
tgagaatctaaccaacgcttgctgatctgaggt

SEQ ID NO: 277915 - DNA, 33 bp, Homo sapien
aagagatgctgactccaaaatgtaaaataaccc

SEQ ID NO: 277916 - DNA, 33 bp, Homo sapien
aagagatgctgactccgaaatgtaaaataaccc

SEQ ID NO: 277917 - DNA, 33 bp, Homo sapien
catgaatacacaaatgcacaaaagatcttaaag

SEQ ID NO: 277918 - DNA, 33 bp, Homo sapien
catgaatacacaaatggacaaaagatcttaaag

SEQ ID NO: 277919 - DNA, 33 bp, Homo sapien
caagcaatatgggaaggatcacctattcaacaa

SEQ ID NO: 277920 - DNA, 33 bp, Homo sapien
caagcaatatgggaagtatcacctattcaacaa

SEQ ID NO: 277921 - DNA, 33 bp, Homo sapien
gaggacataaggaagcagaacaagttttaaatg

SEQ ID NO: 277922 - DNA, 33 bp, Homo sapien
gaggacataaggaagcggaacaagttttaaatg

SEQ ID NO: 277923 - DNA, 33 bp, Homo sapien
ggctgataatgcactcaattgctatttgtttag

SEQ ID NO: 277924 - DNA, 33 bp, Homo sapien
ggctgataatgcactcgattgctatttgtttag

SEQ ID NO: 277925 - DNA, 33 bp, Homo sapien
tatagaagtgcgtaaacgtttgagtctgagttt

SEQ ID NO: 277926 - DNA, 33 bp, Homo sapien
tatagaagtgcgtaaatgtttgagtctgagttt

SEQ ID NO: 277927 - DNA, 33 bp, Homo sapien
caaaatataaagtcacactgtactagtcatata

SEQ ID NO: 277928 - DNA, 33 bp, Homo sapien
caaaatataaagtcacgctgtactagtcatata

SEQ ID NO: 277929 - DNA, 33 bp, Homo sapien
tttttcactttgacaaataaggaaacccaatca

SEQ ID NO: 277930 - DNA, 33 bp, Homo sapien
tttttcactttgacaagtaaggaaacccaatca

SEQ ID NO: 277931 - DNA, 33 bp, Homo sapien
gagcccacaggcaaaaaattagtctgatttgta

SEQ ID NO: 277932 - DNA, 33 bp, Homo sapien
gagcccacaggcaaaagattagtctgatttgta

SEQ ID NO: 277933 - DNA, 33 bp, Homo sapien
aaatgccttaaaaagaaatcagagagaagggac

SEQ ID NO: 277934 - DNA, 33 bp, Homo sapien
aaatgccttaaaaagacatcagagagaagggac

SEQ ID NO: 277935 - DNA, 33 bp, Homo sapien
gggagagaaagtgcaaataaaataaaacggtgc

SEQ ID NO: 277936 - DNA, 33 bp, Homo sapien
gggagagaaagtgcaagtaaaataaaacggtgc

SEQ ID NO: 277937 - DNA, 33 bp, Homo sapien
tctgcacatagctctagctcctcattagttaca

SEQ ID NO: 277938 - DNA, 33 bp, Homo sapien
tctgcacatagctctatctcctcattagttaca

SEQ ID NO: 277939 - DNA, 33 bp, Homo sapien
agtttatcccttcttaacaggtgctagtgtgga

SEQ ID NO: 277940 - DNA, 33 bp, Homo sapien
agtttatcccttcttagcaggtgctagtgtgga

SEQ ID NO: 277941 - DNA, 33 bp, Homo sapien
gtgctggaaatgtccaagacagcatgttatatg

SEQ ID NO: 277942 - DNA, 33 bp, Homo sapien
gtgctggaaatgtccaggacagcatgttatatg

SEQ ID NO: 277943 - DNA, 33 bp, Homo sapien
gaaatgtgattataccacaatcagagctgagag

SEQ ID NO: 277944 - DNA, 33 bp, Homo sapien
gaaatgtgattataccgcaatcagagctgagag

SEQ ID NO: 277945 - DNA, 33 bp, Homo sapien
tgtggtagaacaataacgtatgaagaattgaat

SEQ ID NO: 277946 - DNA, 33 bp, Homo sapien
tgtggtagaacaataaggtatgaagaattgaat

SEQ ID NO: 277947 - DNA, 33 bp, Homo sapien
tctaccacagaatgtaactttttaaatctctca

SEQ ID NO: 277948 - DNA, 33 bp, Homo sapien
tctaccacagaatgtacctttttaaatctctca

SEQ ID NO: 277949 - DNA, 33 bp, Homo sapien
aagatatgagcagtagcagcaaatgtatctcac

SEQ ID NO: 277950 - DNA, 33 bp, Homo sapien
aagatatgagcagtaggagcaaatgtatctcac

SEQ ID NO: 277951 - DNA, 33 bp, Homo sapien
caatttgtcttcattaccagtagcaggagactt

SEQ ID NO: 277952 - DNA, 33 bp, Homo sapien
caatttgtcttcattatcagtagcaggagactt

SEQ ID NO: 277953 - DNA, 33 bp, Homo sapien
cacaggtcgtcattcactcattacattatctca

SEQ ID NO: 277954 - DNA, 33 bp, Homo sapien
cacaggtcgtcattcattcattacattatctca

SEQ ID NO: 277955 - DNA, 33 bp, Homo sapien
tatggagaccctgatacgagaatgagtaggact

SEQ ID NO: 277956 - DNA, 33 bp, Homo sapien
tatggagaccctgatatgagaatgagtaggact

SEQ ID NO: 277957 - DNA, 33 bp, Homo sapien
ctacaaatatctttacagcgaactgattacacc

SEQ ID NO: 277958 - DNA, 33 bp, Homo sapien
ctacaaatatctttacggcgaactgattacacc

SEQ ID NO: 277959 - DNA, 33 bp, Homo sapien
tatcaagaaatacataaaacacacagtcttcca

SEQ ID NO: 277960 - DNA, 33 bp, Homo sapien
tatcaagaaatacatagaacacacagtcttcca

SEQ ID NO: 277961 - DNA, 33 bp, Homo sapien
aatgaaaaattaatgcgatgaaattccataaac

SEQ ID NO: 277962 - DNA, 33 bp, Homo sapien
aatgaaaaattaatgctatgaaattccataaac

SEQ ID NO: 277963 - DNA, 33 bp, Homo sapien
ctaaaaaatgctacaaacttcttacagaagaag

SEQ ID NO: 277964 - DNA, 33 bp, Homo sapien
ctaaaaaatgctacaatcttcttacagaagaag

SEQ ID NO: 277965 - DNA, 33 bp, Homo sapien
agaggcaattagcagccgattaggcaatagaga

SEQ ID NO: 277966 - DNA, 33 bp, Homo sapien
agaggcaattagcagctgattaggcaatagaga

SEQ ID NO: 277967 - DNA, 33 bp, Homo sapien
catcccaagtgctcaaaaaggacatactactct

SEQ ID NO: 277968 - DNA, 33 bp, Homo sapien
catcccaagtgctcaacaaggacatactactct

SEQ ID NO: 277969 - DNA, 33 bp, Homo sapien
cctatcccagatctacagagtgtgaatattccc

SEQ ID NO: 277970 - DNA, 33 bp, Homo sapien
cctatcccagatctacggagtgtgaatattccc

SEQ ID NO: 277971 - DNA, 33 bp, Homo sapien
aacactcatattgaacaaccttggatactaaca

SEQ ID NO: 277972 - DNA, 33 bp, Homo sapien
aacactcatattgaaccaccttggatactaaca

SEQ ID NO: 277973 - DNA, 33 bp, Homo sapien
gcactcatccataaacaagtttcctcccaaatt

SEQ ID NO: 277974 - DNA, 33 bp, Homo sapien
gcactcatccataaacgagtttcctcccaaatt

SEQ ID NO: 277975 - DNA, 33 bp, Homo sapien
agacataattgaaaagaaaatctctcaaccttg

SEQ ID NO: 277976 - DNA, 33 bp, Homo sapien
agacataattgaaaagcaaatctctcaaccttg

SEQ ID NO: 277977 - DNA, 33 bp, Homo sapien
aagattgagcaaaactaaagatataatagctct

SEQ ID NO: 277978 - DNA, 33 bp, Homo sapien
aagattgagcaaaactgaagatataatagctct

SEQ ID NO: 277979 - DNA, 33 bp, Homo sapien
aaacttctacttcatcaagatttgcttcaaaac

SEQ ID NO: 277980 - DNA, 33 bp, Homo sapien
aaacttctacttcatcgagatttgcttcaaaac

SEQ ID NO: 277981 - DNA, 33 bp, Homo sapien
tacaagagtggtatacacaatgctcttctcaac

SEQ ID NO: 277982 - DNA, 33 bp, Homo sapien
tacaagagtggtatacgcaatgctcttctcaac

SEQ ID NO: 277983 - DNA, 33 bp, Homo sapien
taccaaatggatggaagaatgaaataactgatt

SEQ ID NO: 277984 - DNA, 33 bp, Homo sapien
taccaaatggatggaataatgaaataactgatt

SEQ ID NO: 277985 - DNA, 33 bp, Homo sapien
aaccatattaggcagcaaagtatcatttccagt

SEQ ID NO: 277986 - DNA, 33 bp, Homo sapien
aaccatattaggcagcgaagtatcatttccagt

SEQ ID NO: 277987 - DNA, 33 bp, Homo sapien
atgccatatgaaaagggagttcaggggcccata

SEQ ID NO: 277988 - DNA, 33 bp, Homo sapien
atgccatatgaaaaggtagttcaggggcccata

SEQ ID NO: 277989 - DNA, 33 bp, Homo sapien
atgaagttagaaacgacaattctcagcaaacta

SEQ ID NO: 277990 - DNA, 33 bp, Homo sapien
atgaagttagaaacgataattctcagcaaacta

SEQ ID NO: 277991 - DNA, 33 bp, Homo sapien
gttccaacttattcacacactcattattttact

SEQ ID NO: 277992 - DNA, 33 bp, Homo sapien
gttccaacttattcacgcactcattattttact

SEQ ID NO: 277993 - DNA, 33 bp, Homo sapien
taggtattgtcttttacgtcaaccatttacttt

SEQ ID NO: 277994 - DNA, 33 bp, Homo sapien
taggtattgtcttttaggtcaaccatttacttt

SEQ ID NO: 277995 - DNA, 33 bp, Homo sapien
acatcactactatcatgatccttagaaagcagt

SEQ ID NO: 277996 - DNA, 33 bp, Homo sapien
acatcactactatcattatccttagaaagcagt

SEQ ID NO: 277997 - DNA, 33 bp, Homo sapien
aaaccctttgaccatgaagacttgaacaatcac

SEQ ID NO: 277998 - DNA, 33 bp, Homo sapien
aaaccctttgaccatggagacttgaacaatcac

SEQ ID NO: 277999 - DNA, 33 bp, Homo sapien
atcttgtcttgttgcactgactaggatttccaa

SEQ ID NO: 278000 - DNA, 33 bp, Homo sapien
atcttgtcttgttgcagtgactaggatttccaa

SEQ ID NO: 278001 - DNA, 33 bp, Homo sapien
atcctaccagttttgacattgtgtacagtgagt

SEQ ID NO: 278002 - DNA, 33 bp, Homo sapien
atcctaccagttttgatattgtgtacagtgagt

SEQ ID NO: 278003 - DNA, 33 bp, Homo sapien
cagatgtttttgtgaccagaaaacgtatattat

SEQ ID NO: 278004 - DNA, 33 bp, Homo sapien
cagatgtttttgtgacgagaaaacgtatattat

SEQ ID NO: 278005 - DNA, 33 bp, Homo sapien
atgcccaaatccagtcacatttcttactagatt

SEQ ID NO: 278006 - DNA, 33 bp, Homo sapien
atgcccaaatccagtcgcatttcttactagatt

SEQ ID NO: 278007 - DNA, 33 bp, Homo sapien
atgtttaacatttcaaaggtgcataatccaact

SEQ ID NO: 278008 - DNA, 33 bp, Homo sapien
atgtttaacatttcaagggtgcataatccaact

SEQ ID NO: 278009 - DNA, 33 bp, Homo sapien
tgtttgttttgcaatactacctcaatttaaatt

SEQ ID NO: 278010 - DNA, 33 bp, Homo sapien
tgtttgttttgcaatattacctcaatttaaatt

SEQ ID NO: 278011 - DNA, 33 bp, Homo sapien
gataataagactttgaagataccaaaaatatgt

SEQ ID NO: 278012 - DNA, 33 bp, Homo sapien
gataataagactttgaggataccaaaaatatgt

SEQ ID NO: 278013 - DNA, 33 bp, Homo sapien
cagaaggagaagttaaagcacctagaaatatga

SEQ ID NO: 278014 - DNA, 33 bp, Homo sapien
cagaaggagaagttaaggcacctagaaatatga

SEQ ID NO: 278015 - DNA, 33 bp, Homo sapien
cagtggtgtataattacgagaaaattctatttt

SEQ ID NO: 278016 - DNA, 33 bp, Homo sapien
cagtggtgtataattatgagaaaattctatttt

SEQ ID NO: 278017 - DNA, 33 bp, Homo sapien
cttaagtgatgaggacctagatttgaccccagt

SEQ ID NO: 278018 - DNA, 33 bp, Homo sapien
cttaagtgatgaggacttagatttgaccccagt

SEQ ID NO: 278019 - DNA, 33 bp, Homo sapien
tttgggatccagtgaaaaattctaagtgccact

SEQ ID NO: 278020 - DNA, 33 bp, Homo sapien
tttgggatccagtgaacaattctaagtgccact

SEQ ID NO: 278021 - DNA, 33 bp, Homo sapien
attaaatgtgatattgcagatcctcctttaatt

SEQ ID NO: 278022 - DNA, 33 bp, Homo sapien
attaaatgtgatattgtagatcctcctttaatt

SEQ ID NO: 278023 - DNA, 33 bp, Homo sapien
gagttctagtgtacagcatgaagtctgtcatca

SEQ ID NO: 278024 - DNA, 33 bp, Homo sapien
gagttctagtgtacagtatgaagtctgtcatca

SEQ ID NO: 278025 - DNA, 33 bp, Homo sapien
aaacaagcagagaaaaatgactatgtgagtaca

SEQ ID NO: 278026 - DNA, 33 bp, Homo sapien
aaacaagcagagaaaattgactatgtgagtaca

SEQ ID NO: 278027 - DNA, 33 bp, Homo sapien
taacaaaggaaatatacgtgcaaagtgaattat

SEQ ID NO: 278028 - DNA, 33 bp, Homo sapien
taacaaaggaaatatatgtgcaaagtgaattat

SEQ ID NO: 278029 - DNA, 33 bp, Homo sapien
aattgaccaataacatgacacattcaattcacc

SEQ ID NO: 278030 - DNA, 33 bp, Homo sapien
aattgaccaataacattacacattcaattcacc

SEQ ID NO: 278031 - DNA, 33 bp, Homo sapien
agccaagaccctgatccagtagtactttctttg

SEQ ID NO: 278032 - DNA, 33 bp, Homo sapien
agccaagaccctgatcgagtagtactttctttg

SEQ ID NO: 278033 - DNA, 33 bp, Homo sapien
gtagattatcttctaaacaaactcacacttgga

SEQ ID NO: 278034 - DNA, 33 bp, Homo sapien
gtagattatcttctaagcaaactcacacttgga

SEQ ID NO: 278035 - DNA, 33 bp, Homo sapien
cttattatatagcacaacaagtcaaggcccatt

SEQ ID NO: 278036 - DNA, 33 bp, Homo sapien
cttattatatagcacaccaagtcaaggcccatt

SEQ ID NO: 278037 - DNA, 33 bp, Homo sapien
atcttaaagtttcatacagtctacacatgatac

SEQ ID NO: 278038 - DNA, 33 bp, Homo sapien
atcttaaagtttcatatagtctacacatgatac

SEQ ID NO: 278039 - DNA, 33 bp, Homo sapien
catttaacctccccaaatccagtatgaaaaata

SEQ ID NO: 278040 - DNA, 33 bp, Homo sapien
catttaacctccccaagtccagtatgaaaaata

SEQ ID NO: 278041 - DNA, 33 bp, Homo sapien
gtattcaatctattaaaactggcttttttcact

SEQ ID NO: 278042 - DNA, 33 bp, Homo sapien
gtattcaatctattaagactggcttttttcact

SEQ ID NO: 278043 - DNA, 33 bp, Homo sapien
tctcattgccttgggaagaatcaaatccttatt

SEQ ID NO: 278044 - DNA, 33 bp, Homo sapien
tctcattgccttgggaggaatcaaatccttatt

SEQ ID NO: 278045 - DNA, 33 bp, Homo sapien
cctagttaataaatagcagtcataggaccatta

SEQ ID NO: 278046 - DNA, 33 bp, Homo sapien
cctagttaataaataggagtcataggaccatta

SEQ ID NO: 278047 - DNA, 33 bp, Homo sapien
atggtccatattggtgaatttgtctttgttcca

SEQ ID NO: 278048 - DNA, 33 bp, Homo sapien
atggtccatattggtgtatttgtctttgttcca

SEQ ID NO: 278049 - DNA, 33 bp, Homo sapien
aaatttcaaacctatacaatttctgaatttaac

SEQ ID NO: 278050 - DNA, 33 bp, Homo sapien
aaatttcaaacctatagaatttctgaatttaac

SEQ ID NO: 278051 - DNA, 33 bp, Homo sapien
gactagcaaattgcaaagccatgattcaagctc

SEQ ID NO: 278052 - DNA, 33 bp, Homo sapien
gactagcaaattgcaaggccatgattcaagctc

SEQ ID NO: 278053 - DNA, 33 bp, Homo sapien
ctggacagggtaaatccagaggtaatgccttca

SEQ ID NO: 278054 - DNA, 33 bp, Homo sapien
ctggacagggtaaatctagaggtaatgccttca

SEQ ID NO: 278055 - DNA, 33 bp, Homo sapien
gttggtcacaaataaactacaccagcttgttgc

SEQ ID NO: 278056 - DNA, 33 bp, Homo sapien
gttggtcacaaataaattacaccagcttgttgc

SEQ ID NO: 278057 - DNA, 33 bp, Homo sapien
atgatgtgtcagactacgaaaaagaattggact

SEQ ID NO: 278058 - DNA, 33 bp, Homo sapien
atgatgtgtcagactatgaaaaagaattggact

SEQ ID NO: 278059 - DNA, 33 bp, Homo sapien
atggattccttgccaaatggaggttattcctga

SEQ ID NO: 278060 - DNA, 33 bp, Homo sapien
atggattccttgccaagtggaggttattcctga

SEQ ID NO: 278061 - DNA, 33 bp, Homo sapien
ggaggatgctctttaaaaccactagttgaccat

SEQ ID NO: 278062 - DNA, 33 bp, Homo sapien
ggaggatgctctttaacaccactagttgaccat

SEQ ID NO: 278063 - DNA, 33 bp, Homo sapien
acaaatagtccatcaggaaacatggttgtacct

SEQ ID NO: 278064 - DNA, 33 bp, Homo sapien
acaaatagtccatcagtaaacatggttgtacct

SEQ ID NO: 278065 - DNA, 33 bp, Homo sapien
cctgaattaagaggtacagtttccaaatggatt

SEQ ID NO: 278066 - DNA, 33 bp, Homo sapien
cctgaattaagaggtatagtttccaaatggatt

SEQ ID NO: 278067 - DNA, 33 bp, Homo sapien
ctcgtacatttagtccaaggtttttcaacattg

SEQ ID NO: 278068 - DNA, 33 bp, Homo sapien
ctcgtacatttagtccgaggtttttcaacattg

SEQ ID NO: 278069 - DNA, 33 bp, Homo sapien
ctactgtagtagctaacagtgaataacattgca

SEQ ID NO: 278070 - DNA, 33 bp, Homo sapien
ctactgtagtagctaatagtgaataacattgca

SEQ ID NO: 278071 - DNA, 33 bp, Homo sapien
gcactgaggagtaagacagcaacagttctcact

SEQ ID NO: 278072 - DNA, 33 bp, Homo sapien
gcactgaggagtaagagagcaacagttctcact

SEQ ID NO: 278073 - DNA, 33 bp, Homo sapien
taaattgtctgtcccaaattctcaacagtgcca

SEQ ID NO: 278074 - DNA, 33 bp, Homo sapien
taaattgtctgtcccagattctcaacagtgcca

SEQ ID NO: 278075 - DNA, 33 bp, Homo sapien
tcaacttcaaattacaaatgaagactctaggct

SEQ ID NO: 278076 - DNA, 33 bp, Homo sapien
tcaacttcaaattacagatgaagactctaggct

SEQ ID NO: 278077 - DNA, 33 bp, Homo sapien
ctgtaaagttctccacacatgaaagcaactgta

SEQ ID NO: 278078 - DNA, 33 bp, Homo sapien
ctgtaaagttctccacgcatgaaagcaactgta

SEQ ID NO: 278079 - DNA, 33 bp, Homo sapien
accctgatgtataacaatatgtcgttccctaca

SEQ ID NO: 278080 - DNA, 33 bp, Homo sapien
accctgatgtataacagtatgtcgttccctaca

SEQ ID NO: 278081 - DNA, 33 bp, Homo sapien
cacattttatccagagaagttatcgtggaccga

SEQ ID NO: 278082 - DNA, 33 bp, Homo sapien
cacattttatccagaggagttatcgtggaccga

SEQ ID NO: 278083 - DNA, 33 bp, Homo sapien
aaggttattttcaaaacgatgcttcactacaaa

SEQ ID NO: 278084 - DNA, 33 bp, Homo sapien
aaggttattttcaaaatgatgcttcactacaaa

SEQ ID NO: 278085 - DNA, 33 bp, Homo sapien
atattttaaaagggtacccatatactcaagaat

SEQ ID NO: 278086 - DNA, 33 bp, Homo sapien
atattttaaaagggtatccatatactcaagaat

SEQ ID NO: 278087 - DNA, 33 bp, Homo sapien
acttccactgggatgaatatcaagccaagggat

SEQ ID NO: 278088 - DNA, 33 bp, Homo sapien
acttccactgggatgagtatcaagccaagggat

SEQ ID NO: 278089 - DNA, 33 bp, Homo sapien
ccagagtacattccaaagtgactataccagttt

SEQ ID NO: 278090 - DNA, 33 bp, Homo sapien
ccagagtacattccaaggtgactataccagttt

SEQ ID NO: 278091 - DNA, 33 bp, Homo sapien
aataagcacacaaataagtcattcagaagttca

SEQ ID NO: 278092 - DNA, 33 bp, Homo sapien
aataagcacacaaatatgtcattcagaagttca

SEQ ID NO: 278093 - DNA, 33 bp, Homo sapien
ccatgaggtatatgaaaatgaaagctaatatgg

SEQ ID NO: 278094 - DNA, 33 bp, Homo sapien
ccatgaggtatatgaagatgaaagctaatatgg

SEQ ID NO: 278095 - DNA, 33 bp, Homo sapien
cctctggttaagaagagtaattgcctatctctt

SEQ ID NO: 278096 - DNA, 33 bp, Homo sapien
cctctggttaagaagattaattgcctatctctt

SEQ ID NO: 278097 - DNA, 33 bp, Homo sapien
accacaggaaaggagaacaaatccatccaaaag

SEQ ID NO: 278098 - DNA, 33 bp, Homo sapien
accacaggaaaggagagcaaatccatccaaaag

SEQ ID NO: 278099 - DNA, 33 bp, Homo sapien
ttctggatctgactcaaaaaacatataacaaaa

SEQ ID NO: 278100 - DNA, 33 bp, Homo sapien
ttctggatctgactcagaaaacatataacaaaa

SEQ ID NO: 278101 - DNA, 33 bp, Homo sapien
atcatggattaattccactaagccttaattaac

SEQ ID NO: 278102 - DNA, 33 bp, Homo sapien
atcatggattaattccgctaagccttaattaac

SEQ ID NO: 278103 - DNA, 33 bp, Homo sapien
cccagaagaggataccgagtcatctcagaaacc

SEQ ID NO: 278104 - DNA, 33 bp, Homo sapien
cccagaagaggatacctagtcatctcagaaacc

SEQ ID NO: 278105 - DNA, 33 bp, Homo sapien
ctgaagaccttgttcaatacagcagagttaagc

SEQ ID NO: 278106 - DNA, 33 bp, Homo sapien
ctgaagaccttgttcagtacagcagagttaagc

SEQ ID NO: 278107 - DNA, 33 bp, Homo sapien
tttattggccaaaacaaatcatatgtccatcaa

SEQ ID NO: 278108 - DNA, 33 bp, Homo sapien
tttattggccaaaacagatcatatgtccatcaa

SEQ ID NO: 278109 - DNA, 33 bp, Homo sapien
gctatttgtatatggaataagtatcaggtggaa

SEQ ID NO: 278110 - DNA, 33 bp, Homo sapien
gctatttgtatatggagtaagtatcaggtggaa

SEQ ID NO: 278111 - DNA, 33 bp, Homo sapien
tttgatacttgacacacataggattattgtagg

SEQ ID NO: 278112 - DNA, 33 bp, Homo sapien
tttgatacttgacacatataggattattgtagg

SEQ ID NO: 278113 - DNA, 33 bp, Homo sapien
tcaaatctccctaccaatgattttagcaatgat

SEQ ID NO: 278114 - DNA, 33 bp, Homo sapien
tcaaatctccctaccagtgattttagcaatgat

SEQ ID NO: 278115 - DNA, 33 bp, Homo sapien
atgtattcatacaacagtcgtgtggaaaatttg

SEQ ID NO: 278116 - DNA, 33 bp, Homo sapien
atgtattcatacaacattcgtgtggaaaatttg

SEQ ID NO: 278117 - DNA, 33 bp, Homo sapien
cctgccataaacttcggcacacaatggagtcta

SEQ ID NO: 278118 - DNA, 33 bp, Homo sapien
cctgccataaacttcgtcacacaatggagtcta

SEQ ID NO: 278119 - DNA, 33 bp, Homo sapien
cgaccttagcgccctgaaatcttcatcacccgg

SEQ ID NO: 278120 - DNA, 33 bp, Homo sapien
cgaccttagcgccctgcaatcttcatcacccgg

SEQ ID NO: 278121 - DNA, 33 bp, Homo sapien
gtaacaggtatatcaaatgtgtaatcacaaagt

SEQ ID NO: 278122 - DNA, 33 bp, Homo sapien
gtaacaggtatatcaagtgtgtaatcacaaagt

SEQ ID NO: 278123 - DNA, 33 bp, Homo sapien
gcatcatagtcagaccacttcctgcgagtatgg

SEQ ID NO: 278124 - DNA, 33 bp, Homo sapien
gcatcatagtcagaccgcttcctgcgagtatgg

SEQ ID NO: 278125 - DNA, 33 bp, Homo sapien
tatgagacattacctacatcagttaaaatagct

SEQ ID NO: 278126 - DNA, 33 bp, Homo sapien
tatgagacattacctatatcagttaaaatagct

SEQ ID NO: 278127 - DNA, 33 bp, Homo sapien
ttgttgtaatgattcacggtttaaatttgctca

SEQ ID NO: 278128 - DNA, 33 bp, Homo sapien
ttgttgtaatgattcatggtttaaatttgctca

SEQ ID NO: 278129 - DNA, 33 bp, Homo sapien
tgtaaatatcataataagaattgggggtttggg

SEQ ID NO: 278130 - DNA, 33 bp, Homo sapien
tgtaaatatcataataggaattgggggtttggg

SEQ ID NO: 278131 - DNA, 33 bp, Homo sapien
ttttatagtgaacaaggaggtacaccataggaa

SEQ ID NO: 278132 - DNA, 33 bp, Homo sapien
ttttatagtgaacaagtaggtacaccataggaa

SEQ ID NO: 278133 - DNA, 33 bp, Homo sapien
ctaatatttgtccctccatggtaatgatagttt

SEQ ID NO: 278134 - DNA, 33 bp, Homo sapien
ctaatatttgtccctcgatggtaatgatagttt

SEQ ID NO: 278135 - DNA, 33 bp, Homo sapien
aaaacacatcctgatacaagatgagaagcgtca

SEQ ID NO: 278136 - DNA, 33 bp, Homo sapien
aaaacacatcctgatagaagatgagaagcgtca

SEQ ID NO: 278137 - DNA, 33 bp, Homo sapien
caaataaattcttcctaaaactacaagtggaga

SEQ ID NO: 278138 - DNA, 33 bp, Homo sapien
caaataaattcttcctcaaactacaagtggaga

SEQ ID NO: 278139 - DNA, 33 bp, Homo sapien
acccaaaatctaggctaacatcatcctggtcca

SEQ ID NO: 278140 - DNA, 33 bp, Homo sapien
acccaaaatctaggctgacatcatcctggtcca

SEQ ID NO: 278141 - DNA, 33 bp, Homo sapien
ctcagtctagaagaaacctgaagtaggtagctc

SEQ ID NO: 278142 - DNA, 33 bp, Homo sapien
ctcagtctagaagaaagctgaagtaggtagctc

SEQ ID NO: 278143 - DNA, 33 bp, Homo sapien
ctttatatttattatccctcccttgtatcagag

SEQ ID NO: 278144 - DNA, 33 bp, Homo sapien
ctttatatttattatctctcccttgtatcagag

SEQ ID NO: 278145 - DNA, 33 bp, Homo sapien
ttctcttcataatgtccacctggttggagtatc

SEQ ID NO: 278146 - DNA, 33 bp, Homo sapien
ttctcttcataatgtctacctggttggagtatc

SEQ ID NO: 278147 - DNA, 33 bp, Homo sapien
aatacagggaaaggaacattatgtactaaaaca

SEQ ID NO: 278148 - DNA, 33 bp, Homo sapien
aatacagggaaaggaatattatgtactaaaaca

SEQ ID NO: 278149 - DNA, 33 bp, Homo sapien
gtgtccctcaagtactaagcttcttgctctcag

SEQ ID NO: 278150 - DNA, 33 bp, Homo sapien
gtgtccctcaagtacttagcttcttgctctcag

SEQ ID NO: 278151 - DNA, 33 bp, Homo sapien
tggaaatactggacttaaagctctttgtagtta

SEQ ID NO: 278152 - DNA, 33 bp, Homo sapien
tggaaatactggactttaagctctttgtagtta

SEQ ID NO: 278153 - DNA, 33 bp, Homo sapien
gtttgtttgggtataaactgccttctaaccaac

SEQ ID NO: 278154 - DNA, 33 bp, Homo sapien
gtttgtttgggtataacctgccttctaaccaac

SEQ ID NO: 278155 - DNA, 33 bp, Homo sapien
tgccatgaaatacagaaaaactccttaatagtc

SEQ ID NO: 278156 - DNA, 33 bp, Homo sapien
tgccatgaaatacagagaaactccttaatagtc

SEQ ID NO: 278157 - DNA, 33 bp, Homo sapien
ttgaaaagtaacattaagcttttgatgtaaatg

SEQ ID NO: 278158 - DNA, 33 bp, Homo sapien
ttgaaaagtaacattatgcttttgatgtaaatg

SEQ ID NO: 278159 - DNA, 33 bp, Homo sapien
tgagtgagatatgaagcaggttttgtgattagt

SEQ ID NO: 278160 - DNA, 33 bp, Homo sapien
tgagtgagatatgaagtaggttttgtgattagt

SEQ ID NO: 278161 - DNA, 33 bp, Homo sapien
ctagtaggtgaataagacaaatatacaaataac

SEQ ID NO: 278162 - DNA, 33 bp, Homo sapien
ctagtaggtgaataaggcaaatatacaaataac

SEQ ID NO: 278163 - DNA, 33 bp, Homo sapien
aatttccccattgagacgtgtcatgaagttagc

SEQ ID NO: 278164 - DNA, 33 bp, Homo sapien
aatttccccattgagatgtgtcatgaagttagc

SEQ ID NO: 278165 - DNA, 33 bp, Homo sapien
ttagacactgggactaacaaaaggagaagtgat

SEQ ID NO: 278166 - DNA, 33 bp, Homo sapien
ttagacactgggactaccaaaaggagaagtgat

SEQ ID NO: 278167 - DNA, 33 bp, Homo sapien
aagattgtagactgtgaagaaatgggaacaaat

SEQ ID NO: 278168 - DNA, 33 bp, Homo sapien
aagattgtagactgtgcagaaatgggaacaaat

SEQ ID NO: 278169 - DNA, 33 bp, Homo sapien
ctttaattaaatggaaactttagtgtgcaaggg

SEQ ID NO: 278170 - DNA, 33 bp, Homo sapien
ctttaattaaatggaacctttagtgtgcaaggg

SEQ ID NO: 278171 - DNA, 33 bp, Homo sapien
tgttatattcagaaacagtaaacaagaggcatg

SEQ ID NO: 278172 - DNA, 33 bp, Homo sapien
tgttatattcagaaacggtaaacaagaggcatg

SEQ ID NO: 278173 - DNA, 33 bp, Homo sapien
caccttcttttgttcaagagaagagcgagatca

SEQ ID NO: 278174 - DNA, 33 bp, Homo sapien
caccttcttttgttcatgagaagagcgagatca

SEQ ID NO: 278175 - DNA, 33 bp, Homo sapien
cttagtctaggtgctgaatgtagtcctttgctc

SEQ ID NO: 278176 - DNA, 33 bp, Homo sapien
cttagtctaggtgctggatgtagtcctttgctc

SEQ ID NO: 278177 - DNA, 33 bp, Homo sapien
cctctgcttctcaggaaagggaaagagagagct

SEQ ID NO: 278178 - DNA, 33 bp, Homo sapien
cctctgcttctcaggagagggaaagagagagct

SEQ ID NO: 278179 - DNA, 33 bp, Homo sapien
caacttctgcataagaaaggagaactcacaaag

SEQ ID NO: 278180 - DNA, 33 bp, Homo sapien
caacttctgcataagagaggagaactcacaaag

SEQ ID NO: 278181 - DNA, 33 bp, Homo sapien
ccaaaagtgaatcagcactgtatgtttggttta

SEQ ID NO: 278182 - DNA, 33 bp, Homo sapien
ccaaaagtgaatcagcgctgtatgtttggttta

SEQ ID NO: 278183 - DNA, 33 bp, Homo sapien
tttagccaggctttccactctcacctccaaata

SEQ ID NO: 278184 - DNA, 33 bp, Homo sapien
tttagccaggctttccgctctcacctccaaata

SEQ ID NO: 278185 - DNA, 33 bp, Homo sapien
atacagatgtcctatacactaagcatatttgaa

SEQ ID NO: 278186 - DNA, 33 bp, Homo sapien
atacagatgtcctatatactaagcatatttgaa

SEQ ID NO: 278187 - DNA, 33 bp, Homo sapien
gaatacatttattcaaccctcattaaattttaa

SEQ ID NO: 278188 - DNA, 33 bp, Homo sapien
gaatacatttattcaatcctcattaaattttaa

SEQ ID NO: 278189 - DNA, 33 bp, Homo sapien
aacattaaattttgcagcaccttacttggcata

SEQ ID NO: 278190 - DNA, 33 bp, Homo sapien
aacattaaattttgcatcaccttacttggcata

SEQ ID NO: 278191 - DNA, 33 bp, Homo sapien
agggagatggttccataaaagaaagaaggaaga

SEQ ID NO: 278192 - DNA, 33 bp, Homo sapien
agggagatggttccattaaagaaagaaggaaga

SEQ ID NO: 278193 - DNA, 33 bp, Homo sapien
atgattaattcagccaataagcatcaacagtta

SEQ ID NO: 278194 - DNA, 33 bp, Homo sapien
atgattaattcagccattaagcatcaacagtta

SEQ ID NO: 278195 - DNA, 33 bp, Homo sapien
ctactggggagcaaagactgaatgtgatactga

SEQ ID NO: 278196 - DNA, 33 bp, Homo sapien
ctactggggagcaaagcctgaatgtgatactga

SEQ ID NO: 278197 - DNA, 33 bp, Homo sapien
tatgatgcaggtacgcaatgtggaatgattaaa

SEQ ID NO: 278198 - DNA, 33 bp, Homo sapien
tatgatgcaggtacgctatgtggaatgattaaa

SEQ ID NO: 278199 - DNA, 33 bp, Homo sapien
gtcttcaatgccttgcaaatcgtttcccaatca

SEQ ID NO: 278200 - DNA, 33 bp, Homo sapien
gtcttcaatgccttgcgaatcgtttcccaatca

SEQ ID NO: 278201 - DNA, 33 bp, Homo sapien
gcattgttctgggtcacagttaagttacttaaa

SEQ ID NO: 278202 - DNA, 33 bp, Homo sapien
gcattgttctgggtcatagttaagttacttaaa

SEQ ID NO: 278203 - DNA, 33 bp, Homo sapien
gtatatatcgaaggtgaatacaagacagtggcg

SEQ ID NO: 278204 - DNA, 33 bp, Homo sapien
gtatatatcgaaggtgcatacaagacagtggcg

SEQ ID NO: 278205 - DNA, 33 bp, Homo sapien
gcttcagaggaacgaacagaaaaacgaaagcgg

SEQ ID NO: 278206 - DNA, 33 bp, Homo sapien
gcttcagaggaacgaagagaaaaacgaaagcgg

SEQ ID NO: 278207 - DNA, 33 bp, Homo sapien
gtgaaatgagcatctcaaaaagatattaatgta

SEQ ID NO: 278208 - DNA, 33 bp, Homo sapien
gtgaaatgagcatctcgaaaagatattaatgta

SEQ ID NO: 278209 - DNA, 33 bp, Homo sapien
atgtacatcatcataaatgtttatcacaatttc

SEQ ID NO: 278210 - DNA, 33 bp, Homo sapien
atgtacatcatcataagtgtttatcacaatttc

SEQ ID NO: 278211 - DNA, 33 bp, Homo sapien
tcttgagccctaaggcactgtatgttgacacca

SEQ ID NO: 278212 - DNA, 33 bp, Homo sapien
tcttgagccctaaggcgctgtatgttgacacca

SEQ ID NO: 278213 - DNA, 33 bp, Homo sapien
ggccgaattcttgggccatgaggtgacttgcta

SEQ ID NO: 278214 - DNA, 33 bp, Homo sapien
ggccgaattcttgggctatgaggtgacttgcta

SEQ ID NO: 278215 - DNA, 33 bp, Homo sapien
gttgaactaatttacactctcatcaactgtgta

SEQ ID NO: 278216 - DNA, 33 bp, Homo sapien
gttgaactaatttacagtctcatcaactgtgta

SEQ ID NO: 278217 - DNA, 33 bp, Homo sapien
acaaaaaccagaagaccgagtacaaatgctgat

SEQ ID NO: 278218 - DNA, 33 bp, Homo sapien
acaaaaaccagaagactgagtacaaatgctgat

SEQ ID NO: 278219 - DNA, 33 bp, Homo sapien
ttaaacttgtttgtaaactctttgtatcagcaa

SEQ ID NO: 278220 - DNA, 33 bp, Homo sapien
ttaaacttgtttgtaacctctttgtatcagcaa

SEQ ID NO: 278221 - DNA, 33 bp, Homo sapien
ggggcctcagcttataacacaaactgcagtatt

SEQ ID NO: 278222 - DNA, 33 bp, Homo sapien
ggggcctcagcttatatcacaaactgcagtatt

SEQ ID NO: 278223 - DNA, 33 bp, Homo sapien
aatttgtgttcactggacattaaaaattaaaag

SEQ ID NO: 278224 - DNA, 33 bp, Homo sapien
aatttgtgttcactgggcattaaaaattaaaag

SEQ ID NO: 278225 - DNA, 33 bp, Homo sapien
aagaaagaatttgacacaagttcagaatctgta

SEQ ID NO: 278226 - DNA, 33 bp, Homo sapien
aagaaagaatttgacataagttcagaatctgta

SEQ ID NO: 278227 - DNA, 33 bp, Homo sapien
agcagagatcacaggacggcaaggaattatatg

SEQ ID NO: 278228 - DNA, 33 bp, Homo sapien
agcagagatcacaggatggcaaggaattatatg

SEQ ID NO: 278229 - DNA, 33 bp, Homo sapien
atttagggcttctgaaaggactgaaattcatga

SEQ ID NO: 278230 - DNA, 33 bp, Homo sapien
atttagggcttctgaacggactgaaattcatga

SEQ ID NO: 278231 - DNA, 33 bp, Homo sapien
tagagtagttattgcactcagaataagataaaa

SEQ ID NO: 278232 - DNA, 33 bp, Homo sapien
tagagtagttattgcattcagaataagataaaa

SEQ ID NO: 278233 - DNA, 33 bp, Homo sapien
atcaagatgtccacacaataagttacttttaag

SEQ ID NO: 278234 - DNA, 33 bp, Homo sapien
atcaagatgtccacacgataagttacttttaag

SEQ ID NO: 278235 - DNA, 33 bp, Homo sapien
gctaagagagtggatccaagtgttcttaacaca

SEQ ID NO: 278236 - DNA, 33 bp, Homo sapien
gctaagagagtggatctaagtgttcttaacaca

SEQ ID NO: 278237 - DNA, 33 bp, Homo sapien
ttaggcagtgtaaaaagatcagcatggcagaat

SEQ ID NO: 278238 - DNA, 33 bp, Homo sapien
ttaggcagtgtaaaaatatcagcatggcagaat

SEQ ID NO: 278239 - DNA, 33 bp, Homo sapien
ggaaacgagtagatgaagccaatgttgacactt

SEQ ID NO: 278240 - DNA, 33 bp, Homo sapien
ggaaacgagtagatgacgccaatgttgacactt

SEQ ID NO: 278241 - DNA, 33 bp, Homo sapien
tattagattaggacccaattcagtatgatattg

SEQ ID NO: 278242 - DNA, 33 bp, Homo sapien
tattagattaggaccccattcagtatgatattg

SEQ ID NO: 278243 - DNA, 33 bp, Homo sapien
tatactcagaggcatacaaattgttctaccata

SEQ ID NO: 278244 - DNA, 33 bp, Homo sapien
tatactcagaggcatataaattgttctaccata

SEQ ID NO: 278245 - DNA, 33 bp, Homo sapien
gttcggtttcaagccaaatatagagaaaatatt

SEQ ID NO: 278246 - DNA, 33 bp, Homo sapien
gttcggtttcaagccagatatagagaaaatatt

SEQ ID NO: 278247 - DNA, 33 bp, Homo sapien
aatgtctaggtcttgcacatatatttaaagatc

SEQ ID NO: 278248 - DNA, 33 bp, Homo sapien
aatgtctaggtcttgcccatatatttaaagatc

SEQ ID NO: 278249 - DNA, 33 bp, Homo sapien
cacaaagccttgcccaaattacagactcatgaa

SEQ ID NO: 278250 - DNA, 33 bp, Homo sapien
cacaaagccttgcccagattacagactcatgaa

SEQ ID NO: 278251 - DNA, 33 bp, Homo sapien
ctggagaggccatatacagaagaagttccaacc

SEQ ID NO: 278252 - DNA, 33 bp, Homo sapien
ctggagaggccatatatagaagaagttccaacc

SEQ ID NO: 278253 - DNA, 33 bp, Homo sapien
tatgaaaacttctgaggcgatgctacaagttta

SEQ ID NO: 278254 - DNA, 33 bp, Homo sapien
tatgaaaacttctgagtcgatgctacaagttta

SEQ ID NO: 278255 - DNA, 33 bp, Homo sapien
tattgctgcactgaaactgacagtagtgttagc

SEQ ID NO: 278256 - DNA, 33 bp, Homo sapien
tattgctgcactgaaattgacagtagtgttagc

SEQ ID NO: 278257 - DNA, 33 bp, Homo sapien
agagagacatatggataaaagttgaaaggctct

SEQ ID NO: 278258 - DNA, 33 bp, Homo sapien
agagagacatatggattaaagttgaaaggctct

SEQ ID NO: 278259 - DNA, 33 bp, Homo sapien
aacatggttcatttcaaattaaaatggtagcaa

SEQ ID NO: 278260 - DNA, 33 bp, Homo sapien
aacatggttcatttcatattaaaatggtagcaa

SEQ ID NO: 278261 - DNA, 33 bp, Homo sapien
tgtggttacaattaccggcttccacttgcagat

SEQ ID NO: 278262 - DNA, 33 bp, Homo sapien
tgtggttacaattacctgcttccacttgcagat

SEQ ID NO: 278263 - DNA, 33 bp, Homo sapien
agattcattatgctccgagggattgtgattgtt

SEQ ID NO: 278264 - DNA, 33 bp, Homo sapien
agattcattatgctcctagggattgtgattgtt

SEQ ID NO: 278265 - DNA, 33 bp, Homo sapien
ctaaccatgactacacgcaatcaggtattgcct

SEQ ID NO: 278266 - DNA, 33 bp, Homo sapien
ctaaccatgactacactcaatcaggtattgcct

SEQ ID NO: 278267 - DNA, 33 bp, Homo sapien
aaatggataactatcagatggcattttgtttcc

SEQ ID NO: 278268 - DNA, 33 bp, Homo sapien
aaatggataactatcatatggcattttgtttcc

SEQ ID NO: 278269 - DNA, 33 bp, Homo sapien
cttggccatagagatcagaaaatataatattga

SEQ ID NO: 278270 - DNA, 33 bp, Homo sapien
cttggccatagagatcggaaaatataatattga

SEQ ID NO: 278271 - DNA, 33 bp, Homo sapien
gctgcttttacctcacagaagataaatcttggt

SEQ ID NO: 278272 - DNA, 33 bp, Homo sapien
gctgcttttacctcacggaagataaatcttggt

SEQ ID NO: 278273 - DNA, 33 bp, Homo sapien
tctgctgaaagccctgcatcaactaaatcaact

SEQ ID NO: 278274 - DNA, 33 bp, Homo sapien
tctgctgaaagccctgtatcaactaaatcaact

SEQ ID NO: 278275 - DNA, 33 bp, Homo sapien
atttagtgttccctggaaaacagacttggagac

SEQ ID NO: 278276 - DNA, 33 bp, Homo sapien
atttagtgttccctgggaaacagacttggagac

SEQ ID NO: 278277 - DNA, 33 bp, Homo sapien
gtgacagggaaaagaactgacagataaatgatg

SEQ ID NO: 278278 - DNA, 33 bp, Homo sapien
gtgacagggaaaagaattgacagataaatgatg

SEQ ID NO: 278279 - DNA, 33 bp, Homo sapien
tggtagcaaaaataaaatgtccttggagcagca

SEQ ID NO: 278280 - DNA, 33 bp, Homo sapien
tggtagcaaaaataaagtgtccttggagcagca

SEQ ID NO: 278281 - DNA, 33 bp, Homo sapien
attagtggtaattctcgctaggtatttcaaagg

SEQ ID NO: 278282 - DNA, 33 bp, Homo sapien
attagtggtaattctctctaggtatttcaaagg

SEQ ID NO: 278283 - DNA, 33 bp, Homo sapien
ttctgttcccgtgaaacatcccagaaggtgcta

SEQ ID NO: 278284 - DNA, 33 bp, Homo sapien
ttctgttcccgtgaaatatcccagaaggtgcta

SEQ ID NO: 278285 - DNA, 33 bp, Homo sapien
atgagtcttctctgtagctcctgacatcctttt

SEQ ID NO: 278286 - DNA, 33 bp, Homo sapien
atgagtcttctctgtatctcctgacatcctttt

SEQ ID NO: 278287 - DNA, 33 bp, Homo sapien
cttctttctacaaaagcctatggcaaaagctgg

SEQ ID NO: 278288 - DNA, 33 bp, Homo sapien
cttctttctacaaaaggctatggcaaaagctgg

SEQ ID NO: 278289 - DNA, 33 bp, Homo sapien
atggtcaaagtcaaaagtttagcacccttttta

SEQ ID NO: 278290 - DNA, 33 bp, Homo sapien
atggtcaaagtcaaaattttagcacccttttta

SEQ ID NO: 278291 - DNA, 33 bp, Homo sapien
tattggtgataatagaagtgagcctttctttgg

SEQ ID NO: 278292 - DNA, 33 bp, Homo sapien
tattggtgataatagaggtgagcctttctttgg

SEQ ID NO: 278293 - DNA, 33 bp, Homo sapien
tggtggtgttgtctcaaagaaatggcttttatt

SEQ ID NO: 278294 - DNA, 33 bp, Homo sapien
tggtggtgttgtctcagagaaatggcttttatt

SEQ ID NO: 278295 - DNA, 33 bp, Homo sapien
tttgtaagtggatcttaaaacaatgacaaattc

SEQ ID NO: 278296 - DNA, 33 bp, Homo sapien
tttgtaagtggatcttgaaacaatgacaaattc

SEQ ID NO: 278297 - DNA, 33 bp, Homo sapien
catctttcttcacctcaccaaaggaattaaact

SEQ ID NO: 278298 - DNA, 33 bp, Homo sapien
catctttcttcacctctccaaaggaattaaact

SEQ ID NO: 278299 - DNA, 33 bp, Homo sapien
ggatgtcttgaagcaagagggtaaagatacaag

SEQ ID NO: 278300 - DNA, 33 bp, Homo sapien
ggatgtcttgaagcaatagggtaaagatacaag

SEQ ID NO: 278301 - DNA, 33 bp, Homo sapien
gatacaaggtgtggacacgaggagcagtgcctg

SEQ ID NO: 278302 - DNA, 33 bp, Homo sapien
gatacaaggtgtggactcgaggagcagtgcctg

SEQ ID NO: 278303 - DNA, 33 bp, Homo sapien
ggcttctgccttactgaactttccaacatatga

SEQ ID NO: 278304 - DNA, 33 bp, Homo sapien
ggcttctgccttactggactttccaacatatga

SEQ ID NO: 278305 - DNA, 33 bp, Homo sapien
ccttagaatgacagtcccaggccaaacaactta

SEQ ID NO: 278306 - DNA, 33 bp, Homo sapien
ccttagaatgacagtctcaggccaaacaactta

SEQ ID NO: 278307 - DNA, 33 bp, Homo sapien
tttctaaagtcagtaaaattgataaaagattcc

SEQ ID NO: 278308 - DNA, 33 bp, Homo sapien
tttctaaagtcagtaacattgataaaagattcc

SEQ ID NO: 278309 - DNA, 33 bp, Homo sapien
tttggaagaagaggtcccatccattcctagcaa

SEQ ID NO: 278310 - DNA, 33 bp, Homo sapien
tttggaagaagaggtctcatccattcctagcaa

SEQ ID NO: 278311 - DNA, 33 bp, Homo sapien
ggattggatttaaacaagttggattcatattat

SEQ ID NO: 278312 - DNA, 33 bp, Homo sapien
ggattggatttaaacaggttggattcatattat

SEQ ID NO: 278313 - DNA, 33 bp, Homo sapien
tttgattgcattgaaaattaataatgatgcaat

SEQ ID NO: 278314 - DNA, 33 bp, Homo sapien
tttgattgcattgaaagttaataatgatgcaat

SEQ ID NO: 278315 - DNA, 33 bp, Homo sapien
tacaggaagcatggcgacatctgtttggcttcc

SEQ ID NO: 278316 - DNA, 33 bp, Homo sapien
tacaggaagcatggcggcatctgtttggcttcc

SEQ ID NO: 278317 - DNA, 33 bp, Homo sapien
atgcattgtttctatcaacttacctcaatttac

SEQ ID NO: 278318 - DNA, 33 bp, Homo sapien
atgcattgtttctatctacttacctcaatttac

SEQ ID NO: 278319 - DNA, 33 bp, Homo sapien
ccaagaggccatgataacaaatcaatttgatta

SEQ ID NO: 278320 - DNA, 33 bp, Homo sapien
ccaagaggccatgatagcaaatcaatttgatta

SEQ ID NO: 278321 - DNA, 33 bp, Homo sapien
tgatgccagtgaaataaccattaataatcatat

SEQ ID NO: 278322 - DNA, 33 bp, Homo sapien
tgatgccagtgaaatagccattaataatcatat

SEQ ID NO: 278323 - DNA, 33 bp, Homo sapien
aactatacatagaagccgagtttatctcatcca

SEQ ID NO: 278324 - DNA, 33 bp, Homo sapien
aactatacatagaagctgagtttatctcatcca

SEQ ID NO: 278325 - DNA, 33 bp, Homo sapien
ctgggacagaaaggaaccaaagcttcttctctg

SEQ ID NO: 278326 - DNA, 33 bp, Homo sapien
ctgggacagaaaggaatcaaagcttcttctctg

SEQ ID NO: 278327 - DNA, 33 bp, Homo sapien
gggcctagactttttccctatgttctggcatcc

SEQ ID NO: 278328 - DNA, 33 bp, Homo sapien
gggcctagactttttctctatgttctggcatcc

SEQ ID NO: 278329 - DNA, 33 bp, Homo sapien
tttcactttcatttcacatgattgcatggtgtg

SEQ ID NO: 278330 - DNA, 33 bp, Homo sapien
tttcactttcatttcatatgattgcatggtgtg

SEQ ID NO: 278331 - DNA, 33 bp, Homo sapien
gatggagatgtttacaacttggtacgggaaaaa

SEQ ID NO: 278332 - DNA, 33 bp, Homo sapien
gatggagatgtttacagcttggtacgggaaaaa

SEQ ID NO: 278333 - DNA, 33 bp, Homo sapien
aacgctctacaaggagccacttttctccaaatc

SEQ ID NO: 278334 - DNA, 33 bp, Homo sapien
aacgctctacaaggaggcacttttctccaaatc

SEQ ID NO: 278335 - DNA, 33 bp, Homo sapien
caaaatgaaagaggccaagctaagaagtttaca

SEQ ID NO: 278336 - DNA, 33 bp, Homo sapien
caaaatgaaagaggccgagctaagaagtttaca

SEQ ID NO: 278337 - DNA, 33 bp, Homo sapien
aaaattgtttgggtaactcaggctaccttgcct

SEQ ID NO: 278338 - DNA, 33 bp, Homo sapien
aaaattgtttgggtaattcaggctaccttgcct

SEQ ID NO: 278339 - DNA, 33 bp, Homo sapien
agaaaagcaaagtaaagaataatcacttggtaa

SEQ ID NO: 278340 - DNA, 33 bp, Homo sapien
agaaaagcaaagtaaataataatcacttggtaa

SEQ ID NO: 278341 - DNA, 33 bp, Homo sapien
tatctgttcttgagcaaatccgttcattgtaac

SEQ ID NO: 278342 - DNA, 33 bp, Homo sapien
tatctgttcttgagcatatccgttcattgtaac

SEQ ID NO: 278343 - DNA, 33 bp, Homo sapien
taagttgttttcacaccgtaataaggaggagtt

SEQ ID NO: 278344 - DNA, 33 bp, Homo sapien
taagttgttttcacactgtaataaggaggagtt

SEQ ID NO: 278345 - DNA, 33 bp, Homo sapien
gggtccatgctcacaaaagaagcccagatgaat

SEQ ID NO: 278346 - DNA, 33 bp, Homo sapien
gggtccatgctcacaagagaagcccagatgaat

SEQ ID NO: 278347 - DNA, 33 bp, Homo sapien
taatgagccaattcaaatagaaggttttggcat

SEQ ID NO: 278348 - DNA, 33 bp, Homo sapien
taatgagccaattcaagtagaaggttttggcat

SEQ ID NO: 278349 - DNA, 33 bp, Homo sapien
tctaaactactgtgaaatactctacagaatatt

SEQ ID NO: 278350 - DNA, 33 bp, Homo sapien
tctaaactactgtgaattactctacagaatatt

SEQ ID NO: 278351 - DNA, 33 bp, Homo sapien
aggaactggtccatcaaaggagcttctttacct

SEQ ID NO: 278352 - DNA, 33 bp, Homo sapien
aggaactggtccatcagaggagcttctttacct

SEQ ID NO: 278353 - DNA, 33 bp, Homo sapien
gaaagattgtttaaaacgaagacacttggaaca

SEQ ID NO: 278354 - DNA, 33 bp, Homo sapien
gaaagattgtttaaaatgaagacacttggaaca

SEQ ID NO: 278355 - DNA, 33 bp, Homo sapien
tgcttctctcgacttaactaactgcttcttgtc

SEQ ID NO: 278356 - DNA, 33 bp, Homo sapien
tgcttctctcgacttagctaactgcttcttgtc

SEQ ID NO: 278357 - DNA, 33 bp, Homo sapien
cttaaaacgacaaaacaaaagatagctatgtga

SEQ ID NO: 278358 - DNA, 33 bp, Homo sapien
cttaaaacgacaaaacgaaagatagctatgtga

SEQ ID NO: 278359 - DNA, 33 bp, Homo sapien
acatacttgcagatcaataaaagtctgtaggaa

SEQ ID NO: 278360 - DNA, 33 bp, Homo sapien
acatacttgcagatcattaaaagtctgtaggaa

SEQ ID NO: 278361 - DNA, 33 bp, Homo sapien
tatctgatatagctgacgtaattttttttaatt

SEQ ID NO: 278362 - DNA, 33 bp, Homo sapien
tatctgatatagctgatgtaattttttttaatt

SEQ ID NO: 278363 - DNA, 33 bp, Homo sapien
gtttgctatcgtccaactgcaactgtgaattag

SEQ ID NO: 278364 - DNA, 33 bp, Homo sapien
gtttgctatcgtccaagtgcaactgtgaattag

SEQ ID NO: 278365 - DNA, 33 bp, Homo sapien
tttatttctactgttcaaaccatattaatgaga

SEQ ID NO: 278366 - DNA, 33 bp, Homo sapien
tttatttctactgttcgaaccatattaatgaga

SEQ ID NO: 278367 - DNA, 33 bp, Homo sapien
cccatagaaagtgaaccagttttgtgcctacag

SEQ ID NO: 278368 - DNA, 33 bp, Homo sapien
cccatagaaagtgaactagttttgtgcctacag

SEQ ID NO: 278369 - DNA, 33 bp, Homo sapien
tttatgaggattcccaacttaaaggaagaaaca

SEQ ID NO: 278370 - DNA, 33 bp, Homo sapien
tttatgaggattcccagcttaaaggaagaaaca

SEQ ID NO: 278371 - DNA, 33 bp, Homo sapien
cttgtctctaaaaaaactcttgcctatttataa

SEQ ID NO: 278372 - DNA, 33 bp, Homo sapien
cttgtctctaaaaaaattcttgcctatttataa

SEQ ID NO: 278373 - DNA, 33 bp, Homo sapien
ttatttggactaagacaataattggtgccgtgc

SEQ ID NO: 278374 - DNA, 33 bp, Homo sapien
ttatttggactaagactataattggtgccgtgc

SEQ ID NO: 278375 - DNA, 33 bp, Homo sapien
aaagaaggacatcaccagcgagttttataagcc

SEQ ID NO: 278376 - DNA, 33 bp, Homo sapien
aaagaaggacatcaccggcgagttttataagcc

SEQ ID NO: 278377 - DNA, 33 bp, Homo sapien
ttaaacactgggaataccaagctgtgtagcaac

SEQ ID NO: 278378 - DNA, 33 bp, Homo sapien
ttaaacactgggaatagcaagctgtgtagcaac

SEQ ID NO: 278379 - DNA, 33 bp, Homo sapien
atgaatgactatgtaaagcattaagtttctctg

SEQ ID NO: 278380 - DNA, 33 bp, Homo sapien
atgaatgactatgtaaggcattaagtttctctg

SEQ ID NO: 278381 - DNA, 33 bp, Homo sapien
agcaggtttgattttacgcaagaaaccataaag

SEQ ID NO: 278382 - DNA, 33 bp, Homo sapien
agcaggtttgattttatgcaagaaaccataaag

SEQ ID NO: 278383 - DNA, 33 bp, Homo sapien
tttgcttactagccacaaatatttagtggttaa

SEQ ID NO: 278384 - DNA, 33 bp, Homo sapien
tttgcttactagccaccaatatttagtggttaa

SEQ ID NO: 278385 - DNA, 33 bp, Homo sapien
gggaaatctactgagacagaagtataagcagat

SEQ ID NO: 278386 - DNA, 33 bp, Homo sapien
gggaaatctactgagagagaagtataagcagat

SEQ ID NO: 278387 - DNA, 33 bp, Homo sapien
aataattatttgctcaatgaccacaaacattac

SEQ ID NO: 278388 - DNA, 33 bp, Homo sapien
aataattatttgctcagtgaccacaaacattac

SEQ ID NO: 278389 - DNA, 33 bp, Homo sapien
gattctacccacaacaactctcttttacaatta

SEQ ID NO: 278390 - DNA, 33 bp, Homo sapien
gattctacccacaacacctctcttttacaatta

SEQ ID NO: 278391 - DNA, 33 bp, Homo sapien
ggtgaatgcagaattaacttgaaggagcagatt

SEQ ID NO: 278392 - DNA, 33 bp, Homo sapien
ggtgaatgcagaattagcttgaaggagcagatt

SEQ ID NO: 278393 - DNA, 33 bp, Homo sapien
tgggatttcaattaagcaggctgttattaaaaa

SEQ ID NO: 278394 - DNA, 33 bp, Homo sapien
tgggatttcaattaaggaggctgttattaaaaa

SEQ ID NO: 278395 - DNA, 33 bp, Homo sapien
aatgaatctgcctcggaacagtaagagtttact

SEQ ID NO: 278396 - DNA, 33 bp, Homo sapien
aatgaatctgcctcggtacagtaagagtttact

SEQ ID NO: 278397 - DNA, 33 bp, Homo sapien
tgttcctttgcaaaccaaaaagttatagttagt

SEQ ID NO: 278398 - DNA, 33 bp, Homo sapien
tgttcctttgcaaacccaaaagttatagttagt

SEQ ID NO: 278399 - DNA, 33 bp, Homo sapien
agaataaggactgagacgatctggcaatgaaga

SEQ ID NO: 278400 - DNA, 33 bp, Homo sapien
agaataaggactgagatgatctggcaatgaaga

SEQ ID NO: 278401 - DNA, 33 bp, Homo sapien
agacactctcaaggtaaatgtagctcccaaatt

SEQ ID NO: 278402 - DNA, 33 bp, Homo sapien
agacactctcaaggtagatgtagctcccaaatt

SEQ ID NO: 278403 - DNA, 33 bp, Homo sapien
tatttgttagctcagaaaataatgtaaggattt

SEQ ID NO: 278404 - DNA, 33 bp, Homo sapien
tatttgttagctcagataataatgtaaggattt

SEQ ID NO: 278405 - DNA, 33 bp, Homo sapien
atataaaacggcttgcaccacagatatgggaag

SEQ ID NO: 278406 - DNA, 33 bp, Homo sapien
atataaaacggcttgcgccacagatatgggaag

SEQ ID NO: 278407 - DNA, 33 bp, Homo sapien
aatatagcataagttaaagctagagaccttaaa

SEQ ID NO: 278408 - DNA, 33 bp, Homo sapien
aatatagcataagttagagctagagaccttaaa

SEQ ID NO: 278409 - DNA, 33 bp, Homo sapien
ttctaacatccttaaaatataactcaaagataa

SEQ ID NO: 278410 - DNA, 33 bp, Homo sapien
ttctaacatccttaaagtataactcaaagataa

SEQ ID NO: 278411 - DNA, 33 bp, Homo sapien
ttgactcagtttctcacctctaagttgagttga

SEQ ID NO: 278412 - DNA, 33 bp, Homo sapien
ttgactcagtttctcatctctaagttgagttga

SEQ ID NO: 278413 - DNA, 33 bp, Homo sapien
ttacacactgttcctcaagaaagatttccaaca

SEQ ID NO: 278414 - DNA, 33 bp, Homo sapien
ttacacactgttcctccagaaagatttccaaca

SEQ ID NO: 278415 - DNA, 33 bp, Homo sapien
cacctaggcgaatataaacaagactcaaaagca

SEQ ID NO: 278416 - DNA, 33 bp, Homo sapien
cacctaggcgaatatatacaagactcaaaagca

SEQ ID NO: 278417 - DNA, 33 bp, Homo sapien
attttctaagagaacaataagtattcaataact

SEQ ID NO: 278418 - DNA, 33 bp, Homo sapien
attttctaagagaacagtaagtattcaataact

SEQ ID NO: 278419 - DNA, 33 bp, Homo sapien
tatttttgcagatagtaaaacgtcaagacaaat

SEQ ID NO: 278420 - DNA, 33 bp, Homo sapien
tatttttgcagatagtgaaacgtcaagacaaat

SEQ ID NO: 278421 - DNA, 33 bp, Homo sapien
aatagggaagcatcagcaatcctgaaccaaagt

SEQ ID NO: 278422 - DNA, 33 bp, Homo sapien
aatagggaagcatcagtaatcctgaaccaaagt

SEQ ID NO: 278423 - DNA, 33 bp, Homo sapien
tagaaaattatacttaaaaatcaagtagatcat

SEQ ID NO: 278424 - DNA, 33 bp, Homo sapien
tagaaaattatacttacaaatcaagtagatcat

SEQ ID NO: 278425 - DNA, 33 bp, Homo sapien
ctgcaagtatagtgtaataaagagtgtagaatt

SEQ ID NO: 278426 - DNA, 33 bp, Homo sapien
ctgcaagtatagtgtactaaagagtgtagaatt

SEQ ID NO: 278427 - DNA, 33 bp, Homo sapien
agaactaccccactaacgaatttgcacatcatg

SEQ ID NO: 278428 - DNA, 33 bp, Homo sapien
agaactaccccactaaggaatttgcacatcatg

SEQ ID NO: 278429 - DNA, 33 bp, Homo sapien
taaaatgctattggctaaagttcaatttgtttt

SEQ ID NO: 278430 - DNA, 33 bp, Homo sapien
taaaatgctattggctcaagttcaatttgtttt

SEQ ID NO: 278431 - DNA, 33 bp, Homo sapien
aaagacttgctctcaacgttgtatacaccaaaa

SEQ ID NO: 278432 - DNA, 33 bp, Homo sapien
aaagacttgctctcaatgttgtatacaccaaaa

SEQ ID NO: 278433 - DNA, 33 bp, Homo sapien
ttctgcttcatctaaaacttatggaattaaaaa

SEQ ID NO: 278434 - DNA, 33 bp, Homo sapien
ttctgcttcatctaaagcttatggaattaaaaa

SEQ ID NO: 278435 - DNA, 33 bp, Homo sapien
ctgcttgcactcttaccgatgacgtaatgactt

SEQ ID NO: 278436 - DNA, 33 bp, Homo sapien
ctgcttgcactcttactgatgacgtaatgactt

SEQ ID NO: 278437 - DNA, 33 bp, Homo sapien
actttctcaataattccatggcctatgtcaagt

SEQ ID NO: 278438 - DNA, 33 bp, Homo sapien
actttctcaataattctatggcctatgtcaagt

SEQ ID NO: 278439 - DNA, 33 bp, Homo sapien
tcactgtcctaataaccatatagccttgcataa

SEQ ID NO: 278440 - DNA, 33 bp, Homo sapien
tcactgtcctaataactatatagccttgcataa

SEQ ID NO: 278441 - DNA, 33 bp, Homo sapien
gaagctagttcagatacgattgttataaaattg

SEQ ID NO: 278442 - DNA, 33 bp, Homo sapien
gaagctagttcagatatgattgttataaaattg

SEQ ID NO: 278443 - DNA, 33 bp, Homo sapien
caaagccaattgctaaagtgttttttggacaac

SEQ ID NO: 278444 - DNA, 33 bp, Homo sapien
caaagccaattgctaatgtgttttttggacaac

SEQ ID NO: 278445 - DNA, 33 bp, Homo sapien
gttctaaacaactggactcatagtttctagaag

SEQ ID NO: 278446 - DNA, 33 bp, Homo sapien
gttctaaacaactggattcatagtttctagaag

SEQ ID NO: 278447 - DNA, 33 bp, Homo sapien
ttcttaaccactacccaataatgcccttgatca

SEQ ID NO: 278448 - DNA, 33 bp, Homo sapien
ttcttaaccactacccgataatgcccttgatca

SEQ ID NO: 278449 - DNA, 33 bp, Homo sapien
aggatgtgcatcttctcaagtatctattatttc

SEQ ID NO: 278450 - DNA, 33 bp, Homo sapien
aggatgtgcatcttcttaagtatctattatttc

SEQ ID NO: 278451 - DNA, 33 bp, Homo sapien
atcatttgaagttacactgccaagctaggcggt

SEQ ID NO: 278452 - DNA, 33 bp, Homo sapien
atcatttgaagttacattgccaagctaggcggt

SEQ ID NO: 278453 - DNA, 33 bp, Homo sapien
ttgcagggatttgtaacatagatggacaagaca

SEQ ID NO: 278454 - DNA, 33 bp, Homo sapien
ttgcagggatttgtaatatagatggacaagaca

SEQ ID NO: 278455 - DNA, 33 bp, Homo sapien
tacagaacctaaatacagaaaattgacatgata

SEQ ID NO: 278456 - DNA, 33 bp, Homo sapien
tacagaacctaaatacggaaaattgacatgata

SEQ ID NO: 278457 - DNA, 33 bp, Homo sapien
gtcaactattccataaatatttacaaagcattc

SEQ ID NO: 278458 - DNA, 33 bp, Homo sapien
gtcaactattccataattatttacaaagcattc

SEQ ID NO: 278459 - DNA, 33 bp, Homo sapien
atttctggattattttaaaaaatgagcagctct

SEQ ID NO: 278460 - DNA, 33 bp, Homo sapien
atttctggattattttgaaaaatgagcagctct

SEQ ID NO: 278461 - DNA, 33 bp, Homo sapien
tgctcccttaagatgaacagaatgtggcaatac

SEQ ID NO: 278462 - DNA, 33 bp, Homo sapien
tgctcccttaagatgaccagaatgtggcaatac

SEQ ID NO: 278463 - DNA, 33 bp, Homo sapien
gctggattaagcagacactattggtatcacata

SEQ ID NO: 278464 - DNA, 33 bp, Homo sapien
gctggattaagcagacgctattggtatcacata

SEQ ID NO: 278465 - DNA, 33 bp, Homo sapien
attttacctctatataaatcaaggaatatataa

SEQ ID NO: 278466 - DNA, 33 bp, Homo sapien
attttacctctatatagatcaaggaatatataa

SEQ ID NO: 278467 - DNA, 33 bp, Homo sapien
accaacttataaaatcaactgaagtgtctatca

SEQ ID NO: 278468 - DNA, 33 bp, Homo sapien
accaacttataaaatcgactgaagtgtctatca

SEQ ID NO: 278469 - DNA, 33 bp, Homo sapien
cattaagttttgcagcagacatcttgttgatct

SEQ ID NO: 278470 - DNA, 33 bp, Homo sapien
cattaagttttgcagcggacatcttgttgatct

SEQ ID NO: 278471 - DNA, 33 bp, Homo sapien
catccacagaatgaccacttcatttttgcacat

SEQ ID NO: 278472 - DNA, 33 bp, Homo sapien
catccacagaatgaccgcttcatttttgcacat

SEQ ID NO: 278473 - DNA, 33 bp, Homo sapien
aagtagcaacagtaacggtgaagtcttctttca

SEQ ID NO: 278474 - DNA, 33 bp, Homo sapien
aagtagcaacagtaactgtgaagtcttctttca

SEQ ID NO: 278475 - DNA, 33 bp, Homo sapien
atagtggctgacttaacgggttaacttaggatt

SEQ ID NO: 278476 - DNA, 33 bp, Homo sapien
atagtggctgacttaatgggttaacttaggatt

SEQ ID NO: 278477 - DNA, 33 bp, Homo sapien
tacagaaccctggactaaataagagccataata

SEQ ID NO: 278478 - DNA, 33 bp, Homo sapien
tacagaaccctggactcaataagagccataata

SEQ ID NO: 278479 - DNA, 33 bp, Homo sapien
atttaaaatttcaacccgagcccggagatgctt

SEQ ID NO: 278480 - DNA, 33 bp, Homo sapien
atttaaaatttcaacctgagcccggagatgctt

SEQ ID NO: 278481 - DNA, 33 bp, Homo sapien
agaaaaagctgaaatgaatgtcacctttgtccc

SEQ ID NO: 278482 - DNA, 33 bp, Homo sapien
agaaaaagctgaaatggatgtcacctttgtccc

SEQ ID NO: 278483 - DNA, 33 bp, Homo sapien
atgtgtcttttctctacgttggctgcattgttt

SEQ ID NO: 278484 - DNA, 33 bp, Homo sapien
atgtgtcttttctctatgttggctgcattgttt

SEQ ID NO: 278485 - DNA, 33 bp, Homo sapien
taattaggaacttccacagatcaagaaccaaca

SEQ ID NO: 278486 - DNA, 33 bp, Homo sapien
taattaggaacttccatagatcaagaaccaaca

SEQ ID NO: 278487 - DNA, 33 bp, Homo sapien
gaggtatatttcactccaaacttcagggtctca

SEQ ID NO: 278488 - DNA, 33 bp, Homo sapien
gaggtatatttcactctaaacttcagggtctca

SEQ ID NO: 278489 - DNA, 33 bp, Homo sapien
gactttgataccccaccgacagcattagacaga

SEQ ID NO: 278490 - DNA, 33 bp, Homo sapien
gactttgataccccacggacagcattagacaga

SEQ ID NO: 278491 - DNA, 33 bp, Homo sapien
ttttttcttctccaaccattactataatgtgct

SEQ ID NO: 278492 - DNA, 33 bp, Homo sapien
ttttttcttctccaacgattactataatgtgct

SEQ ID NO: 278493 - DNA, 33 bp, Homo sapien
tggaggaaggattaaaaatgtgtatggcttgag

SEQ ID NO: 278494 - DNA, 33 bp, Homo sapien
tggaggaaggattaaacatgtgtatggcttgag

SEQ ID NO: 278495 - DNA, 33 bp, Homo sapien
tagataccctcctttaccagagtcaccaccact

SEQ ID NO: 278496 - DNA, 33 bp, Homo sapien
tagataccctcctttatcagagtcaccaccact

SEQ ID NO: 278497 - DNA, 33 bp, Homo sapien
aaactgttcttaaataccattttaccagctgtt

SEQ ID NO: 278498 - DNA, 33 bp, Homo sapien
aaactgttcttaaatagcattttaccagctgtt

SEQ ID NO: 278499 - DNA, 33 bp, Homo sapien
tttcttggctgtaagcaaatagaaactgaaaat

SEQ ID NO: 278500 - DNA, 33 bp, Homo sapien
tttcttggctgtaagcgaatagaaactgaaaat

SEQ ID NO: 278501 - DNA, 33 bp, Homo sapien
aaaagttctttcacaaagccgatgtccagaatg

SEQ ID NO: 278502 - DNA, 33 bp, Homo sapien
aaaagttctttcacaaggccgatgtccagaatg

SEQ ID NO: 278503 - DNA, 33 bp, Homo sapien
atactatgctcaacaactcgtgacaggatcaat

SEQ ID NO: 278504 - DNA, 33 bp, Homo sapien
atactatgctcaacaattcgtgacaggatcaat

SEQ ID NO: 278505 - DNA, 33 bp, Homo sapien
ggaatcagaactcaaactgatgcattcttttac

SEQ ID NO: 278506 - DNA, 33 bp, Homo sapien
ggaatcagaactcaaattgatgcattcttttac

SEQ ID NO: 278507 - DNA, 33 bp, Homo sapien
tcctcaaaaagcacaggctacagtgaaagtttt

SEQ ID NO: 278508 - DNA, 33 bp, Homo sapien
tcctcaaaaagcacagtctacagtgaaagtttt

SEQ ID NO: 278509 - DNA, 33 bp, Homo sapien
tttccatgtaaggtagaataaccatgggcatga

SEQ ID NO: 278510 - DNA, 33 bp, Homo sapien
tttccatgtaaggtagcataaccatgggcatga

SEQ ID NO: 278511 - DNA, 33 bp, Homo sapien
aaggtgtggtaccatcacccaaggcaaaagacc

SEQ ID NO: 278512 - DNA, 33 bp, Homo sapien
aaggtgtggtaccatcgcccaaggcaaaagacc

SEQ ID NO: 278513 - DNA, 33 bp, Homo sapien
gcaacattggagtaacacaactgtaggatgggt

SEQ ID NO: 278514 - DNA, 33 bp, Homo sapien
gcaacattggagtaacgcaactgtaggatgggt

SEQ ID NO: 278515 - DNA, 33 bp, Homo sapien
tggagattgcttaaaaatttcaaagcccaggct

SEQ ID NO: 278516 - DNA, 33 bp, Homo sapien
tggagattgcttaaaactttcaaagcccaggct

SEQ ID NO: 278517 - DNA, 33 bp, Homo sapien
cacttcataatgacaaaattttcaagtcactag

SEQ ID NO: 278518 - DNA, 33 bp, Homo sapien
cacttcataatgacaacattttcaagtcactag

SEQ ID NO: 278519 - DNA, 33 bp, Homo sapien
tctctactacctgatcaccatctctttttattg

SEQ ID NO: 278520 - DNA, 33 bp, Homo sapien
tctctactacctgatcgccatctctttttattg

SEQ ID NO: 278521 - DNA, 33 bp, Homo sapien
tttgtttaccaggaagaagagttggtatcatcc

SEQ ID NO: 278522 - DNA, 33 bp, Homo sapien
tttgtttaccaggaaggagagttggtatcatcc

SEQ ID NO: 278523 - DNA, 33 bp, Homo sapien
agtagttgaaagaatcggaaatgtcaacagatc

SEQ ID NO: 278524 - DNA, 33 bp, Homo sapien
agtagttgaaagaatctgaaatgtcaacagatc

SEQ ID NO: 278525 - DNA, 33 bp, Homo sapien
gataaactacttaagccgatgactgtaagaaca

SEQ ID NO: 278526 - DNA, 33 bp, Homo sapien
gataaactacttaagctgatgactgtaagaaca

SEQ ID NO: 278527 - DNA, 33 bp, Homo sapien
tggcagcacagagggaatatgagaagctggcag

SEQ ID NO: 278528 - DNA, 33 bp, Homo sapien
tggcagcacagagggattatgagaagctggcag

SEQ ID NO: 278529 - DNA, 33 bp, Homo sapien
gggatgttatcccagtcaattgggggctatatg

SEQ ID NO: 278530 - DNA, 33 bp, Homo sapien
gggatgttatcccagttaattgggggctatatg

SEQ ID NO: 278531 - DNA, 33 bp, Homo sapien
tatttaagctaaagtacgtgggggagaatatac

SEQ ID NO: 278532 - DNA, 33 bp, Homo sapien
tatttaagctaaagtatgtgggggagaatatac

SEQ ID NO: 278533 - DNA, 33 bp, Homo sapien
ccacatctgaggattactaaggtgtgtatgtag

SEQ ID NO: 278534 - DNA, 33 bp, Homo sapien
ccacatctgaggattattaaggtgtgtatgtag

SEQ ID NO: 278535 - DNA, 33 bp, Homo sapien
caaagagcattacgaacgctgaataattattcc

SEQ ID NO: 278536 - DNA, 33 bp, Homo sapien
caaagagcattacgaaggctgaataattattcc

SEQ ID NO: 278537 - DNA, 33 bp, Homo sapien
tttcattaaattgacaaaacagatatatgtggt

SEQ ID NO: 278538 - DNA, 33 bp, Homo sapien
tttcattaaattgacacaacagatatatgtggt

SEQ ID NO: 278539 - DNA, 33 bp, Homo sapien
aagcactaacctttctgattccctttctcactc

SEQ ID NO: 278540 - DNA, 33 bp, Homo sapien
aagcactaacctttcttattccctttctcactc

SEQ ID NO: 278541 - DNA, 33 bp, Homo sapien
tattaaataaacagaaacgttcaggatttcaga

SEQ ID NO: 278542 - DNA, 33 bp, Homo sapien
tattaaataaacagaagcgttcaggatttcaga

SEQ ID NO: 278543 - DNA, 33 bp, Homo sapien
tcataactctggagaacgtggctgaggaagtta

SEQ ID NO: 278544 - DNA, 33 bp, Homo sapien
tcataactctggagaatgtggctgaggaagtta

SEQ ID NO: 278545 - DNA, 33 bp, Homo sapien
catgattccagtataacgtagttcctcagttag

SEQ ID NO: 278546 - DNA, 33 bp, Homo sapien
catgattccagtataatgtagttcctcagttag

SEQ ID NO: 278547 - DNA, 33 bp, Homo sapien
gagcaagactcagttacgtccagggtgtgttac

SEQ ID NO: 278548 - DNA, 33 bp, Homo sapien
gagcaagactcagttatgtccagggtgtgttac

SEQ ID NO: 278549 - DNA, 33 bp, Homo sapien
ccaatttagccttcaaatatccatccatgcctc

SEQ ID NO: 278550 - DNA, 33 bp, Homo sapien
ccaatttagccttcaactatccatccatgcctc

SEQ ID NO: 278551 - DNA, 33 bp, Homo sapien
ttacagttagatgtcaactcatagaggcagaga

SEQ ID NO: 278552 - DNA, 33 bp, Homo sapien
ttacagttagatgtcagctcatagaggcagaga

SEQ ID NO: 278553 - DNA, 33 bp, Homo sapien
caagtagttttgaattcaactgctcagctttca

SEQ ID NO: 278554 - DNA, 33 bp, Homo sapien
caagtagttttgaatttaactgctcagctttca

SEQ ID NO: 278555 - DNA, 33 bp, Homo sapien
agagaagtgaaccagccagagggaacagtaagt

SEQ ID NO: 278556 - DNA, 33 bp, Homo sapien
agagaagtgaaccagcgagagggaacagtaagt

SEQ ID NO: 278557 - DNA, 33 bp, Homo sapien
tagtagcactgataacaagcattcatagagacc

SEQ ID NO: 278558 - DNA, 33 bp, Homo sapien
tagtagcactgataaccagcattcatagagacc

SEQ ID NO: 278559 - DNA, 33 bp, Homo sapien
tatatttttaatgccacatagcctgaccctgat

SEQ ID NO: 278560 - DNA, 33 bp, Homo sapien
tatatttttaatgccatatagcctgaccctgat

SEQ ID NO: 278561 - DNA, 33 bp, Homo sapien
gataaagtgtttagtaaattcaatcagtgtaac

SEQ ID NO: 278562 - DNA, 33 bp, Homo sapien
gataaagtgtttagtacattcaatcagtgtaac

SEQ ID NO: 278563 - DNA, 33 bp, Homo sapien
ctctagtagttgggaacgctgttgctcaggatg

SEQ ID NO: 278564 - DNA, 33 bp, Homo sapien
ctctagtagttgggaatgctgttgctcaggatg

SEQ ID NO: 278565 - DNA, 33 bp, Homo sapien
ccccctcaatagtgatcaggacgtgagatggtg

SEQ ID NO: 278566 - DNA, 33 bp, Homo sapien
ccccctcaatagtgattaggacgtgagatggtg

SEQ ID NO: 278567 - DNA, 33 bp, Homo sapien
ccattttttcattaaactgtttgtcatttgggt

SEQ ID NO: 278568 - DNA, 33 bp, Homo sapien
ccattttttcattaaagtgtttgtcatttgggt

SEQ ID NO: 278569 - DNA, 33 bp, Homo sapien
tagaccactagtgacactgagcatcttttctgt

SEQ ID NO: 278570 - DNA, 33 bp, Homo sapien
tagaccactagtgacattgagcatcttttctgt

SEQ ID NO: 278571 - DNA, 33 bp, Homo sapien
gccagtcctgtttctacataattgcctcttgga

SEQ ID NO: 278572 - DNA, 33 bp, Homo sapien
gccagtcctgtttctatataattgcctcttgga

SEQ ID NO: 278573 - DNA, 33 bp, Homo sapien
cgtcacttcctagtccagataaccagatccagt

SEQ ID NO: 278574 - DNA, 33 bp, Homo sapien
cgtcacttcctagtccggataaccagatccagt

SEQ ID NO: 278575 - DNA, 33 bp, Homo sapien
tttccaagttgtatcacaatcattagctggaat

SEQ ID NO: 278576 - DNA, 33 bp, Homo sapien
tttccaagttgtatcataatcattagctggaat

SEQ ID NO: 278577 - DNA, 33 bp, Homo sapien
cttctggagagaaaaacctttggcagaagaaaa

SEQ ID NO: 278578 - DNA, 33 bp, Homo sapien
cttctggagagaaaaatctttggcagaagaaaa

SEQ ID NO: 278579 - DNA, 33 bp, Homo sapien
aagggaagattcagtggaagttttctgggattg

SEQ ID NO: 278580 - DNA, 33 bp, Homo sapien
aagggaagattcagtgtaagttttctgggattg

SEQ ID NO: 278581 - DNA, 33 bp, Homo sapien
ggaatctgaacgaggaatcactgtatctcagga

SEQ ID NO: 278582 - DNA, 33 bp, Homo sapien
ggaatctgaacgaggagtcactgtatctcagga

SEQ ID NO: 278583 - DNA, 33 bp, Homo sapien
tatacttttaggtttagccaatagactagttat

SEQ ID NO: 278584 - DNA, 33 bp, Homo sapien
tatacttttaggtttatccaatagactagttat

SEQ ID NO: 278585 - DNA, 33 bp, Homo sapien
tcaacagatatttgaaacatccaatccatccgg

SEQ ID NO: 278586 - DNA, 33 bp, Homo sapien
tcaacagatatttgaagcatccaatccatccgg

SEQ ID NO: 278587 - DNA, 33 bp, Homo sapien
atgactcctacttctacaaaggtgagaatgctc

SEQ ID NO: 278588 - DNA, 33 bp, Homo sapien
atgactcctacttctagaaaggtgagaatgctc

SEQ ID NO: 278589 - DNA, 33 bp, Homo sapien
caagaatcatgggcaaaaattgcgaggcttaat

SEQ ID NO: 278590 - DNA, 33 bp, Homo sapien
caagaatcatgggcaacaattgcgaggcttaat

SEQ ID NO: 278591 - DNA, 33 bp, Homo sapien
atcctatctggaatgcgctcaagagctgcttga

SEQ ID NO: 278592 - DNA, 33 bp, Homo sapien
atcctatctggaatgctctcaagagctgcttga

SEQ ID NO: 278593 - DNA, 33 bp, Homo sapien
gttgttttgataaacccagaaacgatgacgctg

SEQ ID NO: 278594 - DNA, 33 bp, Homo sapien
gttgttttgataaacctagaaacgatgacgctg

SEQ ID NO: 278595 - DNA, 33 bp, Homo sapien
gaactttcagggataacgctagaggaatcatga

SEQ ID NO: 278596 - DNA, 33 bp, Homo sapien
gaactttcagggataatgctagaggaatcatga

SEQ ID NO: 278597 - DNA, 33 bp, Homo sapien
acgtattgccttgaaaaagttcactgacgcttc

SEQ ID NO: 278598 - DNA, 33 bp, Homo sapien
acgtattgccttgaaatagttcactgacgcttc

SEQ ID NO: 278599 - DNA, 33 bp, Homo sapien
caaagctatgagaatacgaaaagtacatatatt

SEQ ID NO: 278600 - DNA, 33 bp, Homo sapien
caaagctatgagaatatgaaaagtacatatatt

SEQ ID NO: 278601 - DNA, 33 bp, Homo sapien
ataataaatcaaggtacgtttttggatgaaggt

SEQ ID NO: 278602 - DNA, 33 bp, Homo sapien
ataataaatcaaggtatgtttttggatgaaggt

SEQ ID NO: 278603 - DNA, 33 bp, Homo sapien
tgctaaagtatttggaacatggccctgactacc

SEQ ID NO: 278604 - DNA, 33 bp, Homo sapien
tgctaaagtatttggagcatggccctgactacc

SEQ ID NO: 278605 - DNA, 33 bp, Homo sapien
atgggtttaacctttagctatccaatttacatt

SEQ ID NO: 278606 - DNA, 33 bp, Homo sapien
atgggtttaacctttatctatccaatttacatt

SEQ ID NO: 278607 - DNA, 33 bp, Homo sapien
tcttctttgaaccatccccaattgctccatact

SEQ ID NO: 278608 - DNA, 33 bp, Homo sapien
tcttctttgaaccatctccaattgctccatact

SEQ ID NO: 278609 - DNA, 33 bp, Homo sapien
gatattagcaatgtctcaagaaaatgttgattg

SEQ ID NO: 278610 - DNA, 33 bp, Homo sapien
gatattagcaatgtctgaagaaaatgttgattg

SEQ ID NO: 278611 - DNA, 33 bp, Homo sapien
ttggcagataaaaggaacatctctcattgacta

SEQ ID NO: 278612 - DNA, 33 bp, Homo sapien
ttggcagataaaaggagcatctctcattgacta

SEQ ID NO: 278613 - DNA, 33 bp, Homo sapien
taaccttccgttctgccatatatctggtcacac

SEQ ID NO: 278614 - DNA, 33 bp, Homo sapien
taaccttccgttctgctatatatctggtcacac

SEQ ID NO: 278615 - DNA, 33 bp, Homo sapien
atggtttgcaggaagacgtttgaatgcactgaa

SEQ ID NO: 278616 - DNA, 33 bp, Homo sapien
atggtttgcaggaagatgtttgaatgcactgaa

SEQ ID NO: 278617 - DNA, 33 bp, Homo sapien
caaaaggtgtgcaacaaacaatagccctacagg

SEQ ID NO: 278618 - DNA, 33 bp, Homo sapien
caaaaggtgtgcaacagacaatagccctacagg

SEQ ID NO: 278619 - DNA, 33 bp, Homo sapien
tgtaccacggtttctacatccagcctatcattg

SEQ ID NO: 278620 - DNA, 33 bp, Homo sapien
tgtaccacggtttctatatccagcctatcattg

SEQ ID NO: 278621 - DNA, 33 bp, Homo sapien
gtaaatttcaagcagacgtaacccagcttttct

SEQ ID NO: 278622 - DNA, 33 bp, Homo sapien
gtaaatttcaagcagaggtaacccagcttttct

SEQ ID NO: 278623 - DNA, 33 bp, Homo sapien
agctgattttcacatacctgtcttaagtctgta

SEQ ID NO: 278624 - DNA, 33 bp, Homo sapien
agctgattttcacatatctgtcttaagtctgta

SEQ ID NO: 278625 - DNA, 33 bp, Homo sapien
aactgacattattgaggaagtcggggaatctct

SEQ ID NO: 278626 - DNA, 33 bp, Homo sapien
aactgacattattgagtaagtcggggaatctct

SEQ ID NO: 278627 - DNA, 33 bp, Homo sapien
ttgtaggcagatgagacgccctgttcaaaatca

SEQ ID NO: 278628 - DNA, 33 bp, Homo sapien
ttgtaggcagatgagatgccctgttcaaaatca

SEQ ID NO: 278629 - DNA, 33 bp, Homo sapien
tttaatgtagccataacatacaaatgataatag

SEQ ID NO: 278630 - DNA, 33 bp, Homo sapien
tttaatgtagccataatatacaaatgataatag

SEQ ID NO: 278631 - DNA, 33 bp, Homo sapien
ctagattaaatactacaagaggatggacaggtt

SEQ ID NO: 278632 - DNA, 33 bp, Homo sapien
ctagattaaatactacgagaggatggacaggtt

SEQ ID NO: 278633 - DNA, 33 bp, Homo sapien
ttttaccttctgcatacgtataaattctgttat

SEQ ID NO: 278634 - DNA, 33 bp, Homo sapien
ttttaccttctgcatatgtataaattctgttat

SEQ ID NO: 278635 - DNA, 33 bp, Homo sapien
tatctctgccaagtgaaaatgaatgatctctcc

SEQ ID NO: 278636 - DNA, 33 bp, Homo sapien
tatctctgccaagtgagaatgaatgatctctcc

SEQ ID NO: 278637 - DNA, 33 bp, Homo sapien
tgaggaagacgggaaaattaatgtaggccatgg

SEQ ID NO: 278638 - DNA, 33 bp, Homo sapien
tgaggaagacgggaaagttaatgtaggccatgg

SEQ ID NO: 278639 - DNA, 33 bp, Homo sapien
gaaggtggaaaactgccgacattatttcaatgg

SEQ ID NO: 278640 - DNA, 33 bp, Homo sapien
gaaggtggaaaactgctgacattatttcaatgg

SEQ ID NO: 278641 - DNA, 33 bp, Homo sapien
cattaattcacgctgaagtccggtaaatcaaaa

SEQ ID NO: 278642 - DNA, 33 bp, Homo sapien
cattaattcacgctgaggtccggtaaatcaaaa

SEQ ID NO: 278643 - DNA, 33 bp, Homo sapien
aattagcctatctaatcaaacttgagccagcac

SEQ ID NO: 278644 - DNA, 33 bp, Homo sapien
aattagcctatctaattaaacttgagccagcac

SEQ ID NO: 278645 - DNA, 33 bp, Homo sapien
tctccttgacttttcacagccttatttcatctg

SEQ ID NO: 278646 - DNA, 33 bp, Homo sapien
tctccttgacttttcatagccttatttcatctg

SEQ ID NO: 278647 - DNA, 33 bp, Homo sapien
tttgctctattcttagaccttgtaccaaagttc

SEQ ID NO: 278648 - DNA, 33 bp, Homo sapien
tttgctctattcttaggccttgtaccaaagttc

SEQ ID NO: 278649 - DNA, 33 bp, Homo sapien
taatgtgccttagaagaataaatcaaattggtt

SEQ ID NO: 278650 - DNA, 33 bp, Homo sapien
taatgtgccttagaagcataaatcaaattggtt

SEQ ID NO: 278651 - DNA, 33 bp, Homo sapien
aaatctcatttcctaacctatcagctgaggaga

SEQ ID NO: 278652 - DNA, 33 bp, Homo sapien
aaatctcatttcctaatctatcagctgaggaga

SEQ ID NO: 278653 - DNA, 33 bp, Homo sapien
tgccatatctaacctacggaccaattgccagaa

SEQ ID NO: 278654 - DNA, 33 bp, Homo sapien
tgccatatctaacctatggaccaattgccagaa

SEQ ID NO: 278655 - DNA, 33 bp, Homo sapien
ccctgattttccattgcagcagctgatgtcacc

SEQ ID NO: 278656 - DNA, 33 bp, Homo sapien
ccctgattttccattgtagcagctgatgtcacc

SEQ ID NO: 278657 - DNA, 33 bp, Homo sapien
acacaggatgtcacaactaccatggaagcaagt

SEQ ID NO: 278658 - DNA, 33 bp, Homo sapien
acacaggatgtcacaattaccatggaagcaagt

SEQ ID NO: 278659 - DNA, 33 bp, Homo sapien
gtaggtggggttaacactgatgaagataatata

SEQ ID NO: 278660 - DNA, 33 bp, Homo sapien
gtaggtggggttaacattgatgaagataatata

SEQ ID NO: 278661 - DNA, 33 bp, Homo sapien
accttgagttctgtcaatcatcctttcagtcct

SEQ ID NO: 278662 - DNA, 33 bp, Homo sapien
accttgagttctgtcagtcatcctttcagtcct

SEQ ID NO: 278663 - DNA, 33 bp, Homo sapien
catgttattcttgtgacgatgaataagccctca

SEQ ID NO: 278664 - DNA, 33 bp, Homo sapien
catgttattcttgtgatgatgaataagccctca

SEQ ID NO: 278665 - DNA, 33 bp, Homo sapien
tacttatgttaaccaaagtatggagtgtaatgt

SEQ ID NO: 278666 - DNA, 33 bp, Homo sapien
tacttatgttaaccaaggtatggagtgtaatgt

SEQ ID NO: 278667 - DNA, 33 bp, Homo sapien
aagcatattcaagttacaaaaatgtgccaaata

SEQ ID NO: 278668 - DNA, 33 bp, Homo sapien
aagcatattcaagttataaaaatgtgccaaata

SEQ ID NO: 278669 - DNA, 33 bp, Homo sapien
attgttccttcctttacgcttatgatctcccat

SEQ ID NO: 278670 - DNA, 33 bp, Homo sapien
attgttccttcctttatgcttatgatctcccat

SEQ ID NO: 278671 - DNA, 33 bp, Homo sapien
cttgcttattgcctacactttcattttcttccc

SEQ ID NO: 278672 - DNA, 33 bp, Homo sapien
cttgcttattgcctacgctttcattttcttccc

SEQ ID NO: 278673 - DNA, 33 bp, Homo sapien
tttattcatttgtataaccgattcaactgacct

SEQ ID NO: 278674 - DNA, 33 bp, Homo sapien
tttattcatttgtatacccgattcaactgacct

SEQ ID NO: 278675 - DNA, 33 bp, Homo sapien
gagtccatctacaatcaatcatggatggtgatg

SEQ ID NO: 278676 - DNA, 33 bp, Homo sapien
gagtccatctacaatcgatcatggatggtgatg

SEQ ID NO: 278677 - DNA, 33 bp, Homo sapien
ctctgtggaaaatttgcaagtatactttgtaaa

SEQ ID NO: 278678 - DNA, 33 bp, Homo sapien
ctctgtggaaaatttggaagtatactttgtaaa

SEQ ID NO: 278679 - DNA, 33 bp, Homo sapien
tggctgagagtgacccaaggatccaaggtggat

SEQ ID NO: 278680 - DNA, 33 bp, Homo sapien
tggctgagagtgacccgaggatccaaggtggat

SEQ ID NO: 278681 - DNA, 33 bp, Homo sapien
acctagcataagtgtgaatgtgtacctccaaac

SEQ ID NO: 278682 - DNA, 33 bp, Homo sapien
acctagcataagtgtgtatgtgtacctccaaac

SEQ ID NO: 278683 - DNA, 33 bp, Homo sapien
tgtctatccaaaaatccagttctatcctctccc

SEQ ID NO: 278684 - DNA, 33 bp, Homo sapien
tgtctatccaaaaatctagttctatcctctccc

SEQ ID NO: 278685 - DNA, 33 bp, Homo sapien
gtttcaagtataaataagagcctcctggagtca

SEQ ID NO: 278686 - DNA, 33 bp, Homo sapien
gtttcaagtataaataggagcctcctggagtca

SEQ ID NO: 278687 - DNA, 33 bp, Homo sapien
aatctacctttacaaactcaacaggactttctg

SEQ ID NO: 278688 - DNA, 33 bp, Homo sapien
aatctacctttacaaattcaacaggactttctg

SEQ ID NO: 278689 - DNA, 33 bp, Homo sapien
agtttagaactgcataagtagctaaaatctgaa

SEQ ID NO: 278690 - DNA, 33 bp, Homo sapien
agtttagaactgcataggtagctaaaatctgaa

SEQ ID NO: 278691 - DNA, 33 bp, Homo sapien
ttatatgcaggtcagaaaaactatgatttttgt

SEQ ID NO: 278692 - DNA, 33 bp, Homo sapien
ttatatgcaggtcagataaactatgatttttgt

SEQ ID NO: 278693 - DNA, 33 bp, Homo sapien
agcaaatattaactcaccaaaatcctattcttt

SEQ ID NO: 278694 - DNA, 33 bp, Homo sapien
agcaaatattaactcagcaaaatcctattcttt

SEQ ID NO: 278695 - DNA, 33 bp, Homo sapien
cattttctgtgatggacgtcttaaatattttat

SEQ ID NO: 278696 - DNA, 33 bp, Homo sapien
cattttctgtgatggatgtcttaaatattttat

SEQ ID NO: 278697 - DNA, 33 bp, Homo sapien
atctagctaggtactacgctagattcccacaat

SEQ ID NO: 278698 - DNA, 33 bp, Homo sapien
atctagctaggtactatgctagattcccacaat

SEQ ID NO: 278699 - DNA, 33 bp, Homo sapien
gctgcagggaatttaccgagaaaatccattctt

SEQ ID NO: 278700 - DNA, 33 bp, Homo sapien
gctgcagggaatttactgagaaaatccattctt

SEQ ID NO: 278701 - DNA, 33 bp, Homo sapien
tgtgtatgtggtagtggaaagtattccagacat

SEQ ID NO: 278702 - DNA, 33 bp, Homo sapien
tgtgtatgtggtagtgtaaagtattccagacat

SEQ ID NO: 278703 - DNA, 33 bp, Homo sapien
agtctaggagaatggacagttaggctgaacatt

SEQ ID NO: 278704 - DNA, 33 bp, Homo sapien
agtctaggagaatggatagttaggctgaacatt

SEQ ID NO: 278705 - DNA, 33 bp, Homo sapien
tgaaaaataacaacataaggaagaacatattgg

SEQ ID NO: 278706 - DNA, 33 bp, Homo sapien
tgaaaaataacaacattaggaagaacatattgg

SEQ ID NO: 278707 - DNA, 33 bp, Homo sapien
cacacactcttgtgacgaaagcccaatttttgt

SEQ ID NO: 278708 - DNA, 33 bp, Homo sapien
cacacactcttgtgactaaagcccaatttttgt

SEQ ID NO: 278709 - DNA, 33 bp, Homo sapien
gctttgacacctcagaataggcttctggcaaag

SEQ ID NO: 278710 - DNA, 33 bp, Homo sapien
gctttgacacctcagagtaggcttctggcaaag

SEQ ID NO: 278711 - DNA, 33 bp, Homo sapien
gattaactttagtggcaaaggattagttatata

SEQ ID NO: 278712 - DNA, 33 bp, Homo sapien
gattaactttagtggcgaaggattagttatata

SEQ ID NO: 278713 - DNA, 33 bp, Homo sapien
ttaattcagttacctacagccacacttccacct

SEQ ID NO: 278714 - DNA, 33 bp, Homo sapien
ttaattcagttacctatagccacacttccacct

SEQ ID NO: 278715 - DNA, 33 bp, Homo sapien
aggcacgacctggaaagctcaattaaaatcaca

SEQ ID NO: 278716 - DNA, 33 bp, Homo sapien
aggcacgacctggaaatctcaattaaaatcaca

SEQ ID NO: 278717 - DNA, 33 bp, Homo sapien
tatccaaatgttaaaacagagcataaaaattag

SEQ ID NO: 278718 - DNA, 33 bp, Homo sapien
tatccaaatgttaaaagagagcataaaaattag

SEQ ID NO: 278719 - DNA, 33 bp, Homo sapien
ccatttattctgccaccgagagatggccatgca

SEQ ID NO: 278720 - DNA, 33 bp, Homo sapien
ccatttattctgccactgagagatggccatgca

SEQ ID NO: 278721 - DNA, 33 bp, Homo sapien
cattcctgccaattcacactttcaaattcacac

SEQ ID NO: 278722 - DNA, 33 bp, Homo sapien
cattcctgccaattcatactttcaaattcacac

SEQ ID NO: 278723 - DNA, 33 bp, Homo sapien
aagatagtctcccttaacatcagcaggagctgg

SEQ ID NO: 278724 - DNA, 33 bp, Homo sapien
aagatagtctcccttagcatcagcaggagctgg

SEQ ID NO: 278725 - DNA, 33 bp, Homo sapien
cctgcctttaacggagcctaaacaatgtctgat

SEQ ID NO: 278726 - DNA, 33 bp, Homo sapien
cctgcctttaacggaggctaaacaatgtctgat

SEQ ID NO: 278727 - DNA, 33 bp, Homo sapien
ataaaaaatatggcaactgttgtagcagaggat

SEQ ID NO: 278728 - DNA, 33 bp, Homo sapien
ataaaaaatatggcaattgttgtagcagaggat

SEQ ID NO: 278729 - DNA, 33 bp, Homo sapien
aaagggccttctaggacggagtgtaaaaacagg

SEQ ID NO: 278730 - DNA, 33 bp, Homo sapien
aaagggccttctaggagggagtgtaaaaacagg

SEQ ID NO: 278731 - DNA, 33 bp, Homo sapien
taaagtgttcattaaaagtttggttgcctgaaa

SEQ ID NO: 278732 - DNA, 33 bp, Homo sapien
taaagtgttcattaaaggtttggttgcctgaaa

SEQ ID NO: 278733 - DNA, 33 bp, Homo sapien
gcctcattctcatgaccaagggcttaaatccaa

SEQ ID NO: 278734 - DNA, 33 bp, Homo sapien
gcctcattctcatgactaagggcttaaatccaa

SEQ ID NO: 278735 - DNA, 33 bp, Homo sapien
aagactgtctcagataccaacgactcggtaagt

SEQ ID NO: 278736 - DNA, 33 bp, Homo sapien
aagactgtctcagatatcaacgactcggtaagt

SEQ ID NO: 278737 - DNA, 33 bp, Homo sapien
ttgtagttacttctcacggggcgagatctcagg

SEQ ID NO: 278738 - DNA, 33 bp, Homo sapien
ttgtagttacttctcatggggcgagatctcagg

SEQ ID NO: 278739 - DNA, 33 bp, Homo sapien
ttttgagctaccagaaagggtgctattgtatag

SEQ ID NO: 278740 - DNA, 33 bp, Homo sapien
ttttgagctaccagaatgggtgctattgtatag

SEQ ID NO: 278741 - DNA, 33 bp, Homo sapien
caattagtcatttggcaaaaatatcacctgtgg

SEQ ID NO: 278742 - DNA, 33 bp, Homo sapien
caattagtcatttggcgaaaatatcacctgtgg

SEQ ID NO: 278743 - DNA, 33 bp, Homo sapien
gtctaatagagaacaacgggcattttagaagtg

SEQ ID NO: 278744 - DNA, 33 bp, Homo sapien
gtctaatagagaacaatgggcattttagaagtg

SEQ ID NO: 278745 - DNA, 33 bp, Homo sapien
tattatttagtcataccggtggctttaagtgaa

SEQ ID NO: 278746 - DNA, 33 bp, Homo sapien
tattatttagtcatactggtggctttaagtgaa

SEQ ID NO: 278747 - DNA, 33 bp, Homo sapien
ttaaaaagtaattgaaaacacttgccacgtctc

SEQ ID NO: 278748 - DNA, 33 bp, Homo sapien
ttaaaaagtaattgaacacacttgccacgtctc

SEQ ID NO: 278749 - DNA, 33 bp, Homo sapien
caccatgaaatctcaagtactgctagcttaaca

SEQ ID NO: 278750 - DNA, 33 bp, Homo sapien
caccatgaaatctcaattactgctagcttaaca

SEQ ID NO: 278751 - DNA, 33 bp, Homo sapien
aaggccatgcaatgacactttttaactacagtt

SEQ ID NO: 278752 - DNA, 33 bp, Homo sapien
aaggccatgcaatgacgctttttaactacagtt

SEQ ID NO: 278753 - DNA, 33 bp, Homo sapien
accactgtcctgcagaccaaatttttattgcac

SEQ ID NO: 278754 - DNA, 33 bp, Homo sapien
accactgtcctgcagatcaaatttttattgcac

SEQ ID NO: 278755 - DNA, 33 bp, Homo sapien
gattaaggtggaaaggacatgggacagtggctc

SEQ ID NO: 278756 - DNA, 33 bp, Homo sapien
gattaaggtggaaagggcatgggacagtggctc

SEQ ID NO: 278757 - DNA, 33 bp, Homo sapien
gtaaggaatcctataacgattttctaagtatcc

SEQ ID NO: 278758 - DNA, 33 bp, Homo sapien
gtaaggaatcctataatgattttctaagtatcc

SEQ ID NO: 278759 - DNA, 33 bp, Homo sapien
taattgattctttttacaaggcagtgagtcaaa

SEQ ID NO: 278760 - DNA, 33 bp, Homo sapien
taattgattctttttataaggcagtgagtcaaa

SEQ ID NO: 278761 - DNA, 33 bp, Homo sapien
agtgttctgtgtttaacggccacactggcaaga

SEQ ID NO: 278762 - DNA, 33 bp, Homo sapien
agtgttctgtgtttaagggccacactggcaaga

SEQ ID NO: 278763 - DNA, 33 bp, Homo sapien
tgatttcataaaggtacgctattcaggtttgaa

SEQ ID NO: 278764 - DNA, 33 bp, Homo sapien
tgatttcataaaggtatgctattcaggtttgaa

SEQ ID NO: 278765 - DNA, 33 bp, Homo sapien
tctaggttgtgtcagaacctctgtgatttcata

SEQ ID NO: 278766 - DNA, 33 bp, Homo sapien
tctaggttgtgtcagaccctctgtgatttcata

SEQ ID NO: 278767 - DNA, 33 bp, Homo sapien
acaaatgatggttttacgaccaaactgtatttc

SEQ ID NO: 278768 - DNA, 33 bp, Homo sapien
acaaatgatggttttaggaccaaactgtatttc

SEQ ID NO: 278769 - DNA, 33 bp, Homo sapien
gctgctgatttcgtcccagtgttttatcctgtc

SEQ ID NO: 278770 - DNA, 33 bp, Homo sapien
gctgctgatttcgtcctagtgttttatcctgtc

SEQ ID NO: 278771 - DNA, 33 bp, Homo sapien
ttcaatccatgcttgaccaaaggaggaatggac

SEQ ID NO: 278772 - DNA, 33 bp, Homo sapien
ttcaatccatgcttgatcaaaggaggaatggac

SEQ ID NO: 278773 - DNA, 33 bp, Homo sapien
gctggatctcactaggaagcagggaactggtca

SEQ ID NO: 278774 - DNA, 33 bp, Homo sapien
gctggatctcactagggagcagggaactggtca

SEQ ID NO: 278775 - DNA, 33 bp, Homo sapien
atttgtgctaggaaaaggtatcatgtggtatct

SEQ ID NO: 278776 - DNA, 33 bp, Homo sapien
atttgtgctaggaaaatgtatcatgtggtatct

SEQ ID NO: 278777 - DNA, 33 bp, Homo sapien
cacttctttcctcaggaacttcctttcacacta

SEQ ID NO: 278778 - DNA, 33 bp, Homo sapien
cacttctttcctcagggacttcctttcacacta

SEQ ID NO: 278779 - DNA, 33 bp, Homo sapien
gggtagaaagaataaacatgaggtggatataag

SEQ ID NO: 278780 - DNA, 33 bp, Homo sapien
gggtagaaagaataaagatgaggtggatataag

SEQ ID NO: 278781 - DNA, 33 bp, Homo sapien
ttccctgtcctaacacaataggttttgcctcac

SEQ ID NO: 278782 - DNA, 33 bp, Homo sapien
ttccctgtcctaacacgataggttttgcctcac

SEQ ID NO: 278783 - DNA, 33 bp, Homo sapien
ttttcctccactagccagctcatcatcttccta

SEQ ID NO: 278784 - DNA, 33 bp, Homo sapien
ttttcctccactagcccgctcatcatcttccta

SEQ ID NO: 278785 - DNA, 33 bp, Homo sapien
tttttctcaatgaccaatatgtctaccaacatt

SEQ ID NO: 278786 - DNA, 33 bp, Homo sapien
tttttctcaatgaccattatgtctaccaacatt

SEQ ID NO: 278787 - DNA, 33 bp, Homo sapien
gtttgaacaagttaaactaaacatcatgactca

SEQ ID NO: 278788 - DNA, 33 bp, Homo sapien
gtttgaacaagttaaagtaaacatcatgactca

SEQ ID NO: 278789 - DNA, 33 bp, Homo sapien
caggaagatatataaaatgcctaattcctggtg

SEQ ID NO: 278790 - DNA, 33 bp, Homo sapien
caggaagatatataaagtgcctaattcctggtg

SEQ ID NO: 278791 - DNA, 33 bp, Homo sapien
gcagaataaacaggtacggtcccttagcatttt

SEQ ID NO: 278792 - DNA, 33 bp, Homo sapien
gcagaataaacaggtatggtcccttagcatttt

SEQ ID NO: 278793 - DNA, 33 bp, Homo sapien
ctttgctcttctattagccttgtaactgaaaaa

SEQ ID NO: 278794 - DNA, 33 bp, Homo sapien
ctttgctcttctattatccttgtaactgaaaaa

SEQ ID NO: 278795 - DNA, 33 bp, Homo sapien
tcaatgttttctcaataagcgaatcaatttaat

SEQ ID NO: 278796 - DNA, 33 bp, Homo sapien
tcaatgttttctcaatgagcgaatcaatttaat

SEQ ID NO: 278797 - DNA, 33 bp, Homo sapien
ccccattccatacctcaagcaagtattaaaacc

SEQ ID NO: 278798 - DNA, 33 bp, Homo sapien
ccccattccatacctcgagcaagtattaaaacc

SEQ ID NO: 278799 - DNA, 33 bp, Homo sapien
cctaataaatcataaactctgagggcaaagcac

SEQ ID NO: 278800 - DNA, 33 bp, Homo sapien
cctaataaatcataaattctgagggcaaagcac

SEQ ID NO: 278801 - DNA, 33 bp, Homo sapien
taaacactgatttctccagggcctggactttgc

SEQ ID NO: 278802 - DNA, 33 bp, Homo sapien
taaacactgatttctctagggcctggactttgc

SEQ ID NO: 278803 - DNA, 33 bp, Homo sapien
ggatttcctctatgtcaaaatcaccacatggcc

SEQ ID NO: 278804 - DNA, 33 bp, Homo sapien
ggatttcctctatgtcgaaatcaccacatggcc

SEQ ID NO: 278805 - DNA, 33 bp, Homo sapien
ctggggttgcgaagaccaacaaagtaggatctg

SEQ ID NO: 278806 - DNA, 33 bp, Homo sapien
ctggggttgcgaagacgaacaaagtaggatctg

SEQ ID NO: 278807 - DNA, 33 bp, Homo sapien
ggcatgggtggataaccgggaaaggtgaaaagc

SEQ ID NO: 278808 - DNA, 33 bp, Homo sapien
ggcatgggtggataactgggaaaggtgaaaagc

SEQ ID NO: 278809 - DNA, 33 bp, Homo sapien
tggagctattcctcaccattagctttactgtta

SEQ ID NO: 278810 - DNA, 33 bp, Homo sapien
tggagctattcctcactattagctttactgtta

SEQ ID NO: 278811 - DNA, 33 bp, Homo sapien
aaacacttgttcctacccaccttattgtctaca

SEQ ID NO: 278812 - DNA, 33 bp, Homo sapien
aaacacttgttcctactcaccttattgtctaca

SEQ ID NO: 278813 - DNA, 33 bp, Homo sapien
ttctacttaaacttccacctgctccaattcaag

SEQ ID NO: 278814 - DNA, 33 bp, Homo sapien
ttctacttaaacttccgcctgctccaattcaag

SEQ ID NO: 278815 - DNA, 33 bp, Homo sapien
ttgggtggtctcctgaaaagtctttcatttttg

SEQ ID NO: 278816 - DNA, 33 bp, Homo sapien
ttgggtggtctcctgagaagtctttcatttttg

SEQ ID NO: 278817 - DNA, 33 bp, Homo sapien
gtatctaactagggaaccttcacagctcgccaa

SEQ ID NO: 278818 - DNA, 33 bp, Homo sapien
gtatctaactagggaatcttcacagctcgccaa

SEQ ID NO: 278819 - DNA, 33 bp, Homo sapien
ttaagtccatcaataaggagcacttaaaacatt

SEQ ID NO: 278820 - DNA, 33 bp, Homo sapien
ttaagtccatcaataatgagcacttaaaacatt

SEQ ID NO: 278821 - DNA, 33 bp, Homo sapien
gttgaggcagtccaggaagtgttttgtgctgaa

SEQ ID NO: 278822 - DNA, 33 bp, Homo sapien
gttgaggcagtccagggagtgttttgtgctgaa

SEQ ID NO: 278823 - DNA, 33 bp, Homo sapien
ctttgctactaaactaaatggaaagtctctgat

SEQ ID NO: 278824 - DNA, 33 bp, Homo sapien
ctttgctactaaactagatggaaagtctctgat

SEQ ID NO: 278825 - DNA, 33 bp, Homo sapien
acctttccttctttgcagaacgatgctgattat

SEQ ID NO: 278826 - DNA, 33 bp, Homo sapien
acctttccttctttgcggaacgatgctgattat

SEQ ID NO: 278827 - DNA, 33 bp, Homo sapien
acgtgatatgtcgaataatgttctttggagaca

SEQ ID NO: 278828 - DNA, 33 bp, Homo sapien
acgtgatatgtcgaatgatgttctttggagaca

SEQ ID NO: 278829 - DNA, 33 bp, Homo sapien
tcagaaattctgaaaaacaagatatgtaagcga

SEQ ID NO: 278830 - DNA, 33 bp, Homo sapien
tcagaaattctgaaaagcaagatatgtaagcga

SEQ ID NO: 278831 - DNA, 33 bp, Homo sapien
tggatattagatgataagtaaaaggcatcctag

SEQ ID NO: 278832 - DNA, 33 bp, Homo sapien
tggatattagatgataggtaaaaggcatcctag

SEQ ID NO: 278833 - DNA, 33 bp, Homo sapien
cccatgtcttctgatacgtcattggtacggtgt

SEQ ID NO: 278834 - DNA, 33 bp, Homo sapien
cccatgtcttctgatatgtcattggtacggtgt

SEQ ID NO: 278835 - DNA, 33 bp, Homo sapien
cttcctccatcgtgcaacccccagctctcttgg

SEQ ID NO: 278836 - DNA, 33 bp, Homo sapien
cttcctccatcgtgcagcccccagctctcttgg

SEQ ID NO: 278837 - DNA, 33 bp, Homo sapien
ttcagcacctactatacatcaagtccagagcta

SEQ ID NO: 278838 - DNA, 33 bp, Homo sapien
ttcagcacctactatatatcaagtccagagcta

SEQ ID NO: 278839 - DNA, 33 bp, Homo sapien
agaaataagtacaatcaaaacctcactttacat

SEQ ID NO: 278840 - DNA, 33 bp, Homo sapien
agaaataagtacaatcgaaacctcactttacat

SEQ ID NO: 278841 - DNA, 33 bp, Homo sapien
ctcaggtgcccattcacgccttctgcatgcttt

SEQ ID NO: 278842 - DNA, 33 bp, Homo sapien
ctcaggtgcccattcatgccttctgcatgcttt

SEQ ID NO: 278843 - DNA, 33 bp, Homo sapien
acaggagtattctccaaacaagtacagcaggaa

SEQ ID NO: 278844 - DNA, 33 bp, Homo sapien
acaggagtattctccagacaagtacagcaggaa

SEQ ID NO: 278845 - DNA, 33 bp, Homo sapien
catgatattggacacaaaatagttaaacaggag

SEQ ID NO: 278846 - DNA, 33 bp, Homo sapien
catgatattggacacagaatagttaaacaggag

SEQ ID NO: 278847 - DNA, 33 bp, Homo sapien
aaggtaagctcacaaacgccaaagtcgaaacgt

SEQ ID NO: 278848 - DNA, 33 bp, Homo sapien
aaggtaagctcacaaatgccaaagtcgaaacgt

SEQ ID NO: 278849 - DNA, 33 bp, Homo sapien
tttggtctatcctcaacgtagtggccatggtga

SEQ ID NO: 278850 - DNA, 33 bp, Homo sapien
tttggtctatcctcaatgtagtggccatggtga

SEQ ID NO: 278851 - DNA, 33 bp, Homo sapien
atcctttgttggtttaacagttccatagcatac

SEQ ID NO: 278852 - DNA, 33 bp, Homo sapien
atcctttgttggtttagcagttccatagcatac

SEQ ID NO: 278853 - DNA, 33 bp, Homo sapien
ttcttgaaatgattagacaaatcggaagagaga

SEQ ID NO: 278854 - DNA, 33 bp, Homo sapien
ttcttgaaatgattagtcaaatcggaagagaga

SEQ ID NO: 278855 - DNA, 33 bp, Homo sapien
gtcatttgtgttgttaaaaggagttcctattat

SEQ ID NO: 278856 - DNA, 33 bp, Homo sapien
gtcatttgtgttgttagaaggagttcctattat

SEQ ID NO: 278857 - DNA, 33 bp, Homo sapien
tgtgattcagagagaaaaatttgtgagcaattg

SEQ ID NO: 278858 - DNA, 33 bp, Homo sapien
tgtgattcagagagaacaatttgtgagcaattg

SEQ ID NO: 278859 - DNA, 33 bp, Homo sapien
aactctgattatcaggaagcagcaagcagcagc

SEQ ID NO: 278860 - DNA, 33 bp, Homo sapien
aactctgattatcagggagcagcaagcagcagc

SEQ ID NO: 278861 - DNA, 33 bp, Homo sapien
gatggagtaggagagcacacagattgaccccag

SEQ ID NO: 278862 - DNA, 33 bp, Homo sapien
gatggagtaggagagcgcacagattgaccccag

SEQ ID NO: 278863 - DNA, 33 bp, Homo sapien
gagatgaagtatttcacgttggtcagttgtgcc

SEQ ID NO: 278864 - DNA, 33 bp, Homo sapien
gagatgaagtatttcatgttggtcagttgtgcc

SEQ ID NO: 278865 - DNA, 33 bp, Homo sapien
gtgctgcctagaaaataaggttgcctggctctc

SEQ ID NO: 278866 - DNA, 33 bp, Homo sapien
gtgctgcctagaaaatgaggttgcctggctctc

SEQ ID NO: 278867 - DNA, 33 bp, Homo sapien
caggtaataaatcccccggcagttgaagctaag

SEQ ID NO: 278868 - DNA, 33 bp, Homo sapien
caggtaataaatcccctggcagttgaagctaag

SEQ ID NO: 278869 - DNA, 33 bp, Homo sapien
gcaataagatactctacctggtgttggcagtag

SEQ ID NO: 278870 - DNA, 33 bp, Homo sapien
gcaataagatactctatctggtgttggcagtag

SEQ ID NO: 278871 - DNA, 33 bp, Homo sapien
tgtgtcaatgaagctcgcatatccactggaggt

SEQ ID NO: 278872 - DNA, 33 bp, Homo sapien
tgtgtcaatgaagctctcatatccactggaggt

SEQ ID NO: 278873 - DNA, 33 bp, Homo sapien
agagtttgggagaaaaggtatgaggaggaagta

SEQ ID NO: 278874 - DNA, 33 bp, Homo sapien
agagtttgggagaaaatgtatgaggaggaagta

SEQ ID NO: 278875 - DNA, 33 bp, Homo sapien
ctggaaggtggatgaaatacaaaggccatgatt

SEQ ID NO: 278876 - DNA, 33 bp, Homo sapien
ctggaaggtggatgaagtacaaaggccatgatt

SEQ ID NO: 278877 - DNA, 33 bp, Homo sapien
agaaataaaaagttccacatacacttattaaca

SEQ ID NO: 278878 - DNA, 33 bp, Homo sapien
agaaataaaaagttcctcatacacttattaaca

SEQ ID NO: 278879 - DNA, 33 bp, Homo sapien
ctcactatcatgcaaccgcccccatgatccaat

SEQ ID NO: 278880 - DNA, 33 bp, Homo sapien
ctcactatcatgcaactgcccccatgatccaat

SEQ ID NO: 278881 - DNA, 33 bp, Homo sapien
tctttaatcaagtgaacctgaaatctagattaa

SEQ ID NO: 278882 - DNA, 33 bp, Homo sapien
tctttaatcaagtgaatctgaaatctagattaa

SEQ ID NO: 278883 - DNA, 33 bp, Homo sapien
aggctcttattaacaaacagttcttgagtgaac

SEQ ID NO: 278884 - DNA, 33 bp, Homo sapien
aggctcttattaacaaccagttcttgagtgaac

SEQ ID NO: 278885 - DNA, 33 bp, Homo sapien
aaatgaatcaataatccgagctaggaagtttag

SEQ ID NO: 278886 - DNA, 33 bp, Homo sapien
aaatgaatcaataatctgagctaggaagtttag

SEQ ID NO: 278887 - DNA, 33 bp, Homo sapien
ccttctatttagattcagaaatttctctagcaa

SEQ ID NO: 278888 - DNA, 33 bp, Homo sapien
ccttctatttagattcggaaatttctctagcaa

SEQ ID NO: 278889 - DNA, 33 bp, Homo sapien
ttactggcttaagctaccatgcccggcaggtat

SEQ ID NO: 278890 - DNA, 33 bp, Homo sapien
ttactggcttaagctatcatgcccggcaggtat

SEQ ID NO: 278891 - DNA, 33 bp, Homo sapien
ccatggtctctgaggcactcttggagtcacttt

SEQ ID NO: 278892 - DNA, 33 bp, Homo sapien
ccatggtctctgaggcgctcttggagtcacttt

SEQ ID NO: 278893 - DNA, 33 bp, Homo sapien
agtgtttgtgttgagacggttgactggctctat

SEQ ID NO: 278894 - DNA, 33 bp, Homo sapien
agtgtttgtgttgagatggttgactggctctat

SEQ ID NO: 278895 - DNA, 33 bp, Homo sapien
gcattatgcttagaaaattattccccatgaaaa

SEQ ID NO: 278896 - DNA, 33 bp, Homo sapien
gcattatgcttagaaagttattccccatgaaaa

SEQ ID NO: 278897 - DNA, 33 bp, Homo sapien
atgatgcatataggtacaggtgtggcctgaatg

SEQ ID NO: 278898 - DNA, 33 bp, Homo sapien
atgatgcatataggtataggtgtggcctgaatg

SEQ ID NO: 278899 - DNA, 33 bp, Homo sapien
tccatgcaaaggacgcaatctcatgctttttgt

SEQ ID NO: 278900 - DNA, 33 bp, Homo sapien
tccatgcaaaggacgcgatctcatgctttttgt

SEQ ID NO: 278901 - DNA, 33 bp, Homo sapien
agggaggtaagcctaacagctaactgctgaatt

SEQ ID NO: 278902 - DNA, 33 bp, Homo sapien
agggaggtaagcctaatagctaactgctgaatt

SEQ ID NO: 278903 - DNA, 33 bp, Homo sapien
gctacttttgtggtacagcagtagagtggagtg

SEQ ID NO: 278904 - DNA, 33 bp, Homo sapien
gctacttttgtggtacggcagtagagtggagtg

SEQ ID NO: 278905 - DNA, 33 bp, Homo sapien
cagggaaattctcactcaagtccataaataaaa

SEQ ID NO: 278906 - DNA, 33 bp, Homo sapien
cagggaaattctcactgaagtccataaataaaa

SEQ ID NO: 278907 - DNA, 33 bp, Homo sapien
atttgatactatttcacaatttttgtagcaatc

SEQ ID NO: 278908 - DNA, 33 bp, Homo sapien
atttgatactatttcagaatttttgtagcaatc

SEQ ID NO: 278909 - DNA, 33 bp, Homo sapien
ggatttggaactctgaagaagaattgagaggga

SEQ ID NO: 278910 - DNA, 33 bp, Homo sapien
ggatttggaactctgaggaagaattgagaggga

SEQ ID NO: 278911 - DNA, 33 bp, Homo sapien
gagctgggctataaaccgaaatctgccattacg

SEQ ID NO: 278912 - DNA, 33 bp, Homo sapien
gagctgggctataaactgaaatctgccattacg

SEQ ID NO: 278913 - DNA, 33 bp, Homo sapien
ttgattctgacagaggcattctatggactgctg

SEQ ID NO: 278914 - DNA, 33 bp, Homo sapien
ttgattctgacagaggtattctatggactgctg

SEQ ID NO: 278915 - DNA, 33 bp, Homo sapien
attccctgaaaactgaagtgttagtagacatag

SEQ ID NO: 278916 - DNA, 33 bp, Homo sapien
attccctgaaaactgaggtgttagtagacatag

SEQ ID NO: 278917 - DNA, 33 bp, Homo sapien
aagcctatactctacaaaagtgaagctccaaac

SEQ ID NO: 278918 - DNA, 33 bp, Homo sapien
aagcctatactctacacaagtgaagctccaaac

SEQ ID NO: 278919 - DNA, 33 bp, Homo sapien
gcatcacctgcgaacccagtaaaaatgcacatt

SEQ ID NO: 278920 - DNA, 33 bp, Homo sapien
gcatcacctgcgaacctagtaaaaatgcacatt

SEQ ID NO: 278921 - DNA, 33 bp, Homo sapien
actgagaaggaaccacagtaaaatagaagaaaa

SEQ ID NO: 278922 - DNA, 33 bp, Homo sapien
actgagaaggaaccacggtaaaatagaagaaaa

SEQ ID NO: 278923 - DNA, 33 bp, Homo sapien
tcaaaatatcacctaacgttctaatcctaacct

SEQ ID NO: 278924 - DNA, 33 bp, Homo sapien
tcaaaatatcacctaatgttctaatcctaacct

SEQ ID NO: 278925 - DNA, 33 bp, Homo sapien
cttgccaaacactaggaaaaaagtaaatatttt

SEQ ID NO: 278926 - DNA, 33 bp, Homo sapien
cttgccaaacactagggaaaaagtaaatatttt

SEQ ID NO: 278927 - DNA, 33 bp, Homo sapien
tgcctaccattttggacagaccattaattttgt

SEQ ID NO: 278928 - DNA, 33 bp, Homo sapien
tgcctaccattttggagagaccattaattttgt

SEQ ID NO: 278929 - DNA, 33 bp, Homo sapien
tcatatgacattattcaaaagatcttcataaag

SEQ ID NO: 278930 - DNA, 33 bp, Homo sapien
tcatatgacattattcgaaagatcttcataaag

SEQ ID NO: 278931 - DNA, 33 bp, Homo sapien
agtaatgttttggtcacatcatcctggctccaa

SEQ ID NO: 278932 - DNA, 33 bp, Homo sapien
agtaatgttttggtcatatcatcctggctccaa

SEQ ID NO: 278933 - DNA, 33 bp, Homo sapien
tgtcttacttaaggtacgatgcttccatgttcc

SEQ ID NO: 278934 - DNA, 33 bp, Homo sapien
tgtcttacttaaggtatgatgcttccatgttcc

SEQ ID NO: 278935 - DNA, 33 bp, Homo sapien
catgccttttgaataactgagataagccttaac

SEQ ID NO: 278936 - DNA, 33 bp, Homo sapien
catgccttttgaataattgagataagccttaac

SEQ ID NO: 278937 - DNA, 33 bp, Homo sapien
gtatgtgtggagtgaacatgacctcatttagct

SEQ ID NO: 278938 - DNA, 33 bp, Homo sapien
gtatgtgtggagtgaatatgacctcatttagct

SEQ ID NO: 278939 - DNA, 33 bp, Homo sapien
ttctcaccattcctaacattcacacttcaccct

SEQ ID NO: 278940 - DNA, 33 bp, Homo sapien
ttctcaccattcctaatattcacacttcaccct

SEQ ID NO: 278941 - DNA, 33 bp, Homo sapien
catgctttttgatcaacgttatatttttctttc

SEQ ID NO: 278942 - DNA, 33 bp, Homo sapien
catgctttttgatcaaggttatatttttctttc

SEQ ID NO: 278943 - DNA, 33 bp, Homo sapien
atcaagacttcttagacaaagagctgaggcaat

SEQ ID NO: 278944 - DNA, 33 bp, Homo sapien
atcaagacttcttagagaaagagctgaggcaat

SEQ ID NO: 278945 - DNA, 33 bp, Homo sapien
tagtaactttgatcaccaggttaaggtagcatc

SEQ ID NO: 278946 - DNA, 33 bp, Homo sapien
tagtaactttgatcactaggttaaggtagcatc

SEQ ID NO: 278947 - DNA, 33 bp, Homo sapien
tctgttttccctaggacgccattaaaaatagta

SEQ ID NO: 278948 - DNA, 33 bp, Homo sapien
tctgttttccctaggatgccattaaaaatagta

SEQ ID NO: 278949 - DNA, 33 bp, Homo sapien
ggaacagaaaaccgaaacactgaatgttctcac

SEQ ID NO: 278950 - DNA, 33 bp, Homo sapien
ggaacagaaaaccgaaccactgaatgttctcac

SEQ ID NO: 278951 - DNA, 33 bp, Homo sapien
tatgtaaagtgcttagaacggcttctggcacat

SEQ ID NO: 278952 - DNA, 33 bp, Homo sapien
tatgtaaagtgcttaggacggcttctggcacat

SEQ ID NO: 278953 - DNA, 33 bp, Homo sapien
tttttacaaaaaataccgacactttccatttgt

SEQ ID NO: 278954 - DNA, 33 bp, Homo sapien
tttttacaaaaaatactgacactttccatttgt

SEQ ID NO: 278955 - DNA, 33 bp, Homo sapien
ttcaacttggtatccagtataaccaatatcacc

SEQ ID NO: 278956 - DNA, 33 bp, Homo sapien
ttcaacttggtatccattataaccaatatcacc

SEQ ID NO: 278957 - DNA, 33 bp, Homo sapien
attttaaatgagagccaacattatgaactcagc

SEQ ID NO: 278958 - DNA, 33 bp, Homo sapien
attttaaatgagagccgacattatgaactcagc

SEQ ID NO: 278959 - DNA, 33 bp, Homo sapien
aattctgcaggaatcactgataactctccaaga

SEQ ID NO: 278960 - DNA, 33 bp, Homo sapien
aattctgcaggaatcattgataactctccaaga

SEQ ID NO: 278961 - DNA, 33 bp, Homo sapien
attagttaattttgtaggtaaattatgctccaa

SEQ ID NO: 278962 - DNA, 33 bp, Homo sapien
attagttaattttgtatgtaaattatgctccaa

SEQ ID NO: 278963 - DNA, 33 bp, Homo sapien
aggttcagtgggaacacatatgaaggagaccta

SEQ ID NO: 278964 - DNA, 33 bp, Homo sapien
aggttcagtgggaacatatatgaaggagaccta

SEQ ID NO: 278965 - DNA, 33 bp, Homo sapien
taatctgttaatctgacgaaagccaggaaagaa

SEQ ID NO: 278966 - DNA, 33 bp, Homo sapien
taatctgttaatctgatgaaagccaggaaagaa

SEQ ID NO: 278967 - DNA, 33 bp, Homo sapien
gcagagcgcagggcaaatgcatctgagtgccac

SEQ ID NO: 278968 - DNA, 33 bp, Homo sapien
gcagagcgcagggcaactgcatctgagtgccac

SEQ ID NO: 278969 - DNA, 33 bp, Homo sapien
ccaacagacaactgtacgctaacagaaaattat

SEQ ID NO: 278970 - DNA, 33 bp, Homo sapien
ccaacagacaactgtatgctaacagaaaattat

SEQ ID NO: 278971 - DNA, 33 bp, Homo sapien
ctctcccctacgacccaaagataaataaggtgt

SEQ ID NO: 278972 - DNA, 33 bp, Homo sapien
ctctcccctacgacccgaagataaataaggtgt

SEQ ID NO: 278973 - DNA, 33 bp, Homo sapien
gactgattctgtacaaactaccaccactgctag

SEQ ID NO: 278974 - DNA, 33 bp, Homo sapien
gactgattctgtacaacctaccaccactgctag

SEQ ID NO: 278975 - DNA, 33 bp, Homo sapien
ggactcatgtttagtacaaaatttttcttggta

SEQ ID NO: 278976 - DNA, 33 bp, Homo sapien
ggactcatgtttagtataaaatttttcttggta

SEQ ID NO: 278977 - DNA, 33 bp, Homo sapien
ctgatgtgtatttaaaacccaggataattccac

SEQ ID NO: 278978 - DNA, 33 bp, Homo sapien
ctgatgtgtatttaaagcccaggataattccac

SEQ ID NO: 278979 - DNA, 33 bp, Homo sapien
cataataacttgataacgcttttggatgggcca

SEQ ID NO: 278980 - DNA, 33 bp, Homo sapien
cataataacttgataatgcttttggatgggcca

SEQ ID NO: 278981 - DNA, 33 bp, Homo sapien
ttgaagaattgcgaaaatcaaaatcatgaagta

SEQ ID NO: 278982 - DNA, 33 bp, Homo sapien
ttgaagaattgcgaaagtcaaaatcatgaagta

SEQ ID NO: 278983 - DNA, 33 bp, Homo sapien
gctattagcaaacgacacatctattcttgacat

SEQ ID NO: 278984 - DNA, 33 bp, Homo sapien
gctattagcaaacgacgcatctattcttgacat

SEQ ID NO: 278985 - DNA, 33 bp, Homo sapien
gataaggaatttaccacgctaatatttgaagta

SEQ ID NO: 278986 - DNA, 33 bp, Homo sapien
gataaggaatttaccatgctaatatttgaagta

SEQ ID NO: 278987 - DNA, 33 bp, Homo sapien
gcatatagtcagtaaacgcttcttgaattgact

SEQ ID NO: 278988 - DNA, 33 bp, Homo sapien
gcatatagtcagtaaatgcttcttgaattgact

SEQ ID NO: 278989 - DNA, 33 bp, Homo sapien
gctaggaagaggtgctcacactcagctcactgg

SEQ ID NO: 278990 - DNA, 33 bp, Homo sapien
gctaggaagaggtgcttacactcagctcactgg

SEQ ID NO: 278991 - DNA, 33 bp, Homo sapien
ctccagatcacgttacaatagcaacactggaaa

SEQ ID NO: 278992 - DNA, 33 bp, Homo sapien
ctccagatcacgttacgatagcaacactggaaa

SEQ ID NO: 278993 - DNA, 33 bp, Homo sapien
aaagaaacttgtttaacattcttgagtcacaga

SEQ ID NO: 278994 - DNA, 33 bp, Homo sapien
aaagaaacttgtttaatattcttgagtcacaga

SEQ ID NO: 278995 - DNA, 33 bp, Homo sapien
taaaaaactgcagttacgtattttggcaacatg

SEQ ID NO: 278996 - DNA, 33 bp, Homo sapien
taaaaaactgcagttatgtattttggcaacatg

SEQ ID NO: 278997 - DNA, 33 bp, Homo sapien
tctgagttttcatgtaacaaactcttccaatcg

SEQ ID NO: 278998 - DNA, 33 bp, Homo sapien
tctgagttttcatgtatcaaactcttccaatcg

SEQ ID NO: 278999 - DNA, 33 bp, Homo sapien
ataaagataattgaacacagtaatggaaaaaaa

SEQ ID NO: 279000 - DNA, 33 bp, Homo sapien
ataaagataattgaacgcagtaatggaaaaaaa

SEQ ID NO: 279001 - DNA, 33 bp, Homo sapien; identical to SEQ ID NO: 278999

SEQ ID NO: 279002 - DNA, 33 bp, Homo sapien; identical to SEQ ID NO: 279000

SEQ ID NO: 279003 - DNA, 33 bp, Homo sapien
cagccttcttcactgaaatcggtgcttcctttt

SEQ ID NO: 279004 - DNA, 33 bp, Homo sapien
cagccttcttcactgagatcggtgcttcctttt

SEQ ID NO: 279005 - DNA, 33 bp, Homo sapien
cagatttttctccagtaaaactgaaacctaaat

SEQ ID NO: 279006 - DNA, 33 bp, Homo sapien
cagatttttctccagtgaaactgaaacctaaat

SEQ ID NO: 279007 - DNA, 33 bp, Homo sapien
aacaagaagaaaggtgacaatcaaaaacctatt

SEQ ID NO: 279008 - DNA, 33 bp, Homo sapien
aacaagaagaaaggtgtcaatcaaaaacctatt

SEQ ID NO: 279009 - DNA, 33 bp, Homo sapien
catcttcctggtaaaaccttcattccaagaaca

SEQ ID NO: 279010 - DNA, 33 bp, Homo sapien
catcttcctggtaaaatcttcattccaagaaca

SEQ ID NO: 279011 - DNA, 33 bp, Homo sapien
gcattgtggttgtcacacttgtcattgttcaaa

SEQ ID NO: 279012 - DNA, 33 bp, Homo sapien
gcattgtggttgtcacgcttgtcattgttcaaa

SEQ ID NO: 279013 - DNA, 33 bp, Homo sapien
cttcctatggagcccaagaaacagtgaacatct

SEQ ID NO: 279014 - DNA, 33 bp, Homo sapien
cttcctatggagcccacgaaacagtgaacatct

SEQ ID NO: 279015 - DNA, 33 bp, Homo sapien
aaagtttgaaagaggacgcttctaaagagccta

SEQ ID NO: 279016 - DNA, 33 bp, Homo sapien
aaagtttgaaagaggatgcttctaaagagccta

SEQ ID NO: 279017 - DNA, 33 bp, Homo sapien
tatccagagctcacgacacaaacacctccagct

SEQ ID NO: 279018 - DNA, 33 bp, Homo sapien
tatccagagctcacgatacaaacacctccagct

SEQ ID NO: 279019 - DNA, 33 bp, Homo sapien
agaagaaagctacaagaaaaaacataagaacac

SEQ ID NO: 279020 - DNA, 33 bp, Homo sapien
agaagaaagctacaaggaaaaacataagaacac

SEQ ID NO: 279021 - DNA, 33 bp, Homo sapien
caagatgagaatgagaaaatgtgatggccagga

SEQ ID NO: 279022 - DNA, 33 bp, Homo sapien
caagatgagaatgagagaatgtgatggccagga

SEQ ID NO: 279023 - DNA, 33 bp, Homo sapien
aaattctcaatgtaaacagacctaaaaataaga

SEQ ID NO: 279024 - DNA, 33 bp, Homo sapien
aaattctcaatgtaaagagacctaaaaataaga

SEQ ID NO: 279025 - DNA, 33 bp, Homo sapien
gttagctcttaatatcagaaggaaatatgcact

SEQ ID NO: 279026 - DNA, 33 bp, Homo sapien
gttagctcttaatatccgaaggaaatatgcact

SEQ ID NO: 279027 - DNA, 33 bp, Homo sapien
cattccataggttgtcaatttactatatttata

SEQ ID NO: 279028 - DNA, 33 bp, Homo sapien
cattccataggttgtcgatttactatatttata

SEQ ID NO: 279029 - DNA, 33 bp, Homo sapien
acaatggtctagtatccgaacctataaggaaca

SEQ ID NO: 279030 - DNA, 33 bp, Homo sapien
acaatggtctagtatctgaacctataaggaaca

SEQ ID NO: 279031 - DNA, 33 bp, Homo sapien
aaggggcaaatgtggaaatgcgataaatgagga

SEQ ID NO: 279032 - DNA, 33 bp, Homo sapien
aaggggcaaatgtggagatgcgataaatgagga

SEQ ID NO: 279033 - DNA, 33 bp, Homo sapien
tttaaaagacctgtaacaagtatgtgtttgttt

SEQ ID NO: 279034 - DNA, 33 bp, Homo sapien
tttaaaagacctgtaataagtatgtgtttgttt

SEQ ID NO: 279035 - DNA, 33 bp, Homo sapien
actcagtaaagagttaaaatgtgacaaacagaa

SEQ ID NO: 279036 - DNA, 33 bp, Homo sapien
actcagtaaagagttataatgtgacaaacagaa

SEQ ID NO: 279037 - DNA, 33 bp, Homo sapien
tgttgctaagagaataagtagctgaataaagtg

SEQ ID NO: 279038 - DNA, 33 bp, Homo sapien
tgttgctaagagaataggtagctgaataaagtg

SEQ ID NO: 279039 - DNA, 33 bp, Homo sapien
ccctatagctgggcagcaaatcctttcttgaaa

SEQ ID NO: 279040 - DNA, 33 bp, Homo sapien
ccctatagctgggcagtaaatcctttcttgaaa

SEQ ID NO: 279041 - DNA, 33 bp, Homo sapien
agatgattctgtttggacaatgtcaagaacatg

SEQ ID NO: 279042 - DNA, 33 bp, Homo sapien
agatgattctgtttgggcaatgtcaagaacatg

SEQ ID NO: 279043 - DNA, 33 bp, Homo sapien
aatagatctgaacttgaaatttagaagttaaaa

SEQ ID NO: 279044 - DNA, 33 bp, Homo sapien
aatagatctgaacttgcaatttagaagttaaaa

SEQ ID NO: 279045 - DNA, 33 bp, Homo sapien
tgggaatgagagaaaccggtatcttgcattaga

SEQ ID NO: 279046 - DNA, 33 bp, Homo sapien
tgggaatgagagaaactggtatcttgcattaga

SEQ ID NO: 279047 - DNA, 33 bp, Homo sapien
tatgtatatgtcaaagaaaccagaagagaggac

SEQ ID NO: 279048 - DNA, 33 bp, Homo sapien
tatgtatatgtcaaagtaaccagaagagaggac

SEQ ID NO: 279049 - DNA, 33 bp, Homo sapien
ttactgagatagagaaacgagaggaagaatagg

SEQ ID NO: 279050 - DNA, 33 bp, Homo sapien
ttactgagatagagaaccgagaggaagaatagg

SEQ ID NO: 279051 - DNA, 33 bp, Homo sapien
tgcaggcaatagaaaaccattcaaatgttgtga

SEQ ID NO: 279052 - DNA, 33 bp, Homo sapien
tgcaggcaatagaaaatcattcaaatgttgtga

SEQ ID NO: 279053 - DNA, 33 bp, Homo sapien
tagagaggataagcaaacccaggcagtgacatg

SEQ ID NO: 279054 - DNA, 33 bp, Homo sapien
tagagaggataagcaagcccaggcagtgacatg

SEQ ID NO: 279055 - DNA, 33 bp, Homo sapien
attctttaagtaactaagtgactcacaagctca

SEQ ID NO: 279056 - DNA, 33 bp, Homo sapien
attctttaagtaactaggtgactcacaagctca

SEQ ID NO: 279057 - DNA, 33 bp, Homo sapien
ttcctttcacagcaaacagtatgaattaccact

SEQ ID NO: 279058 - DNA, 33 bp, Homo sapien
ttcctttcacagcaaatagtatgaattaccact

SEQ ID NO: 279059 - DNA, 33 bp, Homo sapien
ctgagctcaaccttggaaaaaagaaatcatcca

SEQ ID NO: 279060 - DNA, 33 bp, Homo sapien
ctgagctcaaccttgggaaaaagaaatcatcca

SEQ ID NO: 279061 - DNA, 33 bp, Homo sapien
attgtcctaagcaaaccaatataggaacagaaa

SEQ ID NO: 279062 - DNA, 33 bp, Homo sapien
attgtcctaagcaaactaatataggaacagaaa

SEQ ID NO: 279063 - DNA, 33 bp, Homo sapien
acactcacctcctcaacaaacttcacaagtgcc

SEQ ID NO: 279064 - DNA, 33 bp, Homo sapien
acactcacctcctcaagaaacttcacaagtgcc

SEQ ID NO: 279065 - DNA, 33 bp, Homo sapien
gtagacacagactataaattcggcttgaaattg

SEQ ID NO: 279066 - DNA, 33 bp, Homo sapien
gtagacacagactatatattcggcttgaaattg

SEQ ID NO: 279067 - DNA, 33 bp, Homo sapien
aggtactttttatttgaacggccaggtggtgag

SEQ ID NO: 279068 - DNA, 33 bp, Homo sapien
aggtactttttatttggacggccaggtggtgag

SEQ ID NO: 279069 - DNA, 33 bp, Homo sapien
tctctccagctttaccaatactgctcccccact

SEQ ID NO: 279070 - DNA, 33 bp, Homo sapien
tctctccagctttaccgatactgctcccccact

SEQ ID NO: 279071 - DNA, 33 bp, Homo sapien
cagtggctttccatcacgctagaataaacattc

SEQ ID NO: 279072 - DNA, 33 bp, Homo sapien
cagtggctttccatcatgctagaataaacattc

SEQ ID NO: 279073 - DNA, 33 bp, Homo sapien
tggtgaatcagataataacagtcctggctccca

SEQ ID NO: 279074 - DNA, 33 bp, Homo sapien
tggtgaatcagataatcacagtcctggctccca

SEQ ID NO: 279075 - DNA, 33 bp, Homo sapien
agcaggtatgggcataataaaagtgattccaca

SEQ ID NO: 279076 - DNA, 33 bp, Homo sapien
agcaggtatgggcatagtaaaagtgattccaca

SEQ ID NO: 279077 - DNA, 33 bp, Homo sapien
tgtgctgttggattccccatatatttacttggt

SEQ ID NO: 279078 - DNA, 33 bp, Homo sapien
tgtgctgttggattccgcatatatttacttggt

SEQ ID NO: 279079 - DNA, 33 bp, Homo sapien
accagacagctcttgaataagtcgcagcataga

SEQ ID NO: 279080 - DNA, 33 bp, Homo sapien
accagacagctcttgagtaagtcgcagcataga

SEQ ID NO: 279081 - DNA, 33 bp, Homo sapien
tatatacatcttaacagattctagtcaggcaca

SEQ ID NO: 279082 - DNA, 33 bp, Homo sapien
tatatacatcttaacatattctagtcaggcaca

SEQ ID NO: 279083 - DNA, 33 bp, Homo sapien
gtaggccgtgattaaacgccctgcaggctatag

SEQ ID NO: 279084 - DNA, 33 bp, Homo sapien
gtaggccgtgattaaatgccctgcaggctatag

SEQ ID NO: 279085 - DNA, 33 bp, Homo sapien
tagaaaaattatgggcagcagataagaaaaact

SEQ ID NO: 279086 - DNA, 33 bp, Homo sapien
tagaaaaattatgggcggcagataagaaaaact

SEQ ID NO: 279087 - DNA, 33 bp, Homo sapien
ttctatttctgtcttacggtaaaactgacattc

SEQ ID NO: 279088 - DNA, 33 bp, Homo sapien
ttctatttctgtcttatggtaaaactgacattc

SEQ ID NO: 279089 - DNA, 33 bp, Homo sapien
agaatggctaatagggaaggaattaaaaatagg

SEQ ID NO: 279090 - DNA, 33 bp, Homo sapien
agaatggctaatagggcaggaattaaaaatagg

SEQ ID NO: 279091 - DNA, 33 bp, Homo sapien
tgaacaacacagaataaatactcataccttttt

SEQ ID NO: 279092 - DNA, 33 bp, Homo sapien
tgaacaacacagaatacatactcataccttttt

SEQ ID NO: 279093 - DNA, 33 bp, Homo sapien
tcagagtcaagcacaaatgaacaccacagaaag

SEQ ID NO: 279094 - DNA, 33 bp, Homo sapien
tcagagtcaagcacaactgaacaccacagaaag

SEQ ID NO: 279095 - DNA, 33 bp, Homo sapien
agttgttactcttgaggcagaaggcttgcttcc

SEQ ID NO: 279096 - DNA, 33 bp, Homo sapien
agttgttactcttgagtcagaaggcttgcttcc

SEQ ID NO: 279097 - DNA, 33 bp, Homo sapien
ggatctgctgattaagacagtctcctttataga

SEQ ID NO: 279098 - DNA, 33 bp, Homo sapien
ggatctgctgattaaggcagtctcctttataga

SEQ ID NO: 279099 - DNA, 33 bp, Homo sapien
tgattagtagtgtccacagctaaattatcttaa

SEQ ID NO: 279100 - DNA, 33 bp, Homo sapien
tgattagtagtgtccagagctaaattatcttaa

SEQ ID NO: 279101 - DNA, 33 bp, Homo sapien
ctccacattcatctcccgactctcaaacaccat

SEQ ID NO: 279102 - DNA, 33 bp, Homo sapien
ctccacattcatctcctgactctcaaacaccat

SEQ ID NO: 279103 - DNA, 33 bp, Homo sapien
aaagatgcatttttaacagtcctaaacatctca

SEQ ID NO: 279104 - DNA, 33 bp, Homo sapien
aaagatgcatttttaatagtcctaaacatctca

SEQ ID NO: 279105 - DNA, 33 bp, Homo sapien
cagacacatacccccaacatgctcactgcctct

SEQ ID NO: 279106 - DNA, 33 bp, Homo sapien
cagacacatacccccagcatgctcactgcctct

SEQ ID NO: 279107 - DNA, 33 bp, Homo sapien
tacattatatttctaccggatggcactggtctt

SEQ ID NO: 279108 - DNA, 33 bp, Homo sapien
tacattatatttctactggatggcactggtctt

SEQ ID NO: 279109 - DNA, 33 bp, Homo sapien
tggggatattatagaaataggtgactcagaccc

SEQ ID NO: 279110 - DNA, 33 bp, Homo sapien
tggggatattatagaactaggtgactcagaccc

SEQ ID NO: 279111 - DNA, 33 bp, Homo sapien
actgtgctgccagtcacataaaagaatagcaca

SEQ ID NO: 279112 - DNA, 33 bp, Homo sapien
actgtgctgccagtcatataaaagaatagcaca

SEQ ID NO: 279113 - DNA, 33 bp, Homo sapien
ttatctggcataataaactatttgggcgggatg

SEQ ID NO: 279114 - DNA, 33 bp, Homo sapien
ttatctggcataataagctatttgggcgggatg

SEQ ID NO: 279115 - DNA, 33 bp, Homo sapien
atattttaaattgttacggtgtttgtgatattt

SEQ ID NO: 279116 - DNA, 33 bp, Homo sapien
atattttaaattgttatggtgtttgtgatattt

SEQ ID NO: 279117 - DNA, 33 bp, Homo sapien
tccaaaaaagtattgcagaagtatttcaggcag

SEQ ID NO: 279118 - DNA, 33 bp, Homo sapien
tccaaaaaagtattgcggaagtatttcaggcag

SEQ ID NO: 279119 - DNA, 33 bp, Homo sapien
tgtaccttactgttaaaactgaatatttatgtc

SEQ ID NO: 279120 - DNA, 33 bp, Homo sapien
tgtaccttactgttaagactgaatatttatgtc

SEQ ID NO: 279121 - DNA, 33 bp, Homo sapien
ggcccctatcagacaccgtattagttcatcctc

SEQ ID NO: 279122 - DNA, 33 bp, Homo sapien
ggcccctatcagacactgtattagttcatcctc

SEQ ID NO: 279123 - DNA, 33 bp, Homo sapien
actcacacagaagttccacacaaaacagtgttc

SEQ ID NO: 279124 - DNA, 33 bp, Homo sapien
actcacacagaagttctacacaaaacagtgttc

SEQ ID NO: 279125 - DNA, 33 bp, Homo sapien
atcataggtttataagaacggtaccacgagtag

SEQ ID NO: 279126 - DNA, 33 bp, Homo sapien
atcataggtttataaggacggtaccacgagtag

SEQ ID NO: 279127 - DNA, 33 bp, Homo sapien
taattaaaaccccaaagaaatatccaaggatgc

SEQ ID NO: 279128 - DNA, 33 bp, Homo sapien
taattaaaaccccaaataaatatccaaggatgc

SEQ ID NO: 279129 - DNA, 33 bp, Homo sapien
gaaagggaaacaaaaagcatctcaatccaaaat

SEQ ID NO: 279130 - DNA, 33 bp, Homo sapien
gaaagggaaacaaaaatcatctcaatccaaaat

SEQ ID NO: 279131 - DNA, 33 bp, Homo sapien
aagcccaccatgtttggatggcggtgatgtcac

SEQ ID NO: 279132 - DNA, 33 bp, Homo sapien
aagcccaccatgtttgtatggcggtgatgtcac

SEQ ID NO: 279133 - DNA, 33 bp, Homo sapien
ggaaactaattcagcagtcagtaaagtaggggg

SEQ ID NO: 279134 - DNA, 33 bp, Homo sapien
ggaaactaattcagcattcagtaaagtaggggg

SEQ ID NO: 279135 - DNA, 33 bp, Homo sapien
ggctcatgtctctgcaggctttaatgggagctt

SEQ ID NO: 279136 - DNA, 33 bp, Homo sapien
ggctcatgtctctgcatgctttaatgggagctt

SEQ ID NO: 279137 - DNA, 33 bp, Homo sapien
tggctgtgcacttacccgccacccaaatcatga

SEQ ID NO: 279138 - DNA, 33 bp, Homo sapien
tggctgtgcacttacctgccacccaaatcatga

SEQ ID NO: 279139 - DNA, 33 bp, Homo sapien
tcaaagagtaaatatcaaccattttttcccaat

SEQ ID NO: 279140 - DNA, 33 bp, Homo sapien
tcaaagagtaaatatctaccattttttcccaat

SEQ ID NO: 279141 - DNA, 33 bp, Homo sapien
tctcaatttgcctagccgattctttgttttctt

SEQ ID NO: 279142 - DNA, 33 bp, Homo sapien
tctcaatttgcctagctgattctttgttttctt

SEQ ID NO: 279143 - DNA, 33 bp, Homo sapien
actccagatgctaggaatacagccagccctctg

SEQ ID NO: 279144 - DNA, 33 bp, Homo sapien
actccagatgctaggagtacagccagccctctg

SEQ ID NO: 279145 - DNA, 33 bp, Homo sapien
taacatttttgttgcactaaaatatggctccaa

SEQ ID NO: 279146 - DNA, 33 bp, Homo sapien
taacatttttgttgcattaaaatatggctccaa

SEQ ID NO: 279147 - DNA, 33 bp, Homo sapien
acactgatgcttcagaacataacttttcaaaca

SEQ ID NO: 279148 - DNA, 33 bp, Homo sapien
acactgatgcttcagaccataacttttcaaaca

SEQ ID NO: 279149 - DNA, 33 bp, Homo sapien
ttaagtctttcaaagcacattttataaaaaaag

SEQ ID NO: 279150 - DNA, 33 bp, Homo sapien
ttaagtctttcaaagcgcattttataaaaaaag

SEQ ID NO: 279151 - DNA, 33 bp, Homo sapien
tgaaatttccagagacaaatgagaaggcccaag

SEQ ID NO: 279152 - DNA, 33 bp, Homo sapien
tgaaatttccagagacgaatgagaaggcccaag

SEQ ID NO: 279153 - DNA, 33 bp, Homo sapien
aaggaaaccaaatatgcaactcaaggtgggaga

SEQ ID NO: 279154 - DNA, 33 bp, Homo sapien
aaggaaaccaaatatggaactcaaggtgggaga

SEQ ID NO: 279155 - DNA, 33 bp, Homo sapien
gtcaatttccaagacaagataaatgtatgatct

SEQ ID NO: 279156 - DNA, 33 bp, Homo sapien
gtcaatttccaagacatgataaatgtatgatct

SEQ ID NO: 279157 - DNA, 33 bp, Homo sapien
acgaatacttttattacctcaaactgtgaacaa

SEQ ID NO: 279158 - DNA, 33 bp, Homo sapien
acgaatacttttattatctcaaactgtgaacaa

SEQ ID NO: 279159 - DNA, 33 bp, Homo sapien
ttctcagaatccttccagcatccagtataagtg

SEQ ID NO: 279160 - DNA, 33 bp, Homo sapien
ttctcagaatccttccggcatccagtataagtg

SEQ ID NO: 279161 - DNA, 33 bp, Homo sapien
gaggcactagtctagacgatagagaatcattga

SEQ ID NO: 279162 - DNA, 33 bp, Homo sapien
gaggcactagtctagatgatagagaatcattga

SEQ ID NO: 279163 - DNA, 33 bp, Homo sapien
tcagtaccagacactccatcatggctagaaata

SEQ ID NO: 279164 - DNA, 33 bp, Homo sapien
tcagtaccagacactctatcatggctagaaata

SEQ ID NO: 279165 - DNA, 33 bp, Homo sapien
gtaatcatggaattcaatgaaatatatgaggta

SEQ ID NO: 279166 - DNA, 33 bp, Homo sapien
gtaatcatggaattcagtgaaatatatgaggta

SEQ ID NO: 279167 - DNA, 33 bp, Homo sapien
atcagtcctattaaaccgtgattgcagcttaaa

SEQ ID NO: 279168 - DNA, 33 bp, Homo sapien
atcagtcctattaaactgtgattgcagcttaaa

SEQ ID NO: 279169 - DNA, 33 bp, Homo sapien
acgaaagcttcattgacgtcttgctcaggtggc

SEQ ID NO: 279170 - DNA, 33 bp, Homo sapien
acgaaagcttcattgatgtcttgctcaggtggc

SEQ ID NO: 279171 - DNA, 33 bp, Homo sapien
gacagattcaactagtcacaagttaccacattg

SEQ ID NO: 279172 - DNA, 33 bp, Homo sapien
gacagattcaactagttacaagttaccacattg

SEQ ID NO: 279173 - DNA, 33 bp, Homo sapien
gaaaataccacctctgacacattaggaggaccc

SEQ ID NO: 279174 - DNA, 33 bp, Homo sapien
gaaaataccacctctggcacattaggaggaccc

SEQ ID NO: 279175 - DNA, 33 bp, Homo sapien
tgtttaaagtgatggaaaatagacagatggaaa

SEQ ID NO: 279176 - DNA, 33 bp, Homo sapien
tgtttaaagtgatggagaatagacagatggaaa

SEQ ID NO: 279177 - DNA, 33 bp, Homo sapien
ttttatttatcatgaaagggattagtagacttg

SEQ ID NO: 279178 - DNA, 33 bp, Homo sapien
ttttatttatcatgaaggggattagtagacttg

SEQ ID NO: 279179 - DNA, 33 bp, Homo sapien
atcagtacatgcctaagaaaaagtaaacacaca

SEQ ID NO: 279180 - DNA, 33 bp, Homo sapien
atcagtacatgcctaataaaaagtaaacacaca

SEQ ID NO: 279181 - DNA, 33 bp, Homo sapien
tgtgggatcttggaatgaatactggaacaaaaa

SEQ ID NO: 279182 - DNA, 33 bp, Homo sapien
tgtgggatcttggaattaatactggaacaaaaa

SEQ ID NO: 279183 - DNA, 33 bp, Homo sapien
ctcatgatgaagtgtaaaaccgttctcaggcta

SEQ ID NO: 279184 - DNA, 33 bp, Homo sapien
ctcatgatgaagtgtagaaccgttctcaggcta

SEQ ID NO: 279185 - DNA, 33 bp, Homo sapien
attgttccttggagaccagtgacattgataggg

SEQ ID NO: 279186 - DNA, 33 bp, Homo sapien
attgttccttggagacgagtgacattgataggg

SEQ ID NO: 279187 - DNA, 33 bp, Homo sapien
cgctccactcctgtgacgtgaaggctacccggc

SEQ ID NO: 279188 - DNA, 33 bp, Homo sapien
cgctccactcctgtgatgtgaaggctacccggc

SEQ ID NO: 279189 - DNA, 33 bp, Homo sapien
ttgctcagaattggagactacatcagacctaga

SEQ ID NO: 279190 - DNA, 33 bp, Homo sapien
ttgctcagaattggagtctacatcagacctaga

SEQ ID NO: 279191 - DNA, 33 bp, Homo sapien
catgtagctggaaaaacctacacaatatgatag

SEQ ID NO: 279192 - DNA, 33 bp, Homo sapien
catgtagctggaaaaatctacacaatatgatag

SEQ ID NO: 279193 - DNA, 33 bp, Homo sapien
ttgtatggtttgggtgaacagaattatggtcaa

SEQ ID NO: 279194 - DNA, 33 bp, Homo sapien
ttgtatggtttgggtggacagaattatggtcaa

SEQ ID NO: 279195 - DNA, 33 bp, Homo sapien
ttgatgatgccatagaaaagaaaaacccctttt

SEQ ID NO: 279196 - DNA, 33 bp, Homo sapien
ttgatgatgccatagagaagaaaaacccctttt

SEQ ID NO: 279197 - DNA, 33 bp, Homo sapien
ccctgtatcctctttacaaagcatttacagttc

SEQ ID NO: 279198 - DNA, 33 bp, Homo sapien
ccctgtatcctctttagaaagcatttacagttc

SEQ ID NO: 279199 - DNA, 33 bp, Homo sapien
cctactgtatgcatagcagtgtatgttttccat

SEQ ID NO: 279200 - DNA, 33 bp, Homo sapien
cctactgtatgcatagtagtgtatgttttccat

SEQ ID NO: 279201 - DNA, 33 bp, Homo sapien
caaaggagaaagggcccagaggattgagcttta

SEQ ID NO: 279202 - DNA, 33 bp, Homo sapien
caaaggagaaagggcctagaggattgagcttta

SEQ ID NO: 279203 - DNA, 33 bp, Homo sapien
agttaagttgctttcccagtcttctttgcaatt

SEQ ID NO: 279204 - DNA, 33 bp, Homo sapien
agttaagttgctttcctagtcttctttgcaatt

SEQ ID NO: 279205 - DNA, 33 bp, Homo sapien
aagcaacttaactccacacatagatagatgaaa

SEQ ID NO: 279206 - DNA, 33 bp, Homo sapien
aagcaacttaactccatacatagatagatgaaa

SEQ ID NO: 279207 - DNA, 33 bp, Homo sapien
tagcctcaagctagccaaaagcatctttgaatt

SEQ ID NO: 279208 - DNA, 33 bp, Homo sapien
tagcctcaagctagccgaaagcatctttgaatt

SEQ ID NO: 279209 - DNA, 33 bp, Homo sapien
agttgtttctgtgatacccaagtggaaatatcc

SEQ ID NO: 279210 - DNA, 33 bp, Homo sapien
agttgtttctgtgatatccaagtggaaatatcc

SEQ ID NO: 279211 - DNA, 33 bp, Homo sapien
tttccacaaggacttaaaaaagtgcagattaca

SEQ ID NO: 279212 - DNA, 33 bp, Homo sapien
tttccacaaggacttacaaaagtgcagattaca

SEQ ID NO: 279213 - DNA, 33 bp, Homo sapien
gtcctttctgtatcaacatcaatctccatcaaa

SEQ ID NO: 279214 - DNA, 33 bp, Homo sapien
gtcctttctgtatcaatatcaatctccatcaaa

SEQ ID NO: 279215 - DNA, 33 bp, Homo sapien
ttccttactgaccctaaaacatttgctactcct

SEQ ID NO: 279216 - DNA, 33 bp, Homo sapien
ttccttactgaccctacaacatttgctactcct

SEQ ID NO: 279217 - DNA, 33 bp, Homo sapien
tcagcaccacatttgcagaaggagagatgctgg

SEQ ID NO: 279218 - DNA, 33 bp, Homo sapien
tcagcaccacatttgcggaaggagagatgctgg

SEQ ID NO: 279219 - DNA, 33 bp, Homo sapien
atccctggagtagatacccttttccctgacgtt

SEQ ID NO: 279220 - DNA, 33 bp, Homo sapien
atccctggagtagatatccttttccctgacgtt

SEQ ID NO: 279221 - DNA, 33 bp, Homo sapien
atttgctctatcactaaggtagtcaagtagcca

SEQ ID NO: 279222 - DNA, 33 bp, Homo sapien
atttgctctatcactatggtagtcaagtagcca

SEQ ID NO: 279223 - DNA, 33 bp, Homo sapien
ccacagagagagtaagcaatttgtccaagctca

SEQ ID NO: 279224 - DNA, 33 bp, Homo sapien
ccacagagagagtaagtaatttgtccaagctca

SEQ ID NO: 279225 - DNA, 33 bp, Homo sapien
aagtcagcctcatacacagtggatcatagcctg

SEQ ID NO: 279226 - DNA, 33 bp, Homo sapien
aagtcagcctcatacatagtggatcatagcctg

SEQ ID NO: 279227 - DNA, 33 bp, Homo sapien
atcatctcaaactttacgtgtctacattcagat

SEQ ID NO: 279228 - DNA, 33 bp, Homo sapien
atcatctcaaactttatgtgtctacattcagat

SEQ ID NO: 279229 - DNA, 33 bp, Homo sapien
ctgcatgttcagacaaagagtggttgaggaaga

SEQ ID NO: 279230 - DNA, 33 bp, Homo sapien
ctgcatgttcagacaaggagtggttgaggaaga

SEQ ID NO: 279231 - DNA, 33 bp, Homo sapien
atttctgctccattacaccttccagcctttagg

SEQ ID NO: 279232 - DNA, 33 bp, Homo sapien
atttctgctccattacgccttccagcctttagg

SEQ ID NO: 279233 - DNA, 33 bp, Homo sapien
atttgaaaggaaatggaaaactcgctttttttt

SEQ ID NO: 279234 - DNA, 33 bp, Homo sapien
atttgaaaggaaatggtaaactcgctttttttt

SEQ ID NO: 279235 - DNA, 33 bp, Homo sapien
tgcaaactctgacttcccagtaaaatgtgtgga

SEQ ID NO: 279236 - DNA, 33 bp, Homo sapien
tgcaaactctgacttctcagtaaaatgtgtgga

SEQ ID NO: 279237 - DNA, 33 bp, Homo sapien
tggacaatttagaaaacgcttatgggttgtctt

SEQ ID NO: 279238 - DNA, 33 bp, Homo sapien
tggacaatttagaaaatgcttatgggttgtctt

SEQ ID NO: 279239 - DNA, 33 bp, Homo sapien
aacttatttgaacctcaatgtactctagcaaaa

SEQ ID NO: 279240 - DNA, 33 bp, Homo sapien
aacttatttgaacctcgatgtactctagcaaaa

SEQ ID NO: 279241 - DNA, 33 bp, Homo sapien
aggatgagtttcatcaaattgaagtgctggttt

SEQ ID NO: 279242 - DNA, 33 bp, Homo sapien
aggatgagtttcatcagattgaagtgctggttt

SEQ ID NO: 279243 - DNA, 33 bp, Homo sapien
tctaaatatggactaaatggaatgacagcaata

SEQ ID NO: 279244 - DNA, 33 bp, Homo sapien
tctaaatatggactaagtggaatgacagcaata

SEQ ID NO: 279245 - DNA, 33 bp, Homo sapien
atggtagaaataataccggtttggaagttgagt

SEQ ID NO: 279246 - DNA, 33 bp, Homo sapien
atggtagaaataatactggtttggaagttgagt

SEQ ID NO: 279247 - DNA, 33 bp, Homo sapien
aaagttggtctaagtactaaacatggatttcaa

SEQ ID NO: 279248 - DNA, 33 bp, Homo sapien
aaagttggtctaagtattaaacatggatttcaa

SEQ ID NO: 279249 - DNA, 33 bp, Homo sapien
catccatctacgcacactaaaaaggcattattg

SEQ ID NO: 279250 - DNA, 33 bp, Homo sapien
catccatctacgcacattaaaaaggcattattg

SEQ ID NO: 279251 - DNA, 33 bp, Homo sapien
tctctctgaaggtaacactatgtgctcttaggt

SEQ ID NO: 279252 - DNA, 33 bp, Homo sapien
tctctctgaaggtaacgctatgtgctcttaggt

SEQ ID NO: 279253 - DNA, 33 bp, Homo sapien
acgcccgaagctatgaaaagacagcagagagga

SEQ ID NO: 279254 - DNA, 33 bp, Homo sapien
acgcccgaagctatgagaagacagcagagagga

SEQ ID NO: 279255 - DNA, 33 bp, Homo sapien
tcttacagtgctaagaatcaattatttgtaata

SEQ ID NO: 279256 - DNA, 33 bp, Homo sapien
tcttacagtgctaagattcaattatttgtaata

SEQ ID NO: 279257 - DNA, 33 bp, Homo sapien
aagctattagcactgcaacaagaagagcttgtt

SEQ ID NO: 279258 - DNA, 33 bp, Homo sapien
aagctattagcactgcgacaagaagagcttgtt

SEQ ID NO: 279259 - DNA, 33 bp, Homo sapien
attggtgtaagaatcaagggtattttaataaca

SEQ ID NO: 279260 - DNA, 33 bp, Homo sapien
attggtgtaagaatcatgggtattttaataaca

SEQ ID NO: 279261 - DNA, 33 bp, Homo sapien
aagatgagactaaatcaaacaactttagataaa

SEQ ID NO: 279262 - DNA, 33 bp, Homo sapien
aagatgagactaaatccaacaactttagataaa

SEQ ID NO: 279263 - DNA, 33 bp, Homo sapien
ttgcacggtgaaatacagctaatccttcagcat

SEQ ID NO: 279264 - DNA, 33 bp, Homo sapien
ttgcacggtgaaatacggctaatccttcagcat

SEQ ID NO: 279265 - DNA, 33 bp, Homo sapien
gcttgcctgactttgaaaactttgttcctcact

SEQ ID NO: 279266 - DNA, 33 bp, Homo sapien
gcttgcctgactttgagaactttgttcctcact

SEQ ID NO: 279267 - DNA, 33 bp, Homo sapien
gccatccttgtctacacaggctagtgtaatgtg

SEQ ID NO: 279268 - DNA, 33 bp, Homo sapien
gccatccttgtctacataggctagtgtaatgtg

SEQ ID NO: 279269 - DNA, 33 bp, Homo sapien
gattcagtatcttttaaagtcctcaaagctgtc

SEQ ID NO: 279270 - DNA, 33 bp, Homo sapien
gattcagtatcttttacagtcctcaaagctgtc

SEQ ID NO: 279271 - DNA, 33 bp, Homo sapien
ctggtatctggatgagaatggcaaccgctcttc

SEQ ID NO: 279272 - DNA, 33 bp, Homo sapien
ctggtatctggatgaggatggcaaccgctcttc

SEQ ID NO: 279273 - DNA, 33 bp, Homo sapien
ccagaagacacgtgacaggggttctcagtataa

SEQ ID NO: 279274 - DNA, 33 bp, Homo sapien
ccagaagacacgtgacgggggttctcagtataa

SEQ ID NO: 279275 - DNA, 33 bp, Homo sapien
tccttagtacctaccacggttcttcgcacctaa

SEQ ID NO: 279276 - DNA, 33 bp, Homo sapien
tccttagtacctaccatggttcttcgcacctaa

SEQ ID NO: 279277 - DNA, 33 bp, Homo sapien
gggttttgcatcggtaaatttctaaagatccct

SEQ ID NO: 279278 - DNA, 33 bp, Homo sapien
gggttttgcatcggtagatttctaaagatccct

SEQ ID NO: 279279 - DNA, 33 bp, Homo sapien
atggtcgtactatagaaaaggacaggtttgata

SEQ ID NO: 279280 - DNA, 33 bp, Homo sapien
atggtcgtactatagagaaggacaggtttgata

SEQ ID NO: 279281 - DNA, 33 bp, Homo sapien
aacatcagggtgcctcccaaagccttgcctgtt

SEQ ID NO: 279282 - DNA, 33 bp, Homo sapien
aacatcagggtgcctctcaaagccttgcctgtt

SEQ ID NO: 279283 - DNA, 33 bp, Homo sapien
ttgatagtgagattgacaataaagtgggctttt

SEQ ID NO: 279284 - DNA, 33 bp, Homo sapien
ttgatagtgagattgataataaagtgggctttt

SEQ ID NO: 279285 - DNA, 33 bp, Homo sapien
gttaggtactatggataaaataacaacacccta

SEQ ID NO: 279286 - DNA, 33 bp, Homo sapien
gttaggtactatggatcaaataacaacacccta

SEQ ID NO: 279287 - DNA, 33 bp, Homo sapien
ctagagagtgtcttaaagttctttctaatgtta

SEQ ID NO: 279288 - DNA, 33 bp, Homo sapien
ctagagagtgtcttaaggttctttctaatgtta

SEQ ID NO: 279289 - DNA, 33 bp, Homo sapien
aaataaagcctgggtaagactatgatattttca

SEQ ID NO: 279290 - DNA, 33 bp, Homo sapien
aaataaagcctgggtatgactatgatattttca

SEQ ID NO: 279291 - DNA, 33 bp, Homo sapien
gacattctcatttgggcaacttgctggaattac

SEQ ID NO: 279292 - DNA, 33 bp, Homo sapien
gacattctcatttgggtaacttgctggaattac

SEQ ID NO: 279293 - DNA, 33 bp, Homo sapien
atctaaatagttagacactataaatcaagctaa

SEQ ID NO: 279294 - DNA, 33 bp, Homo sapien
atctaaatagttagacgctataaatcaagctaa

SEQ ID NO: 279295 - DNA, 33 bp, Homo sapien
aagattgcaaagtaagaaggaccatttggatta

SEQ ID NO: 279296 - DNA, 33 bp, Homo sapien
aagattgcaaagtaaggaggaccatttggatta

SEQ ID NO: 279297 - DNA, 33 bp, Homo sapien
gattcatttatcataactagcttggccatcctt

SEQ ID NO: 279298 - DNA, 33 bp, Homo sapien
gattcatttatcataattagcttggccatcctt

SEQ ID NO: 279299 - DNA, 33 bp, Homo sapien
aggtgccaagccataaacttcagtgtaattcac

SEQ ID NO: 279300 - DNA, 33 bp, Homo sapien
aggtgccaagccataagcttcagtgtaattcac

SEQ ID NO: 279301 - DNA, 33 bp, Homo sapien
tttataataatagctgcagtttctcgagtggaa

SEQ ID NO: 279302 - DNA, 33 bp, Homo sapien
tttataataatagctgtagtttctcgagtggaa

SEQ ID NO: 279303 - DNA, 33 bp, Homo sapien
gcgtttgaaggcccccaaaatgagcaattgagc

SEQ ID NO: 279304 - DNA, 33 bp, Homo sapien
gcgtttgaaggccccctaaatgagcaattgagc

SEQ ID NO: 279305 - DNA, 33 bp, Homo sapien
atcagccagcagcttacggatagaatatattaa

SEQ ID NO: 279306 - DNA, 33 bp, Homo sapien
atcagccagcagcttatggatagaatatattaa

SEQ ID NO: 279307 - DNA, 33 bp, Homo sapien
ctgatctttgtcctagcatcgtagagaccatgc

SEQ ID NO: 279308 - DNA, 33 bp, Homo sapien
ctgatctttgtcctagtatcgtagagaccatgc

SEQ ID NO: 279309 - DNA, 33 bp, Homo sapien
atagttgagcttgataaaattcatcttttcaaa

SEQ ID NO: 279310 - DNA, 33 bp, Homo sapien
atagttgagcttgatataattcatcttttcaaa

SEQ ID NO: 279311 - DNA, 33 bp, Homo sapien
aagtctgcggctacaccaaaactcagacctgag

SEQ ID NO: 279312 - DNA, 33 bp, Homo sapien
aagtctgcggctacactaaaactcagacctgag

SEQ ID NO: 279313 - DNA, 33 bp, Homo sapien
ccaacatatgatagaaggggaaaaagcaacaaa

SEQ ID NO: 279314 - DNA, 33 bp, Homo sapien
ccaacatatgatagaatgggaaaaagcaacaaa

SEQ ID NO: 279315 - DNA, 33 bp, Homo sapien
tgaatatagcctgcaacgataagacatatactt

SEQ ID NO: 279316 - DNA, 33 bp, Homo sapien
tgaatatagcctgcaatgataagacatatactt

SEQ ID NO: 279317 - DNA, 33 bp, Homo sapien
tcaataattcatgttaacttaagtactacatca

SEQ ID NO: 279318 - DNA, 33 bp, Homo sapien
tcaataattcatgttagcttaagtactacatca

SEQ ID NO: 279319 - DNA, 33 bp, Homo sapien
aagtaaaagtaccacacagatctttctacaaca

SEQ ID NO: 279320 - DNA, 33 bp, Homo sapien
aagtaaaagtaccacagagatctttctacaaca

SEQ ID NO: 279321 - DNA, 33 bp, Homo sapien
tgcattatttcagataacaccaagcaaaaatag

SEQ ID NO: 279322 - DNA, 33 bp, Homo sapien
tgcattatttcagatagcaccaagcaaaaatag

SEQ ID NO: 279323 - DNA, 33 bp, Homo sapien
gttggagaaagggctgaaagagtgtggaaggag

SEQ ID NO: 279324 - DNA, 33 bp, Homo sapien
gttggagaaagggctgtaagagtgtggaaggag

SEQ ID NO: 279325 - DNA, 33 bp, Homo sapien
gtaatgtattgaactgcagtcctacctaaatat

SEQ ID NO: 279326 - DNA, 33 bp, Homo sapien
gtaatgtattgaactgtagtcctacctaaatat

SEQ ID NO: 279327 - DNA, 33 bp, Homo sapien
atggaaaagctactacccttacgagagctttca

SEQ ID NO: 279328 - DNA, 33 bp, Homo sapien
atggaaaagctactacgcttacgagagctttca

SEQ ID NO: 279329 - DNA, 33 bp, Homo sapien
gaaaagtgttagtaccaaaaaatgatgggaaag

SEQ ID NO: 279330 - DNA, 33 bp, Homo sapien
gaaaagtgttagtaccgaaaaatgatgggaaag

SEQ ID NO: 279331 - DNA, 33 bp, Homo sapien
gcacgtctttagaatacgaacatggattctgga

SEQ ID NO: 279332 - DNA, 33 bp, Homo sapien
gcacgtctttagaatatgaacatggattctgga

SEQ ID NO: 279333 - DNA, 33 bp, Homo sapien
taaaccatttttagaagatttgccactctttct

SEQ ID NO: 279334 - DNA, 33 bp, Homo sapien
taaaccatttttagaatatttgccactctttct

SEQ ID NO: 279335 - DNA, 33 bp, Homo sapien
cccttggagttagcagacagttatagcaagcct

SEQ ID NO: 279336 - DNA, 33 bp, Homo sapien
cccttggagttagcaggcagttatagcaagcct

SEQ ID NO: 279337 - DNA, 33 bp, Homo sapien
aagcttttgagcaaagacctagaattagtaaga

SEQ ID NO: 279338 - DNA, 33 bp, Homo sapien
aagcttttgagcaaaggcctagaattagtaaga

SEQ ID NO: 279339 - DNA, 33 bp, Homo sapien
catggagtaaataacacagtttcttttcttgac

SEQ ID NO: 279340 - DNA, 33 bp, Homo sapien
catggagtaaataacagagtttcttttcttgac

SEQ ID NO: 279341 - DNA, 33 bp, Homo sapien
catcatattattactcccttagcttttcaggcc

SEQ ID NO: 279342 - DNA, 33 bp, Homo sapien
catcatattattactctcttagcttttcaggcc

SEQ ID NO: 279343 - DNA, 33 bp, Homo sapien
ttaaccactctcaagacaacaggtctgtcataa

SEQ ID NO: 279344 - DNA, 33 bp, Homo sapien
ttaaccactctcaagataacaggtctgtcataa

SEQ ID NO: 279345 - DNA, 33 bp, Homo sapien
agtgccctctccttcactctaccacatttaaaa

SEQ ID NO: 279346 - DNA, 33 bp, Homo sapien
agtgccctctccttcattctaccacatttaaaa

SEQ ID NO: 279347 - DNA, 33 bp, Homo sapien
aaattgagaagataccagaaggaacatcttttt

SEQ ID NO: 279348 - DNA, 33 bp, Homo sapien
aaattgagaagataccggaaggaacatcttttt

SEQ ID NO: 279349 - DNA, 33 bp, Homo sapien
tgagtgaataattccaacatttttgaaattgag

SEQ ID NO: 279350 - DNA, 33 bp, Homo sapien
tgagtgaataattccaccatttttgaaattgag

SEQ ID NO: 279351 - DNA, 33 bp, Homo sapien
ctagagtaacctaaataatcaggagaacttgta

SEQ ID NO: 279352 - DNA, 33 bp, Homo sapien
ctagagtaacctaaatcatcaggagaacttgta

SEQ ID NO: 279353 - DNA, 33 bp, Homo sapien
ttggagagacaggttaaataaactaaacatact

SEQ ID NO: 279354 - DNA, 33 bp, Homo sapien
ttggagagacaggttacataaactaaacatact

SEQ ID NO: 279355 - DNA, 33 bp, Homo sapien
tgccagttccaatcttaaaatcctttgatggct

SEQ ID NO: 279356 - DNA, 33 bp, Homo sapien
tgccagttccaatcttgaaatcctttgatggct

SEQ ID NO: 279357 - DNA, 33 bp, Homo sapien
tctgcctcacttacccacacctcacatgtactt

SEQ ID NO: 279358 - DNA, 33 bp, Homo sapien
tctgcctcacttacccccacctcacatgtactt

SEQ ID NO: 279359 - DNA, 33 bp, Homo sapien
tccctgtttgtggatacggaaagagttcagacc

SEQ ID NO: 279360 - DNA, 33 bp, Homo sapien
tccctgtttgtggatatggaaagagttcagacc

SEQ ID NO: 279361 - DNA, 33 bp, Homo sapien
taagagtgtggcatgggagtccctcaggcctgg

SEQ ID NO: 279362 - DNA, 33 bp, Homo sapien
taagagtgtggcatggtagtccctcaggcctgg

SEQ ID NO: 279363 - DNA, 33 bp, Homo sapien
tgttaagtagacataaactagaatgacagaatg

SEQ ID NO: 279364 - DNA, 33 bp, Homo sapien
tgttaagtagacataagctagaatgacagaatg

SEQ ID NO: 279365 - DNA, 33 bp, Homo sapien
caagtacagaaatctgaaaagcacttaagaaac

SEQ ID NO: 279366 - DNA, 33 bp, Homo sapien
caagtacagaaatctgcaaagcacttaagaaac

SEQ ID NO: 279367 - DNA, 33 bp, Homo sapien
ttagacagttcctccaataattgcgtttgagaa

SEQ ID NO: 279368 - DNA, 33 bp, Homo sapien
ttagacagttcctccagtaattgcgtttgagaa

SEQ ID NO: 279369 - DNA, 33 bp, Homo sapien
ccaacagtgcaaaaaacgttccttttctctgca

SEQ ID NO: 279370 - DNA, 33 bp, Homo sapien
ccaacagtgcaaaaaatgttccttttctctgca

SEQ ID NO: 279371 - DNA, 33 bp, Homo sapien
gaggcaggggcttctcacaaagagtaaatgaac

SEQ ID NO: 279372 - DNA, 33 bp, Homo sapien
gaggcaggggcttctcgcaaagagtaaatgaac

SEQ ID NO: 279373 - DNA, 33 bp, Homo sapien
gctggctgcacacagaatcagttaaaactcagg

SEQ ID NO: 279374 - DNA, 33 bp, Homo sapien
gctggctgcacacagagtcagttaaaactcagg

SEQ ID NO: 279375 - DNA, 33 bp, Homo sapien
cacttctcagttgtaacgctgttggacctctct

SEQ ID NO: 279376 - DNA, 33 bp, Homo sapien
cacttctcagttgtaatgctgttggacctctct

SEQ ID NO: 279377 - DNA, 33 bp, Homo sapien
ttcatgtttttttgaaatcacaacagctactag

SEQ ID NO: 279378 - DNA, 33 bp, Homo sapien
ttcatgtttttttgaagtcacaacagctactag

SEQ ID NO: 279379 - DNA, 33 bp, Homo sapien
gtgtggtgatatctcaaagggctcctagagttc

SEQ ID NO: 279380 - DNA, 33 bp, Homo sapien
gtgtggtgatatctcagagggctcctagagttc

SEQ ID NO: 279381 - DNA, 33 bp, Homo sapien
gaatggagggcacacaaagaatgaggaatactg

SEQ ID NO: 279382 - DNA, 33 bp, Homo sapien
gaatggagggcacacagagaatgaggaatactg

SEQ ID NO: 279383 - DNA, 33 bp, Homo sapien
caccaacaagtgagaaagctggcgacagaagaa

SEQ ID NO: 279384 - DNA, 33 bp, Homo sapien
caccaacaagtgagaacgctggcgacagaagaa

SEQ ID NO: 279385 - DNA, 33 bp, Homo sapien
ttccatgggaataaacgccagttgcatcaacgg

SEQ ID NO: 279386 - DNA, 33 bp, Homo sapien
ttccatgggaataaactccagttgcatcaacgg

SEQ ID NO: 279387 - DNA, 33 bp, Homo sapien
ctttagtaacaccagcaatgtttagagatgggg

SEQ ID NO: 279388 - DNA, 33 bp, Homo sapien
ctttagtaacaccagcgatgtttagagatgggg

SEQ ID NO: 279389 - DNA, 33 bp, Homo sapien
aatttatttaaatgacagatgactgaaaggata

SEQ ID NO: 279390 - DNA, 33 bp, Homo sapien
aatttatttaaatgaccgatgactgaaaggata

SEQ ID NO: 279391 - DNA, 33 bp, Homo sapien
attttacttttacaaacgtgttgagaaataatt

SEQ ID NO: 279392 - DNA, 33 bp, Homo sapien
attttacttttacaaatgtgttgagaaataatt

SEQ ID NO: 279393 - DNA, 33 bp, Homo sapien
acccaatcttcacaacagttgtatgagtttgga

SEQ ID NO: 279394 - DNA, 33 bp, Homo sapien
acccaatcttcacaaccgttgtatgagtttgga

SEQ ID NO: 279395 - DNA, 33 bp, Homo sapien
taagaaatagacattacgatgttggtaactgac

SEQ ID NO: 279396 - DNA, 33 bp, Homo sapien
taagaaatagacattatgatgttggtaactgac

SEQ ID NO: 279397 - DNA, 33 bp, Homo sapien
ggctgacttgagaacaaacgggaactaaataag

SEQ ID NO: 279398 - DNA, 33 bp, Homo sapien
ggctgacttgagaacacacgggaactaaataag

SEQ ID NO: 279399 - DNA, 33 bp, Homo sapien
tggtacagctggaggaaataacagacacctgaa

SEQ ID NO: 279400 - DNA, 33 bp, Homo sapien
tggtacagctggaggagataacagacacctgaa

SEQ ID NO: 279401 - DNA, 33 bp, Homo sapien
tctgtttgtacacttaagcaaatctatgaaaac

SEQ ID NO: 279402 - DNA, 33 bp, Homo sapien
tctgtttgtacacttaggcaaatctatgaaaac

SEQ ID NO: 279403 - DNA, 33 bp, Homo sapien
ccttctgctgtcaaacacaagtgtcaggttttc

SEQ ID NO: 279404 - DNA, 33 bp, Homo sapien
ccttctgctgtcaaacgcaagtgtcaggttttc

SEQ ID NO: 279405 - DNA, 33 bp, Homo sapien
acatgatatatgaaaacctaagatgaccagtgt

SEQ ID NO: 279406 - DNA, 33 bp, Homo sapien
acatgatatatgaaaatctaagatgaccagtgt

SEQ ID NO: 279407 - DNA, 33 bp, Homo sapien
gttatccccatcacagccaaaatgatcctttta

SEQ ID NO: 279408 - DNA, 33 bp, Homo sapien
gttatccccatcacaggcaaaatgatcctttta

SEQ ID NO: 279409 - DNA, 33 bp, Homo sapien
tctcctaaatggtttccctaacttctgctgtca

SEQ ID NO: 279410 - DNA, 33 bp, Homo sapien
tctcctaaatggtttctctaacttctgctgtca

SEQ ID NO: 279411 - DNA, 33 bp, Homo sapien
catgccatgtatcctcaatgggaaatgggaggt

SEQ ID NO: 279412 - DNA, 33 bp, Homo sapien
catgccatgtatcctcgatgggaaatgggaggt

SEQ ID NO: 279413 - DNA, 33 bp, Homo sapien
ttaagggagctgtgaagactcaaaacttgattc

SEQ ID NO: 279414 - DNA, 33 bp, Homo sapien
ttaagggagctgtgaatactcaaaacttgattc

SEQ ID NO: 279415 - DNA, 33 bp, Homo sapien
aataatttgaaagttagaggtgactgaataaca

SEQ ID NO: 279416 - DNA, 33 bp, Homo sapien
aataatttgaaagttataggtgactgaataaca

SEQ ID NO: 279417 - DNA, 33 bp, Homo sapien
ttcagcatggattatacaccaagtgtctgattg

SEQ ID NO: 279418 - DNA, 33 bp, Homo sapien
ttcagcatggattatataccaagtgtctgattg

SEQ ID NO: 279419 - DNA, 33 bp, Homo sapien
aatatgagaggaatcactctaggcagagggggt

SEQ ID NO: 279420 - DNA, 33 bp, Homo sapien
aatatgagaggaatcattctaggcagagggggt

SEQ ID NO: 279421 - DNA, 33 bp, Homo sapien
gttctcccatttgttcccagaagctcaggagca

SEQ ID NO: 279422 - DNA, 33 bp, Homo sapien
gttctcccatttgttcgcagaagctcaggagca

SEQ ID NO: 279423 - DNA, 33 bp, Homo sapien
ccacttggagattatacccttagattctgaacc

SEQ ID NO: 279424 - DNA, 33 bp, Homo sapien
ccacttggagattatatccttagattctgaacc

SEQ ID NO: 279425 - DNA, 33 bp, Homo sapien
tgccaatactatgagacgtaactggtgcttgtg

SEQ ID NO: 279426 - DNA, 33 bp, Homo sapien
tgccaatactatgagatgtaactggtgcttgtg

SEQ ID NO: 279427 - DNA, 33 bp, Homo sapien
atcgtgggttgctgtcaccagtcttggtaatct

SEQ ID NO: 279428 - DNA, 33 bp, Homo sapien
atcgtgggttgctgtcgccagtcttggtaatct

SEQ ID NO: 279429 - DNA, 33 bp, Homo sapien
gtagaggccctcactgaatatttaaggaaagat

SEQ ID NO: 279430 - DNA, 33 bp, Homo sapien
gtagaggccctcactgcatatttaaggaaagat

SEQ ID NO: 279431 - DNA, 33 bp, Homo sapien
ttgacatctgcactacagacatttacaccagat

SEQ ID NO: 279432 - DNA, 33 bp, Homo sapien
ttgacatctgcactacggacatttacaccagat

SEQ ID NO: 279433 - DNA, 33 bp, Homo sapien
aaatacagtcccgaaactggagacaaagatgga

SEQ ID NO: 279434 - DNA, 33 bp, Homo sapien
aaatacagtcccgaaattggagacaaagatgga

SEQ ID NO: 279435 - DNA, 33 bp, Homo sapien
ggaatattaatcagcaatagaaagaaattagtt

SEQ ID NO: 279436 - DNA, 33 bp, Homo sapien
ggaatattaatcagcactagaaagaaattagtt

SEQ ID NO: 279437 - DNA, 33 bp, Homo sapien
cacatcattgtgattcaaagtccatagtctgca

SEQ ID NO: 279438 - DNA, 33 bp, Homo sapien
cacatcattgtgattcgaagtccatagtctgca

SEQ ID NO: 279439 - DNA, 33 bp, Homo sapien
tttaatggtggcagcactgacctattaaagtat

SEQ ID NO: 279440 - DNA, 33 bp, Homo sapien
tttaatggtggcagcattgacctattaaagtat

SEQ ID NO: 279441 - DNA, 33 bp, Homo sapien
tgcaaacctattttaacggatcattcttggtta

SEQ ID NO: 279442 - DNA, 33 bp, Homo sapien
tgcaaacctattttaatggatcattcttggtta

SEQ ID NO: 279443 - DNA, 33 bp, Homo sapien
tgtattcaacgccagaagaatacagtggatgat

SEQ ID NO: 279444 - DNA, 33 bp, Homo sapien
tgtattcaacgccagacgaatacagtggatgat

SEQ ID NO: 279445 - DNA, 33 bp, Homo sapien
aggaatattgtgttctcacgagtttcgttttct

SEQ ID NO: 279446 - DNA, 33 bp, Homo sapien
aggaatattgtgttctgacgagtttcgttttct

SEQ ID NO: 279447 - DNA, 33 bp, Homo sapien
ccttgtcttgctgggcagatgttctatgtcttg

SEQ ID NO: 279448 - DNA, 33 bp, Homo sapien
ccttgtcttgctgggccgatgttctatgtcttg

SEQ ID NO: 279449 - DNA, 33 bp, Homo sapien
agatgattagaggtaaaccaaaggagggttagg

SEQ ID NO: 279450 - DNA, 33 bp, Homo sapien
agatgattagaggtaagccaaaggagggttagg

SEQ ID NO: 279451 - DNA, 33 bp, Homo sapien
caggttccaggcttaaggatctagtaatcttac

SEQ ID NO: 279452 - DNA, 33 bp, Homo sapien
caggttccaggcttaatgatctagtaatcttac

SEQ ID NO: 279453 - DNA, 33 bp, Homo sapien
agctgccttatagagaccttttcaatgaatatt

SEQ ID NO: 279454 - DNA, 33 bp, Homo sapien
agctgccttatagagatcttttcaatgaatatt

SEQ ID NO: 279455 - DNA, 33 bp, Homo sapien
gggaaaatgaaaggccacttgacaatgagaagc

SEQ ID NO: 279456 - DNA, 33 bp, Homo sapien
gggaaaatgaaaggccgcttgacaatgagaagc

SEQ ID NO: 279457 - DNA, 33 bp, Homo sapien
acttgacagttttaaacctttttcacaagaatg

SEQ ID NO: 279458 - DNA, 33 bp, Homo sapien
acttgacagttttaaatctttttcacaagaatg

SEQ ID NO: 279459 - DNA, 33 bp, Homo sapien
tgaaataagcgaccaagcctttgcttttcttca

SEQ ID NO: 279460 - DNA, 33 bp, Homo sapien
tgaaataagcgaccaatcctttgcttttcttca

SEQ ID NO: 279461 - DNA, 33 bp, Homo sapien
cataccactctgaaagcagattcttaggagata

SEQ ID NO: 279462 - DNA, 33 bp, Homo sapien
cataccactctgaaaggagattcttaggagata

SEQ ID NO: 279463 - DNA, 33 bp, Homo sapien
atttagaatataaagcacagtagttcctgcaaa

SEQ ID NO: 279464 - DNA, 33 bp, Homo sapien
atttagaatataaagctcagtagttcctgcaaa

SEQ ID NO: 279465 - DNA, 33 bp, Homo sapien
acattaatgatgcctaacacatctcactcaagg

SEQ ID NO: 279466 - DNA, 33 bp, Homo sapien
acattaatgatgcctaccacatctcactcaagg

SEQ ID NO: 279467 - DNA, 33 bp, Homo sapien
taaatctcagaaaacacgtgtcttgggttcatt

SEQ ID NO: 279468 - DNA, 33 bp, Homo sapien
taaatctcagaaaacatgtgtcttgggttcatt

SEQ ID NO: 279469 - DNA, 33 bp, Homo sapien
ccaagggaatcttggaatatgcagctagagcag

SEQ ID NO: 279470 - DNA, 33 bp, Homo sapien
ccaagggaatcttggattatgcagctagagcag

SEQ ID NO: 279471 - DNA, 33 bp, Homo sapien
cccataagagtttcaactgtgaccatacacatt

SEQ ID NO: 279472 - DNA, 33 bp, Homo sapien
cccataagagtttcaattgtgaccatacacatt

SEQ ID NO: 279473 - DNA, 33 bp, Homo sapien
cttctctatgacacatcagtattattcaacctt

SEQ ID NO: 279474 - DNA, 33 bp, Homo sapien
cttctctatgacacatgagtattattcaacctt

SEQ ID NO: 279475 - DNA, 33 bp, Homo sapien
tgatctgtggactgggcaatgaatacagataaa

SEQ ID NO: 279476 - DNA, 33 bp, Homo sapien
tgatctgtggactggggaatgaatacagataaa

SEQ ID NO: 279477 - DNA, 33 bp, Homo sapien
tctagccagtgagatggaagctgatgtatagtg

SEQ ID NO: 279478 - DNA, 33 bp, Homo sapien
tctagccagtgagatgtaagctgatgtatagtg

SEQ ID NO: 279479 - DNA, 33 bp, Homo sapien
agcaggcaagaatggaacccacactgtgattta

SEQ ID NO: 279480 - DNA, 33 bp, Homo sapien
agcaggcaagaatggagcccacactgtgattta

SEQ ID NO: 279481 - DNA, 33 bp, Homo sapien
agtgctgcgataaacacacaagagcaagcattt

SEQ ID NO: 279482 - DNA, 33 bp, Homo sapien
agtgctgcgataaacatacaagagcaagcattt

SEQ ID NO: 279483 - DNA, 33 bp, Homo sapien
cgttttctattttctaaaatgttcactgatctc

SEQ ID NO: 279484 - DNA, 33 bp, Homo sapien
cgttttctattttctagaatgttcactgatctc

SEQ ID NO: 279485 - DNA, 33 bp, Homo sapien
agtgaaatccacgaagacactgttcatgcctgt

SEQ ID NO: 279486 - DNA, 33 bp, Homo sapien
agtgaaatccacgaaggcactgttcatgcctgt

SEQ ID NO: 279487 - DNA, 33 bp, Homo sapien
gggaatttatcctggaacaaggacacagaatat

SEQ ID NO: 279488 - DNA, 33 bp, Homo sapien
gggaatttatcctggagcaaggacacagaatat

SEQ ID NO: 279489 - DNA, 33 bp, Homo sapien
cctcaagggctggcaacgtagagggctctgaac

SEQ ID NO: 279490 - DNA, 33 bp, Homo sapien
cctcaagggctggcaatgtagagggctctgaac

SEQ ID NO: 279491 - DNA, 33 bp, Homo sapien
gctgctgcttcctgtcactttgtagtcttgtgg

SEQ ID NO: 279492 - DNA, 33 bp, Homo sapien
gctgctgcttcctgtcgctttgtagtcttgtgg

SEQ ID NO: 279493 - DNA, 33 bp, Homo sapien
cataggaatgacatgaaagccaagagaagaaaa

SEQ ID NO: 279494 - DNA, 33 bp, Homo sapien
cataggaatgacatgagagccaagagaagaaaa

SEQ ID NO: 279495 - DNA, 33 bp, Homo sapien
catcaaatgcaaaagcgaagtcaaagaagataa

SEQ ID NO: 279496 - DNA, 33 bp, Homo sapien
catcaaatgcaaaagctaagtcaaagaagataa

SEQ ID NO: 279497 - DNA, 33 bp, Homo sapien
caccttgagttggagacagaatggactatgaag

SEQ ID NO: 279498 - DNA, 33 bp, Homo sapien
caccttgagttggagatagaatggactatgaag

SEQ ID NO: 279499 - DNA, 33 bp, Homo sapien
ttgatatccaggaacagtccaagcattatctgt

SEQ ID NO: 279500 - DNA, 33 bp, Homo sapien
ttgatatccaggaacattccaagcattatctgt

SEQ ID NO: 279501 - DNA, 33 bp, Homo sapien
ctgagtcctttttcaacggactggtgagaaact

SEQ ID NO: 279502 - DNA, 33 bp, Homo sapien
ctgagtcctttttcaatggactggtgagaaact

SEQ ID NO: 279503 - DNA, 33 bp, Homo sapien
atgtgtacctataaacagtcttaaacacaaaat

SEQ ID NO: 279504 - DNA, 33 bp, Homo sapien
atgtgtacctataaactgtcttaaacacaaaat

SEQ ID NO: 279505 - DNA, 33 bp, Homo sapien
tctgtcagaagttatacaggtcagagacaagac

SEQ ID NO: 279506 - DNA, 33 bp, Homo sapien
tctgtcagaagttatataggtcagagacaagac

SEQ ID NO: 279507 - DNA, 33 bp, Homo sapien
tctcttgaggtctgtcacctgttttttgattgg

SEQ ID NO: 279508 - DNA, 33 bp, Homo sapien
tctcttgaggtctgtcgcctgttttttgattgg

SEQ ID NO: 279509 - DNA, 33 bp, Homo sapien
cattcctgctttgttgcaaaacccatctatgag

SEQ ID NO: 279510 - DNA, 33 bp, Homo sapien
cattcctgctttgttggaaaacccatctatgag

SEQ ID NO: 279511 - DNA, 33 bp, Homo sapien
tctatctccacttctgcagtatacctagcatga

SEQ ID NO: 279512 - DNA, 33 bp, Homo sapien
tctatctccacttctgtagtatacctagcatga

SEQ ID NO: 279513 - DNA, 33 bp, Homo sapien
gcacaaaatacaggaacgttttatggttcaatt

SEQ ID NO: 279514 - DNA, 33 bp, Homo sapien
gcacaaaatacaggaatgttttatggttcaatt

SEQ ID NO: 279515 - DNA, 33 bp, Homo sapien
aagttttactgccttacgcatctttatgaatct

SEQ ID NO: 279516 - DNA, 33 bp, Homo sapien
aagttttactgccttatgcatctttatgaatct

SEQ ID NO: 279517 - DNA, 33 bp, Homo sapien
caaaaatccacgtataacttttgactcaccaaa

SEQ ID NO: 279518 - DNA, 33 bp, Homo sapien
caaaaatccacgtatatcttttgactcaccaaa

SEQ ID NO: 279519 - DNA, 33 bp, Homo sapien
tgagtcagaagattaagggatgaagtatgaatg

SEQ ID NO: 279520 - DNA, 33 bp, Homo sapien
tgagtcagaagattaatggatgaagtatgaatg

SEQ ID NO: 279521 - DNA, 33 bp, Homo sapien
cactgggcatttcataggagctagacactagtg

SEQ ID NO: 279522 - DNA, 33 bp, Homo sapien
cactgggcatttcatatgagctagacactagtg

SEQ ID NO: 279523 - DNA, 33 bp, Homo sapien
ttaaatcactggcaacaccctataaccacagcc

SEQ ID NO: 279524 - DNA, 33 bp, Homo sapien
ttaaatcactggcaacgccctataaccacagcc

SEQ ID NO: 279525 - DNA, 33 bp, Homo sapien
agtagatgaacatataaaggtcctggacatttt

SEQ ID NO: 279526 - DNA, 33 bp, Homo sapien
agtagatgaacatatagaggtcctggacatttt

SEQ ID NO: 279527 - DNA, 33 bp, Homo sapien
tgggtaaggttaccccaaactctagattaacca

SEQ ID NO: 279528 - DNA, 33 bp, Homo sapien
tgggtaaggttacccccaactctagattaacca

SEQ ID NO: 279529 - DNA, 33 bp, Homo sapien
tctagattaaccaacactggcttgaattcaaaa

SEQ ID NO: 279530 - DNA, 33 bp, Homo sapien
tctagattaaccaacattggcttgaattcaaaa

SEQ ID NO: 279531 - DNA, 33 bp, Homo sapien
tggcagaataataaaccgctttcctaattttta

SEQ ID NO: 279532 - DNA, 33 bp, Homo sapien
tggcagaataataaactgctttcctaattttta

SEQ ID NO: 279533 - DNA, 33 bp, Homo sapien
gatttagcactaatacaatttcaaggaataggg

SEQ ID NO: 279534 - DNA, 33 bp, Homo sapien
gatttagcactaatacgatttcaaggaataggg

SEQ ID NO: 279535 - DNA, 33 bp, Homo sapien
ctaaaaacgattcctgcataccccacatacatg

SEQ ID NO: 279536 - DNA, 33 bp, Homo sapien
ctaaaaacgattcctggataccccacatacatg

SEQ ID NO: 279537 - DNA, 33 bp, Homo sapien
ttatagaaacctactgccaaattatttttcaaa

SEQ ID NO: 279538 - DNA, 33 bp, Homo sapien
ttatagaaacctactgtcaaattatttttcaaa

SEQ ID NO: 279539 - DNA, 33 bp, Homo sapien
actgacttagtgaaggccaacaacatggaacaa

SEQ ID NO: 279540 - DNA, 33 bp, Homo sapien
actgacttagtgaaggtcaacaacatggaacaa

SEQ ID NO: 279541 - DNA, 33 bp, Homo sapien
atgagtcatctggtccagaggttaccgtctgtg

SEQ ID NO: 279542 - DNA, 33 bp, Homo sapien
atgagtcatctggtccggaggttaccgtctgtg

SEQ ID NO: 279543 - DNA, 33 bp, Homo sapien
gagaaattcctgggaaaaccctggtgatctaat

SEQ ID NO: 279544 - DNA, 33 bp, Homo sapien
gagaaattcctgggaagaccctggtgatctaat

SEQ ID NO: 279545 - DNA, 33 bp, Homo sapien
atccccttctcataaaaggaaagctaattctag

SEQ ID NO: 279546 - DNA, 33 bp, Homo sapien
atccccttctcataaagggaaagctaattctag

SEQ ID NO: 279547 - DNA, 33 bp, Homo sapien
aaggaacattcatgcaaagaatacttgcaccat

SEQ ID NO: 279548 - DNA, 33 bp, Homo sapien
aaggaacattcatgcagagaatacttgcaccat

SEQ ID NO: 279549 - DNA, 33 bp, Homo sapien
tcaacacagattatcccgaagaaaagaaaggaa

SEQ ID NO: 279550 - DNA, 33 bp, Homo sapien
tcaacacagattatcctgaagaaaagaaaggaa

SEQ ID NO: 279551 - DNA, 33 bp, Homo sapien
ttgatatagaaagtcccctgtgattcattgtta

SEQ ID NO: 279552 - DNA, 33 bp, Homo sapien
ttgatatagaaagtcctctgtgattcattgtta

SEQ ID NO: 279553 - DNA, 33 bp, Homo sapien
acactggtttacctgaacctatagccaaaggtc

SEQ ID NO: 279554 - DNA, 33 bp, Homo sapien
acactggtttacctgatcctatagccaaaggtc

SEQ ID NO: 279555 - DNA, 33 bp, Homo sapien
gggtgagcatagccaaactccctcccttaccct

SEQ ID NO: 279556 - DNA, 33 bp, Homo sapien
gggtgagcatagccaacctccctcccttaccct

SEQ ID NO: 279557 - DNA, 33 bp, Homo sapien
aacattctctcttcagcatttgaggacagaagg

SEQ ID NO: 279558 - DNA, 33 bp, Homo sapien
aacattctctcttcagtatttgaggacagaagg

SEQ ID NO: 279559 - DNA, 33 bp, Homo sapien
aaatataatttcatacaaagacaagtcatacaa

SEQ ID NO: 279560 - DNA, 33 bp, Homo sapien
aaatataatttcataccaagacaagtcatacaa

SEQ ID NO: 279561 - DNA, 33 bp, Homo sapien
ctttagcatgggacaacattttctgtgactaaa

SEQ ID NO: 279562 - DNA, 33 bp, Homo sapien
ctttagcatgggacaatattttctgtgactaaa

SEQ ID NO: 279563 - DNA, 33 bp, Homo sapien
ctcattgatacactaacgttgaatggcactcct

SEQ ID NO: 279564 - DNA, 33 bp, Homo sapien
ctcattgatacactaatgttgaatggcactcct

SEQ ID NO: 279565 - DNA, 33 bp, Homo sapien
aattcccacaaaacaacgagccttgtgtacttg

SEQ ID NO: 279566 - DNA, 33 bp, Homo sapien
aattcccacaaaacaatgagccttgtgtacttg

SEQ ID NO: 279567 - DNA, 33 bp, Homo sapien
tatatggagcattcaaaaagaaaagaattgagg

SEQ ID NO: 279568 - DNA, 33 bp, Homo sapien
tatatggagcattcaagaagaaaagaattgagg

SEQ ID NO: 279569 - DNA, 33 bp, Homo sapien
cacagattgatcaacactgaagagactttgacc

SEQ ID NO: 279570 - DNA, 33 bp, Homo sapien
cacagattgatcaacattgaagagactttgacc

SEQ ID NO: 279571 - DNA, 33 bp, Homo sapien
tccggctgttttccaaagttagcagagcagtaa

SEQ ID NO: 279572 - DNA, 33 bp, Homo sapien
tccggctgttttccaaggttagcagagcagtaa

SEQ ID NO: 279573 - DNA, 33 bp, Homo sapien
gagatgcaaagaattcaaacagccaccgtttca

SEQ ID NO: 279574 - DNA, 33 bp, Homo sapien
gagatgcaaagaattcgaacagccaccgtttca

SEQ ID NO: 279575 - DNA, 33 bp, Homo sapien
acatggtctctgtgtcaaatatcaccagtggac

SEQ ID NO: 279576 - DNA, 33 bp, Homo sapien
acatggtctctgtgtcgaatatcaccagtggac

SEQ ID NO: 279577 - DNA, 33 bp, Homo sapien
atcaagcactataccactgaccccagccaaatg

SEQ ID NO: 279578 - DNA, 33 bp, Homo sapien
atcaagcactataccattgaccccagccaaatg

SEQ ID NO: 279579 - DNA, 33 bp, Homo sapien
gagtcaatttaaaacaataacctcaggtgggaa

SEQ ID NO: 279580 - DNA, 33 bp, Homo sapien
gagtcaatttaaaacagtaacctcaggtgggaa

SEQ ID NO: 279581 - DNA, 33 bp, Homo sapien
tgttactttcagcatcccacttctggttcaaac

SEQ ID NO: 279582 - DNA, 33 bp, Homo sapien
tgttactttcagcatctcacttctggttcaaac

SEQ ID NO: 279583 - DNA, 33 bp, Homo sapien
tcttcaaaagcttgagccatcattaagagtttt

SEQ ID NO: 279584 - DNA, 33 bp, Homo sapien
tcttcaaaagcttgagtcatcattaagagtttt

SEQ ID NO: 279585 - DNA, 33 bp, Homo sapien
gaggaataataagttaagttgaaatggctaagg

SEQ ID NO: 279586 - DNA, 33 bp, Homo sapien
gaggaataataagttaggttgaaatggctaagg

SEQ ID NO: 279587 - DNA, 33 bp, Homo sapien
acatgatgttcctggaaaaagagttaatggtca

SEQ ID NO: 279588 - DNA, 33 bp, Homo sapien
acatgatgttcctggagaaagagttaatggtca

SEQ ID NO: 279589 - DNA, 33 bp, Homo sapien
cttcatctactttccacatgcagcaagaacact

SEQ ID NO: 279590 - DNA, 33 bp, Homo sapien
cttcatctactttccatatgcagcaagaacact

SEQ ID NO: 279591 - DNA, 33 bp, Homo sapien
gaaaccaacattataaacctaactctcagcaac

SEQ ID NO: 279592 - DNA, 33 bp, Homo sapien
gaaaccaacattataagcctaactctcagcaac

SEQ ID NO: 279593 - DNA, 33 bp, Homo sapien
tggggactgaccaaaccactatctattgcctca

SEQ ID NO: 279594 - DNA, 33 bp, Homo sapien
tggggactgaccaaactactatctattgcctca

SEQ ID NO: 279595 - DNA, 33 bp, Homo sapien
taaatgcaaaaataaacgtagaaacaatgtgct

SEQ ID NO: 279596 - DNA, 33 bp, Homo sapien
taaatgcaaaaataaaggtagaaacaatgtgct

SEQ ID NO: 279597 - DNA, 33 bp, Homo sapien
tgtggtgaagattaagcatggcagacacagagt

SEQ ID NO: 279598 - DNA, 33 bp, Homo sapien
tgtggtgaagattaagtatggcagacacagagt

SEQ ID NO: 279599 - DNA, 33 bp, Homo sapien
ttttttccgaataagacgtaagagtggcaaaac

SEQ ID NO: 279600 - DNA, 33 bp, Homo sapien
ttttttccgaataagaggtaagagtggcaaaac

SEQ ID NO: 279601 - DNA, 33 bp, Homo sapien
agacatatctgtgaccgattaattcataaagaa

SEQ ID NO: 279602 - DNA, 33 bp, Homo sapien
agacatatctgtgacctattaattcataaagaa

SEQ ID NO: 279603 - DNA, 33 bp, Homo sapien
ccctgcccgcttgcaactggggtctggaaactg

SEQ ID NO: 279604 - DNA, 33 bp, Homo sapien
ccctgcccgcttgcaagtggggtctggaaactg

SEQ ID NO: 279605 - DNA, 33 bp, Homo sapien
catggaagagaagctaagcaggaaagaggttgc

SEQ ID NO: 279606 - DNA, 33 bp, Homo sapien
catggaagagaagctaggcaggaaagaggttgc

SEQ ID NO: 279607 - DNA, 33 bp, Homo sapien
gctgtccctcagtatccatgagcaattggttca

SEQ ID NO: 279608 - DNA, 33 bp, Homo sapien
gctgtccctcagtatctatgagcaattggttca

SEQ ID NO: 279609 - DNA, 33 bp, Homo sapien
gcttcatcctgagacacggggattttatgcaaa

SEQ ID NO: 279610 - DNA, 33 bp, Homo sapien
gcttcatcctgagacatggggattttatgcaaa

SEQ ID NO: 279611 - DNA, 33 bp, Homo sapien
caatccaacacagtaggtttcactatcaccatt

SEQ ID NO: 279612 - DNA, 33 bp, Homo sapien
caatccaacacagtagttttcactatcaccatt

SEQ ID NO: 279613 - DNA, 33 bp, Homo sapien
cacctgactgtgctaaaactagagcctatttct

SEQ ID NO: 279614 - DNA, 33 bp, Homo sapien
cacctgactgtgctaacactagagcctatttct

SEQ ID NO: 279615 - DNA, 33 bp, Homo sapien
atgaagctgatttgagaagagtagaccaagaaa

SEQ ID NO: 279616 - DNA, 33 bp, Homo sapien
atgaagctgatttgaggagagtagaccaagaaa

SEQ ID NO: 279617 - DNA, 33 bp, Homo sapien
tttaaggaacaaccacaaggatttaatatgtgt

SEQ ID NO: 279618 - DNA, 33 bp, Homo sapien
tttaaggaacaaccacgaggatttaatatgtgt

SEQ ID NO: 279619 - DNA, 33 bp, Homo sapien
aaccctaaggatatgccacagaggctgctaaca

SEQ ID NO: 279620 - DNA, 33 bp, Homo sapien
aaccctaaggatatgctacagaggctgctaaca

SEQ ID NO: 279621 - DNA, 33 bp, Homo sapien
tccctgctgggatgataaagtagttttgcactg

SEQ ID NO: 279622 - DNA, 33 bp, Homo sapien
tccctgctgggatgatgaagtagttttgcactg

SEQ ID NO: 279623 - DNA, 33 bp, Homo sapien
actatgaagtccatgaaaattatgggcattgta

SEQ ID NO: 279624 - DNA, 33 bp, Homo sapien
actatgaagtccatgagaattatgggcattgta

SEQ ID NO: 279625 - DNA, 33 bp, Homo sapien
ccacccattataagtagggccttttgggtaagt

SEQ ID NO: 279626 - DNA, 33 bp, Homo sapien
ccacccattataagtatggccttttgggtaagt

SEQ ID NO: 279627 - DNA, 33 bp, Homo sapien
gagctggactgatataaagttgaaatgcttcag

SEQ ID NO: 279628 - DNA, 33 bp, Homo sapien
gagctggactgatatagagttgaaatgcttcag

SEQ ID NO: 279629 - DNA, 33 bp, Homo sapien
ctatccaggccatactaaccttcttgcaacttc

SEQ ID NO: 279630 - DNA, 33 bp, Homo sapien
ctatccaggccatactgaccttcttgcaacttc

SEQ ID NO: 279631 - DNA, 33 bp, Homo sapien
tcctccagccaaaacacactaggcttatttggg

SEQ ID NO: 279632 - DNA, 33 bp, Homo sapien
tcctccagccaaaacatactaggcttatttggg

SEQ ID NO: 279633 - DNA, 33 bp, Homo sapien
ctctgaagttaagcaagttgcccaatgttacat

SEQ ID NO: 279634 - DNA, 33 bp, Homo sapien
ctctgaagttaagcaatttgcccaatgttacat

SEQ ID NO: 279635 - DNA, 33 bp, Homo sapien
gagggaggagtaattaagctatcgaacatctgc

SEQ ID NO: 279636 - DNA, 33 bp, Homo sapien
gagggaggagtaattaggctatcgaacatctgc

SEQ ID NO: 279637 - DNA, 33 bp, Homo sapien
tcttattagcccttaacgctaggaaagtttata

SEQ ID NO: 279638 - DNA, 33 bp, Homo sapien
tcttattagcccttaatgctaggaaagtttata

SEQ ID NO: 279639 - DNA, 33 bp, Homo sapien
acacttttgaaaatgaagccaagtggtattgat

SEQ ID NO: 279640 - DNA, 33 bp, Homo sapien
acacttttgaaaatgacgccaagtggtattgat

SEQ ID NO: 279641 - DNA, 33 bp, Homo sapien
attgattgttataccacgacaagaggcataaac

SEQ ID NO: 279642 - DNA, 33 bp, Homo sapien
attgattgttataccaggacaagaggcataaac

SEQ ID NO: 279643 - DNA, 33 bp, Homo sapien
aggttagagttaaacacaaaactagggactaaa

SEQ ID NO: 279644 - DNA, 33 bp, Homo sapien
aggttagagttaaacataaaactagggactaaa

SEQ ID NO: 279645 - DNA, 33 bp, Homo sapien
agagagtatttacagcacagctgagtagcccag

SEQ ID NO: 279646 - DNA, 33 bp, Homo sapien
agagagtatttacagcccagctgagtagcccag

SEQ ID NO: 279647 - DNA, 33 bp, Homo sapien
ggcccctgaatcctcaatattactctacacagt

SEQ ID NO: 279648 - DNA, 33 bp, Homo sapien
ggcccctgaatcctcagtattactctacacagt

SEQ ID NO: 279649 - DNA, 33 bp, Homo sapien
gtgttgggagttaaaaatggtgagctggaagga

SEQ ID NO: 279650 - DNA, 33 bp, Homo sapien
gtgttgggagttaaaagtggtgagctggaagga

SEQ ID NO: 279651 - DNA, 33 bp, Homo sapien
tgatgtccttgtttgaggatgaagagatgccaa

SEQ ID NO: 279652 - DNA, 33 bp, Homo sapien
tgatgtccttgtttgatgatgaagagatgccaa

SEQ ID NO: 279653 - DNA, 33 bp, Homo sapien
agtggagctcttgctaaacatattatgagtaat

SEQ ID NO: 279654 - DNA, 33 bp, Homo sapien
agtggagctcttgctatacatattatgagtaat

SEQ ID NO: 279655 - DNA, 33 bp, Homo sapien
atttatttatactaaaacatcaatggaaaaagt

SEQ ID NO: 279656 - DNA, 33 bp, Homo sapien
atttatttatactaaagcatcaatggaaaaagt

SEQ ID NO: 279657 - DNA, 33 bp, Homo sapien
gtctttttgaaggaaaccatcagttaacagtca

SEQ ID NO: 279658 - DNA, 33 bp, Homo sapien
gtctttttgaaggaaagcatcagttaacagtca

SEQ ID NO: 279659 - DNA, 33 bp, Homo sapien
aaacctttaggaaaaccgtgtagcaatagcaaa

SEQ ID NO: 279660 - DNA, 33 bp, Homo sapien
aaacctttaggaaaactgtgtagcaatagcaaa

SEQ ID NO: 279661 - DNA, 33 bp, Homo sapien
ttcagaaataatgttgaaacagatatctgggca

SEQ ID NO: 279662 - DNA, 33 bp, Homo sapien
ttcagaaataatgttggaacagatatctgggca

SEQ ID NO: 279663 - DNA, 33 bp, Homo sapien
tcatccaactctaaaacgtgcccactttaagac

SEQ ID NO: 279664 - DNA, 33 bp, Homo sapien
tcatccaactctaaaatgtgcccactttaagac

SEQ ID NO: 279665 - DNA, 33 bp, Homo sapien
ataacaagcaatcctgaaatcttactgactttc

SEQ ID NO: 279666 - DNA, 33 bp, Homo sapien
ataacaagcaatcctggaatcttactgactttc

SEQ ID NO: 279667 - DNA, 33 bp, Homo sapien
cacacaggtggaaagaaaccatagtgaattttg

SEQ ID NO: 279668 - DNA, 33 bp, Homo sapien
cacacaggtggaaagagaccatagtgaattttg

SEQ ID NO: 279669 - DNA, 33 bp, Homo sapien
catctctttctctcacaatgcacgcgtaaatca

SEQ ID NO: 279670 - DNA, 33 bp, Homo sapien
catctctttctctcacgatgcacgcgtaaatca

SEQ ID NO: 279671 - DNA, 33 bp, Homo sapien
tggaactgttccctgaataacactttgtacttg

SEQ ID NO: 279672 - DNA, 33 bp, Homo sapien
tggaactgttccctgagtaacactttgtacttg

SEQ ID NO: 279673 - DNA, 33 bp, Homo sapien
tctcctgataggtactaaaaggttatactaaat

SEQ ID NO: 279674 - DNA, 33 bp, Homo sapien
tctcctgataggtactgaaaggttatactaaat

SEQ ID NO: 279675 - DNA, 33 bp, Homo sapien
gataaaaggctaaacaaaagttgaaatgcccaa

SEQ ID NO: 279676 - DNA, 33 bp, Homo sapien
gataaaaggctaaacagaagttgaaatgcccaa

SEQ ID NO: 279677 - DNA, 33 bp, Homo sapien
attaattatgacataaactgaatagatataaca

SEQ ID NO: 279678 - DNA, 33 bp, Homo sapien
attaattatgacataacctgaatagatataaca

SEQ ID NO: 279679 - DNA, 33 bp, Homo sapien
aaatatattacagggcacagagaagataataaa

SEQ ID NO: 279680 - DNA, 33 bp, Homo sapien
aaatatattacagggcgcagagaagataataaa

SEQ ID NO: 279681 - DNA, 33 bp, Homo sapien
gttccttatgcttagaaatcatgcaaaaaagac

SEQ ID NO: 279682 - DNA, 33 bp, Homo sapien
gttccttatgcttagagatcatgcaaaaaagac

SEQ ID NO: 279683 - DNA, 33 bp, Homo sapien
tccccatttctgaaaccgtgaggacttgctaaa

SEQ ID NO: 279684 - DNA, 33 bp, Homo sapien
tccccatttctgaaactgtgaggacttgctaaa

SEQ ID NO: 279685 - DNA, 33 bp, Homo sapien
gtctccccacagaatcagatatactctctagtt

SEQ ID NO: 279686 - DNA, 33 bp, Homo sapien
gtctccccacagaatcggatatactctctagtt

SEQ ID NO: 279687 - DNA, 33 bp, Homo sapien
aatcttaggttttcacagcagacctgctaagct

SEQ ID NO: 279688 - DNA, 33 bp, Homo sapien
aatcttaggttttcacggcagacctgctaagct

SEQ ID NO: 279689 - DNA, 33 bp, Homo sapien
ctcaataattgatacaaattagtttcctgacta

SEQ ID NO: 279690 - DNA, 33 bp, Homo sapien
ctcaataattgatacagattagtttcctgacta

SEQ ID NO: 279691 - DNA, 33 bp, Homo sapien
aaggagtaaaaatttaaatacagaactgtctta

SEQ ID NO: 279692 - DNA, 33 bp, Homo sapien
aaggagtaaaaatttatatacagaactgtctta

SEQ ID NO: 279693 - DNA, 33 bp, Homo sapien
gcaccctcagtagcctaaacagaatttatttta

SEQ ID NO: 279694 - DNA, 33 bp, Homo sapien
gcaccctcagtagcctgaacagaatttatttta

SEQ ID NO: 279695 - DNA, 33 bp, Homo sapien
cttgccctattcaaaaatttctcaaatccgttg

SEQ ID NO: 279696 - DNA, 33 bp, Homo sapien
cttgccctattcaaaagtttctcaaatccgttg

SEQ ID NO: 279697 - DNA, 33 bp, Homo sapien
tgcaatatattcattcactatgtattgagcacc

SEQ ID NO: 279698 - DNA, 33 bp, Homo sapien
tgcaatatattcattcgctatgtattgagcacc

SEQ ID NO: 279699 - DNA, 33 bp, Homo sapien
agccatattcacaataacaaagccgtggaatta

SEQ ID NO: 279700 - DNA, 33 bp, Homo sapien
agccatattcacaatagcaaagccgtggaatta

SEQ ID NO: 279701 - DNA, 33 bp, Homo sapien
gacaatttcaagcataaacaaaagacaaaagta

SEQ ID NO: 279702 - DNA, 33 bp, Homo sapien
gacaatttcaagcatacacaaaagacaaaagta

SEQ ID NO: 279703 - DNA, 33 bp, Homo sapien
gtatagatgcatactgaagtacgtaggagtgaa

SEQ ID NO: 279704 - DNA, 33 bp, Homo sapien
gtatagatgcatactggagtacgtaggagtgaa

SEQ ID NO: 279705 - DNA, 33 bp, Homo sapien
cttttttttttcatgcaatcgacttaccactga

SEQ ID NO: 279706 - DNA, 33 bp, Homo sapien
cttttttttttcatgcgatcgacttaccactga

SEQ ID NO: 279707 - DNA, 33 bp, Homo sapien
cagctttaacttgaagcatcttacaaattgtac

SEQ ID NO: 279708 - DNA, 33 bp, Homo sapien
cagctttaacttgaaggatcttacaaattgtac

SEQ ID NO: 279709 - DNA, 33 bp, Homo sapien
tttaacaggctgagcacaagccatgagagagag

SEQ ID NO: 279710 - DNA, 33 bp, Homo sapien
tttaacaggctgagcataagccatgagagagag

SEQ ID NO: 279711 - DNA, 33 bp, Homo sapien
ttcctagtcagaaagacctcagtcacaatcctg

SEQ ID NO: 279712 - DNA, 33 bp, Homo sapien
ttcctagtcagaaagatctcagtcacaatcctg

SEQ ID NO: 279713 - DNA, 33 bp, Homo sapien
taactccttacatagtcaaaatgcccttaacaa

SEQ ID NO: 279714 - DNA, 33 bp, Homo sapien
taactccttacatagttaaaatgcccttaacaa

SEQ ID NO: 279715 - DNA, 33 bp, Homo sapien
cagagctcgaagacacagcttttgaattaaccc

SEQ ID NO: 279716 - DNA, 33 bp, Homo sapien
cagagctcgaagacacggcttttgaattaaccc

SEQ ID NO: 279717 - DNA, 33 bp, Homo sapien
tcagagtcctcttcgcacctctgctacctcccc

SEQ ID NO: 279718 - DNA, 33 bp, Homo sapien
tcagagtcctcttcgcgcctctgctacctcccc

SEQ ID NO: 279719 - DNA, 33 bp, Homo sapien
caaagctatgctgagaatatacccagagaaata

SEQ ID NO: 279720 - DNA, 33 bp, Homo sapien
caaagctatgctgagagtatacccagagaaata

SEQ ID NO: 279721 - DNA, 33 bp, Homo sapien
aatgtcttgtggtctaataccctttaatttcca

SEQ ID NO: 279722 - DNA, 33 bp, Homo sapien
aatgtcttgtggtctattaccctttaatttcca

SEQ ID NO: 279723 - DNA, 33 bp, Homo sapien
catgcaatgtaaatgacaggctttagggctcta

SEQ ID NO: 279724 - DNA, 33 bp, Homo sapien
catgcaatgtaaatgataggctttagggctcta

SEQ ID NO: 279725 - DNA, 33 bp, Homo sapien
ttttctacggacaagacgagaatgtggaaaata

SEQ ID NO: 279726 - DNA, 33 bp, Homo sapien
ttttctacggacaagatgagaatgtggaaaata

SEQ ID NO: 279727 - DNA, 33 bp, Homo sapien
caaagaaagcacttgcacaattgtttgggttgt

SEQ ID NO: 279728 - DNA, 33 bp, Homo sapien
caaagaaagcacttgcgcaattgtttgggttgt

SEQ ID NO: 279729 - DNA, 33 bp, Homo sapien
gtgtctctttcatatacagcttacattttgttg

SEQ ID NO: 279730 - DNA, 33 bp, Homo sapien
gtgtctctttcatatagagcttacattttgttg

SEQ ID NO: 279731 - DNA, 33 bp, Homo sapien
tcctataaaacttgaaatgactgcttagcatta

SEQ ID NO: 279732 - DNA, 33 bp, Homo sapien
tcctataaaacttgaagtgactgcttagcatta

SEQ ID NO: 279733 - DNA, 33 bp, Homo sapien
agaagagccagaataaactagaaacacttccaa

SEQ ID NO: 279734 - DNA, 33 bp, Homo sapien
agaagagccagaataatctagaaacacttccaa

SEQ ID NO: 279735 - DNA, 33 bp, Homo sapien
atttttcaagatgactcaataaagtggtatgga

SEQ ID NO: 279736 - DNA, 33 bp, Homo sapien
atttttcaagatgacttaataaagtggtatgga

SEQ ID NO: 279737 - DNA, 33 bp, Homo sapien
gatcaggtaactcaacactcttttcttgggcat

SEQ ID NO: 279738 - DNA, 33 bp, Homo sapien
gatcaggtaactcaactctcttttcttgggcat

SEQ ID NO: 279739 - DNA, 33 bp, Homo sapien
acatttataacctccaacaactataaagtctca

SEQ ID NO: 279740 - DNA, 33 bp, Homo sapien
acatttataacctccagcaactataaagtctca

SEQ ID NO: 279741 - DNA, 33 bp, Homo sapien
ggcagaatcagttaaaacagtagcagtgaagga

SEQ ID NO: 279742 - DNA, 33 bp, Homo sapien
ggcagaatcagttaaagcagtagcagtgaagga

SEQ ID NO: 279743 - DNA, 33 bp, Homo sapien
gagattatagaagcaaacataacatggaaagaa

SEQ ID NO: 279744 - DNA, 33 bp, Homo sapien
gagattatagaagcaagcataacatggaaagaa

SEQ ID NO: 279745 - DNA, 33 bp, Homo sapien
actgaggcatatataccgattgtctttctaagt

SEQ ID NO: 279746 - DNA, 33 bp, Homo sapien
actgaggcatatatactgattgtctttctaagt

SEQ ID NO: 279747 - DNA, 33 bp, Homo sapien
tgtgtcccttcctcgaggtcagctatcagagtt

SEQ ID NO: 279748 - DNA, 33 bp, Homo sapien
tgtgtcccttcctcgatgtcagctatcagagtt

SEQ ID NO: 279749 - DNA, 33 bp, Homo sapien
gtgactatcctactaaatatcttactcaacgaa

SEQ ID NO: 279750 - DNA, 33 bp, Homo sapien
gtgactatcctactaagtatcttactcaacgaa

SEQ ID NO: 279751 - DNA, 33 bp, Homo sapien
acagattgcaagaaaaactttgtgaagtacata

SEQ ID NO: 279752 - DNA, 33 bp, Homo sapien
acagattgcaagaaaatctttgtgaagtacata

SEQ ID NO: 279753 - DNA, 33 bp, Homo sapien
acagtaagggcctgatgagagaactcgatgctg

SEQ ID NO: 279754 - DNA, 33 bp, Homo sapien
acagtaagggcctgattagagaactcgatgctg

SEQ ID NO: 279755 - DNA, 33 bp, Homo sapien
ataaggattacttcatcaagtgcatttattcag

SEQ ID NO: 279756 - DNA, 33 bp, Homo sapien
ataaggattacttcattaagtgcatttattcag

SEQ ID NO: 279757 - DNA, 33 bp, Homo sapien
actgctacccctaaaacaggagaaactgacagg

SEQ ID NO: 279758 - DNA, 33 bp, Homo sapien
actgctacccctaaaataggagaaactgacagg

SEQ ID NO: 279759 - DNA, 33 bp, Homo sapien
caccatatatattttcaaaatgatgtaaaaatc

SEQ ID NO: 279760 - DNA, 33 bp, Homo sapien
caccatatatattttccaaatgatgtaaaaatc

SEQ ID NO: 279761 - DNA, 33 bp, Homo sapien
acctattaatcaataaaaggtaaacatctgaac

SEQ ID NO: 279762 - DNA, 33 bp, Homo sapien
acctattaatcaataagaggtaaacatctgaac

SEQ ID NO: 279763 - DNA, 33 bp, Homo sapien
tgaactttgggaaaaactcatgagggaaatgca

SEQ ID NO: 279764 - DNA, 33 bp, Homo sapien
tgaactttgggaaaaattcatgagggaaatgca

SEQ ID NO: 279765 - DNA, 33 bp, Homo sapien
gactacccagattggaaatggaagttccacacc

SEQ ID NO: 279766 - DNA, 33 bp, Homo sapien
gactacccagattggatatggaagttccacacc

SEQ ID NO: 279767 - DNA, 33 bp, Homo sapien
ttcaacaggaagaccacattaaaacaatggaag

SEQ ID NO: 279768 - DNA, 33 bp, Homo sapien
ttcaacaggaagaccagattaaaacaatggaag

SEQ ID NO: 279769 - DNA, 33 bp, Homo sapien
catgcatatggaggctcagatgttccacagtct

SEQ ID NO: 279770 - DNA, 33 bp, Homo sapien
catgcatatggaggcttagatgttccacagtct

SEQ ID NO: 279771 - DNA, 33 bp, Homo sapien
taagactcctgttagaccattctatgtggccaa

SEQ ID NO: 279772 - DNA, 33 bp, Homo sapien
taagactcctgttagatcattctatgtggccaa

SEQ ID NO: 279773 - DNA, 33 bp, Homo sapien
cttttagagagcttaacgttttgattcatccgt

SEQ ID NO: 279774 - DNA, 33 bp, Homo sapien
cttttagagagcttaatgttttgattcatccgt

SEQ ID NO: 279775 - DNA, 33 bp, Homo sapien
agttattccaggaatacaaggctgattgaatgt

SEQ ID NO: 279776 - DNA, 33 bp, Homo sapien
agttattccaggaatataaggctgattgaatgt

SEQ ID NO: 279777 - DNA, 33 bp, Homo sapien
tggatgatttcaaccaagttatgataattaaaa

SEQ ID NO: 279778 - DNA, 33 bp, Homo sapien
tggatgatttcaaccaggttatgataattaaaa

SEQ ID NO: 279779 - DNA, 33 bp, Homo sapien
acagatccaaatgataacagttagcaaatgctg

SEQ ID NO: 279780 - DNA, 33 bp, Homo sapien
acagatccaaatgatagcagttagcaaatgctg

SEQ ID NO: 279781 - DNA, 33 bp, Homo sapien
gtcactgccttgctcaagtaggttaagaagcct

SEQ ID NO: 279782 - DNA, 33 bp, Homo sapien
gtcactgccttgctcaggtaggttaagaagcct

SEQ ID NO: 279783 - DNA, 33 bp, Homo sapien
gactggtggcttaatgaaaggaagtaagacctg

SEQ ID NO: 279784 - DNA, 33 bp, Homo sapien
gactggtggcttaatggaaggaagtaagacctg

SEQ ID NO: 279785 - DNA, 33 bp, Homo sapien
aattcaaatgttaaaactctaccttgcagtact

SEQ ID NO: 279786 - DNA, 33 bp, Homo sapien
aattcaaatgttaaaattctaccttgcagtact

SEQ ID NO: 279787 - DNA, 33 bp, Homo sapien
ttttatcagtgacggaaatcaaattttaccttt

SEQ ID NO: 279788 - DNA, 33 bp, Homo sapien
ttttatcagtgacggatatcaaattttaccttt

SEQ ID NO: 279789 - DNA, 33 bp, Homo sapien
tgtccctctgcctccccaaacaagaaaatctct

SEQ ID NO: 279790 - DNA, 33 bp, Homo sapien
tgtccctctgcctccctaaacaagaaaatctct

SEQ ID NO: 279791 - DNA, 33 bp, Homo sapien
gctcgcctcaaaggaccggaagagattttcttg

SEQ ID NO: 279792 - DNA, 33 bp, Homo sapien
gctcgcctcaaaggactggaagagattttcttg

SEQ ID NO: 279793 - DNA, 33 bp, Homo sapien
cctatacactacaaaactgattttcttggcttc

SEQ ID NO: 279794 - DNA, 33 bp, Homo sapien
cctatacactacaaaattgattttcttggcttc

SEQ ID NO: 279795 - DNA, 33 bp, Homo sapien
aatatagttaggttcacgattttcagatttttc

SEQ ID NO: 279796 - DNA, 33 bp, Homo sapien
aatatagttaggttcatgattttcagatttttc

SEQ ID NO: 279797 - DNA, 33 bp, Homo sapien
ctgagacttattcttgcatcattttttagctct

SEQ ID NO: 279798 - DNA, 33 bp, Homo sapien
ctgagacttattcttgtatcattttttagctct

SEQ ID NO: 279799 - DNA, 33 bp, Homo sapien
aatatgtagaccttgaaaagacttgcctttaaa

SEQ ID NO: 279800 - DNA, 33 bp, Homo sapien
aatatgtagaccttgagaagacttgcctttaaa

SEQ ID NO: 279801 - DNA, 33 bp, Homo sapien
gtaatcgatttttaaaatgggccagtcctccaa

SEQ ID NO: 279802 - DNA, 33 bp, Homo sapien
gtaatcgatttttaaattgggccagtcctccaa

SEQ ID NO: 279803 - DNA, 33 bp, Homo sapien
tgtgacatgagaaaaaattgttggctatttgtt

SEQ ID NO: 279804 - DNA, 33 bp, Homo sapien
tgtgacatgagaaaaacttgttggctatttgtt

SEQ ID NO: 279805 - DNA, 33 bp, Homo sapien
tctagctttaactctacgggccatattatatga

SEQ ID NO: 279806 - DNA, 33 bp, Homo sapien
tctagctttaactctatgggccatattatatga

SEQ ID NO: 279807 - DNA, 33 bp, Homo sapien
ttctgtagaacatgcaatcttataatatctaaa

SEQ ID NO: 279808 - DNA, 33 bp, Homo sapien
ttctgtagaacatgcagtcttataatatctaaa

SEQ ID NO: 279809 - DNA, 33 bp, Homo sapien
gccaaagaaacacatacgacatctctagggtat

SEQ ID NO: 279810 - DNA, 33 bp, Homo sapien
gccaaagaaacacatatgacatctctagggtat

SEQ ID NO: 279811 - DNA, 33 bp, Homo sapien
catttacacctcattaacaagaaggagaattgc

SEQ ID NO: 279812 - DNA, 33 bp, Homo sapien
catttacacctcattagcaagaaggagaattgc

SEQ ID NO: 279813 - DNA, 33 bp, Homo sapien
ccatttcccacagtacacaattcaaacactact

SEQ ID NO: 279814 - DNA, 33 bp, Homo sapien
ccatttcccacagtacgcaattcaaacactact

SEQ ID NO: 279815 - DNA, 33 bp, Homo sapien
gacttggaagtagagcaaccagttaggatgcca

SEQ ID NO: 279816 - DNA, 33 bp, Homo sapien
gacttggaagtagagcgaccagttaggatgcca

SEQ ID NO: 279817 - DNA, 33 bp, Homo sapien
accatatctgtggctaagtgctcttaattctgt

SEQ ID NO: 279818 - DNA, 33 bp, Homo sapien
accatatctgtggctaggtgctcttaattctgt

SEQ ID NO: 279819 - DNA, 33 bp, Homo sapien
gtccttctgaatatcgaatagagaaggaaacca

SEQ ID NO: 279820 - DNA, 33 bp, Homo sapien
gtccttctgaatatcggatagagaaggaaacca

SEQ ID NO: 279821 - DNA, 33 bp, Homo sapien
gcaatagctagataacaagcatacatacccaca

SEQ ID NO: 279822 - DNA, 33 bp, Homo sapien
gcaatagctagataaccagcatacatacccaca

SEQ ID NO: 279823 - DNA, 33 bp, Homo sapien
gaataaaaatgcaagaaagatctgtcttagcct

SEQ ID NO: 279824 - DNA, 33 bp, Homo sapien
gaataaaaatgcaagagagatctgtcttagcct

SEQ ID NO: 279825 - DNA, 33 bp, Homo sapien
gtatgacccagagcacaatgatgccattcaata

SEQ ID NO: 279826 - DNA, 33 bp, Homo sapien
gtatgacccagagcacgatgatgccattcaata

SEQ ID NO: 279827 - DNA, 33 bp, Homo sapien
ttatgtatgtcaataaagatgccaacaacaact

SEQ ID NO: 279828 - DNA, 33 bp, Homo sapien
ttatgtatgtcaataaggatgccaacaacaact

SEQ ID NO: 279829 - DNA, 33 bp, Homo sapien
atgatgtagtatagaaatgggaaaataggctct

SEQ ID NO: 279830 - DNA, 33 bp, Homo sapien
atgatgtagtatagaagtgggaaaataggctct

SEQ ID NO: 279831 - DNA, 33 bp, Homo sapien
tttccctggttgatgaagtgttaggtacgttag

SEQ ID NO: 279832 - DNA, 33 bp, Homo sapien
tttccctggttgatgaggtgttaggtacgttag

SEQ ID NO: 279833 - DNA, 33 bp, Homo sapien
tctgcaccagatacccaactcaatagatgtgat

SEQ ID NO: 279834 - DNA, 33 bp, Homo sapien
tctgcaccagatacccgactcaatagatgtgat

SEQ ID NO: 279835 - DNA, 33 bp, Homo sapien
taatcaagtatagatgccagagggcttgtctca

SEQ ID NO: 279836 - DNA, 33 bp, Homo sapien
taatcaagtatagatgtcagagggcttgtctca

SEQ ID NO: 279837 - DNA, 33 bp, Homo sapien
gcagctcacactcgcaatagggctggggatcct

SEQ ID NO: 279838 - DNA, 33 bp, Homo sapien
gcagctcacactcgcagtagggctggggatcct

SEQ ID NO: 279839 - DNA, 33 bp, Homo sapien
cactctccacataaaaatattcaaataggctgg

SEQ ID NO: 279840 - DNA, 33 bp, Homo sapien
cactctccacataaaattattcaaataggctgg

SEQ ID NO: 279841 - DNA, 33 bp, Homo sapien
cattttgtgataattaactgaatcagacacatt

SEQ ID NO: 279842 - DNA, 33 bp, Homo sapien
cattttgtgataattagctgaatcagacacatt

SEQ ID NO: 279843 - DNA, 33 bp, Homo sapien
ggtatggagattcacacgggaaataaataagtt

SEQ ID NO: 279844 - DNA, 33 bp, Homo sapien
ggtatggagattcacaggggaaataaataagtt

SEQ ID NO: 279845 - DNA, 33 bp, Homo sapien
tacaatatcttgaaagcatcatcttaaggttta

SEQ ID NO: 279846 - DNA, 33 bp, Homo sapien
tacaatatcttgaaagtatcatcttaaggttta

SEQ ID NO: 279847 - DNA, 33 bp, Homo sapien
ggtaaaactcctgatcactcttaggtctcagct

SEQ ID NO: 279848 - DNA, 33 bp, Homo sapien
ggtaaaactcctgatctctcttaggtctcagct

SEQ ID NO: 279849 - DNA, 33 bp, Homo sapien
cttcaacatgatacatcagatattccatgatat

SEQ ID NO: 279850 - DNA, 33 bp, Homo sapien
cttcaacatgatacatgagatattccatgatat

SEQ ID NO: 279851 - DNA, 33 bp, Homo sapien
catcagatgaatcaaacctctagcctcttccat

SEQ ID NO: 279852 - DNA, 33 bp, Homo sapien
catcagatgaatcaaagctctagcctcttccat

SEQ ID NO: 279853 - DNA, 33 bp, Homo sapien
agagctcatttgtccactgatgtcttacagatg

SEQ ID NO: 279854 - DNA, 33 bp, Homo sapien
agagctcatttgtccattgatgtcttacagatg

SEQ ID NO: 279855 - DNA, 33 bp, Homo sapien
cttaatggattcctcaatgaataaggtaacagt

SEQ ID NO: 279856 - DNA, 33 bp, Homo sapien
cttaatggattcctcagtgaataaggtaacagt

SEQ ID NO: 279857 - DNA, 33 bp, Homo sapien
atgtggtttactcaaacaacagcaagcgctctc

SEQ ID NO: 279858 - DNA, 33 bp, Homo sapien
atgtggtttactcaaagaacagcaagcgctctc

SEQ ID NO: 279859 - DNA, 33 bp, Homo sapien
tagcatactttttcaacaattaggacttttgtg

SEQ ID NO: 279860 - DNA, 33 bp, Homo sapien
tagcatactttttcaagaattaggacttttgtg

SEQ ID NO: 279861 - DNA, 33 bp, Homo sapien
ttgcattcagttcatgccactttattcattttt

SEQ ID NO: 279862 - DNA, 33 bp, Homo sapien
ttgcattcagttcatgtcactttattcattttt

SEQ ID NO: 279863 - DNA, 33 bp, Homo sapien
attgtgtgagcatgtaaatagttgatactcagt

SEQ ID NO: 279864 - DNA, 33 bp, Homo sapien
attgtgtgagcatgtatatagttgatactcagt

SEQ ID NO: 279865 - DNA, 33 bp, Homo sapien
gaccaggattatgtgacacttcattgtgtgagc

SEQ ID NO: 279866 - DNA, 33 bp, Homo sapien
gaccaggattatgtgatacttcattgtgtgagc

SEQ ID NO: 279867 - DNA, 33 bp, Homo sapien
aaagtagctatagaaaaagtgaaattgattgca

SEQ ID NO: 279868 - DNA, 33 bp, Homo sapien
aaagtagctatagaaagagtgaaattgattgca

SEQ ID NO: 279869 - DNA, 33 bp, Homo sapien
gttgaccattaggcttcatcctggttaccagtt

SEQ ID NO: 279870 - DNA, 33 bp, Homo sapien
gttgaccattaggctttatcctggttaccagtt

SEQ ID NO: 279871 - DNA, 33 bp, Homo sapien
gcctctcttaataaaacagaaaacagcatcctc

SEQ ID NO: 279872 - DNA, 33 bp, Homo sapien
gcctctcttaataaaatagaaaacagcatcctc

SEQ ID NO: 279873 - DNA, 33 bp, Homo sapien
gattcagctgtgttagccagccattctttccca

SEQ ID NO: 279874 - DNA, 33 bp, Homo sapien
gattcagctgtgttagtcagccattctttccca

SEQ ID NO: 279875 - DNA, 33 bp, Homo sapien
tttcctgaaaaataaaatggactgtattagtct

SEQ ID NO: 279876 - DNA, 33 bp, Homo sapien
tttcctgaaaaataaagtggactgtattagtct

SEQ ID NO: 279877 - DNA, 33 bp, Homo sapien
ttaagcagagataggtcaaagcatagtaaatcc

SEQ ID NO: 279878 - DNA, 33 bp, Homo sapien
ttaagcagagataggttaaagcatagtaaatcc

SEQ ID NO: 279879 - DNA, 33 bp, Homo sapien
cgtgaatttttatagccgcattgtaatccattc

SEQ ID NO: 279880 - DNA, 33 bp, Homo sapien
cgtgaatttttatagctgcattgtaatccattc

SEQ ID NO: 279881 - DNA, 33 bp, Homo sapien
tgctgcctccattatcaacagtcagaacggtca

SEQ ID NO: 279882 - DNA, 33 bp, Homo sapien
tgctgcctccattatcgacagtcagaacggtca

SEQ ID NO: 279883 - DNA, 33 bp, Homo sapien
agaggaaaggagttcaaacatctggcacaagtg

SEQ ID NO: 279884 - DNA, 33 bp, Homo sapien
agaggaaaggagttcacacatctggcacaagtg

SEQ ID NO: 279885 - DNA, 33 bp, Homo sapien
actaaaaaaataccaacgatcttctgaatcttc

SEQ ID NO: 279886 - DNA, 33 bp, Homo sapien
actaaaaaaataccaatgatcttctgaatcttc

SEQ ID NO: 279887 - DNA, 33 bp, Homo sapien
ttaacagataaattgcccctgtatttctataga

SEQ ID NO: 279888 - DNA, 33 bp, Homo sapien
ttaacagataaattgcgcctgtatttctataga

SEQ ID NO: 279889 - DNA, 33 bp, Homo sapien
gtactttatcataaaaacagacacagtcacgtg

SEQ ID NO: 279890 - DNA, 33 bp, Homo sapien
gtactttatcataaaagcagacacagtcacgtg

SEQ ID NO: 279891 - DNA, 33 bp, Homo sapien
caggtataaaaaccaactatgattaatgccagc

SEQ ID NO: 279892 - DNA, 33 bp, Homo sapien
caggtataaaaaccaagtatgattaatgccagc

SEQ ID NO: 279893 - DNA, 33 bp, Homo sapien
ccccgcagttacagtaaaaggctctctattttc

SEQ ID NO: 279894 - DNA, 33 bp, Homo sapien
ccccgcagttacagtagaaggctctctattttc

SEQ ID NO: 279895 - DNA, 33 bp, Homo sapien
gctccagatgaagagaatccctaacaagaactg

SEQ ID NO: 279896 - DNA, 33 bp, Homo sapien
gctccagatgaagagactccctaacaagaactg

SEQ ID NO: 279897 - DNA, 33 bp, Homo sapien
cttttatgcttgactacacattttctttttgtt

SEQ ID NO: 279898 - DNA, 33 bp, Homo sapien
cttttatgcttgactagacattttctttttgtt

SEQ ID NO: 279899 - DNA, 33 bp, Homo sapien
ctaaaagtaacagatacatatacaaagccagaa

SEQ ID NO: 279900 - DNA, 33 bp, Homo sapien
ctaaaagtaacagatagatatacaaagccagaa

SEQ ID NO: 279901 - DNA, 33 bp, Homo sapien
ttgatccaaaaaggacagagcaatggcccaaag

SEQ ID NO: 279902 - DNA, 33 bp, Homo sapien
ttgatccaaaaaggacggagcaatggcccaaag

SEQ ID NO: 279903 - DNA, 33 bp, Homo sapien
aactctagccatgagacagcatcataaacttat

SEQ ID NO: 279904 - DNA, 33 bp, Homo sapien
aactctagccatgagagagcatcataaacttat

SEQ ID NO: 279905 - DNA, 33 bp, Homo sapien
acaatggctatgtggacctgaagttgagcttga

SEQ ID NO: 279906 - DNA, 33 bp, Homo sapien
acaatggctatgtggatctgaagttgagcttga

SEQ ID NO: 279907 - DNA, 33 bp, Homo sapien
gatggaaatccaaaagacttattatatcaacat

SEQ ID NO: 279908 - DNA, 33 bp, Homo sapien
gatggaaatccaaaagccttattatatcaacat

SEQ ID NO: 279909 - DNA, 33 bp, Homo sapien
ctcttacagcttccgaatatcccattttttggt

SEQ ID NO: 279910 - DNA, 33 bp, Homo sapien
ctcttacagcttccgagtatcccattttttggt

SEQ ID NO: 279911 - DNA, 33 bp, Homo sapien
actttactgaagtatacaagactctgtcagctg

SEQ ID NO: 279912 - DNA, 33 bp, Homo sapien
actttactgaagtatataagactctgtcagctg

SEQ ID NO: 279913 - DNA, 33 bp, Homo sapien
cacgcctgtttattacacatgatttttacaaac

SEQ ID NO: 279914 - DNA, 33 bp, Homo sapien
cacgcctgtttattacgcatgatttttacaaac

SEQ ID NO: 279915 - DNA, 33 bp, Homo sapien
ttgctggttctactggaaaggctatgttgaatt

SEQ ID NO: 279916 - DNA, 33 bp, Homo sapien
ttgctggttctactggcaaggctatgttgaatt

SEQ ID NO: 279917 - DNA, 33 bp, Homo sapien
cagcatctctaagaagaatttcagaaggaattg

SEQ ID NO: 279918 - DNA, 33 bp, Homo sapien
cagcatctctaagaagtatttcagaaggaattg

SEQ ID NO: 279919 - DNA, 33 bp, Homo sapien
tgtatatgtaagctatcataataaatttctagt

SEQ ID NO: 279920 - DNA, 33 bp, Homo sapien
tgtatatgtaagctatgataataaatttctagt

SEQ ID NO: 279921 - DNA, 33 bp, Homo sapien
taaatcaattaagatcaatctcagacacttttt

SEQ ID NO: 279922 - DNA, 33 bp, Homo sapien
taaatcaattaagatcgatctcagacacttttt

SEQ ID NO: 279923 - DNA, 33 bp, Homo sapien
tatccatgtcagtgccacccatcagaccgtgaa

SEQ ID NO: 279924 - DNA, 33 bp, Homo sapien
tatccatgtcagtgccgcccatcagaccgtgaa

SEQ ID NO: 279925 - DNA, 33 bp, Homo sapien
agttatagaaacgacacccatcttgtgacctct

SEQ ID NO: 279926 - DNA, 33 bp, Homo sapien
agttatagaaacgacatccatcttgtgacctct

SEQ ID NO: 279927 - DNA, 33 bp, Homo sapien
cttcagtaatggcaaaatagattgaattggatt

SEQ ID NO: 279928 - DNA, 33 bp, Homo sapien
cttcagtaatggcaaagtagattgaattggatt

SEQ ID NO: 279929 - DNA, 33 bp, Homo sapien
ggcatccatcagcatacagataagaccttccac

SEQ ID NO: 279930 - DNA, 33 bp, Homo sapien
ggcatccatcagcatagagataagaccttccac

SEQ ID NO: 279931 - DNA, 33 bp, Homo sapien
tgcaaatgacagggtacagatatgttccaataa

SEQ ID NO: 279932 - DNA, 33 bp, Homo sapien
tgcaaatgacagggtagagatatgttccaataa

SEQ ID NO: 279933 - DNA, 33 bp, Homo sapien
cctatttctaatcaccccttttctagctactga

SEQ ID NO: 279934 - DNA, 33 bp, Homo sapien
cctatttctaatcacctcttttctagctactga

SEQ ID NO: 279935 - DNA, 33 bp, Homo sapien
ttatagataactctaccgagcacttctattcaa

SEQ ID NO: 279936 - DNA, 33 bp, Homo sapien
ttatagataactctactgagcacttctattcaa

SEQ ID NO: 279937 - DNA, 33 bp, Homo sapien
acagaattcctcggagcctacattcatttttta

SEQ ID NO: 279938 - DNA, 33 bp, Homo sapien
acagaattcctcggagtctacattcatttttta

SEQ ID NO: 279939 - DNA, 33 bp, Homo sapien
atgtagatgaagtagaactcttatacactgctg

SEQ ID NO: 279940 - DNA, 33 bp, Homo sapien
atgtagatgaagtagagctcttatacactgctg

SEQ ID NO: 279941 - DNA, 33 bp, Homo sapien
ttgctgagactgagccacaacttgattcccagt

SEQ ID NO: 279942 - DNA, 33 bp, Homo sapien
ttgctgagactgagccgcaacttgattcccagt

SEQ ID NO: 279943 - DNA, 33 bp, Homo sapien
gggcacagtacagaaaacaatcttagaatgcgg

SEQ ID NO: 279944 - DNA, 33 bp, Homo sapien
gggcacagtacagaaagcaatcttagaatgcgg

SEQ ID NO: 279945 - DNA, 33 bp, Homo sapien
tacttacatacatcaaacctatcatttaaattt

SEQ ID NO: 279946 - DNA, 33 bp, Homo sapien
tacttacatacatcaagcctatcatttaaattt

SEQ ID NO: 279947 - DNA, 33 bp, Homo sapien
ctttcaatgcaaaaaacctggaaattttctcca

SEQ ID NO: 279948 - DNA, 33 bp, Homo sapien
ctttcaatgcaaaaaatctggaaattttctcca

SEQ ID NO: 279949 - DNA, 33 bp, Homo sapien
tacaagatgccaattacatcacctgctgcacaa

SEQ ID NO: 279950 - DNA, 33 bp, Homo sapien
tacaagatgccaattagatcacctgctgcacaa

SEQ ID NO: 279951 - DNA, 33 bp, Homo sapien
aaaggggatttattgtgaatcatggagaaatac

SEQ ID NO: 279952 - DNA, 33 bp, Homo sapien
aaaggggatttattgttaatcatggagaaatac

SEQ ID NO: 279953 - DNA, 33 bp, Homo sapien
atttctcttcattctacctacaaataaccatta

SEQ ID NO: 279954 - DNA, 33 bp, Homo sapien
atttctcttcattctatctacaaataaccatta

SEQ ID NO: 279955 - DNA, 33 bp, Homo sapien
gcaaaaatcttcaatgaaagttgacttgttcag

SEQ ID NO: 279956 - DNA, 33 bp, Homo sapien
gcaaaaatcttcaatggaagttgacttgttcag

SEQ ID NO: 279957 - DNA, 33 bp, Homo sapien
gacagaatcaataaccccttgaacctactagag

SEQ ID NO: 279958 - DNA, 33 bp, Homo sapien
gacagaatcaataacctcttgaacctactagag

SEQ ID NO: 279959 - DNA, 33 bp, Homo sapien
tgcactagaaggtagcaaaaacacttcactggg

SEQ ID NO: 279960 - DNA, 33 bp, Homo sapien
tgcactagaaggtagcgaaaacacttcactggg

SEQ ID NO: 279961 - DNA, 33 bp, Homo sapien
cagaggaaatagttgaactgaaccttgaaggat

SEQ ID NO: 279962 - DNA, 33 bp, Homo sapien
cagaggaaatagttgagctgaaccttgaaggat

SEQ ID NO: 279963 - DNA, 33 bp, Homo sapien
tagttctctgctattgaattgtatcagtgtcga

SEQ ID NO: 279964 - DNA, 33 bp, Homo sapien
tagttctctgctattgcattgtatcagtgtcga

SEQ ID NO: 279965 - DNA, 33 bp, Homo sapien
gtaccattttctaccacatcctaagtatttcag

SEQ ID NO: 279966 - DNA, 33 bp, Homo sapien
gtaccattttctaccatatcctaagtatttcag

SEQ ID NO: 279967 - DNA, 33 bp, Homo sapien
cacacaagttttaggcaatagaagttgttctat

SEQ ID NO: 279968 - DNA, 33 bp, Homo sapien
cacacaagttttaggccatagaagttgttctat

SEQ ID NO: 279969 - DNA, 33 bp, Homo sapien
tactttatgattttcactatgttttcacagtgt

SEQ ID NO: 279970 - DNA, 33 bp, Homo sapien
tactttatgattttcattatgttttcacagtgt

SEQ ID NO: 279971 - DNA, 33 bp, Homo sapien
ataggtagtatttatacaaacgtgaactctctt

SEQ ID NO: 279972 - DNA, 33 bp, Homo sapien
ataggtagtatttatataaacgtgaactctctt

SEQ ID NO: 279973 - DNA, 33 bp, Homo sapien
cttcttaggcttgatgcaatttgtagataggta

SEQ ID NO: 279974 - DNA, 33 bp, Homo sapien
cttcttaggcttgatggaatttgtagataggta

SEQ ID NO: 279975 - DNA, 33 bp, Homo sapien
ttcaggttgagaagagccatactcaggtatctt

SEQ ID NO: 279976 - DNA, 33 bp, Homo sapien
ttcaggttgagaagagtcatactcaggtatctt

SEQ ID NO: 279977 - DNA, 33 bp, Homo sapien
aaagagccagagagaacgatttaatatttccaa

SEQ ID NO: 279978 - DNA, 33 bp, Homo sapien
aaagagccagagagaatgatttaatatttccaa

SEQ ID NO: 279979 - DNA, 33 bp, Homo sapien
aaattattcatgaaataaaaaaagatgctaaca

SEQ ID NO: 279980 - DNA, 33 bp, Homo sapien
aaattattcatgaaatcaaaaaagatgctaaca

SEQ ID NO: 279981 - DNA, 33 bp, Homo sapien
ttctagcatctggaacagacaaaaatgcccatt

SEQ ID NO: 279982 - DNA, 33 bp, Homo sapien
ttctagcatctggaaccgacaaaaatgcccatt

SEQ ID NO: 279983 - DNA, 33 bp, Homo sapien
aagtttttgtcattgactatgatattaactgtg

SEQ ID NO: 279984 - DNA, 33 bp, Homo sapien
aagtttttgtcattgagtatgatattaactgtg

SEQ ID NO: 279985 - DNA, 33 bp, Homo sapien
gtgaatatgatgctaccgatctgtgatcaatgt

SEQ ID NO: 279986 - DNA, 33 bp, Homo sapien
gtgaatatgatgctactgatctgtgatcaatgt

SEQ ID NO: 279987 - DNA, 33 bp, Homo sapien
accatgtgctgtattcaattctaagccctttaa

SEQ ID NO: 279988 - DNA, 33 bp, Homo sapien
accatgtgctgtattccattctaagccctttaa

SEQ ID NO: 279989 - DNA, 33 bp, Homo sapien
tttaaataacccttggccaaagcaaagcaatta

SEQ ID NO: 279990 - DNA, 33 bp, Homo sapien
tttaaataacccttggtcaaagcaaagcaatta

SEQ ID NO: 279991 - DNA, 33 bp, Homo sapien
ttgaagaaactgtgaacaaacccataaaactgt

SEQ ID NO: 279992 - DNA, 33 bp, Homo sapien
ttgaagaaactgtgaataaacccataaaactgt

SEQ ID NO: 279993 - DNA, 33 bp, Homo sapien
gaagcaaaatggaagaaaagcatggctacataa

SEQ ID NO: 279994 - DNA, 33 bp, Homo sapien
gaagcaaaatggaagacaagcatggctacataa

SEQ ID NO: 279995 - DNA, 33 bp, Homo sapien
ccatttttggtatttgaacacctcaagggtaca

SEQ ID NO: 279996 - DNA, 33 bp, Homo sapien
ccatttttggtatttggacacctcaagggtaca

SEQ ID NO: 279997 - DNA, 33 bp, Homo sapien
aatccagatttttagactatgtttctgaatagg

SEQ ID NO: 279998 - DNA, 33 bp, Homo sapien
aatccagatttttagagtatgtttctgaatagg

SEQ ID NO: 279999 - DNA, 33 bp, Homo sapien
ctgaaagaacccagtgcattagtctcaatgttt

SEQ ID NO: 280000 - DNA, 33 bp, Homo sapien
ctgaaagaacccagtgtattagtctcaatgttt

SEQ ID NO: 280001 - DNA, 33 bp, Homo sapien
tcttgagagatgcaaacaaacattgagactaat

SEQ ID NO: 280002 - DNA, 33 bp, Homo sapien
tcttgagagatgcaaagaaacattgagactaat

SEQ ID NO: 280003 - DNA, 33 bp, Homo sapien
taacagagtagaaggcaagaaattgattatttg

SEQ ID NO: 280004 - DNA, 33 bp, Homo sapien
taacagagtagaaggcgagaaattgattatttg

SEQ ID NO: 280005 - DNA, 33 bp, Homo sapien
tcccagggactgcagaccttaccctgaacagca

SEQ ID NO: 280006 - DNA, 33 bp, Homo sapien
tcccagggactgcagatcttaccctgaacagca

SEQ ID NO: 280007 - DNA, 33 bp, Homo sapien
aataaaggctatatacaacaaatccatagccaa

SEQ ID NO: 280008 - DNA, 33 bp, Homo sapien
aataaaggctatatacgacaaatccatagccaa

SEQ ID NO: 280009 - DNA, 33 bp, Homo sapien
gtgtcactgggttgcaatcaaggtgttggcagg

SEQ ID NO: 280010 - DNA, 33 bp, Homo sapien
gtgtcactgggttgcagtcaaggtgttggcagg

SEQ ID NO: 280011 - DNA, 33 bp, Homo sapien
atcagtatatacacacagaaaacttatacaaca

SEQ ID NO: 280012 - DNA, 33 bp, Homo sapien
atcagtatatacacacggaaaacttatacaaca

SEQ ID NO: 280013 - DNA, 33 bp, Homo sapien
ttaccagatggagagcagatttcagatgaagat

SEQ ID NO: 280014 - DNA, 33 bp, Homo sapien
ttaccagatggagagcggatttcagatgaagat

SEQ ID NO: 280015 - DNA, 33 bp, Homo sapien
aaaccaggacaaaaacggttcacagggtgccct

SEQ ID NO: 280016 - DNA, 33 bp, Homo sapien
aaaccaggacaaaaactgttcacagggtgccct

SEQ ID NO: 280017 - DNA, 33 bp, Homo sapien
gagacaatgctattaaccttacttgttctacct

SEQ ID NO: 280018 - DNA, 33 bp, Homo sapien
gagacaatgctattaatcttacttgttctacct

SEQ ID NO: 280019 - DNA, 33 bp, Homo sapien
atgagttagtttcagacacctctagtccaaaca

SEQ ID NO: 280020 - DNA, 33 bp, Homo sapien
atgagttagtttcagatacctctagtccaaaca

SEQ ID NO: 280021 - DNA, 33 bp, Homo sapien
ttaaattgcttcaaccacaggagagacattaaa

SEQ ID NO: 280022 - DNA, 33 bp, Homo sapien
ttaaattgcttcaaccgcaggagagacattaaa

SEQ ID NO: 280023 - DNA, 33 bp, Homo sapien
aatccttcccaatggccgcatctccaagtacca

SEQ ID NO: 280024 - DNA, 33 bp, Homo sapien
aatccttcccaatggctgcatctccaagtacca

SEQ ID NO: 280025 - DNA, 33 bp, Homo sapien
atactcactgctatgaactcaattgtgtcaccc

SEQ ID NO: 280026 - DNA, 33 bp, Homo sapien
atactcactgctatgacctcaattgtgtcaccc

SEQ ID NO: 280027 - DNA, 33 bp, Homo sapien
acctcacaataggatcaacacatcacatatcaa

SEQ ID NO: 280028 - DNA, 33 bp, Homo sapien
acctcacaataggatcgacacatcacatatcaa

SEQ ID NO: 280029 - DNA, 33 bp, Homo sapien
gattcagaaagtcgaacgatggggtccagcaaa

SEQ ID NO: 280030 - DNA, 33 bp, Homo sapien
gattcagaaagtcgaatgatggggtccagcaaa

SEQ ID NO: 280031 - DNA, 33 bp, Homo sapien
tattttggaatgagaaaaatacaggaaaatcta

SEQ ID NO: 280032 - DNA, 33 bp, Homo sapien
tattttggaatgagaagaatacaggaaaatcta

SEQ ID NO: 280033 - DNA, 33 bp, Homo sapien
agctcattcaggtctacattaagaggcaacaac

SEQ ID NO: 280034 - DNA, 33 bp, Homo sapien
agctcattcaggtctatattaagaggcaacaac

SEQ ID NO: 280035 - DNA, 33 bp, Homo sapien
ccttccttttccttcccagcaattcagtccaaa

SEQ ID NO: 280036 - DNA, 33 bp, Homo sapien
ccttccttttccttcctagcaattcagtccaaa

SEQ ID NO: 280037 - DNA, 33 bp, Homo sapien
tccttttaactcttacagccagtactctttgtc

SEQ ID NO: 280038 - DNA, 33 bp, Homo sapien
tccttttaactcttacggccagtactctttgtc

SEQ ID NO: 280039 - DNA, 33 bp, Homo sapien
gcactccagccttccaaccagggcaagagagtg

SEQ ID NO: 280040 - DNA, 33 bp, Homo sapien
gcactccagccttccagccagggcaagagagtg

SEQ ID NO: 280041 - DNA, 33 bp, Homo sapien
aaaacagttagtcaccactcttcctatatcacg

SEQ ID NO: 280042 - DNA, 33 bp, Homo sapien
aaaacagttagtcaccgctcttcctatatcacg

SEQ ID NO: 280043 - DNA, 33 bp, Homo sapien
aaagaagctgagtaaagtgagcctggtggaatg

SEQ ID NO: 280044 - DNA, 33 bp, Homo sapien
aaagaagctgagtaaattgagcctggtggaatg

SEQ ID NO: 280045 - DNA, 33 bp, Homo sapien
ttgcattttggttttaagtctcttcattctcat

SEQ ID NO: 280046 - DNA, 33 bp, Homo sapien
ttgcattttggttttaggtctcttcattctcat

SEQ ID NO: 280047 - DNA, 33 bp, Homo sapien
tacttcctctatgcgagaaaaaaaaaattagag

SEQ ID NO: 280048 - DNA, 33 bp, Homo sapien
tacttcctctatgcgataaaaaaaaaattagag

SEQ ID NO: 280049 - DNA, 33 bp, Homo sapien
agaaatgtaatccaaacgcttcatcttacacag

SEQ ID NO: 280050 - DNA, 33 bp, Homo sapien
agaaatgtaatccaaatgcttcatcttacacag

SEQ ID NO: 280051 - DNA, 33 bp, Homo sapien
ttctaactttcatctaaggatgcagtaggtaac

SEQ ID NO: 280052 - DNA, 33 bp, Homo sapien
ttctaactttcatctagggatgcagtaggtaac

SEQ ID NO: 280053 - DNA, 33 bp, Homo sapien
aaattgtcagtaaggacgagacaccaggcactg

SEQ ID NO: 280054 - DNA, 33 bp, Homo sapien
aaattgtcagtaaggatgagacaccaggcactg

SEQ ID NO: 280055 - DNA, 33 bp, Homo sapien
tgcctggacagtgccaatgatagcgatctcccc

SEQ ID NO: 280056 - DNA, 33 bp, Homo sapien
tgcctggacagtgccagtgatagcgatctcccc

SEQ ID NO: 280057 - DNA, 33 bp, Homo sapien
gagactatttcaggaacggatcaaggcacagaa

SEQ ID NO: 280058 - DNA, 33 bp, Homo sapien
gagactatttcaggaagggatcaaggcacagaa

SEQ ID NO: 280059 - DNA, 33 bp, Homo sapien
tacaggggaaatttcaaatggaaactctcaagt

SEQ ID NO: 280060 - DNA, 33 bp, Homo sapien
tacaggggaaatttcacatggaaactctcaagt

SEQ ID NO: 280061 - DNA, 33 bp, Homo sapien
tcatagccaaattcccacatttcatgactttat

SEQ ID NO: 280062 - DNA, 33 bp, Homo sapien
tcatagccaaattcccgcatttcatgactttat

SEQ ID NO: 280063 - DNA, 33 bp, Homo sapien
aggaatgtggaaagaacagtctggggctatagt

SEQ ID NO: 280064 - DNA, 33 bp, Homo sapien
aggaatgtggaaagaatagtctggggctatagt

SEQ ID NO: 280065 - DNA, 33 bp, Homo sapien
gcagggtattagaaccaaattttcacttcactg

SEQ ID NO: 280066 - DNA, 33 bp, Homo sapien
gcagggtattagaaccgaattttcacttcactg

SEQ ID NO: 280067 - DNA, 33 bp, Homo sapien
aactgtgtccatccaaatgtaacttcacattac

SEQ ID NO: 280068 - DNA, 33 bp, Homo sapien
aactgtgtccatccaagtgtaacttcacattac

SEQ ID NO: 280069 - DNA, 33 bp, Homo sapien
attcttcaagtgaagcagatgttatttaacaat

SEQ ID NO: 280070 - DNA, 33 bp, Homo sapien
attcttcaagtgaagcggatgttatttaacaat

SEQ ID NO: 280071 - DNA, 33 bp, Homo sapien
gcctatcttaggagaaagttgttatatgcattt

SEQ ID NO: 280072 - DNA, 33 bp, Homo sapien
gcctatcttaggagaacgttgttatatgcattt

SEQ ID NO: 280073 - DNA, 33 bp, Homo sapien
ggtcctgtgtaccagcaaaactactgacatcca

SEQ ID NO: 280074 - DNA, 33 bp, Homo sapien
ggtcctgtgtaccagcgaaactactgacatcca

SEQ ID NO: 280075 - DNA, 33 bp, Homo sapien
cattaatcaggctgtacgttgacccgttatcag

SEQ ID NO: 280076 - DNA, 33 bp, Homo sapien
cattaatcaggctgtatgttgacccgttatcag

SEQ ID NO: 280077 - DNA, 33 bp, Homo sapien
gatagatgtagtcacacaactaagttcgggcca

SEQ ID NO: 280078 - DNA, 33 bp, Homo sapien
gatagatgtagtcacataactaagttcgggcca

SEQ ID NO: 280079 - DNA, 33 bp, Homo sapien
ttttcagtttacctcaaagtccaagatggctgt

SEQ ID NO: 280080 - DNA, 33 bp, Homo sapien
ttttcagtttacctcagagtccaagatggctgt

SEQ ID NO: 280081 - DNA, 33 bp, Homo sapien
aggctgcagagagatacgaagagttttacattg

SEQ ID NO: 280082 - DNA, 33 bp, Homo sapien
aggctgcagagagatatgaagagttttacattg

SEQ ID NO: 280083 - DNA, 33 bp, Homo sapien
gtttttaccagtctacccaaatcatatgtcatt

SEQ ID NO: 280084 - DNA, 33 bp, Homo sapien
gtttttaccagtctactcaaatcatatgtcatt

SEQ ID NO: 280085 - DNA, 33 bp, Homo sapien
ttcttctttcaaaacccctgcaatacttaagat

SEQ ID NO: 280086 - DNA, 33 bp, Homo sapien
ttcttctttcaaaacctctgcaatacttaagat

SEQ ID NO: 280087 - DNA, 33 bp, Homo sapien
ctgaatcaggttcttcaccaccttatctcacct

SEQ ID NO: 280088 - DNA, 33 bp, Homo sapien
ctgaatcaggttcttcgccaccttatctcacct

SEQ ID NO: 280089 - DNA, 33 bp, Homo sapien
gctggtatgagctggccccagtaccccactgga

SEQ ID NO: 280090 - DNA, 33 bp, Homo sapien
gctggtatgagctggctccagtaccccactgga

SEQ ID NO: 280091 - DNA, 33 bp, Homo sapien
taggcagtagtaactgaagatgtttgaaggaga

SEQ ID NO: 280092 - DNA, 33 bp, Homo sapien
taggcagtagtaactgtagatgtttgaaggaga

SEQ ID NO: 280093 - DNA, 33 bp, Homo sapien
ctgcactaactcgaaaactgagatttgcttaca

SEQ ID NO: 280094 - DNA, 33 bp, Homo sapien
ctgcactaactcgaaacctgagatttgcttaca

SEQ ID NO: 280095 - DNA, 33 bp, Homo sapien
tgtatccccatagaacaaaagtatcagcagaac

SEQ ID NO: 280096 - DNA, 33 bp, Homo sapien
tgtatccccatagaacgaaagtatcagcagaac

SEQ ID NO: 280097 - DNA, 33 bp, Homo sapien
ggaagccacagaagaagaaatcagtaagcaaaa

SEQ ID NO: 280098 - DNA, 33 bp, Homo sapien
ggaagccacagaagaataaatcagtaagcaaaa

SEQ ID NO: 280099 - DNA, 33 bp, Homo sapien
ccatggcaacacttacagaccagattctgatga

SEQ ID NO: 280100 - DNA, 33 bp, Homo sapien
ccatggcaacacttacggaccagattctgatga

SEQ ID NO: 280101 - DNA, 33 bp, Homo sapien
tacctgagagtatgacagcagattcgaatcctt

SEQ ID NO: 280102 - DNA, 33 bp, Homo sapien
tacctgagagtatgacggcagattcgaatcctt

SEQ ID NO: 280103 - DNA, 33 bp, Homo sapien
acactggccacaacaaacggtggagaacacgca

SEQ ID NO: 280104 - DNA, 33 bp, Homo sapien
acactggccacaacaagcggtggagaacacgca

SEQ ID NO: 280105 - DNA, 33 bp, Homo sapien
tttgctttatctgatacacatacaggcactgtt

SEQ ID NO: 280106 - DNA, 33 bp, Homo sapien
tttgctttatctgatatacatacaggcactgtt

SEQ ID NO: 280107 - DNA, 33 bp, Homo sapien
acccagaaagatcaaactcatctgctggcatta

SEQ ID NO: 280108 - DNA, 33 bp, Homo sapien
acccagaaagatcaaattcatctgctggcatta

SEQ ID NO: 280109 - DNA, 33 bp, Homo sapien
agaagttaatgcacttaaacaagacttagtatc

SEQ ID NO: 280110 - DNA, 33 bp, Homo sapien
agaagttaatgcacttgaacaagacttagtatc

SEQ ID NO: 280111 - DNA, 33 bp, Homo sapien
caaatgaatgaacaagcatttgagccaatgtat

SEQ ID NO: 280112 - DNA, 33 bp, Homo sapien
caaatgaatgaacaagtatttgagccaatgtat

SEQ ID NO: 280113 - DNA, 33 bp, Homo sapien
acccttgagggctaagcagtgcattactctgtt

SEQ ID NO: 280114 - DNA, 33 bp, Homo sapien
acccttgagggctaagtagtgcattactctgtt

SEQ ID NO: 280115 - DNA, 33 bp, Homo sapien
tcaaatggtcaagtcaaataaacacttacaaca

SEQ ID NO: 280116 - DNA, 33 bp, Homo sapien
tcaaatggtcaagtcatataaacacttacaaca

SEQ ID NO: 280117 - DNA, 33 bp, Homo sapien
caacgtgttcaacctaagtttccctcctcccta

SEQ ID NO: 280118 - DNA, 33 bp, Homo sapien
caacgtgttcaacctaggtttccctcctcccta

SEQ ID NO: 280119 - DNA, 33 bp, Homo sapien
ctggcgtaggatgggcaatttgttattggacaa

SEQ ID NO: 280120 - DNA, 33 bp, Homo sapien
ctggcgtaggatgggctatttgttattggacaa

SEQ ID NO: 280121 - DNA, 33 bp, Homo sapien
cttctggagggaacaaatgttgcttactgaatt

SEQ ID NO: 280122 - DNA, 33 bp, Homo sapien
cttctggagggaacaactgttgcttactgaatt

SEQ ID NO: 280123 - DNA, 33 bp, Homo sapien
ttctcctttaccttgaactgggtagactcagcc

SEQ ID NO: 280124 - DNA, 33 bp, Homo sapien
ttctcctttaccttgagctgggtagactcagcc

SEQ ID NO: 280125 - DNA, 33 bp, Homo sapien
acaactctcatcatccacaacagattttcacaa

SEQ ID NO: 280126 - DNA, 33 bp, Homo sapien
acaactctcatcatccgcaacagattttcacaa

SEQ ID NO: 280127 - DNA, 33 bp, Homo sapien
atagatatttggttaaattaaagggaggaggaa

SEQ ID NO: 280128 - DNA, 33 bp, Homo sapien
atagatatttggttaagttaaagggaggaggaa

SEQ ID NO: 280129 - DNA, 33 bp, Homo sapien
ttaagggagactttgaagaactttatttatgga

SEQ ID NO: 280130 - DNA, 33 bp, Homo sapien
ttaagggagactttgatgaactttatttatgga

SEQ ID NO: 280131 - DNA, 33 bp, Homo sapien
aacatcctattggctagacccaaaacagtacct

SEQ ID NO: 280132 - DNA, 33 bp, Homo sapien
aacatcctattggctatacccaaaacagtacct

SEQ ID NO: 280133 - DNA, 33 bp, Homo sapien
tgattttcagaaacaacggtttggtagctatta

SEQ ID NO: 280134 - DNA, 33 bp, Homo sapien
tgattttcagaaacaatggtttggtagctatta

SEQ ID NO: 280135 - DNA, 33 bp, Homo sapien
cctcacgcaacacttacgataatgacaatatta

SEQ ID NO: 280136 - DNA, 33 bp, Homo sapien
cctcacgcaacacttatgataatgacaatatta

SEQ ID NO: 280137 - DNA, 33 bp, Homo sapien
tagcaacaaatgctaaacctaatttacaactct

SEQ ID NO: 280138 - DNA, 33 bp, Homo sapien
tagcaacaaatgctaaccctaatttacaactct

SEQ ID NO: 280139 - DNA, 33 bp, Homo sapien
attgattacttagccaaaatataaatctataca

SEQ ID NO: 280140 - DNA, 33 bp, Homo sapien
attgattacttagccagaatataaatctataca

SEQ ID NO: 280141 - DNA, 33 bp, Homo sapien
tagaaggaaggaatgacgaagctctggagtcat

SEQ ID NO: 280142 - DNA, 33 bp, Homo sapien
tagaaggaaggaatgatgaagctctggagtcat

SEQ ID NO: 280143 - DNA, 33 bp, Homo sapien
aactggtattactaaacatgaagttaactctgc

SEQ ID NO: 280144 - DNA, 33 bp, Homo sapien
aactggtattactaaagatgaagttaactctgc

SEQ ID NO: 280145 - DNA, 33 bp, Homo sapien
cacattttccctactacatagccctcagagcac

SEQ ID NO: 280146 - DNA, 33 bp, Homo sapien
cacattttccctactatatagccctcagagcac

SEQ ID NO: 280147 - DNA, 33 bp, Homo sapien
ctttatctcattgacaactctcggtaggttggg

SEQ ID NO: 280148 - DNA, 33 bp, Homo sapien
ctttatctcattgacagctctcggtaggttggg

SEQ ID NO: 280149 - DNA, 33 bp, Homo sapien
ggacaacagtatttgaacaactattgatccaat

SEQ ID NO: 280150 - DNA, 33 bp, Homo sapien
ggacaacagtatttgagcaactattgatccaat

SEQ ID NO: 280151 - DNA, 33 bp, Homo sapien
gataaccaattcaccaatattgaagcagactga

SEQ ID NO: 280152 - DNA, 33 bp, Homo sapien
gataaccaattcaccagtattgaagcagactga

SEQ ID NO: 280153 - DNA, 33 bp, Homo sapien
gaggaaaagtttctgaaaactcctctccacctc

SEQ ID NO: 280154 - DNA, 33 bp, Homo sapien
gaggaaaagtttctgagaactcctctccacctc

SEQ ID NO: 280155 - DNA, 33 bp, Homo sapien
aatttctaagcgataccgagcacaaccagatac

SEQ ID NO: 280156 - DNA, 33 bp, Homo sapien
aatttctaagcgatactgagcacaaccagatac

SEQ ID NO: 280157 - DNA, 33 bp, Homo sapien
aagctgtgtcagaatccgaggtttggcataatt

SEQ ID NO: 280158 - DNA, 33 bp, Homo sapien
aagctgtgtcagaatctgaggtttggcataatt

SEQ ID NO: 280159 - DNA, 33 bp, Homo sapien
cctctagaataggaaactgttagtgatgggagt

SEQ ID NO: 280160 - DNA, 33 bp, Homo sapien
cctctagaataggaaagtgttagtgatgggagt

SEQ ID NO: 280161 - DNA, 33 bp, Homo sapien
ccaagaagacagtaaactgaaaactccgttact

SEQ ID NO: 280162 - DNA, 33 bp, Homo sapien
ccaagaagacagtaaattgaaaactccgttact

SEQ ID NO: 280163 - DNA, 33 bp, Homo sapien
ggaatgttataggagagaaagccagaggaaagc

SEQ ID NO: 280164 - DNA, 33 bp, Homo sapien
ggaatgttataggagataaagccagaggaaagc

SEQ ID NO: 280165 - DNA, 33 bp, Homo sapien
tccctatctcgccaccccaatttaaatttcatg

SEQ ID NO: 280166 - DNA, 33 bp, Homo sapien
tccctatctcgccacctcaatttaaatttcatg

SEQ ID NO: 280167 - DNA, 33 bp, Homo sapien
gtctgtgctatgtttgcaatagatgtaagtcaa

SEQ ID NO: 280168 - DNA, 33 bp, Homo sapien
gtctgtgctatgtttgtaatagatgtaagtcaa

SEQ ID NO: 280169 - DNA, 33 bp, Homo sapien
caaaactgatatacttcaacactagctttcttt

SEQ ID NO: 280170 - DNA, 33 bp, Homo sapien
caaaactgatatactttaacactagctttcttt

SEQ ID NO: 280171 - DNA, 33 bp, Homo sapien
atgtggaagacttgagaaccatagtactcaagt

SEQ ID NO: 280172 - DNA, 33 bp, Homo sapien
atgtggaagacttgaggaccatagtactcaagt

SEQ ID NO: 280173 - DNA, 33 bp, Homo sapien
aaagtcatgacactagcaaacagagctgatatg

SEQ ID NO: 280174 - DNA, 33 bp, Homo sapien
aaagtcatgacactagtaaacagagctgatatg

SEQ ID NO: 280175 - DNA, 33 bp, Homo sapien
tgtaaaaatcttttgccgagagggactgcagat

SEQ ID NO: 280176 - DNA, 33 bp, Homo sapien
tgtaaaaatcttttgctgagagggactgcagat

SEQ ID NO: 280177 - DNA, 33 bp, Homo sapien
ctcaaacagagtagaccgtaatttgatatacag

SEQ ID NO: 280178 - DNA, 33 bp, Homo sapien
ctcaaacagagtagactgtaatttgatatacag

SEQ ID NO: 280179 - DNA, 33 bp, Homo sapien
ttctccagtagctaacaacaacaagaacaacaa

SEQ ID NO: 280180 - DNA, 33 bp, Homo sapien
ttctccagtagctaacgacaacaagaacaacaa

SEQ ID NO: 280181 - DNA, 33 bp, Homo sapien
cgggttaatgagttccacagtccagtttcacag

SEQ ID NO: 280182 - DNA, 33 bp, Homo sapien
cgggttaatgagttccgcagtccagtttcacag

SEQ ID NO: 280183 - DNA, 33 bp, Homo sapien
catcacagtgttgtcaacgagggggcctttagg

SEQ ID NO: 280184 - DNA, 33 bp, Homo sapien
catcacagtgttgtcatcgagggggcctttagg

SEQ ID NO: 280185 - DNA, 33 bp, Homo sapien
ttctagatgacaccacaaaaacagctgacttgg

SEQ ID NO: 280186 - DNA, 33 bp, Homo sapien
ttctagatgacaccactaaaacagctgacttgg

SEQ ID NO: 280187 - DNA, 33 bp, Homo sapien
atagctaaatgtatgcccttcattgtttaggat

SEQ ID NO: 280188 - DNA, 33 bp, Homo sapien
atagctaaatgtatgctcttcattgtttaggat

SEQ ID NO: 280189 - DNA, 33 bp, Homo sapien
atgaatgagaaccacacagtagtgtaaaggttt

SEQ ID NO: 280190 - DNA, 33 bp, Homo sapien
atgaatgagaaccacatagtagtgtaaaggttt

SEQ ID NO: 280191 - DNA, 33 bp, Homo sapien
ccaccttaacacttacaaaacaactcaaaggac

SEQ ID NO: 280192 - DNA, 33 bp, Homo sapien
ccaccttaacacttacgaaacaactcaaaggac

SEQ ID NO: 280193 - DNA, 33 bp, Homo sapien
tccaccgactaaaagtaactcctgtaaccacgt

SEQ ID NO: 280194 - DNA, 33 bp, Homo sapien
tccaccgactaaaagtgactcctgtaaccacgt

SEQ ID NO: 280195 - DNA, 33 bp, Homo sapien
tttggtaaacttatataaacggtagaagtatgg

SEQ ID NO: 280196 - DNA, 33 bp, Homo sapien
tttggtaaacttatatcaacggtagaagtatgg

SEQ ID NO: 280197 - DNA, 33 bp, Homo sapien
gtttacttggaaggaaagataaacatgaagatg

SEQ ID NO: 280198 - DNA, 33 bp, Homo sapien
gtttacttggaaggaaggataaacatgaagatg

SEQ ID NO: 280199 - DNA, 33 bp, Homo sapien
cctgccaactaatttcaatgactaaacattaac

SEQ ID NO: 280200 - DNA, 33 bp, Homo sapien
cctgccaactaatttcgatgactaaacattaac

SEQ ID NO: 280201 - DNA, 33 bp, Homo sapien
ctgttacctggcattgccaataataaatgaaac

SEQ ID NO: 280202 - DNA, 33 bp, Homo sapien
ctgttacctggcattgtcaataataaatgaaac

SEQ ID NO: 280203 - DNA, 33 bp, Homo sapien
ctgcacttgatttgacaatttctcattttagtg

SEQ ID NO: 280204 - DNA, 33 bp, Homo sapien
ctgcacttgatttgacgatttctcattttagtg

SEQ ID NO: 280205 - DNA, 33 bp, Homo sapien
actactctctcttgtcacaatctggctctactg

SEQ ID NO: 280206 - DNA, 33 bp, Homo sapien
actactctctcttgtcgcaatctggctctactg

SEQ ID NO: 280207 - DNA, 33 bp, Homo sapien
tcagatggtaagaggaaatgagtctaggacaca

SEQ ID NO: 280208 - DNA, 33 bp, Homo sapien
tcagatggtaagaggacatgagtctaggacaca

SEQ ID NO: 280209 - DNA, 33 bp, Homo sapien
ctcagtattggtgaaaatgattgccaattcttt

SEQ ID NO: 280210 - DNA, 33 bp, Homo sapien
ctcagtattggtgaaagtgattgccaattcttt

SEQ ID NO: 280211 - DNA, 33 bp, Homo sapien
cacctattccacagggccacacttgcgtagtca

SEQ ID NO: 280212 - DNA, 33 bp, Homo sapien
cacctattccacagggtcacacttgcgtagtca

SEQ ID NO: 280213 - DNA, 33 bp, Homo sapien
ttgttcattgacagcaagagtctaaagcagaaa

SEQ ID NO: 280214 - DNA, 33 bp, Homo sapien
ttgttcattgacagcatgagtctaaagcagaaa

SEQ ID NO: 280215 - DNA, 33 bp, Homo sapien
aagaactgaaaaatgaacttctaaaaatatatt

SEQ ID NO: 280216 - DNA, 33 bp, Homo sapien
aagaactgaaaaatgaccttctaaaaatatatt

SEQ ID NO: 280217 - DNA, 33 bp, Homo sapien
acatttatgctgttcaaaattatgtggacttat

SEQ ID NO: 280218 - DNA, 33 bp, Homo sapien
acatttatgctgttcagaattatgtggacttat

SEQ ID NO: 280219 - DNA, 33 bp, Homo sapien
ttaaatttgtcatggacgaattattccaagtct

SEQ ID NO: 280220 - DNA, 33 bp, Homo sapien
ttaaatttgtcatggatgaattattccaagtct

SEQ ID NO: 280221 - DNA, 33 bp, Homo sapien
atgcctccaattcaagaagtaacacagttctca

SEQ ID NO: 280222 - DNA, 33 bp, Homo sapien
atgcctccaattcaaggagtaacacagttctca

SEQ ID NO: 280223 - DNA, 33 bp, Homo sapien
gaaaaggatttgagagaaagtgtcagatacaga

SEQ ID NO: 280224 - DNA, 33 bp, Homo sapien
gaaaaggatttgagaggaagtgtcagatacaga

SEQ ID NO: 280225 - DNA, 33 bp, Homo sapien
ttgaagataatagagcaacatatttaggacact

SEQ ID NO: 280226 - DNA, 33 bp, Homo sapien
ttgaagataatagagcgacatatttaggacact

SEQ ID NO: 280227 - DNA, 33 bp, Homo sapien
tatgtttcacacatagacgagcaagaattcctg

SEQ ID NO: 280228 - DNA, 33 bp, Homo sapien
tatgtttcacacatagtcgagcaagaattcctg

SEQ ID NO: 280229 - DNA, 33 bp, Homo sapien
ccgtagccatggtgtaaagttgaaggcaggaat

SEQ ID NO: 280230 - DNA, 33 bp, Homo sapien
ccgtagccatggtgtacagttgaaggcaggaat

SEQ ID NO: 280231 - DNA, 33 bp, Homo sapien
attatttttaagcaaactgtattcctcatatcc

SEQ ID NO: 280232 - DNA, 33 bp, Homo sapien
attatttttaagcaaattgtattcctcatatcc

SEQ ID NO: 280233 - DNA, 33 bp, Homo sapien
atttaatggccaagtgaactataatggttatgt

SEQ ID NO: 280234 - DNA, 33 bp, Homo sapien
atttaatggccaagtggactataatggttatgt

SEQ ID NO: 280235 - DNA, 33 bp, Homo sapien
ataatacctacatcagaaaaatgcatacattca

SEQ ID NO: 280236 - DNA, 33 bp, Homo sapien
ataatacctacatcagcaaaatgcatacattca

SEQ ID NO: 280237 - DNA, 33 bp, Homo sapien
agaagttgaatatgaagccaggagttggagcaa

SEQ ID NO: 280238 - DNA, 33 bp, Homo sapien
agaagttgaatatgaatccaggagttggagcaa

SEQ ID NO: 280239 - DNA, 33 bp, Homo sapien
ttttattacagtatcaccttacttttaggtaca

SEQ ID NO: 280240 - DNA, 33 bp, Homo sapien
ttttattacagtatcatcttacttttaggtaca

SEQ ID NO: 280241 - DNA, 33 bp, Homo sapien
gccagtgttagcttacaatatgctcatcacctg

SEQ ID NO: 280242 - DNA, 33 bp, Homo sapien
gccagtgttagcttacgatatgctcatcacctg

SEQ ID NO: 280243 - DNA, 33 bp, Homo sapien
ttcaaaaacctatcgacctgatttggggagagt

SEQ ID NO: 280244 - DNA, 33 bp, Homo sapien
ttcaaaaacctatcgatctgatttggggagagt

SEQ ID NO: 280245 - DNA, 33 bp, Homo sapien
tgttactccagcaacaagtgataaactgtttat

SEQ ID NO: 280246 - DNA, 33 bp, Homo sapien
tgttactccagcaacacgtgataaactgtttat

SEQ ID NO: 280247 - DNA, 33 bp, Homo sapien
catctgtattttccaaatgcgaagtttgtgtaa

SEQ ID NO: 280248 - DNA, 33 bp, Homo sapien
catctgtattttccaactgcgaagtttgtgtaa

SEQ ID NO: 280249 - DNA, 33 bp, Homo sapien
gactctaccaatcacacaactctacgccttatg

SEQ ID NO: 280250 - DNA, 33 bp, Homo sapien
gactctaccaatcacagaactctacgccttatg

SEQ ID NO: 280251 - DNA, 33 bp, Homo sapien
taagccactaaatgtacggtaatttgttatagc

SEQ ID NO: 280252 - DNA, 33 bp, Homo sapien
taagccactaaatgtatggtaatttgttatagc

SEQ ID NO: 280253 - DNA, 33 bp, Homo sapien
tccactgcctctactccacagtgaactcaactt

SEQ ID NO: 280254 - DNA, 33 bp, Homo sapien
tccactgcctctactctacagtgaactcaactt

SEQ ID NO: 280255 - DNA, 33 bp, Homo sapien
ctgactgtatcactctaagaggaagtttgtcag

SEQ ID NO: 280256 - DNA, 33 bp, Homo sapien
ctgactgtatcactctgagaggaagtttgtcag

SEQ ID NO: 280257 - DNA, 33 bp, Homo sapien
ggtaaaagtagtacaactggagtcagagaactg

SEQ ID NO: 280258 - DNA, 33 bp, Homo sapien
ggtaaaagtagtacaattggagtcagagaactg

SEQ ID NO: 280259 - DNA, 33 bp, Homo sapien
ctcagcccaatcattacaactattacgctcttt

SEQ ID NO: 280260 - DNA, 33 bp, Homo sapien
ctcagcccaatcattataactattacgctcttt

SEQ ID NO: 280261 - DNA, 33 bp, Homo sapien
attttgtagactcaatcagcaaggcacatcttc

SEQ ID NO: 280262 - DNA, 33 bp, Homo sapien
attttgtagactcaattagcaaggcacatcttc

SEQ ID NO: 280263 - DNA, 33 bp, Homo sapien
cttcatttatgcttacggagaaaatcaactgga

SEQ ID NO: 280264 - DNA, 33 bp, Homo sapien
cttcatttatgcttactgagaaaatcaactgga

SEQ ID NO: 280265 - DNA, 33 bp, Homo sapien
tcagtctcatcaaagcagaaaatgaaaaagcac

SEQ ID NO: 280266 - DNA, 33 bp, Homo sapien
tcagtctcatcaaagccgaaaatgaaaaagcac

SEQ ID NO: 280267 - DNA, 33 bp, Homo sapien
accttttgtggcttaaaaggaaatagaaccctc

SEQ ID NO: 280268 - DNA, 33 bp, Homo sapien
accttttgtggcttaagaggaaatagaaccctc

SEQ ID NO: 280269 - DNA, 33 bp, Homo sapien
gccaattgtgacttcactgaaccttttgtggct

SEQ ID NO: 280270 - DNA, 33 bp, Homo sapien
gccaattgtgacttcattgaaccttttgtggct

SEQ ID NO: 280271 - DNA, 33 bp, Homo sapien
cttgaagacagacagaaggtcaggtgctgtata

SEQ ID NO: 280272 - DNA, 33 bp, Homo sapien
cttgaagacagacagagggtcaggtgctgtata

SEQ ID NO: 280273 - DNA, 33 bp, Homo sapien
cttttgatagactgacaatattttcttcataac

SEQ ID NO: 280274 - DNA, 33 bp, Homo sapien
cttttgatagactgacgatattttcttcataac

SEQ ID NO: 280275 - DNA, 33 bp, Homo sapien
catatatcttctccacactgattgcttccatat

SEQ ID NO: 280276 - DNA, 33 bp, Homo sapien
catatatcttctccacgctgattgcttccatat

SEQ ID NO: 280277 - DNA, 33 bp, Homo sapien
gcagccctaggacataccagcaaacactcatca

SEQ ID NO: 280278 - DNA, 33 bp, Homo sapien
gcagccctaggacatatcagcaaacactcatca

SEQ ID NO: 280279 - DNA, 33 bp, Homo sapien
ttcccatactaattcaccctagcatcttcccaa

SEQ ID NO: 280280 - DNA, 33 bp, Homo sapien
ttcccatactaattcatcctagcatcttcccaa

SEQ ID NO: 280281 - DNA, 33 bp, Homo sapien
gtgttgctcagttttacagatgcttccatgtta

SEQ ID NO: 280282 - DNA, 33 bp, Homo sapien
gtgttgctcagttttatagatgcttccatgtta

SEQ ID NO: 280283 - DNA, 33 bp, Homo sapien
tagtgatttacacttacgccagctgttagataa

SEQ ID NO: 280284 - DNA, 33 bp, Homo sapien
tagtgatttacacttatgccagctgttagataa

SEQ ID NO: 280285 - DNA, 33 bp, Homo sapien
aattctgggaaaatcaactagatgataaacaac

SEQ ID NO: 280286 - DNA, 33 bp, Homo sapien
aattctgggaaaatcacctagatgataaacaac

SEQ ID NO: 280287 - DNA, 33 bp, Homo sapien
cttaaactaagggtgaccaaactagagcctgtg

SEQ ID NO: 280288 - DNA, 33 bp, Homo sapien
cttaaactaagggtgagcaaactagagcctgtg

SEQ ID NO: 280289 - DNA, 33 bp, Homo sapien
aatacaggcaggcattaaagtgttagggtagta

SEQ ID NO: 280290 - DNA, 33 bp, Homo sapien
aatacaggcaggcattgaagtgttagggtagta

SEQ ID NO: 280291 - DNA, 33 bp, Homo sapien
catgaatgccaatacacattcagattggcatga

SEQ ID NO: 280292 - DNA, 33 bp, Homo sapien
catgaatgccaatacatattcagattggcatga

SEQ ID NO: 280293 - DNA, 33 bp, Homo sapien
aactcatgtatttgtacgggtggtgtattagtc

SEQ ID NO: 280294 - DNA, 33 bp, Homo sapien
aactcatgtatttgtatgggtggtgtattagtc

SEQ ID NO: 280295 - DNA, 33 bp, Homo sapien
tttgttcctttaggtacgggagatttagtaaat

SEQ ID NO: 280296 - DNA, 33 bp, Homo sapien
tttgttcctttaggtatgggagatttagtaaat

SEQ ID NO: 280297 - DNA, 33 bp, Homo sapien
gaacagaattgtttcacggcgttctgtagaata

SEQ ID NO: 280298 - DNA, 33 bp, Homo sapien
gaacagaattgtttcatggcgttctgtagaata

SEQ ID NO: 280299 - DNA, 33 bp, Homo sapien
cagactaagagatcaagggtaacatgtcataag

SEQ ID NO: 280300 - DNA, 33 bp, Homo sapien
cagactaagagatcaatggtaacatgtcataag

SEQ ID NO: 280301 - DNA, 33 bp, Homo sapien
cttgatctctactttaccgatgagaaaataagg

SEQ ID NO: 280302 - DNA, 33 bp, Homo sapien
cttgatctctactttatcgatgagaaaataagg

SEQ ID NO: 280303 - DNA, 33 bp, Homo sapien
tagggctagagggatgcaacaagggaatacagg

SEQ ID NO: 280304 - DNA, 33 bp, Homo sapien
tagggctagagggatggaacaagggaatacagg

SEQ ID NO: 280305 - DNA, 33 bp, Homo sapien
tttgagtcttccagaaaaatagctgttgttaaa

SEQ ID NO: 280306 - DNA, 33 bp, Homo sapien
tttgagtcttccagaagaatagctgttgttaaa

SEQ ID NO: 280307 - DNA, 33 bp, Homo sapien
cttaaacttgtgccaacgttatgactaagagat

SEQ ID NO: 280308 - DNA, 33 bp, Homo sapien
cttaaacttgtgccaatgttatgactaagagat

SEQ ID NO: 280309 - DNA, 33 bp, Homo sapien
ctcttgcctcatactccaacctcacatcttctc

SEQ ID NO: 280310 - DNA, 33 bp, Homo sapien
ctcttgcctcatactctaacctcacatcttctc

SEQ ID NO: 280311 - DNA, 33 bp, Homo sapien
ttccattctcaagttaaccatgttccaaagcaa

SEQ ID NO: 280312 - DNA, 33 bp, Homo sapien
ttccattctcaagttatccatgttccaaagcaa

SEQ ID NO: 280313 - DNA, 33 bp, Homo sapien
tgagaatggaacttaaacatctatttcagcact

SEQ ID NO: 280314 - DNA, 33 bp, Homo sapien
tgagaatggaacttaagcatctatttcagcact

SEQ ID NO: 280315 - DNA, 33 bp, Homo sapien
tgatcttatgagtagacatttctgtattgctac

SEQ ID NO: 280316 - DNA, 33 bp, Homo sapien
tgatcttatgagtagatatttctgtattgctac

SEQ ID NO: 280317 - DNA, 33 bp, Homo sapien
gcttccaaaatggtcccagtgattctcactttg

SEQ ID NO: 280318 - DNA, 33 bp, Homo sapien
gcttccaaaatggtcctagtgattctcactttg

SEQ ID NO: 280319 - DNA, 33 bp, Homo sapien
ggtagagaagagctacgcttgaagagattgatg

SEQ ID NO: 280320 - DNA, 33 bp, Homo sapien
ggtagagaagagctactcttgaagagattgatg

SEQ ID NO: 280321 - DNA, 33 bp, Homo sapien
aaataagatgaagtcaaagagtaaagaaacttg

SEQ ID NO: 280322 - DNA, 33 bp, Homo sapien
aaataagatgaagtcacagagtaaagaaacttg

SEQ ID NO: 280323 - DNA, 33 bp, Homo sapien
cagtgaactatagtaacgacagtaatacttgat

SEQ ID NO: 280324 - DNA, 33 bp, Homo sapien
cagtgaactatagtaatgacagtaatacttgat

SEQ ID NO: 280325 - DNA, 33 bp, Homo sapien
tacatccactcaaagtaacttagttcacaaact

SEQ ID NO: 280326 - DNA, 33 bp, Homo sapien
tacatccactcaaagttacttagttcacaaact

SEQ ID NO: 280327 - DNA, 33 bp, Homo sapien
catcctgtataaatcactgagaaagaagtgaca

SEQ ID NO: 280328 - DNA, 33 bp, Homo sapien
catcctgtataaatcattgagaaagaagtgaca

SEQ ID NO: 280329 - DNA, 33 bp, Homo sapien
cagaggtgagactgaaacttaatgagattaagc

SEQ ID NO: 280330 - DNA, 33 bp, Homo sapien
cagaggtgagactgaagcttaatgagattaagc

SEQ ID NO: 280331 - DNA, 33 bp, Homo sapien
gcagcttaattttatcaccaatgcagttctata

SEQ ID NO: 280332 - DNA, 33 bp, Homo sapien
gcagcttaattttatctccaatgcagttctata

SEQ ID NO: 280333 - DNA, 33 bp, Homo sapien
tcagtaaacatatatactaaatgcaggaagaat

SEQ ID NO: 280334 - DNA, 33 bp, Homo sapien
tcagtaaacatatatagtaaatgcaggaagaat

SEQ ID NO: 280335 - DNA, 33 bp, Homo sapien
gagcagtcacaggaagaaaaagtatatggactg

SEQ ID NO: 280336 - DNA, 33 bp, Homo sapien
gagcagtcacaggaaggaaaagtatatggactg

SEQ ID NO: 280337 - DNA, 33 bp, Homo sapien
ctgtctgtcttggccccgatctgcggagctggt

SEQ ID NO: 280338 - DNA, 33 bp, Homo sapien
ctgtctgtcttggccctgatctgcggagctggt

SEQ ID NO: 280339 - DNA, 33 bp, Homo sapien
tgcgtgtgggcccagacagcagggagctggagc

SEQ ID NO: 280340 - DNA, 33 bp, Homo sapien
tgcgtgtgggcccagatagcagggagctggagc

SEQ ID NO: 280341 - DNA, 33 bp, Homo sapien
tttgttgtggaaaaatgatccaactttggagct

SEQ ID NO: 280342 - DNA, 33 bp, Homo sapien
tttgttgtggaaaaattatccaactttggagct

SEQ ID NO: 280343 - DNA, 33 bp, Homo sapien
ttatagaactcttgaacacaaattaagcctgaa

SEQ ID NO: 280344 - DNA, 33 bp, Homo sapien
ttatagaactcttgaatacaaattaagcctgaa

SEQ ID NO: 280345 - DNA, 33 bp, Homo sapien
tactaaaaacggtggcacttctgtcagaacctg

SEQ ID NO: 280346 - DNA, 33 bp, Homo sapien
tactaaaaacggtggcgcttctgtcagaacctg

SEQ ID NO: 280347 - DNA, 33 bp, Homo sapien
gactagccaaaggtgactagcagaccaactagc

SEQ ID NO: 280348 - DNA, 33 bp, Homo sapien
gactagccaaaggtgattagcagaccaactagc

SEQ ID NO: 280349 - DNA, 33 bp, Homo sapien
cattctagatgccaaaagtgtaactgagccaca

SEQ ID NO: 280350 - DNA, 33 bp, Homo sapien
cattctagatgccaaaggtgtaactgagccaca

SEQ ID NO: 280351 - DNA, 33 bp, Homo sapien
aaaaatgctacccacacagccaaatccagttct

SEQ ID NO: 280352 - DNA, 33 bp, Homo sapien
aaaaatgctacccacatagccaaatccagttct

SEQ ID NO: 280353 - DNA, 33 bp, Homo sapien
gaaatgagtcaaaggacggactggttccttaat

SEQ ID NO: 280354 - DNA, 33 bp, Homo sapien
gaaatgagtcaaaggatggactggttccttaat

SEQ ID NO: 280355 - DNA, 33 bp, Homo sapien
atgctttaaaagaaataatgatggcaacatctt

SEQ ID NO: 280356 - DNA, 33 bp, Homo sapien
atgctttaaaagaaatgatgatggcaacatctt

SEQ ID NO: 280357 - DNA, 33 bp, Homo sapien
aaataacatacctcccacagtaacataactatt

SEQ ID NO: 280358 - DNA, 33 bp, Homo sapien
aaataacatacctccctcagtaacataactatt

SEQ ID NO: 280359 - DNA, 33 bp, Homo sapien
tttttcttggacacatcacgtactttttggagc

SEQ ID NO: 280360 - DNA, 33 bp, Homo sapien
tttttcttggacacatgacgtactttttggagc

SEQ ID NO: 280361 - DNA, 33 bp, Homo sapien
aaaaacggggataatacacctactttgcagagt

SEQ ID NO: 280362 - DNA, 33 bp, Homo sapien
aaaaacggggataatatacctactttgcagagt

SEQ ID NO: 280363 - DNA, 33 bp, Homo sapien
ttttctgctaaactaaaggaaatcttattgtca

SEQ ID NO: 280364 - DNA, 33 bp, Homo sapien
ttttctgctaaactaagggaaatcttattgtca

SEQ ID NO: 280365 - DNA, 33 bp, Homo sapien
gacctccacctgaaaaagagagaaatggttaat

SEQ ID NO: 280366 - DNA, 33 bp, Homo sapien
gacctccacctgaaaaggagagaaatggttaat

SEQ ID NO: 280367 - DNA, 33 bp, Homo sapien
tgaaactaaaaggttaacacgcagatccaattg

SEQ ID NO: 280368 - DNA, 33 bp, Homo sapien
tgaaactaaaaggttagcacgcagatccaattg

SEQ ID NO: 280369 - DNA, 33 bp, Homo sapien
cagcactggaactgaacgcccttccacctggct

SEQ ID NO: 280370 - DNA, 33 bp, Homo sapien
cagcactggaactgaatgcccttccacctggct

SEQ ID NO: 280371 - DNA, 33 bp, Homo sapien
acggagaatctcaaaacgcacctgttctcagat

SEQ ID NO: 280372 - DNA, 33 bp, Homo sapien
acggagaatctcaaaatgcacctgttctcagat

SEQ ID NO: 280373 - DNA, 33 bp, Homo sapien
ctaatctcaccaacaacgtaaagagaagaaaaa

SEQ ID NO: 280374 - DNA, 33 bp, Homo sapien
ctaatctcaccaacaaggtaaagagaagaaaaa

SEQ ID NO: 280375 - DNA, 33 bp, Homo sapien
tgataatggcttcagacaatattccagagcttg

SEQ ID NO: 280376 - DNA, 33 bp, Homo sapien
tgataatggcttcagataatattccagagcttg

SEQ ID NO: 280377 - DNA, 33 bp, Homo sapien
taagagtaagagcacactcaatcatggaaatgg

SEQ ID NO: 280378 - DNA, 33 bp, Homo sapien
taagagtaagagcacattcaatcatggaaatgg

SEQ ID NO: 280379 - DNA, 33 bp, Homo sapien
ctctggctgacatgacccaagtgtgcatggtat

SEQ ID NO: 280380 - DNA, 33 bp, Homo sapien
ctctggctgacatgacgcaagtgtgcatggtat

SEQ ID NO: 280381 - DNA, 33 bp, Homo sapien
tgtctacttgttgccaccgtctcatttgcctgt

SEQ ID NO: 280382 - DNA, 33 bp, Homo sapien
tgtctacttgttgccatcgtctcatttgcctgt

SEQ ID NO: 280383 - DNA, 33 bp, Homo sapien
gagcttcactccacataaaaacataacacccta

SEQ ID NO: 280384 - DNA, 33 bp, Homo sapien
gagcttcactccacatgaaaacataacacccta

SEQ ID NO: 280385 - DNA, 33 bp, Homo sapien
tgaactatgtgtcaaaacttaaggaccaaagct

SEQ ID NO: 280386 - DNA, 33 bp, Homo sapien
tgaactatgtgtcaaatcttaaggaccaaagct

SEQ ID NO: 280387 - DNA, 33 bp, Homo sapien
catcacaaagatgtgacgaaatggcacttgtaa

SEQ ID NO: 280388 - DNA, 33 bp, Homo sapien
catcacaaagatgtgaggaaatggcacttgtaa

SEQ ID NO: 280389 - DNA, 33 bp, Homo sapien
gtaaaccagccatagaccaactgctttcaccta

SEQ ID NO: 280390 - DNA, 33 bp, Homo sapien
gtaaaccagccatagagcaactgctttcaccta

SEQ ID NO: 280391 - DNA, 33 bp, Homo sapien
tagctgctagacactcaaacaagagtatgtgca

SEQ ID NO: 280392 - DNA, 33 bp, Homo sapien
tagctgctagacactcgaacaagagtatgtgca

SEQ ID NO: 280393 - DNA, 33 bp, Homo sapien
tatccaggcttgggtccatagaatttcaacttc

SEQ ID NO: 280394 - DNA, 33 bp, Homo sapien
tatccaggcttgggtctatagaatttcaacttc

SEQ ID NO: 280395 - DNA, 33 bp, Homo sapien
cagaagagtgagtaaacgcaaaataattagtta

SEQ ID NO: 280396 - DNA, 33 bp, Homo sapien
cagaagagtgagtaaatgcaaaataattagtta

SEQ ID NO: 280397 - DNA, 33 bp, Homo sapien
atgaaaaaaagggagcagctaccctctgagcag

SEQ ID NO: 280398 - DNA, 33 bp, Homo sapien
atgaaaaaaagggagccgctaccctctgagcag

SEQ ID NO: 280399 - DNA, 33 bp, Homo sapien
agattcctcaaagtcacccaggaccagaggttt

SEQ ID NO: 280400 - DNA, 33 bp, Homo sapien
agattcctcaaagtcatccaggaccagaggttt

SEQ ID NO: 280401 - DNA, 33 bp, Homo sapien
tcatctttctttcccccagctttgtatctggtg

SEQ ID NO: 280402 - DNA, 33 bp, Homo sapien
tcatctttctttcccctagctttgtatctggtg

SEQ ID NO: 280403 - DNA, 33 bp, Homo sapien
gctagcagtttccagaaattccactttgttttc

SEQ ID NO: 280404 - DNA, 33 bp, Homo sapien
gctagcagtttccagatattccactttgttttc

SEQ ID NO: 280405 - DNA, 33 bp, Homo sapien
atcagcctcatcacaaatgtgtgctcaatgtgt

SEQ ID NO: 280406 - DNA, 33 bp, Homo sapien
atcagcctcatcacaagtgtgtgctcaatgtgt

SEQ ID NO: 280407 - DNA, 33 bp, Homo sapien
gtgatctgttgttgaacgaaatgttacgtggcg

SEQ ID NO: 280408 - DNA, 33 bp, Homo sapien
gtgatctgttgttgaatgaaatgttacgtggcg

SEQ ID NO: 280409 - DNA, 33 bp, Homo sapien
tcatgcttgtgggttccagttagcccctgatca

SEQ ID NO: 280410 - DNA, 33 bp, Homo sapien
tcatgcttgtgggttcgagttagcccctgatca

SEQ ID NO: 280411 - DNA, 33 bp, Homo sapien
ggcccacaagtttttccaaagaggatttggagg

SEQ ID NO: 280412 - DNA, 33 bp, Homo sapien
ggcccacaagtttttctaaagaggatttggagg

SEQ ID NO: 280413 - DNA, 33 bp, Homo sapien
ctccccggttacggtcagaaactgataatgctt

SEQ ID NO: 280414 - DNA, 33 bp, Homo sapien
ctccccggttacggtcggaaactgataatgctt

SEQ ID NO: 280415 - DNA, 33 bp, Homo sapien
tagacacaagagtctaagtttgatttttttgat

SEQ ID NO: 280416 - DNA, 33 bp, Homo sapien
tagacacaagagtctaggtttgatttttttgat

SEQ ID NO: 280417 - DNA, 33 bp, Homo sapien
gatttgccatttgacagtgagctagtttcttaa

SEQ ID NO: 280418 - DNA, 33 bp, Homo sapien
gatttgccatttgacattgagctagtttcttaa

SEQ ID NO: 280419 - DNA, 33 bp, Homo sapien
tcatttaacctctcaacgtcattgtctcctaca

SEQ ID NO: 280420 - DNA, 33 bp, Homo sapien
tcatttaacctctcaatgtcattgtctcctaca

SEQ ID NO: 280421 - DNA, 33 bp, Homo sapien
aatctttgattgtaagaaatgaagttagagtgt

SEQ ID NO: 280422 - DNA, 33 bp, Homo sapien
aatctttgattgtaaggaatgaagttagagtgt

SEQ ID NO: 280423 - DNA, 33 bp, Homo sapien
gattattgcagtcccacgaaacatctaactgca

SEQ ID NO: 280424 - DNA, 33 bp, Homo sapien
gattattgcagtcccatgaaacatctaactgca

SEQ ID NO: 280425 - DNA, 33 bp, Homo sapien
tcatgtttctcaagcaccgttgtgtccctacgt

SEQ ID NO: 280426 - DNA, 33 bp, Homo sapien
tcatgtttctcaagcatcgttgtgtccctacgt

SEQ ID NO: 280427 - DNA, 33 bp, Homo sapien
ggtcctgggagctcggaacactttgtaaccact

SEQ ID NO: 280428 - DNA, 33 bp, Homo sapien
ggtcctgggagctcgggacactttgtaaccact

SEQ ID NO: 280429 - DNA, 33 bp, Homo sapien
agcttgctctaacttacactgcagaaataacac

SEQ ID NO: 280430 - DNA, 33 bp, Homo sapien
agcttgctctaacttagactgcagaaataacac

SEQ ID NO: 280431 - DNA, 33 bp, Homo sapien
accatttggtacatccaagtaaaaaccgatgtt

SEQ ID NO: 280432 - DNA, 33 bp, Homo sapien
accatttggtacatccgagtaaaaaccgatgtt

SEQ ID NO: 280433 - DNA, 33 bp, Homo sapien
ggaataacaagattacaagctaataacaacatt

SEQ ID NO: 280434 - DNA, 33 bp, Homo sapien
ggaataacaagattacgagctaataacaacatt

SEQ ID NO: 280435 - DNA, 33 bp, Homo sapien
gagttcttctccacaactgcatggctctagagt

SEQ ID NO: 280436 - DNA, 33 bp, Homo sapien
gagttcttctccacaattgcatggctctagagt

SEQ ID NO: 280437 - DNA, 33 bp, Homo sapien
caccatgccaggccccaattactatcatgtgaa

SEQ ID NO: 280438 - DNA, 33 bp, Homo sapien
caccatgccaggccccgattactatcatgtgaa

SEQ ID NO: 280439 - DNA, 33 bp, Homo sapien
taatcagcagtcctcaacctttttaacatgagg

SEQ ID NO: 280440 - DNA, 33 bp, Homo sapien
taatcagcagtcctcatcctttttaacatgagg

SEQ ID NO: 280441 - DNA, 33 bp, Homo sapien
tacctcttctatggaaattcactacagccatca

SEQ ID NO: 280442 - DNA, 33 bp, Homo sapien
tacctcttctatggaacttcactacagccatca

SEQ ID NO: 280443 - DNA, 33 bp, Homo sapien
aatggcaagaatgggaaaaaagtataaggaaag

SEQ ID NO: 280444 - DNA, 33 bp, Homo sapien
aatggcaagaatgggacaaaagtataaggaaag

SEQ ID NO: 280445 - DNA, 33 bp, Homo sapien
gaggaagaactggatacaaatgatttttaaaaa

SEQ ID NO: 280446 - DNA, 33 bp, Homo sapien
gaggaagaactggatagaaatgatttttaaaaa

SEQ ID NO: 280447 - DNA, 33 bp, Homo sapien
ttccaactgtagtacacggctgcacttgaccac

SEQ ID NO: 280448 - DNA, 33 bp, Homo sapien
ttccaactgtagtacatggctgcacttgaccac

SEQ ID NO: 280449 - DNA, 33 bp, Homo sapien
ttcaggtactctcatcccccagcacttcctaaa

SEQ ID NO: 280450 - DNA, 33 bp, Homo sapien
ttcaggtactctcatctcccagcacttcctaaa

SEQ ID NO: 280451 - DNA, 33 bp, Homo sapien
atgtggtatcttcctacgagttatttttacaat

SEQ ID NO: 280452 - DNA, 33 bp, Homo sapien
atgtggtatcttcctatgagttatttttacaat

SEQ ID NO: 280453 - DNA, 33 bp, Homo sapien
tggcagacttagaaaacaaagttgaggggaaca

SEQ ID NO: 280454 - DNA, 33 bp, Homo sapien
tggcagacttagaaaataaagttgaggggaaca

SEQ ID NO: 280455 - DNA, 33 bp, Homo sapien
aggagattctgaaagaaaacgttcagagaacaa

SEQ ID NO: 280456 - DNA, 33 bp, Homo sapien
aggagattctgaaagagaacgttcagagaacaa

SEQ ID NO: 280457 - DNA, 33 bp, Homo sapien
tttctatcttcgaaagccttcacactttactgg

SEQ ID NO: 280458 - DNA, 33 bp, Homo sapien
tttctatcttcgaaaggcttcacactttactgg

SEQ ID NO: 280459 - DNA, 33 bp, Homo sapien
tggcccttatatctacaacacacaagctacttt

SEQ ID NO: 280460 - DNA, 33 bp, Homo sapien
tggcccttatatctacgacacacaagctacttt

SEQ ID NO: 280461 - DNA, 33 bp, Homo sapien
taccctgatgtctaccacagtggctggtaaata

SEQ ID NO: 280462 - DNA, 33 bp, Homo sapien
taccctgatgtctaccccagtggctggtaaata

SEQ ID NO: 280463 - DNA, 33 bp, Homo sapien
tagcacatatcaggtaagtaggtataaaataca

SEQ ID NO: 280464 - DNA, 33 bp, Homo sapien
tagcacatatcaggtaggtaggtataaaataca

SEQ ID NO: 280465 - DNA, 33 bp, Homo sapien
tcacaatggagtatgacagatggacatatgtaa

SEQ ID NO: 280466 - DNA, 33 bp, Homo sapien
tcacaatggagtatgatagatggacatatgtaa

SEQ ID NO: 280467 - DNA, 33 bp, Homo sapien
atgcttacaacaaccaatgaaagagaatacaca

SEQ ID NO: 280468 - DNA, 33 bp, Homo sapien
atgcttacaacaaccagtgaaagagaatacaca

SEQ ID NO: 280469 - DNA, 33 bp, Homo sapien
gtcaatggttgcttaaattaaacataaatatat

SEQ ID NO: 280470 - DNA, 33 bp, Homo sapien
gtcaatggttgcttaagttaaacataaatatat

SEQ ID NO: 280471 - DNA, 33 bp, Homo sapien
ataatatctgacaacactgtgcccatgttccca

SEQ ID NO: 280472 - DNA, 33 bp, Homo sapien
ataatatctgacaacattgtgcccatgttccca

SEQ ID NO: 280473 - DNA, 33 bp, Homo sapien
cctctctcacactttcccctgagtccccaaagt

SEQ ID NO: 280474 - DNA, 33 bp, Homo sapien
cctctctcacactttctcctgagtccccaaagt

SEQ ID NO: 280475 - DNA, 33 bp, Homo sapien
cttatctgttgttcatcaaagaaataaactcct

SEQ ID NO: 280476 - DNA, 33 bp, Homo sapien
cttatctgttgttcatgaaagaaataaactcct

SEQ ID NO: 280477 - DNA, 33 bp, Homo sapien
agacaacagaatgggacaaagtagttacgaatc

SEQ ID NO: 280478 - DNA, 33 bp, Homo sapien
agacaacagaatgggagaaagtagttacgaatc

SEQ ID NO: 280479 - DNA, 33 bp, Homo sapien
agaaagatactgccaagaagttcaggtattctg

SEQ ID NO: 280480 - DNA, 33 bp, Homo sapien
agaaagatactgccaataagttcaggtattctg

SEQ ID NO: 280481 - DNA, 33 bp, Homo sapien
tatggtgtcgggggaacgggagtagactttgag

SEQ ID NO: 280482 - DNA, 33 bp, Homo sapien
tatggtgtcgggggaatgggagtagactttgag

SEQ ID NO: 280483 - DNA, 33 bp, Homo sapien
atacttacaaggtttacccatcagtatttcatc

SEQ ID NO: 280484 - DNA, 33 bp, Homo sapien
atacttacaaggtttatccatcagtatttcatc

SEQ ID NO: 280485 - DNA, 33 bp, Homo sapien
attctctagtggagaaaaaagctgccggaaatg

SEQ ID NO: 280486 - DNA, 33 bp, Homo sapien
attctctagtggagaacaaagctgccggaaatg

SEQ ID NO: 280487 - DNA, 33 bp, Homo sapien
tcacctagatgactaaatgaagactatgctggt

SEQ ID NO: 280488 - DNA, 33 bp, Homo sapien
tcacctagatgactaagtgaagactatgctggt

SEQ ID NO: 280489 - DNA, 33 bp, Homo sapien
taggaaaacctatccaatctttcaacacacata

SEQ ID NO: 280490 - DNA, 33 bp, Homo sapien
taggaaaacctatccagtctttcaacacacata

SEQ ID NO: 280491 - DNA, 33 bp, Homo sapien
tttggatggtccctaaactctgaagtgcagaaa

SEQ ID NO: 280492 - DNA, 33 bp, Homo sapien
tttggatggtccctaagctctgaagtgcagaaa

SEQ ID NO: 280493 - DNA, 33 bp, Homo sapien
tctctctgggagtgaaacattttgccagcaaca

SEQ ID NO: 280494 - DNA, 33 bp, Homo sapien
tctctctgggagtgaatcattttgccagcaaca

SEQ ID NO: 280495 - DNA, 33 bp, Homo sapien
aagggaagtaaactgaaatggcttaaaaacatc

SEQ ID NO: 280496 - DNA, 33 bp, Homo sapien
aagggaagtaaactgatatggcttaaaaacatc

SEQ ID NO: 280497 - DNA, 33 bp, Homo sapien
ataaactggcagttcacagaaaggtatcttcat

SEQ ID NO: 280498 - DNA, 33 bp, Homo sapien
ataaactggcagttcatagaaaggtatcttcat

SEQ ID NO: 280499 - DNA, 33 bp, Homo sapien
ttttcaatgttgcacacattcaaggagcctctc

SEQ ID NO: 280500 - DNA, 33 bp, Homo sapien
ttttcaatgttgcacatattcaaggagcctctc

SEQ ID NO: 280501 - DNA, 33 bp, Homo sapien
gaccacaccaaacacaataaggaagcagggaac

SEQ ID NO: 280502 - DNA, 33 bp, Homo sapien
gaccacaccaaacacattaaggaagcagggaac

SEQ ID NO: 280503 - DNA, 33 bp, Homo sapien
ttgaagaagctcaatgaaatttgatataacaca

SEQ ID NO: 280504 - DNA, 33 bp, Homo sapien
ttgaagaagctcaatgcaatttgatataacaca

SEQ ID NO: 280505 - DNA, 33 bp, Homo sapien
aacattatgatgggtacaaaactccacatatca

SEQ ID NO: 280506 - DNA, 33 bp, Homo sapien
aacattatgatgggtataaaactccacatatca

SEQ ID NO: 280507 - DNA, 33 bp, Homo sapien
gctgcagcaccgtttacgatagcaaagacacgg

SEQ ID NO: 280508 - DNA, 33 bp, Homo sapien
gctgcagcaccgtttatgatagcaaagacacgg

SEQ ID NO: 280509 - DNA, 33 bp, Homo sapien
agcatcaaaccgaaaaccttctgcagagcaaat

SEQ ID NO: 280510 - DNA, 33 bp, Homo sapien
agcatcaaaccgaaaagcttctgcagagcaaat

SEQ ID NO: 280511 - DNA, 33 bp, Homo sapien
gacatgattacaccaaactttcaacatatcacc

SEQ ID NO: 280512 - DNA, 33 bp, Homo sapien
gacatgattacaccaagctttcaacatatcacc

SEQ ID NO: 280513 - DNA, 33 bp, Homo sapien
ttttacatggcatttaaacttacaaacaacttt

SEQ ID NO: 280514 - DNA, 33 bp, Homo sapien
ttttacatggcatttatacttacaaacaacttt

SEQ ID NO: 280515 - DNA, 33 bp, Homo sapien
tggctatcctctccaactgactttgaatttcca

SEQ ID NO: 280516 - DNA, 33 bp, Homo sapien
tggctatcctctccaattgactttgaatttcca

SEQ ID NO: 280517 - DNA, 33 bp, Homo sapien
tttcagttaattttggcaaatatcaaggagtat

SEQ ID NO: 280518 - DNA, 33 bp, Homo sapien
tttcagttaattttggtaaatatcaaggagtat

SEQ ID NO: 280519 - DNA, 33 bp, Homo sapien
cctgaacccagaaaagcctagagacctcaccaa

SEQ ID NO: 280520 - DNA, 33 bp, Homo sapien
cctgaacccagaaaaggctagagacctcaccaa

SEQ ID NO: 280521 - DNA, 33 bp, Homo sapien
agcaaagtgttccagacatgacttgggtgctct

SEQ ID NO: 280522 - DNA, 33 bp, Homo sapien
agcaaagtgttccagatatgacttgggtgctct

SEQ ID NO: 280523 - DNA, 33 bp, Homo sapien
agacaatcaaattataactgtaaagaacaaaat

SEQ ID NO: 280524 - DNA, 33 bp, Homo sapien
agacaatcaaattatagctgtaaagaacaaaat

SEQ ID NO: 280525 - DNA, 33 bp, Homo sapien
acaagtcaggagagaaccaacaataaacaaaca

SEQ ID NO: 280526 - DNA, 33 bp, Homo sapien
acaagtcaggagagaagcaacaataaacaaaca

SEQ ID NO: 280527 - DNA, 33 bp, Homo sapien
cactttttgttcaaccaagtctactcctcacat

SEQ ID NO: 280528 - DNA, 33 bp, Homo sapien
cactttttgttcaaccgagtctactcctcacat

SEQ ID NO: 280529 - DNA, 33 bp, Homo sapien
gaaaagggcagtggtacgcttaacctcaagata

SEQ ID NO: 280530 - DNA, 33 bp, Homo sapien
gaaaagggcagtggtatgcttaacctcaagata

SEQ ID NO: 280531 - DNA, 33 bp, Homo sapien
atttagcactcaaatacagtggattgtattcca

SEQ ID NO: 280532 - DNA, 33 bp, Homo sapien
atttagcactcaaatatagtggattgtattcca

SEQ ID NO: 280533 - DNA, 33 bp, Homo sapien
tccatgtatgaaccctcaaagccagagtgagag

SEQ ID NO: 280534 - DNA, 33 bp, Homo sapien
tccatgtatgaaccctgaaagccagagtgagag

SEQ ID NO: 280535 - DNA, 33 bp, Homo sapien
aggaacacaagggggacggaaaatgcatctgtt

SEQ ID NO: 280536 - DNA, 33 bp, Homo sapien
aggaacacaagggggagggaaaatgcatctgtt

SEQ ID NO: 280537 - DNA, 33 bp, Homo sapien
atgtaagtcacttaaaggacatccacagaaaac

SEQ ID NO: 280538 - DNA, 33 bp, Homo sapien
atgtaagtcacttaaatgacatccacagaaaac

SEQ ID NO: 280539 - DNA, 33 bp, Homo sapien
tgtcagcatcatccacaaacagctgccaactgg

SEQ ID NO: 280540 - DNA, 33 bp, Homo sapien
tgtcagcatcatccaccaacagctgccaactgg

SEQ ID NO: 280541 - DNA, 33 bp, Homo sapien
agtactcacttgcagccagcattgggaatcacc

SEQ ID NO: 280542 - DNA, 33 bp, Homo sapien
agtactcacttgcagcgagcattgggaatcacc

SEQ ID NO: 280543 - DNA, 33 bp, Homo sapien
aagagaattgtgtcaccgatttcacttgcgctg

SEQ ID NO: 280544 - DNA, 33 bp, Homo sapien
aagagaattgtgtcactgatttcacttgcgctg

SEQ ID NO: 280545 - DNA, 33 bp, Homo sapien
ggaggagattgtgttaagtgaaataagtcaaga

SEQ ID NO: 280546 - DNA, 33 bp, Homo sapien
ggaggagattgtgttacgtgaaataagtcaaga

SEQ ID NO: 280547 - DNA, 33 bp, Homo sapien
gagttataaaacaacccgcaatatttgtcttac

SEQ ID NO: 280548 - DNA, 33 bp, Homo sapien
gagttataaaacaacctgcaatatttgtcttac

SEQ ID NO: 280549 - DNA, 33 bp, Homo sapien
gatatatacagcagaaagagatagctcaatatc

SEQ ID NO: 280550 - DNA, 33 bp, Homo sapien
gatatatacagcagaaggagatagctcaatatc

SEQ ID NO: 280551 - DNA, 33 bp, Homo sapien
tgtgaccaaatatagcactggagaactgagatg

SEQ ID NO: 280552 - DNA, 33 bp, Homo sapien
tgtgaccaaatatagcgctggagaactgagatg

SEQ ID NO: 280553 - DNA, 33 bp, Homo sapien
atccatttttgtgtcactatgcatgaaactgtg

SEQ ID NO: 280554 - DNA, 33 bp, Homo sapien
atccatttttgtgtcattatgcatgaaactgtg

SEQ ID NO: 280555 - DNA, 33 bp, Homo sapien
cctgagacccttaccaaaagctaagtagatgct

SEQ ID NO: 280556 - DNA, 33 bp, Homo sapien
cctgagacccttaccagaagctaagtagatgct

SEQ ID NO: 280557 - DNA, 33 bp, Homo sapien
taaaaagtaagtgccaagtacacagaattttct

SEQ ID NO: 280558 - DNA, 33 bp, Homo sapien
taaaaagtaagtgccatgtacacagaattttct

SEQ ID NO: 280559 - DNA, 33 bp, Homo sapien
tgtcatagcagcccaaaccgacttagataggaa

SEQ ID NO: 280560 - DNA, 33 bp, Homo sapien
tgtcatagcagcccaagccgacttagataggaa

SEQ ID NO: 280561 - DNA, 33 bp, Homo sapien
gatgggaaatgatttgaaagtacatggaaatat

SEQ ID NO: 280562 - DNA, 33 bp, Homo sapien
gatgggaaatgatttggaagtacatggaaatat

SEQ ID NO: 280563 - DNA, 33 bp, Homo sapien
tcaggaagcatggtacagagagagaagattagt

SEQ ID NO: 280564 - DNA, 33 bp, Homo sapien
tcaggaagcatggtacggagagagaagattagt

SEQ ID NO: 280565 - DNA, 33 bp, Homo sapien
caaagtctaagggcaaaggtaagccgtaatact

SEQ ID NO: 280566 - DNA, 33 bp, Homo sapien
caaagtctaagggcaacggtaagccgtaatact

SEQ ID NO: 280567 - DNA, 33 bp, Homo sapien
caaattaggaatcaaaaagtctcactagcccag

SEQ ID NO: 280568 - DNA, 33 bp, Homo sapien
caaattaggaatcaaacagtctcactagcccag

SEQ ID NO: 280569 - DNA, 33 bp, Homo sapien
ggaatagttaaacactaaatgccttagccatct

SEQ ID NO: 280570 - DNA, 33 bp, Homo sapien
ggaatagttaaacacttaatgccttagccatct

SEQ ID NO: 280571 - DNA, 33 bp, Homo sapien
ttcactctgcaaatagcctatgggactacttaa

SEQ ID NO: 280572 - DNA, 33 bp, Homo sapien
ttcactctgcaaatagtctatgggactacttaa

SEQ ID NO: 280573 - DNA, 33 bp, Homo sapien
tcatttgatatagacaaaaggctttttccatcc

SEQ ID NO: 280574 - DNA, 33 bp, Homo sapien
tcatttgatatagacagaaggctttttccatcc

SEQ ID NO: 280575 - DNA, 33 bp, Homo sapien
cagtgaaattgctacccaaatctaactcatttg

SEQ ID NO: 280576 - DNA, 33 bp, Homo sapien
cagtgaaattgctacctaaatctaactcatttg

SEQ ID NO: 280577 - DNA, 33 bp, Homo sapien
ctctccctctatccacccaaaatgtcaatgtcc

SEQ ID NO: 280578 - DNA, 33 bp, Homo sapien
ctctccctctatccactcaaaatgtcaatgtcc

SEQ ID NO: 280579 - DNA, 33 bp, Homo sapien
acctggaataactaagacaactggaaaagaaga

SEQ ID NO: 280580 - DNA, 33 bp, Homo sapien
acctggaataactaagtcaactggaaaagaaga

SEQ ID NO: 280581 - DNA, 33 bp, Homo sapien
ttcagtactgttaaataaaagattcctgtccaa

SEQ ID NO: 280582 - DNA, 33 bp, Homo sapien
ttcagtactgttaaatgaaagattcctgtccaa

SEQ ID NO: 280583 - DNA, 33 bp, Homo sapien
ctatctagtagactcacagtcgaagtgcttggt

SEQ ID NO: 280584 - DNA, 33 bp, Homo sapien
ctatctagtagactcatagtcgaagtgcttggt

SEQ ID NO: 280585 - DNA, 33 bp, Homo sapien
ttaactcgcaaaaagcagcttgattctttttat

SEQ ID NO: 280586 - DNA, 33 bp, Homo sapien
ttaactcgcaaaaagcggcttgattctttttat

SEQ ID NO: 280587 - DNA, 33 bp, Homo sapien
aggtggtttaaggtgacctccaggaaaacatga

SEQ ID NO: 280588 - DNA, 33 bp, Homo sapien
aggtggtttaaggtgagctccaggaaaacatga

SEQ ID NO: 280589 - DNA, 33 bp, Homo sapien
tctctttgcttttaatgactgtgaggcatatcg

SEQ ID NO: 280590 - DNA, 33 bp, Homo sapien
tctctttgcttttaattactgtgaggcatatcg

SEQ ID NO: 280591 - DNA, 33 bp, Homo sapien
atttttatttctttgaagtgatcacatacacac

SEQ ID NO: 280592 - DNA, 33 bp, Homo sapien
atttttatttctttgaggtgatcacatacacac

SEQ ID NO: 280593 - DNA, 33 bp, Homo sapien
agagattctatattaaaggcctaaacaaacagt

SEQ ID NO: 280594 - DNA, 33 bp, Homo sapien
agagattctatattaatggcctaaacaaacagt

SEQ ID NO: 280595 - DNA, 33 bp, Homo sapien
aaaatacctacaaatcagaaacaaaatattttt

SEQ ID NO: 280596 - DNA, 33 bp, Homo sapien
aaaatacctacaaatcggaaacaaaatattttt

SEQ ID NO: 280597 - DNA, 33 bp, Homo sapien
ggtaaaagcataaacaatgaggaaattcagaaa

SEQ ID NO: 280598 - DNA, 33 bp, Homo sapien
ggtaaaagcataaacagtgaggaaattcagaaa

SEQ ID NO: 280599 - DNA, 33 bp, Homo sapien
atggaggtaggaaatcagattctcagttaagac

SEQ ID NO: 280600 - DNA, 33 bp, Homo sapien
atggaggtaggaaatcggattctcagttaagac

SEQ ID NO: 280601 - DNA, 33 bp, Homo sapien
attaaaacatagttcacaccctcaaggagatca

SEQ ID NO: 280602 - DNA, 33 bp, Homo sapien
attaaaacatagttcataccctcaaggagatca

SEQ ID NO: 280603 - DNA, 33 bp, Homo sapien
catgaaataggcacaactatcttcatccccatc

SEQ ID NO: 280604 - DNA, 33 bp, Homo sapien
catgaaataggcacaattatcttcatccccatc

SEQ ID NO: 280605 - DNA, 33 bp, Homo sapien
gtttcagaagcttccaatcactgaccaattatt

SEQ ID NO: 280606 - DNA, 33 bp, Homo sapien
gtttcagaagcttccagtcactgaccaattatt

SEQ ID NO: 280607 - DNA, 33 bp, Homo sapien
atttaaaaaggaatcccataattcttgcagaat

SEQ ID NO: 280608 - DNA, 33 bp, Homo sapien
atttaaaaaggaatccgataattcttgcagaat

SEQ ID NO: 280609 - DNA, 33 bp, Homo sapien
atctaggttatttatacgaaaagcccagtttct

SEQ ID NO: 280610 - DNA, 33 bp, Homo sapien
atctaggttatttatatgaaaagcccagtttct

SEQ ID NO: 280611 - DNA, 33 bp, Homo sapien
cctgtgggcagagttcactctcctagcaaaaca

SEQ ID NO: 280612 - DNA, 33 bp, Homo sapien
cctgtgggcagagttcgctctcctagcaaaaca

SEQ ID NO: 280613 - DNA, 33 bp, Homo sapien
ttgaattaccagcccccaggtcccttccatgac

SEQ ID NO: 280614 - DNA, 33 bp, Homo sapien
ttgaattaccagccccgaggtcccttccatgac

SEQ ID NO: 280615 - DNA, 33 bp, Homo sapien
aaaatgcactactatactatagcgcatattttt

SEQ ID NO: 280616 - DNA, 33 bp, Homo sapien
aaaatgcactactatattatagcgcatattttt

SEQ ID NO: 280617 - DNA, 33 bp, Homo sapien
gctcaacatggttaatcatcagagagatgcaaa

SEQ ID NO: 280618 - DNA, 33 bp, Homo sapien
gctcaacatggttaatgatcagagagatgcaaa

SEQ ID NO: 280619 - DNA, 33 bp, Homo sapien; identical to SEQ ID NO: 280617

SEQ ID NO: 280620 - DNA, 33 bp, Homo sapien; identical to SEQ ID NO: 280618

SEQ ID NO: 280621 - DNA, 33 bp, Homo sapien
attctggggattaagacctggaaatatatgtta

SEQ ID NO: 280622 - DNA, 33 bp, Homo sapien
attctggggattaagatctggaaatatatgtta

SEQ ID NO: 280623 - DNA, 33 bp, Homo sapien
ttcaggggattgactcaaaatttactggttaat

SEQ ID NO: 280624 - DNA, 33 bp, Homo sapien
ttcaggggattgactcgaaatttactggttaat

SEQ ID NO: 280625 - DNA, 33 bp, Homo sapien
atttctttgctcttgaactgagagctgtaattt

SEQ ID NO: 280626 - DNA, 33 bp, Homo sapien
atttctttgctcttgagctgagagctgtaattt

SEQ ID NO: 280627 - DNA, 33 bp, Homo sapien
tgcttctttccaatcaatattaacacatataat

SEQ ID NO: 280628 - DNA, 33 bp, Homo sapien
tgcttctttccaatcagtattaacacatataat

SEQ ID NO: 280629 - DNA, 33 bp, Homo sapien
aagtggcattatctcccaggcattttttcttgt

SEQ ID NO: 280630 - DNA, 33 bp, Homo sapien
aagtggcattatctcctaggcattttttcttgt

SEQ ID NO: 280631 - DNA, 33 bp, Homo sapien
taataatgctaccatgcagaggtaactgaatag

SEQ ID NO: 280632 - DNA, 33 bp, Homo sapien
taataatgctaccatgtagaggtaactgaatag

SEQ ID NO: 280633 - DNA, 33 bp, Homo sapien
atctggaagacctaacacagactgggaagagag

SEQ ID NO: 280634 - DNA, 33 bp, Homo sapien
atctggaagacctaacccagactgggaagagag

SEQ ID NO: 280635 - DNA, 33 bp, Homo sapien
gggttgcgaagacacaccaggatgcaggagagc

SEQ ID NO: 280636 - DNA, 33 bp, Homo sapien
gggttgcgaagacacatcaggatgcaggagagc

SEQ ID NO: 280637 - DNA, 33 bp, Homo sapien
atcattgctaagacatcaccggaaatctaatga

SEQ ID NO: 280638 - DNA, 33 bp, Homo sapien
atcattgctaagacattaccggaaatctaatga

SEQ ID NO: 280639 - DNA, 33 bp, Homo sapien
cctagatatggcttgaaggaagagttagaaaat

SEQ ID NO: 280640 - DNA, 33 bp, Homo sapien
cctagatatggcttgagggaagagttagaaaat

SEQ ID NO: 280641 - DNA, 33 bp, Homo sapien
tgttccttgaaattgaactcttagcatttcagt

SEQ ID NO: 280642 - DNA, 33 bp, Homo sapien
tgttccttgaaattgagctcttagcatttcagt

SEQ ID NO: 280643 - DNA, 33 bp, Homo sapien
aagaaagtgtacattccaattccctggactaaa

SEQ ID NO: 280644 - DNA, 33 bp, Homo sapien
aagaaagtgtacattctaattccctggactaaa

SEQ ID NO: 280645 - DNA, 33 bp, Homo sapien
aataaaagatttattcaaagtgcaagagtgatc

SEQ ID NO: 280646 - DNA, 33 bp, Homo sapien
aataaaagatttattccaagtgcaagagtgatc

SEQ ID NO: 280647 - DNA, 33 bp, Homo sapien
agtcaagtactgggaaacattccagttcatggt

SEQ ID NO: 280648 - DNA, 33 bp, Homo sapien
agtcaagtactgggaagcattccagttcatggt

SEQ ID NO: 280649 - DNA, 33 bp, Homo sapien
tagtcaagaatgatgaactttgggaaaatcatt

SEQ ID NO: 280650 - DNA, 33 bp, Homo sapien
tagtcaagaatgatgagctttgggaaaatcatt

SEQ ID NO: 280651 - DNA, 33 bp, Homo sapien
aaatttaagactctacactatgattttatcttt

SEQ ID NO: 280652 - DNA, 33 bp, Homo sapien
aaatttaagactctacgctatgattttatcttt

SEQ ID NO: 280653 - DNA, 33 bp, Homo sapien
ttgggaaatcaatgataaagaaactgcaatacc

SEQ ID NO: 280654 - DNA, 33 bp, Homo sapien
ttgggaaatcaatgatgaagaaactgcaatacc

SEQ ID NO: 280655 - DNA, 33 bp, Homo sapien
taagtttatttgcaccaggaaatttcttgactt

SEQ ID NO: 280656 - DNA, 33 bp, Homo sapien
taagtttatttgcaccgggaaatttcttgactt

SEQ ID NO: 280657 - DNA, 33 bp, Homo sapien
aacagagatcttgagcgactggattttgagcta

SEQ ID NO: 280658 - DNA, 33 bp, Homo sapien
aacagagatcttgagctactggattttgagcta

SEQ ID NO: 280659 - DNA, 33 bp, Homo sapien
ccctttttgcttttaaagtcatcaaacatttga

SEQ ID NO: 280660 - DNA, 33 bp, Homo sapien
ccctttttgcttttaaggtcatcaaacatttga

SEQ ID NO: 280661 - DNA, 33 bp, Homo sapien
taagatagagaagccaatatagtagagatgaga

SEQ ID NO: 280662 - DNA, 33 bp, Homo sapien
taagatagagaagccagtatagtagagatgaga

SEQ ID NO: 280663 - DNA, 33 bp, Homo sapien
cctcatatcctcaacccattcttccctcatttt

SEQ ID NO: 280664 - DNA, 33 bp, Homo sapien
cctcatatcctcaacctattcttccctcatttt

SEQ ID NO: 280665 - DNA, 33 bp, Homo sapien
gctaaatgttttctcccatgcttcacaatggcc

SEQ ID NO: 280666 - DNA, 33 bp, Homo sapien
gctaaatgttttctcctatgcttcacaatggcc

SEQ ID NO: 280667 - DNA, 33 bp, Homo sapien
taaaatcagaagagtacgtcaatgtgtatgttg

SEQ ID NO: 280668 - DNA, 33 bp, Homo sapien
taaaatcagaagagtatgtcaatgtgtatgttg

SEQ ID NO: 280669 - DNA, 33 bp, Homo sapien
aagagatggaaggaaactttttgcaagtggcag

SEQ ID NO: 280670 - DNA, 33 bp, Homo sapien
aagagatggaaggaaattttttgcaagtggcag

SEQ ID NO: 280671 - DNA, 33 bp, Homo sapien
atcatatgaagacaaaattggtaagattagcac

SEQ ID NO: 280672 - DNA, 33 bp, Homo sapien
atcatatgaagacaaagttggtaagattagcac

SEQ ID NO: 280673 - DNA, 33 bp, Homo sapien
ctattactcatacatcacaaacactgttatgaa

SEQ ID NO: 280674 - DNA, 33 bp, Homo sapien
ctattactcatacatcgcaaacactgttatgaa

SEQ ID NO: 280675 - DNA, 33 bp, Homo sapien
aaatgatcaatattcagcaaaacctcagacaat

SEQ ID NO: 280676 - DNA, 33 bp, Homo sapien
aaatgatcaatattcatcaaaacctcagacaat

SEQ ID NO: 280677 - DNA, 33 bp, Homo sapien
ggtgctgccaaaattccagttattggaccaaaa

SEQ ID NO: 280678 - DNA, 33 bp, Homo sapien
ggtgctgccaaaattctagttattggaccaaaa

SEQ ID NO: 280679 - DNA, 33 bp, Homo sapien
gaataaggagaatgtaagcacaaagaacaagat

SEQ ID NO: 280680 - DNA, 33 bp, Homo sapien
gaataaggagaatgtatgcacaaagaacaagat

SEQ ID NO: 280681 - DNA, 33 bp, Homo sapien
aactggctcataaatcgatagtcatgagaaatt

SEQ ID NO: 280682 - DNA, 33 bp, Homo sapien
aactggctcataaatctatagtcatgagaaatt

SEQ ID NO: 280683 - DNA, 33 bp, Homo sapien
ataatatgtgagctgtaaaattggaagtcaaaa

SEQ ID NO: 280684 - DNA, 33 bp, Homo sapien
ataatatgtgagctgtcaaattggaagtcaaaa

SEQ ID NO: 280685 - DNA, 33 bp, Homo sapien
tcaaccaggcctatgagaacttctcaagcaaga

SEQ ID NO: 280686 - DNA, 33 bp, Homo sapien
tcaaccaggcctatgataacttctcaagcaaga

SEQ ID NO: 280687 - DNA, 33 bp, Homo sapien
aaaactacagggtaagaaaagtatcagactgca

SEQ ID NO: 280688 - DNA, 33 bp, Homo sapien
aaaactacagggtaaggaaagtatcagactgca

SEQ ID NO: 280689 - DNA, 33 bp, Homo sapien
ttgggacctcaagaagaagatattgaatgggat

SEQ ID NO: 280690 - DNA, 33 bp, Homo sapien
ttgggacctcaagaagcagatattgaatgggat

SEQ ID NO: 280691 - DNA, 33 bp, Homo sapien
catgagccaccgttccaagcctgatatttaaat

SEQ ID NO: 280692 - DNA, 33 bp, Homo sapien
catgagccaccgttcccagcctgatatttaaat

SEQ ID NO: 280693 - DNA, 33 bp, Homo sapien
gtatgatggacccagaacttaaattttgttagt

SEQ ID NO: 280694 - DNA, 33 bp, Homo sapien
gtatgatggacccagagcttaaattttgttagt

SEQ ID NO: 280695 - DNA, 33 bp, Homo sapien
ctaagacatcagctaaagaaagtatatgacacg

SEQ ID NO: 280696 - DNA, 33 bp, Homo sapien
ctaagacatcagctaaggaaagtatatgacacg

SEQ ID NO: 280697 - DNA, 33 bp, Homo sapien
aaattatttctccaaaaaaagacagggtgtatc

SEQ ID NO: 280698 - DNA, 33 bp, Homo sapien
aaattatttctccaaacaaagacagggtgtatc

SEQ ID NO: 280699 - DNA, 33 bp, Homo sapien
atttctaatttaagaccgaacgtacttccaaaa

SEQ ID NO: 280700 - DNA, 33 bp, Homo sapien
atttctaatttaagactgaacgtacttccaaaa

SEQ ID NO: 280701 - DNA, 33 bp, Homo sapien
ctattataattgaatacggtcacgtgccacata

SEQ ID NO: 280702 - DNA, 33 bp, Homo sapien
ctattataattgaatatggtcacgtgccacata

SEQ ID NO: 280703 - DNA, 33 bp, Homo sapien
ggtcagtaatgtgttacgctttgacattatcat

SEQ ID NO: 280704 - DNA, 33 bp, Homo sapien
ggtcagtaatgtgttatgctttgacattatcat

SEQ ID NO: 280705 - DNA, 33 bp, Homo sapien
ttgacctcagtgactaaaacaggagaagacgtc

SEQ ID NO: 280706 - DNA, 33 bp, Homo sapien
ttgacctcagtgactagaacaggagaagacgtc

SEQ ID NO: 280707 - DNA, 33 bp, Homo sapien
acaattctgaaagccaagaagatctccattacc

SEQ ID NO: 280708 - DNA, 33 bp, Homo sapien
acaattctgaaagccaggaagatctccattacc

SEQ ID NO: 280709 - DNA, 33 bp, Homo sapien
atgtgactcaatggtcccaagatactgccagtc

SEQ ID NO: 280710 - DNA, 33 bp, Homo sapien
atgtgactcaatggtctcaagatactgccagtc

SEQ ID NO: 280711 - DNA, 33 bp, Homo sapien
gaccagtggtttcagcaataagctgatgtagcc

SEQ ID NO: 280712 - DNA, 33 bp, Homo sapien
gaccagtggtttcagcgataagctgatgtagcc

SEQ ID NO: 280713 - DNA, 33 bp, Homo sapien
cctaatcttttgctaactggacttttccatata

SEQ ID NO: 280714 - DNA, 33 bp, Homo sapien
cctaatcttttgctaagtggacttttccatata

SEQ ID NO: 280715 - DNA, 33 bp, Homo sapien
tttcagcaattcctctaaaaatcagaaacttgg

SEQ ID NO: 280716 - DNA, 33 bp, Homo sapien
tttcagcaattcctctgaaaatcagaaacttgg

SEQ ID NO: 280717 - DNA, 33 bp, Homo sapien
agtataagggaggaacaacttggtgtcatttgt

SEQ ID NO: 280718 - DNA, 33 bp, Homo sapien
agtataagggaggaaccacttggtgtcatttgt

SEQ ID NO: 280719 - DNA, 33 bp, Homo sapien
tgtgtctcacaaacccaaagcatcttagtttat

SEQ ID NO: 280720 - DNA, 33 bp, Homo sapien
tgtgtctcacaaacccgaagcatcttagtttat

SEQ ID NO: 280721 - DNA, 33 bp, Homo sapien
aaattggattcctgccgcgtaccatatactaaa

SEQ ID NO: 280722 - DNA, 33 bp, Homo sapien
aaattggattcctgcctcgtaccatatactaaa

SEQ ID NO: 280723 - DNA, 33 bp, Homo sapien
ggagtgggagttcacactctgtgcaaatggaaa

SEQ ID NO: 280724 - DNA, 33 bp, Homo sapien
ggagtgggagttcacagtctgtgcaaatggaaa

SEQ ID NO: 280725 - DNA, 33 bp, Homo sapien
actgctgggtcagagacagggagtatattcaat

SEQ ID NO: 280726 - DNA, 33 bp, Homo sapien
actgctgggtcagagagagggagtatattcaat

SEQ ID NO: 280727 - DNA, 33 bp, Homo sapien
caaatagtaaagcacaataagttggtaaaatta

SEQ ID NO: 280728 - DNA, 33 bp, Homo sapien
caaatagtaaagcacagtaagttggtaaaatta

SEQ ID NO: 280729 - DNA, 33 bp, Homo sapien
ccttaaacatcctcacaacacttacgttatttc

SEQ ID NO: 280730 - DNA, 33 bp, Homo sapien
ccttaaacatcctcacgacacttacgttatttc

SEQ ID NO: 280731 - DNA, 33 bp, Homo sapien
ccattcagcagaagcaatactttgaattttgat

SEQ ID NO: 280732 - DNA, 33 bp, Homo sapien
ccattcagcagaagcagtactttgaattttgat

SEQ ID NO: 280733 - DNA, 33 bp, Homo sapien
caatttcacagatattaaaagatcttgttgatg

SEQ ID NO: 280734 - DNA, 33 bp, Homo sapien
caatttcacagatattgaaagatcttgttgatg

SEQ ID NO: 280735 - DNA, 33 bp, Homo sapien
ctttccattttggataaatctcttcacacctac

SEQ ID NO: 280736 - DNA, 33 bp, Homo sapien
ctttccattttggatacatctcttcacacctac

SEQ ID NO: 280737 - DNA, 33 bp, Homo sapien
actatttgccatataccctgagtattacagaat

SEQ ID NO: 280738 - DNA, 33 bp, Homo sapien
actatttgccatatactctgagtattacagaat

SEQ ID NO: 280739 - DNA, 33 bp, Homo sapien
ccaatagaagtaatacaacaggttcagaatcca

SEQ ID NO: 280740 - DNA, 33 bp, Homo sapien
ccaatagaagtaatactacaggttcagaatcca

SEQ ID NO: 280741 - DNA, 33 bp, Homo sapien
gcttgagtctttgatacaggggtgacagagata

SEQ ID NO: 280742 - DNA, 33 bp, Homo sapien
gcttgagtctttgatataggggtgacagagata

SEQ ID NO: 280743 - DNA, 33 bp, Homo sapien
agtgagaattaactacccgatgctattaataac

SEQ ID NO: 280744 - DNA, 33 bp, Homo sapien
agtgagaattaactactcgatgctattaataac

SEQ ID NO: 280745 - DNA, 33 bp, Homo sapien
ataaaggaattggacacgtaagagtaaatgtac

SEQ ID NO: 280746 - DNA, 33 bp, Homo sapien
ataaaggaattggacatgtaagagtaaatgtac

SEQ ID NO: 280747 - DNA, 33 bp, Homo sapien
cacaaagataggaacaatagacactggactgct

SEQ ID NO: 280748 - DNA, 33 bp, Homo sapien
cacaaagataggaacattagacactggactgct

SEQ ID NO: 280749 - DNA, 33 bp, Homo sapien
ttatcttgagcatctaaagttttgcaagttcta

SEQ ID NO: 280750 - DNA, 33 bp, Homo sapien
ttatcttgagcatctagagttttgcaagttcta

SEQ ID NO: 280751 - DNA, 33 bp, Homo sapien
agagttgccagtgtacaaagagccattcaccac

SEQ ID NO: 280752 - DNA, 33 bp, Homo sapien
agagttgccagtgtacgaagagccattcaccac

SEQ ID NO: 280753 - DNA, 33 bp, Homo sapien
ccactcatatgtttcccattcagagagtaaaac

SEQ ID NO: 280754 - DNA, 33 bp, Homo sapien
ccactcatatgtttcctattcagagagtaaaac

SEQ ID NO: 280755 - DNA, 33 bp, Homo sapien
atcacatctgaatctacgacaggaaaagaagat

SEQ ID NO: 280756 - DNA, 33 bp, Homo sapien
atcacatctgaatctatgacaggaaaagaagat

SEQ ID NO: 280757 - DNA, 33 bp, Homo sapien
gattataggcatgatccatgaacatattttgtc

SEQ ID NO: 280758 - DNA, 33 bp, Homo sapien
gattataggcatgatcgatgaacatattttgtc

SEQ ID NO: 280759 - DNA, 33 bp, Homo sapien
tcagccctttaaacacagagaatttgaaatgat

SEQ ID NO: 280760 - DNA, 33 bp, Homo sapien
tcagccctttaaacaccgagaatttgaaatgat

SEQ ID NO: 280761 - DNA, 33 bp, Homo sapien
agaactgtagtaggcacattggtaacacatttg

SEQ ID NO: 280762 - DNA, 33 bp, Homo sapien
agaactgtagtaggcatattggtaacacatttg

SEQ ID NO: 280763 - DNA, 33 bp, Homo sapien
gggagggcaagcaacaatagtaaattatggatt

SEQ ID NO: 280764 - DNA, 33 bp, Homo sapien
gggagggcaagcaacagtagtaaattatggatt

SEQ ID NO: 280765 - DNA, 33 bp, Homo sapien
aaagtagatcacttcacaaaggactcctgttag

SEQ ID NO: 280766 - DNA, 33 bp, Homo sapien
aaagtagatcacttcagaaaggactcctgttag

SEQ ID NO: 280767 - DNA, 33 bp, Homo sapien
gtgataaatgccacaaagatgccttcttgttga

SEQ ID NO: 280768 - DNA, 33 bp, Homo sapien
gtgataaatgccacaaggatgccttcttgttga

SEQ ID NO: 280769 - DNA, 33 bp, Homo sapien
ccagagaacccaaggccaaaaatgatcacagtt

SEQ ID NO: 280770 - DNA, 33 bp, Homo sapien
ccagagaacccaaggcgaaaaatgatcacagtt

SEQ ID NO: 280771 - DNA, 33 bp, Homo sapien
attttgataaatgccaaaaagacatttgacaat

SEQ ID NO: 280772 - DNA, 33 bp, Homo sapien
attttgataaatgccagaaagacatttgacaat

SEQ ID NO: 280773 - DNA, 33 bp, Homo sapien
aactacctcacttacactgcctctgtctctcag

SEQ ID NO: 280774 - DNA, 33 bp, Homo sapien
aactacctcacttacattgcctctgtctctcag

SEQ ID NO: 280775 - DNA, 33 bp, Homo sapien
aaataaagtcttgaccaataggttagacagcta

SEQ ID NO: 280776 - DNA, 33 bp, Homo sapien
aaataaagtcttgaccgataggttagacagcta

SEQ ID NO: 280777 - DNA, 33 bp, Homo sapien
tattttgctatctctaaggaatattgtacaaga

SEQ ID NO: 280778 - DNA, 33 bp, Homo sapien
tattttgctatctctacggaatattgtacaaga

SEQ ID NO: 280779 - DNA, 33 bp, Homo sapien
gagtaattgagaaactcagaatttcagtgtatg

SEQ ID NO: 280780 - DNA, 33 bp, Homo sapien
gagtaattgagaaacttagaatttcagtgtatg

SEQ ID NO: 280781 - DNA, 33 bp, Homo sapien
agggcctacctagagcacatgacctccaccttc

SEQ ID NO: 280782 - DNA, 33 bp, Homo sapien
agggcctacctagagcgcatgacctccaccttc

SEQ ID NO: 280783 - DNA, 33 bp, Homo sapien
ctaaccttattaagcaatctgcagatataagca

SEQ ID NO: 280784 - DNA, 33 bp, Homo sapien
ctaaccttattaagcagtctgcagatataagca

SEQ ID NO: 280785 - DNA, 33 bp, Homo sapien
agacttactcaacccagtcccaaagccgactag

SEQ ID NO: 280786 - DNA, 33 bp, Homo sapien
agacttactcaacccattcccaaagccgactag

SEQ ID NO: 280787 - DNA, 33 bp, Homo sapien
ctggcttggcaaagaccaaataaacacgcttga

SEQ ID NO: 280788 - DNA, 33 bp, Homo sapien
ctggcttggcaaagacgaaataaacacgcttga

SEQ ID NO: 280789 - DNA, 33 bp, Homo sapien
ctttcatgatgaacaacgagaagtggtagaatc

SEQ ID NO: 280790 - DNA, 33 bp, Homo sapien
ctttcatgatgaacaatgagaagtggtagaatc

SEQ ID NO: 280791 - DNA, 33 bp, Homo sapien
ttatggagaatgtctaaagtgagtacagtatgt

SEQ ID NO: 280792 - DNA, 33 bp, Homo sapien
ttatggagaatgtctagagtgagtacagtatgt

SEQ ID NO: 280793 - DNA, 33 bp, Homo sapien
tgctaggtactgcaaaattgtggtttgccaatt

SEQ ID NO: 280794 - DNA, 33 bp, Homo sapien
tgctaggtactgcaaagttgtggtttgccaatt

SEQ ID NO: 280795 - DNA, 33 bp, Homo sapien
cataccataaaaatgacatagtgattatgctaa

SEQ ID NO: 280796 - DNA, 33 bp, Homo sapien
cataccataaaaatgatatagtgattatgctaa

SEQ ID NO: 280797 - DNA, 33 bp, Homo sapien
aggagaatgagaataccaagtgttggtgaggac

SEQ ID NO: 280798 - DNA, 33 bp, Homo sapien
aggagaatgagaatacgaagtgttggtgaggac

SEQ ID NO: 280799 - DNA, 33 bp, Homo sapien
acctcttttccactcacgtatgaagagcctaag

SEQ ID NO: 280800 - DNA, 33 bp, Homo sapien
acctcttttccactcaggtatgaagagcctaag

SEQ ID NO: 280801 - DNA, 33 bp, Homo sapien
tttgcaatgtgctttcggaaactgaggaaatta

SEQ ID NO: 280802 - DNA, 33 bp, Homo sapien
tttgcaatgtgctttctgaaactgaggaaatta

SEQ ID NO: 280803 - DNA, 33 bp, Homo sapien
ctgtttcgtttttatgccaaatttgttctgatt

SEQ ID NO: 280804 - DNA, 33 bp, Homo sapien
ctgtttcgtttttatgtcaaatttgttctgatt

SEQ ID NO: 280805 - DNA, 33 bp, Homo sapien
catttttatcccacaccgatacgagtactattt

SEQ ID NO: 280806 - DNA, 33 bp, Homo sapien
catttttatcccacactgatacgagtactattt

SEQ ID NO: 280807 - DNA, 33 bp, Homo sapien
tggaaaataatgaataacaagactgtccagtag

SEQ ID NO: 280808 - DNA, 33 bp, Homo sapien
tggaaaataatgaatagcaagactgtccagtag

SEQ ID NO: 280809 - DNA, 33 bp, Homo sapien
tgaaagatgtaggaaaggtctcttgttcaaaaa

SEQ ID NO: 280810 - DNA, 33 bp, Homo sapien
tgaaagatgtaggaaatgtctcttgttcaaaaa

SEQ ID NO: 280811 - DNA, 33 bp, Homo sapien
tttagaccagcatccaatgaaacctacatcttg

SEQ ID NO: 280812 - DNA, 33 bp, Homo sapien
tttagaccagcatccagtgaaacctacatcttg

SEQ ID NO: 280813 - DNA, 33 bp, Homo sapien
cctataggcttaatgaggatttgattataaata

SEQ ID NO: 280814 - DNA, 33 bp, Homo sapien
cctataggcttaatgatgatttgattataaata

SEQ ID NO: 280815 - DNA, 33 bp, Homo sapien
ctaacttttagctaaacctgcaactatattcct

SEQ ID NO: 280816 - DNA, 33 bp, Homo sapien
ctaacttttagctaaagctgcaactatattcct

SEQ ID NO: 280817 - DNA, 33 bp, Homo sapien
aaaactaaacactatacaatctctgcatattcc

SEQ ID NO: 280818 - DNA, 33 bp, Homo sapien
aaaactaaacactatagaatctctgcatattcc

SEQ ID NO: 280819 - DNA, 33 bp, Homo sapien
tgaatttctaaatatcaaatagtctggcctccc

SEQ ID NO: 280820 - DNA, 33 bp, Homo sapien
tgaatttctaaatatcgaatagtctggcctccc

SEQ ID NO: 280821 - DNA, 33 bp, Homo sapien
ctgaaaattgtcaagacgtataggtgctcttaa

SEQ ID NO: 280822 - DNA, 33 bp, Homo sapien
ctgaaaattgtcaagatgtataggtgctcttaa

SEQ ID NO: 280823 - DNA, 33 bp, Homo sapien
cccttgattttgaaagcagctttgaaactcaag

SEQ ID NO: 280824 - DNA, 33 bp, Homo sapien
cccttgattttgaaagtagctttgaaactcaag

SEQ ID NO: 280825 - DNA, 33 bp, Homo sapien
gcacagcaagctgagaaaaaagaaggagaaata

SEQ ID NO: 280826 - DNA, 33 bp, Homo sapien
gcacagcaagctgagagaaaagaaggagaaata

SEQ ID NO: 280827 - DNA, 33 bp, Homo sapien
gagaggcaaaaagagaagaattcaaccttgaac

SEQ ID NO: 280828 - DNA, 33 bp, Homo sapien
gagaggcaaaaagagaggaattcaaccttgaac

SEQ ID NO: 280829 - DNA, 33 bp, Homo sapien
atctgctggaaaaatccgaaggaagccagatat

SEQ ID NO: 280830 - DNA, 33 bp, Homo sapien
atctgctggaaaaatctgaaggaagccagatat

SEQ ID NO: 280831 - DNA, 33 bp, Homo sapien
atgccagattatctccgcattcacaaagctttt

SEQ ID NO: 280832 - DNA, 33 bp, Homo sapien
atgccagattatctcctcattcacaaagctttt

SEQ ID NO: 280833 - DNA, 33 bp, Homo sapien
atgtttgatttagaacagaccacatctatctca

SEQ ID NO: 280834 - DNA, 33 bp, Homo sapien
atgtttgatttagaaccgaccacatctatctca

SEQ ID NO: 280835 - DNA, 33 bp, Homo sapien
ccatttgttttcaaggaatgttgactattgcaa

SEQ ID NO: 280836 - DNA, 33 bp, Homo sapien
ccatttgttttcaaggcatgttgactattgcaa

SEQ ID NO: 280837 - DNA, 33 bp, Homo sapien
acaggaggctatataaagttacagaaatgaata

SEQ ID NO: 280838 - DNA, 33 bp, Homo sapien
acaggaggctatataaggttacagaaatgaata

SEQ ID NO: 280839 - DNA, 33 bp, Homo sapien
aaagtttaatatacaccatgcatcacaggcaaa

SEQ ID NO: 280840 - DNA, 33 bp, Homo sapien
aaagtttaatatacactatgcatcacaggcaaa

SEQ ID NO: 280841 - DNA, 33 bp, Homo sapien
attaccaagagagtgaatatatagagagaagtg

SEQ ID NO: 280842 - DNA, 33 bp, Homo sapien
attaccaagagagtgagtatatagagagaagtg

SEQ ID NO: 280843 - DNA, 33 bp, Homo sapien
catcattctagcttaaaaacattgacttcaaag

SEQ ID NO: 280844 - DNA, 33 bp, Homo sapien
catcattctagcttaagaacattgacttcaaag

SEQ ID NO: 280845 - DNA, 33 bp, Homo sapien
acattctctgaagtcaatatttcccacatcaaa

SEQ ID NO: 280846 - DNA, 33 bp, Homo sapien
acattctctgaagtcagtatttcccacatcaaa

SEQ ID NO: 280847 - DNA, 33 bp, Homo sapien
gtgtgagtcagtgtcccactcttgccaagggag

SEQ ID NO: 280848 - DNA, 33 bp, Homo sapien
gtgtgagtcagtgtcctactcttgccaagggag

SEQ ID NO: 280849 - DNA, 33 bp, Homo sapien
gtgactgtgggaatgacgcaccaggacttgcgg

SEQ ID NO: 280850 - DNA, 33 bp, Homo sapien
gtgactgtgggaatgaggcaccaggacttgcgg

SEQ ID NO: 280851 - DNA, 33 bp, Homo sapien
aggccaaccatgtgcaagtatcaaaaggtacct

SEQ ID NO: 280852 - DNA, 33 bp, Homo sapien
aggccaaccatgtgcaggtatcaaaaggtacct

SEQ ID NO: 280853 - DNA, 33 bp, Homo sapien
tagaactgataagccacgtggaaatgttttgta

SEQ ID NO: 280854 - DNA, 33 bp, Homo sapien
tagaactgataagccatgtggaaatgttttgta

SEQ ID NO: 280855 - DNA, 33 bp, Homo sapien
atctccaagacaacatcagaagcactttaaata

SEQ ID NO: 280856 - DNA, 33 bp, Homo sapien
atctccaagacaacattagaagcactttaaata

SEQ ID NO: 280857 - DNA, 33 bp, Homo sapien
ggcatagagaagctcaatagtttccccagttca

SEQ ID NO: 280858 - DNA, 33 bp, Homo sapien
ggcatagagaagctcagtagtttccccagttca

SEQ ID NO: 280859 - DNA, 33 bp, Homo sapien
aaagataacagaaaaactggcaatgtttattat

SEQ ID NO: 280860 - DNA, 33 bp, Homo sapien
aaagataacagaaaaattggcaatgtttattat

SEQ ID NO: 280861 - DNA, 33 bp, Homo sapien
caatagcattgataggaaatcgacctaagtgtt

SEQ ID NO: 280862 - DNA, 33 bp, Homo sapien
caatagcattgatagggaatcgacctaagtgtt

SEQ ID NO: 280863 - DNA, 33 bp, Homo sapien
atttcacttggtgcaacgtccacgttcattcat

SEQ ID NO: 280864 - DNA, 33 bp, Homo sapien
atttcacttggtgcaatgtccacgttcattcat

SEQ ID NO: 280865 - DNA, 33 bp, Homo sapien
tgtcttcaaatgtaacactgtgattcagcattg

SEQ ID NO: 280866 - DNA, 33 bp, Homo sapien
tgtcttcaaatgtaacgctgtgattcagcattg

SEQ ID NO: 280867 - DNA, 33 bp, Homo sapien
atattcaccataggacaaatgatcactatgcca

SEQ ID NO: 280868 - DNA, 33 bp, Homo sapien
atattcaccataggacgaatgatcactatgcca

SEQ ID NO: 280869 - DNA, 33 bp, Homo sapien
gaatcagctggattcacactgaggaatacatcc

SEQ ID NO: 280870 - DNA, 33 bp, Homo sapien
gaatcagctggattcatactgaggaatacatcc

SEQ ID NO: 280871 - DNA, 33 bp, Homo sapien
ggtttggaaagcaagaatcaggatactttggag

SEQ ID NO: 280872 - DNA, 33 bp, Homo sapien
ggtttggaaagcaagattcaggatactttggag

SEQ ID NO: 280873 - DNA, 33 bp, Homo sapien
ttctttaaaaagctaccgcatgtaagacatact

SEQ ID NO: 280874 - DNA, 33 bp, Homo sapien
ttctttaaaaagctactgcatgtaagacatact

SEQ ID NO: 280875 - DNA, 33 bp, Homo sapien
tgtggaaaactagcagaaggctcagagtaaagc

SEQ ID NO: 280876 - DNA, 33 bp, Homo sapien
tgtggaaaactagcagcaggctcagagtaaagc

SEQ ID NO: 280877 - DNA, 33 bp, Homo sapien
cctaaggagcctcaaagctcattcaggtctgag

SEQ ID NO: 280878 - DNA, 33 bp, Homo sapien
cctaaggagcctcaaatctcattcaggtctgag

SEQ ID NO: 280879 - DNA, 33 bp, Homo sapien
cagagaaggcaaattaaaggggtgactgagatc

SEQ ID NO: 280880 - DNA, 33 bp, Homo sapien
cagagaaggcaaattagaggggtgactgagatc

SEQ ID NO: 280881 - DNA, 33 bp, Homo sapien
actatgaaacacaagacctgagttccaaacacc

SEQ ID NO: 280882 - DNA, 33 bp, Homo sapien
actatgaaacacaagatctgagttccaaacacc

SEQ ID NO: 280883 - DNA, 33 bp, Homo sapien
ttttccaaccaagaacactagaaataagctcag

SEQ ID NO: 280884 - DNA, 33 bp, Homo sapien
ttttccaaccaagaacgctagaaataagctcag

SEQ ID NO: 280885 - DNA, 33 bp, Homo sapien
aaatagaatcccaggacgcaatggccttccact

SEQ ID NO: 280886 - DNA, 33 bp, Homo sapien
aaatagaatcccaggatgcaatggccttccact

SEQ ID NO: 280887 - DNA, 33 bp, Homo sapien
tactttttggagagaaatagaaagcaagtttct

SEQ ID NO: 280888 - DNA, 33 bp, Homo sapien
tactttttggagagaagtagaaagcaagtttct

SEQ ID NO: 280889 - DNA, 33 bp, Homo sapien
tgatctcaccagcaaacgaagaaggcagagaga

SEQ ID NO: 280890 - DNA, 33 bp, Homo sapien
tgatctcaccagcaaatgaagaaggcagagaga

SEQ ID NO: 280891 - DNA, 33 bp, Homo sapien
agcatcatgcaatataaccccataacaacttgc

SEQ ID NO: 280892 - DNA, 33 bp, Homo sapien
agcatcatgcaatatacccccataacaacttgc

SEQ ID NO: 280893 - DNA, 33 bp, Homo sapien
ttcacagacataaaaacggcaacgattggccgg

SEQ ID NO: 280894 - DNA, 33 bp, Homo sapien
ttcacagacataaaaatggcaacgattggccgg

SEQ ID NO: 280895 - DNA, 33 bp, Homo sapien
aaagaagtgaaaaaaaatctgattgcatgattt

SEQ ID NO: 280896 - DNA, 33 bp, Homo sapien
aaagaagtgaaaaaaattctgattgcatgattt

SEQ ID NO: 280897 - DNA, 33 bp, Homo sapien
taaacttctaagggtccaatttcagttatagga

SEQ ID NO: 280898 - DNA, 33 bp, Homo sapien
taaacttctaagggtctaatttcagttatagga

SEQ ID NO: 280899 - DNA, 33 bp, Homo sapien
aaattcccagggtagccccacattgaaaacttc

SEQ ID NO: 280900 - DNA, 33 bp, Homo sapien
aaattcccagggtagctccacattgaaaacttc

SEQ ID NO: 280901 - DNA, 33 bp, Homo sapien
ttccaggaagaaggcacggaatgaacggaggtg

SEQ ID NO: 280902 - DNA, 33 bp, Homo sapien
ttccaggaagaaggcagggaatgaacggaggtg

SEQ ID NO: 280903 - DNA, 33 bp, Homo sapien
gtgatccaattgtggaatcaaattcaatggaaa

SEQ ID NO: 280904 - DNA, 33 bp, Homo sapien
gtgatccaattgtggagtcaaattcaatggaaa

SEQ ID NO: 280905 - DNA, 33 bp, Homo sapien
acttgaactgagtagaagaggtagtaaaatgtt

SEQ ID NO: 280906 - DNA, 33 bp, Homo sapien
acttgaactgagtagaggaggtagtaaaatgtt

SEQ ID NO: 280907 - DNA, 33 bp, Homo sapien
gagaaggactataacgcattagccaaagtgcta

SEQ ID NO: 280908 - DNA, 33 bp, Homo sapien
gagaaggactataacgtattagccaaagtgcta

SEQ ID NO: 280909 - DNA, 33 bp, Homo sapien
gaattctggtaaattccaggtaagagcagtatt

SEQ ID NO: 280910 - DNA, 33 bp, Homo sapien
gaattctggtaaattctaggtaagagcagtatt

SEQ ID NO: 280911 - DNA, 33 bp, Homo sapien
agtcacctactcataacgctattccctaagtat

SEQ ID NO: 280912 - DNA, 33 bp, Homo sapien
agtcacctactcataatgctattccctaagtat

SEQ ID NO: 280913 - DNA, 33 bp, Homo sapien
ttaaaatatgacagacaaattgaatgtgggaag

SEQ ID NO: 280914 - DNA, 33 bp, Homo sapien
ttaaaatatgacagacgaattgaatgtgggaag

SEQ ID NO: 280915 - DNA, 33 bp, Homo sapien
gattggtttgagccaacatggttcatctcttgg

SEQ ID NO: 280916 - DNA, 33 bp, Homo sapien
gattggtttgagccaagatggttcatctcttgg

SEQ ID NO: 280917 - DNA, 33 bp, Homo sapien
agaataataaaagaagaaagccaagggtgaaac

SEQ ID NO: 280918 - DNA, 33 bp, Homo sapien
agaataataaaagaaggaagccaagggtgaaac

SEQ ID NO: 280919 - DNA, 33 bp, Homo sapien
catatgttcttttgtccagggaaacagtggtct

SEQ ID NO: 280920 - DNA, 33 bp, Homo sapien
catatgttcttttgtctagggaaacagtggtct

SEQ ID NO: 280921 - DNA, 33 bp, Homo sapien
atgaaattggtgttcacagaagtaatgtggata

SEQ ID NO: 280922 - DNA, 33 bp, Homo sapien
atgaaattggtgttcagagaagtaatgtggata

SEQ ID NO: 280923 - DNA, 33 bp, Homo sapien
ggataattgcattgaagtagttgtacaaaaaaa

SEQ ID NO: 280924 - DNA, 33 bp, Homo sapien
ggataattgcattgaattagttgtacaaaaaaa

SEQ ID NO: 280925 - DNA, 33 bp, Homo sapien
cattagatggttgaagaaattctcaaagtttgg

SEQ ID NO: 280926 - DNA, 33 bp, Homo sapien
cattagatggttgaaggaattctcaaagtttgg

SEQ ID NO: 280927 - DNA, 33 bp, Homo sapien
gtcaacaaataaggcaaggaagaggaagctgca

SEQ ID NO: 280928 - DNA, 33 bp, Homo sapien
gtcaacaaataaggcagggaagaggaagctgca

SEQ ID NO: 280929 - DNA, 33 bp, Homo sapien
atagtcttgcgagggaaacaaataaatatagta

SEQ ID NO: 280930 - DNA, 33 bp, Homo sapien
atagtcttgcgagggagacaaataaatatagta

SEQ ID NO: 280931 - DNA, 33 bp, Homo sapien
tgcattacctggcttccataaggaaataccaat

SEQ ID NO: 280932 - DNA, 33 bp, Homo sapien
tgcattacctggcttctataaggaaataccaat

SEQ ID NO: 280933 - DNA, 33 bp, Homo sapien
cagtttctaatgatggccattgctaattgatgg

SEQ ID NO: 280934 - DNA, 33 bp, Homo sapien
cagtttctaatgatggtcattgctaattgatgg

SEQ ID NO: 280935 - DNA, 33 bp, Homo sapien
gttacttgcaggcacactgtatcttattcagga

SEQ ID NO: 280936 - DNA, 33 bp, Homo sapien
gttacttgcaggcacagtgtatcttattcagga

SEQ ID NO: 280937 - DNA, 33 bp, Homo sapien
gaaactgaggcacagtaaactaattttcccaag

SEQ ID NO: 280938 - DNA, 33 bp, Homo sapien
gaaactgaggcacagtgaactaattttcccaag

SEQ ID NO: 280939 - DNA, 33 bp, Homo sapien
aactcaaagtagccaccctgaaagaactagggt

SEQ ID NO: 280940 - DNA, 33 bp, Homo sapien
aactcaaagtagccactctgaaagaactagggt

SEQ ID NO: 280941 - DNA, 33 bp, Homo sapien
ccagcatccctcaaagaagtatatagtcttcaa

SEQ ID NO: 280942 - DNA, 33 bp, Homo sapien
ccagcatccctcaaaggagtatatagtcttcaa

SEQ ID NO: 280943 - DNA, 33 bp, Homo sapien
gaggtaagcaaactcaacaaggaactctgaatt

SEQ ID NO: 280944 - DNA, 33 bp, Homo sapien
gaggtaagcaaactcaccaaggaactctgaatt

SEQ ID NO: 280945 - DNA, 33 bp, Homo sapien
atggacagggtaaatgacacttcctcagcagtt

SEQ ID NO: 280946 - DNA, 33 bp, Homo sapien
atggacagggtaaatggcacttcctcagcagtt

SEQ ID NO: 280947 - DNA, 33 bp, Homo sapien
ctttgcagtgtgcacacgttcttcctgttgtgg

SEQ ID NO: 280948 - DNA, 33 bp, Homo sapien
ctttgcagtgtgcacatgttcttcctgttgtgg

SEQ ID NO: 280949 - DNA, 33 bp, Homo sapien
taactctggtaaattacgtgtcacaatgaaaag

SEQ ID NO: 280950 - DNA, 33 bp, Homo sapien
taactctggtaaattatgtgtcacaatgaaaag

SEQ ID NO: 280951 - DNA, 33 bp, Homo sapien
ctgctgaccttcgttaagctattgcagctggat

SEQ ID NO: 280952 - DNA, 33 bp, Homo sapien
ctgctgaccttcgttatgctattgcagctggat

SEQ ID NO: 280953 - DNA, 33 bp, Homo sapien
aggatcttttcacaaaatcctggatatattgat

SEQ ID NO: 280954 - DNA, 33 bp, Homo sapien
aggatcttttcacaaattcctggatatattgat

SEQ ID NO: 280955 - DNA, 33 bp, Homo sapien
gtgcctgaggaggccacgtgttccagaggcaaa

SEQ ID NO: 280956 - DNA, 33 bp, Homo sapien
gtgcctgaggaggccatgtgttccagaggcaaa

SEQ ID NO: 280957 - DNA, 33 bp, Homo sapien
cggttcttccccgtaagaccacagctgatgctg

SEQ ID NO: 280958 - DNA, 33 bp, Homo sapien
cggttcttccccgtaataccacagctgatgctg

SEQ ID NO: 280959 - DNA, 33 bp, Homo sapien; identical to SEQ ID NO: 280957

SEQ ID NO: 280960 - DNA, 33 bp, Homo sapien; identical to SEQ ID NO: 280958

SEQ ID NO: 280961 - DNA, 33 bp, Homo sapien
gtggttatgagaggtaaagtcacagccaacctc

SEQ ID NO: 280962 - DNA, 33 bp, Homo sapien
gtggttatgagaggtagagtcacagccaacctc

SEQ ID NO: 280963 - DNA, 33 bp, Homo sapien
tgcattattgtctccaaatattccaaaccctcc

SEQ ID NO: 280964 - DNA, 33 bp, Homo sapien
tgcattattgtctccagatattccaaaccctcc

SEQ ID NO: 280965 - DNA, 33 bp, Homo sapien
taaaaagcagtcataacataaaacagcagctct

SEQ ID NO: 280966 - DNA, 33 bp, Homo sapien
taaaaagcagtcataatataaaacagcagctct

SEQ ID NO: 280967 - DNA, 33 bp, Homo sapien
tttagtgcaataccataaaccgtggataacatc

SEQ ID NO: 280968 - DNA, 33 bp, Homo sapien
tttagtgcaataccatcaaccgtggataacatc

SEQ ID NO: 280969 - DNA, 33 bp, Homo sapien
caaatgttgcttgtagaaggataaagagaaaaa

SEQ ID NO: 280970 - DNA, 33 bp, Homo sapien
caaatgttgcttgtaggaggataaagagaaaaa

SEQ ID NO: 280971 - DNA, 33 bp, Homo sapien
ctggccacaaaaaagacgtaagaagatgatatg

SEQ ID NO: 280972 - DNA, 33 bp, Homo sapien
ctggccacaaaaaagatgtaagaagatgatatg

SEQ ID NO: 280973 - DNA, 33 bp, Homo sapien
tatagtttaatgctacaactatttcagatattg

SEQ ID NO: 280974 - DNA, 33 bp, Homo sapien
tatagtttaatgctacgactatttcagatattg

SEQ ID NO: 280975 - DNA, 33 bp, Homo sapien
gaaccactgctctgaaaaattaacaccctgctc

SEQ ID NO: 280976 - DNA, 33 bp, Homo sapien
gaaccactgctctgaacaattaacaccctgctc

SEQ ID NO: 280977 - DNA, 33 bp, Homo sapien
tcctgccaacatggaccgattttattgtttact

SEQ ID NO: 280978 - DNA, 33 bp, Homo sapien
tcctgccaacatggactgattttattgtttact

SEQ ID NO: 280979 - DNA, 33 bp, Homo sapien
gatgtctcagacccaaaagagccttgatttctg

SEQ ID NO: 280980 - DNA, 33 bp, Homo sapien
gatgtctcagacccaagagagccttgatttctg

SEQ ID NO: 280981 - DNA, 33 bp, Homo sapien
ctggaattttagggaccagtttcagctcaggca

SEQ ID NO: 280982 - DNA, 33 bp, Homo sapien
ctggaattttagggacgagtttcagctcaggca

SEQ ID NO: 280983 - DNA, 33 bp, Homo sapien
gattcataaaacaagacattaccggccatgcca

SEQ ID NO: 280984 - DNA, 33 bp, Homo sapien
gattcataaaacaagatattaccggccatgcca

SEQ ID NO: 280985 - DNA, 33 bp, Homo sapien
tatcaacgcacagggaataatcagaggcaggta

SEQ ID NO: 280986 - DNA, 33 bp, Homo sapien
tatcaacgcacagggagtaatcagaggcaggta

SEQ ID NO: 280987 - DNA, 33 bp, Homo sapien
aggcaggtaacaaaccacagcaaccgtgctggt

SEQ ID NO: 280988 - DNA, 33 bp, Homo sapien
aggcaggtaacaaaccgcagcaaccgtgctggt

SEQ ID NO: 280989 - DNA, 33 bp, Homo sapien
tcagtacacccatgaaagccagaatgacatgaa

SEQ ID NO: 280990 - DNA, 33 bp, Homo sapien
tcagtacacccatgaatgccagaatgacatgaa

SEQ ID NO: 280991 - DNA, 33 bp, Homo sapien
attcccttagggagaacaaccaaagatgctgct

SEQ ID NO: 280992 - DNA, 33 bp, Homo sapien
attcccttagggagaataaccaaagatgctgct

SEQ ID NO: 280993 - DNA, 33 bp, Homo sapien
tttacatggttggttacgtaggcaccctctccc

SEQ ID NO: 280994 - DNA, 33 bp, Homo sapien
tttacatggttggttatgtaggcaccctctccc

SEQ ID NO: 280995 - DNA, 33 bp, Homo sapien
ccgctggaaccatggaaagtgtcaaagagaaga

SEQ ID NO: 280996 - DNA, 33 bp, Homo sapien
ccgctggaaccatggagagtgtcaaagagaaga

SEQ ID NO: 280997 - DNA, 33 bp, Homo sapien
cactcgacctgggccaatgataacagtggttaa

SEQ ID NO: 280998 - DNA, 33 bp, Homo sapien
cactcgacctgggccagtgataacagtggttaa

SEQ ID NO: 280999 - DNA, 33 bp, Homo sapien
cgtcatcttttatgaactgacctgtccttgccc

SEQ ID NO: 281000 - DNA, 33 bp, Homo sapien
cgtcatcttttatgaattgacctgtccttgccc

SEQ ID NO: 281001 - DNA, 33 bp, Homo sapien
tctaccttttgacttacgaataatgctgctgtg

SEQ ID NO: 281002 - DNA, 33 bp, Homo sapien
tctaccttttgacttatgaataatgctgctgtg

SEQ ID NO: 281003 - DNA, 33 bp, Homo sapien
caccaattaagtttcacgtaaacaacagatatt

SEQ ID NO: 281004 - DNA, 33 bp, Homo sapien
caccaattaagtttcaggtaaacaacagatatt

SEQ ID NO: 281005 - DNA, 33 bp, Homo sapien
tgaaatgggatcttcaaatgaaaaggaagcata

SEQ ID NO: 281006 - DNA, 33 bp, Homo sapien
tgaaatgggatcttcagatgaaaaggaagcata

SEQ ID NO: 281007 - DNA, 33 bp, Homo sapien
atttgttcttgaattccaggccaaccagggtcc

SEQ ID NO: 281008 - DNA, 33 bp, Homo sapien
atttgttcttgaattcgaggccaaccagggtcc

SEQ ID NO: 281009 - DNA, 33 bp, Homo sapien
aacagtgcaatattaaatgatgtgtttgaagaa

SEQ ID NO: 281010 - DNA, 33 bp, Homo sapien
aacagtgcaatattaagtgatgtgtttgaagaa

SEQ ID NO: 281011 - DNA, 33 bp, Homo sapien
atttagaggaaagataaagggcctggaacagtc

SEQ ID NO: 281012 - DNA, 33 bp, Homo sapien
atttagaggaaagatagagggcctggaacagtc

SEQ ID NO: 281013 - DNA, 33 bp, Homo sapien
taggtccacacttgacagtacactctcatgagg

SEQ ID NO: 281014 - DNA, 33 bp, Homo sapien
taggtccacacttgacggtacactctcatgagg

SEQ ID NO: 281015 - DNA, 33 bp, Homo sapien
gaggctgtcagctaaccggactccttgaggtgg

SEQ ID NO: 281016 - DNA, 33 bp, Homo sapien
gaggctgtcagctaactggactccttgaggtgg

SEQ ID NO: 281017 - DNA, 33 bp, Homo sapien
ctgcttcctaattcacccagaaagtcataagct

SEQ ID NO: 281018 - DNA, 33 bp, Homo sapien
ctgcttcctaattcactcagaaagtcataagct

SEQ ID NO: 281019 - DNA, 33 bp, Homo sapien
tttctgaggattaaccgaagcaatttttaccag

SEQ ID NO: 281020 - DNA, 33 bp, Homo sapien
tttctgaggattaacctaagcaatttttaccag

SEQ ID NO: 281021 - DNA, 33 bp, Homo sapien
tgcttcagaacttacaatggtttctcatgacct

SEQ ID NO: 281022 - DNA, 33 bp, Homo sapien
tgcttcagaacttacagtggtttctcatgacct

SEQ ID NO: 281023 - DNA, 33 bp, Homo sapien
ttgcatgaaatcattcacagatctaacttgaaa

SEQ ID NO: 281024 - DNA, 33 bp, Homo sapien
ttgcatgaaatcattcgcagatctaacttgaaa

SEQ ID NO: 281025 - DNA, 33 bp, Homo sapien
attctgacgagtaatcaacacagttggggaggg

SEQ ID NO: 281026 - DNA, 33 bp, Homo sapien
attctgacgagtaatccacacagttggggaggg

SEQ ID NO: 281027 - DNA, 33 bp, Homo sapien
tgtatgaatataacaaaatcctggcttctatgt

SEQ ID NO: 281028 - DNA, 33 bp, Homo sapien
tgtatgaatataacaagatcctggcttctatgt

SEQ ID NO: 281029 - DNA, 33 bp, Homo sapien
ccagactggtcctaagaattttactgcctaaat

SEQ ID NO: 281030 - DNA, 33 bp, Homo sapien
ccagactggtcctaagcattttactgcctaaat

SEQ ID NO: 281031 - DNA, 33 bp, Homo sapien
aagtctaaactaagtacggcttacaagaccctt

SEQ ID NO: 281032 - DNA, 33 bp, Homo sapien
aagtctaaactaagtatggcttacaagaccctt

SEQ ID NO: 281033 - DNA, 33 bp, Homo sapien
ctttcctatgtttccactgcatcctgtgactac

SEQ ID NO: 281034 - DNA, 33 bp, Homo sapien
ctttcctatgtttccattgcatcctgtgactac

SEQ ID NO: 281035 - DNA, 33 bp, Homo sapien
ccatgttggtgctagaatacagaaaaatgttgt

SEQ ID NO: 281036 - DNA, 33 bp, Homo sapien
ccatgttggtgctagagtacagaaaaatgttgt

SEQ ID NO: 281037 - DNA, 33 bp, Homo sapien
agatactttcagatagacctttacggagaaatc

SEQ ID NO: 281038 - DNA, 33 bp, Homo sapien
agatactttcagataggcctttacggagaaatc

SEQ ID NO: 281039 - DNA, 33 bp, Homo sapien
gcttgatacataggccagaaatctagacatttt

SEQ ID NO: 281040 - DNA, 33 bp, Homo sapien
gcttgatacataggccggaaatctagacatttt

SEQ ID NO: 281041 - DNA, 33 bp, Homo sapien
ttgaagataaggtccactacgttgttcactatt

SEQ ID NO: 281042 - DNA, 33 bp, Homo sapien
ttgaagataaggtccagtacgttgttcactatt

SEQ ID NO: 281043 - DNA, 33 bp, Homo sapien
tgagaatgcaagcaggcatgggtagaagaagga

SEQ ID NO: 281044 - DNA, 33 bp, Homo sapien
tgagaatgcaagcaggtatgggtagaagaagga

SEQ ID NO: 281045 - DNA, 33 bp, Homo sapien
cttcaacacagtaatcgcacttctaggaattta

SEQ ID NO: 281046 - DNA, 33 bp, Homo sapien
cttcaacacagtaatctcacttctaggaattta

SEQ ID NO: 281047 - DNA, 33 bp, Homo sapien
tcacctagtgtctgctaaataaaagataatcag

SEQ ID NO: 281048 - DNA, 33 bp, Homo sapien
tcacctagtgtctgctgaataaaagataatcag

SEQ ID NO: 281049 - DNA, 33 bp, Homo sapien
attgaaacccaagaaaacaatgatattactgct

SEQ ID NO: 281050 - DNA, 33 bp, Homo sapien
attgaaacccaagaaagcaatgatattactgct

SEQ ID NO: 281051 - DNA, 33 bp, Homo sapien
atgtagtaaggttcaaataaatgtttgatgaaa

SEQ ID NO: 281052 - DNA, 33 bp, Homo sapien
atgtagtaaggttcaactaaatgtttgatgaaa

SEQ ID NO: 281053 - DNA, 33 bp, Homo sapien
gaatctagactaaaatcaaagagtctgtggtaa

SEQ ID NO: 281054 - DNA, 33 bp, Homo sapien
gaatctagactaaaatgaaagagtctgtggtaa

SEQ ID NO: 281055 - DNA, 33 bp, Homo sapien
acctgtgagaaccaaactgcatgaacctaacta

SEQ ID NO: 281056 - DNA, 33 bp, Homo sapien
acctgtgagaaccaaattgcatgaacctaacta

SEQ ID NO: 281057 - DNA, 33 bp, Homo sapien
accatatgctaggtaactggctaggcatgggag

SEQ ID NO: 281058 - DNA, 33 bp, Homo sapien
accatatgctaggtaattggctaggcatgggag

SEQ ID NO: 281059 - DNA, 33 bp, Homo sapien
taattggcatacatacagaaacatatccaacaa

SEQ ID NO: 281060 - DNA, 33 bp, Homo sapien
taattggcatacatacggaaacatatccaacaa

SEQ ID NO: 281061 - DNA, 33 bp, Homo sapien
ccccaattatcttccaacttgcatcatctttct

SEQ ID NO: 281062 - DNA, 33 bp, Homo sapien
ccccaattatcttccaccttgcatcatctttct

SEQ ID NO: 281063 - DNA, 33 bp, Homo sapien
gctgctcaaagctaaacccctgcccataagttg

SEQ ID NO: 281064 - DNA, 33 bp, Homo sapien
gctgctcaaagctaaatccctgcccataagttg

SEQ ID NO: 281065 - DNA, 33 bp, Homo sapien
gatgcccaaatttcgacgtacagtatagatgtg

SEQ ID NO: 281066 - DNA, 33 bp, Homo sapien
gatgcccaaatttcgatgtacagtatagatgtg

SEQ ID NO: 281067 - DNA, 33 bp, Homo sapien
gttatcaggtgacacacgtcaggttgtcctatt

SEQ ID NO: 281068 - DNA, 33 bp, Homo sapien
gttatcaggtgacacatgtcaggttgtcctatt

SEQ ID NO: 281069 - DNA, 33 bp, Homo sapien
tgctaagttctacttacactagctgtttgcaac

SEQ ID NO: 281070 - DNA, 33 bp, Homo sapien
tgctaagttctacttatactagctgtttgcaac

SEQ ID NO: 281071 - DNA, 33 bp, Homo sapien
gttgaatgactaccaaccaggttatattttatt

SEQ ID NO: 281072 - DNA, 33 bp, Homo sapien
gttgaatgactaccaatcaggttatattttatt

SEQ ID NO: 281073 - DNA, 33 bp, Homo sapien
aatatcctcttagaaacggcattgacttaaaac

SEQ ID NO: 281074 - DNA, 33 bp, Homo sapien
aatatcctcttagaaatggcattgacttaaaac

SEQ ID NO: 281075 - DNA, 33 bp, Homo sapien
accctgagcacaacaactagcaactgtaatgcc

SEQ ID NO: 281076 - DNA, 33 bp, Homo sapien
accctgagcacaacaagtagcaactgtaatgcc

SEQ ID NO: 281077 - DNA, 33 bp, Homo sapien
gtagtatccagtattcaagagctacagtggtat

SEQ ID NO: 281078 - DNA, 33 bp, Homo sapien
gtagtatccagtattcgagagctacagtggtat

SEQ ID NO: 281079 - DNA, 33 bp, Homo sapien
ttgatgacactgatgacgcagtaataggtatta

SEQ ID NO: 281080 - DNA, 33 bp, Homo sapien
ttgatgacactgatgatgcagtaataggtatta

SEQ ID NO: 281081 - DNA, 33 bp, Homo sapien
aatctctgtggctggcaaataccaggaagtagc

SEQ ID NO: 281082 - DNA, 33 bp, Homo sapien
aatctctgtggctggcgaataccaggaagtagc

SEQ ID NO: 281083 - DNA, 33 bp, Homo sapien
aggaatgtccttatcacacttcacaactgttca

SEQ ID NO: 281084 - DNA, 33 bp, Homo sapien
aggaatgtccttatcatacttcacaactgttca

SEQ ID NO: 281085 - DNA, 33 bp, Homo sapien
taaggagcattttgtacgtcataatttctctgc

SEQ ID NO: 281086 - DNA, 33 bp, Homo sapien
taaggagcattttgtatgtcataatttctctgc

SEQ ID NO: 281087 - DNA, 33 bp, Homo sapien
tgagacactattaaaaaacagctctaaatgaca

SEQ ID NO: 281088 - DNA, 33 bp, Homo sapien
tgagacactattaaaacacagctctaaatgaca

SEQ ID NO: 281089 - DNA, 33 bp, Homo sapien
cagcaggtcacctctacggcccttataatcagt

SEQ ID NO: 281090 - DNA, 33 bp, Homo sapien
cagcaggtcacctctatggcccttataatcagt

SEQ ID NO: 281091 - DNA, 33 bp, Homo sapien
tcatgttggtgtataacggattatctttctatt

SEQ ID NO: 281092 - DNA, 33 bp, Homo sapien
tcatgttggtgtataatggattatctttctatt

SEQ ID NO: 281093 - DNA, 33 bp, Homo sapien
gaagaatgttcagacacaggttgtacatagctg

SEQ ID NO: 281094 - DNA, 33 bp, Homo sapien
gaagaatgttcagacataggttgtacatagctg

SEQ ID NO: 281095 - DNA, 33 bp, Homo sapien
ctcccaaaaggcctcacgtaagaggtaccatca

SEQ ID NO: 281096 - DNA, 33 bp, Homo sapien
ctcccaaaaggcctcatgtaagaggtaccatca

SEQ ID NO: 281097 - DNA, 33 bp, Homo sapien
tatggtagagaagataagttcaaaatgtcatta

SEQ ID NO: 281098 - DNA, 33 bp, Homo sapien
tatggtagagaagatatgttcaaaatgtcatta

SEQ ID NO: 281099 - DNA, 33 bp, Homo sapien
tgcagaggacacagaaatgtttaggacatggac

SEQ ID NO: 281100 - DNA, 33 bp, Homo sapien
tgcagaggacacagaagtgtttaggacatggac

SEQ ID NO: 281101 - DNA, 33 bp, Homo sapien
aatagggtagaggaagaaatcagatagatgtgc

SEQ ID NO: 281102 - DNA, 33 bp, Homo sapien
aatagggtagaggaagcaatcagatagatgtgc

SEQ ID NO: 281103 - DNA, 33 bp, Homo sapien
cttcatgaaaagcactaagaaccaagtacagaa

SEQ ID NO: 281104 - DNA, 33 bp, Homo sapien
cttcatgaaaagcacttagaaccaagtacagaa

SEQ ID NO: 281105 - DNA, 33 bp, Homo sapien
gtcttagcaacagaaaactcttagatagtaggc

SEQ ID NO: 281106 - DNA, 33 bp, Homo sapien
gtcttagcaacagaaagctcttagatagtaggc

SEQ ID NO: 281107 - DNA, 33 bp, Homo sapien
ctaggcaactagaactcacatttccaacctcat

SEQ ID NO: 281108 - DNA, 33 bp, Homo sapien
ctaggcaactagaacttacatttccaacctcat

SEQ ID NO: 281109 - DNA, 33 bp, Homo sapien
atttagaatattaacacccaaacccattaaggg

SEQ ID NO: 281110 - DNA, 33 bp, Homo sapien
atttagaatattaacatccaaacccattaaggg

SEQ ID NO: 281111 - DNA, 33 bp, Homo sapien
tggagtgtattataataaaggtgctcaggtaag

SEQ ID NO: 281112 - DNA, 33 bp, Homo sapien
tggagtgtattataatcaaggtgctcaggtaag

SEQ ID NO: 281113 - DNA, 33 bp, Homo sapien
gtgaaaactgtaattacgacacatggttggtgt

SEQ ID NO: 281114 - DNA, 33 bp, Homo sapien
gtgaaaactgtaattatgacacatggttggtgt

SEQ ID NO: 281115 - DNA, 33 bp, Homo sapien
taaatctgatcatttccctatcttcttcaaatt

SEQ ID NO: 281116 - DNA, 33 bp, Homo sapien
taaatctgatcatttctctatcttcttcaaatt

SEQ ID NO: 281117 - DNA, 33 bp, Homo sapien
gatatttgtgttataccataaaggaagaaatga

SEQ ID NO: 281118 - DNA, 33 bp, Homo sapien
gatatttgtgttatactataaaggaagaaatga

SEQ ID NO: 281119 - DNA, 33 bp, Homo sapien
gtctttacataggtcaaatctgaggcatccatt

SEQ ID NO: 281120 - DNA, 33 bp, Homo sapien
gtctttacataggtcagatctgaggcatccatt

SEQ ID NO: 281121 - DNA, 33 bp, Homo sapien
ttacttaggcagattaagttttccctaaataaa

SEQ ID NO: 281122 - DNA, 33 bp, Homo sapien
ttacttaggcagattaggttttccctaaataaa

SEQ ID NO: 281123 - DNA, 33 bp, Homo sapien
gatattttataatctacgagatggattttcttt

SEQ ID NO: 281124 - DNA, 33 bp, Homo sapien
gatattttataatctatgagatggattttcttt

SEQ ID NO: 281125 - DNA, 33 bp, Homo sapien
tttctgatttctcatgacaacacagtaaagata

SEQ ID NO: 281126 - DNA, 33 bp, Homo sapien
tttctgatttctcatgccaacacagtaaagata

SEQ ID NO: 281127 - DNA, 33 bp, Homo sapien
ttcttagcacattctaccattacgctgtaataa

SEQ ID NO: 281128 - DNA, 33 bp, Homo sapien
ttcttagcacattctatcattacgctgtaataa

SEQ ID NO: 281129 - DNA, 33 bp, Homo sapien
tgctggtgcccacagaatagagccatgtgaaat

SEQ ID NO: 281130 - DNA, 33 bp, Homo sapien
tgctggtgcccacagagtagagccatgtgaaat

SEQ ID NO: 281131 - DNA, 33 bp, Homo sapien
tcatgtatctttaatcacctttaatctagaata

SEQ ID NO: 281132 - DNA, 33 bp, Homo sapien
tcatgtatctttaatcgcctttaatctagaata

SEQ ID NO: 281133 - DNA, 33 bp, Homo sapien
tgacacctaatattaactgtcacatgggatatc

SEQ ID NO: 281134 - DNA, 33 bp, Homo sapien
tgacacctaatattaattgtcacatgggatatc

SEQ ID NO: 281135 - DNA, 33 bp, Homo sapien
taatgactcaatctaacgtaatggaaatcactg

SEQ ID NO: 281136 - DNA, 33 bp, Homo sapien
taatgactcaatctaatgtaatggaaatcactg

SEQ ID NO: 281137 - DNA, 33 bp, Homo sapien
agaggatcttcatataacttctaaaacctacat

SEQ ID NO: 281138 - DNA, 33 bp, Homo sapien
agaggatcttcatataccttctaaaacctacat

SEQ ID NO: 281139 - DNA, 33 bp, Homo sapien
ataaactgtagacttcaaagtatcatcattttg

SEQ ID NO: 281140 - DNA, 33 bp, Homo sapien
ataaactgtagacttcgaagtatcatcattttg

SEQ ID NO: 281141 - DNA, 33 bp, Homo sapien
gaaatgtggaagacatgaagaagatgacagagt

SEQ ID NO: 281142 - DNA, 33 bp, Homo sapien
gaaatgtggaagacattaagaagatgacagagt

SEQ ID NO: 281143 - DNA, 33 bp, Homo sapien
gatttgctctaccaaaattaaaatgtgcaaaca

SEQ ID NO: 281144 - DNA, 33 bp, Homo sapien
gatttgctctaccaaagttaaaatgtgcaaaca

SEQ ID NO: 281145 - DNA, 33 bp, Homo sapien
ctgtaacaggagtccccgcctagaatggctctt

SEQ ID NO: 281146 - DNA, 33 bp, Homo sapien
ctgtaacaggagtccctgcctagaatggctctt

SEQ ID NO: 281147 - DNA, 33 bp, Homo sapien
ggaaaatgatcaacaaatggtctagaagcagga

SEQ ID NO: 281148 - DNA, 33 bp, Homo sapien
ggaaaatgatcaacaagtggtctagaagcagga

SEQ ID NO: 281149 - DNA, 33 bp, Homo sapien
ctcacgaagtctttaccactccctgctaacttt

SEQ ID NO: 281150 - DNA, 33 bp, Homo sapien
ctcacgaagtctttactactccctgctaacttt

SEQ ID NO: 281151 - DNA, 33 bp, Homo sapien
caggtgctcaattgaaataacagagaacacact

SEQ ID NO: 281152 - DNA, 33 bp, Homo sapien
caggtgctcaattgaactaacagagaacacact

SEQ ID NO: 281153 - DNA, 33 bp, Homo sapien
gtgtttatattatttacgtggcttctgtttgtg

SEQ ID NO: 281154 - DNA, 33 bp, Homo sapien
gtgtttatattatttatgtggcttctgtttgtg

SEQ ID NO: 281155 - DNA, 33 bp, Homo sapien
taccggagctcagagacaggatgcaacatgtcc

SEQ ID NO: 281156 - DNA, 33 bp, Homo sapien
taccggagctcagagagaggatgcaacatgtcc

SEQ ID NO: 281157 - DNA, 33 bp, Homo sapien
acacactgctttgggtcaacgtattattttcct

SEQ ID NO: 281158 - DNA, 33 bp, Homo sapien
acacactgctttgggttaacgtattattttcct

SEQ ID NO: 281159 - DNA, 33 bp, Homo sapien
atgactaaaagctgcgacaagtatactttttct

SEQ ID NO: 281160 - DNA, 33 bp, Homo sapien
atgactaaaagctgcggcaagtatactttttct

SEQ ID NO: 281161 - DNA, 33 bp, Homo sapien
agacaacggccacctaaagacatagtgatggtg

SEQ ID NO: 281162 - DNA, 33 bp, Homo sapien
agacaacggccacctagagacatagtgatggtg

SEQ ID NO: 281163 - DNA, 33 bp, Homo sapien
ttgtactgagaaatataaggaagtctagaataa

SEQ ID NO: 281164 - DNA, 33 bp, Homo sapien
ttgtactgagaaatatcaggaagtctagaataa

SEQ ID NO: 281165 - DNA, 33 bp, Homo sapien
tgaggtgtgcaaaagaaacataaataaatgtgt

SEQ ID NO: 281166 - DNA, 33 bp, Homo sapien
tgaggtgtgcaaaagagacataaataaatgtgt

SEQ ID NO: 281167 - DNA, 33 bp, Homo sapien
gcaagaatctttcctccgacattttgggcataa

SEQ ID NO: 281168 - DNA, 33 bp, Homo sapien
gcaagaatctttcctctgacattttgggcataa

SEQ ID NO: 281169 - DNA, 33 bp, Homo sapien
gaaatcagggactgtccaggttgttcccatagg

SEQ ID NO: 281170 - DNA, 33 bp, Homo sapien
gaaatcagggactgtctaggttgttcccatagg

SEQ ID NO: 281171 - DNA, 33 bp, Homo sapien
tagtcgatagaacttccagcaatactaggagaa

SEQ ID NO: 281172 - DNA, 33 bp, Homo sapien
tagtcgatagaacttctagcaatactaggagaa

SEQ ID NO: 281173 - DNA, 33 bp, Homo sapien
aacaaccactacagcaaaagacactatttcctg

SEQ ID NO: 281174 - DNA, 33 bp, Homo sapien
aacaaccactacagcagaagacactatttcctg

SEQ ID NO: 281175 - DNA, 33 bp, Homo sapien
ggtcagcagtgcatgaaaactgtaaatggtcct

SEQ ID NO: 281176 - DNA, 33 bp, Homo sapien
ggtcagcagtgcatgagaactgtaaatggtcct

SEQ ID NO: 281177 - DNA, 33 bp, Homo sapien
tttctgtagacaacaaacactaagttgttttag

SEQ ID NO: 281178 - DNA, 33 bp, Homo sapien
tttctgtagacaacaagcactaagttgttttag

SEQ ID NO: 281179 - DNA, 33 bp, Homo sapien
cctctcttccataggaaaaagcaaatatgccaa

SEQ ID NO: 281180 - DNA, 33 bp, Homo sapien
cctctcttccataggagaaagcaaatatgccaa

SEQ ID NO: 281181 - DNA, 33 bp, Homo sapien
agtagggtaaggaatacaggaacaagtgtgagc

SEQ ID NO: 281182 - DNA, 33 bp, Homo sapien
agtagggtaaggaatataggaacaagtgtgagc

SEQ ID NO: 281183 - DNA, 33 bp, Homo sapien
gtttctagaaaaaagacgtatggaacatggaag

SEQ ID NO: 281184 - DNA, 33 bp, Homo sapien
gtttctagaaaaaagatgtatggaacatggaag

SEQ ID NO: 281185 - DNA, 33 bp, Homo sapien
gcattctcatctgagaaagcaaggaaatacata

SEQ ID NO: 281186 - DNA, 33 bp, Homo sapien
gcattctcatctgagagagcaaggaaatacata

SEQ ID NO: 281187 - DNA, 33 bp, Homo sapien
tggggagatcgaatcacagtacctttgtatgca

SEQ ID NO: 281188 - DNA, 33 bp, Homo sapien
tggggagatcgaatcatagtacctttgtatgca

SEQ ID NO: 281189 - DNA, 33 bp, Homo sapien
cacacttagccttatacgccattctcttatttg

SEQ ID NO: 281190 - DNA, 33 bp, Homo sapien
cacacttagccttatatgccattctcttatttg

SEQ ID NO: 281191 - DNA, 33 bp, Homo sapien
gttcctggtcccactgcaggttctggccatgcc

SEQ ID NO: 281192 - DNA, 33 bp, Homo sapien
gttcctggtcccactgtaggttctggccatgcc

SEQ ID NO: 281193 - DNA, 33 bp, Homo sapien; identical to SEQ ID NO: 281191

SEQ ID NO: 281194 - DNA, 33 bp, Homo sapien; identical to SEQ ID NO: 281192

SEQ ID NO: 281195 - DNA, 33 bp, Homo sapien
ctgttggcataagagtctcagtctggatattgg

SEQ ID NO: 281196 - DNA, 33 bp, Homo sapien
ctgttggcataagagtttcagtctggatattgg

SEQ ID NO: 281197 - DNA, 33 bp, Homo sapien
cccccttttcgtgggacgagagcagagggagat

SEQ ID NO: 281198 - DNA, 33 bp, Homo sapien
cccccttttcgtgggatgagagcagagggagat

SEQ ID NO: 281199 - DNA, 33 bp, Homo sapien
ccctaagaactataacaagacaagcatgcccac

SEQ ID NO: 281200 - DNA, 33 bp, Homo sapien
ccctaagaactataacgagacaagcatgcccac

SEQ ID NO: 281201 - DNA, 33 bp, Homo sapien
agtgttcccagaggatcaaacagatgcccagag

SEQ ID NO: 281202 - DNA, 33 bp, Homo sapien
agtgttcccagaggatgaaacagatgcccagag

SEQ ID NO: 281203 - DNA, 33 bp, Homo sapien
ctccagattaaagaatcatactgtttgagggta

SEQ ID NO: 281204 - DNA, 33 bp, Homo sapien
ctccagattaaagaatgatactgtttgagggta

SEQ ID NO: 281205 - DNA, 33 bp, Homo sapien
gtaagataagtagaaactgactgttttagagta

SEQ ID NO: 281206 - DNA, 33 bp, Homo sapien
gtaagataagtagaaagtgactgttttagagta

SEQ ID NO: 281207 - DNA, 33 bp, Homo sapien
aaccttgacagtgtaaaaatagaactgtcaaat

SEQ ID NO: 281208 - DNA, 33 bp, Homo sapien
aaccttgacagtgtaataatagaactgtcaaat

SEQ ID NO: 281209 - DNA, 33 bp, Homo sapien
tcaacatgggagctaacagttaatagtggcaac

SEQ ID NO: 281210 - DNA, 33 bp, Homo sapien
tcaacatgggagctaatagttaatagtggcaac

SEQ ID NO: 281211 - DNA, 33 bp, Homo sapien
cactacagtcatttcaatacctaatataagact

SEQ ID NO: 281212 - DNA, 33 bp, Homo sapien
cactacagtcatttcagtacctaatataagact

SEQ ID NO: 281213 - DNA, 33 bp, Homo sapien
gagagggactttacaacaactctgaattagcag

SEQ ID NO: 281214 - DNA, 33 bp, Homo sapien
gagagggactttacaataactctgaattagcag

SEQ ID NO: 281215 - DNA, 33 bp, Homo sapien
aaaaaaaaatgtgtagaaacatgatacagtcaa

SEQ ID NO: 281216 - DNA, 33 bp, Homo sapien
aaaaaaaaatgtgtaggaacatgatacagtcaa

SEQ ID NO: 281217 - DNA, 33 bp, Homo sapien
cgatttgattgtttgccgagcaatttgaaagta

SEQ ID NO: 281218 - DNA, 33 bp, Homo sapien
cgatttgattgtttgctgagcaatttgaaagta

SEQ ID NO: 281219 - DNA, 33 bp, Homo sapien
tagagtagaatccaaaccacttatcataacata

SEQ ID NO: 281220 - DNA, 33 bp, Homo sapien
tagagtagaatccaaatcacttatcataacata

SEQ ID NO: 281221 - DNA, 33 bp, Homo sapien
gggaatagatgaatcaatgagttagtgtaggag

SEQ ID NO: 281222 - DNA, 33 bp, Homo sapien
gggaatagatgaatcagtgagttagtgtaggag

SEQ ID NO: 281223 - DNA, 33 bp, Homo sapien
taacatggtggacttgaatagtttatatgatga

SEQ ID NO: 281224 - DNA, 33 bp, Homo sapien
taacatggtggacttgcatagtttatatgatga

SEQ ID NO: 281225 - DNA, 33 bp, Homo sapien
tgttgtatgaagccagccacgagatcagattat

SEQ ID NO: 281226 - DNA, 33 bp, Homo sapien
tgttgtatgaagccaggcacgagatcagattat

SEQ ID NO: 281227 - DNA, 33 bp, Homo sapien
tggagtatgcactgaccagacaacttctgaggt

SEQ ID NO: 281228 - DNA, 33 bp, Homo sapien
tggagtatgcactgacgagacaacttctgaggt

SEQ ID NO: 281229 - DNA, 33 bp, Homo sapien
tctgcctcctgccagccgcattgcaaacataat

SEQ ID NO: 281230 - DNA, 33 bp, Homo sapien
tctgcctcctgccagctgcattgcaaacataat

SEQ ID NO: 281231 - DNA, 33 bp, Homo sapien
tgactagcaactgaaaacattaatgatacattg

SEQ ID NO: 281232 - DNA, 33 bp, Homo sapien
tgactagcaactgaaagcattaatgatacattg

SEQ ID NO: 281233 - DNA, 33 bp, Homo sapien
tgctgtactccaacaaattcaatgtatcattaa

SEQ ID NO: 281234 - DNA, 33 bp, Homo sapien
tgctgtactccaacaagttcaatgtatcattaa

SEQ ID NO: 281235 - DNA, 33 bp, Homo sapien
tccatttaaaggcagcaacacttagaaaatcac

SEQ ID NO: 281236 - DNA, 33 bp, Homo sapien
tccatttaaaggcagcgacacttagaaaatcac

SEQ ID NO: 281237 - DNA, 33 bp, Homo sapien
aaggatccctgaaagaacccaaccatttctgtg

SEQ ID NO: 281238 - DNA, 33 bp, Homo sapien
aaggatccctgaaagagcccaaccatttctgtg

SEQ ID NO: 281239 - DNA, 33 bp, Homo sapien
ttgctaaccttccttgcacactgtattctggag

SEQ ID NO: 281240 - DNA, 33 bp, Homo sapien
ttgctaaccttccttgtacactgtattctggag

SEQ ID NO: 281241 - DNA, 33 bp, Homo sapien
tgtcccagtaaaatagccatcctgatagctcca

SEQ ID NO: 281242 - DNA, 33 bp, Homo sapien
tgtcccagtaaaatagtcatcctgatagctcca

SEQ ID NO: 281243 - DNA, 33 bp, Homo sapien
cataaagaagttgagaacctccttccagaggag

SEQ ID NO: 281244 - DNA, 33 bp, Homo sapien
cataaagaagttgagaccctccttccagaggag

SEQ ID NO: 281245 - DNA, 33 bp, Homo sapien
cgccaagcattgctctaaaaaaccacactaacc

SEQ ID NO: 281246 - DNA, 33 bp, Homo sapien
cgccaagcattgctctgaaaaaccacactaacc

SEQ ID NO: 281247 - DNA, 33 bp, Homo sapien
ctcgctatattgcccgaactgctcttgaattgt

SEQ ID NO: 281248 - DNA, 33 bp, Homo sapien
ctcgctatattgcccggactgctcttgaattgt

SEQ ID NO: 281249 - DNA, 33 bp, Homo sapien
ctgacatgaattcttacaatcaatgtctgttca

SEQ ID NO: 281250 - DNA, 33 bp, Homo sapien
ctgacatgaattcttataatcaatgtctgttca

SEQ ID NO: 281251 - DNA, 33 bp, Homo sapien
agctagtatttatcggacacacatcatgtatca

SEQ ID NO: 281252 - DNA, 33 bp, Homo sapien
agctagtatttatcgggcacacatcatgtatca

SEQ ID NO: 281253 - DNA, 33 bp, Homo sapien
atatcactaacccaaccctctcctggagctcca

SEQ ID NO: 281254 - DNA, 33 bp, Homo sapien
atatcactaacccaactctctcctggagctcca

SEQ ID NO: 281255 - DNA, 33 bp, Homo sapien
acaaaagaggtagaagaataatctcaaacttcc

SEQ ID NO: 281256 - DNA, 33 bp, Homo sapien
acaaaagaggtagaagcataatctcaaacttcc

SEQ ID NO: 281257 - DNA, 33 bp, Homo sapien
accaaaatattcacagaagcattgtttcatcca

SEQ ID NO: 281258 - DNA, 33 bp, Homo sapien
accaaaatattcacaggagcattgtttcatcca

SEQ ID NO: 281259 - DNA, 33 bp, Homo sapien
attcaccttgtctaaagaaacactaaaattgtt

SEQ ID NO: 281260 - DNA, 33 bp, Homo sapien
attcaccttgtctaaataaacactaaaattgtt

SEQ ID NO: 281261 - DNA, 33 bp, Homo sapien
tactatcatccaagaaatgtgaaaggggtaaag

SEQ ID NO: 281262 - DNA, 33 bp, Homo sapien
tactatcatccaagaagtgtgaaaggggtaaag

SEQ ID NO: 281263 - DNA, 33 bp, Homo sapien
gacatggagaaggaaaaggtatcaggatgtaaa

SEQ ID NO: 281264 - DNA, 33 bp, Homo sapien
gacatggagaaggaaagggtatcaggatgtaaa

SEQ ID NO: 281265 - DNA, 33 bp, Homo sapien
ctgccttagtgtttacacgggagctacgttctt

SEQ ID NO: 281266 - DNA, 33 bp, Homo sapien
ctgccttagtgtttacgcgggagctacgttctt

SEQ ID NO: 281267 - DNA, 33 bp, Homo sapien
agaaatagaaactgaacagccaccaatcttttg

SEQ ID NO: 281268 - DNA, 33 bp, Homo sapien
agaaatagaaactgaatagccaccaatcttttg

SEQ ID NO: 281269 - DNA, 33 bp, Homo sapien
gtcccatacatatatcaaacaatggtgcttttc

SEQ ID NO: 281270 - DNA, 33 bp, Homo sapien
gtcccatacatatatcgaacaatggtgcttttc

SEQ ID NO: 281271 - DNA, 33 bp, Homo sapien
cccttagcaaaaagtaggtgatgtctactagca

SEQ ID NO: 281272 - DNA, 33 bp, Homo sapien
cccttagcaaaaagtatgtgatgtctactagca

SEQ ID NO: 281273 - DNA, 33 bp, Homo sapien
cagttggcaatactcacataactggcactggtt

SEQ ID NO: 281274 - DNA, 33 bp, Homo sapien
cagttggcaatactcagataactggcactggtt

SEQ ID NO: 281275 - DNA, 33 bp, Homo sapien
ccttagtgtgccaacaagagagtaggagaattt

SEQ ID NO: 281276 - DNA, 33 bp, Homo sapien
ccttagtgtgccaacaggagagtaggagaattt

SEQ ID NO: 281277 - DNA, 33 bp, Homo sapien
acaagctatttgtaaaactcagcatttattgat

SEQ ID NO: 281278 - DNA, 33 bp, Homo sapien
acaagctatttgtaaagctcagcatttattgat

SEQ ID NO: 281279 - DNA, 33 bp, Homo sapien
ccgtagaagaacttagcattgggcagtaccaag

SEQ ID NO: 281280 - DNA, 33 bp, Homo sapien
ccgtagaagaacttagtattgggcagtaccaag

SEQ ID NO: 281281 - DNA, 33 bp, Homo sapien
ctaatggagagcaatccatacacccacagctga

SEQ ID NO: 281282 - DNA, 33 bp, Homo sapien
ctaatggagagcaatctatacacccacagctga

SEQ ID NO: 281283 - DNA, 33 bp, Homo sapien
aagtgagagatcaatacaggcagacaactagga

SEQ ID NO: 281284 - DNA, 33 bp, Homo sapien
aagtgagagatcaatataggcagacaactagga

SEQ ID NO: 281285 - DNA, 33 bp, Homo sapien
taaatttgaaaagatcccattccactatcctct

SEQ ID NO: 281286 - DNA, 33 bp, Homo sapien
taaatttgaaaagatctcattccactatcctct

SEQ ID NO: 281287 - DNA, 33 bp, Homo sapien
tgctactaaagtcaagactctacatttaaataa

SEQ ID NO: 281288 - DNA, 33 bp, Homo sapien
tgctactaaagtcaagtctctacatttaaataa

SEQ ID NO: 281289 - DNA, 33 bp, Homo sapien
gagcccaggctctgacaggatgatggtctgagg

SEQ ID NO: 281290 - DNA, 33 bp, Homo sapien
gagcccaggctctgactggatgatggtctgagg

SEQ ID NO: 281291 - DNA, 33 bp, Homo sapien
accaggtaatcttatcaacatttctatgataac

SEQ ID NO: 281292 - DNA, 33 bp, Homo sapien
accaggtaatcttatcgacatttctatgataac

SEQ ID NO: 281293 - DNA, 33 bp, Homo sapien
cagtcttgcttttaagcataatgaataccaggt

SEQ ID NO: 281294 - DNA, 33 bp, Homo sapien
cagtcttgcttttaagtataatgaataccaggt

SEQ ID NO: 281295 - DNA, 33 bp, Homo sapien
tctgcctaacatgacaacacaattctcctgggt

SEQ ID NO: 281296 - DNA, 33 bp, Homo sapien
tctgcctaacatgacagcacaattctcctgggt

SEQ ID NO: 281297 - DNA, 33 bp, Homo sapien
gtaaaatgatttccaacgcaccattttgactga

SEQ ID NO: 281298 - DNA, 33 bp, Homo sapien
gtaaaatgatttccaatgcaccattttgactga

SEQ ID NO: 281299 - DNA, 33 bp, Homo sapien
catgaaatagaaatcacattaactcatgacatt

SEQ ID NO: 281300 - DNA, 33 bp, Homo sapien
catgaaatagaaatcatattaactcatgacatt

SEQ ID NO: 281301 - DNA, 33 bp, Homo sapien
tattatgtggttgagcaaagggtgatcagaaat

SEQ ID NO: 281302 - DNA, 33 bp, Homo sapien
tattatgtggttgagcgaagggtgatcagaaat

SEQ ID NO: 281303 - DNA, 33 bp, Homo sapien
atttcagaatctgatccacacttgtggaactca

SEQ ID NO: 281304 - DNA, 33 bp, Homo sapien
atttcagaatctgatctacacttgtggaactca

SEQ ID NO: 281305 - DNA, 33 bp, Homo sapien
ttgtctttgcacttaaagaataacatagccatt

SEQ ID NO: 281306 - DNA, 33 bp, Homo sapien
ttgtctttgcacttaaggaataacatagccatt

SEQ ID NO: 281307 - DNA, 33 bp, Homo sapien
agtgttggaacgaatccagggaagagattatgg

SEQ ID NO: 281308 - DNA, 33 bp, Homo sapien
agtgttggaacgaatcgagggaagagattatgg

SEQ ID NO: 281309 - DNA, 33 bp, Homo sapien
ataaagttgcagttaacattttcacgcataatt

SEQ ID NO: 281310 - DNA, 33 bp, Homo sapien
ataaagttgcagttaatattttcacgcataatt

SEQ ID NO: 281311 - DNA, 33 bp, Homo sapien
tgaaatagagtaggtaaaacagtggttgatgag

SEQ ID NO: 281312 - DNA, 33 bp, Homo sapien
tgaaatagagtaggtagaacagtggttgatgag

SEQ ID NO: 281313 - DNA, 33 bp, Homo sapien
caggtgtcataccctacacctggaagaaggaat

SEQ ID NO: 281314 - DNA, 33 bp, Homo sapien
caggtgtcataccctatacctggaagaaggaat

SEQ ID NO: 281315 - DNA, 33 bp, Homo sapien
gattctgcttacgagacgtttcactcttttacc

SEQ ID NO: 281316 - DNA, 33 bp, Homo sapien
gattctgcttacgagatgtttcactcttttacc

SEQ ID NO: 281317 - DNA, 33 bp, Homo sapien
ggtgacctctaaagaaaggctttgggtgctata

SEQ ID NO: 281318 - DNA, 33 bp, Homo sapien
ggtgacctctaaagaagggctttgggtgctata

SEQ ID NO: 281319 - DNA, 33 bp, Homo sapien
aatagactaatacagcaatgcaggataattttg

SEQ ID NO: 281320 - DNA, 33 bp, Homo sapien
aatagactaatacagcgatgcaggataattttg

SEQ ID NO: 281321 - DNA, 33 bp, Homo sapien
gtagtggaaaactcaacggaaacagataaacaa

SEQ ID NO: 281322 - DNA, 33 bp, Homo sapien
gtagtggaaaactcaatggaaacagataaacaa

SEQ ID NO: 281323 - DNA, 33 bp, Homo sapien
tctagaatagatagccaaaatataactactagg

SEQ ID NO: 281324 - DNA, 33 bp, Homo sapien
tctagaatagatagccgaaatataactactagg

SEQ ID NO: 281325 - DNA, 33 bp, Homo sapien
accagatgaaaatgtacgagaatagccaagcac

SEQ ID NO: 281326 - DNA, 33 bp, Homo sapien
accagatgaaaatgtaggagaatagccaagcac

SEQ ID NO: 281327 - DNA, 33 bp, Homo sapien
gaaaagcaacagaaagaacaactaacaggtgat

SEQ ID NO: 281328 - DNA, 33 bp, Homo sapien
gaaaagcaacagaaaggacaactaacaggtgat

SEQ ID NO: 281329 - DNA, 33 bp, Homo sapien
ttagatctgacacaaaatgctctcttttagtgg

SEQ ID NO: 281330 - DNA, 33 bp, Homo sapien
ttagatctgacacaaattgctctcttttagtgg

SEQ ID NO: 281331 - DNA, 33 bp, Homo sapien
tattgcaataaagtacactggcagttaaataat

SEQ ID NO: 281332 - DNA, 33 bp, Homo sapien
tattgcaataaagtacgctggcagttaaataat

SEQ ID NO: 281333 - DNA, 33 bp, Homo sapien
aatagaattattaaaacagcctgagagcttttt

SEQ ID NO: 281334 - DNA, 33 bp, Homo sapien
aatagaattattaaaagagcctgagagcttttt

SEQ ID NO: 281335 - DNA, 33 bp, Homo sapien
caccttacaggttctcaataaaaatgttaagtg

SEQ ID NO: 281336 - DNA, 33 bp, Homo sapien
caccttacaggttctccataaaaatgttaagtg

SEQ ID NO: 281337 - DNA, 33 bp, Homo sapien
ttttccttaaggtgaacgtgtcagcttattttt

SEQ ID NO: 281338 - DNA, 33 bp, Homo sapien
ttttccttaaggtgaatgtgtcagcttattttt

SEQ ID NO: 281339 - DNA, 33 bp, Homo sapien
aaaatagagaagtcacagagcctgacattgacc

SEQ ID NO: 281340 - DNA, 33 bp, Homo sapien
aaaatagagaagtcacggagcctgacattgacc

SEQ ID NO: 281341 - DNA, 33 bp, Homo sapien
cgactttcccacatgacgcattttgtacactgc

SEQ ID NO: 281342 - DNA, 33 bp, Homo sapien
cgactttcccacatgatgcattttgtacactgc

SEQ ID NO: 281343 - DNA, 33 bp, Homo sapien
ttgtaaactgatcacagaggagtctaccatctc

SEQ ID NO: 281344 - DNA, 33 bp, Homo sapien
ttgtaaactgatcacataggagtctaccatctc

SEQ ID NO: 281345 - DNA, 33 bp, Homo sapien
tgtgtaataatcacatcaacgtaaatggggtct

SEQ ID NO: 281346 - DNA, 33 bp, Homo sapien
tgtgtaataatcacatgaacgtaaatggggtct

SEQ ID NO: 281347 - DNA, 33 bp, Homo sapien
acttagattttttccaatgagtcctattttaaa

SEQ ID NO: 281348 - DNA, 33 bp, Homo sapien
acttagattttttccagtgagtcctattttaaa

SEQ ID NO: 281349 - DNA, 33 bp, Homo sapien
actacctctcatctaactctagtacagaagacc

SEQ ID NO: 281350 - DNA, 33 bp, Homo sapien
actacctctcatctaattctagtacagaagacc

SEQ ID NO: 281351 - DNA, 33 bp, Homo sapien
ccaaatttttttgtaagtatgcttggccttttt

SEQ ID NO: 281352 - DNA, 33 bp, Homo sapien
ccaaatttttttgtaattatgcttggccttttt

SEQ ID NO: 281353 - DNA, 33 bp, Homo sapien
ctagagagcaataagcagaacagacagagggca

SEQ ID NO: 281354 - DNA, 33 bp, Homo sapien
ctagagagcaataagcggaacagacagagggca

SEQ ID NO: 281355 - DNA, 33 bp, Homo sapien
ggcatacattgtgtaagagtcatatcagggtaa

SEQ ID NO: 281356 - DNA, 33 bp, Homo sapien
ggcatacattgtgtaatagtcatatcagggtaa

SEQ ID NO: 281357 - DNA, 33 bp, Homo sapien
cctgtagcccagggaaagtccagaaataccatc

SEQ ID NO: 281358 - DNA, 33 bp, Homo sapien
cctgtagcccagggaaggtccagaaataccatc

SEQ ID NO: 281359 - DNA, 33 bp, Homo sapien
tatctccatagacaccacaatttggaatgtgtt

SEQ ID NO: 281360 - DNA, 33 bp, Homo sapien
tatctccatagacaccgcaatttggaatgtgtt

SEQ ID NO: 281361 - DNA, 33 bp, Homo sapien
catcttaaatatcaccacttgaatgagtgtaaa

SEQ ID NO: 281362 - DNA, 33 bp, Homo sapien
catcttaaatatcacctcttgaatgagtgtaaa

SEQ ID NO: 281363 - DNA, 33 bp, Homo sapien
ttattaataagtttaacaaggagattatctgga

SEQ ID NO: 281364 - DNA, 33 bp, Homo sapien
ttattaataagtttaataaggagattatctgga

SEQ ID NO: 281365 - DNA, 33 bp, Homo sapien
tgcagagaccttaggacgttgttcttgaactct

SEQ ID NO: 281366 - DNA, 33 bp, Homo sapien
tgcagagaccttaggatgttgttcttgaactct

SEQ ID NO: 281367 - DNA, 33 bp, Homo sapien
gcttcagatcagcagacagaacagcaggctcag

SEQ ID NO: 281368 - DNA, 33 bp, Homo sapien
gcttcagatcagcagagagaacagcaggctcag

SEQ ID NO: 281369 - DNA, 33 bp, Homo sapien
gttttctggaggtaaggccccaagaacctctcc

SEQ ID NO: 281370 - DNA, 33 bp, Homo sapien
gttttctggaggtaagtccccaagaacctctcc

SEQ ID NO: 281371 - DNA, 33 bp, Homo sapien
attaagcagaatagtacgttaaggctgtgcatt

SEQ ID NO: 281372 - DNA, 33 bp, Homo sapien
attaagcagaatagtatgttaaggctgtgcatt

SEQ ID NO: 281373 - DNA, 33 bp, Homo sapien
agaaagttatttttcaatcatgtataggaagcc

SEQ ID NO: 281374 - DNA, 33 bp, Homo sapien
agaaagttatttttcagtcatgtataggaagcc

SEQ ID NO: 281375 - DNA, 33 bp, Homo sapien
ttcaatggttcgttaacgtaggctgattcctac

SEQ ID NO: 281376 - DNA, 33 bp, Homo sapien
ttcaatggttcgttaatgtaggctgattcctac

SEQ ID NO: 281377 - DNA, 33 bp, Homo sapien
attaaattgcaaacaacaatgcatctagctaaa

SEQ ID NO: 281378 - DNA, 33 bp, Homo sapien
attaaattgcaaacaataatgcatctagctaaa

SEQ ID NO: 281379 - DNA, 33 bp, Homo sapien
actggactttctgaaaccctgtctttggctcct

SEQ ID NO: 281380 - DNA, 33 bp, Homo sapien
actggactttctgaaatcctgtctttggctcct

SEQ ID NO: 281381 - DNA, 33 bp, Homo sapien
ccctacctggttatctaaatccaattaggcatg

SEQ ID NO: 281382 - DNA, 33 bp, Homo sapien
ccctacctggttatctgaatccaattaggcatg

SEQ ID NO: 281383 - DNA, 33 bp, Homo sapien
atggtctcatcaataaaacatatcaacaacttt

SEQ ID NO: 281384 - DNA, 33 bp, Homo sapien
atggtctcatcaataacacatatcaacaacttt

SEQ ID NO: 281385 - DNA, 33 bp, Homo sapien
cagtgcagtaaaacaactagtggaaggatattt

SEQ ID NO: 281386 - DNA, 33 bp, Homo sapien
cagtgcagtaaaacaattagtggaaggatattt

SEQ ID NO: 281387 - DNA, 33 bp, Homo sapien
cagacccagagtggacaaaactagacatgaaaa

SEQ ID NO: 281388 - DNA, 33 bp, Homo sapien
cagacccagagtggacgaaactagacatgaaaa

SEQ ID NO: 281389 - DNA, 33 bp, Homo sapien
atacaaatgacccatacacttgaaacatttttt

SEQ ID NO: 281390 - DNA, 33 bp, Homo sapien
atacaaatgacccatatacttgaaacatttttt

SEQ ID NO: 281391 - DNA, 33 bp, Homo sapien
acttcttgcataacaagtactcaaagcattagc

SEQ ID NO: 281392 - DNA, 33 bp, Homo sapien
acttcttgcataacaattactcaaagcattagc

SEQ ID NO: 281393 - DNA, 33 bp, Homo sapien
ttaggattcttatacactgaggtcttatgttta

SEQ ID NO: 281394 - DNA, 33 bp, Homo sapien
ttaggattcttatacagtgaggtcttatgttta

SEQ ID NO: 281395 - DNA, 33 bp, Homo sapien
actctagacatgatccacgtgcagaaacagatt

SEQ ID NO: 281396 - DNA, 33 bp, Homo sapien
actctagacatgatccgcgtgcagaaacagatt

SEQ ID NO: 281397 - DNA, 33 bp, Homo sapien
aagaagaaaatgtgtcaatgaagaaaatgttgc

SEQ ID NO: 281398 - DNA, 33 bp, Homo sapien
aagaagaaaatgtgtcgatgaagaaaatgttgc

SEQ ID NO: 281399 - DNA, 33 bp, Homo sapien
aaatactgtcagcaacaaaaaagtggtttaagc

SEQ ID NO: 281400 - DNA, 33 bp, Homo sapien
aaatactgtcagcaacgaaaaagtggtttaagc

SEQ ID NO: 281401 - DNA, 33 bp, Homo sapien
tttccttatcttgcaccgggtttagtctaaatc

SEQ ID NO: 281402 - DNA, 33 bp, Homo sapien
tttccttatcttgcactgggtttagtctaaatc

SEQ ID NO: 281403 - DNA, 33 bp, Homo sapien
caacaggccaggtgaccctatctatctatctat

SEQ ID NO: 281404 - DNA, 33 bp, Homo sapien
caacaggccaggtgactctatctatctatctat

SEQ ID NO: 281405 - DNA, 33 bp, Homo sapien
acctggcctgttgcaacgtattttcagtgttct

SEQ ID NO: 281406 - DNA, 33 bp, Homo sapien
acctggcctgttgcaatgtattttcagtgttct

SEQ ID NO: 281407 - DNA, 33 bp, Homo sapien
ttttagctctgtcattaaaattctccctttgta

SEQ ID NO: 281408 - DNA, 33 bp, Homo sapien
ttttagctctgtcattgaaattctccctttgta

SEQ ID NO: 281409 - DNA, 33 bp, Homo sapien
gtggatattgatgttacacagtgcaaataagca

SEQ ID NO: 281410 - DNA, 33 bp, Homo sapien
gtggatattgatgttatacagtgcaaataagca

SEQ ID NO: 281411 - DNA, 33 bp, Homo sapien
tccagtcctccaatacagcacatttcaccactg

SEQ ID NO: 281412 - DNA, 33 bp, Homo sapien
tccagtcctccaatacggcacatttcaccactg

SEQ ID NO: 281413 - DNA, 33 bp, Homo sapien
tctgtgatgtagatgacaagcaatatgttaaat

SEQ ID NO: 281414 - DNA, 33 bp, Homo sapien
tctgtgatgtagatgagaagcaatatgttaaat

SEQ ID NO: 281415 - DNA, 33 bp, Homo sapien
aggttgtactattatacggtatgaagccagaaa

SEQ ID NO: 281416 - DNA, 33 bp, Homo sapien
aggttgtactattatatggtatgaagccagaaa

SEQ ID NO: 281417 - DNA, 33 bp, Homo sapien
aatgtatatacctacaatggtgttgcaagatac

SEQ ID NO: 281418 - DNA, 33 bp, Homo sapien
aatgtatatacctacagtggtgttgcaagatac

SEQ ID NO: 281419 - DNA, 33 bp, Homo sapien
atgttccaaagacccactaaagatgctcaaggg

SEQ ID NO: 281420 - DNA, 33 bp, Homo sapien
atgttccaaagacccattaaagatgctcaaggg

SEQ ID NO: 281421 - DNA, 33 bp, Homo sapien
ttttgtggcacttaaacttataatactcaattt

SEQ ID NO: 281422 - DNA, 33 bp, Homo sapien
ttttgtggcacttaaagttataatactcaattt

SEQ ID NO: 281423 - DNA, 33 bp, Homo sapien
ttagcgcagatgaaaccaacaggttgtagaaag

SEQ ID NO: 281424 - DNA, 33 bp, Homo sapien
ttagcgcagatgaaactaacaggttgtagaaag

SEQ ID NO: 281425 - DNA, 33 bp, Homo sapien
gtgtttcctgccaatccatccaaaatatttttc

SEQ ID NO: 281426 - DNA, 33 bp, Homo sapien
gtgtttcctgccaatctatccaaaatatttttc

SEQ ID NO: 281427 - DNA, 33 bp, Homo sapien
atcaaaagaaggcaaaatactctcatttttgtg

SEQ ID NO: 281428 - DNA, 33 bp, Homo sapien
atcaaaagaaggcaaagtactctcatttttgtg

SEQ ID NO: 281429 - DNA, 33 bp, Homo sapien
tactcagtcacaataaatgagattcctgtttga

SEQ ID NO: 281430 - DNA, 33 bp, Homo sapien
tactcagtcacaataattgagattcctgtttga

SEQ ID NO: 281431 - DNA, 33 bp, Homo sapien
aaaacaaactactatcactagaaataatgtact

SEQ ID NO: 281432 - DNA, 33 bp, Homo sapien
aaaacaaactactatcgctagaaataatgtact

SEQ ID NO: 281433 - DNA, 33 bp, Homo sapien
ttatttgctttttgtcactatgaaatcattttg

SEQ ID NO: 281434 - DNA, 33 bp, Homo sapien
ttatttgctttttgtcgctatgaaatcattttg

SEQ ID NO: 281435 - DNA, 33 bp, Homo sapien
aaagtcagaccatctcgaggtcattgagaattc

SEQ ID NO: 281436 - DNA, 33 bp, Homo sapien
aaagtcagaccatctctaggtcattgagaattc

SEQ ID NO: 281437 - DNA, 33 bp, Homo sapien
aacttacattgacttacgtgtaatctgtgagca

SEQ ID NO: 281438 - DNA, 33 bp, Homo sapien
aacttacattgacttatgtgtaatctgtgagca

SEQ ID NO: 281439 - DNA, 33 bp, Homo sapien
ttctgtgaatcttggcaaatgggatgagtattg

SEQ ID NO: 281440 - DNA, 33 bp, Homo sapien
ttctgtgaatcttggcgaatgggatgagtattg

SEQ ID NO: 281441 - DNA, 33 bp, Homo sapien
aggtagggcctgcatccaatgttttctatcccc

SEQ ID NO: 281442 - DNA, 33 bp, Homo sapien
aggtagggcctgcatctaatgttttctatcccc

SEQ ID NO: 281443 - DNA, 33 bp, Homo sapien
aagagcaagaaaggacactcataacacagagag

SEQ ID NO: 281444 - DNA, 33 bp, Homo sapien
aagagcaagaaaggacgctcataacacagagag

SEQ ID NO: 281445 - DNA, 33 bp, Homo sapien
gttatgaatttcaacactagattcatggatttg

SEQ ID NO: 281446 - DNA, 33 bp, Homo sapien
gttatgaatttcaacattagattcatggatttg

SEQ ID NO: 281447 - DNA, 33 bp, Homo sapien
ttttgttcttgaaatagcagtttgccttttgct

SEQ ID NO: 281448 - DNA, 33 bp, Homo sapien
ttttgttcttgaaatatcagtttgccttttgct

SEQ ID NO: 281449 - DNA, 33 bp, Homo sapien
aaacaaaactattcagcccaaataaacagctat

SEQ ID NO: 281450 - DNA, 33 bp, Homo sapien
aaacaaaactattcagtccaaataaacagctat

SEQ ID NO: 281451 - DNA, 33 bp, Homo sapien
gaaagaaaaagacataaaaggctaccaaataga

SEQ ID NO: 281452 - DNA, 33 bp, Homo sapien
gaaagaaaaagacatagaaggctaccaaataga

SEQ ID NO: 281453 - DNA, 33 bp, Homo sapien
ttacagttaaaaaacggcagcctggactaagag

SEQ ID NO: 281454 - DNA, 33 bp, Homo sapien
ttacagttaaaaaacgtcagcctggactaagag

SEQ ID NO: 281455 - DNA, 33 bp, Homo sapien
agtgaataagtggaggccacattgaaagaagcc

SEQ ID NO: 281456 - DNA, 33 bp, Homo sapien
agtgaataagtggaggtcacattgaaagaagcc

SEQ ID NO: 281457 - DNA, 33 bp, Homo sapien
gatctgctttgatcaaaagaacatggtgaaaat

SEQ ID NO: 281458 - DNA, 33 bp, Homo sapien
gatctgctttgatcaacagaacatggtgaaaat

SEQ ID NO: 281459 - DNA, 33 bp, Homo sapien
aagcacggttgaagaaccatcccccttacaaaa

SEQ ID NO: 281460 - DNA, 33 bp, Homo sapien
aagcacggttgaagaatcatcccccttacaaaa

SEQ ID NO: 281461 - DNA, 33 bp, Homo sapien
gcaatggttcagttccagagacttagcaaagta

SEQ ID NO: 281462 - DNA, 33 bp, Homo sapien
gcaatggttcagttccggagacttagcaaagta

SEQ ID NO: 281463 - DNA, 33 bp, Homo sapien
gtttgcttcttctcgacgcttaccattttaagc

SEQ ID NO: 281464 - DNA, 33 bp, Homo sapien
gtttgcttcttctcgatgcttaccattttaagc

SEQ ID NO: 281465 - DNA, 33 bp, Homo sapien
taagcttccctacatcaaaaccagcacaaataa

SEQ ID NO: 281466 - DNA, 33 bp, Homo sapien
taagcttccctacatcgaaaccagcacaaataa

SEQ ID NO: 281467 - DNA, 33 bp, Homo sapien
tttttaaactgtgctgaatcaaaacaagtgaga

SEQ ID NO: 281468 - DNA, 33 bp, Homo sapien
tttttaaactgtgctggatcaaaacaagtgaga

SEQ ID NO: 281469 - DNA, 33 bp, Homo sapien
tggtttttgaatgtaaagacggtactattatat

SEQ ID NO: 281470 - DNA, 33 bp, Homo sapien
tggtttttgaatgtaaggacggtactattatat

SEQ ID NO: 281471 - DNA, 33 bp, Homo sapien
gggcagcaaagttgaaaattagagccaaatttg

SEQ ID NO: 281472 - DNA, 33 bp, Homo sapien
gggcagcaaagttgaagattagagccaaatttg

SEQ ID NO: 281473 - DNA, 33 bp, Homo sapien
ctgtctgcacaactgaacattactttcaatgat

SEQ ID NO: 281474 - DNA, 33 bp, Homo sapien
ctgtctgcacaactgagcattactttcaatgat

SEQ ID NO: 281475 - DNA, 33 bp, Homo sapien
gtcttttaaagaaaacagaggtgagcagaacag

SEQ ID NO: 281476 - DNA, 33 bp, Homo sapien
gtcttttaaagaaaacggaggtgagcagaacag

SEQ ID NO: 281477 - DNA, 33 bp, Homo sapien
ggcatggatacaaatgacagcttctggattcct

SEQ ID NO: 281478 - DNA, 33 bp, Homo sapien
ggcatggatacaaatgtcagcttctggattcct

SEQ ID NO: 281479 - DNA, 33 bp, Homo sapien
attcttcaacaaattcccattatatatggatgc

SEQ ID NO: 281480 - DNA, 33 bp, Homo sapien
attcttcaacaaattctcattatatatggatgc

SEQ ID NO: 281481 - DNA, 33 bp, Homo sapien
aacttgggtagcggcaaaatggatagagagtaa

SEQ ID NO: 281482 - DNA, 33 bp, Homo sapien
aacttgggtagcggcagaatggatagagagtaa

SEQ ID NO: 281483 - DNA, 33 bp, Homo sapien
aattattaattcttacaacacatccagaggtat

SEQ ID NO: 281484 - DNA, 33 bp, Homo sapien
aattattaattcttacgacacatccagaggtat

SEQ ID NO: 281485 - DNA, 33 bp, Homo sapien
tttataataattcaccacattggaaaggcagaa

SEQ ID NO: 281486 - DNA, 33 bp, Homo sapien
tttataataattcaccgcattggaaaggcagaa

SEQ ID NO: 281487 - DNA, 33 bp, Homo sapien
tccctgggcgagagaaaacaagccaaagtctta

SEQ ID NO: 281488 - DNA, 33 bp, Homo sapien
tccctgggcgagagaagacaagccaaagtctta

SEQ ID NO: 281489 - DNA, 33 bp, Homo sapien
tctgcagaccaggtgaaataggaccgtagctcg

SEQ ID NO: 281490 - DNA, 33 bp, Homo sapien
tctgcagaccaggtgagataggaccgtagctcg

SEQ ID NO: 281491 - DNA, 33 bp, Homo sapien
aggcaaagactggaaccgaaggaaacattcagc

SEQ ID NO: 281492 - DNA, 33 bp, Homo sapien
aggcaaagactggaactgaaggaaacattcagc

SEQ ID NO: 281493 - DNA, 33 bp, Homo sapien
gctatcttttaaagtacaatcaacgctctaaaa

SEQ ID NO: 281494 - DNA, 33 bp, Homo sapien
gctatcttttaaagtataatcaacgctctaaaa

SEQ ID NO: 281495 - DNA, 33 bp, Homo sapien
gtcttgggattagtgacagtttttgaagaactg

SEQ ID NO: 281496 - DNA, 33 bp, Homo sapien
gtcttgggattagtgatagtttttgaagaactg

SEQ ID NO: 281497 - DNA, 33 bp, Homo sapien
tgttaattctgtaatcactcaatttcatatgta

SEQ ID NO: 281498 - DNA, 33 bp, Homo sapien
tgttaattctgtaatcgctcaatttcatatgta

SEQ ID NO: 281499 - DNA, 33 bp, Homo sapien
aatcacatcgctagcacaaattgtctggcatgg

SEQ ID NO: 281500 - DNA, 33 bp, Homo sapien
aatcacatcgctagcataaattgtctggcatgg

SEQ ID NO: 281501 - DNA, 33 bp, Homo sapien
gcttgttaatgtttcacgtgcataaaaataaat

SEQ ID NO: 281502 - DNA, 33 bp, Homo sapien
gcttgttaatgtttcatgtgcataaaaataaat

SEQ ID NO: 281503 - DNA, 33 bp, Homo sapien
tttaattgcatcaacaataaaagtgtaagaata

SEQ ID NO: 281504 - DNA, 33 bp, Homo sapien
tttaattgcatcaacagtaaaagtgtaagaata

SEQ ID NO: 281505 - DNA, 33 bp, Homo sapien
tagacccagcaatagcacttacaggaatttaca

SEQ ID NO: 281506 - DNA, 33 bp, Homo sapien
tagacccagcaatagcgcttacaggaatttaca

SEQ ID NO: 281507 - DNA, 33 bp, Homo sapien
cttatgccaaaacatccatggattagttaagaa

SEQ ID NO: 281508 - DNA, 33 bp, Homo sapien
cttatgccaaaacatctatggattagttaagaa

SEQ ID NO: 281509 - DNA, 33 bp, Homo sapien
tgatcctcaattattacgttaagtgcatgaata

SEQ ID NO: 281510 - DNA, 33 bp, Homo sapien
tgatcctcaattattatgttaagtgcatgaata

SEQ ID NO: 281511 - DNA, 33 bp, Homo sapien
tcatggtgtactggaaaggtacagatacatggt

SEQ ID NO: 281512 - DNA, 33 bp, Homo sapien
tcatggtgtactggaagggtacagatacatggt

SEQ ID NO: 281513 - DNA, 33 bp, Homo sapien
tgtgtccaagtaatcaagtatagacagagtact

SEQ ID NO: 281514 - DNA, 33 bp, Homo sapien
tgtgtccaagtaatcaggtatagacagagtact

SEQ ID NO: 281515 - DNA, 33 bp, Homo sapien
cagtgtagttggcttactcaaagcagagagtgc

SEQ ID NO: 281516 - DNA, 33 bp, Homo sapien
cagtgtagttggcttattcaaagcagagagtgc

SEQ ID NO: 281517 - DNA, 33 bp, Homo sapien
cgttcagtaagcatgcactggccacctactctg

SEQ ID NO: 281518 - DNA, 33 bp, Homo sapien
cgttcagtaagcatgcgctggccacctactctg

SEQ ID NO: 281519 - DNA, 33 bp, Homo sapien
atatacatcttctaggacagaaaacttctatag

SEQ ID NO: 281520 - DNA, 33 bp, Homo sapien
atatacatcttctagggcagaaaacttctatag

SEQ ID NO: 281521 - DNA, 33 bp, Homo sapien
ttacttataaatgggagctaaacatggacacaa

SEQ ID NO: 281522 - DNA, 33 bp, Homo sapien
ttacttataaatgggatctaaacatggacacaa

SEQ ID NO: 281523 - DNA, 33 bp, Homo sapien
taaaggataagacacgacctaagtatatttgct

SEQ ID NO: 281524 - DNA, 33 bp, Homo sapien
taaaggataagacacggcctaagtatatttgct

SEQ ID NO: 281525 - DNA, 33 bp, Homo sapien
taattccactttaaagaccgatatgtgtatggt

SEQ ID NO: 281526 - DNA, 33 bp, Homo sapien
taattccactttaaaggccgatatgtgtatggt

SEQ ID NO: 281527 - DNA, 33 bp, Homo sapien
tgcgtgtctctctccactcccaactaaacccaa

SEQ ID NO: 281528 - DNA, 33 bp, Homo sapien
tgcgtgtctctctccattcccaactaaacccaa

SEQ ID NO: 281529 - DNA, 33 bp, Homo sapien
tgataccaaaaaggaacatgccaggactcactc

SEQ ID NO: 281530 - DNA, 33 bp, Homo sapien
tgataccaaaaaggaatatgccaggactcactc

SEQ ID NO: 281531 - DNA, 33 bp, Homo sapien
atctttaatttaggaaggtacagaagagctgat

SEQ ID NO: 281532 - DNA, 33 bp, Homo sapien
atctttaatttaggaatgtacagaagagctgat

SEQ ID NO: 281533 - DNA, 33 bp, Homo sapien
ataagaccagcgcaaaagacaaaagtaagagta

SEQ ID NO: 281534 - DNA, 33 bp, Homo sapien
ataagaccagcgcaaaggacaaaagtaagagta

SEQ ID NO: 281535 - DNA, 33 bp, Homo sapien
cttaggagctgaaaagacttattatctaattgt

SEQ ID NO: 281536 - DNA, 33 bp, Homo sapien
cttaggagctgaaaagtcttattatctaattgt

SEQ ID NO: 281537 - DNA, 33 bp, Homo sapien
catgtgacaggacctacgaacaatggaatcatt

SEQ ID NO: 281538 - DNA, 33 bp, Homo sapien
catgtgacaggacctatgaacaatggaatcatt

SEQ ID NO: 281539 - DNA, 33 bp, Homo sapien
tacttgtcctaatgaactatagaatggttttac

SEQ ID NO: 281540 - DNA, 33 bp, Homo sapien
tacttgtcctaatgaattatagaatggttttac

SEQ ID NO: 281541 - DNA, 33 bp, Homo sapien
tcactagagctctgtactaaacgatttgctcag

SEQ ID NO: 281542 - DNA, 33 bp, Homo sapien
tcactagagctctgtattaaacgatttgctcag

SEQ ID NO: 281543 - DNA, 33 bp, Homo sapien
tggaattgaggtggtacataaatttgcatacag

SEQ ID NO: 281544 - DNA, 33 bp, Homo sapien
tggaattgaggtggtatataaatttgcatacag

SEQ ID NO: 281545 - DNA, 33 bp, Homo sapien
caacctgtgggctcaactatctagccaggtaga

SEQ ID NO: 281546 - DNA, 33 bp, Homo sapien
caacctgtgggctcaattatctagccaggtaga

SEQ ID NO: 281547 - DNA, 33 bp, Homo sapien
gaattgacttcatagaatcattcaacggatcaa

SEQ ID NO: 281548 - DNA, 33 bp, Homo sapien
gaattgacttcatagagtcattcaacggatcaa

SEQ ID NO: 281549 - DNA, 33 bp, Homo sapien
ccaaaaccttgcctccaatccttgttttgctgt

SEQ ID NO: 281550 - DNA, 33 bp, Homo sapien
ccaaaaccttgcctcctatccttgttttgctgt

SEQ ID NO: 281551 - DNA, 33 bp, Homo sapien
cttaaagtggcctatacatttagttttcttgaa

SEQ ID NO: 281552 - DNA, 33 bp, Homo sapien
cttaaagtggcctatagatttagttttcttgaa

SEQ ID NO: 281553 - DNA, 33 bp, Homo sapien
tctgtcaagaaacaacaacgacgtcacatttat

SEQ ID NO: 281554 - DNA, 33 bp, Homo sapien
tctgtcaagaaacaaccacgacgtcacatttat

SEQ ID NO: 281555 - DNA, 33 bp, Homo sapien
taatggttcatatctaaatggatcaaggaactc

SEQ ID NO: 281556 - DNA, 33 bp, Homo sapien
taatggttcatatctacatggatcaaggaactc

SEQ ID NO: 281557 - DNA, 33 bp, Homo sapien
ataactgagacattggaacattttataccaggg

SEQ ID NO: 281558 - DNA, 33 bp, Homo sapien
ataactgagacattgggacattttataccaggg

SEQ ID NO: 281559 - DNA, 33 bp, Homo sapien
gcactaggaaaagatacaatgcctttacaatat

SEQ ID NO: 281560 - DNA, 33 bp, Homo sapien
gcactaggaaaagatataatgcctttacaatat

SEQ ID NO: 281561 - DNA, 33 bp, Homo sapien
gatgtagttgaggaaacattatctcaatgctat

SEQ ID NO: 281562 - DNA, 33 bp, Homo sapien
gatgtagttgaggaaagattatctcaatgctat

SEQ ID NO: 281563 - DNA, 33 bp, Homo sapien
tagttaagagagcaaaatctggggatagtctgt

SEQ ID NO: 281564 - DNA, 33 bp, Homo sapien
tagttaagagagcaaattctggggatagtctgt

SEQ ID NO: 281565 - DNA, 33 bp, Homo sapien
tgcagagaagtgaaagcatgctaaaacagggaa

SEQ ID NO: 281566 - DNA, 33 bp, Homo sapien
tgcagagaagtgaaagtatgctaaaacagggaa

SEQ ID NO: 281567 - DNA, 33 bp, Homo sapien
acaaagtttttcaatacgtgtgaggtgaaggag

SEQ ID NO: 281568 - DNA, 33 bp, Homo sapien
acaaagtttttcaatatgtgtgaggtgaaggag

SEQ ID NO: 281569 - DNA, 33 bp, Homo sapien
gtgagccagactaaagaagtatagttttgtcca

SEQ ID NO: 281570 - DNA, 33 bp, Homo sapien
gtgagccagactaaagtagtatagttttgtcca

SEQ ID NO: 281571 - DNA, 33 bp, Homo sapien
ccctcctaataattcacgaagggccatcctcat

SEQ ID NO: 281572 - DNA, 33 bp, Homo sapien
ccctcctaataattcatgaagggccatcctcat

SEQ ID NO: 281573 - DNA, 33 bp, Homo sapien
tgtttatcctctagataaggaagagacatcaaa

SEQ ID NO: 281574 - DNA, 33 bp, Homo sapien
tgtttatcctctagatgaggaagagacatcaaa

SEQ ID NO: 281575 - DNA, 33 bp, Homo sapien
atctgtcatagattaccaagcacacagtgattg

SEQ ID NO: 281576 - DNA, 33 bp, Homo sapien
atctgtcatagattacgaagcacacagtgattg

SEQ ID NO: 281577 - DNA, 33 bp, Homo sapien
tgcattggaaggacaaaatcaaaattttctaca

SEQ ID NO: 281578 - DNA, 33 bp, Homo sapien
tgcattggaaggacaagatcaaaattttctaca

SEQ ID NO: 281579 - DNA, 33 bp, Homo sapien
ctttctccctgcacccacctaatactccccagc

SEQ ID NO: 281580 - DNA, 33 bp, Homo sapien
ctttctccctgcacccgcctaatactccccagc

SEQ ID NO: 281581 - DNA, 33 bp, Homo sapien
tgcggccattgattgacggaaaatataggacac

SEQ ID NO: 281582 - DNA, 33 bp, Homo sapien
tgcggccattgattgatggaaaatataggacac

SEQ ID NO: 281583 - DNA, 33 bp, Homo sapien
aataataactcaccaccattgtcattgaaaagg

SEQ ID NO: 281584 - DNA, 33 bp, Homo sapien
aataataactcaccactattgtcattgaaaagg

SEQ ID NO: 281585 - DNA, 33 bp, Homo sapien
aagagaattttccaataattgcattcagagcct

SEQ ID NO: 281586 - DNA, 33 bp, Homo sapien
aagagaattttccaatgattgcattcagagcct

SEQ ID NO: 281587 - DNA, 33 bp, Homo sapien
tgtatacttatatgtacaaatgcatgaagtatt

SEQ ID NO: 281588 - DNA, 33 bp, Homo sapien
tgtatacttatatgtagaaatgcatgaagtatt

SEQ ID NO: 281589 - DNA, 33 bp, Homo sapien
tgagctacaattgcataactatagtccagcctg

SEQ ID NO: 281590 - DNA, 33 bp, Homo sapien
tgagctacaattgcatcactatagtccagcctg

SEQ ID NO: 281591 - DNA, 33 bp, Homo sapien
aaagtataaaattgtagataaagccaggagtgg

SEQ ID NO: 281592 - DNA, 33 bp, Homo sapien
aaagtataaaattgtatataaagccaggagtgg

SEQ ID NO: 281593 - DNA, 33 bp, Homo sapien
aaatgtaagccaaagcagagccagccaagttca

SEQ ID NO: 281594 - DNA, 33 bp, Homo sapien
aaatgtaagccaaagcggagccagccaagttca

SEQ ID NO: 281595 - DNA, 33 bp, Homo sapien
accatgtaggaaaagacagaatgcagaaatcat

SEQ ID NO: 281596 - DNA, 33 bp, Homo sapien
accatgtaggaaaagatagaatgcagaaatcat

SEQ ID NO: 281597 - DNA, 33 bp, Homo sapien
aaacagggaatactaacggtttgagtcatatca

SEQ ID NO: 281598 - DNA, 33 bp, Homo sapien
aaacagggaatactaatggtttgagtcatatca

SEQ ID NO: 281599 - DNA, 33 bp, Homo sapien
agtctgacaatggagaacctaatatcaaatata

SEQ ID NO: 281600 - DNA, 33 bp, Homo sapien
agtctgacaatggagagcctaatatcaaatata

SEQ ID NO: 281601 - DNA, 33 bp, Homo sapien
atgtagcactagtaaccagaactgtcaacaaat

SEQ ID NO: 281602 - DNA, 33 bp, Homo sapien
atgtagcactagtaacgagaactgtcaacaaat

SEQ ID NO: 281603 - DNA, 33 bp, Homo sapien
ttacctggttaaagtacagcaaatttagagtgt

SEQ ID NO: 281604 - DNA, 33 bp, Homo sapien
ttacctggttaaagtatagcaaatttagagtgt

SEQ ID NO: 281605 - DNA, 33 bp, Homo sapien
gcagtttagcacttggaatcgaatgtattttgt

SEQ ID NO: 281606 - DNA, 33 bp, Homo sapien
gcagtttagcacttggcatcgaatgtattttgt

SEQ ID NO: 281607 - DNA, 33 bp, Homo sapien
gttgtcttacaaattacccttgcacttggcact

SEQ ID NO: 281608 - DNA, 33 bp, Homo sapien
gttgtcttacaaattatccttgcacttggcact

SEQ ID NO: 281609 - DNA, 33 bp, Homo sapien
aaacatagataaggcaaaaaataagaaataaac

SEQ ID NO: 281610 - DNA, 33 bp, Homo sapien
aaacatagataaggcacaaaataagaaataaac

SEQ ID NO: 281611 - DNA, 33 bp, Homo sapien
taagagtgctggttgaatagaactttggctata

SEQ ID NO: 281612 - DNA, 33 bp, Homo sapien
taagagtgctggttgactagaactttggctata

SEQ ID NO: 281613 - DNA, 33 bp, Homo sapien
cataggaaactaagacaataaacaagtaattct

SEQ ID NO: 281614 - DNA, 33 bp, Homo sapien
cataggaaactaagacgataaacaagtaattct

SEQ ID NO: 281615 - DNA, 33 bp, Homo sapien
ttatgtcatctgtatcaatccaatggtatatct

SEQ ID NO: 281616 - DNA, 33 bp, Homo sapien
ttatgtcatctgtatcgatccaatggtatatct

SEQ ID NO: 281617 - DNA, 33 bp, Homo sapien
atgctgtttaaactgacgtgggtcttgtagggc

SEQ ID NO: 281618 - DNA, 33 bp, Homo sapien
atgctgtttaaactgatgtgggtcttgtagggc

SEQ ID NO: 281619 - DNA, 33 bp, Homo sapien
cctgtcaaaaaaaagaagcactcaattctgttt

SEQ ID NO: 281620 - DNA, 33 bp, Homo sapien
cctgtcaaaaaaaagaggcactcaattctgttt

SEQ ID NO: 281621 - DNA, 33 bp, Homo sapien
aaagtttcatgtgttaataaaattcctccctcc

SEQ ID NO: 281622 - DNA, 33 bp, Homo sapien
aaagtttcatgtgttattaaaattcctccctcc

SEQ ID NO: 281623 - DNA, 33 bp, Homo sapien
atttgtgattggaatggagcaaaattaatatga

SEQ ID NO: 281624 - DNA, 33 bp, Homo sapien
atttgtgattggaatgtagcaaaattaatatga

SEQ ID NO: 281625 - DNA, 33 bp, Homo sapien
agagctagagagtgtgaaataggctccatggag

SEQ ID NO: 281626 - DNA, 33 bp, Homo sapien
agagctagagagtgtgtaataggctccatggag

SEQ ID NO: 281627 - DNA, 33 bp, Homo sapien
atatgtgagcataccacagatatgatttcttca

SEQ ID NO: 281628 - DNA, 33 bp, Homo sapien
atatgtgagcataccagagatatgatttcttca

SEQ ID NO: 281629 - DNA, 33 bp, Homo sapien
cattaaacagcatacaaacccatttttaaagac

SEQ ID NO: 281630 - DNA, 33 bp, Homo sapien
cattaaacagcatacatacccatttttaaagac

SEQ ID NO: 281631 - DNA, 33 bp, Homo sapien
catctatttacttgaaccagattttccttcctt

SEQ ID NO: 281632 - DNA, 33 bp, Homo sapien
catctatttacttgaatcagattttccttcctt

SEQ ID NO: 281633 - DNA, 33 bp, Homo sapien
acatacaacacgatcactaaaacaacagggtag

SEQ ID NO: 281634 - DNA, 33 bp, Homo sapien
acatacaacacgatcattaaaacaacagggtag

SEQ ID NO: 281635 - DNA, 33 bp, Homo sapien
ttttattcttcctggtgaatccctgtctgtcct

SEQ ID NO: 281636 - DNA, 33 bp, Homo sapien
ttttattcttcctggttaatccctgtctgtcct

SEQ ID NO: 281637 - DNA, 33 bp, Homo sapien
ctatagagaacatactaaagtactaaagtcatt

SEQ ID NO: 281638 - DNA, 33 bp, Homo sapien
ctatagagaacatactgaagtactaaagtcatt

SEQ ID NO: 281639 - DNA, 33 bp, Homo sapien
atttatcctaccagaaatagctctctgcttgtc

SEQ ID NO: 281640 - DNA, 33 bp, Homo sapien
atttatcctaccagaagtagctctctgcttgtc

SEQ ID NO: 281641 - DNA, 33 bp, Homo sapien
ggacttcatttctttccaatggaaaaagacaat

SEQ ID NO: 281642 - DNA, 33 bp, Homo sapien
ggacttcatttctttctaatggaaaaagacaat

SEQ ID NO: 281643 - DNA, 33 bp, Homo sapien
ctaggaatattgtaacaggaaccaccaaggcag

SEQ ID NO: 281644 - DNA, 33 bp, Homo sapien
ctaggaatattgtaactggaaccaccaaggcag

SEQ ID NO: 281645 - DNA, 33 bp, Homo sapien
ggcaagcaacagtggaaaaagtaattcagttga

SEQ ID NO: 281646 - DNA, 33 bp, Homo sapien
ggcaagcaacagtggagaaagtaattcagttga

SEQ ID NO: 281647 - DNA, 33 bp, Homo sapien
ttccagtgaaaaccagaagaaatgggaggtaaa

SEQ ID NO: 281648 - DNA, 33 bp, Homo sapien
ttccagtgaaaaccaggagaaatgggaggtaaa

SEQ ID NO: 281649 - DNA, 33 bp, Homo sapien
tctttctcagacacaaaattctagcagtgcttg

SEQ ID NO: 281650 - DNA, 33 bp, Homo sapien
tctttctcagacacaacattctagcagtgcttg

SEQ ID NO: 281651 - DNA, 33 bp, Homo sapien
ttgaccccaggcagatcaacaagagaaaagtac

SEQ ID NO: 281652 - DNA, 33 bp, Homo sapien
ttgaccccaggcagattaacaagagaaaagtac

SEQ ID NO: 281653 - DNA, 33 bp, Homo sapien
gttgtctagatgttgacctttcactcagaaggg

SEQ ID NO: 281654 - DNA, 33 bp, Homo sapien
gttgtctagatgttgagctttcactcagaaggg

SEQ ID NO: 281655 - DNA, 33 bp, Homo sapien
atcactctgtgtcagaaactatgttatgcgctt

SEQ ID NO: 281656 - DNA, 33 bp, Homo sapien
atcactctgtgtcagatactatgttatgcgctt

SEQ ID NO: 281657 - DNA, 33 bp, Homo sapien
ccagatgggagctatacaactttttctagaaac

SEQ ID NO: 281658 - DNA, 33 bp, Homo sapien
ccagatgggagctatataactttttctagaaac

SEQ ID NO: 281659 - DNA, 33 bp, Homo sapien
gtacaaaactgcagaaacaaaagcatacctgaa

SEQ ID NO: 281660 - DNA, 33 bp, Homo sapien
gtacaaaactgcagaagcaaaagcatacctgaa

SEQ ID NO: 281661 - DNA, 33 bp, Homo sapien
cctggatacgtcgttagcacccaaaatccatag

SEQ ID NO: 281662 - DNA, 33 bp, Homo sapien
cctggatacgtcgttatcacccaaaatccatag

SEQ ID NO: 281663 - DNA, 33 bp, Homo sapien
caaaagcattttgataacatgaacaaagtaaat

SEQ ID NO: 281664 - DNA, 33 bp, Homo sapien
caaaagcattttgatagcatgaacaaagtaaat

SEQ ID NO: 281665 - DNA, 33 bp, Homo sapien
aaaaaaaaagctgccaatgaaacagatgagcct

SEQ ID NO: 281666 - DNA, 33 bp, Homo sapien
aaaaaaaaagctgccagtgaaacagatgagcct

SEQ ID NO: 281667 - DNA, 33 bp, Homo sapien
ttctgttggctaataaaataattggcaaggaat

SEQ ID NO: 281668 - DNA, 33 bp, Homo sapien
ttctgttggctaataagataattggcaaggaat

SEQ ID NO: 281669 - DNA, 33 bp, Homo sapien
gttgatctacttctctgaaacacacatctttct

SEQ ID NO: 281670 - DNA, 33 bp, Homo sapien
gttgatctacttctcttaaacacacatctttct

SEQ ID NO: 281671 - DNA, 33 bp, Homo sapien
gtttacaatgttgttaaggagacaaatactcaa

SEQ ID NO: 281672 - DNA, 33 bp, Homo sapien
gtttacaatgttgttagggagacaaatactcaa

SEQ ID NO: 281673 - DNA, 33 bp, Homo sapien
cataatgttcaaagtacgtttttcaattcagat

SEQ ID NO: 281674 - DNA, 33 bp, Homo sapien
cataatgttcaaagtatgtttttcaattcagat

SEQ ID NO: 281675 - DNA, 33 bp, Homo sapien
tttgctgtcaagtacaatggataaggacatggg

SEQ ID NO: 281676 - DNA, 33 bp, Homo sapien
tttgctgtcaagtacagtggataaggacatggg

SEQ ID NO: 281677 - DNA, 33 bp, Homo sapien
tgtttttccttggggaagtagaagctggagaaa

SEQ ID NO: 281678 - DNA, 33 bp, Homo sapien
tgtttttccttggggacgtagaagctggagaaa

SEQ ID NO: 281679 - DNA, 33 bp, Homo sapien
tttaaatcaactataaaaccttgcacttacaat

SEQ ID NO: 281680 - DNA, 33 bp, Homo sapien
tttaaatcaactataacaccttgcacttacaat

SEQ ID NO: 281681 - DNA, 33 bp, Homo sapien
agaagttgaatattaccattgactgagattgta

SEQ ID NO: 281682 - DNA, 33 bp, Homo sapien
agaagttgaatattactattgactgagattgta

SEQ ID NO: 281683 - DNA, 33 bp, Homo sapien
gtcttagtcactagaaacagtatctccaaaatg

SEQ ID NO: 281684 - DNA, 33 bp, Homo sapien
gtcttagtcactagaaccagtatctccaaaatg

SEQ ID NO: 281685 - DNA, 33 bp, Homo sapien
ttcacagctcagtaaggcatgtgtatggctggc

SEQ ID NO: 281686 - DNA, 33 bp, Homo sapien
ttcacagctcagtaagtcatgtgtatggctggc

SEQ ID NO: 281687 - DNA, 33 bp, Homo sapien
gccacataaaggcaaccccaagaaaggcagcct

SEQ ID NO: 281688 - DNA, 33 bp, Homo sapien
gccacataaaggcaactccaagaaaggcagcct

SEQ ID NO: 281689 - DNA, 33 bp, Homo sapien
tacttagctattgtagcacttgaaagctgttta

SEQ ID NO: 281690 - DNA, 33 bp, Homo sapien
tacttagctattgtagtacttgaaagctgttta

SEQ ID NO: 281691 - DNA, 33 bp, Homo sapien
aaaagaaaagtgaccacgttcaattcccaacac

SEQ ID NO: 281692 - DNA, 33 bp, Homo sapien
aaaagaaaagtgaccatgttcaattcccaacac

SEQ ID NO: 281693 - DNA, 33 bp, Homo sapien
ttcacctgtatgttccactggccctcatctgga

SEQ ID NO: 281694 - DNA, 33 bp, Homo sapien
ttcacctgtatgttccgctggccctcatctgga

SEQ ID NO: 281695 - DNA, 33 bp, Homo sapien
ttttagctaagatagaactatgagtgctgagaa

SEQ ID NO: 281696 - DNA, 33 bp, Homo sapien
ttttagctaagatagagctatgagtgctgagaa

SEQ ID NO: 281697 - DNA, 33 bp, Homo sapien
taaatggcacttatcacgtctaattctctaaac

SEQ ID NO: 281698 - DNA, 33 bp, Homo sapien
taaatggcacttatcatgtctaattctctaaac

SEQ ID NO: 281699 - DNA, 33 bp, Homo sapien
agtttgaggactcccaaattctctcacaatatt

SEQ ID NO: 281700 - DNA, 33 bp, Homo sapien
agtttgaggactcccagattctctcacaatatt

SEQ ID NO: 281701 - DNA, 33 bp, Homo sapien
catggttgaaaagcaaaacagttaagaagggaa

SEQ ID NO: 281702 - DNA, 33 bp, Homo sapien
catggttgaaaagcaacacagttaagaagggaa

SEQ ID NO: 281703 - DNA, 33 bp, Homo sapien
gtctgggtattgttggaatcattctctcagtag

SEQ ID NO: 281704 - DNA, 33 bp, Homo sapien
gtctgggtattgttgggatcattctctcagtag

SEQ ID NO: 281705 - DNA, 33 bp, Homo sapien
aaagatgtgtcctaaacgtaggtgatagctgtc

SEQ ID NO: 281706 - DNA, 33 bp, Homo sapien
aaagatgtgtcctaaatgtaggtgatagctgtc

SEQ ID NO: 281707 - DNA, 33 bp, Homo sapien
taatatacaaacacccaaagttcatatgactca

SEQ ID NO: 281708 - DNA, 33 bp, Homo sapien
taatatacaaacacccgaagttcatatgactca

SEQ ID NO: 281709 - DNA, 33 bp, Homo sapien
tatgtatttatttttaaccagaggccaaatgga

SEQ ID NO: 281710 - DNA, 33 bp, Homo sapien
tatgtatttatttttagccagaggccaaatgga

SEQ ID NO: 281711 - DNA, 33 bp, Homo sapien
gatccccaaacttgacaactatagtgtctgtga

SEQ ID NO: 281712 - DNA, 33 bp, Homo sapien
gatccccaaacttgacgactatagtgtctgtga

SEQ ID NO: 281713 - DNA, 33 bp, Homo sapien
tttccctttttggccactaatactctatctgcc

SEQ ID NO: 281714 - DNA, 33 bp, Homo sapien
tttccctttttggccagtaatactctatctgcc

SEQ ID NO: 281715 - DNA, 33 bp, Homo sapien
ttgagataattactgcactaaagagagcatatg

SEQ ID NO: 281716 - DNA, 33 bp, Homo sapien
ttgagataattactgcgctaaagagagcatatg

SEQ ID NO: 281717 - DNA, 33 bp, Homo sapien
tggggtgatagcctaacgaactgccacctagaa

SEQ ID NO: 281718 - DNA, 33 bp, Homo sapien
tggggtgatagcctaatgaactgccacctagaa

SEQ ID NO: 281719 - DNA, 33 bp, Homo sapien
cataaagttgtgtgaccatgaactggattaaac

SEQ ID NO: 281720 - DNA, 33 bp, Homo sapien
cataaagttgtgtgactatgaactggattaaac

SEQ ID NO: 281721 - DNA, 33 bp, Homo sapien
tgcacaccaaggaatacagtttcaccttctatt

SEQ ID NO: 281722 - DNA, 33 bp, Homo sapien
tgcacaccaaggaatatagtttcaccttctatt

SEQ ID NO: 281723 - DNA, 33 bp, Homo sapien
tgtgtagttggtatcactaaagaggtatggata

SEQ ID NO: 281724 - DNA, 33 bp, Homo sapien
tgtgtagttggtatcattaaagaggtatggata

SEQ ID NO: 281725 - DNA, 33 bp, Homo sapien
gctgcttgctaggacactgtattgctgaggcca

SEQ ID NO: 281726 - DNA, 33 bp, Homo sapien
gctgcttgctaggacattgtattgctgaggcca

SEQ ID NO: 281727 - DNA, 33 bp, Homo sapien
tgggaaacttccagtacagttttggttctaaat

SEQ ID NO: 281728 - DNA, 33 bp, Homo sapien
tgggaaacttccagtatagttttggttctaaat

SEQ ID NO: 281729 - DNA, 33 bp, Homo sapien
gcatcactgtgaattgaaaatagacttggaaaa

SEQ ID NO: 281730 - DNA, 33 bp, Homo sapien
gcatcactgtgaattggaaatagacttggaaaa

SEQ ID NO: 281731 - DNA, 33 bp, Homo sapien
gtggttaatgggaagacgatgaattctatttca

SEQ ID NO: 281732 - DNA, 33 bp, Homo sapien
gtggttaatgggaagatgatgaattctatttca

SEQ ID NO: 281733 - DNA, 33 bp, Homo sapien
attaataggataataacaagtgccataggaatt

SEQ ID NO: 281734 - DNA, 33 bp, Homo sapien
attaataggataataataagtgccataggaatt

SEQ ID NO: 281735 - DNA, 33 bp, Homo sapien
accaatatttaacagccatggaatatatcataa

SEQ ID NO: 281736 - DNA, 33 bp, Homo sapien
accaatatttaacagctatggaatatatcataa

SEQ ID NO: 281737 - DNA, 33 bp, Homo sapien
tacaacatttgttgaaagactaaggccttttag

SEQ ID NO: 281738 - DNA, 33 bp, Homo sapien
tacaacatttgttgaaggactaaggccttttag

SEQ ID NO: 281739 - DNA, 33 bp, Homo sapien
tttcaatagtcctttcacttcattagattttga

SEQ ID NO: 281740 - DNA, 33 bp, Homo sapien
tttcaatagtcctttcgcttcattagattttga

SEQ ID NO: 281741 - DNA, 33 bp, Homo sapien
atatcgccagaagtaccctcacaattgatatag

SEQ ID NO: 281742 - DNA, 33 bp, Homo sapien
atatcgccagaagtactctcacaattgatatag

SEQ ID NO: 281743 - DNA, 33 bp, Homo sapien
agaggaaacagaactacggcagcatgaatttga

SEQ ID NO: 281744 - DNA, 33 bp, Homo sapien
agaggaaacagaactatggcagcatgaatttga

SEQ ID NO: 281745 - DNA, 33 bp, Homo sapien
agtcatgattgcaccactgaactcaagcttggg

SEQ ID NO: 281746 - DNA, 33 bp, Homo sapien
agtcatgattgcaccattgaactcaagcttggg

SEQ ID NO: 281747 - DNA, 33 bp, Homo sapien
gatctgaaatgtaatcaagcccatgcctctacc

SEQ ID NO: 281748 - DNA, 33 bp, Homo sapien
gatctgaaatgtaatcgagcccatgcctctacc

SEQ ID NO: 281749 - DNA, 33 bp, Homo sapien
gtgttttgcattttcacgttaccctcctcatgg

SEQ ID NO: 281750 - DNA, 33 bp, Homo sapien
gtgttttgcattttcatgttaccctcctcatgg

SEQ ID NO: 281751 - DNA, 33 bp, Homo sapien
aatgaacacaatattcgccagctaaggtggaaa

SEQ ID NO: 281752 - DNA, 33 bp, Homo sapien
aatgaacacaatattctccagctaaggtggaaa

SEQ ID NO: 281753 - DNA, 33 bp, Homo sapien
ttatctgaatgaaataagaatgttttgaatata

SEQ ID NO: 281754 - DNA, 33 bp, Homo sapien
ttatctgaatgaaatacgaatgttttgaatata

SEQ ID NO: 281755 - DNA, 33 bp, Homo sapien
gccttatgaccttaagaaagaatggccacatgg

SEQ ID NO: 281756 - DNA, 33 bp, Homo sapien
gccttatgaccttaagcaagaatggccacatgg

SEQ ID NO: 281757 - DNA, 33 bp, Homo sapien
aaattactaatgtttaaagtgccattagtctga

SEQ ID NO: 281758 - DNA, 33 bp, Homo sapien
aaattactaatgtttacagtgccattagtctga

SEQ ID NO: 281759 - DNA, 33 bp, Homo sapien
gcagcagagagtataaagatgacaaacccttaa

SEQ ID NO: 281760 - DNA, 33 bp, Homo sapien
gcagcagagagtataaggatgacaaacccttaa

SEQ ID NO: 281761 - DNA, 33 bp, Homo sapien
cagtcaagataaaaacacaggcttcccatctcc

SEQ ID NO: 281762 - DNA, 33 bp, Homo sapien
cagtcaagataaaaacgcaggcttcccatctcc

SEQ ID NO: 281763 - DNA, 33 bp, Homo sapien
caccaaactaatataacaccgaaggcaaattcc

SEQ ID NO: 281764 - DNA, 33 bp, Homo sapien
caccaaactaatataataccgaaggcaaattcc

SEQ ID NO: 281765 - DNA, 33 bp, Homo sapien
ttatcaacaatggaaagaagattatgcattttc

SEQ ID NO: 281766 - DNA, 33 bp, Homo sapien
ttatcaacaatggaaataagattatgcattttc

SEQ ID NO: 281767 - DNA, 33 bp, Homo sapien
ggacaaaagagttacacctgcagcacattacaa

SEQ ID NO: 281768 - DNA, 33 bp, Homo sapien
ggacaaaagagttacatctgcagcacattacaa

SEQ ID NO: 281769 - DNA, 33 bp, Homo sapien
agtctaaggtaacttaagtgacacctaggtaga

SEQ ID NO: 281770 - DNA, 33 bp, Homo sapien
agtctaaggtaacttatgtgacacctaggtaga

SEQ ID NO: 281771 - DNA, 33 bp, Homo sapien
aaagctcagagataccaggaactgcaaagcccc

SEQ ID NO: 281772 - DNA, 33 bp, Homo sapien
aaagctcagagataccgggaactgcaaagcccc

SEQ ID NO: 281773 - DNA, 33 bp, Homo sapien
acaccacccattactacatggaaactgagggag

SEQ ID NO: 281774 - DNA, 33 bp, Homo sapien
acaccacccattactagatggaaactgagggag

SEQ ID NO: 281775 - DNA, 33 bp, Homo sapien
caaactgaggagcccaatgaatggagaacacag

SEQ ID NO: 281776 - DNA, 33 bp, Homo sapien
caaactgaggagcccagtgaatggagaacacag

SEQ ID NO: 281777 - DNA, 33 bp, Homo sapien
ttatcactgattcctacgacaggctaggctttc

SEQ ID NO: 281778 - DNA, 33 bp, Homo sapien
ttatcactgattcctatgacaggctaggctttc

SEQ ID NO: 281779 - DNA, 33 bp, Homo sapien
aaagcatagggcatgcggactgaatttgaattc

SEQ ID NO: 281780 - DNA, 33 bp, Homo sapien
aaagcatagggcatgctgactgaatttgaattc

SEQ ID NO: 281781 - DNA, 33 bp, Homo sapien
ggctccttactatttccctgcttatcacagagt

SEQ ID NO: 281782 - DNA, 33 bp, Homo sapien
ggctccttactatttctctgcttatcacagagt

SEQ ID NO: 281783 - DNA, 33 bp, Homo sapien
tctttttgaagtacaacatttctgaagcctcat

SEQ ID NO: 281784 - DNA, 33 bp, Homo sapien
tctttttgaagtacaatatttctgaagcctcat

SEQ ID NO: 281785 - DNA, 33 bp, Homo sapien
tcaaaaagacacatgacgccattaaactaagcg

SEQ ID NO: 281786 - DNA, 33 bp, Homo sapien
tcaaaaagacacatgatgccattaaactaagcg

SEQ ID NO: 281787 - DNA, 33 bp, Homo sapien
tggtcctcagactttaacctggaagggtaccac

SEQ ID NO: 281788 - DNA, 33 bp, Homo sapien
tggtcctcagactttatcctggaagggtaccac

SEQ ID NO: 281789 - DNA, 33 bp, Homo sapien
actttttatccccccaataggatcctcattctc

SEQ ID NO: 281790 - DNA, 33 bp, Homo sapien
actttttatccccccagtaggatcctcattctc

SEQ ID NO: 281791 - DNA, 33 bp, Homo sapien
tctaatcactgttataactggtaatttcaaaca

SEQ ID NO: 281792 - DNA, 33 bp, Homo sapien
tctaatcactgttatatctggtaatttcaaaca

SEQ ID NO: 281793 - DNA, 33 bp, Homo sapien
gtaaagatctgctccactaattttggtgagcaa

SEQ ID NO: 281794 - DNA, 33 bp, Homo sapien
gtaaagatctgctccattaattttggtgagcaa

SEQ ID NO: 281795 - DNA, 33 bp, Homo sapien
tcaaccaaacttgtaacgcatattaatgctatg

SEQ ID NO: 281796 - DNA, 33 bp, Homo sapien
tcaaccaaacttgtaatgcatattaatgctatg

SEQ ID NO: 281797 - DNA, 33 bp, Homo sapien
tcttgtccaggtgttcaacagcaaagcaggcag

SEQ ID NO: 281798 - DNA, 33 bp, Homo sapien
tcttgtccaggtgttccacagcaaagcaggcag

SEQ ID NO: 281799 - DNA, 33 bp, Homo sapien
ggtcaacaattgttaccgacaaatggctgagat

SEQ ID NO: 281800 - DNA, 33 bp, Homo sapien
ggtcaacaattgttactgacaaatggctgagat

SEQ ID NO: 281801 - DNA, 33 bp, Homo sapien
tcctattgcctatggaaaacttgcaggaaaata

SEQ ID NO: 281802 - DNA, 33 bp, Homo sapien
tcctattgcctatggacaacttgcaggaaaata

SEQ ID NO: 281803 - DNA, 33 bp, Homo sapien
ttgtgaagcattatcaaagtgagaaaaaaacaa

SEQ ID NO: 281804 - DNA, 33 bp, Homo sapien
ttgtgaagcattatcatagtgagaaaaaaacaa

SEQ ID NO: 281805 - DNA, 33 bp, Homo sapien
ctcactcacagggtccagagagcatgagccaag

SEQ ID NO: 281806 - DNA, 33 bp, Homo sapien
ctcactcacagggtccggagagcatgagccaag

SEQ ID NO: 281807 - DNA, 33 bp, Homo sapien
ggcaagatgtgagtaaagtgaagggggaggtga

SEQ ID NO: 281808 - DNA, 33 bp, Homo sapien
ggcaagatgtgagtaaggtgaagggggaggtga

SEQ ID NO: 281809 - DNA, 33 bp, Homo sapien
taatcacacatttcagaaaaacaccaaagctca

SEQ ID NO: 281810 - DNA, 33 bp, Homo sapien
taatcacacatttcaggaaaacaccaaagctca

SEQ ID NO: 281811 - DNA, 33 bp, Homo sapien
gcttcatttaaaccagaaagtacagtacagaaa

SEQ ID NO: 281812 - DNA, 33 bp, Homo sapien
gcttcatttaaaccaggaagtacagtacagaaa

SEQ ID NO: 281813 - DNA, 33 bp, Homo sapien
tgcacagacacaaacaactgtgtgatgcatata

SEQ ID NO: 281814 - DNA, 33 bp, Homo sapien
tgcacagacacaaacatctgtgtgatgcatata

SEQ ID NO: 281815 - DNA, 33 bp, Homo sapien
ctgtattatgtggtcaatattcatttagactta

SEQ ID NO: 281816 - DNA, 33 bp, Homo sapien
ctgtattatgtggtcagtattcatttagactta

SEQ ID NO: 281817 - DNA, 33 bp, Homo sapien
ttaaaaaaagagaaacactaatgctttacaggt

SEQ ID NO: 281818 - DNA, 33 bp, Homo sapien
ttaaaaaaagagaaacgctaatgctttacaggt

SEQ ID NO: 281819 - DNA, 33 bp, Homo sapien
ggcaatgccagaaagcagaagagagaagaggct

SEQ ID NO: 281820 - DNA, 33 bp, Homo sapien
ggcaatgccagaaagcggaagagagaagaggct

SEQ ID NO: 281821 - DNA, 33 bp, Homo sapien
atccaaatattcttatcaaggtctctgttggct

SEQ ID NO: 281822 - DNA, 33 bp, Homo sapien
atccaaatattcttattaaggtctctgttggct

SEQ ID NO: 281823 - DNA, 33 bp, Homo sapien
aggatgcctcaggagaaaaagcacaaaaaggta

SEQ ID NO: 281824 - DNA, 33 bp, Homo sapien
aggatgcctcaggagagaaagcacaaaaaggta

SEQ ID NO: 281825 - DNA, 33 bp, Homo sapien
taaaaatgtgggtgaaatcatccgtgtctttga

SEQ ID NO: 281826 - DNA, 33 bp, Homo sapien
taaaaatgtgggtgaagtcatccgtgtctttga

SEQ ID NO: 281827 - DNA, 33 bp, Homo sapien
agtgctataaagcttaaactccaatagaaacca

SEQ ID NO: 281828 - DNA, 33 bp, Homo sapien
agtgctataaagcttacactccaatagaaacca

SEQ ID NO: 281829 - DNA, 33 bp, Homo sapien
tcctaagtatttctcaagtcactgtttctgtct

SEQ ID NO: 281830 - DNA, 33 bp, Homo sapien
tcctaagtatttctcacgtcactgtttctgtct

SEQ ID NO: 281831 - DNA, 33 bp, Homo sapien
aaaattgttcccaagaagccatcatgtttaggt

SEQ ID NO: 281832 - DNA, 33 bp, Homo sapien
aaaattgttcccaagaggccatcatgtttaggt

SEQ ID NO: 281833 - DNA, 33 bp, Homo sapien
aggatttaaataacaaaagagcaaagtggtaac

SEQ ID NO: 281834 - DNA, 33 bp, Homo sapien
aggatttaaataacaagagagcaaagtggtaac

SEQ ID NO: 281835 - DNA, 33 bp, Homo sapien
agtgaataagattgaacattaggatgatgagaa

SEQ ID NO: 281836 - DNA, 33 bp, Homo sapien
agtgaataagattgaatattaggatgatgagaa

SEQ ID NO: 281837 - DNA, 33 bp, Homo sapien
gaattcaattctggcccatgagaccaacaccag

SEQ ID NO: 281838 - DNA, 33 bp, Homo sapien
gaattcaattctggcctatgagaccaacaccag

SEQ ID NO: 281839 - DNA, 33 bp, Homo sapien
tcaattttaaatacaaacggcactattgagtct

SEQ ID NO: 281840 - DNA, 33 bp, Homo sapien
tcaattttaaatacaagcggcactattgagtct

SEQ ID NO: 281841 - DNA, 33 bp, Homo sapien
attgtggagttgttacaagaaaaactaataaca

SEQ ID NO: 281842 - DNA, 33 bp, Homo sapien
attgtggagttgttacgagaaaaactaataaca

SEQ ID NO: 281843 - DNA, 33 bp, Homo sapien
tctaaaaggattaaagcatctctatgtgagtcc

SEQ ID NO: 281844 - DNA, 33 bp, Homo sapien
tctaaaaggattaaaggatctctatgtgagtcc

SEQ ID NO: 281845 - DNA, 33 bp, Homo sapien
ttgttaatcagaacgacgtggataataggaaat

SEQ ID NO: 281846 - DNA, 33 bp, Homo sapien
ttgttaatcagaacgatgtggataataggaaat

SEQ ID NO: 281847 - DNA, 33 bp, Homo sapien
ttctgactttgaggtacgctactaggctgatta

SEQ ID NO: 281848 - DNA, 33 bp, Homo sapien
ttctgactttgaggtatgctactaggctgatta

SEQ ID NO: 281849 - DNA, 33 bp, Homo sapien
tactaagcctttattgcagtcatgttgataggt

SEQ ID NO: 281850 - DNA, 33 bp, Homo sapien
tactaagcctttattggagtcatgttgataggt

SEQ ID NO: 281851 - DNA, 33 bp, Homo sapien
aaaactaggcacttataaagaaatcttagttca

SEQ ID NO: 281852 - DNA, 33 bp, Homo sapien
aaaactaggcacttatgaagaaatcttagttca

SEQ ID NO: 281853 - DNA, 33 bp, Homo sapien
tcagatgaacagttaaatcgaatgggcttctat

SEQ ID NO: 281854 - DNA, 33 bp, Homo sapien
tcagatgaacagttaagtcgaatgggcttctat

SEQ ID NO: 281855 - DNA, 33 bp, Homo sapien
ctcagtgcagtttctacgtctgcttcagatgct

SEQ ID NO: 281856 - DNA, 33 bp, Homo sapien
ctcagtgcagtttctatgtctgcttcagatgct

SEQ ID NO: 281857 - DNA, 33 bp, Homo sapien
atattattcccattacacttatctgatcaactt

SEQ ID NO: 281858 - DNA, 33 bp, Homo sapien
atattattcccattacgcttatctgatcaactt

SEQ ID NO: 281859 - DNA, 33 bp, Homo sapien
tgagctaggtaaatgagagtgtactctggaaac

SEQ ID NO: 281860 - DNA, 33 bp, Homo sapien
tgagctaggtaaatgatagtgtactctggaaac

SEQ ID NO: 281861 - DNA, 33 bp, Homo sapien
gccacttactggcaaccagtgtcattgcaaagg

SEQ ID NO: 281862 - DNA, 33 bp, Homo sapien
gccacttactggcaacgagtgtcattgcaaagg

SEQ ID NO: 281863 - DNA, 33 bp, Homo sapien
attatatttcctcagcaacatactattatacta

SEQ ID NO: 281864 - DNA, 33 bp, Homo sapien
attatatttcctcagcgacatactattatacta

SEQ ID NO: 281865 - DNA, 33 bp, Homo sapien
tgagaaatctgaaaacactgggggagtttcact

SEQ ID NO: 281866 - DNA, 33 bp, Homo sapien
tgagaaatctgaaaacgctgggggagtttcact

SEQ ID NO: 281867 - DNA, 33 bp, Homo sapien
gatgaaggaatttagaaaagaagcctccattct

SEQ ID NO: 281868 - DNA, 33 bp, Homo sapien
gatgaaggaatttagataagaagcctccattct

SEQ ID NO: 281869 - DNA, 33 bp, Homo sapien
aagaacacttaacatacagcatagtgcctagag

SEQ ID NO: 281870 - DNA, 33 bp, Homo sapien
aagaacacttaacatagagcatagtgcctagag

SEQ ID NO: 281871 - DNA, 33 bp, Homo sapien
tatcaaactgtatggaaacaccagcatcactct

SEQ ID NO: 281872 - DNA, 33 bp, Homo sapien
tatcaaactgtatggagacaccagcatcactct

SEQ ID NO: 281873 - DNA, 33 bp, Homo sapien
aattgtactgctgaaacctcaagttggaggaaa

SEQ ID NO: 281874 - DNA, 33 bp, Homo sapien
aattgtactgctgaaatctcaagttggaggaaa

SEQ ID NO: 281875 - DNA, 33 bp, Homo sapien
ctagactatcaccaggacatattaaaggaagaa

SEQ ID NO: 281876 - DNA, 33 bp, Homo sapien
ctagactatcaccaggtcatattaaaggaagaa

SEQ ID NO: 281877 - DNA, 33 bp, Homo sapien
catgcaggatgagaaacggtggggctgtgatca

SEQ ID NO: 281878 - DNA, 33 bp, Homo sapien
catgcaggatgagaaatggtggggctgtgatca

SEQ ID NO: 281879 - DNA, 33 bp, Homo sapien
actttcattagaaacaccagattgtcttcattc

SEQ ID NO: 281880 - DNA, 33 bp, Homo sapien
actttcattagaaacatcagattgtcttcattc

SEQ ID NO: 281881 - DNA, 33 bp, Homo sapien
ctggaaagtgaaaaaaatgtgaaaacacagaga

SEQ ID NO: 281882 - DNA, 33 bp, Homo sapien
ctggaaagtgaaaaaattgtgaaaacacagaga

SEQ ID NO: 281883 - DNA, 33 bp, Homo sapien
atgcatatatctgggcaattaagacaagcaact

SEQ ID NO: 281884 - DNA, 33 bp, Homo sapien
atgcatatatctgggccattaagacaagcaact

SEQ ID NO: 281885 - DNA, 33 bp, Homo sapien
atggagaaagaacaaaatcaccaaaaaggaggg

SEQ ID NO: 281886 - DNA, 33 bp, Homo sapien
atggagaaagaacaaagtcaccaaaaaggaggg

SEQ ID NO: 281887 - DNA, 33 bp, Homo sapien
tgtcgaaagaacttcaagagaggtactcagtgc

SEQ ID NO: 281888 - DNA, 33 bp, Homo sapien
tgtcgaaagaacttcaggagaggtactcagtgc

SEQ ID NO: 281889 - DNA, 33 bp, Homo sapien
ggtgtgaatgtgtcaacaagtccaggctcaaga

SEQ ID NO: 281890 - DNA, 33 bp, Homo sapien
ggtgtgaatgtgtcaataagtccaggctcaaga

SEQ ID NO: 281891 - DNA, 33 bp, Homo sapien
tatcctaagtgaagcacgagtgtttgagagaaa

SEQ ID NO: 281892 - DNA, 33 bp, Homo sapien
tatcctaagtgaagcatgagtgtttgagagaaa

SEQ ID NO: 281893 - DNA, 33 bp, Homo sapien
gtttatacgtctcccactatacggtatttgtta

SEQ ID NO: 281894 - DNA, 33 bp, Homo sapien
gtttatacgtctcccagtatacggtatttgtta

SEQ ID NO: 281895 - DNA, 33 bp, Homo sapien
ccacttttgtatcaaaaagaacattgtatataa

SEQ ID NO: 281896 - DNA, 33 bp, Homo sapien
ccacttttgtatcaaatagaacattgtatataa

SEQ ID NO: 281897 - DNA, 33 bp, Homo sapien
ggagtaaggtagataaaaggcagcacattagtt

SEQ ID NO: 281898 - DNA, 33 bp, Homo sapien
ggagtaaggtagataagaggcagcacattagtt

SEQ ID NO: 281899 - DNA, 33 bp, Homo sapien
atttgctaaagacataactgataaagaactgtt

SEQ ID NO: 281900 - DNA, 33 bp, Homo sapien
atttgctaaagacatatctgataaagaactgtt

SEQ ID NO: 281901 - DNA, 33 bp, Homo sapien
ttgcaggaaaacctgcgcaatgatctcactgat

SEQ ID NO: 281902 - DNA, 33 bp, Homo sapien
ttgcaggaaaacctgctcaatgatctcactgat

SEQ ID NO: 281903 - DNA, 33 bp, Homo sapien
gaaattgcattaacaccgtcataaatcacacac

SEQ ID NO: 281904 - DNA, 33 bp, Homo sapien
gaaattgcattaacactgtcataaatcacacac

SEQ ID NO: 281905 - DNA, 33 bp, Homo sapien
tggcatgaaactaaaaggagaccaaggattctg

SEQ ID NO: 281906 - DNA, 33 bp, Homo sapien
tggcatgaaactaaaatgagaccaaggattctg

SEQ ID NO: 281907 - DNA, 33 bp, Homo sapien
agaaaggaactttgtgaaaatattagctataca

SEQ ID NO: 281908 - DNA, 33 bp, Homo sapien
agaaaggaactttgtggaaatattagctataca

SEQ ID NO: 281909 - DNA, 33 bp, Homo sapien
aaattctagataataccaagatgataagagtgg

SEQ ID NO: 281910 - DNA, 33 bp, Homo sapien
aaattctagataatacgaagatgataagagtgg

SEQ ID NO: 281911 - DNA, 33 bp, Homo sapien
tcacaagttaaatttcaaaaaatcatggcactg

SEQ ID NO: 281912 - DNA, 33 bp, Homo sapien
tcacaagttaaatttcgaaaaatcatggcactg

SEQ ID NO: 281913 - DNA, 33 bp, Homo sapien
cttagtcttcgggcaaacagccacatctacgta

SEQ ID NO: 281914 - DNA, 33 bp, Homo sapien
cttagtcttcgggcaagcagccacatctacgta

SEQ ID NO: 281915 - DNA, 33 bp, Homo sapien
tcactgaagactcagacgggtgggaagatgaga

SEQ ID NO: 281916 - DNA, 33 bp, Homo sapien
tcactgaagactcagatgggtgggaagatgaga

SEQ ID NO: 281917 - DNA, 33 bp, Homo sapien
tctgtctttctatcagccattcctatctgatgt

SEQ ID NO: 281918 - DNA, 33 bp, Homo sapien
tctgtctttctatcaggcattcctatctgatgt

SEQ ID NO: 281919 - DNA, 33 bp, Homo sapien
ttgaaatgtatgtagagctctttgaagtgaaat

SEQ ID NO: 281920 - DNA, 33 bp, Homo sapien
ttgaaatgtatgtagatctctttgaagtgaaat

SEQ ID NO: 281921 - DNA, 33 bp, Homo sapien
tctaagaaatcatatacagtgagtgtggttgga

SEQ ID NO: 281922 - DNA, 33 bp, Homo sapien
tctaagaaatcatatatagtgagtgtggttgga

SEQ ID NO: 281923 - DNA, 33 bp, Homo sapien
caatgtaaagagtgacaacaagccttacatttc

SEQ ID NO: 281924 - DNA, 33 bp, Homo sapien
caatgtaaagagtgacgacaagccttacatttc

SEQ ID NO: 281925 - DNA, 33 bp, Homo sapien
aagcttgaacaagtgacctgattctctctagaa

SEQ ID NO: 281926 - DNA, 33 bp, Homo sapien
aagcttgaacaagtgatctgattctctctagaa

SEQ ID NO: 281927 - DNA, 33 bp, Homo sapien
ttttagtagccatgtgcataacagaagcactct

SEQ ID NO: 281928 - DNA, 33 bp, Homo sapien
ttttagtagccatgtggataacagaagcactct

SEQ ID NO: 281929 - DNA, 33 bp, Homo sapien
tcatagtctcttgcaacttcatttgtttgtctg

SEQ ID NO: 281930 - DNA, 33 bp, Homo sapien
tcatagtctcttgcaatttcatttgtttgtctg

SEQ ID NO: 281931 - DNA, 33 bp, Homo sapien
agtcctacactaaatccagtctcatacccttgc

SEQ ID NO: 281932 - DNA, 33 bp, Homo sapien
agtcctacactaaatctagtctcatacccttgc

SEQ ID NO: 281933 - DNA, 33 bp, Homo sapien
tatcaaccgtgaaatccagggtggccaaagtgg

SEQ ID NO: 281934 - DNA, 33 bp, Homo sapien
tatcaaccgtgaaatctagggtggccaaagtgg

SEQ ID NO: 281935 - DNA, 33 bp, Homo sapien
ttacctccgaagaagtaaatacacacatggtgt

SEQ ID NO: 281936 - DNA, 33 bp, Homo sapien
ttacctccgaagaagtgaatacacacatggtgt

SEQ ID NO: 281937 - DNA, 33 bp, Homo sapien
ttcacaaagagaatctcacttaatcctcaccat

SEQ ID NO: 281938 - DNA, 33 bp, Homo sapien
ttcacaaagagaatcttacttaatcctcaccat

SEQ ID NO: 281939 - DNA, 33 bp, Homo sapien
ttcaggtgttttatgactaaagattctgacttt

SEQ ID NO: 281940 - DNA, 33 bp, Homo sapien
ttcaggtgttttatgagtaaagattctgacttt

SEQ ID NO: 281941 - DNA, 33 bp, Homo sapien
attattacttgttaaactgcttagctttcctac

SEQ ID NO: 281942 - DNA, 33 bp, Homo sapien
attattacttgttaaattgcttagctttcctac

SEQ ID NO: 281943 - DNA, 33 bp, Homo sapien
ttgaatgtttggatcaaaatgcttttggtgaat

SEQ ID NO: 281944 - DNA, 33 bp, Homo sapien
ttgaatgtttggatcacaatgcttttggtgaat

SEQ ID NO: 281945 - DNA, 33 bp, Homo sapien
tttggactcttggaccgatattagtggtttgcc

SEQ ID NO: 281946 - DNA, 33 bp, Homo sapien
tttggactcttggacctatattagtggtttgcc

SEQ ID NO: 281947 - DNA, 33 bp, Homo sapien
ctagcagctgcttagacggtgctcactcagatt

SEQ ID NO: 281948 - DNA, 33 bp, Homo sapien
ctagcagctgcttagatggtgctcactcagatt

SEQ ID NO: 281949 - DNA, 33 bp, Homo sapien
cccaaagagtcaaaaacaagagctgcaattaaa

SEQ ID NO: 281950 - DNA, 33 bp, Homo sapien
cccaaagagtcaaaaagaagagctgcaattaaa

SEQ ID NO: 281951 - DNA, 33 bp, Homo sapien
aagatgttccactgtaaaaccacaccggtattc

SEQ ID NO: 281952 - DNA, 33 bp, Homo sapien
aagatgttccactgtacaaccacaccggtattc

SEQ ID NO: 281953 - DNA, 33 bp, Homo sapien
ttgtcaagtacaaagcactggcctaggagctac

SEQ ID NO: 281954 - DNA, 33 bp, Homo sapien
ttgtcaagtacaaagcgctggcctaggagctac

SEQ ID NO: 281955 - DNA, 33 bp, Homo sapien
gagtattatttgtagaaaactcaaagctgcaaa

SEQ ID NO: 281956 - DNA, 33 bp, Homo sapien
gagtattatttgtagagaactcaaagctgcaaa

SEQ ID NO: 281957 - DNA, 33 bp, Homo sapien
tgcctacaacactcaaccacaggacctctttta

SEQ ID NO: 281958 - DNA, 33 bp, Homo sapien
tgcctacaacactcaatcacaggacctctttta

SEQ ID NO: 281959 - DNA, 33 bp, Homo sapien
ctccagagtatattagaagtagttagagtggaa

SEQ ID NO: 281960 - DNA, 33 bp, Homo sapien
ctccagagtatattaggagtagttagagtggaa

SEQ ID NO: 281961 - DNA, 33 bp, Homo sapien
cacagttagtaaacccagatgcttaacgtctct

SEQ ID NO: 281962 - DNA, 33 bp, Homo sapien
cacagttagtaaacccggatgcttaacgtctct

SEQ ID NO: 281963 - DNA, 33 bp, Homo sapien
tccagttagttccatgcatttctgccagccata

SEQ ID NO: 281964 - DNA, 33 bp, Homo sapien
tccagttagttccatgtatttctgccagccata

SEQ ID NO: 281965 - DNA, 33 bp, Homo sapien
gctgtgttcaaaagaccgtatctgtcagccata

SEQ ID NO: 281966 - DNA, 33 bp, Homo sapien
gctgtgttcaaaagactgtatctgtcagccata

SEQ ID NO: 281967 - DNA, 33 bp, Homo sapien
tgaaatagttttccaaatgaaagcaatgaaaga

SEQ ID NO: 281968 - DNA, 33 bp, Homo sapien
tgaaatagttttccaagtgaaagcaatgaaaga

SEQ ID NO: 281969 - DNA, 33 bp, Homo sapien
aaatccaccaagaacaagactttagactcctca

SEQ ID NO: 281970 - DNA, 33 bp, Homo sapien
aaatccaccaagaacaggactttagactcctca

SEQ ID NO: 281971 - DNA, 33 bp, Homo sapien
ttatttagcctaagaaccttttttcaccagttt

SEQ ID NO: 281972 - DNA, 33 bp, Homo sapien
ttatttagcctaagaatcttttttcaccagttt

SEQ ID NO: 281973 - DNA, 33 bp, Homo sapien
gatcattttttggacacggtagaaatctgtttt

SEQ ID NO: 281974 - DNA, 33 bp, Homo sapien
gatcattttttggacatggtagaaatctgtttt

SEQ ID NO: 281975 - DNA, 33 bp, Homo sapien
tgatgttccctaatcaaatttcatgatgaaaga

SEQ ID NO: 281976 - DNA, 33 bp, Homo sapien
tgatgttccctaatcagatttcatgatgaaaga

SEQ ID NO: 281977 - DNA, 33 bp, Homo sapien
atgtgattctatagacacttacagctaataagt

SEQ ID NO: 281978 - DNA, 33 bp, Homo sapien
atgtgattctatagacccttacagctaataagt

SEQ ID NO: 281979 - DNA, 33 bp, Homo sapien
acagcaaagttaatcaaactggtaaaatccaat

SEQ ID NO: 281980 - DNA, 33 bp, Homo sapien
acagcaaagttaatcacactggtaaaatccaat

SEQ ID NO: 281981 - DNA, 33 bp, Homo sapien
tgagctggtgtgagtaaactggtagctgataga

SEQ ID NO: 281982 - DNA, 33 bp, Homo sapien
tgagctggtgtgagtagactggtagctgataga

SEQ ID NO: 281983 - DNA, 33 bp, Homo sapien
cttcaaataattgaaaagttatcacaaggaaaa

SEQ ID NO: 281984 - DNA, 33 bp, Homo sapien
cttcaaataattgaaaggttatcacaaggaaaa

SEQ ID NO: 281985 - DNA, 33 bp, Homo sapien
atatttgtttgagtaaccagaagaagaatttat

SEQ ID NO: 281986 - DNA, 33 bp, Homo sapien
atatttgtttgagtaatcagaagaagaatttat

SEQ ID NO: 281987 - DNA, 33 bp, Homo sapien
aatatgtctatttcctcacgatattgccaactg

SEQ ID NO: 281988 - DNA, 33 bp, Homo sapien
aatatgtctatttccttacgatattgccaactg

SEQ ID NO: 281989 - DNA, 33 bp, Homo sapien
ggacaacctgcttgcgcagaggagctacccact

SEQ ID NO: 281990 - DNA, 33 bp, Homo sapien
ggacaacctgcttgcggagaggagctacccact

SEQ ID NO: 281991 - DNA, 33 bp, Homo sapien
tttctggcactcaataaagcacctctttgcctt

SEQ ID NO: 281992 - DNA, 33 bp, Homo sapien
tttctggcactcaatagagcacctctttgcctt

SEQ ID NO: 281993 - DNA, 33 bp, Homo sapien
cctggaggtgggacaaaaactctggacccgcta

SEQ ID NO: 281994 - DNA, 33 bp, Homo sapien
cctggaggtgggacaagaactctggacccgcta

SEQ ID NO: 281995 - DNA, 33 bp, Homo sapien
aggaataagcagaaggacaaggaacaaatgaac

SEQ ID NO: 281996 - DNA, 33 bp, Homo sapien
aggaataagcagaagggcaaggaacaaatgaac

SEQ ID NO: 281997 - DNA, 33 bp, Homo sapien
ttttagtttatcacaacgactggtctttcttag

SEQ ID NO: 281998 - DNA, 33 bp, Homo sapien
ttttagtttatcacaatgactggtctttcttag

SEQ ID NO: 281999 - DNA, 33 bp, Homo sapien
ctaatacctctccagacgtataggatagaagtt

SEQ ID NO: 282000 - DNA, 33 bp, Homo sapien
ctaatacctctccagatgtataggatagaagtt

SEQ ID NO: 282001 - DNA, 33 bp, Homo sapien
cttagtccagcctccaaattttgaccatgggac

SEQ ID NO: 282002 - DNA, 33 bp, Homo sapien
cttagtccagcctccacattttgaccatgggac

SEQ ID NO: 282003 - DNA, 33 bp, Homo sapien
agaaatagccttctaaaacagcactaataaaaa

SEQ ID NO: 282004 - DNA, 33 bp, Homo sapien
agaaatagccttctaagacagcactaataaaaa

SEQ ID NO: 282005 - DNA, 33 bp, Homo sapien
acacacacgcaaataccgcacaggtagtagaaa

SEQ ID NO: 282006 - DNA, 33 bp, Homo sapien
acacacacgcaaatactgcacaggtagtagaaa

SEQ ID NO: 282007 - DNA, 33 bp, Homo sapien
agacagtgagatactactaacagtgctcccaag

SEQ ID NO: 282008 - DNA, 33 bp, Homo sapien
agacagtgagatactattaacagtgctcccaag

SEQ ID NO: 282009 - DNA, 33 bp, Homo sapien
aaaaatccaacggactctccagacaactctcaa

SEQ ID NO: 282010 - DNA, 33 bp, Homo sapien
aaaaatccaacggactgtccagacaactctcaa

SEQ ID NO: 282011 - DNA, 33 bp, Homo sapien
tatcaggaataaggacagagtttcaaagaacat

SEQ ID NO: 282012 - DNA, 33 bp, Homo sapien
tatcaggaataaggacggagtttcaaagaacat

SEQ ID NO: 282013 - DNA, 33 bp, Homo sapien
atatgatggttaaagaaaacacctacaagctaa

SEQ ID NO: 282014 - DNA, 33 bp, Homo sapien
atatgatggttaaagagaacacctacaagctaa

SEQ ID NO: 282015 - DNA, 33 bp, Homo sapien
gtcaacttggttgaaggatgcaaagtattgatt

SEQ ID NO: 282016 - DNA, 33 bp, Homo sapien
gtcaacttggttgaagtatgcaaagtattgatt

SEQ ID NO: 282017 - DNA, 33 bp, Homo sapien
agagcagatgacaaagactccttctaactctaa

SEQ ID NO: 282018 - DNA, 33 bp, Homo sapien
agagcagatgacaaaggctccttctaactctaa

SEQ ID NO: 282019 - DNA, 33 bp, Homo sapien
tatatgcaaaacagcactcttccagtttctcaa

SEQ ID NO: 282020 - DNA, 33 bp, Homo sapien
tatatgcaaaacagcagtcttccagtttctcaa

SEQ ID NO: 282021 - DNA, 33 bp, Homo sapien
taataaatgctaataaaatgttgagatcttgaa

SEQ ID NO: 282022 - DNA, 33 bp, Homo sapien
taataaatgctaataacatgttgagatcttgaa

SEQ ID NO: 282023 - DNA, 33 bp, Homo sapien
ttttatatacacatcaacttattttgctttagt

SEQ ID NO: 282024 - DNA, 33 bp, Homo sapien
ttttatatacacatcagcttattttgctttagt

SEQ ID NO: 282025 - DNA, 33 bp, Homo sapien
caagctaatcacttaaacactatgaagctccac

SEQ ID NO: 282026 - DNA, 33 bp, Homo sapien
caagctaatcacttaagcactatgaagctccac

SEQ ID NO: 282027 - DNA, 33 bp, Homo sapien
tctttgctctggtaaacggagtggctgtctcag

SEQ ID NO: 282028 - DNA, 33 bp, Homo sapien
tctttgctctggtaaatggagtggctgtctcag

SEQ ID NO: 282029 - DNA, 33 bp, Homo sapien
caataagcattagcaactaatattttttcacag

SEQ ID NO: 282030 - DNA, 33 bp, Homo sapien
caataagcattagcaagtaatattttttcacag

SEQ ID NO: 282031 - DNA, 33 bp, Homo sapien
gtatacttgaaccttacagatttggggggaaaa

SEQ ID NO: 282032 - DNA, 33 bp, Homo sapien
gtatacttgaaccttatagatttggggggaaaa

SEQ ID NO: 282033 - DNA, 33 bp, Homo sapien
gaactattaacaggcaatcgaaaatatttcaat

SEQ ID NO: 282034 - DNA, 33 bp, Homo sapien
gaactattaacaggcattcgaaaatatttcaat

SEQ ID NO: 282035 - DNA, 33 bp, Homo sapien
gctataatgcgctaaaaaaaagtcattcttttt

SEQ ID NO: 282036 - DNA, 33 bp, Homo sapien
gctataatgcgctaaagaaaagtcattcttttt

SEQ ID NO: 282037 - DNA, 33 bp, Homo sapien
acacttgacattcatgacaaggatagtagtgta

SEQ ID NO: 282038 - DNA, 33 bp, Homo sapien
acacttgacattcatggcaaggatagtagtgta

SEQ ID NO: 282039 - DNA, 33 bp, Homo sapien
ttttactttcaagtcacccgaacattttctaaa

SEQ ID NO: 282040 - DNA, 33 bp, Homo sapien
ttttactttcaagtcatccgaacattttctaaa

SEQ ID NO: 282041 - DNA, 33 bp, Homo sapien
tggccccattacctcaatcttgtgacggatcta

SEQ ID NO: 282042 - DNA, 33 bp, Homo sapien
tggccccattacctcagtcttgtgacggatcta

SEQ ID NO: 282043 - DNA, 33 bp, Homo sapien
aatatctgaatcactacagtctggtttgtttct

SEQ ID NO: 282044 - DNA, 33 bp, Homo sapien
aatatctgaatcactatagtctggtttgtttct

SEQ ID NO: 282045 - DNA, 33 bp, Homo sapien
agactcccatgaaagaatatcagacatacccag

SEQ ID NO: 282046 - DNA, 33 bp, Homo sapien
agactcccatgaaagattatcagacatacccag

SEQ ID NO: 282047 - DNA, 33 bp, Homo sapien
agaggaagccaagagaaaactcatttcagtttc

SEQ ID NO: 282048 - DNA, 33 bp, Homo sapien
agaggaagccaagagacaactcatttcagtttc

SEQ ID NO: 282049 - DNA, 33 bp, Homo sapien
tggaaatgtaacctaccattgaaaacagtatta

SEQ ID NO: 282050 - DNA, 33 bp, Homo sapien
tggaaatgtaacctactattgaaaacagtatta

SEQ ID NO: 282051 - DNA, 33 bp, Homo sapien
gaaatggcgtgagaaaagatttcttagttggat

SEQ ID NO: 282052 - DNA, 33 bp, Homo sapien
gaaatggcgtgagaaaggatttcttagttggat

SEQ ID NO: 282053 - DNA, 33 bp, Homo sapien
atccatcaattaaacacaggtaagaagtaacag

SEQ ID NO: 282054 - DNA, 33 bp, Homo sapien
atccatcaattaaacataggtaagaagtaacag

SEQ ID NO: 282055 - DNA, 33 bp, Homo sapien
aaaaccatgcccagaaataacttattattatta

SEQ ID NO: 282056 - DNA, 33 bp, Homo sapien
aaaaccatgcccagaagtaacttattattatta

SEQ ID NO: 282057 - DNA, 33 bp, Homo sapien
ctcttagaaacagccactcttaaatcttaaagc

SEQ ID NO: 282058 - DNA, 33 bp, Homo sapien
ctcttagaaacagccattcttaaatcttaaagc

SEQ ID NO: 282059 - DNA, 33 bp, Homo sapien
agaaactgtgaaataagagatgttgtcatttca

SEQ ID NO: 282060 - DNA, 33 bp, Homo sapien
agaaactgtgaaataatagatgttgtcatttca

SEQ ID NO: 282061 - DNA, 33 bp, Homo sapien
ggatagatgaatgagccatttgctgagataagg

SEQ ID NO: 282062 - DNA, 33 bp, Homo sapien
ggatagatgaatgagctatttgctgagataagg

SEQ ID NO: 282063 - DNA, 33 bp, Homo sapien
ctcagttatgtttatacctatggttgacacatt

SEQ ID NO: 282064 - DNA, 33 bp, Homo sapien
ctcagttatgtttatatctatggttgacacatt

SEQ ID NO: 282065 - DNA, 33 bp, Homo sapien
atatagagagaaagaaatgttatcagtagatta

SEQ ID NO: 282066 - DNA, 33 bp, Homo sapien
atatagagagaaagaagtgttatcagtagatta

SEQ ID NO: 282067 - DNA, 33 bp, Homo sapien
acctcattcaatcttaactacctctttacagac

SEQ ID NO: 282068 - DNA, 33 bp, Homo sapien
acctcattcaatcttacctacctctttacagac

SEQ ID NO: 282069 - DNA, 33 bp, Homo sapien
tcagaataggcaaacaatgaatgcaatattggc

SEQ ID NO: 282070 - DNA, 33 bp, Homo sapien
tcagaataggcaaacagtgaatgcaatattggc

SEQ ID NO: 282071 - DNA, 33 bp, Homo sapien
tcagggctagcctacgaaacatagtgagaccct

SEQ ID NO: 282072 - DNA, 33 bp, Homo sapien
tcagggctagcctacgcaacatagtgagaccct

SEQ ID NO: 282073 - DNA, 33 bp, Homo sapien
aagttggcccaaggtgaaagacatctatccatt

SEQ ID NO: 282074 - DNA, 33 bp, Homo sapien
aagttggcccaaggtggaagacatctatccatt

SEQ ID NO: 282075 - DNA, 33 bp, Homo sapien
aaatgacaaagtctcaacctttcccagttcaga

SEQ ID NO: 282076 - DNA, 33 bp, Homo sapien
aaatgacaaagtctcatcctttcccagttcaga

SEQ ID NO: 282077 - DNA, 33 bp, Homo sapien
atcccagttgtcaatcagataaatcctaactcc

SEQ ID NO: 282078 - DNA, 33 bp, Homo sapien
atcccagttgtcaatccgataaatcctaactcc

SEQ ID NO: 282079 - DNA, 33 bp, Homo sapien
atgtcaacaccacagagaggttttcctgacagc

SEQ ID NO: 282080 - DNA, 33 bp, Homo sapien
atgtcaacaccacagataggttttcctgacagc

SEQ ID NO: 282081 - DNA, 33 bp, Homo sapien
gggttagcctactcaccaaaaaataaatgtata

SEQ ID NO: 282082 - DNA, 33 bp, Homo sapien
gggttagcctactcactaaaaaataaatgtata

SEQ ID NO: 282083 - DNA, 33 bp, Homo sapien
cactcacaactcattagcacagccttgatccca

SEQ ID NO: 282084 - DNA, 33 bp, Homo sapien
cactcacaactcattatcacagccttgatccca

SEQ ID NO: 282085 - DNA, 33 bp, Homo sapien
ttaaggtaagaggatcaagtgaaacactgtgta

SEQ ID NO: 282086 - DNA, 33 bp, Homo sapien
ttaaggtaagaggatctagtgaaacactgtgta

SEQ ID NO: 282087 - DNA, 33 bp, Homo sapien
ggctgggcctctgttcgccctcaacaaagcaca

SEQ ID NO: 282088 - DNA, 33 bp, Homo sapien
ggctgggcctctgttctccctcaacaaagcaca

SEQ ID NO: 282089 - DNA, 33 bp, Homo sapien
atgcgccaaaagccaacgaaacgagcctacatc

SEQ ID NO: 282090 - DNA, 33 bp, Homo sapien
atgcgccaaaagccaatgaaacgagcctacatc

SEQ ID NO: 282091 - DNA, 33 bp, Homo sapien
ctcttgataattccacactcctaaggcatcagg

SEQ ID NO: 282092 - DNA, 33 bp, Homo sapien
ctcttgataattccacgctcctaaggcatcagg

SEQ ID NO: 282093 - DNA, 33 bp, Homo sapien
ttaatagtgcaatctcaacaagtgcgtatgagt

SEQ ID NO: 282094 - DNA, 33 bp, Homo sapien
ttaatagtgcaatctcgacaagtgcgtatgagt

SEQ ID NO: 282095 - DNA, 33 bp, Homo sapien
cagatgttatagcctactagataaaaatttgct

SEQ ID NO: 282096 - DNA, 33 bp, Homo sapien
cagatgttatagcctagtagataaaaatttgct

SEQ ID NO: 282097 - DNA, 33 bp, Homo sapien
cccctcatttagtagacgcttgctaaatattat

SEQ ID NO: 282098 - DNA, 33 bp, Homo sapien
cccctcatttagtagatgcttgctaaatattat

SEQ ID NO: 282099 - DNA, 33 bp, Homo sapien
gaaggaagtgttcttaaacatctcagacatgat

SEQ ID NO: 282100 - DNA, 33 bp, Homo sapien
gaaggaagtgttcttacacatctcagacatgat

SEQ ID NO: 282101 - DNA, 33 bp, Homo sapien
tctccactggaaaaagaataaatgtcttctaag

SEQ ID NO: 282102 - DNA, 33 bp, Homo sapien
tctccactggaaaaaggataaatgtcttctaag

SEQ ID NO: 282103 - DNA, 33 bp, Homo sapien
gtttatcttgattaggaaaattcagaaaccatt

SEQ ID NO: 282104 - DNA, 33 bp, Homo sapien
gtttatcttgattaggtaaattcagaaaccatt

SEQ ID NO: 282105 - DNA, 33 bp, Homo sapien
aggggataagggtacaacatttcagagaggagg

SEQ ID NO: 282106 - DNA, 33 bp, Homo sapien
aggggataagggtacagcatttcagagaggagg

SEQ ID NO: 282107 - DNA, 33 bp, Homo sapien
gatgatcccagacagaagaactcttgtagctag

SEQ ID NO: 282108 - DNA, 33 bp, Homo sapien
gatgatcccagacagatgaactcttgtagctag

SEQ ID NO: 282109 - DNA, 33 bp, Homo sapien
tttgagagttgtcaaaatatatgttacttaagg

SEQ ID NO: 282110 - DNA, 33 bp, Homo sapien
tttgagagttgtcaaagtatatgttacttaagg

SEQ ID NO: 282111 - DNA, 33 bp, Homo sapien
caaacttactggtttacatcaacataaatttgt

SEQ ID NO: 282112 - DNA, 33 bp, Homo sapien
caaacttactggtttatatcaacataaatttgt

SEQ ID NO: 282113 - DNA, 33 bp, Homo sapien
ttcactccattgcttgaaactccaaaattttac

SEQ ID NO: 282114 - DNA, 33 bp, Homo sapien
ttcactccattgcttgcaactccaaaattttac

SEQ ID NO: 282115 - DNA, 33 bp, Homo sapien
agattgtgagacagcaaaaattgtagcttgcct

SEQ ID NO: 282116 - DNA, 33 bp, Homo sapien
agattgtgagacagcagaaattgtagcttgcct

SEQ ID NO: 282117 - DNA, 33 bp, Homo sapien
aaactggcacataaacactagatcttcaactga

SEQ ID NO: 282118 - DNA, 33 bp, Homo sapien
aaactggcacataaacgctagatcttcaactga

SEQ ID NO: 282119 - DNA, 33 bp, Homo sapien
tttacttctgtctgcacatctactttctttccc

SEQ ID NO: 282120 - DNA, 33 bp, Homo sapien
tttacttctgtctgcatatctactttctttccc

SEQ ID NO: 282121 - DNA, 33 bp, Homo sapien
ctgcagaaaggaccagcctacgaagaccttatt

SEQ ID NO: 282122 - DNA, 33 bp, Homo sapien
ctgcagaaaggaccaggctacgaagaccttatt

SEQ ID NO: 282123 - DNA, 33 bp, Homo sapien
ttggaggtgaaaaatggaagcagaggtctgcaa

SEQ ID NO: 282124 - DNA, 33 bp, Homo sapien
ttggaggtgaaaaatgtaagcagaggtctgcaa

SEQ ID NO: 282125 - DNA, 33 bp, Homo sapien
tacaattcaaggtaaacgtgtaaatggaaattt

SEQ ID NO: 282126 - DNA, 33 bp, Homo sapien
tacaattcaaggtaaatgtgtaaatggaaattt

SEQ ID NO: 282127 - DNA, 33 bp, Homo sapien
agcagtcaataaataactgtctcatctgatgca

SEQ ID NO: 282128 - DNA, 33 bp, Homo sapien
agcagtcaataaataattgtctcatctgatgca

SEQ ID NO: 282129 - DNA, 33 bp, Homo sapien
gaagatatgacttctgacaattaaactcttaaa

SEQ ID NO: 282130 - DNA, 33 bp, Homo sapien
gaagatatgacttctgccaattaaactcttaaa

SEQ ID NO: 282131 - DNA, 33 bp, Homo sapien
catactcaatagttaacagactgcattttgcat

SEQ ID NO: 282132 - DNA, 33 bp, Homo sapien
catactcaatagttaatagactgcattttgcat

SEQ ID NO: 282133 - DNA, 33 bp, Homo sapien
cactgatttcttttaggcaccaattcttgtaag

SEQ ID NO: 282134 - DNA, 33 bp, Homo sapien
cactgatttcttttagtcaccaattcttgtaag

SEQ ID NO: 282135 - DNA, 33 bp, Homo sapien
cagccccctggagaaaccaacttagctacaggt

SEQ ID NO: 282136 - DNA, 33 bp, Homo sapien
cagccccctggagaaatcaacttagctacaggt

SEQ ID NO: 282137 - DNA, 33 bp, Homo sapien
ctttgatgctattgccacataattaattctatt

SEQ ID NO: 282138 - DNA, 33 bp, Homo sapien
ctttgatgctattgcctcataattaattctatt

SEQ ID NO: 282139 - DNA, 33 bp, Homo sapien
aagtagttttagcagaacaaagaagtcaagttc

SEQ ID NO: 282140 - DNA, 33 bp, Homo sapien
aagtagttttagcagagcaaagaagtcaagttc

SEQ ID NO: 282141 - DNA, 33 bp, Homo sapien
taaaaaatgttccaaaagtgctggctcctgaag

SEQ ID NO: 282142 - DNA, 33 bp, Homo sapien
taaaaaatgttccaaacgtgctggctcctgaag

SEQ ID NO: 282143 - DNA, 33 bp, Homo sapien
aaaacagttcctgacacatgggaagcactacat

SEQ ID NO: 282144 - DNA, 33 bp, Homo sapien
aaaacagttcctgacatatgggaagcactacat

SEQ ID NO: 282145 - DNA, 33 bp, Homo sapien
tattccttgtttttcacctgaactatcacattt

SEQ ID NO: 282146 - DNA, 33 bp, Homo sapien
tattccttgtttttcatctgaactatcacattt

SEQ ID NO: 282147 - DNA, 33 bp, Homo sapien
agaggagcttcctaccccagggatgacctgcct

SEQ ID NO: 282148 - DNA, 33 bp, Homo sapien
agaggagcttcctacctcagggatgacctgcct

SEQ ID NO: 282149 - DNA, 33 bp, Homo sapien
gactaaaaaggaagcaaaggacacaattctgaa

SEQ ID NO: 282150 - DNA, 33 bp, Homo sapien
gactaaaaaggaagcagaggacacaattctgaa

SEQ ID NO: 282151 - DNA, 33 bp, Homo sapien
gattggtgagagaggacgtgtttgtcttgtgcc

SEQ ID NO: 282152 - DNA, 33 bp, Homo sapien
gattggtgagagaggatgtgtttgtcttgtgcc

SEQ ID NO: 282153 - DNA, 33 bp, Homo sapien
agatattgaattttcacctgggtcatacctgct

SEQ ID NO: 282154 - DNA, 33 bp, Homo sapien
agatattgaattttcagctgggtcatacctgct

SEQ ID NO: 282155 - DNA, 33 bp, Homo sapien
gactactcccctatcacacagattaaacaacct

SEQ ID NO: 282156 - DNA, 33 bp, Homo sapien
gactactcccctatcatacagattaaacaacct

SEQ ID NO: 282157 - DNA, 33 bp, Homo sapien
tatgtgtcaatccaggaaaaataaatttctatc

SEQ ID NO: 282158 - DNA, 33 bp, Homo sapien
tatgtgtcaatccaggcaaaataaatttctatc

SEQ ID NO: 282159 - DNA, 33 bp, Homo sapien
tacaacagatggtggtaaaagaaggaggttctc

SEQ ID NO: 282160 - DNA, 33 bp, Homo sapien
tacaacagatggtggtgaaagaaggaggttctc

SEQ ID NO: 282161 - DNA, 33 bp, Homo sapien
ggtagaacctacacctcaatcttgactcaagca

SEQ ID NO: 282162 - DNA, 33 bp, Homo sapien
ggtagaacctacacctgaatcttgactcaagca

SEQ ID NO: 282163 - DNA, 33 bp, Homo sapien
caaaagaaacgaggaaaaggaatgttgaatgtt

SEQ ID NO: 282164 - DNA, 33 bp, Homo sapien
caaaagaaacgaggaagaggaatgttgaatgtt

SEQ ID NO: 282165 - DNA, 33 bp, Homo sapien
taatgaatagaactaaataatcatctccttaca

SEQ ID NO: 282166 - DNA, 33 bp, Homo sapien
taatgaatagaactaagtaatcatctccttaca

SEQ ID NO: 282167 - DNA, 33 bp, Homo sapien
taatagacaaaataaaacaaggcaggtgtgtaa

SEQ ID NO: 282168 - DNA, 33 bp, Homo sapien
taatagacaaaataaagcaaggcaggtgtgtaa

SEQ ID NO: 282169 - DNA, 33 bp, Homo sapien
agtgcaagtttattgactacctacaatgtcaca

SEQ ID NO: 282170 - DNA, 33 bp, Homo sapien
agtgcaagtttattgagtacctacaatgtcaca

SEQ ID NO: 282171 - DNA, 33 bp, Homo sapien
tgttgagagcttcctacgtgtcaagtcttgtga

SEQ ID NO: 282172 - DNA, 33 bp, Homo sapien
tgttgagagcttcctatgtgtcaagtcttgtga

SEQ ID NO: 282173 - DNA, 33 bp, Homo sapien
tgtaaattactaacaccgtcaactgagagtaga

SEQ ID NO: 282174 - DNA, 33 bp, Homo sapien
tgtaaattactaacactgtcaactgagagtaga

SEQ ID NO: 282175 - DNA, 33 bp, Homo sapien
aatgtctattgtgaccccattattcatttctgt

SEQ ID NO: 282176 - DNA, 33 bp, Homo sapien
aatgtctattgtgacctcattattcatttctgt

SEQ ID NO: 282177 - DNA, 33 bp, Homo sapien
aactaatcatttaagaaaagcagaaatcatctt

SEQ ID NO: 282178 - DNA, 33 bp, Homo sapien
aactaatcatttaagagaagcagaaatcatctt

SEQ ID NO: 282179 - DNA, 33 bp, Homo sapien
tgagtttaatatgttcaaggtcacccttcaaat

SEQ ID NO: 282180 - DNA, 33 bp, Homo sapien
tgagtttaatatgttcgaggtcacccttcaaat

SEQ ID NO: 282181 - DNA, 33 bp, Homo sapien
gcttacaacaatgtcccagccatggaacttcaa

SEQ ID NO: 282182 - DNA, 33 bp, Homo sapien
gcttacaacaatgtcctagccatggaacttcaa

SEQ ID NO: 282183 - DNA, 33 bp, Homo sapien
ggttccaggcagaagaaggagacttggatgaaa

SEQ ID NO: 282184 - DNA, 33 bp, Homo sapien
ggttccaggcagaagagggagacttggatgaaa

SEQ ID NO: 282185 - DNA, 33 bp, Homo sapien
ttgttaataccacctcactctaattgttcatgc

SEQ ID NO: 282186 - DNA, 33 bp, Homo sapien
ttgttaataccacctcgctctaattgttcatgc

SEQ ID NO: 282187 - DNA, 33 bp, Homo sapien
ggctattcccattataactgctgataggattgt

SEQ ID NO: 282188 - DNA, 33 bp, Homo sapien
ggctattcccattatacctgctgataggattgt

SEQ ID NO: 282189 - DNA, 33 bp, Homo sapien
attagtagggaaaaccaaggtaggtgaatgaat

SEQ ID NO: 282190 - DNA, 33 bp, Homo sapien
attagtagggaaaaccgaggtaggtgaatgaat

SEQ ID NO: 282191 - DNA, 33 bp, Homo sapien
cctttgggtatataaccgataatgggattgctg

SEQ ID NO: 282192 - DNA, 33 bp, Homo sapien
cctttgggtatataactgataatgggattgctg

SEQ ID NO: 282193 - DNA, 33 bp, Homo sapien
aaggaaacgcttacacactggaatgtagattag

SEQ ID NO: 282194 - DNA, 33 bp, Homo sapien
aaggaaacgcttacacgctggaatgtagattag

SEQ ID NO: 282195 - DNA, 33 bp, Homo sapien
tcctccacatcctagccgacacctgttatgttt

SEQ ID NO: 282196 - DNA, 33 bp, Homo sapien
tcctccacatcctagctgacacctgttatgttt

SEQ ID NO: 282197 - DNA, 33 bp, Homo sapien
accctaatgtaaactacggaatttaggtgaaaa

SEQ ID NO: 282198 - DNA, 33 bp, Homo sapien
accctaatgtaaactatggaatttaggtgaaaa

SEQ ID NO: 282199 - DNA, 33 bp, Homo sapien
gtctaaaactgggatgcaatctgctcagcctgt

SEQ ID NO: 282200 - DNA, 33 bp, Homo sapien
gtctaaaactgggatggaatctgctcagcctgt

SEQ ID NO: 282201 - DNA, 33 bp, Homo sapien
gtgctatgaatatacaagcctacctgattcatc

SEQ ID NO: 282202 - DNA, 33 bp, Homo sapien
gtgctatgaatatacacgcctacctgattcatc

SEQ ID NO: 282203 - DNA, 33 bp, Homo sapien
tattcttctttagctcactggtaattttttcta

SEQ ID NO: 282204 - DNA, 33 bp, Homo sapien
tattcttctttagctcgctggtaattttttcta

SEQ ID NO: 282205 - DNA, 33 bp, Homo sapien
gtctagtatcagactgcaacctgcaatacaagt

SEQ ID NO: 282206 - DNA, 33 bp, Homo sapien
gtctagtatcagactgtaacctgcaatacaagt

SEQ ID NO: 282207 - DNA, 33 bp, Homo sapien
ttttgaaatatgtcctaaagtaaatagatgtgc

SEQ ID NO: 282208 - DNA, 33 bp, Homo sapien
ttttgaaatatgtcctgaagtaaatagatgtgc

SEQ ID NO: 282209 - DNA, 33 bp, Homo sapien
gtcctaaatgtgatgacatgtatccttatagga

SEQ ID NO: 282210 - DNA, 33 bp, Homo sapien
gtcctaaatgtgatgatatgtatccttatagga

SEQ ID NO: 282211 - DNA, 33 bp, Homo sapien
tatggtttcagagttacctggcaacttagccac

SEQ ID NO: 282212 - DNA, 33 bp, Homo sapien
tatggtttcagagttatctggcaacttagccac

SEQ ID NO: 282213 - DNA, 33 bp, Homo sapien
acaggtgaatgtcaacaactctgggtcaaaaaa

SEQ ID NO: 282214 - DNA, 33 bp, Homo sapien
acaggtgaatgtcaaccactctgggtcaaaaaa

SEQ ID NO: 282215 - DNA, 33 bp, Homo sapien
gtgcagtcagataggaccacaaggagatgataa

SEQ ID NO: 282216 - DNA, 33 bp, Homo sapien
gtgcagtcagataggatcacaaggagatgataa

SEQ ID NO: 282217 - DNA, 33 bp, Homo sapien
caagaccatcctaagcacgtcatctggaaaagg

SEQ ID NO: 282218 - DNA, 33 bp, Homo sapien
caagaccatcctaagctcgtcatctggaaaagg

SEQ ID NO: 282219 - DNA, 33 bp, Homo sapien
atacttttgtgaatctcaattgtgggagtggag

SEQ ID NO: 282220 - DNA, 33 bp, Homo sapien
atacttttgtgaatctgaattgtgggagtggag

SEQ ID NO: 282221 - DNA, 33 bp, Homo sapien
aagccatttaccattccctgaatcatattacct

SEQ ID NO: 282222 - DNA, 33 bp, Homo sapien
aagccatttaccattctctgaatcatattacct

SEQ ID NO: 282223 - DNA, 33 bp, Homo sapien
ccgaagtcctgctttcaattctaggttcctgcc

SEQ ID NO: 282224 - DNA, 33 bp, Homo sapien
ccgaagtcctgctttccattctaggttcctgcc

SEQ ID NO: 282225 - DNA, 33 bp, Homo sapien
cttatactcttatacacaattctcttctgtgat

SEQ ID NO: 282226 - DNA, 33 bp, Homo sapien
cttatactcttatacataattctcttctgtgat

SEQ ID NO: 282227 - DNA, 33 bp, Homo sapien
agggatatggtagtaaacagatgtgttcttgcc

SEQ ID NO: 282228 - DNA, 33 bp, Homo sapien
agggatatggtagtaatcagatgtgttcttgcc

SEQ ID NO: 282229 - DNA, 33 bp, Homo sapien
aagaaaaaacaacaacacatttgagagactacc

SEQ ID NO: 282230 - DNA, 33 bp, Homo sapien
aagaaaaaacaacaacgcatttgagagactacc

SEQ ID NO: 282231 - DNA, 33 bp, Homo sapien
catttctcatttatggccaacattccattcact

SEQ ID NO: 282232 - DNA, 33 bp, Homo sapien
catttctcatttatggtcaacattccattcact

SEQ ID NO: 282233 - DNA, 33 bp, Homo sapien
gagactataaacatagaaaaaagctccagagat

SEQ ID NO: 282234 - DNA, 33 bp, Homo sapien
gagactataaacatagtaaaaagctccagagat

SEQ ID NO: 282235 - DNA, 33 bp, Homo sapien
gctcagccaaactcaacgtgtgacttccattag

SEQ ID NO: 282236 - DNA, 33 bp, Homo sapien
gctcagccaaactcaatgtgtgacttccattag

SEQ ID NO: 282237 - DNA, 33 bp, Homo sapien
ccaaggatctgtatccacacagtttgacaataa

SEQ ID NO: 282238 - DNA, 33 bp, Homo sapien
ccaaggatctgtatccgcacagtttgacaataa

SEQ ID NO: 282239 - DNA, 33 bp, Homo sapien
ttattgtgggtgcttcaatatttgcgtttttat

SEQ ID NO: 282240 - DNA, 33 bp, Homo sapien
ttattgtgggtgcttcgatatttgcgtttttat

SEQ ID NO: 282241 - DNA, 33 bp, Homo sapien
ctgctctcccagaagaatcgctgatctggaaag

SEQ ID NO: 282242 - DNA, 33 bp, Homo sapien
ctgctctcccagaagactcgctgatctggaaag

SEQ ID NO: 282243 - DNA, 33 bp, Homo sapien
tttgtgataggttttaaattccaggatgcgtgt

SEQ ID NO: 282244 - DNA, 33 bp, Homo sapien
tttgtgataggttttagattccaggatgcgtgt

SEQ ID NO: 282245 - DNA, 33 bp, Homo sapien
agaatgtcgcattcaacgtttgtatctgtacac

SEQ ID NO: 282246 - DNA, 33 bp, Homo sapien
agaatgtcgcattcaatgtttgtatctgtacac

SEQ ID NO: 282247 - DNA, 33 bp, Homo sapien
taacctttgagtcataaaaaattatcttccaaa

SEQ ID NO: 282248 - DNA, 33 bp, Homo sapien
taacctttgagtcatacaaaattatcttccaaa

SEQ ID NO: 282249 - DNA, 33 bp, Homo sapien
ctttattaatcatctacctgacccacttctgcc

SEQ ID NO: 282250 - DNA, 33 bp, Homo sapien
ctttattaatcatctagctgacccacttctgcc

SEQ ID NO: 282251 - DNA, 33 bp, Homo sapien
gtccttgtcgctgcaacgtctctgtcttcagct

SEQ ID NO: 282252 - DNA, 33 bp, Homo sapien
gtccttgtcgctgcaatgtctctgtcttcagct

SEQ ID NO: 282253 - DNA, 33 bp, Homo sapien
ggattatttgaaagagaccttccttgtcagaac

SEQ ID NO: 282254 - DNA, 33 bp, Homo sapien
ggattatttgaaagaggccttccttgtcagaac

SEQ ID NO: 282255 - DNA, 33 bp, Homo sapien
cggacagcacatattacgaattttgttcagaag

SEQ ID NO: 282256 - DNA, 33 bp, Homo sapien
cggacagcacatattatgaattttgttcagaag

SEQ ID NO: 282257 - DNA, 33 bp, Homo sapien
ggcctaaacatgagtaccaaagctgaacgaatc

SEQ ID NO: 282258 - DNA, 33 bp, Homo sapien
ggcctaaacatgagtatcaaagctgaacgaatc

SEQ ID NO: 282259 - DNA, 33 bp, Homo sapien
ataccaattcagagataaaaaattgattttaac

SEQ ID NO: 282260 - DNA, 33 bp, Homo sapien
ataccaattcagagatcaaaaattgattttaac

SEQ ID NO: 282261 - DNA, 33 bp, Homo sapien
attgccaggtaataagcatgactaccctgagac

SEQ ID NO: 282262 - DNA, 33 bp, Homo sapien
attgccaggtaataagtatgactaccctgagac

SEQ ID NO: 282263 - DNA, 33 bp, Homo sapien
cttacttgattacttgaataaattgaagacttg

SEQ ID NO: 282264 - DNA, 33 bp, Homo sapien
cttacttgattacttgcataaattgaagacttg

SEQ ID NO: 282265 - DNA, 33 bp, Homo sapien
gcttgctgaattttagaatatgagacagcctgc

SEQ ID NO: 282266 - DNA, 33 bp, Homo sapien
gcttgctgaattttaggatatgagacagcctgc

SEQ ID NO: 282267 - DNA, 33 bp, Homo sapien
ttgatcaaattagacaactaatgcctcaggcag

SEQ ID NO: 282268 - DNA, 33 bp, Homo sapien
ttgatcaaattagacacctaatgcctcaggcag

SEQ ID NO: 282269 - DNA, 33 bp, Homo sapien
aatatcagtgattgctcagaaaggaatacatac

SEQ ID NO: 282270 - DNA, 33 bp, Homo sapien
aatatcagtgattgcttagaaaggaatacatac

SEQ ID NO: 282271 - DNA, 33 bp, Homo sapien
cttttcttttagaacaaccattgaaataataat

SEQ ID NO: 282272 - DNA, 33 bp, Homo sapien
cttttcttttagaacatccattgaaataataat

SEQ ID NO: 282273 - DNA, 33 bp, Homo sapien
tggagataagcagagcacactctatggtggaga

SEQ ID NO: 282274 - DNA, 33 bp, Homo sapien
tggagataagcagagcgcactctatggtggaga

SEQ ID NO: 282275 - DNA, 33 bp, Homo sapien
ttctgccacatcctacaatatttctttcttatt

SEQ ID NO: 282276 - DNA, 33 bp, Homo sapien
ttctgccacatcctacgatatttctttcttatt

SEQ ID NO: 282277 - DNA, 33 bp, Homo sapien
aaattctctgggcaaaagttacctcttgttcct

SEQ ID NO: 282278 - DNA, 33 bp, Homo sapien
aaattctctgggcaaatgttacctcttgttcct

SEQ ID NO: 282279 - DNA, 33 bp, Homo sapien
catttatttggcattacatacaaatgaagttga

SEQ ID NO: 282280 - DNA, 33 bp, Homo sapien
catttatttggcattatatacaaatgaagttga

SEQ ID NO: 282281 - DNA, 33 bp, Homo sapien
aaataaatgcctggatgacttttcctcccataa

SEQ ID NO: 282282 - DNA, 33 bp, Homo sapien
aaataaatgcctggattacttttcctcccataa

SEQ ID NO: 282283 - DNA, 33 bp, Homo sapien
caaatcagtggttaaaagcattggtgaaggggg

SEQ ID NO: 282284 - DNA, 33 bp, Homo sapien
caaatcagtggttaaaggcattggtgaaggggg

SEQ ID NO: 282285 - DNA, 33 bp, Homo sapien
tctatatagatagttgaatgaacactctgaagt

SEQ ID NO: 282286 - DNA, 33 bp, Homo sapien
tctatatagatagttggatgaacactctgaagt

SEQ ID NO: 282287 - DNA, 33 bp, Homo sapien
cattttactcactgtaaataccaacattcatga

SEQ ID NO: 282288 - DNA, 33 bp, Homo sapien
cattttactcactgtacataccaacattcatga

SEQ ID NO: 282289 - DNA, 33 bp, Homo sapien
ttttttactacctagacaccaatatgtttggaa

SEQ ID NO: 282290 - DNA, 33 bp, Homo sapien
ttttttactacctagagaccaatatgtttggaa

SEQ ID NO: 282291 - DNA, 33 bp, Homo sapien
gggacagtagcttgcgcattgtgaataaaagag

SEQ ID NO: 282292 - DNA, 33 bp, Homo sapien
gggacagtagcttgcgtattgtgaataaaagag

SEQ ID NO: 282293 - DNA, 33 bp, Homo sapien
tccattacagtcaaaactgctgtcaagataagt

SEQ ID NO: 282294 - DNA, 33 bp, Homo sapien
tccattacagtcaaaagtgctgtcaagataagt

SEQ ID NO: 282295 - DNA, 33 bp, Homo sapien
tgtatccttctgtatacgaaagattcttctgtg

SEQ ID NO: 282296 - DNA, 33 bp, Homo sapien
tgtatccttctgtatatgaaagattcttctgtg

SEQ ID NO: 282297 - DNA, 33 bp, Homo sapien
ggacacctagcattcacagtgttgcttttacat

SEQ ID NO: 282298 - DNA, 33 bp, Homo sapien
ggacacctagcattcatagtgttgcttttacat

SEQ ID NO: 282299 - DNA, 33 bp, Homo sapien
agatgggatgctatctcaaaccaaaacattagg

SEQ ID NO: 282300 - DNA, 33 bp, Homo sapien
agatgggatgctatctgaaaccaaaacattagg

SEQ ID NO: 282301 - DNA, 33 bp, Homo sapien
atgtgacactctcagactatcagtagcaaatat

SEQ ID NO: 282302 - DNA, 33 bp, Homo sapien
atgtgacactctcagattatcagtagcaaatat

SEQ ID NO: 282303 - DNA, 33 bp, Homo sapien
cattcctttttcatccaatcgtcacttcacttc

SEQ ID NO: 282304 - DNA, 33 bp, Homo sapien
cattcctttttcatcccatcgtcacttcacttc

SEQ ID NO: 282305 - DNA, 33 bp, Homo sapien
cctccggccagctatccatgaaaggctttatct

SEQ ID NO: 282306 - DNA, 33 bp, Homo sapien
cctccggccagctatctatgaaaggctttatct

SEQ ID NO: 282307 - DNA, 33 bp, Homo sapien
accctagaccacagtacccaagcttaggcagag

SEQ ID NO: 282308 - DNA, 33 bp, Homo sapien
accctagaccacagtatccaagcttaggcagag

SEQ ID NO: 282309 - DNA, 33 bp, Homo sapien
tcaacttgtatggagaaaattatagtggtctgc

SEQ ID NO: 282310 - DNA, 33 bp, Homo sapien
tcaacttgtatggagacaattatagtggtctgc

SEQ ID NO: 282311 - DNA, 33 bp, Homo sapien
tgtagccaccttaatcaatgatcttagctagat

SEQ ID NO: 282312 - DNA, 33 bp, Homo sapien
tgtagccaccttaatcgatgatcttagctagat

SEQ ID NO: 282313 - DNA, 33 bp, Homo sapien
agcatactgcttagtacgctgagaagaaagcgc

SEQ ID NO: 282314 - DNA, 33 bp, Homo sapien
agcatactgcttagtatgctgagaagaaagcgc

SEQ ID NO: 282315 - DNA, 33 bp, Homo sapien
aagagttgaagaggaaaagagccatgcttccca

SEQ ID NO: 282316 - DNA, 33 bp, Homo sapien
aagagttgaagaggaagagagccatgcttccca

SEQ ID NO: 282317 - DNA, 33 bp, Homo sapien
agtatgctagacttaccgcatttgtactttcaa

SEQ ID NO: 282318 - DNA, 33 bp, Homo sapien
agtatgctagacttactgcatttgtactttcaa

SEQ ID NO: 282319 - DNA, 33 bp, Homo sapien
aaatcattttctctaacataacatcaggtagtc

SEQ ID NO: 282320 - DNA, 33 bp, Homo sapien
aaatcattttctctaatataacatcaggtagtc

SEQ ID NO: 282321 - DNA, 33 bp, Homo sapien
ctcttcctagcctccacgtaacattataaatat

SEQ ID NO: 282322 - DNA, 33 bp, Homo sapien
ctcttcctagcctccatgtaacattataaatat

SEQ ID NO: 282323 - DNA, 33 bp, Homo sapien
ctttctactccatcaactgtgagttatatactt

SEQ ID NO: 282324 - DNA, 33 bp, Homo sapien
ctttctactccatcaattgtgagttatatactt

SEQ ID NO: 282325 - DNA, 33 bp, Homo sapien
gatcctcactgtattaccttgttgtaaggggat

SEQ ID NO: 282326 - DNA, 33 bp, Homo sapien
gatcctcactgtattatcttgttgtaaggggat

SEQ ID NO: 282327 - DNA, 33 bp, Homo sapien
ggactttatttctcaacccttgaattacacctt

SEQ ID NO: 282328 - DNA, 33 bp, Homo sapien
ggactttatttctcaagccttgaattacacctt

SEQ ID NO: 282329 - DNA, 33 bp, Homo sapien
acatattaattataaaacgaagccaaatttcaa

SEQ ID NO: 282330 - DNA, 33 bp, Homo sapien
acatattaattataaagcgaagccaaatttcaa

SEQ ID NO: 282331 - DNA, 33 bp, Homo sapien
atcttcctttgtgatccaacaccttttcctaga

SEQ ID NO: 282332 - DNA, 33 bp, Homo sapien
atcttcctttgtgatctaacaccttttcctaga

SEQ ID NO: 282333 - DNA, 33 bp, Homo sapien
ctagtccagttagaaaatactctatagccatgt

SEQ ID NO: 282334 - DNA, 33 bp, Homo sapien
ctagtccagttagaaagtactctatagccatgt

SEQ ID NO: 282335 - DNA, 33 bp, Homo sapien
aatctgtgtatgcgtaagaagtaagaaatgggg

SEQ ID NO: 282336 - DNA, 33 bp, Homo sapien
aatctgtgtatgcgtaggaagtaagaaatgggg

SEQ ID NO: 282337 - DNA, 33 bp, Homo sapien
ttccccagaagcaaacgcagtatagatgtagaa

SEQ ID NO: 282338 - DNA, 33 bp, Homo sapien
ttccccagaagcaaactcagtatagatgtagaa

SEQ ID NO: 282339 - DNA, 33 bp, Homo sapien
ctgtgtcttctgtaaaactggagaaaagtagtg

SEQ ID NO: 282340 - DNA, 33 bp, Homo sapien
ctgtgtcttctgtaaatctggagaaaagtagtg

SEQ ID NO: 282341 - DNA, 33 bp, Homo sapien
ctcccttgctaagtaaacttgagtccaccattt

SEQ ID NO: 282342 - DNA, 33 bp, Homo sapien
ctcccttgctaagtaaccttgagtccaccattt

SEQ ID NO: 282343 - DNA, 33 bp, Homo sapien
ctgaggtagtctgtagaaactggtctacaatga

SEQ ID NO: 282344 - DNA, 33 bp, Homo sapien
ctgaggtagtctgtagcaactggtctacaatga

SEQ ID NO: 282345 - DNA, 33 bp, Homo sapien
tattcagtttgaatgcaccatttcttttcttct

SEQ ID NO: 282346 - DNA, 33 bp, Homo sapien
tattcagtttgaatgcgccatttcttttcttct

SEQ ID NO: 282347 - DNA, 33 bp, Homo sapien
ggcattcactaaaatacccctctccaccttgtt

SEQ ID NO: 282348 - DNA, 33 bp, Homo sapien
ggcattcactaaaatatccctctccaccttgtt

SEQ ID NO: 282349 - DNA, 33 bp, Homo sapien
gcattaaaagacatgacgtgtgtaggagatagt

SEQ ID NO: 282350 - DNA, 33 bp, Homo sapien
gcattaaaagacatgatgtgtgtaggagatagt

SEQ ID NO: 282351 - DNA, 33 bp, Homo sapien
agatttggaattggtacaaaacaaagcaaagtc

SEQ ID NO: 282352 - DNA, 33 bp, Homo sapien
agatttggaattggtagaaaacaaagcaaagtc

SEQ ID NO: 282353 - DNA, 33 bp, Homo sapien
ctttaacaaccttttcaatgtttctgtgttgcc

SEQ ID NO: 282354 - DNA, 33 bp, Homo sapien
ctttaacaaccttttcgatgtttctgtgttgcc

SEQ ID NO: 282355 - DNA, 33 bp, Homo sapien
actttcctaaaaaaaaatgaattagcaagattt

SEQ ID NO: 282356 - DNA, 33 bp, Homo sapien
actttcctaaaaaaaagtgaattagcaagattt

SEQ ID NO: 282357 - DNA, 33 bp, Homo sapien
tgaagttcattatcaaccataatacgagggaaa

SEQ ID NO: 282358 - DNA, 33 bp, Homo sapien
tgaagttcattatcaatcataatacgagggaaa

SEQ ID NO: 282359 - DNA, 33 bp, Homo sapien
ctagttgatctaatgcaaaaggaaagcggtagc

SEQ ID NO: 282360 - DNA, 33 bp, Homo sapien
ctagttgatctaatgcgaaaggaaagcggtagc

SEQ ID NO: 282361 - DNA, 33 bp, Homo sapien
ttctgtaatcctgtgacgtacaacaatacaaaa

SEQ ID NO: 282362 - DNA, 33 bp, Homo sapien
ttctgtaatcctgtgatgtacaacaatacaaaa

SEQ ID NO: 282363 - DNA, 33 bp, Homo sapien
aggaactttgcgaagacacatcgttagggatca

SEQ ID NO: 282364 - DNA, 33 bp, Homo sapien
aggaactttgcgaagatacatcgttagggatca

SEQ ID NO: 282365 - DNA, 33 bp, Homo sapien
atggaatttagatcagaaacttccagctgttta

SEQ ID NO: 282366 - DNA, 33 bp, Homo sapien
atggaatttagatcaggaacttccagctgttta

SEQ ID NO: 282367 - DNA, 33 bp, Homo sapien
gattggatgacataaaatatctacccagcctag

SEQ ID NO: 282368 - DNA, 33 bp, Homo sapien
gattggatgacataaagtatctacccagcctag

SEQ ID NO: 282369 - DNA, 33 bp, Homo sapien
aagggacctgtttagccgatatggttgtttcta

SEQ ID NO: 282370 - DNA, 33 bp, Homo sapien
aagggacctgtttagctgatatggttgtttcta

SEQ ID NO: 282371 - DNA, 33 bp, Homo sapien
gatggagcttctaaacaatttcagatacagggc

SEQ ID NO: 282372 - DNA, 33 bp, Homo sapien
gatggagcttctaaaccatttcagatacagggc

SEQ ID NO: 282373 - DNA, 33 bp, Homo sapien
caaatattaaccagaaatgccactatgatgtct

SEQ ID NO: 282374 - DNA, 33 bp, Homo sapien
caaatattaaccagaactgccactatgatgtct

SEQ ID NO: 282375 - DNA, 33 bp, Homo sapien
tgctctcaaggccaaccgtggtggatggataag

SEQ ID NO: 282376 - DNA, 33 bp, Homo sapien
tgctctcaaggccaactgtggtggatggataag

SEQ ID NO: 282377 - DNA, 33 bp, Homo sapien
tcctgagtatcctttaacaccacaaaaggctta

SEQ ID NO: 282378 - DNA, 33 bp, Homo sapien
tcctgagtatcctttagcaccacaaaaggctta

SEQ ID NO: 282379 - DNA, 33 bp, Homo sapien
aaatatttctcatcaagtggttataggtaatag

SEQ ID NO: 282380 - DNA, 33 bp, Homo sapien
aaatatttctcatcaattggttataggtaatag

SEQ ID NO: 282381 - DNA, 33 bp, Homo sapien
cagttgtcatggggaccagatgagttgtaagaa

SEQ ID NO: 282382 - DNA, 33 bp, Homo sapien
cagttgtcatggggacgagatgagttgtaagaa

SEQ ID NO: 282383 - DNA, 33 bp, Homo sapien
actccatcttccagtacgctttaactccatctt

SEQ ID NO: 282384 - DNA, 33 bp, Homo sapien
actccatcttccagtatgctttaactccatctt

SEQ ID NO: 282385 - DNA, 33 bp, Homo sapien
ttcatttaatggaatcagatgtcacaaaaatac

SEQ ID NO: 282386 - DNA, 33 bp, Homo sapien
ttcatttaatggaatcggatgtcacaaaaatac

SEQ ID NO: 282387 - DNA, 33 bp, Homo sapien
gcacaggagaccatatcaatgcgcaggactaga

SEQ ID NO: 282388 - DNA, 33 bp, Homo sapien
gcacaggagaccatattaatgcgcaggactaga

SEQ ID NO: 282389 - DNA, 33 bp, Homo sapien
cctcaagcctaggggaaaaaaggaattgcatta

SEQ ID NO: 282390 - DNA, 33 bp, Homo sapien
cctcaagcctaggggagaaaaggaattgcatta

SEQ ID NO: 282391 - DNA, 33 bp, Homo sapien
tctttatgaaattcaaagtagtccagttttctt

SEQ ID NO: 282392 - DNA, 33 bp, Homo sapien
tctttatgaaattcaaggtagtccagttttctt

SEQ ID NO: 282393 - DNA, 33 bp, Homo sapien
cactttctgaggaaaactgaacaaccaggaaaa

SEQ ID NO: 282394 - DNA, 33 bp, Homo sapien
cactttctgaggaaaattgaacaaccaggaaaa

SEQ ID NO: 282395 - DNA, 33 bp, Homo sapien
agtaattaatgttgcaaaacaaccattgcccca

SEQ ID NO: 282396 - DNA, 33 bp, Homo sapien
agtaattaatgttgcacaacaaccattgcccca

SEQ ID NO: 282397 - DNA, 33 bp, Homo sapien
ttgactaggcgttttcccacagcctttttgctt

SEQ ID NO: 282398 - DNA, 33 bp, Homo sapien
ttgactaggcgttttctcacagcctttttgctt

SEQ ID NO: 282399 - DNA, 33 bp, Homo sapien
tatacatgaaagataacgcagagaaatcagtaa

SEQ ID NO: 282400 - DNA, 33 bp, Homo sapien
tatacatgaaagataatgcagagaaatcagtaa

SEQ ID NO: 282401 - DNA, 33 bp, Homo sapien
agcacaatctcagagaaaacaggaagaggtgag

SEQ ID NO: 282402 - DNA, 33 bp, Homo sapien
agcacaatctcagagagaacaggaagaggtgag

SEQ ID NO: 282403 - DNA, 33 bp, Homo sapien
ttttgcttcaaaaacaccacttctagttggtga

SEQ ID NO: 282404 - DNA, 33 bp, Homo sapien
ttttgcttcaaaaacatcacttctagttggtga

SEQ ID NO: 282405 - DNA, 33 bp, Homo sapien
agggtaacactgtaaagtccctctcttgactaa

SEQ ID NO: 282406 - DNA, 33 bp, Homo sapien
agggtaacactgtaaattccctctcttgactaa

SEQ ID NO: 282407 - DNA, 33 bp, Homo sapien
aaggtttacttcataccccacaaatatgtacaa

SEQ ID NO: 282408 - DNA, 33 bp, Homo sapien
aaggtttacttcatactccacaaatatgtacaa

SEQ ID NO: 282409 - DNA, 33 bp, Homo sapien
tagtggagatgcagaaagacagtctctgtgtgg

SEQ ID NO: 282410 - DNA, 33 bp, Homo sapien
tagtggagatgcagaacgacagtctctgtgtgg

SEQ ID NO: 282411 - DNA, 33 bp, Homo sapien
agcagaactgtgtcaaaaactcagatcttcctt

SEQ ID NO: 282412 - DNA, 33 bp, Homo sapien
agcagaactgtgtcaagaactcagatcttcctt

SEQ ID NO: 282413 - DNA, 33 bp, Homo sapien
agtaaaccaacttcccaatatgtgttgatttgc

SEQ ID NO: 282414 - DNA, 33 bp, Homo sapien
agtaaaccaacttcccgatatgtgttgatttgc

SEQ ID NO: 282415 - DNA, 33 bp, Homo sapien
gcatctaaaacacttacgtgatgatatagggct

SEQ ID NO: 282416 - DNA, 33 bp, Homo sapien
gcatctaaaacacttatgtgatgatatagggct

SEQ ID NO: 282417 - DNA, 33 bp, Homo sapien
aataaatagcataccacaactgatgataaatgt

SEQ ID NO: 282418 - DNA, 33 bp, Homo sapien
aataaatagcataccataactgatgataaatgt

SEQ ID NO: 282419 - DNA, 33 bp, Homo sapien
aagtacaggggagaaaacttctttgaactaatt

SEQ ID NO: 282420 - DNA, 33 bp, Homo sapien
aagtacaggggagaaaccttctttgaactaatt

SEQ ID NO: 282421 - DNA, 33 bp, Homo sapien
atgaccaagcccacaaagtcaaatacatcactt

SEQ ID NO: 282422 - DNA, 33 bp, Homo sapien
atgaccaagcccacaacgtcaaatacatcactt

SEQ ID NO: 282423 - DNA, 33 bp, Homo sapien
attaactataggacaaaggataactcctagagg

SEQ ID NO: 282424 - DNA, 33 bp, Homo sapien
attaactataggacaacggataactcctagagg

SEQ ID NO: 282425 - DNA, 33 bp, Homo sapien
gcaaggtttttcaccaaccaacaaacatgcgaa

SEQ ID NO: 282426 - DNA, 33 bp, Homo sapien
gcaaggtttttcaccagccaacaaacatgcgaa

SEQ ID NO: 282427 - DNA, 33 bp, Homo sapien
cctagaaatttggcgaaaccaccatcctactac

SEQ ID NO: 282428 - DNA, 33 bp, Homo sapien
cctagaaatttggcgagaccaccatcctactac

SEQ ID NO: 282429 - DNA, 33 bp, Homo sapien
caaacagtggtatttaacttctttgtgtgaaat

SEQ ID NO: 282430 - DNA, 33 bp, Homo sapien
caaacagtggtatttatcttctttgtgtgaaat

SEQ ID NO: 282431 - DNA, 33 bp, Homo sapien
ttatttaaagagtgaactacaagaacatgctat

SEQ ID NO: 282432 - DNA, 33 bp, Homo sapien
ttatttaaagagtgaagtacaagaacatgctat

SEQ ID NO: 282433 - DNA, 33 bp, Homo sapien
tgagagattcagaacaagatgatttacatagtg

SEQ ID NO: 282434 - DNA, 33 bp, Homo sapien
tgagagattcagaacacgatgatttacatagtg

SEQ ID NO: 282435 - DNA, 33 bp, Homo sapien
tatagattgtattgccaagaagctacattttca

SEQ ID NO: 282436 - DNA, 33 bp, Homo sapien
tatagattgtattgccgagaagctacattttca

SEQ ID NO: 282437 - DNA, 33 bp, Homo sapien
ttgcaacataaaagtacggaacagagtcacagt

SEQ ID NO: 282438 - DNA, 33 bp, Homo sapien
ttgcaacataaaagtagggaacagagtcacagt

SEQ ID NO: 282439 - DNA, 33 bp, Homo sapien
ctatgaatggaattggaaagtcagtatacattt

SEQ ID NO: 282440 - DNA, 33 bp, Homo sapien
ctatgaatggaattgggaagtcagtatacattt

SEQ ID NO: 282441 - DNA, 33 bp, Homo sapien
gtcttttatagcatcactctggttatctaattt

SEQ ID NO: 282442 - DNA, 33 bp, Homo sapien
gtcttttatagcatcattctggttatctaattt

SEQ ID NO: 282443 - DNA, 33 bp, Homo sapien
taaacaatgtagttgaggagataaatacgtggt

SEQ ID NO: 282444 - DNA, 33 bp, Homo sapien
taaacaatgtagttgatgagataaatacgtggt

SEQ ID NO: 282445 - DNA, 33 bp, Homo sapien
ttaattaggacatggaagagttttgtaatccta

SEQ ID NO: 282446 - DNA, 33 bp, Homo sapien
ttaattaggacatggatgagttttgtaatccta

SEQ ID NO: 282447 - DNA, 33 bp, Homo sapien
ttctcttccacttttcaaatgtcatctaaagta

SEQ ID NO: 282448 - DNA, 33 bp, Homo sapien
ttctcttccacttttcgaatgtcatctaaagta

SEQ ID NO: 282449 - DNA, 33 bp, Homo sapien
ttttgtaaagcttccaagtcccagactcacaat

SEQ ID NO: 282450 - DNA, 33 bp, Homo sapien
ttttgtaaagcttccaggtcccagactcacaat

SEQ ID NO: 282451 - DNA, 33 bp, Homo sapien
tctactgaaaaggcaacctcatatctaaatata

SEQ ID NO: 282452 - DNA, 33 bp, Homo sapien
tctactgaaaaggcaatctcatatctaaatata

SEQ ID NO: 282453 - DNA, 33 bp, Homo sapien
ggggcaaacacaaatgcaatgaggaggtaaaaa

SEQ ID NO: 282454 - DNA, 33 bp, Homo sapien
ggggcaaacacaaatggaatgaggaggtaaaaa

SEQ ID NO: 282455 - DNA, 33 bp, Homo sapien
tgaacatatgctaggaaattttgtcctaaatct

SEQ ID NO: 282456 - DNA, 33 bp, Homo sapien
tgaacatatgctaggagattttgtcctaaatct

SEQ ID NO: 282457 - DNA, 33 bp, Homo sapien
ttgacctcatcataaacgccttgggttttggaa

SEQ ID NO: 282458 - DNA, 33 bp, Homo sapien
ttgacctcatcataaatgccttgggttttggaa

SEQ ID NO: 282459 - DNA, 33 bp, Homo sapien
ctaggtagatttcatagcagatgtacacaggaa

SEQ ID NO: 282460 - DNA, 33 bp, Homo sapien
ctaggtagatttcatatcagatgtacacaggaa

SEQ ID NO: 282461 - DNA, 33 bp, Homo sapien
attaaaatagagacctaaatcctcactgtcagt

SEQ ID NO: 282462 - DNA, 33 bp, Homo sapien
attaaaatagagacctgaatcctcactgtcagt

SEQ ID NO: 282463 - DNA, 33 bp, Homo sapien
tacttacagcaataacagccttggtttccgatg

SEQ ID NO: 282464 - DNA, 33 bp, Homo sapien
tacttacagcaataacggccttggtttccgatg

SEQ ID NO: 282465 - DNA, 33 bp, Homo sapien
tgagaaatgcacaacagaatctaaagtcttacc

SEQ ID NO: 282466 - DNA, 33 bp, Homo sapien
tgagaaatgcacaacataatctaaagtcttacc

SEQ ID NO: 282467 - DNA, 33 bp, Homo sapien
tcttcctcccacacacaaaatttaacagtttta

SEQ ID NO: 282468 - DNA, 33 bp, Homo sapien
tcttcctcccacacaccaaatttaacagtttta

SEQ ID NO: 282469 - DNA, 33 bp, Homo sapien
gccatctaaggaaagcacatactgtcatgatgt

SEQ ID NO: 282470 - DNA, 33 bp, Homo sapien
gccatctaaggaaagctcatactgtcatgatgt

SEQ ID NO: 282471 - DNA, 33 bp, Homo sapien
gtctggttaagaaaaggcatggtacctgttgtt

SEQ ID NO: 282472 - DNA, 33 bp, Homo sapien
gtctggttaagaaaagtcatggtacctgttgtt

SEQ ID NO: 282473 - DNA, 33 bp, Homo sapien
ctttcatgattccaacaccacggtcatactcat

SEQ ID NO: 282474 - DNA, 33 bp, Homo sapien
ctttcatgattccaactccacggtcatactcat

SEQ ID NO: 282475 - DNA, 33 bp, Homo sapien
cagaacaacaaaatgcacaacaaaatgagcaac

SEQ ID NO: 282476 - DNA, 33 bp, Homo sapien
cagaacaacaaaatgcgcaacaaaatgagcaac

SEQ ID NO: 282477 - DNA, 33 bp, Homo sapien
agattgcaacttgtaaatcatcttcatatcttg

SEQ ID NO: 282478 - DNA, 33 bp, Homo sapien
agattgcaacttgtaagtcatcttcatatcttg

SEQ ID NO: 282479 - DNA, 33 bp, Homo sapien
cctcaatactctatagacactgctttatttaat

SEQ ID NO: 282480 - DNA, 33 bp, Homo sapien
cctcaatactctataggcactgctttatttaat

SEQ ID NO: 282481 - DNA, 33 bp, Homo sapien
acttttgactactgtaactagctatggatgctg

SEQ ID NO: 282482 - DNA, 33 bp, Homo sapien
acttttgactactgtatctagctatggatgctg

SEQ ID NO: 282483 - DNA, 33 bp, Homo sapien
aattcataagcttagacatagaaggggtaccat

SEQ ID NO: 282484 - DNA, 33 bp, Homo sapien
aattcataagcttagatatagaaggggtaccat

SEQ ID NO: 282485 - DNA, 33 bp, Homo sapien
aaaattatctattgacggacggagccttctcaa

SEQ ID NO: 282486 - DNA, 33 bp, Homo sapien
aaaattatctattgactgacggagccttctcaa

SEQ ID NO: 282487 - DNA, 33 bp, Homo sapien
ggctaaaaaatcatgaaaagccatggaaggaat

SEQ ID NO: 282488 - DNA, 33 bp, Homo sapien
ggctaaaaaatcatgacaagccatggaaggaat

SEQ ID NO: 282489 - DNA, 33 bp, Homo sapien
gcaataacatgaaataaaagagaaagtgacatg

SEQ ID NO: 282490 - DNA, 33 bp, Homo sapien
gcaataacatgaaatagaagagaaagtgacatg

SEQ ID NO: 282491 - DNA, 33 bp, Homo sapien
atagacatatctctcaccattaacacccatatc

SEQ ID NO: 282492 - DNA, 33 bp, Homo sapien
atagacatatctctcatcattaacacccatatc

SEQ ID NO: 282493 - DNA, 33 bp, Homo sapien
tatgatatccatgaaacgaggttgaaaaataca

SEQ ID NO: 282494 - DNA, 33 bp, Homo sapien
tatgatatccatgaaaggaggttgaaaaataca

SEQ ID NO: 282495 - DNA, 33 bp, Homo sapien
agcagaacgacggttaccagaggatgggaaagg

SEQ ID NO: 282496 - DNA, 33 bp, Homo sapien
agcagaacgacggttatcagaggatgggaaagg

SEQ ID NO: 282497 - DNA, 33 bp, Homo sapien
ccttgtttataagcacggatatatgatattaat

SEQ ID NO: 282498 - DNA, 33 bp, Homo sapien
ccttgtttataagcactgatatatgatattaat

SEQ ID NO: 282499 - DNA, 33 bp, Homo sapien
gagaccttgaaaagaacacctgagtcagattat

SEQ ID NO: 282500 - DNA, 33 bp, Homo sapien
gagaccttgaaaagaatacctgagtcagattat

SEQ ID NO: 282501 - DNA, 33 bp, Homo sapien
gtcactgggaacagtaccatgaacttcacactt

SEQ ID NO: 282502 - DNA, 33 bp, Homo sapien
gtcactgggaacagtatcatgaacttcacactt

SEQ ID NO: 282503 - DNA, 33 bp, Homo sapien
attctagggctggaaccatttaccctttgaaag

SEQ ID NO: 282504 - DNA, 33 bp, Homo sapien
attctagggctggaactatttaccctttgaaag

SEQ ID NO: 282505 - DNA, 33 bp, Homo sapien
tacacttctgatcaccacagttataatttctgc

SEQ ID NO: 282506 - DNA, 33 bp, Homo sapien
tacacttctgatcaccgcagttataatttctgc

SEQ ID NO: 282507 - DNA, 33 bp, Homo sapien
acacaaattcaaaccgcaacagataatttgcac

SEQ ID NO: 282508 - DNA, 33 bp, Homo sapien
acacaaattcaaaccgtaacagataatttgcac

SEQ ID NO: 282509 - DNA, 33 bp, Homo sapien
agacatctgtcttttcccagatagcaagaactt

SEQ ID NO: 282510 - DNA, 33 bp, Homo sapien
agacatctgtcttttcgcagatagcaagaactt

SEQ ID NO: 282511 - DNA, 33 bp, Homo sapien
gaaatggcctcaaaggaatttaggggatctaag

SEQ ID NO: 282512 - DNA, 33 bp, Homo sapien
gaaatggcctcaaaggcatttaggggatctaag

SEQ ID NO: 282513 - DNA, 33 bp, Homo sapien
ttgactgcttctaaccacctatacacagatgca

SEQ ID NO: 282514 - DNA, 33 bp, Homo sapien
ttgactgcttctaaccgcctatacacagatgca

SEQ ID NO: 282515 - DNA, 33 bp, Homo sapien
tttggcaagtggctcgacatgaaagagataatg

SEQ ID NO: 282516 - DNA, 33 bp, Homo sapien
tttggcaagtggctcggcatgaaagagataatg

SEQ ID NO: 282517 - DNA, 33 bp, Homo sapien
gaagtcttctgtagtacctgcttgcttttgtct

SEQ ID NO: 282518 - DNA, 33 bp, Homo sapien
gaagtcttctgtagtatctgcttgcttttgtct

SEQ ID NO: 282519 - DNA, 33 bp, Homo sapien
gtggatgaacaaataccaagaggaaacttcaag

SEQ ID NO: 282520 - DNA, 33 bp, Homo sapien
gtggatgaacaaatactaagaggaaacttcaag

SEQ ID NO: 282521 - DNA, 33 bp, Homo sapien
cttatgaaaggctggcaagctctaagatgaaag

SEQ ID NO: 282522 - DNA, 33 bp, Homo sapien
cttatgaaaggctggcgagctctaagatgaaag

SEQ ID NO: 282523 - DNA, 33 bp, Homo sapien
ttcattcattaaattacagcattgggcagtata

SEQ ID NO: 282524 - DNA, 33 bp, Homo sapien
ttcattcattaaattatagcattgggcagtata

SEQ ID NO: 282525 - DNA, 33 bp, Homo sapien
ctacaagactcagacaatgcataagattaacaa

SEQ ID NO: 282526 - DNA, 33 bp, Homo sapien
ctacaagactcagacagtgcataagattaacaa

SEQ ID NO: 282527 - DNA, 33 bp, Homo sapien
ggagaagagtcaatacaaggttgagctttttac

SEQ ID NO: 282528 - DNA, 33 bp, Homo sapien
ggagaagagtcaatacgaggttgagctttttac

SEQ ID NO: 282529 - DNA, 33 bp, Homo sapien
gggttagggtagctgaataaaggacttcagagc

SEQ ID NO: 282530 - DNA, 33 bp, Homo sapien
gggttagggtagctgagtaaaggacttcagagc

SEQ ID NO: 282531 - DNA, 33 bp, Homo sapien
taaaaaggtagatgagaatttgtacatttttat

SEQ ID NO: 282532 - DNA, 33 bp, Homo sapien
taaaaaggtagatgagcatttgtacatttttat

SEQ ID NO: 282533 - DNA, 33 bp, Homo sapien
tctggcctatgctaacaccatctctgttggtaa

SEQ ID NO: 282534 - DNA, 33 bp, Homo sapien
tctggcctatgctaacgccatctctgttggtaa

SEQ ID NO: 282535 - DNA, 33 bp, Homo sapien
tgagggaggaagattacagcagagttcaagacc

SEQ ID NO: 282536 - DNA, 33 bp, Homo sapien
tgagggaggaagattagagcagagttcaagacc

SEQ ID NO: 282537 - DNA, 33 bp, Homo sapien
tcctatttgaagactcaacggactctttttcat

SEQ ID NO: 282538 - DNA, 33 bp, Homo sapien
tcctatttgaagactcgacggactctttttcat

SEQ ID NO: 282539 - DNA, 33 bp, Homo sapien
cacaagtaaaatgaaacgcaaaggatcgggtgg

SEQ ID NO: 282540 - DNA, 33 bp, Homo sapien
cacaagtaaaatgaaatgcaaaggatcgggtgg

SEQ ID NO: 282541 - DNA, 33 bp, Homo sapien
caacattcagtaagaccaggacaatacagagga

SEQ ID NO: 282542 - DNA, 33 bp, Homo sapien
caacattcagtaagactaggacaatacagagga

SEQ ID NO: 282543 - DNA, 33 bp, Homo sapien
atgtcaatagataccacaaggtagggtaagaag

SEQ ID NO: 282544 - DNA, 33 bp, Homo sapien
atgtcaatagataccataaggtagggtaagaag

SEQ ID NO: 282545 - DNA, 33 bp, Homo sapien
aaatatgaacaaatatgagagaggatagaaaag

SEQ ID NO: 282546 - DNA, 33 bp, Homo sapien
aaatatgaacaaatattagagaggatagaaaag

SEQ ID NO: 282547 - DNA, 33 bp, Homo sapien
ttcttgaaatatagcaatacctgttaaagcatt

SEQ ID NO: 282548 - DNA, 33 bp, Homo sapien
ttcttgaaatatagcattacctgttaaagcatt

SEQ ID NO: 282549 - DNA, 33 bp, Homo sapien
tgaatgccttttgtaacgaggtagatggtagat

SEQ ID NO: 282550 - DNA, 33 bp, Homo sapien
tgaatgccttttgtaatgaggtagatggtagat

SEQ ID NO: 282551 - DNA, 33 bp, Homo sapien
tggaatggttttgtccacgttgaatgccttttg

SEQ ID NO: 282552 - DNA, 33 bp, Homo sapien
tggaatggttttgtcctcgttgaatgccttttg

SEQ ID NO: 282553 - DNA, 33 bp, Homo sapien
aaagaggtaaagcccaataaacgtggaggttag

SEQ ID NO: 282554 - DNA, 33 bp, Homo sapien
aaagaggtaaagcccagtaaacgtggaggttag

SEQ ID NO: 282555 - DNA, 33 bp, Homo sapien
atatcacagtacattacatccacaacatttctt

SEQ ID NO: 282556 - DNA, 33 bp, Homo sapien
atatcacagtacattatatccacaacatttctt

SEQ ID NO: 282557 - DNA, 33 bp, Homo sapien
atttgaggatgtgatactataagagactccaaa

SEQ ID NO: 282558 - DNA, 33 bp, Homo sapien
atttgaggatgtgatattataagagactccaaa

SEQ ID NO: 282559 - DNA, 33 bp, Homo sapien
ccttgagcaaatttatgaatgtttcctgaactt

SEQ ID NO: 282560 - DNA, 33 bp, Homo sapien
ccttgagcaaatttattaatgtttcctgaactt

SEQ ID NO: 282561 - DNA, 33 bp, Homo sapien
ttcagtcttgccaatacgccagactgtttttat

SEQ ID NO: 282562 - DNA, 33 bp, Homo sapien
ttcagtcttgccaatatgccagactgtttttat

SEQ ID NO: 282563 - DNA, 33 bp, Homo sapien
acagtatattacactgcagaagaccttaatctt

SEQ ID NO: 282564 - DNA, 33 bp, Homo sapien
acagtatattacactgtagaagaccttaatctt

SEQ ID NO: 282565 - DNA, 33 bp, Homo sapien
tatcaagtattctctgaacccgatggagataca

SEQ ID NO: 282566 - DNA, 33 bp, Homo sapien
tatcaagtattctctgtacccgatggagataca

SEQ ID NO: 282567 - DNA, 33 bp, Homo sapien
aaatttgctgaattaacagaccaattttggatg

SEQ ID NO: 282568 - DNA, 33 bp, Homo sapien
aaatttgctgaattaagagaccaattttggatg

SEQ ID NO: 282569 - DNA, 33 bp, Homo sapien
agaacagcatcacataccagttggaatttgtag

SEQ ID NO: 282570 - DNA, 33 bp, Homo sapien
agaacagcatcacatatcagttggaatttgtag

SEQ ID NO: 282571 - DNA, 33 bp, Homo sapien
aaacttcaaaaaataagcaagtttggcatgaat

SEQ ID NO: 282572 - DNA, 33 bp, Homo sapien
aaacttcaaaaaataatcaagtttggcatgaat

SEQ ID NO: 282573 - DNA, 33 bp, Homo sapien
accatttaagagaactaacagttacatacatca

SEQ ID NO: 282574 - DNA, 33 bp, Homo sapien
accatttaagagaactgacagttacatacatca

SEQ ID NO: 282575 - DNA, 33 bp, Homo sapien
aagcagatttaagaggccaagaacaacgattga

SEQ ID NO: 282576 - DNA, 33 bp, Homo sapien
aagcagatttaagaggtcaagaacaacgattga

SEQ ID NO: 282577 - DNA, 33 bp, Homo sapien
aggcggggaataatcaatcgcagagttttaact

SEQ ID NO: 282578 - DNA, 33 bp, Homo sapien
aggcggggaataatcagtcgcagagttttaact

SEQ ID NO: 282579 - DNA, 33 bp, Homo sapien
cccctcctctaagctcaaagcaggaaattggag

SEQ ID NO: 282580 - DNA, 33 bp, Homo sapien
cccctcctctaagctcgaagcaggaaattggag

SEQ ID NO: 282581 - DNA, 33 bp, Homo sapien
atcttagttatttccgaaagctgcaggtgctat

SEQ ID NO: 282582 - DNA, 33 bp, Homo sapien
atcttagttatttccggaagctgcaggtgctat

SEQ ID NO: 282583 - DNA, 33 bp, Homo sapien
aaatattggtttgtgacgctgtcatccaatctt

SEQ ID NO: 282584 - DNA, 33 bp, Homo sapien
aaatattggtttgtgatgctgtcatccaatctt

SEQ ID NO: 282585 - DNA, 33 bp, Homo sapien
tatttgggggttttgtcaagtcctgagttttcc

SEQ ID NO: 282586 - DNA, 33 bp, Homo sapien
tatttgggggttttgtgaagtcctgagttttcc

SEQ ID NO: 282587 - DNA, 33 bp, Homo sapien
atatttacagccttagcacgtcaatcatacctt

SEQ ID NO: 282588 - DNA, 33 bp, Homo sapien
atatttacagccttagtacgtcaatcatacctt

SEQ ID NO: 282589 - DNA, 33 bp, Homo sapien
gttatagaatggaaaacgttccctggcctgaga

SEQ ID NO: 282590 - DNA, 33 bp, Homo sapien
gttatagaatggaaaatgttccctggcctgaga

SEQ ID NO: 282591 - DNA, 33 bp, Homo sapien
tgaagtagtatcaatagaaaactagcagattta

SEQ ID NO: 282592 - DNA, 33 bp, Homo sapien
tgaagtagtatcaatataaaactagcagattta

SEQ ID NO: 282593 - DNA, 33 bp, Homo sapien
ttatgaggtgaacaggaagtaaacaaagtcatt

SEQ ID NO: 282594 - DNA, 33 bp, Homo sapien
ttatgaggtgaacaggtagtaaacaaagtcatt

SEQ ID NO: 282595 - DNA, 33 bp, Homo sapien
gaataaataatcttgcaatttacaatgacattt

SEQ ID NO: 282596 - DNA, 33 bp, Homo sapien
gaataaataatcttgccatttacaatgacattt

SEQ ID NO: 282597 - DNA, 33 bp, Homo sapien
tttcttatataagatgaacctattactgtgtca

SEQ ID NO: 282598 - DNA, 33 bp, Homo sapien
tttcttatataagatgcacctattactgtgtca

SEQ ID NO: 282599 - DNA, 33 bp, Homo sapien
agtaattccagataagaaagtgcctcagttatt

SEQ ID NO: 282600 - DNA, 33 bp, Homo sapien
agtaattccagataagcaagtgcctcagttatt

SEQ ID NO: 282601 - DNA, 33 bp, Homo sapien
tcaaattttatctccacctgactttcacatttt

SEQ ID NO: 282602 - DNA, 33 bp, Homo sapien
tcaaattttatctccatctgactttcacatttt

SEQ ID NO: 282603 - DNA, 33 bp, Homo sapien
tctctccagcaaagcccacaaagttaaaatcat

SEQ ID NO: 282604 - DNA, 33 bp, Homo sapien
tctctccagcaaagcctacaaagttaaaatcat

SEQ ID NO: 282605 - DNA, 33 bp, Homo sapien
gagtggcttcagttggaaaactacaagaaagag

SEQ ID NO: 282606 - DNA, 33 bp, Homo sapien
gagtggcttcagttggcaaactacaagaaagag

SEQ ID NO: 282607 - DNA, 33 bp, Homo sapien
tatggcaatcttggctaaccttaaaattgaaat

SEQ ID NO: 282608 - DNA, 33 bp, Homo sapien
tatggcaatcttggcttaccttaaaattgaaat

SEQ ID NO: 282609 - DNA, 33 bp, Homo sapien
agatccaaaacacaaaagtcactagtcattcaa

SEQ ID NO: 282610 - DNA, 33 bp, Homo sapien
agatccaaaacacaaacgtcactagtcattcaa

SEQ ID NO: 282611 - DNA, 33 bp, Homo sapien
tttaacaagtaacctccgacattcatcaaattt

SEQ ID NO: 282612 - DNA, 33 bp, Homo sapien
tttaacaagtaacctctgacattcatcaaattt

SEQ ID NO: 282613 - DNA, 33 bp, Homo sapien
caaagtgagcttctaactatgccttttttttaa

SEQ ID NO: 282614 - DNA, 33 bp, Homo sapien
caaagtgagcttctaagtatgccttttttttaa

SEQ ID NO: 282615 - DNA, 33 bp, Homo sapien
gataatctagagcaaggaggtagtaaaatcatg

SEQ ID NO: 282616 - DNA, 33 bp, Homo sapien
gataatctagagcaagtaggtagtaaaatcatg

SEQ ID NO: 282617 - DNA, 33 bp, Homo sapien
tgatctgatacaaagtaactttctctgctattc

SEQ ID NO: 282618 - DNA, 33 bp, Homo sapien
tgatctgatacaaagtgactttctctgctattc

SEQ ID NO: 282619 - DNA, 33 bp, Homo sapien
aattgttatggcagccaaatttatgtctacaca

SEQ ID NO: 282620 - DNA, 33 bp, Homo sapien
aattgttatggcagccgaatttatgtctacaca

SEQ ID NO: 282621 - DNA, 33 bp, Homo sapien
aaatcttaaggttccagaacaaccttccttgac

SEQ ID NO: 282622 - DNA, 33 bp, Homo sapien
aaatcttaaggttccataacaaccttccttgac

SEQ ID NO: 282623 - DNA, 33 bp, Homo sapien
actggaacgccagagtaaagtctcaaggtggta

SEQ ID NO: 282624 - DNA, 33 bp, Homo sapien
actggaacgccagagtgaagtctcaaggtggta

SEQ ID NO: 282625 - DNA, 33 bp, Homo sapien
cctggtaatttgatcaatcattaagctatcctt

SEQ ID NO: 282626 - DNA, 33 bp, Homo sapien
cctggtaatttgatcagtcattaagctatcctt

SEQ ID NO: 282627 - DNA, 33 bp, Homo sapien
cacacagctgataaaaagagagaaaactcttgc

SEQ ID NO: 282628 - DNA, 33 bp, Homo sapien
cacacagctgataaaacgagagaaaactcttgc

SEQ ID NO: 282629 - DNA, 33 bp, Homo sapien
tcctgaccataacggaacccactgcctgcagga

SEQ ID NO: 282630 - DNA, 33 bp, Homo sapien
tcctgaccataacggagcccactgcctgcagga

SEQ ID NO: 282631 - DNA, 33 bp, Homo sapien
gtagtagccagagaaactggtcagagccatgag

SEQ ID NO: 282632 - DNA, 33 bp, Homo sapien
gtagtagccagagaaattggtcagagccatgag

SEQ ID NO: 282633 - DNA, 33 bp, Homo sapien
agtacttggtcaggtaactctctgatgtaaaat

SEQ ID NO: 282634 - DNA, 33 bp, Homo sapien
agtacttggtcaggtagctctctgatgtaaaat

SEQ ID NO: 282635 - DNA, 33 bp, Homo sapien
aagaataaatagattaagatggtagaagtggga

SEQ ID NO: 282636 - DNA, 33 bp, Homo sapien
aagaataaatagattaggatggtagaagtggga

SEQ ID NO: 282637 - DNA, 33 bp, Homo sapien
cattgcatttcaattcaaagctactgacttttc

SEQ ID NO: 282638 - DNA, 33 bp, Homo sapien
cattgcatttcaattcgaagctactgacttttc

SEQ ID NO: 282639 - DNA, 33 bp, Homo sapien
atgcatttgttcagacacataggtaaatgcctg

SEQ ID NO: 282640 - DNA, 33 bp, Homo sapien
atgcatttgttcagacgcataggtaaatgcctg

SEQ ID NO: 282641 - DNA, 33 bp, Homo sapien
catctaaaaagaaaaaagcatcagcagttagaa

SEQ ID NO: 282642 - DNA, 33 bp, Homo sapien
catctaaaaagaaaaaggcatcagcagttagaa

SEQ ID NO: 282643 - DNA, 33 bp, Homo sapien
ctatacacacagtgtaagtagtaacatgactga

SEQ ID NO: 282644 - DNA, 33 bp, Homo sapien
ctatacacacagtgtacgtagtaacatgactga

SEQ ID NO: 282645 - DNA, 33 bp, Homo sapien
ttgtggtgaaagaaaactatttgaagctctaca

SEQ ID NO: 282646 - DNA, 33 bp, Homo sapien
ttgtggtgaaagaaaattatttgaagctctaca

SEQ ID NO: 282647 - DNA, 33 bp, Homo sapien
tattctaggatacagacgtagtagtgaacaaaa

SEQ ID NO: 282648 - DNA, 33 bp, Homo sapien
tattctaggatacagatgtagtagtgaacaaaa

SEQ ID NO: 282649 - DNA, 33 bp, Homo sapien
aaatgtggcataaagtaaagatgatatctttct

SEQ ID NO: 282650 - DNA, 33 bp, Homo sapien
aaatgtggcataaagtgaagatgatatctttct

SEQ ID NO: 282651 - DNA, 33 bp, Homo sapien
cttatatatgcaaaggaaacgaaatctctatgg

SEQ ID NO: 282652 - DNA, 33 bp, Homo sapien
cttatatatgcaaaggcaacgaaatctctatgg

SEQ ID NO: 282653 - DNA, 33 bp, Homo sapien
tcccaaaagagagactcactcctagaatatatt

SEQ ID NO: 282654 - DNA, 33 bp, Homo sapien
tcccaaaagagagactgactcctagaatatatt

SEQ ID NO: 282655 - DNA, 33 bp, Homo sapien
acttttgccattggataactggctctgaatctc

SEQ ID NO: 282656 - DNA, 33 bp, Homo sapien
acttttgccattggattactggctctgaatctc

SEQ ID NO: 282657 - DNA, 33 bp, Homo sapien
ttctcattatttcatagacctgattccagtaat

SEQ ID NO: 282658 - DNA, 33 bp, Homo sapien
ttctcattatttcatatacctgattccagtaat

SEQ ID NO: 282659 - DNA, 33 bp, Homo sapien
tgcagctgcccgaaataactacatcttcagtat

SEQ ID NO: 282660 - DNA, 33 bp, Homo sapien
tgcagctgcccgaaatgactacatcttcagtat

SEQ ID NO: 282661 - DNA, 33 bp, Homo sapien
ttatgtgtaaccaaccaattacagaaataaaaa

SEQ ID NO: 282662 - DNA, 33 bp, Homo sapien
ttatgtgtaaccaaccgattacagaaataaaaa

SEQ ID NO: 282663 - DNA, 33 bp, Homo sapien
atatgacaggattccaataaaatttaaaagcaa

SEQ ID NO: 282664 - DNA, 33 bp, Homo sapien
atatgacaggattccagtaaaatttaaaagcaa

SEQ ID NO: 282665 - DNA, 33 bp, Homo sapien
agaatttcaaacagggaattagttatacatgta

SEQ ID NO: 282666 - DNA, 33 bp, Homo sapien
agaatttcaaacagggcattagttatacatgta

SEQ ID NO: 282667 - DNA, 33 bp, Homo sapien
actggaagtaaaaataagtgatgctgagataac

SEQ ID NO: 282668 - DNA, 33 bp, Homo sapien
actggaagtaaaaataggtgatgctgagataac

SEQ ID NO: 282669 - DNA, 33 bp, Homo sapien
cctttcttttctcaaacgccagtgccattgtat

SEQ ID NO: 282670 - DNA, 33 bp, Homo sapien
cctttcttttctcaaatgccagtgccattgtat

SEQ ID NO: 282671 - DNA, 33 bp, Homo sapien
taaattcttagcagtaaatttcaagagccatgt

SEQ ID NO: 282672 - DNA, 33 bp, Homo sapien
taaattcttagcagtacatttcaagagccatgt

SEQ ID NO: 282673 - DNA, 33 bp, Homo sapien
tgatattatgaaacagaatattttgtgtttgtt

SEQ ID NO: 282674 - DNA, 33 bp, Homo sapien
tgatattatgaaacagtatattttgtgtttgtt

SEQ ID NO: 282675 - DNA, 33 bp, Homo sapien
cttccatgagttttaagctttcaatgtctccgt

SEQ ID NO: 282676 - DNA, 33 bp, Homo sapien
cttccatgagttttaatctttcaatgtctccgt

SEQ ID NO: 282677 - DNA, 33 bp, Homo sapien
agaacaagaaactaacacaatcatcctggtgtg

SEQ ID NO: 282678 - DNA, 33 bp, Homo sapien
agaacaagaaactaacgcaatcatcctggtgtg

SEQ ID NO: 282679 - DNA, 33 bp, Homo sapien
acactgcctacccttgaatatgctccttaatgg

SEQ ID NO: 282680 - DNA, 33 bp, Homo sapien
acactgcctacccttgtatatgctccttaatgg

SEQ ID NO: 282681 - DNA, 33 bp, Homo sapien
ggaggaggcaagcacaatccatttttctgatta

SEQ ID NO: 282682 - DNA, 33 bp, Homo sapien
ggaggaggcaagcacagtccatttttctgatta

SEQ ID NO: 282683 - DNA, 33 bp, Homo sapien
ttataaggatgctttaccccctgtactgtgatt

SEQ ID NO: 282684 - DNA, 33 bp, Homo sapien
ttataaggatgctttatcccctgtactgtgatt

SEQ ID NO: 282685 - DNA, 33 bp, Homo sapien
cattataccaagcaaaacagtttgaatgctctg

SEQ ID NO: 282686 - DNA, 33 bp, Homo sapien
cattataccaagcaaagcagtttgaatgctctg

SEQ ID NO: 282687 - DNA, 33 bp, Homo sapien
tacaagttgttttgcaatctccttggccaagaa

SEQ ID NO: 282688 - DNA, 33 bp, Homo sapien
tacaagttgttttgcagtctccttggccaagaa

SEQ ID NO: 282689 - DNA, 33 bp, Homo sapien
aaatggttttggaaaacattaacagaagaaagg

SEQ ID NO: 282690 - DNA, 33 bp, Homo sapien
aaatggttttggaaaatattaacagaagaaagg

SEQ ID NO: 282691 - DNA, 33 bp, Homo sapien
gataggtaagtcaataaaagagcaaatatgaca

SEQ ID NO: 282692 - DNA, 33 bp, Homo sapien
gataggtaagtcaatagaagagcaaatatgaca

SEQ ID NO: 282693 - DNA, 33 bp, Homo sapien
gcctctctggatcacaaaaggatgcggtcattt

SEQ ID NO: 282694 - DNA, 33 bp, Homo sapien
gcctctctggatcacagaaggatgcggtcattt

SEQ ID NO: 282695 - DNA, 33 bp, Homo sapien
aactacactatttgcccatcatccagtctttgg

SEQ ID NO: 282696 - DNA, 33 bp, Homo sapien
aactacactatttgcctatcatccagtctttgg

SEQ ID NO: 282697 - DNA, 33 bp, Homo sapien
tatttatcctaacccccgcatcaattttttagc

SEQ ID NO: 282698 - DNA, 33 bp, Homo sapien
tatttatcctaacccctgcatcaattttttagc

SEQ ID NO: 282699 - DNA, 33 bp, Homo sapien
tcaatcctactgcaaactctgccaaccaatatg

SEQ ID NO: 282700 - DNA, 33 bp, Homo sapien
tcaatcctactgcaaattctgccaaccaatatg

SEQ ID NO: 282701 - DNA, 33 bp, Homo sapien
tactttaagataccaacgctcacctggcatatg

SEQ ID NO: 282702 - DNA, 33 bp, Homo sapien
tactttaagataccaatgctcacctggcatatg

SEQ ID NO: 282703 - DNA, 33 bp, Homo sapien
ttgtaaaattcagttacagtgcttacatccaga

SEQ ID NO: 282704 - DNA, 33 bp, Homo sapien
ttgtaaaattcagttatagtgcttacatccaga

SEQ ID NO: 282705 - DNA, 33 bp, Homo sapien
ttagaaaataaaaatgccacttagctctcaata

SEQ ID NO: 282706 - DNA, 33 bp, Homo sapien
ttagaaaataaaaatgtcacttagctctcaata

SEQ ID NO: 282707 - DNA, 33 bp, Homo sapien
ctggaagaaagcacaacgagaaaatatgcaaat

SEQ ID NO: 282708 - DNA, 33 bp, Homo sapien
ctggaagaaagcacaatgagaaaatatgcaaat

SEQ ID NO: 282709 - DNA, 33 bp, Homo sapien
atgatctaagcctttgcacttaacataaccagt

SEQ ID NO: 282710 - DNA, 33 bp, Homo sapien
atgatctaagcctttgtacttaacataaccagt

SEQ ID NO: 282711 - DNA, 33 bp, Homo sapien
gctcagagcaaccatacaaaacaggtaaacaaa

SEQ ID NO: 282712 - DNA, 33 bp, Homo sapien
gctcagagcaaccatataaaacaggtaaacaaa

SEQ ID NO: 282713 - DNA, 33 bp, Homo sapien
taatctgacgtccaccacaaatctattatcttc

SEQ ID NO: 282714 - DNA, 33 bp, Homo sapien
taatctgacgtccaccgcaaatctattatcttc

SEQ ID NO: 282715 - DNA, 33 bp, Homo sapien
ggcctttggactcagggtttatactagcggcct

SEQ ID NO: 282716 - DNA, 33 bp, Homo sapien
ggcctttggactcaggttttatactagcggcct

SEQ ID NO: 282717 - DNA, 33 bp, Homo sapien
ttgatggagctacttcagaagccatttgttgat

SEQ ID NO: 282718 - DNA, 33 bp, Homo sapien
ttgatggagctacttctgaagccatttgttgat

SEQ ID NO: 282719 - DNA, 33 bp, Homo sapien
gacacattgtttactaaaatttgcatcttattt

SEQ ID NO: 282720 - DNA, 33 bp, Homo sapien
gacacattgtttactagaatttgcatcttattt

SEQ ID NO: 282721 - DNA, 33 bp, Homo sapien
gaatgtcatcccttaccctaacatatttcagct

SEQ ID NO: 282722 - DNA, 33 bp, Homo sapien
gaatgtcatcccttactctaacatatttcagct

SEQ ID NO: 282723 - DNA, 33 bp, Homo sapien
atgagttttgtcagtaaaagtggaaactgtcag

SEQ ID NO: 282724 - DNA, 33 bp, Homo sapien
atgagttttgtcagtagaagtggaaactgtcag

SEQ ID NO: 282725 - DNA, 33 bp, Homo sapien
cacatttagagaaacagtaagttagaaaaaagt

SEQ ID NO: 282726 - DNA, 33 bp, Homo sapien
cacatttagagaaacattaagttagaaaaaagt

SEQ ID NO: 282727 - DNA, 33 bp, Homo sapien
aaagagataatagtgactaggaactaaggaggt

SEQ ID NO: 282728 - DNA, 33 bp, Homo sapien
aaagagataatagtgagtaggaactaaggaggt

SEQ ID NO: 282729 - DNA, 33 bp, Homo sapien
tgcaaacttagagacaagttgatatgctgttgc

SEQ ID NO: 282730 - DNA, 33 bp, Homo sapien
tgcaaacttagagacaggttgatatgctgttgc

SEQ ID NO: 282731 - DNA, 33 bp, Homo sapien
tgtctgctagcagaacaggttggcatttgtgct

SEQ ID NO: 282732 - DNA, 33 bp, Homo sapien
tgtctgctagcagaacgggttggcatttgtgct

SEQ ID NO: 282733 - DNA, 33 bp, Homo sapien
actgactggtttataacgtcctcctggtagtac

SEQ ID NO: 282734 - DNA, 33 bp, Homo sapien
actgactggtttataatgtcctcctggtagtac

SEQ ID NO: 282735 - DNA, 33 bp, Homo sapien
ggacactaaatactgacgcaggatatttcccag

SEQ ID NO: 282736 - DNA, 33 bp, Homo sapien
ggacactaaatactgatgcaggatatttcccag

SEQ ID NO: 282737 - DNA, 33 bp, Homo sapien
cagtactggtatcaaaacaggcatatagaccaa

SEQ ID NO: 282738 - DNA, 33 bp, Homo sapien
cagtactggtatcaaagcaggcatatagaccaa

SEQ ID NO: 282739 - DNA, 33 bp, Homo sapien
tgaaaaatttcatagacgtctcagaagaagcag

SEQ ID NO: 282740 - DNA, 33 bp, Homo sapien
tgaaaaatttcatagatgtctcagaagaagcag

SEQ ID NO: 282741 - DNA, 33 bp, Homo sapien
aaagatacactgcctcaaatgtaagttaaaggc

SEQ ID NO: 282742 - DNA, 33 bp, Homo sapien
aaagatacactgcctcgaatgtaagttaaaggc

SEQ ID NO: 282743 - DNA, 33 bp, Homo sapien
atgatgattaaacttacactctggaatgacaac

SEQ ID NO: 282744 - DNA, 33 bp, Homo sapien
atgatgattaaacttatactctggaatgacaac

SEQ ID NO: 282745 - DNA, 33 bp, Homo sapien
tctatatgctctattaaatcacctaagtgttat

SEQ ID NO: 282746 - DNA, 33 bp, Homo sapien
tctatatgctctattacatcacctaagtgttat

SEQ ID NO: 282747 - DNA, 33 bp, Homo sapien
gctttaaataatcacaaacgttacctctatttg

SEQ ID NO: 282748 - DNA, 33 bp, Homo sapien
gctttaaataatcacagacgttacctctatttg

SEQ ID NO: 282749 - DNA, 33 bp, Homo sapien
ttttttaaagacaaagaatccgaataaatattt

SEQ ID NO: 282750 - DNA, 33 bp, Homo sapien
ttttttaaagacaaagtatccgaataaatattt

SEQ ID NO: 282751 - DNA, 33 bp, Homo sapien
ataccaatttgttgcacggaaatttttgtttaa

SEQ ID NO: 282752 - DNA, 33 bp, Homo sapien
ataccaatttgttgcatggaaatttttgtttaa

SEQ ID NO: 282753 - DNA, 33 bp, Homo sapien
ctgacacggagattgacgtaaatggaatgtatt

SEQ ID NO: 282754 - DNA, 33 bp, Homo sapien
ctgacacggagattgaggtaaatggaatgtatt

SEQ ID NO: 282755 - DNA, 33 bp, Homo sapien
taaattccatgtatcacaaccaccttccttctc

SEQ ID NO: 282756 - DNA, 33 bp, Homo sapien
taaattccatgtatcataaccaccttccttctc

SEQ ID NO: 282757 - DNA, 33 bp, Homo sapien
ctcttcataccatctgaacacattaaatttcat

SEQ ID NO: 282758 - DNA, 33 bp, Homo sapien
ctcttcataccatctggacacattaaatttcat

SEQ ID NO: 282759 - DNA, 33 bp, Homo sapien
caaaacaacttcatacaaccacagagtctccct

SEQ ID NO: 282760 - DNA, 33 bp, Homo sapien
caaaacaacttcatacgaccacagagtctccct

SEQ ID NO: 282761 - DNA, 33 bp, Homo sapien
aagtttatggtggagaatactatctagtcacca

SEQ ID NO: 282762 - DNA, 33 bp, Homo sapien
aagtttatggtggagagtactatctagtcacca

SEQ ID NO: 282763 - DNA, 33 bp, Homo sapien
tctcatagtaatggtacatcacttcccagtgag

SEQ ID NO: 282764 - DNA, 33 bp, Homo sapien
tctcatagtaatggtatatcacttcccagtgag

SEQ ID NO: 282765 - DNA, 33 bp, Homo sapien
ggtagaggacaagtgaaaacccaaaccatcttg

SEQ ID NO: 282766 - DNA, 33 bp, Homo sapien
ggtagaggacaagtgagaacccaaaccatcttg

SEQ ID NO: 282767 - DNA, 33 bp, Homo sapien
agataagggtgcattaaactactccttttccca

SEQ ID NO: 282768 - DNA, 33 bp, Homo sapien
agataagggtgcattacactactccttttccca

SEQ ID NO: 282769 - DNA, 33 bp, Homo sapien
aagggaccattgggaactcaaagtatgattatg

SEQ ID NO: 282770 - DNA, 33 bp, Homo sapien
aagggaccattgggaattcaaagtatgattatg

SEQ ID NO: 282771 - DNA, 33 bp, Homo sapien
acctgcagagtgcagaagactatttaaaactag

SEQ ID NO: 282772 - DNA, 33 bp, Homo sapien
acctgcagagtgcagaggactatttaaaactag

SEQ ID NO: 282773 - DNA, 33 bp, Homo sapien
tttccctgtgtgttgtcaatcctaaaaagaaat

SEQ ID NO: 282774 - DNA, 33 bp, Homo sapien
tttccctgtgtgttgttaatcctaaaaagaaat

SEQ ID NO: 282775 - DNA, 33 bp, Homo sapien
tgcattttaacaactacctgtacaaagaaaagc

SEQ ID NO: 282776 - DNA, 33 bp, Homo sapien
tgcattttaacaactatctgtacaaagaaaagc

SEQ ID NO: 282777 - DNA, 33 bp, Homo sapien
cttatgtcctgtcatcggagatataaaattctt

SEQ ID NO: 282778 - DNA, 33 bp, Homo sapien
cttatgtcctgtcatctgagatataaaattctt

SEQ ID NO: 282779 - DNA, 33 bp, Homo sapien
tacttgcattttttgacggactatttgtcaccc

SEQ ID NO: 282780 - DNA, 33 bp, Homo sapien
tacttgcattttttgatggactatttgtcaccc

SEQ ID NO: 282781 - DNA, 33 bp, Homo sapien
aactgggatgtaaagacagagaaaaacacatat

SEQ ID NO: 282782 - DNA, 33 bp, Homo sapien
aactgggatgtaaagagagagaaaaacacatat

SEQ ID NO: 282783 - DNA, 33 bp, Homo sapien
aatagttttaactatcacagatcaaactaatta

SEQ ID NO: 282784 - DNA, 33 bp, Homo sapien
aatagttttaactatcgcagatcaaactaatta

SEQ ID NO: 282785 - DNA, 33 bp, Homo sapien
ggagaaggaaaagcaacagctagatataacaaa

SEQ ID NO: 282786 - DNA, 33 bp, Homo sapien
ggagaaggaaaagcaagagctagatataacaaa

SEQ ID NO: 282787 - DNA, 33 bp, Homo sapien
ataaaagattatatgcaaaagaagagatgagta

SEQ ID NO: 282788 - DNA, 33 bp, Homo sapien
ataaaagattatatgcgaaagaagagatgagta

SEQ ID NO: 282789 - DNA, 33 bp, Homo sapien
gatcaaacaaagtggagatacgaaagaggaaat

SEQ ID NO: 282790 - DNA, 33 bp, Homo sapien
gatcaaacaaagtggatatacgaaagaggaaat

SEQ ID NO: 282791 - DNA, 33 bp, Homo sapien
tacaggagtcacctcacgcttcatttcccagtc

SEQ ID NO: 282792 - DNA, 33 bp, Homo sapien
tacaggagtcacctcatgcttcatttcccagtc

SEQ ID NO: 282793 - DNA, 33 bp, Homo sapien
agtaaatagaagacacaaaatacagaacatttc

SEQ ID NO: 282794 - DNA, 33 bp, Homo sapien
agtaaatagaagacaccaaatacagaacatttc

SEQ ID NO: 282795 - DNA, 33 bp, Homo sapien
aaagaagagtttttcactagaccatctacagga

SEQ ID NO: 282796 - DNA, 33 bp, Homo sapien
aaagaagagtttttcattagaccatctacagga

SEQ ID NO: 282797 - DNA, 33 bp, Homo sapien
gatcaaattagtgtaaccagcattattcatcat

SEQ ID NO: 282798 - DNA, 33 bp, Homo sapien
gatcaaattagtgtaatcagcattattcatcat

SEQ ID NO: 282799 - DNA, 33 bp, Homo sapien
ggttactagagcctagaacagttgggggagtca

SEQ ID NO: 282800 - DNA, 33 bp, Homo sapien
ggttactagagcctaggacagttgggggagtca

SEQ ID NO: 282801 - DNA, 33 bp, Homo sapien
agttaggatgtggaacagatttaaagtgagggg

SEQ ID NO: 282802 - DNA, 33 bp, Homo sapien
agttaggatgtggaacggatttaaagtgagggg

SEQ ID NO: 282803 - DNA, 33 bp, Homo sapien
tcactatttcaatagacacacaaactccaattc

SEQ ID NO: 282804 - DNA, 33 bp, Homo sapien
tcactatttcaatagatacacaaactccaattc

SEQ ID NO: 282805 - DNA, 33 bp, Homo sapien
caagacatataagcaaaaaagaggctaataaag

SEQ ID NO: 282806 - DNA, 33 bp, Homo sapien
caagacatataagcaagaaagaggctaataaag

SEQ ID NO: 282807 - DNA, 33 bp, Homo sapien
attacctgtcacaacgcatatgtgggaactgct

SEQ ID NO: 282808 - DNA, 33 bp, Homo sapien
attacctgtcacaacgtatatgtgggaactgct

SEQ ID NO: 282809 - DNA, 33 bp, Homo sapien
gtcaaaagtcataataacacatggacagcctaa

SEQ ID NO: 282810 - DNA, 33 bp, Homo sapien
gtcaaaagtcataatatcacatggacagcctaa

SEQ ID NO: 282811 - DNA, 33 bp, Homo sapien
aacttggagggcattacgccaagtgacattaag

SEQ ID NO: 282812 - DNA, 33 bp, Homo sapien
aacttggagggcattatgccaagtgacattaag

SEQ ID NO: 282813 - DNA, 33 bp, Homo sapien
aaagctcaggaactccaaagaaaatgtgtgaat

SEQ ID NO: 282814 - DNA, 33 bp, Homo sapien
aaagctcaggaactccgaagaaaatgtgtgaat

SEQ ID NO: 282815 - DNA, 33 bp, Homo sapien
acagacattgttagtacgacacagagtttaaag

SEQ ID NO: 282816 - DNA, 33 bp, Homo sapien
acagacattgttagtatgacacagagtttaaag

SEQ ID NO: 282817 - DNA, 33 bp, Homo sapien
agctacagattgtagagcacccaagcgaatgac

SEQ ID NO: 282818 - DNA, 33 bp, Homo sapien
agctacagattgtagatcacccaagcgaatgac

SEQ ID NO: 282819 - DNA, 33 bp, Homo sapien
gcgaatgaccaaaatggcaatttatctgcgggg

SEQ ID NO: 282820 - DNA, 33 bp, Homo sapien
gcgaatgaccaaaatgtcaatttatctgcgggg

SEQ ID NO: 282821 - DNA, 33 bp, Homo sapien
aagaaaagcaaattacggcatatttttctgtac

SEQ ID NO: 282822 - DNA, 33 bp, Homo sapien
aagaaaagcaaattactgcatatttttctgtac

SEQ ID NO: 282823 - DNA, 33 bp, Homo sapien
aattgctggtatctcaaacagatattttctcaa

SEQ ID NO: 282824 - DNA, 33 bp, Homo sapien
aattgctggtatctcagacagatattttctcaa

SEQ ID NO: 282825 - DNA, 33 bp, Homo sapien
ctcattagtgactaaagcattgaggtttggagt

SEQ ID NO: 282826 - DNA, 33 bp, Homo sapien
ctcattagtgactaaatcattgaggtttggagt

SEQ ID NO: 282827 - DNA, 33 bp, Homo sapien
tcatgtagtactcatcagaataggtactatgta

SEQ ID NO: 282828 - DNA, 33 bp, Homo sapien
tcatgtagtactcatcggaataggtactatgta

SEQ ID NO: 282829 - DNA, 33 bp, Homo sapien
tttgatttcttttcaactgtggtaagaacacat

SEQ ID NO: 282830 - DNA, 33 bp, Homo sapien
tttgatttcttttcaattgtggtaagaacacat

SEQ ID NO: 282831 - DNA, 33 bp, Homo sapien
taacaatagacgtaaaactactttgcattgtta

SEQ ID NO: 282832 - DNA, 33 bp, Homo sapien
taacaatagacgtaaacctactttgcattgtta

SEQ ID NO: 282833 - DNA, 33 bp, Homo sapien
tagagaaaattagcagaaaaaaggaaagctagg

SEQ ID NO: 282834 - DNA, 33 bp, Homo sapien
tagagaaaattagcaggaaaaaggaaagctagg

SEQ ID NO: 282835 - DNA, 33 bp, Homo sapien
tttgagtaatcaacaccgggccatgtccctgtc

SEQ ID NO: 282836 - DNA, 33 bp, Homo sapien
tttgagtaatcaacactgggccatgtccctgtc

SEQ ID NO: 282837 - DNA, 33 bp, Homo sapien
actatttccatgcacaaagatgtcataatttaa

SEQ ID NO: 282838 - DNA, 33 bp, Homo sapien
actatttccatgcacagagatgtcataatttaa

SEQ ID NO: 282839 - DNA, 33 bp, Homo sapien
aatgtgttatctgacaatgggaaaatcaataca

SEQ ID NO: 282840 - DNA, 33 bp, Homo sapien
aatgtgttatctgacattgggaaaatcaataca

SEQ ID NO: 282841 - DNA, 33 bp, Homo sapien
gataacacatttgaaactagactctaaacacaa

SEQ ID NO: 282842 - DNA, 33 bp, Homo sapien
gataacacatttgaaattagactctaaacacaa

SEQ ID NO: 282843 - DNA, 33 bp, Homo sapien
aggtacaagttaaaccaagatcacctcagtgca

SEQ ID NO: 282844 - DNA, 33 bp, Homo sapien
aggtacaagttaaaccgagatcacctcagtgca

SEQ ID NO: 282845 - DNA, 33 bp, Homo sapien
ggtgtcaggcagcaggaaaaataggtacaagtt

SEQ ID NO: 282846 - DNA, 33 bp, Homo sapien
ggtgtcaggcagcaggcaaaataggtacaagtt

SEQ ID NO: 282847 - DNA, 33 bp, Homo sapien
cacccattatataaaaccgtggctttgatgatg

SEQ ID NO: 282848 - DNA, 33 bp, Homo sapien
cacccattatataaaatcgtggctttgatgatg

SEQ ID NO: 282849 - DNA, 33 bp, Homo sapien
cagagaactcagattacgctgtgtgtatggaac

SEQ ID NO: 282850 - DNA, 33 bp, Homo sapien
cagagaactcagattatgctgtgtgtatggaac

SEQ ID NO: 282851 - DNA, 33 bp, Homo sapien
ataaggatggcacttacgtactcaaagtcaatg

SEQ ID NO: 282852 - DNA, 33 bp, Homo sapien
ataaggatggcacttatgtactcaaagtcaatg

SEQ ID NO: 282853 - DNA, 33 bp, Homo sapien
tcatgagaagaaaccaacttgtgcagtaagttt

SEQ ID NO: 282854 - DNA, 33 bp, Homo sapien
tcatgagaagaaaccagcttgtgcagtaagttt

SEQ ID NO: 282855 - DNA, 33 bp, Homo sapien
gtgcctggcagacaaacagataatcatttaata

SEQ ID NO: 282856 - DNA, 33 bp, Homo sapien
gtgcctggcagacaaagagataatcatttaata

SEQ ID NO: 282857 - DNA, 33 bp, Homo sapien
gtaacaagatgccttcaaagacttagaaagtaa

SEQ ID NO: 282858 - DNA, 33 bp, Homo sapien
gtaacaagatgccttcgaagacttagaaagtaa

SEQ ID NO: 282859 - DNA, 33 bp, Homo sapien
attatagcttgagaaaatagaaaattcgtgtga

SEQ ID NO: 282860 - DNA, 33 bp, Homo sapien
attatagcttgagaaagtagaaaattcgtgtga

SEQ ID NO: 282861 - DNA, 33 bp, Homo sapien
taattcagtagggagacagttgtagccaagtgt

SEQ ID NO: 282862 - DNA, 33 bp, Homo sapien
taattcagtagggagatagttgtagccaagtgt

SEQ ID NO: 282863 - DNA, 33 bp, Homo sapien
aaaaaaattgactcccagcagcgccactctctg

SEQ ID NO: 282864 - DNA, 33 bp, Homo sapien
aaaaaaattgactcccggcagcgccactctctg

SEQ ID NO: 282865 - DNA, 33 bp, Homo sapien
tgtgagccttagttaacgtcatttacagatcac

SEQ ID NO: 282866 - DNA, 33 bp, Homo sapien
tgtgagccttagttaatgtcatttacagatcac

SEQ ID NO: 282867 - DNA, 33 bp, Homo sapien
agtaaaataggtgtaacgagagctatcttacca

SEQ ID NO: 282868 - DNA, 33 bp, Homo sapien
agtaaaataggtgtaatgagagctatcttacca

SEQ ID NO: 282869 - DNA, 33 bp, Homo sapien
tctatcagagcttctacagtaacttgagagctg

SEQ ID NO: 282870 - DNA, 33 bp, Homo sapien
tctatcagagcttctatagtaacttgagagctg

SEQ ID NO: 282871 - DNA, 33 bp, Homo sapien
cccatataataaacacgggaatcttcataaatg

SEQ ID NO: 282872 - DNA, 33 bp, Homo sapien
cccatataataaacactggaatcttcataaatg

SEQ ID NO: 282873 - DNA, 33 bp, Homo sapien
ttcagcttctgcaaaccgacaactaatgactta

SEQ ID NO: 282874 - DNA, 33 bp, Homo sapien
ttcagcttctgcaaactgacaactaatgactta

SEQ ID NO: 282875 - DNA, 33 bp, Homo sapien
taataagcaattgtagaatcattcatatcttga

SEQ ID NO: 282876 - DNA, 33 bp, Homo sapien
taataagcaattgtaggatcattcatatcttga

SEQ ID NO: 282877 - DNA, 33 bp, Homo sapien
ttctaatgtaaatgtacgatatatgcaaccagg

SEQ ID NO: 282878 - DNA, 33 bp, Homo sapien
ttctaatgtaaatgtatgatatatgcaaccagg

SEQ ID NO: 282879 - DNA, 33 bp, Homo sapien
aaatacgcattatgccaataggtaaaatcaaaa

SEQ ID NO: 282880 - DNA, 33 bp, Homo sapien
aaatacgcattatgccgataggtaaaatcaaaa

SEQ ID NO: 282881 - DNA, 33 bp, Homo sapien
tgtgtatctgcaaaacaaattattagactataa

SEQ ID NO: 282882 - DNA, 33 bp, Homo sapien
tgtgtatctgcaaaacgaattattagactataa

SEQ ID NO: 282883 - DNA, 33 bp, Homo sapien
aggggttattttcaaacgcgtgtagtcacattt

SEQ ID NO: 282884 - DNA, 33 bp, Homo sapien
aggggttattttcaaatgcgtgtagtcacattt

SEQ ID NO: 282885 - DNA, 33 bp, Homo sapien
ctggcagatgaatcagaccactttttaaaaatt

SEQ ID NO: 282886 - DNA, 33 bp, Homo sapien
ctggcagatgaatcagtccactttttaaaaatt

SEQ ID NO: 282887 - DNA, 33 bp, Homo sapien
gaagcatcaaataaaccgtagggctgaggatca

SEQ ID NO: 282888 - DNA, 33 bp, Homo sapien
gaagcatcaaataaactgtagggctgaggatca

SEQ ID NO: 282889 - DNA, 33 bp, Homo sapien
gtgacatttttgttacagcaaccagagtagact

SEQ ID NO: 282890 - DNA, 33 bp, Homo sapien
gtgacatttttgttacggcaaccagagtagact

SEQ ID NO: 282891 - DNA, 33 bp, Homo sapien
tttcaaaaatcatcataagtcctcagaactaga

SEQ ID NO: 282892 - DNA, 33 bp, Homo sapien
tttcaaaaatcatcatgagtcctcagaactaga

SEQ ID NO: 282893 - DNA, 33 bp, Homo sapien
gcactacaaatttttaaataggctttggaaggc

SEQ ID NO: 282894 - DNA, 33 bp, Homo sapien
gcactacaaatttttacataggctttggaaggc

SEQ ID NO: 282895 - DNA, 33 bp, Homo sapien
tcttgaaatatacaagcccaagagattgtctct

SEQ ID NO: 282896 - DNA, 33 bp, Homo sapien
tcttgaaatatacaagtccaagagattgtctct

SEQ ID NO: 282897 - DNA, 33 bp, Homo sapien
aaactccaacagacaacacccataataaggaag

SEQ ID NO: 282898 - DNA, 33 bp, Homo sapien
aaactccaacagacaatacccataataaggaag

SEQ ID NO: 282899 - DNA, 33 bp, Homo sapien
tattgaaatcttagaacgacagttttgttatgc

SEQ ID NO: 282900 - DNA, 33 bp, Homo sapien
tattgaaatcttagaatgacagttttgttatgc

SEQ ID NO: 282901 - DNA, 33 bp, Homo sapien
ggactttgaattttgccatagtatcagagaagc

SEQ ID NO: 282902 - DNA, 33 bp, Homo sapien
ggactttgaattttgctatagtatcagagaagc

SEQ ID NO: 282903 - DNA, 33 bp, Homo sapien
gttgataaaagatcttaaagagtcttgtgagca

SEQ ID NO: 282904 - DNA, 33 bp, Homo sapien
gttgataaaagatcttgaagagtcttgtgagca

SEQ ID NO: 282905 - DNA, 33 bp, Homo sapien
attgtgcagtcttgaccattaagccatactgcc

SEQ ID NO: 282906 - DNA, 33 bp, Homo sapien
attgtgcagtcttgactattaagccatactgcc

SEQ ID NO: 282907 - DNA, 33 bp, Homo sapien
aaataactttcaatgccattccaatacatcagt

SEQ ID NO: 282908 - DNA, 33 bp, Homo sapien
aaataactttcaatgctattccaatacatcagt

SEQ ID NO: 282909 - DNA, 33 bp, Homo sapien
cactctcttgcagcagaaaagcagtctatggct

SEQ ID NO: 282910 - DNA, 33 bp, Homo sapien
cactctcttgcagcaggaaagcagtctatggct

SEQ ID NO: 282911 - DNA, 33 bp, Homo sapien
atgcagacagagtcaaaaaaaccataaatattt

SEQ ID NO: 282912 - DNA, 33 bp, Homo sapien
atgcagacagagtcaacaaaaccataaatattt

SEQ ID NO: 282913 - DNA, 33 bp, Homo sapien
gtgtctgatttacgtaaggctcacagattggtt

SEQ ID NO: 282914 - DNA, 33 bp, Homo sapien
gtgtctgatttacgtagggctcacagattggtt

SEQ ID NO: 282915 - DNA, 33 bp, Homo sapien
gctgcagacatagataccggcagttgtgccaat

SEQ ID NO: 282916 - DNA, 33 bp, Homo sapien
gctgcagacatagatatcggcagttgtgccaat

SEQ ID NO: 282917 - DNA, 33 bp, Homo sapien
agagcatgagggtaaccgcttccataattcaat

SEQ ID NO: 282918 - DNA, 33 bp, Homo sapien
agagcatgagggtaactgcttccataattcaat

SEQ ID NO: 282919 - DNA, 33 bp, Homo sapien
acggagattgataagacgctggtagaaataggg

SEQ ID NO: 282920 - DNA, 33 bp, Homo sapien
acggagattgataagatgctggtagaaataggg

SEQ ID NO: 282921 - DNA, 33 bp, Homo sapien
tatacagctcttctgcacaaaatgtgaatgtac

SEQ ID NO: 282922 - DNA, 33 bp, Homo sapien
tatacagctcttctgcgcaaaatgtgaatgtac

SEQ ID NO: 282923 - DNA, 33 bp, Homo sapien
catatgttagccccccccttttttgtgcttatg

SEQ ID NO: 282924 - DNA, 33 bp, Homo sapien
catatgttagcccccctcttttttgtgcttatg

SEQ ID NO: 282925 - DNA, 33 bp, Homo sapien
gttattataaaaattccaggagcttatgcaggt

SEQ ID NO: 282926 - DNA, 33 bp, Homo sapien
gttattataaaaattcgaggagcttatgcaggt

SEQ ID NO: 282927 - DNA, 33 bp, Homo sapien
aagctgctactactgacgtaggaagagcataaa

SEQ ID NO: 282928 - DNA, 33 bp, Homo sapien
aagctgctactactgatgtaggaagagcataaa

SEQ ID NO: 282929 - DNA, 33 bp, Homo sapien
aaaggcaaaactaaacaagtgatcttcagtccc

SEQ ID NO: 282930 - DNA, 33 bp, Homo sapien
aaaggcaaaactaaacgagtgatcttcagtccc

SEQ ID NO: 282931 - DNA, 33 bp, Homo sapien
tccaggccagaaataaagttgggaagtgttagg

SEQ ID NO: 282932 - DNA, 33 bp, Homo sapien
tccaggccagaaataatgttgggaagtgttagg

SEQ ID NO: 282933 - DNA, 33 bp, Homo sapien
agccctgagctgccaaatatgaagttcagcttc

SEQ ID NO: 282934 - DNA, 33 bp, Homo sapien
agccctgagctgccaagtatgaagttcagcttc

SEQ ID NO: 282935 - DNA, 33 bp, Homo sapien
gccaggcaaatgagtgaaatcatcctggacatc

SEQ ID NO: 282936 - DNA, 33 bp, Homo sapien
gccaggcaaatgagtggaatcatcctggacatc

SEQ ID NO: 282937 - DNA, 33 bp, Homo sapien
gatggttaacatctccaatcataactaaaaaga

SEQ ID NO: 282938 - DNA, 33 bp, Homo sapien
gatggttaacatctccgatcataactaaaaaga

SEQ ID NO: 282939 - DNA, 33 bp, Homo sapien
cttcatcataccttggaatgaaaagcagagtaa

SEQ ID NO: 282940 - DNA, 33 bp, Homo sapien
cttcatcataccttgggatgaaaagcagagtaa

SEQ ID NO: 282941 - DNA, 33 bp, Homo sapien
aatagcgatgaatatacctagaccctgattttg

SEQ ID NO: 282942 - DNA, 33 bp, Homo sapien
aatagcgatgaatatatctagaccctgattttg

SEQ ID NO: 282943 - DNA, 33 bp, Homo sapien
atagttatactaacatcaaaacagaataaattc

SEQ ID NO: 282944 - DNA, 33 bp, Homo sapien
atagttatactaacatgaaaacagaataaattc

SEQ ID NO: 282945 - DNA, 33 bp, Homo sapien
tctgacaaaggtctaacgtccagaatttacaag

SEQ ID NO: 282946 - DNA, 33 bp, Homo sapien
tctgacaaaggtctaatgtccagaatttacaag

SEQ ID NO: 282947 - DNA, 33 bp, Homo sapien
gctcagcgttaagaggaaaaacaggtattgttc

SEQ ID NO: 282948 - DNA, 33 bp, Homo sapien
gctcagcgttaagaggcaaaacaggtattgttc

SEQ ID NO: 282949 - DNA, 33 bp, Homo sapien
ttcccaatatctgccacgtattcacttaatttt

SEQ ID NO: 282950 - DNA, 33 bp, Homo sapien
ttcccaatatctgccatgtattcacttaatttt

SEQ ID NO: 282951 - DNA, 33 bp, Homo sapien
aagttactaatggaaggatgttgaagtgaaata

SEQ ID NO: 282952 - DNA, 33 bp, Homo sapien
aagttactaatggaagtatgttgaagtgaaata

SEQ ID NO: 282953 - DNA, 33 bp, Homo sapien
gttgctattcctgtatcagataaaatagatatt

SEQ ID NO: 282954 - DNA, 33 bp, Homo sapien
gttgctattcctgtatgagataaaatagatatt

SEQ ID NO: 282955 - DNA, 33 bp, Homo sapien
tgcctaatagataagaaactgaagtgaatcatg

SEQ ID NO: 282956 - DNA, 33 bp, Homo sapien
tgcctaatagataagagactgaagtgaatcatg

SEQ ID NO: 282957 - DNA, 33 bp, Homo sapien
agggttacttgaccacaagtgttgttatactag

SEQ ID NO: 282958 - DNA, 33 bp, Homo sapien
agggttacttgaccactagtgttgttatactag

SEQ ID NO: 282959 - DNA, 33 bp, Homo sapien
ctcataaatacttacaaaatcacaatcatacag

SEQ ID NO: 282960 - DNA, 33 bp, Homo sapien
ctcataaatacttacagaatcacaatcatacag

SEQ ID NO: 282961 - DNA, 33 bp, Homo sapien
ttcatacaattgaggacagaaagttggtgcatt

SEQ ID NO: 282962 - DNA, 33 bp, Homo sapien
ttcatacaattgaggatagaaagttggtgcatt

SEQ ID NO: 282963 - DNA, 33 bp, Homo sapien
atgagcattggctgcaaaccatcgttaacttct

SEQ ID NO: 282964 - DNA, 33 bp, Homo sapien
atgagcattggctgcataccatcgttaacttct

SEQ ID NO: 282965 - DNA, 33 bp, Homo sapien
cagaaattctttcctaacataccagatagaaca

SEQ ID NO: 282966 - DNA, 33 bp, Homo sapien
cagaaattctttcctagcataccagatagaaca

SEQ ID NO: 282967 - DNA, 33 bp, Homo sapien
atctacttatccccaacttaagcaatgtgaacc

SEQ ID NO: 282968 - DNA, 33 bp, Homo sapien
atctacttatccccaatttaagcaatgtgaacc

SEQ ID NO: 282969 - DNA, 33 bp, Homo sapien
ccagctgattttagcaacattcatatgtaattt

SEQ ID NO: 282970 - DNA, 33 bp, Homo sapien
ccagctgattttagcagcattcatatgtaattt

SEQ ID NO: 282971 - DNA, 33 bp, Homo sapien
tatcttttccacacacagcatgatggcaatgtc

SEQ ID NO: 282972 - DNA, 33 bp, Homo sapien
tatcttttccacacacggcatgatggcaatgtc

SEQ ID NO: 282973 - DNA, 33 bp, Homo sapien
tagaaagatcaaactaactttacatttgttgag

SEQ ID NO: 282974 - DNA, 33 bp, Homo sapien
tagaaagatcaaactagctttacatttgttgag

SEQ ID NO: 282975 - DNA, 33 bp, Homo sapien
gctccatatagaatccaaggcatggcgcaagaa

SEQ ID NO: 282976 - DNA, 33 bp, Homo sapien
gctccatatagaatccgaggcatggcgcaagaa

SEQ ID NO: 282977 - DNA, 33 bp, Homo sapien
aaaaatgtaccaaacaaataaaaagcagaaaaa

SEQ ID NO: 282978 - DNA, 33 bp, Homo sapien
aaaaatgtaccaaacacataaaaagcagaaaaa

SEQ ID NO: 282979 - DNA, 33 bp, Homo sapien
attgaaacgaataaagccagctgaaaggctaac

SEQ ID NO: 282980 - DNA, 33 bp, Homo sapien
attgaaacgaataaagtcagctgaaaggctaac

SEQ ID NO: 282981 - DNA, 33 bp, Homo sapien
gcacacagacatagacaaaatatcgaaataatg

SEQ ID NO: 282982 - DNA, 33 bp, Homo sapien
gcacacagacatagacgaaatatcgaaataatg

SEQ ID NO: 282983 - DNA, 33 bp, Homo sapien
atgcttaatgcaggtgcagatatagccatttga

SEQ ID NO: 282984 - DNA, 33 bp, Homo sapien
atgcttaatgcaggtgtagatatagccatttga

SEQ ID NO: 282985 - DNA, 33 bp, Homo sapien
agactgctttgctttcaactgcacagaaaaagt

SEQ ID NO: 282986 - DNA, 33 bp, Homo sapien
agactgctttgctttcgactgcacagaaaaagt

SEQ ID NO: 282987 - DNA, 33 bp, Homo sapien
tcatagaccaaactaccggagatcagaaaaaaa

SEQ ID NO: 282988 - DNA, 33 bp, Homo sapien
tcatagaccaaactactggagatcagaaaaaaa

SEQ ID NO: 282989 - DNA, 33 bp, Homo sapien
tccaattaaagggcacagagttgatatttatgc

SEQ ID NO: 282990 - DNA, 33 bp, Homo sapien
tccaattaaagggcacggagttgatatttatgc

SEQ ID NO: 282991 - DNA, 33 bp, Homo sapien
cctgtgttgatggaagcaggtaaaatgatgcag

SEQ ID NO: 282992 - DNA, 33 bp, Homo sapien
cctgtgttgatggaagtaggtaaaatgatgcag

SEQ ID NO: 282993 - DNA, 33 bp, Homo sapien
gggcatatattcaaagccatcaaccttttttaa

SEQ ID NO: 282994 - DNA, 33 bp, Homo sapien
gggcatatattcaaagtcatcaaccttttttaa

SEQ ID NO: 282995 - DNA, 33 bp, Homo sapien
aactgactacttcttacgtgtctttcacaaaag

SEQ ID NO: 282996 - DNA, 33 bp, Homo sapien
aactgactacttcttatgtgtctttcacaaaag

SEQ ID NO: 282997 - DNA, 33 bp, Homo sapien
cctaaatgctcatcaacggcagactgaataaaa

SEQ ID NO: 282998 - DNA, 33 bp, Homo sapien
cctaaatgctcatcaatggcagactgaataaaa

SEQ ID NO: 282999 - DNA, 33 bp, Homo sapien
tcctgtgctcccgacaccagcttagccgtcata

SEQ ID NO: 283000 - DNA, 33 bp, Homo sapien
tcctgtgctcccgacatcagcttagccgtcata

SEQ ID NO: 283001 - DNA, 33 bp, Homo sapien
atcatgagagagcaaacgttcaatattctatac

SEQ ID NO: 283002 - DNA, 33 bp, Homo sapien
atcatgagagagcaaatgttcaatattctatac

SEQ ID NO: 283003 - DNA, 33 bp, Homo sapien
ggtagatctttccacaatggtcataaaagaaga

SEQ ID NO: 283004 - DNA, 33 bp, Homo sapien
ggtagatctttccacattggtcataaaagaaga

SEQ ID NO: 283005 - DNA, 33 bp, Homo sapien
gaatccaaattcattacgcttctagaattctga

SEQ ID NO: 283006 - DNA, 33 bp, Homo sapien
gaatccaaattcattatgcttctagaattctga

SEQ ID NO: 283007 - DNA, 33 bp, Homo sapien
agtacaaggagggtgaagactaagaaactgcct

SEQ ID NO: 283008 - DNA, 33 bp, Homo sapien
agtacaaggagggtgaggactaagaaactgcct

SEQ ID NO: 283009 - DNA, 33 bp, Homo sapien
taattttcttacctaactaatcagcataatacc

SEQ ID NO: 283010 - DNA, 33 bp, Homo sapien
taattttcttacctaagtaatcagcataatacc

SEQ ID NO: 283011 - DNA, 33 bp, Homo sapien
ttcaccacagaaacagaattaaaagcaaaaaac

SEQ ID NO: 283012 - DNA, 33 bp, Homo sapien
ttcaccacagaaacaggattaaaagcaaaaaac

SEQ ID NO: 283013 - DNA, 33 bp, Homo sapien
tgcatgtaatatccagaataaggtaacatatac

SEQ ID NO: 283014 - DNA, 33 bp, Homo sapien
tgcatgtaatatccaggataaggtaacatatac

SEQ ID NO: 283015 - DNA, 33 bp, Homo sapien
gaaaggaaaaccagagaagtggtagcatgagag

SEQ ID NO: 283016 - DNA, 33 bp, Homo sapien
gaaaggaaaaccagagtagtggtagcatgagag

SEQ ID NO: 283017 - DNA, 33 bp, Homo sapien
tagtttgacattaatcacattgaatttgtaaat

SEQ ID NO: 283018 - DNA, 33 bp, Homo sapien
tagtttgacattaatcgcattgaatttgtaaat

SEQ ID NO: 283019 - DNA, 33 bp, Homo sapien
ccagtcaattatagccagaaataaatgctgcat

SEQ ID NO: 283020 - DNA, 33 bp, Homo sapien
ccagtcaattatagcctgaaataaatgctgcat

SEQ ID NO: 283021 - DNA, 33 bp, Homo sapien
gaactcctcgactaaaacaatcctcccaattca

SEQ ID NO: 283022 - DNA, 33 bp, Homo sapien
gaactcctcgactaaagcaatcctcccaattca

SEQ ID NO: 283023 - DNA, 33 bp, Homo sapien
ttcctggacacctcaaaatcctggcactgtatt

SEQ ID NO: 283024 - DNA, 33 bp, Homo sapien
ttcctggacacctcaagatcctggcactgtatt

SEQ ID NO: 283025 - DNA, 33 bp, Homo sapien
atgtcgatatctgaataagagaagagaaacata

SEQ ID NO: 283026 - DNA, 33 bp, Homo sapien
atgtcgatatctgaattagagaagagaaacata

SEQ ID NO: 283027 - DNA, 33 bp, Homo sapien
aacatgaactgtaccaccccacttacgttgcat

SEQ ID NO: 283028 - DNA, 33 bp, Homo sapien
aacatgaactgtaccatcccacttacgttgcat

SEQ ID NO: 283029 - DNA, 33 bp, Homo sapien
cctgttcttacaggccaaggtcatcactggatt

SEQ ID NO: 283030 - DNA, 33 bp, Homo sapien
cctgttcttacaggccgaggtcatcactggatt

SEQ ID NO: 283031 - DNA, 33 bp, Homo sapien
ggtgagtctgcaaattaaagacctacctatatt

SEQ ID NO: 283032 - DNA, 33 bp, Homo sapien
ggtgagtctgcaaattgaagacctacctatatt

SEQ ID NO: 283033 - DNA, 33 bp, Homo sapien
ttccctgtgtctgatacaggattttttccactt

SEQ ID NO: 283034 - DNA, 33 bp, Homo sapien
ttccctgtgtctgatataggattttttccactt

SEQ ID NO: 283035 - DNA, 33 bp, Homo sapien
ctaagtaacatttgcaatatctttaggctaatg

SEQ ID NO: 283036 - DNA, 33 bp, Homo sapien
ctaagtaacatttgcattatctttaggctaatg

SEQ ID NO: 283037 - DNA, 33 bp, Homo sapien
gttgaaattgaatcgccaatataaagatgttgg

SEQ ID NO: 283038 - DNA, 33 bp, Homo sapien
gttgaaattgaatcgctaatataaagatgttgg

SEQ ID NO: 283039 - DNA, 33 bp, Homo sapien
ttgaaggaagtctctcaatcttgtttcatgagt

SEQ ID NO: 283040 - DNA, 33 bp, Homo sapien
ttgaaggaagtctctcgatcttgtttcatgagt

SEQ ID NO: 283041 - DNA, 33 bp, Homo sapien
tgctgtaacaaagtttcgctaattaagtagcat

SEQ ID NO: 283042 - DNA, 33 bp, Homo sapien
tgctgtaacaaagttttgctaattaagtagcat

SEQ ID NO: 283043 - DNA, 33 bp, Homo sapien
ctactcatccaaaccacgcacagagctaattat

SEQ ID NO: 283044 - DNA, 33 bp, Homo sapien
ctactcatccaaaccatgcacagagctaattat

SEQ ID NO: 283045 - DNA, 33 bp, Homo sapien
ccccacttcatttggcacttcttccagctgcct

SEQ ID NO: 283046 - DNA, 33 bp, Homo sapien
ccccacttcatttggcgcttcttccagctgcct

SEQ ID NO: 283047 - DNA, 33 bp, Homo sapien
tactagccagccgtaaaaaaaagaaaattctgt

SEQ ID NO: 283048 - DNA, 33 bp, Homo sapien
tactagccagccgtaataaaaagaaaattctgt

SEQ ID NO: 283049 - DNA, 33 bp, Homo sapien
ttaccactaccttttgcaatagaaatgtctgtc

SEQ ID NO: 283050 - DNA, 33 bp, Homo sapien
ttaccactaccttttggaatagaaatgtctgtc

SEQ ID NO: 283051 - DNA, 33 bp, Homo sapien
aacgtgtatttagaaacgaactactgtgttaac

SEQ ID NO: 283052 - DNA, 33 bp, Homo sapien
aacgtgtatttagaaatgaactactgtgttaac

SEQ ID NO: 283053 - DNA, 33 bp, Homo sapien
agaattacacaattaacccaactcttacagcag

SEQ ID NO: 283054 - DNA, 33 bp, Homo sapien
agaattacacaattaatccaactcttacagcag

SEQ ID NO: 283055 - DNA, 33 bp, Homo sapien
gccttcatggaaagaccgaaagaggcaataata

SEQ ID NO: 283056 - DNA, 33 bp, Homo sapien
gccttcatggaaagactgaaagaggcaataata

SEQ ID NO: 283057 - DNA, 33 bp, Homo sapien
aataaatggacctaacactaaatcccagggaga

SEQ ID NO: 283058 - DNA, 33 bp, Homo sapien
aataaatggacctaacgctaaatcccagggaga

SEQ ID NO: 283059 - DNA, 33 bp, Homo sapien
taaataatgaatgttaagcacgtacctcaaaat

SEQ ID NO: 283060 - DNA, 33 bp, Homo sapien
taaataatgaatgttaggcacgtacctcaaaat

SEQ ID NO: 283061 - DNA, 33 bp, Homo sapien
aatattgttcagccttaaaaaatccttctattt

SEQ ID NO: 283062 - DNA, 33 bp, Homo sapien
aatattgttcagcctttaaaaatccttctattt

SEQ ID NO: 283063 - DNA, 33 bp, Homo sapien
ataaatagttctgaaaatctaatgcacagcata

SEQ ID NO: 283064 - DNA, 33 bp, Homo sapien
ataaatagttctgaaagtctaatgcacagcata

SEQ ID NO: 283065 - DNA, 33 bp, Homo sapien
gttgcaaaagagatcacatgtctggcaaagctt

SEQ ID NO: 283066 - DNA, 33 bp, Homo sapien
gttgcaaaagagatcatatgtctggcaaagctt

SEQ ID NO: 283067 - DNA, 33 bp, Homo sapien
gaagttttcctacaggacagaggctggcaaact

SEQ ID NO: 283068 - DNA, 33 bp, Homo sapien
gaagttttcctacaggtcagaggctggcaaact

SEQ ID NO: 283069 - DNA, 33 bp, Homo sapien
ctgtgtaatcgtgcagaagaacttatccttgct

SEQ ID NO: 283070 - DNA, 33 bp, Homo sapien
ctgtgtaatcgtgcaggagaacttatccttgct

SEQ ID NO: 283071 - DNA, 33 bp, Homo sapien
tgacattaggaacaatcaaccaacgtcattata

SEQ ID NO: 283072 - DNA, 33 bp, Homo sapien
tgacattaggaacaattaaccaacgtcattata

SEQ ID NO: 283073 - DNA, 33 bp, Homo sapien
cactcctcccttgaaacgcacctatttttccta

SEQ ID NO: 283074 - DNA, 33 bp, Homo sapien
cactcctcccttgaaatgcacctatttttccta

SEQ ID NO: 283075 - DNA, 33 bp, Homo sapien
gaatttaccaacaacactaaggtttgaaaaaga

SEQ ID NO: 283076 - DNA, 33 bp, Homo sapien
gaatttaccaacaacagtaaggtttgaaaaaga

SEQ ID NO: 283077 - DNA, 33 bp, Homo sapien
tgggttctattgcctcactactcttattacgtc

SEQ ID NO: 283078 - DNA, 33 bp, Homo sapien
tgggttctattgcctcgctactcttattacgtc

SEQ ID NO: 283079 - DNA, 33 bp, Homo sapien
actacctgttgagtacaatgttcactacctggg

SEQ ID NO: 283080 - DNA, 33 bp, Homo sapien
actacctgttgagtacgatgttcactacctggg

SEQ ID NO: 283081 - DNA, 33 bp, Homo sapien
aatgttctaggcatacactttaaaatggctgtt

SEQ ID NO: 283082 - DNA, 33 bp, Homo sapien
aatgttctaggcataccctttaaaatggctgtt

SEQ ID NO: 283083 - DNA, 33 bp, Homo sapien
aatataacacataggactattgcctcaagttaa

SEQ ID NO: 283084 - DNA, 33 bp, Homo sapien
aatataacacataggattattgcctcaagttaa

SEQ ID NO: 283085 - DNA, 33 bp, Homo sapien
ggatttgtgtggcaagaaaatagcctcacagtc

SEQ ID NO: 283086 - DNA, 33 bp, Homo sapien
ggatttgtgtggcaagcaaatagcctcacagtc

SEQ ID NO: 283087 - DNA, 33 bp, Homo sapien
tgtctgtatccacaaaaagagtggtccttatcg

SEQ ID NO: 283088 - DNA, 33 bp, Homo sapien
tgtctgtatccacaaagagagtggtccttatcg

SEQ ID NO: 283089 - DNA, 33 bp, Homo sapien
tgtaagactgtgcttaataaatatgttgttata

SEQ ID NO: 283090 - DNA, 33 bp, Homo sapien
tgtaagactgtgcttattaaatatgttgttata

SEQ ID NO: 283091 - DNA, 33 bp, Homo sapien
tctttgctctccgtcacgtgagggtataagaaa

SEQ ID NO: 283092 - DNA, 33 bp, Homo sapien
tctttgctctccgtcatgtgagggtataagaaa

SEQ ID NO: 283093 - DNA, 33 bp, Homo sapien
atttgcagcacatataccctaacaattaatttc

SEQ ID NO: 283094 - DNA, 33 bp, Homo sapien
atttgcagcacatatatcctaacaattaatttc

SEQ ID NO: 283095 - DNA, 33 bp, Homo sapien
tattcatggcagagaacaaaccactactccaga

SEQ ID NO: 283096 - DNA, 33 bp, Homo sapien
tattcatggcagagaagaaaccactactccaga

SEQ ID NO: 283097 - DNA, 33 bp, Homo sapien
tgttaaaatataacagaacatccaaaatacgta

SEQ ID NO: 283098 - DNA, 33 bp, Homo sapien
tgttaaaatataacagtacatccaaaatacgta

SEQ ID NO: 283099 - DNA, 33 bp, Homo sapien
taaatgtagttctatacgttcagattttggcac

SEQ ID NO: 283100 - DNA, 33 bp, Homo sapien
taaatgtagttctatatgttcagattttggcac

SEQ ID NO: 283101 - DNA, 33 bp, Homo sapien
attatttatctactagcctacccatctttcagg

SEQ ID NO: 283102 - DNA, 33 bp, Homo sapien
attatttatctactaggctacccatctttcagg

SEQ ID NO: 283103 - DNA, 33 bp, Homo sapien
acatcttcctgcaaatcacattattaggtatag

SEQ ID NO: 283104 - DNA, 33 bp, Homo sapien
acatcttcctgcaaatgacattattaggtatag

SEQ ID NO: 283105 - DNA, 33 bp, Homo sapien
tgtaattcctgttaaacttccaatgacatttga

SEQ ID NO: 283106 - DNA, 33 bp, Homo sapien
tgtaattcctgttaaatttccaatgacatttga

SEQ ID NO: 283107 - DNA, 33 bp, Homo sapien
attagtcatcacggaacttcaaattaaaaccac

SEQ ID NO: 283108 - DNA, 33 bp, Homo sapien
attagtcatcacggaagttcaaattaaaaccac

SEQ ID NO: 283109 - DNA, 33 bp, Homo sapien
tttatatgtttatcaaagaagccatcaagttct

SEQ ID NO: 283110 - DNA, 33 bp, Homo sapien
tttatatgtttatcaatgaagccatcaagttct

SEQ ID NO: 283111 - DNA, 33 bp, Homo sapien
aacaggctcatgtgaactaatgagaccaaagat

SEQ ID NO: 283112 - DNA, 33 bp, Homo sapien
aacaggctcatgtgaagtaatgagaccaaagat

SEQ ID NO: 283113 - DNA, 33 bp, Homo sapien
gtgatgagttattctacggaccagaaagttggg

SEQ ID NO: 283114 - DNA, 33 bp, Homo sapien
gtgatgagttattctatggaccagaaagttggg

SEQ ID NO: 283115 - DNA, 33 bp, Homo sapien
cataatgaagagtatacagtgtttctaaatctc

SEQ ID NO: 283116 - DNA, 33 bp, Homo sapien
cataatgaagagtatatagtgtttctaaatctc

SEQ ID NO: 283117 - DNA, 33 bp, Homo sapien
tatcatactcctttccacaaacacacacacatc

SEQ ID NO: 283118 - DNA, 33 bp, Homo sapien
tatcatactcctttccgcaaacacacacacatc

SEQ ID NO: 283119 - DNA, 33 bp, Homo sapien
gtttgtccaataacacacaaaattgggaatgca

SEQ ID NO: 283120 - DNA, 33 bp, Homo sapien
gtttgtccaataacacgcaaaattgggaatgca

SEQ ID NO: 283121 - DNA, 33 bp, Homo sapien
aatcttggaaacggaaatgtgagacaggttgaa

SEQ ID NO: 283122 - DNA, 33 bp, Homo sapien
aatcttggaaacggaagtgtgagacaggttgaa

SEQ ID NO: 283123 - DNA, 33 bp, Homo sapien
tcacctttcccaactaactataagcctgcaatt

SEQ ID NO: 283124 - DNA, 33 bp, Homo sapien
tcacctttcccaactacctataagcctgcaatt

SEQ ID NO: 283125 - DNA, 33 bp, Homo sapien
tatatgtgggaagttaagctaagacagttgtac

SEQ ID NO: 283126 - DNA, 33 bp, Homo sapien
tatatgtgggaagttaggctaagacagttgtac

SEQ ID NO: 283127 - DNA, 33 bp, Homo sapien
caaaaatattcacacaactctctaaacttcatg

SEQ ID NO: 283128 - DNA, 33 bp, Homo sapien
caaaaatattcacacatctctctaaacttcatg

SEQ ID NO: 283129 - DNA, 33 bp, Homo sapien
tgaatatttttgctacaatcacattttatcatt

SEQ ID NO: 283130 - DNA, 33 bp, Homo sapien
tgaatatttttgctacgatcacattttatcatt

SEQ ID NO: 283131 - DNA, 33 bp, Homo sapien
tctttattcaaagctgcagtattaagttctatg

SEQ ID NO: 283132 - DNA, 33 bp, Homo sapien
tctttattcaaagctgtagtattaagttctatg

SEQ ID NO: 283133 - DNA, 33 bp, Homo sapien
gattgctatggtaggggccaaatgggaaaattt

SEQ ID NO: 283134 - DNA, 33 bp, Homo sapien
gattgctatggtagggtccaaatgggaaaattt

SEQ ID NO: 283135 - DNA, 33 bp, Homo sapien
cccagaaatcttctcaaccaactgccctttgga

SEQ ID NO: 283136 - DNA, 33 bp, Homo sapien
cccagaaatcttctcagccaactgccctttgga

SEQ ID NO: 283137 - DNA, 33 bp, Homo sapien
cctgtgatagtgtatacctcaagtaggataaac

SEQ ID NO: 283138 - DNA, 33 bp, Homo sapien
cctgtgatagtgtatatctcaagtaggataaac

SEQ ID NO: 283139 - DNA, 33 bp, Homo sapien
gaaaggctcactatgccaaaactttgtgtgcaa

SEQ ID NO: 283140 - DNA, 33 bp, Homo sapien
gaaaggctcactatgctaaaactttgtgtgcaa

SEQ ID NO: 283141 - DNA, 33 bp, Homo sapien
acacttaaaaaaaaccaaattgctgcaatataa

SEQ ID NO: 283142 - DNA, 33 bp, Homo sapien
acacttaaaaaaaaccgaattgctgcaatataa

SEQ ID NO: 283143 - DNA, 33 bp, Homo sapien
acctcagcctgtcatacagactataaattcatg

SEQ ID NO: 283144 - DNA, 33 bp, Homo sapien
acctcagcctgtcatagagactataaattcatg

SEQ ID NO: 283145 - DNA, 33 bp, Homo sapien
tccacgcctgtagaaaagcatccttagcttcta

SEQ ID NO: 283146 - DNA, 33 bp, Homo sapien
tccacgcctgtagaaaggcatccttagcttcta

SEQ ID NO: 283147 - DNA, 33 bp, Homo sapien
tttcagagtagtttggcattagagtttcattaa

SEQ ID NO: 283148 - DNA, 33 bp, Homo sapien
tttcagagtagtttggtattagagtttcattaa

SEQ ID NO: 283149 - DNA, 33 bp, Homo sapien
tcacgccactgcaatacagcctgaaaagcagag

SEQ ID NO: 283150 - DNA, 33 bp, Homo sapien
tcacgccactgcaatagagcctgaaaagcagag

SEQ ID NO: 283151 - DNA, 33 bp, Homo sapien
ggacagaaaggtgcctcaagagggtgcatggac

SEQ ID NO: 283152 - DNA, 33 bp, Homo sapien
ggacagaaaggtgccttaagagggtgcatggac

SEQ ID NO: 283153 - DNA, 33 bp, Homo sapien
aacaagggagagaaaaggagtcgtgagaagtgg

SEQ ID NO: 283154 - DNA, 33 bp, Homo sapien
aacaagggagagaaaatgagtcgtgagaagtgg

SEQ ID NO: 283155 - DNA, 33 bp, Homo sapien
gagatggagaccatggaagtcctgaaggaaaga

SEQ ID NO: 283156 - DNA, 33 bp, Homo sapien
gagatggagaccatggcagtcctgaaggaaaga

SEQ ID NO: 283157 - DNA, 33 bp, Homo sapien
ctcatctggatttgtcagaagtgtgagtaaatg

SEQ ID NO: 283158 - DNA, 33 bp, Homo sapien
ctcatctggatttgtcggaagtgtgagtaaatg

SEQ ID NO: 283159 - DNA, 33 bp, Homo sapien
aataggcatatgtacaataagtgaagggtaagg

SEQ ID NO: 283160 - DNA, 33 bp, Homo sapien
aataggcatatgtacagtaagtgaagggtaagg

SEQ ID NO: 283161 - DNA, 33 bp, Homo sapien
acatccaaaatcctataacttcattcttcatta

SEQ ID NO: 283162 - DNA, 33 bp, Homo sapien
acatccaaaatcctatgacttcattcttcatta

SEQ ID NO: 283163 - DNA, 33 bp, Homo sapien
actataatctcattgacggcagctgtattagtc

SEQ ID NO: 283164 - DNA, 33 bp, Homo sapien
actataatctcattgatggcagctgtattagtc

SEQ ID NO: 283165 - DNA, 33 bp, Homo sapien
aatgggtacacattgagagttagataaaagaaa

SEQ ID NO: 283166 - DNA, 33 bp, Homo sapien
aatgggtacacattgatagttagataaaagaaa

SEQ ID NO: 283167 - DNA, 33 bp, Homo sapien
agcaactttatttttaacagcccagaactgaaa

SEQ ID NO: 283168 - DNA, 33 bp, Homo sapien
agcaactttatttttaccagcccagaactgaaa

SEQ ID NO: 283169 - DNA, 33 bp, Homo sapien
gcagagacttataaaccgtatgaaagcagtgcc

SEQ ID NO: 283170 - DNA, 33 bp, Homo sapien
gcagagacttataaactgtatgaaagcagtgcc

SEQ ID NO: 283171 - DNA, 33 bp, Homo sapien
aattgttatctgactagccataaaattatacct

SEQ ID NO: 283172 - DNA, 33 bp, Homo sapien
aattgttatctgactatccataaaattatacct

SEQ ID NO: 283173 - DNA, 33 bp, Homo sapien
tgttgatattgttttacggacccacacatggtc

SEQ ID NO: 283174 - DNA, 33 bp, Homo sapien
tgttgatattgttttatggacccacacatggtc

SEQ ID NO: 283175 - DNA, 33 bp, Homo sapien
ttttatatcttcttgcactaatccaggtttcta

SEQ ID NO: 283176 - DNA, 33 bp, Homo sapien
ttttatatcttcttgccctaatccaggtttcta

SEQ ID NO: 283177 - DNA, 33 bp, Homo sapien
ttgtctatgactgaaaacatttttactttaaca

SEQ ID NO: 283178 - DNA, 33 bp, Homo sapien
ttgtctatgactgaaagcatttttactttaaca

SEQ ID NO: 283179 - DNA, 33 bp, Homo sapien
aattctgtttttatgacagcctcagtactatat

SEQ ID NO: 283180 - DNA, 33 bp, Homo sapien
aattctgtttttatgatagcctcagtactatat

SEQ ID NO: 283181 - DNA, 33 bp, Homo sapien
cagaagcggccaagaaaactaatgggcaagact

SEQ ID NO: 283182 - DNA, 33 bp, Homo sapien
cagaagcggccaagaagactaatgggcaagact

SEQ ID NO: 283183 - DNA, 33 bp, Homo sapien
ctattggtagagatcacgccataaaaatttgct

SEQ ID NO: 283184 - DNA, 33 bp, Homo sapien
ctattggtagagatcatgccataaaaatttgct

SEQ ID NO: 283185 - DNA, 33 bp, Homo sapien
aattcagcccataacactcattctccgtgtttt

SEQ ID NO: 283186 - DNA, 33 bp, Homo sapien
aattcagcccataacattcattctccgtgtttt

SEQ ID NO: 283187 - DNA, 33 bp, Homo sapien
ctttgacgtcataatcaaattagtttttgtaca

SEQ ID NO: 283188 - DNA, 33 bp, Homo sapien
ctttgacgtcataatcgaattagtttttgtaca

SEQ ID NO: 283189 - DNA, 33 bp, Homo sapien
tttagtgactgtaataaacaacaaccaatagta

SEQ ID NO: 283190 - DNA, 33 bp, Homo sapien
tttagtgactgtaatagacaacaaccaatagta

SEQ ID NO: 283191 - DNA, 33 bp, Homo sapien
cattagctgcaatatggattagcttgtgggctg

SEQ ID NO: 283192 - DNA, 33 bp, Homo sapien
cattagctgcaatatgtattagcttgtgggctg

SEQ ID NO: 283193 - DNA, 33 bp, Homo sapien
aagccctcaactgtgaaaagggaccctgaaagt

SEQ ID NO: 283194 - DNA, 33 bp, Homo sapien
aagccctcaactgtgagaagggaccctgaaagt

SEQ ID NO: 283195 - DNA, 33 bp, Homo sapien
aggcaggggaagaatgccacaaggtacattatc

SEQ ID NO: 283196 - DNA, 33 bp, Homo sapien
aggcaggggaagaatgtcacaaggtacattatc

SEQ ID NO: 283197 - DNA, 33 bp, Homo sapien
ttagtcatttgtcagaggtatatgttttaatat

SEQ ID NO: 283198 - DNA, 33 bp, Homo sapien
ttagtcatttgtcagatgtatatgttttaatat

SEQ ID NO: 283199 - DNA, 33 bp, Homo sapien
agttacactgctaaaacattctccttagctctg

SEQ ID NO: 283200 - DNA, 33 bp, Homo sapien
agttacactgctaaaatattctccttagctctg

SEQ ID NO: 283201 - DNA, 33 bp, Homo sapien
aattgttgcattgatactaatttacctaaaaat

SEQ ID NO: 283202 - DNA, 33 bp, Homo sapien
aattgttgcattgatagtaatttacctaaaaat

SEQ ID NO: 283203 - DNA, 33 bp, Homo sapien
gggttgttagtgtacaccagtttgagcaaggag

SEQ ID NO: 283204 - DNA, 33 bp, Homo sapien
gggttgttagtgtacatcagtttgagcaaggag

SEQ ID NO: 283205 - DNA, 33 bp, Homo sapien
accaagctaagaatcaaatcaataacgcaattc

SEQ ID NO: 283206 - DNA, 33 bp, Homo sapien
accaagctaagaatcagatcaataacgcaattc

SEQ ID NO: 283207 - DNA, 33 bp, Homo sapien
acattgagctgaaatacagggtgttctggaaaa

SEQ ID NO: 283208 - DNA, 33 bp, Homo sapien
acattgagctgaaatatagggtgttctggaaaa

SEQ ID NO: 283209 - DNA, 33 bp, Homo sapien
gttgtacttcacttcactagtcaaaagccacac

SEQ ID NO: 283210 - DNA, 33 bp, Homo sapien
gttgtacttcacttcattagtcaaaagccacac

SEQ ID NO: 283211 - DNA, 33 bp, Homo sapien
ttatgctagctctgtaacttttagttcaagatt

SEQ ID NO: 283212 - DNA, 33 bp, Homo sapien
ttatgctagctctgtatcttttagttcaagatt

SEQ ID NO: 283213 - DNA, 33 bp, Homo sapien
actgtggaagctattgacaaatgagaaaggaga

SEQ ID NO: 283214 - DNA, 33 bp, Homo sapien
actgtggaagctattgtcaaatgagaaaggaga

SEQ ID NO: 283215 - DNA, 33 bp, Homo sapien
gcaatattaatatgtacgagagttataatacca

SEQ ID NO: 283216 - DNA, 33 bp, Homo sapien
gcaatattaatatgtatgagagttataatacca

SEQ ID NO: 283217 - DNA, 33 bp, Homo sapien
aagacattgtgcaaacggaaaattaatgatttt

SEQ ID NO: 283218 - DNA, 33 bp, Homo sapien
aagacattgtgcaaactgaaaattaatgatttt

SEQ ID NO: 283219 - DNA, 33 bp, Homo sapien
cctgtcgtatatacagcatgcacatatatattt

SEQ ID NO: 283220 - DNA, 33 bp, Homo sapien
cctgtcgtatatacagtatgcacatatatattt

SEQ ID NO: 283221 - DNA, 33 bp, Homo sapien
gccaagttgaattttacgcttagtttacaactc

SEQ ID NO: 283222 - DNA, 33 bp, Homo sapien
gccaagttgaattttatgcttagtttacaactc

SEQ ID NO: 283223 - DNA, 33 bp, Homo sapien
aatcagataactcacaactccaagggaagaagg

SEQ ID NO: 283224 - DNA, 33 bp, Homo sapien
aatcagataactcacatctccaagggaagaagg

SEQ ID NO: 283225 - DNA, 33 bp, Homo sapien
ttattattttctgcacaatgcatggtctttata

SEQ ID NO: 283226 - DNA, 33 bp, Homo sapien
ttattattttctgcacgatgcatggtctttata

SEQ ID NO: 283227 - DNA, 33 bp, Homo sapien
tgtgtgtattcttgcccgcacagaaagacccat

SEQ ID NO: 283228 - DNA, 33 bp, Homo sapien
tgtgtgtattcttgcctgcacagaaagacccat

SEQ ID NO: 283229 - DNA, 33 bp, Homo sapien
agtagaaagatcgtaaacagcagctggaaaggg

SEQ ID NO: 283230 - DNA, 33 bp, Homo sapien
agtagaaagatcgtaagcagcagctggaaaggg

SEQ ID NO: 283231 - DNA, 33 bp, Homo sapien
attctaaattctcttaagttacaggacaaagag

SEQ ID NO: 283232 - DNA, 33 bp, Homo sapien
attctaaattctcttaggttacaggacaaagag

SEQ ID NO: 283233 - DNA, 33 bp, Homo sapien
tttattttctccgtaacctctagatccccaggc

SEQ ID NO: 283234 - DNA, 33 bp, Homo sapien
tttattttctccgtaagctctagatccccaggc

SEQ ID NO: 283235 - DNA, 33 bp, Homo sapien
atcaactcactctggcagcacagggcaattcta

SEQ ID NO: 283236 - DNA, 33 bp, Homo sapien
atcaactcactctggcggcacagggcaattcta

SEQ ID NO: 283237 - DNA, 33 bp, Homo sapien
gatttggaagtttgggacagataaactacaact

SEQ ID NO: 283238 - DNA, 33 bp, Homo sapien
gatttggaagtttggggcagataaactacaact

SEQ ID NO: 283239 - DNA, 33 bp, Homo sapien
tacatccttggttttacgtagagattttgagca

SEQ ID NO: 283240 - DNA, 33 bp, Homo sapien
tacatccttggttttatgtagagattttgagca

SEQ ID NO: 283241 - DNA, 33 bp, Homo sapien
caatctgagtgtagcaaatggcgatttatgcca

SEQ ID NO: 283242 - DNA, 33 bp, Homo sapien
caatctgagtgtagcatatggcgatttatgcca

SEQ ID NO: 283243 - DNA, 33 bp, Homo sapien
tgtaatttgtatgcagacataataactggaata

SEQ ID NO: 283244 - DNA, 33 bp, Homo sapien
tgtaatttgtatgcaggcataataactggaata

SEQ ID NO: 283245 - DNA, 33 bp, Homo sapien
ctcatttttgaatgccagacaagtgcttgggac

SEQ ID NO: 283246 - DNA, 33 bp, Homo sapien
ctcatttttgaatgccggacaagtgcttgggac

SEQ ID NO: 283247 - DNA, 33 bp, Homo sapien
gaattgaatggccaaaatgtcatagagatgaaa

SEQ ID NO: 283248 - DNA, 33 bp, Homo sapien
gaattgaatggccaaagtgtcatagagatgaaa

SEQ ID NO: 283249 - DNA, 33 bp, Homo sapien
tgtgactatggaaggaaagtcaaagagattcac

SEQ ID NO: 283250 - DNA, 33 bp, Homo sapien
tgtgactatggaaggagagtcaaagagattcac

SEQ ID NO: 283251 - DNA, 33 bp, Homo sapien
tcccctgctgaggtaaaagtcagagaatgagat

SEQ ID NO: 283252 - DNA, 33 bp, Homo sapien
tcccctgctgaggtaagagtcagagaatgagat

SEQ ID NO: 283253 - DNA, 33 bp, Homo sapien
taaactcaatcataggaagacgacacaattaga

SEQ ID NO: 283254 - DNA, 33 bp, Homo sapien
taaactcaatcatagggagacgacacaattaga

SEQ ID NO: 283255 - DNA, 33 bp, Homo sapien
atttgcatatcataggaaatgtttgagagtcta

SEQ ID NO: 283256 - DNA, 33 bp, Homo sapien
atttgcatatcataggcaatgtttgagagtcta

SEQ ID NO: 283257 - DNA, 33 bp, Homo sapien
gcattctgaggattgcacagcaaagtgataaag

SEQ ID NO: 283258 - DNA, 33 bp, Homo sapien
gcattctgaggattgcgcagcaaagtgataaag

SEQ ID NO: 283259 - DNA, 33 bp, Homo sapien
aaaaaggcaaaatgaagagcagtccaacctctt

SEQ ID NO: 283260 - DNA, 33 bp, Homo sapien
aaaaaggcaaaatgaatagcagtccaacctctt

SEQ ID NO: 283261 - DNA, 33 bp, Homo sapien
tagatactctaaatcacgtctctcaagttcaag

SEQ ID NO: 283262 - DNA, 33 bp, Homo sapien
tagatactctaaatcatgtctctcaagttcaag

SEQ ID NO: 283263 - DNA, 33 bp, Homo sapien
attgatagatgaggacaactacaaaacatatat

SEQ ID NO: 283264 - DNA, 33 bp, Homo sapien
attgatagatgaggacgactacaaaacatatat

SEQ ID NO: 283265 - DNA, 33 bp, Homo sapien
aacaatacaagaaaacagagtgcaagcttttat

SEQ ID NO: 283266 - DNA, 33 bp, Homo sapien
aacaatacaagaaaaccgagtgcaagcttttat

SEQ ID NO: 283267 - DNA, 33 bp, Homo sapien
ttttgaggaagcccacactatagtatcttgatg

SEQ ID NO: 283268 - DNA, 33 bp, Homo sapien
ttttgaggaagcccacgctatagtatcttgatg

SEQ ID NO: 283269 - DNA, 33 bp, Homo sapien
caccattgatattgtccacagaaacagcatcat

SEQ ID NO: 283270 - DNA, 33 bp, Homo sapien
caccattgatattgtctacagaaacagcatcat

SEQ ID NO: 283271 - DNA, 33 bp, Homo sapien
tgctaatctatcaccacgtttgctagccactaa

SEQ ID NO: 283272 - DNA, 33 bp, Homo sapien
tgctaatctatcaccatgtttgctagccactaa

SEQ ID NO: 283273 - DNA, 33 bp, Homo sapien
tatgacccaagtataagtatgtatcaaagagaa

SEQ ID NO: 283274 - DNA, 33 bp, Homo sapien
tatgacccaagtataattatgtatcaaagagaa

SEQ ID NO: 283275 - DNA, 33 bp, Homo sapien
atctatggtattcaaaattctcttggacattcc

SEQ ID NO: 283276 - DNA, 33 bp, Homo sapien
atctatggtattcaaacttctcttggacattcc

SEQ ID NO: 283277 - DNA, 33 bp, Homo sapien
taatgcttctgagtaaactcaatggatttcaga

SEQ ID NO: 283278 - DNA, 33 bp, Homo sapien
taatgcttctgagtaacctcaatggatttcaga

SEQ ID NO: 283279 - DNA, 33 bp, Homo sapien
ggtagtggtgtgtgtacctttaaatcattgata

SEQ ID NO: 283280 - DNA, 33 bp, Homo sapien
ggtagtggtgtgtgtatctttaaatcattgata

SEQ ID NO: 283281 - DNA, 33 bp, Homo sapien
atttgtgcgtgtttaactaccattattccatat

SEQ ID NO: 283282 - DNA, 33 bp, Homo sapien
atttgtgcgtgtttaattaccattattccatat

SEQ ID NO: 283283 - DNA, 33 bp, Homo sapien
ctactactattgataaagcaatgaacaaaatag

SEQ ID NO: 283284 - DNA, 33 bp, Homo sapien
ctactactattgataaggcaatgaacaaaatag

SEQ ID NO: 283285 - DNA, 33 bp, Homo sapien
gtccgaggatcccgtacggtgttctaaagcgga

SEQ ID NO: 283286 - DNA, 33 bp, Homo sapien
gtccgaggatcccgtatggtgttctaaagcgga

SEQ ID NO: 283287 - DNA, 33 bp, Homo sapien
agtttggatggtataaaacctttattctggaga

SEQ ID NO: 283288 - DNA, 33 bp, Homo sapien
agtttggatggtataacacctttattctggaga

SEQ ID NO: 283289 - DNA, 33 bp, Homo sapien
atcaagaacaatcaaaactgaatctgacaatct

SEQ ID NO: 283290 - DNA, 33 bp, Homo sapien
atcaagaacaatcaaagctgaatctgacaatct

SEQ ID NO: 283291 - DNA, 33 bp, Homo sapien
ttgttcattgatgttaaaattatcacctttgca

SEQ ID NO: 283292 - DNA, 33 bp, Homo sapien
ttgttcattgatgttacaattatcacctttgca

SEQ ID NO: 283293 - DNA, 33 bp, Homo sapien
aacaaataaccttaagactgaatagaaaggcat

SEQ ID NO: 283294 - DNA, 33 bp, Homo sapien
aacaaataaccttaaggctgaatagaaaggcat

SEQ ID NO: 283295 - DNA, 33 bp, Homo sapien
tgtatttggaggagaaagtcttgtatttggagg

SEQ ID NO: 283296 - DNA, 33 bp, Homo sapien
tgtatttggaggagaatgtcttgtatttggagg

SEQ ID NO: 283297 - DNA, 33 bp, Homo sapien
ttatgaacaatatataagaaagcagaaaggcat

SEQ ID NO: 283298 - DNA, 33 bp, Homo sapien
ttatgaacaatatatatgaaagcagaaaggcat

SEQ ID NO: 283299 - DNA, 33 bp, Homo sapien
tcagtcccctttgccactaagtctcttgagagc

SEQ ID NO: 283300 - DNA, 33 bp, Homo sapien
tcagtcccctttgccattaagtctcttgagagc

SEQ ID NO: 283301 - DNA, 33 bp, Homo sapien
ctttatgataatgcaaacagcatgagcatccgt

SEQ ID NO: 283302 - DNA, 33 bp, Homo sapien
ctttatgataatgcaagcagcatgagcatccgt

SEQ ID NO: 283303 - DNA, 33 bp, Homo sapien
acatttctcttttgccagctgacataatatcaa

SEQ ID NO: 283304 - DNA, 33 bp, Homo sapien
acatttctcttttgccggctgacataatatcaa

SEQ ID NO: 283305 - DNA, 33 bp, Homo sapien
tatttctagcgttagccagaccctgagatgtca

SEQ ID NO: 283306 - DNA, 33 bp, Homo sapien
tatttctagcgttagcgagaccctgagatgtca

SEQ ID NO: 283307 - DNA, 33 bp, Homo sapien
aatgtaaaacttgcgacgtaaaactcttattga

SEQ ID NO: 283308 - DNA, 33 bp, Homo sapien
aatgtaaaacttgcgatgtaaaactcttattga

SEQ ID NO: 283309 - DNA, 33 bp, Homo sapien
gtagtacaggttaatgaaaaactgtgacaatca

SEQ ID NO: 283310 - DNA, 33 bp, Homo sapien
gtagtacaggttaatgcaaaactgtgacaatca

SEQ ID NO: 283311 - DNA, 33 bp, Homo sapien
tacccactgggagataacattctaaagggatat

SEQ ID NO: 283312 - DNA, 33 bp, Homo sapien
tacccactgggagataccattctaaagggatat

SEQ ID NO: 283313 - DNA, 33 bp, Homo sapien
gtaatattgtggtacacgaggcaaagatgtggg

SEQ ID NO: 283314 - DNA, 33 bp, Homo sapien
gtaatattgtggtacatgaggcaaagatgtggg

SEQ ID NO: 283315 - DNA, 33 bp, Homo sapien
atgcagctgctgcgacactattataataacaaa

SEQ ID NO: 283316 - DNA, 33 bp, Homo sapien
atgcagctgctgcgacgctattataataacaaa

SEQ ID NO: 283317 - DNA, 33 bp, Homo sapien
catgacctcagcacataagtgaataatggaatt

SEQ ID NO: 283318 - DNA, 33 bp, Homo sapien
catgacctcagcacatcagtgaataatggaatt

SEQ ID NO: 283319 - DNA, 33 bp, Homo sapien
caggccacacagtaacagtgtttaaccaattta

SEQ ID NO: 283320 - DNA, 33 bp, Homo sapien
caggccacacagtaacggtgtttaaccaattta

SEQ ID NO: 283321 - DNA, 33 bp, Homo sapien
aaaagagcaatgttaaatgatgttaggatgtag

SEQ ID NO: 283322 - DNA, 33 bp, Homo sapien
aaaagagcaatgttaagtgatgttaggatgtag

SEQ ID NO: 283323 - DNA, 33 bp, Homo sapien
tctgtgacctgcttccgaagttaaaagtggggt

SEQ ID NO: 283324 - DNA, 33 bp, Homo sapien
tctgtgacctgcttcctaagttaaaagtggggt

SEQ ID NO: 283325 - DNA, 33 bp, Homo sapien
gttaaacaggcaaagacgacatttgtctaagat

SEQ ID NO: 283326 - DNA, 33 bp, Homo sapien
gttaaacaggcaaagatgacatttgtctaagat

SEQ ID NO: 283327 - DNA, 33 bp, Homo sapien
agacacagaaattcaagtccaaaatcgtacttt

SEQ ID NO: 283328 - DNA, 33 bp, Homo sapien
agacacagaaattcaattccaaaatcgtacttt

SEQ ID NO: 283329 - DNA, 33 bp, Homo sapien
tgtattgacatgattacagaagattgataagat

SEQ ID NO: 283330 - DNA, 33 bp, Homo sapien
tgtattgacatgattatagaagattgataagat

SEQ ID NO: 283331 - DNA, 33 bp, Homo sapien
ttgccttgtagctataagacatgtgataacttg

SEQ ID NO: 283332 - DNA, 33 bp, Homo sapien
ttgccttgtagctataggacatgtgataacttg

SEQ ID NO: 283333 - DNA, 33 bp, Homo sapien
tgtgaattggaactgaaaaggtaatgtaacaga

SEQ ID NO: 283334 - DNA, 33 bp, Homo sapien
tgtgaattggaactgagaaggtaatgtaacaga

SEQ ID NO: 283335 - DNA, 33 bp, Homo sapien
atctctttacttcaataagttcacagtagccta

SEQ ID NO: 283336 - DNA, 33 bp, Homo sapien
atctctttacttcaattagttcacagtagccta

SEQ ID NO: 283337 - DNA, 33 bp, Homo sapien
ccaagacatgagaataaccagaataaatctgcc

SEQ ID NO: 283338 - DNA, 33 bp, Homo sapien
ccaagacatgagaatagccagaataaatctgcc

SEQ ID NO: 283339 - DNA, 33 bp, Homo sapien
tgaggcactccatatcagagacaaaggattttt

SEQ ID NO: 283340 - DNA, 33 bp, Homo sapien
tgaggcactccatatcggagacaaaggattttt

SEQ ID NO: 283341 - DNA, 33 bp, Homo sapien
ggataaagaagtataaacagtgttgacaaatta

SEQ ID NO: 283342 - DNA, 33 bp, Homo sapien
ggataaagaagtataagcagtgttgacaaatta

SEQ ID NO: 283343 - DNA, 33 bp, Homo sapien
acaactatgatttagggaagagtatggtcttgc

SEQ ID NO: 283344 - DNA, 33 bp, Homo sapien
acaactatgatttaggtaagagtatggtcttgc

SEQ ID NO: 283345 - DNA, 33 bp, Homo sapien
tggaacaaaagtaaggaaaaatgcagtatattt

SEQ ID NO: 283346 - DNA, 33 bp, Homo sapien
tggaacaaaagtaaggcaaaatgcagtatattt

SEQ ID NO: 283347 - DNA, 33 bp, Homo sapien
aaatcatcacaagtgcacaaagacattttcaac

SEQ ID NO: 283348 - DNA, 33 bp, Homo sapien
aaatcatcacaagtgcccaaagacattttcaac

SEQ ID NO: 283349 - DNA, 33 bp, Homo sapien
ggcagagcagtatttaaacaccctaagattgtt

SEQ ID NO: 283350 - DNA, 33 bp, Homo sapien
ggcagagcagtatttagacaccctaagattgtt

SEQ ID NO: 283351 - DNA, 33 bp, Homo sapien
ccagaaggaaagcagacactggattctgagcca

SEQ ID NO: 283352 - DNA, 33 bp, Homo sapien
ccagaaggaaagcagatactggattctgagcca

SEQ ID NO: 283353 - DNA, 33 bp, Homo sapien
gtgtaagtttaacataagaagggcatttaactc

SEQ ID NO: 283354 - DNA, 33 bp, Homo sapien
gtgtaagtttaacatatgaagggcatttaactc

SEQ ID NO: 283355 - DNA, 33 bp, Homo sapien
attgaatgtgttaaaggaagttgtgaagaaaag

SEQ ID NO: 283356 - DNA, 33 bp, Homo sapien
attgaatgtgttaaagtaagttgtgaagaaaag

SEQ ID NO: 283357 - DNA, 33 bp, Homo sapien
tttcaatttattttgccgatatctgtcaaagga

SEQ ID NO: 283358 - DNA, 33 bp, Homo sapien
tttcaatttattttgctgatatctgtcaaagga

SEQ ID NO: 283359 - DNA, 33 bp, Homo sapien
tcctgcctgccttcacaatattcattctgttgc

SEQ ID NO: 283360 - DNA, 33 bp, Homo sapien
tcctgcctgccttcacgatattcattctgttgc

SEQ ID NO: 283361 - DNA, 33 bp, Homo sapien
gcttcaaaacttcaaaacttcaaaggataatct

SEQ ID NO: 283362 - DNA, 33 bp, Homo sapien
gcttcaaaacttcaaagcttcaaaggataatct

SEQ ID NO: 283363 - DNA, 33 bp, Homo sapien
ttgataatttagaagcaaacgatcccctatact

SEQ ID NO: 283364 - DNA, 33 bp, Homo sapien
ttgataatttagaagccaacgatcccctatact

SEQ ID NO: 283365 - DNA, 33 bp, Homo sapien
accatcctctagacccaagattggtagatccac

SEQ ID NO: 283366 - DNA, 33 bp, Homo sapien
accatcctctagaccccagattggtagatccac

SEQ ID NO: 283367 - DNA, 33 bp, Homo sapien
tgggtcctaacaaaccaatgtgagctcatgaaa

SEQ ID NO: 283368 - DNA, 33 bp, Homo sapien
tgggtcctaacaaaccgatgtgagctcatgaaa

SEQ ID NO: 283369 - DNA, 33 bp, Homo sapien
tcaagttcacaagaagccctgagtcaattctaa

SEQ ID NO: 283370 - DNA, 33 bp, Homo sapien
tcaagttcacaagaagtcctgagtcaattctaa

SEQ ID NO: 283371 - DNA, 33 bp, Homo sapien
atatgcagtctcacaaactttggaataattctc

SEQ ID NO: 283372 - DNA, 33 bp, Homo sapien
atatgcagtctcacaagctttggaataattctc

SEQ ID NO: 283373 - DNA, 33 bp, Homo sapien
tgaaggacatctgaacggattccaattctttgc

SEQ ID NO: 283374 - DNA, 33 bp, Homo sapien
tgaaggacatctgaactgattccaattctttgc

SEQ ID NO: 283375 - DNA, 33 bp, Homo sapien
tttggagctaaaattgcagacatttttctatga

SEQ ID NO: 283376 - DNA, 33 bp, Homo sapien
tttggagctaaaattggagacatttttctatga

SEQ ID NO: 283377 - DNA, 33 bp, Homo sapien
cagattcagatctttcaaagtttttccttctct

SEQ ID NO: 283378 - DNA, 33 bp, Homo sapien
cagattcagatctttcgaagtttttccttctct

SEQ ID NO: 283379 - DNA, 33 bp, Homo sapien
ttctccttaagatgaaaaagagtgttgcctcca

SEQ ID NO: 283380 - DNA, 33 bp, Homo sapien
ttctccttaagatgaacaagagtgttgcctcca

SEQ ID NO: 283381 - DNA, 33 bp, Homo sapien
gcgtgctctcctgaaaatcaaatccatccctat

SEQ ID NO: 283382 - DNA, 33 bp, Homo sapien
gcgtgctctcctgaaagtcaaatccatccctat

SEQ ID NO: 283383 - DNA, 33 bp, Homo sapien
tttttgaaatctcaatcataggcctgtgatgag

SEQ ID NO: 283384 - DNA, 33 bp, Homo sapien
tttttgaaatctcaattataggcctgtgatgag

SEQ ID NO: 283385 - DNA, 33 bp, Homo sapien
taagatacatcaggtaagtttttgtttaatata

SEQ ID NO: 283386 - DNA, 33 bp, Homo sapien
taagatacatcaggtaggtttttgtttaatata

SEQ ID NO: 283387 - DNA, 33 bp, Homo sapien
caaatgcaggattaccactttccaactgtttag

SEQ ID NO: 283388 - DNA, 33 bp, Homo sapien
caaatgcaggattacctctttccaactgtttag

SEQ ID NO: 283389 - DNA, 33 bp, Homo sapien
aagcagattactttccaagaacaagcaccctag

SEQ ID NO: 283390 - DNA, 33 bp, Homo sapien
aagcagattactttcccagaacaagcaccctag

SEQ ID NO: 283391 - DNA, 33 bp, Homo sapien
gaagaaaaggtcagcacctcctatctctgccct

SEQ ID NO: 283392 - DNA, 33 bp, Homo sapien
gaagaaaaggtcagcatctcctatctctgccct

SEQ ID NO: 283393 - DNA, 33 bp, Homo sapien
agacagtcattctctacgagagcactgaacagg

SEQ ID NO: 283394 - DNA, 33 bp, Homo sapien
agacagtcattctctaggagagcactgaacagg

SEQ ID NO: 283395 - DNA, 33 bp, Homo sapien
taatcaaagtgaatgccaaggcaccataaaatt

SEQ ID NO: 283396 - DNA, 33 bp, Homo sapien
taatcaaagtgaatgcgaaggcaccataaaatt

SEQ ID NO: 283397 - DNA, 33 bp, Homo sapien
aaaataaatgcaaaaactaaatagcctataaat

SEQ ID NO: 283398 - DNA, 33 bp, Homo sapien
aaaataaatgcaaaaagtaaatagcctataaat

SEQ ID NO: 283399 - DNA, 33 bp, Homo sapien
attagaaaccataaaaggtaccatagcaaattt

SEQ ID NO: 283400 - DNA, 33 bp, Homo sapien
attagaaaccataaaatgtaccatagcaaattt

SEQ ID NO: 283401 - DNA, 33 bp, Homo sapien
aaccatgttggagtaaacgatagcagacattcc

SEQ ID NO: 283402 - DNA, 33 bp, Homo sapien
aaccatgttggagtaaccgatagcagacattcc

SEQ ID NO: 283403 - DNA, 33 bp, Homo sapien
taaaaagtgttttagacattggtaagcaggcgg

SEQ ID NO: 283404 - DNA, 33 bp, Homo sapien
taaaaagtgttttagatattggtaagcaggcgg

SEQ ID NO: 283405 - DNA, 33 bp, Homo sapien
atgtaatctagcatataaacagaacagcgtata

SEQ ID NO: 283406 - DNA, 33 bp, Homo sapien
atgtaatctagcatatcaacagaacagcgtata

SEQ ID NO: 283407 - DNA, 33 bp, Homo sapien
gactttgggcaatgaaattaatagacactgaag

SEQ ID NO: 283408 - DNA, 33 bp, Homo sapien
gactttgggcaatgaatttaatagacactgaag

SEQ ID NO: 283409 - DNA, 33 bp, Homo sapien
tctgtatacgtctaacccattatcccagcacca

SEQ ID NO: 283410 - DNA, 33 bp, Homo sapien
tctgtatacgtctaactcattatcccagcacca

SEQ ID NO: 283411 - DNA, 33 bp, Homo sapien
aagtgttagcacataaacttttcatttagaatc

SEQ ID NO: 283412 - DNA, 33 bp, Homo sapien
aagtgttagcacataagcttttcatttagaatc

SEQ ID NO: 283413 - DNA, 33 bp, Homo sapien
tacagttttaaccaccaaatgaccacaagcacg

SEQ ID NO: 283414 - DNA, 33 bp, Homo sapien
tacagttttaaccaccgaatgaccacaagcacg

SEQ ID NO: 283415 - DNA, 33 bp, Homo sapien
tgaagatgtggaagaacgtcactcttggcaggt

SEQ ID NO: 283416 - DNA, 33 bp, Homo sapien
tgaagatgtggaagaatgtcactcttggcaggt

SEQ ID NO: 283417 - DNA, 33 bp, Homo sapien
tttcttgcttacacaacttcctgttgagtgtga

SEQ ID NO: 283418 - DNA, 33 bp, Homo sapien
tttcttgcttacacaatttcctgttgagtgtga

SEQ ID NO: 283419 - DNA, 33 bp, Homo sapien
ctatattaaccatagaatcatccataatagttc

SEQ ID NO: 283420 - DNA, 33 bp, Homo sapien
ctatattaaccatagattcatccataatagttc

SEQ ID NO: 283421 - DNA, 33 bp, Homo sapien
gcaggatgtttgagtaaaaggagcatagagagc

SEQ ID NO: 283422 - DNA, 33 bp, Homo sapien
gcaggatgtttgagtacaaggagcatagagagc

SEQ ID NO: 283423 - DNA, 33 bp, Homo sapien
aatgggagatatacagaaggaaattgaggcagc

SEQ ID NO: 283424 - DNA, 33 bp, Homo sapien
aatgggagatatacagcaggaaattgaggcagc

SEQ ID NO: 283425 - DNA, 33 bp, Homo sapien
agccctgctgagattaagtgaactccagttgat

SEQ ID NO: 283426 - DNA, 33 bp, Homo sapien
agccctgctgagattaggtgaactccagttgat

SEQ ID NO: 283427 - DNA, 33 bp, Homo sapien
ttttactgtcaatctgcaacatttctccaatga

SEQ ID NO: 283428 - DNA, 33 bp, Homo sapien
ttttactgtcaatctggaacatttctccaatga

SEQ ID NO: 283429 - DNA, 33 bp, Homo sapien
aaccataactatcaccaagaagtcttagttgtc

SEQ ID NO: 283430 - DNA, 33 bp, Homo sapien
aaccataactatcaccgagaagtcttagttgtc

SEQ ID NO: 283431 - DNA, 33 bp, Homo sapien
actgtttagacacttaacagagacaagcaggga

SEQ ID NO: 283432 - DNA, 33 bp, Homo sapien
actgtttagacacttaccagagacaagcaggga

SEQ ID NO: 283433 - DNA, 33 bp, Homo sapien
atttgtttgagaggtcaatcaaccggtactctg

SEQ ID NO: 283434 - DNA, 33 bp, Homo sapien
atttgtttgagaggtcgatcaaccggtactctg

SEQ ID NO: 283435 - DNA, 33 bp, Homo sapien
aaataaataagtcaaaataggacctgcttagca

SEQ ID NO: 283436 - DNA, 33 bp, Homo sapien
aaataaataagtcaaagtaggacctgcttagca

SEQ ID NO: 283437 - DNA, 33 bp, Homo sapien
gccaaattgcgggatacgtggcaatccttggta

SEQ ID NO: 283438 - DNA, 33 bp, Homo sapien
gccaaattgcgggatatgtggcaatccttggta

SEQ ID NO: 283439 - DNA, 33 bp, Homo sapien
actcttaggtgatttaactgcttggaaaacata

SEQ ID NO: 283440 - DNA, 33 bp, Homo sapien
actcttaggtgatttatctgcttggaaaacata

SEQ ID NO: 283441 - DNA, 33 bp, Homo sapien
ttaactaccattcaacaatgtactggaagtcct

SEQ ID NO: 283442 - DNA, 33 bp, Homo sapien
ttaactaccattcaacgatgtactggaagtcct

SEQ ID NO: 283443 - DNA, 33 bp, Homo sapien
ttctttttacattaccaagtttgcattttactt

SEQ ID NO: 283444 - DNA, 33 bp, Homo sapien
ttctttttacattacctagtttgcattttactt

SEQ ID NO: 283445 - DNA, 33 bp, Homo sapien
atatttattttaaatacaaggtgtgtgagaaga

SEQ ID NO: 283446 - DNA, 33 bp, Homo sapien
atatttattttaaatagaaggtgtgtgagaaga

SEQ ID NO: 283447 - DNA, 33 bp, Homo sapien
tgtttgcacaagatcaaattaaaacttttgaag

SEQ ID NO: 283448 - DNA, 33 bp, Homo sapien
tgtttgcacaagatcagattaaaacttttgaag

SEQ ID NO: 283449 - DNA, 33 bp, Homo sapien
ctaaataaatctaaaaagcaatctaggccacca

SEQ ID NO: 283450 - DNA, 33 bp, Homo sapien
ctaaataaatctaaaaggcaatctaggccacca

SEQ ID NO: 283451 - DNA, 33 bp, Homo sapien
acagcatcaaatggtcaaagctaatacaatgtt

SEQ ID NO: 283452 - DNA, 33 bp, Homo sapien
acagcatcaaatggtcgaagctaatacaatgtt

SEQ ID NO: 283453 - DNA, 33 bp, Homo sapien
attcatgaagttcaaacgtgtattattagatat

SEQ ID NO: 283454 - DNA, 33 bp, Homo sapien
attcatgaagttcaaatgtgtattattagatat

SEQ ID NO: 283455 - DNA, 33 bp, Homo sapien
cattctgtaacagttggaaaaatgccattcata

SEQ ID NO: 283456 - DNA, 33 bp, Homo sapien
cattctgtaacagttgtaaaaatgccattcata

SEQ ID NO: 283457 - DNA, 33 bp, Homo sapien
atcacacacacataaaattcggtatctattgat

SEQ ID NO: 283458 - DNA, 33 bp, Homo sapien
atcacacacacataaagttcggtatctattgat

SEQ ID NO: 283459 - DNA, 33 bp, Homo sapien
tatttttagtggtgtacgaaggactagaatatg

SEQ ID NO: 283460 - DNA, 33 bp, Homo sapien
tatttttagtggtgtatgaaggactagaatatg

SEQ ID NO: 283461 - DNA, 33 bp, Homo sapien
tagcttatgttgaatgcattacaccttagttgt

SEQ ID NO: 283462 - DNA, 33 bp, Homo sapien
tagcttatgttgaatgtattacaccttagttgt

SEQ ID NO: 283463 - DNA, 33 bp, Homo sapien
acagtttgctgtcacaagaatgagtggaaaatt

SEQ ID NO: 283464 - DNA, 33 bp, Homo sapien
acagtttgctgtcacaggaatgagtggaaaatt

SEQ ID NO: 283465 - DNA, 33 bp, Homo sapien
aaaatagccagaaaaaaatttgcattttcttga

SEQ ID NO: 283466 - DNA, 33 bp, Homo sapien
aaaatagccagaaaaagatttgcattttcttga

SEQ ID NO: 283467 - DNA, 33 bp, Homo sapien
tataaagtctaaattacagttagtagcattaat

SEQ ID NO: 283468 - DNA, 33 bp, Homo sapien
tataaagtctaaattagagttagtagcattaat

SEQ ID NO: 283469 - DNA, 33 bp, Homo sapien
agaatgtcgaatattggaccccaatctattctg

SEQ ID NO: 283470 - DNA, 33 bp, Homo sapien
agaatgtcgaatattgtaccccaatctattctg

SEQ ID NO: 283471 - DNA, 33 bp, Homo sapien
cagtctcagaaagaaactggcaaaacttagtag

SEQ ID NO: 283472 - DNA, 33 bp, Homo sapien
cagtctcagaaagaaagtggcaaaacttagtag

SEQ ID NO: 283473 - DNA, 33 bp, Homo sapien
acatcaggggaaggggacatttcataatgactt

SEQ ID NO: 283474 - DNA, 33 bp, Homo sapien
acatcaggggaagggggcatttcataatgactt

SEQ ID NO: 283475 - DNA, 33 bp, Homo sapien
agttaacattgtatggaaaacaatagtagtaag

SEQ ID NO: 283476 - DNA, 33 bp, Homo sapien
agttaacattgtatgggaaacaatagtagtaag

SEQ ID NO: 283477 - DNA, 33 bp, Homo sapien
tcttatcattgaggtgaaattataataactttt

SEQ ID NO: 283478 - DNA, 33 bp, Homo sapien
tcttatcattgaggtgcaattataataactttt

SEQ ID NO: 283479 - DNA, 33 bp, Homo sapien
attcattcaaaagcaccgtagaggctcaagtaa

SEQ ID NO: 283480 - DNA, 33 bp, Homo sapien
attcattcaaaagcactgtagaggctcaagtaa

SEQ ID NO: 283481 - DNA, 33 bp, Homo sapien
atttgatttctttgaacacaataggctttcctt

SEQ ID NO: 283482 - DNA, 33 bp, Homo sapien
atttgatttctttgaatacaataggctttcctt

SEQ ID NO: 283483 - DNA, 33 bp, Homo sapien
ttattatgttacttggaatttacaagattactg

SEQ ID NO: 283484 - DNA, 33 bp, Homo sapien
ttattatgttacttggtatttacaagattactg

SEQ ID NO: 283485 - DNA, 33 bp, Homo sapien
cccagtggacaccttcaaaccctatatatagtg

SEQ ID NO: 283486 - DNA, 33 bp, Homo sapien
cccagtggacaccttcgaaccctatatatagtg

SEQ ID NO: 283487 - DNA, 33 bp, Homo sapien
agtggggactactggaaaactaatttagtagat

SEQ ID NO: 283488 - DNA, 33 bp, Homo sapien
agtggggactactggagaactaatttagtagat

SEQ ID NO: 283489 - DNA, 33 bp, Homo sapien
cattaacaagagcacaggaaaattctgaaagac

SEQ ID NO: 283490 - DNA, 33 bp, Homo sapien
cattaacaagagcacatgaaaattctgaaagac

SEQ ID NO: 283491 - DNA, 33 bp, Homo sapien
aaatttcaatggtggagcgtcctctaactctat

SEQ ID NO: 283492 - DNA, 33 bp, Homo sapien
aaatttcaatggtggatcgtcctctaactctat

SEQ ID NO: 283493 - DNA, 33 bp, Homo sapien
ataggcaggtgagacgaattttggtggagaagt

SEQ ID NO: 283494 - DNA, 33 bp, Homo sapien
ataggcaggtgagacgtattttggtggagaagt

SEQ ID NO: 283495 - DNA, 33 bp, Homo sapien
atttgcaatattctccactcaaggtgacaggac

SEQ ID NO: 283496 - DNA, 33 bp, Homo sapien
atttgcaatattctccgctcaaggtgacaggac

SEQ ID NO: 283497 - DNA, 33 bp, Homo sapien
caatcataaccttctcaccttctccgtttagac

SEQ ID NO: 283498 - DNA, 33 bp, Homo sapien
caatcataaccttctctccttctccgtttagac

SEQ ID NO: 283499 - DNA, 33 bp, Homo sapien
agtagaggaagtagtgaagtaaaatgcttttta

SEQ ID NO: 283500 - DNA, 33 bp, Homo sapien
agtagaggaagtagtggagtaaaatgcttttta

SEQ ID NO: 283501 - DNA, 33 bp, Homo sapien
acttgcagttgtctgaaggttaattctcacaaa

SEQ ID NO: 283502 - DNA, 33 bp, Homo sapien
acttgcagttgtctgacggttaattctcacaaa

SEQ ID NO: 283503 - DNA, 33 bp, Homo sapien
taccaacaacattgtacctgagctgtttcactc

SEQ ID NO: 283504 - DNA, 33 bp, Homo sapien
taccaacaacattgtagctgagctgtttcactc

SEQ ID NO: 283505 - DNA, 33 bp, Homo sapien
gaagccctggataaaccataagtataagtaaaa

SEQ ID NO: 283506 - DNA, 33 bp, Homo sapien
gaagccctggataaacgataagtataagtaaaa

SEQ ID NO: 283507 - DNA, 33 bp, Homo sapien
tcagaggttctaaacaatgttccttcaaatagt

SEQ ID NO: 283508 - DNA, 33 bp, Homo sapien
tcagaggttctaaacagtgttccttcaaatagt

SEQ ID NO: 283509 - DNA, 33 bp, Homo sapien
cactcatgccagaaagcccatgaggttgaaaag

SEQ ID NO: 283510 - DNA, 33 bp, Homo sapien
cactcatgccagaaagtccatgaggttgaaaag

SEQ ID NO: 283511 - DNA, 33 bp, Homo sapien
gatacctcaatgaaaaatctagatgaggggtta

SEQ ID NO: 283512 - DNA, 33 bp, Homo sapien
gatacctcaatgaaaactctagatgaggggtta

SEQ ID NO: 283513 - DNA, 33 bp, Homo sapien
tttaggaaactgatcccgaaatccaactttgga

SEQ ID NO: 283514 - DNA, 33 bp, Homo sapien
tttaggaaactgatcctgaaatccaactttgga

SEQ ID NO: 283515 - DNA, 33 bp, Homo sapien
gatggcacctacatgaaagaccctgagccaaaa

SEQ ID NO: 283516 - DNA, 33 bp, Homo sapien
gatggcacctacatgagagaccctgagccaaaa

SEQ ID NO: 283517 - DNA, 33 bp, Homo sapien
aaagtgttgctttaaaaagttgataataaagta

SEQ ID NO: 283518 - DNA, 33 bp, Homo sapien
aaagtgttgctttaaagagttgataataaagta

SEQ ID NO: 283519 - DNA, 33 bp, Homo sapien
tacaaactagtgtcaacaggcaaaaaatttaaa

SEQ ID NO: 283520 - DNA, 33 bp, Homo sapien
tacaaactagtgtcaagaggcaaaaaatttaaa

SEQ ID NO: 283521 - DNA, 33 bp, Homo sapien
ctggacattttgtcaacgtaagattgggtaagc

SEQ ID NO: 283522 - DNA, 33 bp, Homo sapien
ctggacattttgtcaatgtaagattgggtaagc

SEQ ID NO: 283523 - DNA, 33 bp, Homo sapien
ataaagctaagcaagaaggcaaatctaccaaag

SEQ ID NO: 283524 - DNA, 33 bp, Homo sapien
ataaagctaagcaagatggcaaatctaccaaag

SEQ ID NO: 283525 - DNA, 33 bp, Homo sapien
tcattttgaatttagagtccaccttagttcagt

SEQ ID NO: 283526 - DNA, 33 bp, Homo sapien
tcattttgaatttagattccaccttagttcagt

SEQ ID NO: 283527 - DNA, 33 bp, Homo sapien
gttttgtagttagcataaataaaatttgagttg

SEQ ID NO: 283528 - DNA, 33 bp, Homo sapien
gttttgtagttagcatgaataaaatttgagttg

SEQ ID NO: 283529 - DNA, 33 bp, Homo sapien
cttctctacattcttcaagtaagatgacattaa

SEQ ID NO: 283530 - DNA, 33 bp, Homo sapien
cttctctacattcttcgagtaagatgacattaa

SEQ ID NO: 283531 - DNA, 33 bp, Homo sapien
gggggagttttcaggaagataaatcaagagtcc

SEQ ID NO: 283532 - DNA, 33 bp, Homo sapien
gggggagttttcaggacgataaatcaagagtcc

SEQ ID NO: 283533 - DNA, 33 bp, Homo sapien
gaagcacatcggtcacagaaccctgaaagcaca

SEQ ID NO: 283534 - DNA, 33 bp, Homo sapien
gaagcacatcggtcacggaaccctgaaagcaca

SEQ ID NO: 283535 - DNA, 33 bp, Homo sapien
tatccaattagtaaagaagtgctgaattgtgtg

SEQ ID NO: 283536 - DNA, 33 bp, Homo sapien
tatccaattagtaaagtagtgctgaattgtgtg

SEQ ID NO: 283537 - DNA, 33 bp, Homo sapien
tctttgttaatggctacggtttcaaatacattt

SEQ ID NO: 283538 - DNA, 33 bp, Homo sapien
tctttgttaatggctatggtttcaaatacattt

SEQ ID NO: 283539 - DNA, 33 bp, Homo sapien
atggttttcttccaaccatagtcataatacttt

SEQ ID NO: 283540 - DNA, 33 bp, Homo sapien
atggttttcttccaactatagtcataatacttt

SEQ ID NO: 283541 - DNA, 33 bp, Homo sapien
gtctcagataagaccaactgaattcaaatctct

SEQ ID NO: 283542 - DNA, 33 bp, Homo sapien
gtctcagataagaccagctgaattcaaatctct

SEQ ID NO: 283543 - DNA, 33 bp, Homo sapien
gggacaacagccctcacaccagctcaaaattca

SEQ ID NO: 283544 - DNA, 33 bp, Homo sapien
gggacaacagccctcataccagctcaaaattca

SEQ ID NO: 283545 - DNA, 33 bp, Homo sapien
gtacagcaaagaatgacatgaaaggaaaaacca

SEQ ID NO: 283546 - DNA, 33 bp, Homo sapien
gtacagcaaagaatgatatgaaaggaaaaacca

SEQ ID NO: 283547 - DNA, 33 bp, Homo sapien
atgcttttctgcttagaatttcttccaacaggt

SEQ ID NO: 283548 - DNA, 33 bp, Homo sapien
atgcttttctgcttaggatttcttccaacaggt

SEQ ID NO: 283549 - DNA, 33 bp, Homo sapien
ttgtactttaattgcacgaaatctttactaata

SEQ ID NO: 283550 - DNA, 33 bp, Homo sapien
ttgtactttaattgcatgaaatctttactaata

SEQ ID NO: 283551 - DNA, 33 bp, Homo sapien
cagaatacctgattgacagcagatgtggaagtc

SEQ ID NO: 283552 - DNA, 33 bp, Homo sapien
cagaatacctgattgagagcagatgtggaagtc

SEQ ID NO: 283553 - DNA, 33 bp, Homo sapien
aaatccatctcaaacccagctgcttgtggaaaa

SEQ ID NO: 283554 - DNA, 33 bp, Homo sapien
aaatccatctcaaacctagctgcttgtggaaaa

SEQ ID NO: 283555 - DNA, 33 bp, Homo sapien
aaaataggctaatacaatacattggtaccaggt

SEQ ID NO: 283556 - DNA, 33 bp, Homo sapien
aaaataggctaatacagtacattggtaccaggt

SEQ ID NO: 283557 - DNA, 33 bp, Homo sapien; identical to SEQ ID NO: 283555

SEQ ID NO: 283558 - DNA, 33 bp, Homo sapien; identical to SEQ ID NO: 283556

SEQ ID NO: 283559 - DNA, 33 bp, Homo sapien
catgaaattaatttccaaaaatgaagtagctta

SEQ ID NO: 283560 - DNA, 33 bp, Homo sapien
catgaaattaatttcccaaaatgaagtagctta

SEQ ID NO: 283561 - DNA, 33 bp, Homo sapien
ttgttctaaaaatatggaatccactcttttgat

SEQ ID NO: 283562 - DNA, 33 bp, Homo sapien
ttgttctaaaaatatgtaatccactcttttgat

SEQ ID NO: 283563 - DNA, 33 bp, Homo sapien
ttagaattatgaaagaaaaacactggtatgcaa

SEQ ID NO: 283564 - DNA, 33 bp, Homo sapien
ttagaattatgaaagagaaacactggtatgcaa

SEQ ID NO: 283565 - DNA, 33 bp, Homo sapien
acttaattgttaagaaaccaagtcagactgtct

SEQ ID NO: 283566 - DNA, 33 bp, Homo sapien
acttaattgttaagaagccaagtcagactgtct

SEQ ID NO: 283567 - DNA, 33 bp, Homo sapien
ttgcttcattgacctaccttctccgtgaacttt

SEQ ID NO: 283568 - DNA, 33 bp, Homo sapien
ttgcttcattgacctatcttctccgtgaacttt

SEQ ID NO: 283569 - DNA, 33 bp, Homo sapien
agtatagctggctctacctcaaactatttttat

SEQ ID NO: 283570 - DNA, 33 bp, Homo sapien
agtatagctggctctatctcaaactatttttat

SEQ ID NO: 283571 - DNA, 33 bp, Homo sapien
caaggtaggatggtgaagctgtattgctaagac

SEQ ID NO: 283572 - DNA, 33 bp, Homo sapien
caaggtaggatggtgacgctgtattgctaagac

SEQ ID NO: 283573 - DNA, 33 bp, Homo sapien
ctcatctgcagagacaatagtgtttgaacacag

SEQ ID NO: 283574 - DNA, 33 bp, Homo sapien
ctcatctgcagagacagtagtgtttgaacacag

SEQ ID NO: 283575 - DNA, 33 bp, Homo sapien
tgtcatcacatcaaaagacgtttagttgagttg

SEQ ID NO: 283576 - DNA, 33 bp, Homo sapien
tgtcatcacatcaaaatacgtttagttgagttg

SEQ ID NO: 283577 - DNA, 33 bp, Homo sapien
gagaaatggaaacaaaatgagagaatggataca

SEQ ID NO: 283578 - DNA, 33 bp, Homo sapien
gagaaatggaaacaaagtgagagaatggataca

SEQ ID NO: 283579 - DNA, 33 bp, Homo sapien
attctggatcagaaggaaaacttacgtgttatt

SEQ ID NO: 283580 - DNA, 33 bp, Homo sapien
attctggatcagaaggtaaacttacgtgttatt

SEQ ID NO: 283581 - DNA, 33 bp, Homo sapien
aatgttagatgcaaacaagtgtgatgaaacttc

SEQ ID NO: 283582 - DNA, 33 bp, Homo sapien
aatgttagatgcaaaccagtgtgatgaaacttc

SEQ ID NO: 283583 - DNA, 33 bp, Homo sapien
tcttaaaatgcaaacactggaagagtagatttg

SEQ ID NO: 283584 - DNA, 33 bp, Homo sapien
tcttaaaatgcaaacattggaagagtagatttg

SEQ ID NO: 283585 - DNA, 33 bp, Homo sapien
gaaggaaaaaatcatgcattactcaggctgtca

SEQ ID NO: 283586 - DNA, 33 bp, Homo sapien
gaaggaaaaaatcatgtattactcaggctgtca

SEQ ID NO: 283587 - DNA, 33 bp, Homo sapien
cacatcaatgtatatcaaattttcatgaaggaa

SEQ ID NO: 283588 - DNA, 33 bp, Homo sapien
cacatcaatgtatatcgaattttcatgaaggaa

SEQ ID NO: 283589 - DNA, 33 bp, Homo sapien
ggtgttctatgaaatacgtgtcctacagcctag

SEQ ID NO: 283590 - DNA, 33 bp, Homo sapien
ggtgttctatgaaatatgtgtcctacagcctag

SEQ ID NO: 283591 - DNA, 33 bp, Homo sapien
cctgctgctactcatgcattatgtaaacataaa

SEQ ID NO: 283592 - DNA, 33 bp, Homo sapien
cctgctgctactcatgtattatgtaaacataaa

SEQ ID NO: 283593 - DNA, 33 bp, Homo sapien
ataatcataataaatacgccacagtaatgagcg

SEQ ID NO: 283594 - DNA, 33 bp, Homo sapien
ataatcataataaatatgccacagtaatgagcg

SEQ ID NO: 283595 - DNA, 33 bp, Homo sapien
aaaggcttgtattatcagacatttggtgttgaa

SEQ ID NO: 283596 - DNA, 33 bp, Homo sapien
aaaggcttgtattatcggacatttggtgttgaa

SEQ ID NO: 283597 - DNA, 33 bp, Homo sapien
aagttacacagaaataaagtaagattgatgcaa

SEQ ID NO: 283598 - DNA, 33 bp, Homo sapien
aagttacacagaaatagagtaagattgatgcaa

SEQ ID NO: 283599 - DNA, 33 bp, Homo sapien
attatttaagtctttagggagtgcttaaaatat

SEQ ID NO: 283600 - DNA, 33 bp, Homo sapien
attatttaagtctttatggagtgcttaaaatat

SEQ ID NO: 283601 - DNA, 33 bp, Homo sapien
gttaatttttctaacactgatgtatgtcaagat

SEQ ID NO: 283602 - DNA, 33 bp, Homo sapien
gttaatttttctaacattgatgtatgtcaagat

SEQ ID NO: 283603 - DNA, 33 bp, Homo sapien
tttacaaattacttaactgtctacgtgggtgtt

SEQ ID NO: 283604 - DNA, 33 bp, Homo sapien
tttacaaattacttaagtgtctacgtgggtgtt

SEQ ID NO: 283605 - DNA, 33 bp, Homo sapien
ccatacttgaagaagtaacttcccagaacactc

SEQ ID NO: 283606 - DNA, 33 bp, Homo sapien
ccatacttgaagaagtgacttcccagaacactc

SEQ ID NO: 283607 - DNA, 33 bp, Homo sapien
taagcgaccaggaaaacattgcgagcttgaaag

SEQ ID NO: 283608 - DNA, 33 bp, Homo sapien
taagcgaccaggaaaagattgcgagcttgaaag

SEQ ID NO: 283609 - DNA, 33 bp, Homo sapien
caaaagctattttgaaccactaggtcataaagt

SEQ ID NO: 283610 - DNA, 33 bp, Homo sapien
caaaagctattttgaatcactaggtcataaagt

SEQ ID NO: 283611 - DNA, 33 bp, Homo sapien
tttcttgaggattataaaaaagtacatgtcagg

SEQ ID NO: 283612 - DNA, 33 bp, Homo sapien
tttcttgaggattatagaaaagtacatgtcagg

SEQ ID NO: 283613 - DNA, 33 bp, Homo sapien
aaaattgacagcttagaaaagttaagatatata

SEQ ID NO: 283614 - DNA, 33 bp, Homo sapien
aaaattgacagcttaggaaagttaagatatata

SEQ ID NO: 283615 - DNA, 33 bp, Homo sapien
attaaacagttatacactccacaagcatcagca

SEQ ID NO: 283616 - DNA, 33 bp, Homo sapien
attaaacagttatacattccacaagcatcagca

SEQ ID NO: 283617 - DNA, 33 bp, Homo sapien
tcttgattcaataaacaactacaataatatcat

SEQ ID NO: 283618 - DNA, 33 bp, Homo sapien
tcttgattcaataaacgactacaataatatcat

SEQ ID NO: 283619 - DNA, 33 bp, Homo sapien
caaatgtgtttcaacaatggccttgaaaaaaca

SEQ ID NO: 283620 - DNA, 33 bp, Homo sapien
caaatgtgtttcaacattggccttgaaaaaaca

SEQ ID NO: 283621 - DNA, 33 bp, Homo sapien
agttatttacttgaaactttattggccagaagg

SEQ ID NO: 283622 - DNA, 33 bp, Homo sapien
agttatttacttgaaattttattggccagaagg

SEQ ID NO: 283623 - DNA, 33 bp, Homo sapien
atgtatgtggccattacgacatacaggtattta

SEQ ID NO: 283624 - DNA, 33 bp, Homo sapien
atgtatgtggccattatgacatacaggtattta

SEQ ID NO: 283625 - DNA, 33 bp, Homo sapien
tatggttttctttgggaatcaatagttgggcag

SEQ ID NO: 283626 - DNA, 33 bp, Homo sapien
tatggttttctttgggtatcaatagttgggcag

SEQ ID NO: 283627 - DNA, 33 bp, Homo sapien
tttgaaacaaccttcacaaaaattgtatcaatg

SEQ ID NO: 283628 - DNA, 33 bp, Homo sapien
tttgaaacaaccttcagaaaaattgtatcaatg

SEQ ID NO: 283629 - DNA, 33 bp, Homo sapien
ccaaatgagccaaagcaaagtcttaataatatt

SEQ ID NO: 283630 - DNA, 33 bp, Homo sapien
ccaaatgagccaaagcgaagtcttaataatatt

SEQ ID NO: 283631 - DNA, 33 bp, Homo sapien
atataaaggatttgagcagcatccagtgtgtct

SEQ ID NO: 283632 - DNA, 33 bp, Homo sapien
atataaaggatttgagtagcatccagtgtgtct

SEQ ID NO: 283633 - DNA, 33 bp, Homo sapien
atcgaagtgacattcaacagaaataaatacatt

SEQ ID NO: 283634 - DNA, 33 bp, Homo sapien
atcgaagtgacattcatcagaaataaatacatt

SEQ ID NO: 283635 - DNA, 33 bp, Homo sapien
ttttaagtttaatgccaaagatcacaacatggg

SEQ ID NO: 283636 - DNA, 33 bp, Homo sapien
ttttaagtttaatgccgaagatcacaacatggg

SEQ ID NO: 283637 - DNA, 33 bp, Homo sapien
aaacaagataccataaaagtcagagaacacaga

SEQ ID NO: 283638 - DNA, 33 bp, Homo sapien
aaacaagataccataagagtcagagaacacaga

SEQ ID NO: 283639 - DNA, 33 bp, Homo sapien
tttatttttcacatacactattctgctctaagt

SEQ ID NO: 283640 - DNA, 33 bp, Homo sapien
tttatttttcacataccctattctgctctaagt

SEQ ID NO: 283641 - DNA, 33 bp, Homo sapien
tgtcgagagactgatacgtttttcagtttttca

SEQ ID NO: 283642 - DNA, 33 bp, Homo sapien
tgtcgagagactgatatgtttttcagtttttca

SEQ ID NO: 283643 - DNA, 33 bp, Homo sapien
atggactacaatgataacgtatcaattcttctc

SEQ ID NO: 283644 - DNA, 33 bp, Homo sapien
atggactacaatgatagcgtatcaattcttctc

SEQ ID NO: 283645 - DNA, 33 bp, Homo sapien
tgataaaacaagtcataaaattccctgtggtta

SEQ ID NO: 283646 - DNA, 33 bp, Homo sapien
tgataaaacaagtcatgaaattccctgtggtta

SEQ ID NO: 283647 - DNA, 33 bp, Homo sapien
cattttatattctggaagtttaaggtttttagg

SEQ ID NO: 283648 - DNA, 33 bp, Homo sapien
cattttatattctggaggtttaaggtttttagg

SEQ ID NO: 283649 - DNA, 33 bp, Homo sapien
ttttccttcagggaaccaatatactttctctag

SEQ ID NO: 283650 - DNA, 33 bp, Homo sapien
ttttccttcagggaacgaatatactttctctag

SEQ ID NO: 283651 - DNA, 33 bp, Homo sapien
tacgatcatctaggaaactgttgaaaatgcaga

SEQ ID NO: 283652 - DNA, 33 bp, Homo sapien
tacgatcatctaggaacctgttgaaaatgcaga

SEQ ID NO: 283653 - DNA, 33 bp, Homo sapien
tttatgtctcccaccaataattttttttctaaa

SEQ ID NO: 283654 - DNA, 33 bp, Homo sapien
tttatgtctcccaccagtaattttttttctaaa

SEQ ID NO: 283655 - DNA, 33 bp, Homo sapien
tcacccacagcctaaaaaacaagatgatgttta

SEQ ID NO: 283656 - DNA, 33 bp, Homo sapien
tcacccacagcctaaagaacaagatgatgttta

SEQ ID NO: 283657 - DNA, 33 bp, Homo sapien
gttcattaaatagctacacaaaactggttttat

SEQ ID NO: 283658 - DNA, 33 bp, Homo sapien
gttcattaaatagctatacaaaactggttttat

SEQ ID NO: 283659 - DNA, 33 bp, Homo sapien
tgtacagtaaaagtacagaagtacagtattata

SEQ ID NO: 283660 - DNA, 33 bp, Homo sapien
tgtacagtaaaagtacggaagtacagtattata

SEQ ID NO: 283661 - DNA, 33 bp, Homo sapien
ggacagttatggctcacgcagaaagtggtaatt

SEQ ID NO: 283662 - DNA, 33 bp, Homo sapien
ggacagttatggctcatgcagaaagtggtaatt

SEQ ID NO: 283663 - DNA, 33 bp, Homo sapien
catgcaagtccctcaacatccagttctaaaacc

SEQ ID NO: 283664 - DNA, 33 bp, Homo sapien
catgcaagtccctcaagatccagttctaaaacc

SEQ ID NO: 283665 - DNA, 33 bp, Homo sapien
aatcaatagaaacaaccctcttcacttgattga

SEQ ID NO: 283666 - DNA, 33 bp, Homo sapien
aatcaatagaaacaactctcttcacttgattga

SEQ ID NO: 283667 - DNA, 33 bp, Homo sapien
tttcatagatttttgcactcatttgaatgtaag

SEQ ID NO: 283668 - DNA, 33 bp, Homo sapien
tttcatagatttttgcgctcatttgaatgtaag

SEQ ID NO: 283669 - DNA, 33 bp, Homo sapien
ttgaggatgttagttacgtactgtcacatcaca

SEQ ID NO: 283670 - DNA, 33 bp, Homo sapien
ttgaggatgttagttatgtactgtcacatcaca

SEQ ID NO: 283671 - DNA, 33 bp, Homo sapien
tcagtgccttgacagacgagatgtttagtaaag

SEQ ID NO: 283672 - DNA, 33 bp, Homo sapien
tcagtgccttgacagatgagatgtttagtaaag

SEQ ID NO: 283673 - DNA, 33 bp, Homo sapien
tttccatataactataacaacctacacattgtt

SEQ ID NO: 283674 - DNA, 33 bp, Homo sapien
tttccatataactatagcaacctacacattgtt

SEQ ID NO: 283675 - DNA, 33 bp, Homo sapien
tggtaagcacattaacacttttgttatcatttt

SEQ ID NO: 283676 - DNA, 33 bp, Homo sapien
tggtaagcacattaacgcttttgttatcatttt

SEQ ID NO: 283677 - DNA, 33 bp, Homo sapien
ttcaagcccttgtgtgaatttgatagagtgaga

SEQ ID NO: 283678 - DNA, 33 bp, Homo sapien
ttcaagcccttgtgtgcatttgatagagtgaga

SEQ ID NO: 283679 - DNA, 33 bp, Homo sapien
catagcaacttataagacaattcactgtaatgg

SEQ ID NO: 283680 - DNA, 33 bp, Homo sapien
catagcaacttataagtcaattcactgtaatgg

SEQ ID NO: 283681 - DNA, 33 bp, Homo sapien
agggttattgtgaagaatatgtgacattacaca

SEQ ID NO: 283682 - DNA, 33 bp, Homo sapien
agggttattgtgaagagtatgtgacattacaca

SEQ ID NO: 283683 - DNA, 33 bp, Homo sapien
actgcatattcagaaacacttgtaaggttaaga

SEQ ID NO: 283684 - DNA, 33 bp, Homo sapien
actgcatattcagaaagacttgtaaggttaaga

SEQ ID NO: 283685 - DNA, 33 bp, Homo sapien
atcttagccctcatcaataagttgtagcattgg

SEQ ID NO: 283686 - DNA, 33 bp, Homo sapien
atcttagccctcatcactaagttgtagcattgg

SEQ ID NO: 283687 - DNA, 33 bp, Homo sapien
tttccgggcctctttaaagcagtaggtagcaca

SEQ ID NO: 283688 - DNA, 33 bp, Homo sapien
tttccgggcctctttagagcagtaggtagcaca

SEQ ID NO: 283689 - DNA, 33 bp, Homo sapien
agcgctcatagtatagaaaagtttgtgttccac

SEQ ID NO: 283690 - DNA, 33 bp, Homo sapien
agcgctcatagtataggaaagtttgtgttccac

SEQ ID NO: 283691 - DNA, 33 bp, Homo sapien
agaactctgtcacaaaacagtactagggagatg

SEQ ID NO: 283692 - DNA, 33 bp, Homo sapien
agaactctgtcacaaagcagtactagggagatg

SEQ ID NO: 283693 - DNA, 33 bp, Homo sapien
aacctgttaggtcctccagtgcaggatgtactt

SEQ ID NO: 283694 - DNA, 33 bp, Homo sapien
aacctgttaggtcctctagtgcaggatgtactt

SEQ ID NO: 283695 - DNA, 33 bp, Homo sapien
atttgttaatgtaccacaaagtatgagagagtc

SEQ ID NO: 283696 - DNA, 33 bp, Homo sapien
atttgttaatgtaccagaaagtatgagagagtc

SEQ ID NO: 283697 - DNA, 33 bp, Homo sapien
tgaggaaggatctatcaaaggaggaatgtaggg

SEQ ID NO: 283698 - DNA, 33 bp, Homo sapien
tgaggaaggatctatccaaggaggaatgtaggg

SEQ ID NO: 283699 - DNA, 33 bp, Homo sapien
aaattattctcaattacgaaagtgatacaaaat

SEQ ID NO: 283700 - DNA, 33 bp, Homo sapien
aaattattctcaattatgaaagtgatacaaaat

SEQ ID NO: 283701 - DNA, 33 bp, Homo sapien
tcaacaatccctcctcactaagctcagtcattt

SEQ ID NO: 283702 - DNA, 33 bp, Homo sapien
tcaacaatccctcctctctaagctcagtcattt

SEQ ID NO: 283703 - DNA, 33 bp, Homo sapien
gatacagagtctaaggaaatcccaaattgaaca

SEQ ID NO: 283704 - DNA, 33 bp, Homo sapien
gatacagagtctaagggaatcccaaattgaaca

SEQ ID NO: 283705 - DNA, 33 bp, Homo sapien
atgtactgaagacagagatatttcactaaaatg

SEQ ID NO: 283706 - DNA, 33 bp, Homo sapien
atgtactgaagacagatatatttcactaaaatg

SEQ ID NO: 283707 - DNA, 33 bp, Homo sapien
cttaatgggaatttgccattctgcccttggata

SEQ ID NO: 283708 - DNA, 33 bp, Homo sapien
cttaatgggaatttgctattctgcccttggata

SEQ ID NO: 283709 - DNA, 33 bp, Homo sapien
tatgaattttactttcacgatcacacagctaaa

SEQ ID NO: 283710 - DNA, 33 bp, Homo sapien
tatgaattttactttcgcgatcacacagctaaa

SEQ ID NO: 283711 - DNA, 33 bp, Homo sapien
tcagcataatgttttccctctcagatcttgaag

SEQ ID NO: 283712 - DNA, 33 bp, Homo sapien
tcagcataatgttttcgctctcagatcttgaag

SEQ ID NO: 283713 - DNA, 33 bp, Homo sapien
taaatatagatcgaaaaattaaagagcctccat

SEQ ID NO: 283714 - DNA, 33 bp, Homo sapien
taaatatagatcgaaagattaaagagcctccat

SEQ ID NO: 283715 - DNA, 33 bp, Homo sapien
caaagagcaacatgtaaccattggagcattttt

SEQ ID NO: 283716 - DNA, 33 bp, Homo sapien
caaagagcaacatgtagccattggagcattttt

SEQ ID NO: 283717 - DNA, 33 bp, Homo sapien
ccccaatcaaggtgacaatcaacatgtctttag

SEQ ID NO: 283718 - DNA, 33 bp, Homo sapien
ccccaatcaaggtgacgatcaacatgtctttag

SEQ ID NO: 283719 - DNA, 33 bp, Homo sapien
taagtgttgggagatgaacttccagtggctttt

SEQ ID NO: 283720 - DNA, 33 bp, Homo sapien
taagtgttgggagatggacttccagtggctttt

SEQ ID NO: 283721 - DNA, 33 bp, Homo sapien
tgtttctgcagggctacgcttaatgaacagaat

SEQ ID NO: 283722 - DNA, 33 bp, Homo sapien
tgtttctgcagggctatgcttaatgaacagaat

SEQ ID NO: 283723 - DNA, 33 bp, Homo sapien
ttggtgagataacgcaaatgagtgtgcagattg

SEQ ID NO: 283724 - DNA, 33 bp, Homo sapien
ttggtgagataacgcatatgagtgtgcagattg

SEQ ID NO: 283725 - DNA, 33 bp, Homo sapien
aaaatgctgctgtttacagactgaatttctttt

SEQ ID NO: 283726 - DNA, 33 bp, Homo sapien
aaaatgctgctgtttatagactgaatttctttt

SEQ ID NO: 283727 - DNA, 33 bp, Homo sapien
actttattctcaacaacgatgttttttgaatag

SEQ ID NO: 283728 - DNA, 33 bp, Homo sapien
actttattctcaacaatgatgttttttgaatag

SEQ ID NO: 283729 - DNA, 33 bp, Homo sapien
ctcccaaaagcataaacaacatagatgaaagat

SEQ ID NO: 283730 - DNA, 33 bp, Homo sapien
ctcccaaaagcataaagaacatagatgaaagat

SEQ ID NO: 283731 - DNA, 33 bp, Homo sapien
agtcagaaaatctacaaagtgacaataaagcac

SEQ ID NO: 283732 - DNA, 33 bp, Homo sapien
agtcagaaaatctacatagtgacaataaagcac

SEQ ID NO: 283733 - DNA, 33 bp, Homo sapien
ttttggatatttcagcgacccaaaatcaaatct

SEQ ID NO: 283734 - DNA, 33 bp, Homo sapien
ttttggatatttcagctacccaaaatcaaatct

SEQ ID NO: 283735 - DNA, 33 bp, Homo sapien
ggtgtttgttatgctgcacaatttgtcaaatac

SEQ ID NO: 283736 - DNA, 33 bp, Homo sapien
ggtgtttgttatgctgtacaatttgtcaaatac

SEQ ID NO: 283737 - DNA, 33 bp, Homo sapien
aatatacacaggaaagaaaaaaatgtgcaatta

SEQ ID NO: 283738 - DNA, 33 bp, Homo sapien
aatatacacaggaaaggaaaaaatgtgcaatta

SEQ ID NO: 283739 - DNA, 33 bp, Homo sapien
gaaaccaatgctcacagaggggcagcaatattc

SEQ ID NO: 283740 - DNA, 33 bp, Homo sapien
gaaaccaatgctcacataggggcagcaatattc

SEQ ID NO: 283741 - DNA, 33 bp, Homo sapien
ttgaagtgcttatatcgagtgaataaaagagtc

SEQ ID NO: 283742 - DNA, 33 bp, Homo sapien
ttgaagtgcttatatctagtgaataaaagagtc

SEQ ID NO: 283743 - DNA, 33 bp, Homo sapien
agaacacatttgcttcaacgcccgccactaagt

SEQ ID NO: 283744 - DNA, 33 bp, Homo sapien
agaacacatttgcttctacgcccgccactaagt

SEQ ID NO: 283745 - DNA, 33 bp, Homo sapien
taagctaacatgaatactatctgaagttctatt

SEQ ID NO: 283746 - DNA, 33 bp, Homo sapien
taagctaacatgaatagtatctgaagttctatt

SEQ ID NO: 283747 - DNA, 33 bp, Homo sapien
atatttatttgttaaaagtgaaattttcattgc

SEQ ID NO: 283748 - DNA, 33 bp, Homo sapien
atatttatttgttaaaggtgaaattttcattgc

SEQ ID NO: 283749 - DNA, 33 bp, Homo sapien
aggagtttgcattcttcaaatgttttatttaag

SEQ ID NO: 283750 - DNA, 33 bp, Homo sapien
aggagtttgcattcttgaaatgttttatttaag

SEQ ID NO: 283751 - DNA, 33 bp, Homo sapien
cttatgtattaacaagcatatagcgattaaatt

SEQ ID NO: 283752 - DNA, 33 bp, Homo sapien
cttatgtattaacaagtatatagcgattaaatt

SEQ ID NO: 283753 - DNA, 33 bp, Homo sapien
aggaagtgacagggcaactctgaggcataaaaa

SEQ ID NO: 283754 - DNA, 33 bp, Homo sapien
aggaagtgacagggcacctctgaggcataaaaa

SEQ ID NO: 283755 - DNA, 33 bp, Homo sapien
gtcatcttgcagctgacgtgcccaatactgggg

SEQ ID NO: 283756 - DNA, 33 bp, Homo sapien
gtcatcttgcagctgatgtgcccaatactgggg

SEQ ID NO: 283757 - DNA, 33 bp, Homo sapien
gatactctactacccacagcaatataccctttc

SEQ ID NO: 283758 - DNA, 33 bp, Homo sapien
gatactctactacccatagcaatataccctttc

SEQ ID NO: 283759 - DNA, 33 bp, Homo sapien
ttctacattaactctcaattagttttactctca

SEQ ID NO: 283760 - DNA, 33 bp, Homo sapien
ttctacattaactctccattagttttactctca

SEQ ID NO: 283761 - DNA, 33 bp, Homo sapien
ccatttaatggaaatgccatccaaccttagtgg

SEQ ID NO: 283762 - DNA, 33 bp, Homo sapien
ccatttaatggaaatgtcatccaaccttagtgg

SEQ ID NO: 283763 - DNA, 33 bp, Homo sapien
aagcttcagagaaagacaaaagccatggaacac

SEQ ID NO: 283764 - DNA, 33 bp, Homo sapien
aagcttcagagaaagataaaagccatggaacac

SEQ ID NO: 283765 - DNA, 33 bp, Homo sapien
ggagagataactcaacacaagtatgatttagac

SEQ ID NO: 283766 - DNA, 33 bp, Homo sapien
ggagagataactcaacgcaagtatgatttagac

SEQ ID NO: 283767 - DNA, 33 bp, Homo sapien
gaaaacagaggagaaaatacaacatgtcaactt

SEQ ID NO: 283768 - DNA, 33 bp, Homo sapien
gaaaacagaggagaaactacaacatgtcaactt

SEQ ID NO: 283769 - DNA, 33 bp, Homo sapien
gggaaagtgtcttcaaagtatgtcagagacctt

SEQ ID NO: 283770 - DNA, 33 bp, Homo sapien
gggaaagtgtcttcaaggtatgtcagagacctt

SEQ ID NO: 283771 - DNA, 33 bp, Homo sapien
acctggttaaacatcacggatacagggatttac

SEQ ID NO: 283772 - DNA, 33 bp, Homo sapien
acctggttaaacatcatggatacagggatttac

SEQ ID NO: 283773 - DNA, 33 bp, Homo sapien
aaatgtctaaagacgacagatgttgtcatggat

SEQ ID NO: 283774 - DNA, 33 bp, Homo sapien
aaatgtctaaagacgatagatgttgtcatggat

SEQ ID NO: 283775 - DNA, 33 bp, Homo sapien
gttggtattctcaaaggccaaatttagtattaa

SEQ ID NO: 283776 - DNA, 33 bp, Homo sapien
gttggtattctcaaagtccaaatttagtattaa

SEQ ID NO: 283777 - DNA, 33 bp, Homo sapien
ctcttgcttttgaaaacgctatcctcttcacac

SEQ ID NO: 283778 - DNA, 33 bp, Homo sapien
ctcttgcttttgaaaatgctatcctcttcacac

SEQ ID NO: 283779 - DNA, 33 bp, Homo sapien
tatgtcactgtttgtcactctaatatgtttatc

SEQ ID NO: 283780 - DNA, 33 bp, Homo sapien
tatgtcactgtttgtcgctctaatatgtttatc

SEQ ID NO: 283781 - DNA, 33 bp, Homo sapien
ttcttcaataacctaaagacaactaagaaggtt

SEQ ID NO: 283782 - DNA, 33 bp, Homo sapien
ttcttcaataacctaaggacaactaagaaggtt

SEQ ID NO: 283783 - DNA, 33 bp, Homo sapien
tagatatagtaaggcagtagcacaaaggaaaca

SEQ ID NO: 283784 - DNA, 33 bp, Homo sapien
tagatatagtaaggcattagcacaaaggaaaca

SEQ ID NO: 283785 - DNA, 33 bp, Homo sapien
aaggagatggaaaaggaagataatctcctggag

SEQ ID NO: 283786 - DNA, 33 bp, Homo sapien
aaggagatggaaaaggtagataatctcctggag

SEQ ID NO: 283787 - DNA, 33 bp, Homo sapien
ataatatcacatatcaataaggtgacctgggaa

SEQ ID NO: 283788 - DNA, 33 bp, Homo sapien
ataatatcacatatcagtaaggtgacctgggaa

SEQ ID NO: 283789 - DNA, 33 bp, Homo sapien
tagtttagtggcaagagaaatcagaatgtaatt

SEQ ID NO: 283790 - DNA, 33 bp, Homo sapien
tagtttagtggcaagataaatcagaatgtaatt

SEQ ID NO: 283791 - DNA, 33 bp, Homo sapien
ataggtcaattcaatacggcatcttaagttcca

SEQ ID NO: 283792 - DNA, 33 bp, Homo sapien
ataggtcaattcaatatggcatcttaagttcca

SEQ ID NO: 283793 - DNA, 33 bp, Homo sapien
agaaatctgggtgttacactggcagcaattaat

SEQ ID NO: 283794 - DNA, 33 bp, Homo sapien
agaaatctgggtgttatactggcagcaattaat

SEQ ID NO: 283795 - DNA, 33 bp, Homo sapien
gttatgtaattcattcaccatccatttattctt

SEQ ID NO: 283796 - DNA, 33 bp, Homo sapien
gttatgtaattcattctccatccatttattctt

SEQ ID NO: 283797 - DNA, 33 bp, Homo sapien
aatgattttcagggcaacctaaactgtttttta

SEQ ID NO: 283798 - DNA, 33 bp, Homo sapien
aatgattttcagggcagcctaaactgtttttta

SEQ ID NO: 283799 - DNA, 33 bp, Homo sapien
aggattttattcaaccacaatgcgccatgcaac

SEQ ID NO: 283800 - DNA, 33 bp, Homo sapien
aggattttattcaacctcaatgcgccatgcaac

SEQ ID NO: 283801 - DNA, 33 bp, Homo sapien
attgggtaatatttgaaggcgaggaagtgggat

SEQ ID NO: 283802 - DNA, 33 bp, Homo sapien
attgggtaatatttgagggcgaggaagtgggat

SEQ ID NO: 283803 - DNA, 33 bp, Homo sapien
cctgaggctgccctgccaacaggttcagacaag

SEQ ID NO: 283804 - DNA, 33 bp, Homo sapien
cctgaggctgccctgcgaacaggttcagacaag

SEQ ID NO: 283805 - DNA, 33 bp, Homo sapien
ttagaaagaaattttaaacagccaccatctgtc

SEQ ID NO: 283806 - DNA, 33 bp, Homo sapien
ttagaaagaaattttatacagccaccatctgtc

SEQ ID NO: 283807 - DNA, 33 bp, Homo sapien
tgtgtagtcttaattacggtcctacaaatgtac

SEQ ID NO: 283808 - DNA, 33 bp, Homo sapien
tgtgtagtcttaattagggtcctacaaatgtac

SEQ ID NO: 283809 - DNA, 33 bp, Homo sapien
ccttgaaagaggagaaaggaagcatctgatagc

SEQ ID NO: 283810 - DNA, 33 bp, Homo sapien
ccttgaaagaggagaagggaagcatctgatagc

SEQ ID NO: 283811 - DNA, 33 bp, Homo sapien
gtacttgaatgtcaaaatattcccaattggagc

SEQ ID NO: 283812 - DNA, 33 bp, Homo sapien
gtacttgaatgtcaaattattcccaattggagc

SEQ ID NO: 283813 - DNA, 33 bp, Homo sapien
ataccactggttttcaaaataacaagttatggt

SEQ ID NO: 283814 - DNA, 33 bp, Homo sapien
ataccactggttttcagaataacaagttatggt

SEQ ID NO: 283815 - DNA, 33 bp, Homo sapien
ttgacatcaaacacaaatcctggtaattgtgta

SEQ ID NO: 283816 - DNA, 33 bp, Homo sapien
ttgacatcaaacacaagtcctggtaattgtgta

SEQ ID NO: 283817 - DNA, 33 bp, Homo sapien
ttgatgtcaataaactaaatgagacacaatctt

SEQ ID NO: 283818 - DNA, 33 bp, Homo sapien
ttgatgtcaataaacttaatgagacacaatctt

SEQ ID NO: 283819 - DNA, 33 bp, Homo sapien
atttgctctaattgcacaagtttcagtcttact

SEQ ID NO: 283820 - DNA, 33 bp, Homo sapien
atttgctctaattgcataagtttcagtcttact

SEQ ID NO: 283821 - DNA, 33 bp, Homo sapien
acttactggacttggcacttgactgagagagtg

SEQ ID NO: 283822 - DNA, 33 bp, Homo sapien
acttactggacttggcgcttgactgagagagtg

SEQ ID NO: 283823 - DNA, 33 bp, Homo sapien
tttagagtccacttacacttgacttatatgtga

SEQ ID NO: 283824 - DNA, 33 bp, Homo sapien
tttagagtccacttacgcttgacttatatgtga

SEQ ID NO: 283825 - DNA, 33 bp, Homo sapien
atacaggttcaatcaaaataattcactcaaggg

SEQ ID NO: 283826 - DNA, 33 bp, Homo sapien
atacaggttcaatcaacataattcactcaaggg

SEQ ID NO: 283827 - DNA, 33 bp, Homo sapien
taatcaaaattgtaaacacggcaagtaaggatg

SEQ ID NO: 283828 - DNA, 33 bp, Homo sapien
taatcaaaattgtaaatacggcaagtaaggatg

SEQ ID NO: 283829 - DNA, 33 bp, Homo sapien
ttttgcaagacaaatactaagttccagaaaaag

SEQ ID NO: 283830 - DNA, 33 bp, Homo sapien
ttttgcaagacaaatagtaagttccagaaaaag

SEQ ID NO: 283831 - DNA, 33 bp, Homo sapien
agaactcgcccttggaagactttatttttgcat

SEQ ID NO: 283832 - DNA, 33 bp, Homo sapien
agaactcgcccttggatgactttatttttgcat

SEQ ID NO: 283833 - DNA, 33 bp, Homo sapien
tttcctgactttaaaacgtgtctgataaccaaa

SEQ ID NO: 283834 - DNA, 33 bp, Homo sapien
tttcctgactttaaaatgtgtctgataaccaaa

SEQ ID NO: 283835 - DNA, 33 bp, Homo sapien
cttttgctgtggagccacttttagactgcaact

SEQ ID NO: 283836 - DNA, 33 bp, Homo sapien
cttttgctgtggagccccttttagactgcaact

SEQ ID NO: 283837 - DNA, 33 bp, Homo sapien
atatacaataaaagagcaagagtagtttttcat

SEQ ID NO: 283838 - DNA, 33 bp, Homo sapien
atatacaataaaagagtaagagtagtttttcat

SEQ ID NO: 283839 - DNA, 33 bp, Homo sapien
gagagattcctgaaaccataaacaagtaggcat

SEQ ID NO: 283840 - DNA, 33 bp, Homo sapien
gagagattcctgaaactataaacaagtaggcat

SEQ ID NO: 283841 - DNA, 33 bp, Homo sapien
tttggccaacagaatccatcatactattgtcta

SEQ ID NO: 283842 - DNA, 33 bp, Homo sapien
tttggccaacagaatctatcatactattgtcta

SEQ ID NO: 283843 - DNA, 33 bp, Homo sapien
atgtttgtatgtttgcaaattttgagacactgt

SEQ ID NO: 283844 - DNA, 33 bp, Homo sapien
atgtttgtatgtttgcgaattttgagacactgt

SEQ ID NO: 283845 - DNA, 33 bp, Homo sapien
aatagctaccagaacggatgaacaagaatgaaa

SEQ ID NO: 283846 - DNA, 33 bp, Homo sapien
aatagctaccagaacgtatgaacaagaatgaaa

SEQ ID NO: 283847 - DNA, 33 bp, Homo sapien
tcgaggagaggtgaaaaagtatgaggaaggaac

SEQ ID NO: 283848 - DNA, 33 bp, Homo sapien
tcgaggagaggtgaaagagtatgaggaaggaac

SEQ ID NO: 283849 - DNA, 33 bp, Homo sapien
tttgaagtggaagggaagttatgaccccgaata

SEQ ID NO: 283850 - DNA, 33 bp, Homo sapien
tttgaagtggaagggatgttatgaccccgaata

SEQ ID NO: 283851 - DNA, 33 bp, Homo sapien
ttgctaaaatgttgcacagttagctaatagcaa

SEQ ID NO: 283852 - DNA, 33 bp, Homo sapien
ttgctaaaatgttgcatagttagctaatagcaa

SEQ ID NO: 283853 - DNA, 33 bp, Homo sapien
tctctaaagcttgccacgcttctctaggtggtt

SEQ ID NO: 283854 - DNA, 33 bp, Homo sapien
tctctaaagcttgccatgcttctctaggtggtt

SEQ ID NO: 283855 - DNA, 33 bp, Homo sapien
agtatggatcctgctgacactaacctgacaaac

SEQ ID NO: 283856 - DNA, 33 bp, Homo sapien
agtatggatcctgctgccactaacctgacaaac

SEQ ID NO: 283857 - DNA, 33 bp, Homo sapien
agctgactaacttttaagaagcaagtcagtttt

SEQ ID NO: 283858 - DNA, 33 bp, Homo sapien
agctgactaacttttatgaagcaagtcagtttt

SEQ ID NO: 283859 - DNA, 33 bp, Homo sapien
tggtcatgctcttaggcatatctgcattactaa

SEQ ID NO: 283860 - DNA, 33 bp, Homo sapien
tggtcatgctcttaggtatatctgcattactaa

SEQ ID NO: 283861 - DNA, 33 bp, Homo sapien
catgtgcaaaactataccaagtgagtccatatt

SEQ ID NO: 283862 - DNA, 33 bp, Homo sapien
catgtgcaaaactatatcaagtgagtccatatt

SEQ ID NO: 283863 - DNA, 33 bp, Homo sapien
attaccataatttgggacacaaggtggaactca

SEQ ID NO: 283864 - DNA, 33 bp, Homo sapien
attaccataatttgggtcacaaggtggaactca

SEQ ID NO: 283865 - DNA, 33 bp, Homo sapien
gaatatagcatcaaaaatagccacaattatcta

SEQ ID NO: 283866 - DNA, 33 bp, Homo sapien
gaatatagcatcaaaagtagccacaattatcta

SEQ ID NO: 283867 - DNA, 33 bp, Homo sapien
tgatatctgcaaataacgtagaggaagatagga

SEQ ID NO: 283868 - DNA, 33 bp, Homo sapien
tgatatctgcaaataatgtagaggaagatagga

SEQ ID NO: 283869 - DNA, 33 bp, Homo sapien
gtagaaaggcattctcaatgcagagagagttgt

SEQ ID NO: 283870 - DNA, 33 bp, Homo sapien
gtagaaaggcattctcgatgcagagagagttgt

SEQ ID NO: 283871 - DNA, 33 bp, Homo sapien
tgttgttgcgtttcaccgctgggaaatggaaag

SEQ ID NO: 283872 - DNA, 33 bp, Homo sapien
tgttgttgcgtttcactgctgggaaatggaaag

SEQ ID NO: 283873 - DNA, 33 bp, Homo sapien
cctcatcattccttaaactgtcttcttccaata

SEQ ID NO: 283874 - DNA, 33 bp, Homo sapien
cctcatcattccttaagctgtcttcttccaata

SEQ ID NO: 283875 - DNA, 33 bp, Homo sapien
ttttataaatgatgaaaccaattcaggtatatt

SEQ ID NO: 283876 - DNA, 33 bp, Homo sapien
ttttataaatgatgaagccaattcaggtatatt

SEQ ID NO: 283877 - DNA, 33 bp, Homo sapien
aagttaaaaacctagaccaattataggctgctg

SEQ ID NO: 283878 - DNA, 33 bp, Homo sapien
aagttaaaaacctagatcaattataggctgctg

SEQ ID NO: 283879 - DNA, 33 bp, Homo sapien
agcttaaaccaattaactagcttcagatgtcac

SEQ ID NO: 283880 - DNA, 33 bp, Homo sapien
agcttaaaccaattaagtagcttcagatgtcac

SEQ ID NO: 283881 - DNA, 33 bp, Homo sapien
ctcccagttttgctgaataagtgtgaagtgtca

SEQ ID NO: 283882 - DNA, 33 bp, Homo sapien
ctcccagttttgctgagtaagtgtgaagtgtca

SEQ ID NO: 283883 - DNA, 33 bp, Homo sapien
tcctctcctattagcacgttcttcattaaataa

SEQ ID NO: 283884 - DNA, 33 bp, Homo sapien
tcctctcctattagcatgttcttcattaaataa

SEQ ID NO: 283885 - DNA, 33 bp, Homo sapien
ttaaacttctgctatacgtcctagaaataaaaa

SEQ ID NO: 283886 - DNA, 33 bp, Homo sapien
ttaaacttctgctatatgtcctagaaataaaaa

SEQ ID NO: 283887 - DNA, 33 bp, Homo sapien
taagtttagaaaatgacgtttagcaagatattt

SEQ ID NO: 283888 - DNA, 33 bp, Homo sapien
taagtttagaaaatgatgtttagcaagatattt

SEQ ID NO: 283889 - DNA, 33 bp, Homo sapien
ttccattgagtgccaccgtattattgactcttc

SEQ ID NO: 283890 - DNA, 33 bp, Homo sapien
ttccattgagtgccactgtattattgactcttc

SEQ ID NO: 283891 - DNA, 33 bp, Homo sapien
catgttttatgtaacaaataagactctcaatgt

SEQ ID NO: 283892 - DNA, 33 bp, Homo sapien
catgttttatgtaacagataagactctcaatgt

SEQ ID NO: 283893 - DNA, 33 bp, Homo sapien
attctcctaatatctccacttttgcttgactgg

SEQ ID NO: 283894 - DNA, 33 bp, Homo sapien
attctcctaatatctctacttttgcttgactgg

SEQ ID NO: 283895 - DNA, 33 bp, Homo sapien
attatgaagagcaatcactttatacaaagtcta

SEQ ID NO: 283896 - DNA, 33 bp, Homo sapien
attatgaagagcaatcgctttatacaaagtcta

SEQ ID NO: 283897 - DNA, 33 bp, Homo sapien
agacaagtcagttgaaataaatgtattagaatg

SEQ ID NO: 283898 - DNA, 33 bp, Homo sapien
agacaagtcagttgaattaaatgtattagaatg

SEQ ID NO: 283899 - DNA, 33 bp, Homo sapien
gaaagacacacttacacgcactgggagtacagc

SEQ ID NO: 283900 - DNA, 33 bp, Homo sapien
gaaagacacacttacatgcactgggagtacagc

SEQ ID NO: 283901 - DNA, 33 bp, Homo sapien
ttttgtaaggtaaggccacagtcacaaattact

SEQ ID NO: 283902 - DNA, 33 bp, Homo sapien
ttttgtaaggtaaggcgacagtcacaaattact

SEQ ID NO: 283903 - DNA, 33 bp, Homo sapien
agaaatactttcaaccacgattctattttcctg

SEQ ID NO: 283904 - DNA, 33 bp, Homo sapien
agaaatactttcaaccgcgattctattttcctg

SEQ ID NO: 283905 - DNA, 33 bp, Homo sapien
gaacatgatgtgaaaaaagacagtttgatacag

SEQ ID NO: 283906 - DNA, 33 bp, Homo sapien
gaacatgatgtgaaaacagacagtttgatacag

SEQ ID NO: 283907 - DNA, 33 bp, Homo sapien
tactttgaaaacataccattagttcctggaaaa

SEQ ID NO: 283908 - DNA, 33 bp, Homo sapien
tactttgaaaacatactattagttcctggaaaa

SEQ ID NO: 283909 - DNA, 33 bp, Homo sapien
gattatgtgtgacaaacggtgttgtgaagtcct

SEQ ID NO: 283910 - DNA, 33 bp, Homo sapien
gattatgtgtgacaaatggtgttgtgaagtcct

SEQ ID NO: 283911 - DNA, 33 bp, Homo sapien
aagacttacggagatcagaatggttaaaatgta

SEQ ID NO: 283912 - DNA, 33 bp, Homo sapien
aagacttacggagatcggaatggttaaaatgta

SEQ ID NO: 283913 - DNA, 33 bp, Homo sapien
tgtggagtgggattgacattactggatactttg

SEQ ID NO: 283914 - DNA, 33 bp, Homo sapien
tgtggagtgggattgatattactggatactttg

SEQ ID NO: 283915 - DNA, 33 bp, Homo sapien
atatatactaaacataatagagtgcctgtgaag

SEQ ID NO: 283916 - DNA, 33 bp, Homo sapien
atatatactaaacatattagagtgcctgtgaag

SEQ ID NO: 283917 - DNA, 33 bp, Homo sapien
atcatctccacaccaaacgaaaatataaaagta

SEQ ID NO: 283918 - DNA, 33 bp, Homo sapien
atcatctccacaccaagcgaaaatataaaagta

SEQ ID NO: 283919 - DNA, 33 bp, Homo sapien
aaacatagccgtattccatacagtagtaactca

SEQ ID NO: 283920 - DNA, 33 bp, Homo sapien
aaacatagccgtattcgatacagtagtaactca

SEQ ID NO: 283921 - DNA, 33 bp, Homo sapien
tattcaactgtaagaagtgggtcaaactctaca

SEQ ID NO: 283922 - DNA, 33 bp, Homo sapien
tattcaactgtaagaattgggtcaaactctaca

SEQ ID NO: 283923 - DNA, 33 bp, Homo sapien
gcacatgaaaagctacagagtcagatatgcaaa

SEQ ID NO: 283924 - DNA, 33 bp, Homo sapien
gcacatgaaaagctacggagtcagatatgcaaa

SEQ ID NO: 283925 - DNA, 33 bp, Homo sapien
taaccaacacaaagaactggagatccacaaatt

SEQ ID NO: 283926 - DNA, 33 bp, Homo sapien
taaccaacacaaagaattggagatccacaaatt

SEQ ID NO: 283927 - DNA, 33 bp, Homo sapien
ctggaattaaagctacacaaaactgcttcatgt

SEQ ID NO: 283928 - DNA, 33 bp, Homo sapien
ctggaattaaagctacgcaaaactgcttcatgt

SEQ ID NO: 283929 - DNA, 33 bp, Homo sapien
ttacctcgggagataccactggagattaaggat

SEQ ID NO: 283930 - DNA, 33 bp, Homo sapien
ttacctcgggagatactactggagattaaggat

SEQ ID NO: 283931 - DNA, 33 bp, Homo sapien
cttggtgtgtctcaacaaaatagccacataggg

SEQ ID NO: 283932 - DNA, 33 bp, Homo sapien
cttggtgtgtctcaaccaaatagccacataggg

SEQ ID NO: 283933 - DNA, 33 bp, Homo sapien
ctctttatggcaatcacctggagttagctttca

SEQ ID NO: 283934 - DNA, 33 bp, Homo sapien
ctctttatggcaatcatctggagttagctttca

SEQ ID NO: 283935 - DNA, 33 bp, Homo sapien
atataatacattgccaaactcgtcctgattcca

SEQ ID NO: 283936 - DNA, 33 bp, Homo sapien
atataatacattgccacactcgtcctgattcca

SEQ ID NO: 283937 - DNA, 33 bp, Homo sapien
attttgcaaatacacacggcaatctgatactac

SEQ ID NO: 283938 - DNA, 33 bp, Homo sapien
attttgcaaatacacatggcaatctgatactac

SEQ ID NO: 283939 - DNA, 33 bp, Homo sapien
acatgatatacaaccaaaacaaacagaataagg

SEQ ID NO: 283940 - DNA, 33 bp, Homo sapien
acatgatatacaaccagaacaaacagaataagg

SEQ ID NO: 283941 - DNA, 33 bp, Homo sapien
gcattcatgcttatacaactgttatctatatgt

SEQ ID NO: 283942 - DNA, 33 bp, Homo sapien
gcattcatgcttatactactgttatctatatgt

SEQ ID NO: 283943 - DNA, 33 bp, Homo sapien
atatttcaggtattcaactttctaagaccacag

SEQ ID NO: 283944 - DNA, 33 bp, Homo sapien
atatttcaggtattcagctttctaagaccacag

SEQ ID NO: 283945 - DNA, 33 bp, Homo sapien
cctacttgtctatttgaaacagaacacctacaa

SEQ ID NO: 283946 - DNA, 33 bp, Homo sapien
cctacttgtctatttggaacagaacacctacaa

SEQ ID NO: 283947 - DNA, 33 bp, Homo sapien
ccagtaggggtgttcaaaattctcttgatagca

SEQ ID NO: 283948 - DNA, 33 bp, Homo sapien
ccagtaggggtgttcataattctcttgatagca

SEQ ID NO: 283949 - DNA, 33 bp, Homo sapien
ttcagctttgaactcacaatcattttgttatat

SEQ ID NO: 283950 - DNA, 33 bp, Homo sapien
ttcagctttgaactcataatcattttgttatat

SEQ ID NO: 283951 - DNA, 33 bp, Homo sapien
ttattcctttattccaagttgagtgaaggagga

SEQ ID NO: 283952 - DNA, 33 bp, Homo sapien
ttattcctttattccatgttgagtgaaggagga

SEQ ID NO: 283953 - DNA, 33 bp, Homo sapien
ctcactaaatctccaacatagactgttccctct

SEQ ID NO: 283954 - DNA, 33 bp, Homo sapien
ctcactaaatctccaatatagactgttccctct

SEQ ID NO: 283955 - DNA, 33 bp, Homo sapien
gccaatacaaaatgagaaaaggtatctatagta

SEQ ID NO: 283956 - DNA, 33 bp, Homo sapien
gccaatacaaaatgaggaaaggtatctatagta

SEQ ID NO: 283957 - DNA, 33 bp, Homo sapien
tttttctggatgcacaccttttactagcttgta

SEQ ID NO: 283958 - DNA, 33 bp, Homo sapien
tttttctggatgcacatcttttactagcttgta

SEQ ID NO: 283959 - DNA, 33 bp, Homo sapien
acatttgcactgaagacaaatttctcactgact

SEQ ID NO: 283960 - DNA, 33 bp, Homo sapien
acatttgcactgaagataaatttctcactgact

SEQ ID NO: 283961 - DNA, 33 bp, Homo sapien
aaaacaaacacaaaaacattactcatacttgac

SEQ ID NO: 283962 - DNA, 33 bp, Homo sapien
aaaacaaacacaaaaatattactcatacttgac

SEQ ID NO: 283963 - DNA, 33 bp, Homo sapien
tttctgtagcagtaaacggcaaagctcaatgta

SEQ ID NO: 283964 - DNA, 33 bp, Homo sapien
tttctgtagcagtaaatggcaaagctcaatgta

SEQ ID NO: 283965 - DNA, 33 bp, Homo sapien
atgttttcattctccaagagtgaattgaatgat

SEQ ID NO: 283966 - DNA, 33 bp, Homo sapien
atgttttcattctccacgagtgaattgaatgat

SEQ ID NO: 283967 - DNA, 33 bp, Homo sapien
attcctggacctgcaactctaccccacaaatac

SEQ ID NO: 283968 - DNA, 33 bp, Homo sapien
attcctggacctgcaattctaccccacaaatac

SEQ ID NO: 283969 - DNA, 33 bp, Homo sapien
tctaatggattttcaccgtactgcctgtatttg

SEQ ID NO: 283970 - DNA, 33 bp, Homo sapien
tctaatggattttcactgtactgcctgtatttg

SEQ ID NO: 283971 - DNA, 33 bp, Homo sapien
tatgctctcttcctaacatttgaaactgggtga

SEQ ID NO: 283972 - DNA, 33 bp, Homo sapien
tatgctctcttcctaatatttgaaactgggtga

SEQ ID NO: 283973 - DNA, 33 bp, Homo sapien
gtgatcatccatttatgaactacacatattttc

SEQ ID NO: 283974 - DNA, 33 bp, Homo sapien
gtgatcatccatttattaactacacatattttc

SEQ ID NO: 283975 - DNA, 33 bp, Homo sapien
aaatttaagagtctgcacaattggtatatggac

SEQ ID NO: 283976 - DNA, 33 bp, Homo sapien
aaatttaagagtctgcgcaattggtatatggac

SEQ ID NO: 283977 - DNA, 33 bp, Homo sapien
atccttggtggtttaacgagtttcatcaatttg

SEQ ID NO: 283978 - DNA, 33 bp, Homo sapien
atccttggtggtttaaggagtttcatcaatttg

SEQ ID NO: 283979 - DNA, 33 bp, Homo sapien
cttttgaaaacaatgcgaaaactggacaaaaca

SEQ ID NO: 283980 - DNA, 33 bp, Homo sapien
cttttgaaaacaatgctaaaactggacaaaaca

SEQ ID NO: 283981 - DNA, 33 bp, Homo sapien
gtttgagactagtgtcccatttccttgactgca

SEQ ID NO: 283982 - DNA, 33 bp, Homo sapien
gtttgagactagtgtcgcatttccttgactgca

SEQ ID NO: 283983 - DNA, 33 bp, Homo sapien
cagttctgtggaacaactgggctggtttctctt

SEQ ID NO: 283984 - DNA, 33 bp, Homo sapien
cagttctgtggaacaattgggctggtttctctt

SEQ ID NO: 283985 - DNA, 33 bp, Homo sapien
agcacacatggttcaagtaaatggtattcaacc

SEQ ID NO: 283986 - DNA, 33 bp, Homo sapien
agcacacatggttcaattaaatggtattcaacc

SEQ ID NO: 283987 - DNA, 33 bp, Homo sapien
taccttggaagaatcactatacttagaattatg

SEQ ID NO: 283988 - DNA, 33 bp, Homo sapien
taccttggaagaatcagtatacttagaattatg

SEQ ID NO: 283989 - DNA, 33 bp, Homo sapien
acctacagagaatctaaggaatcaagtgcatta

SEQ ID NO: 283990 - DNA, 33 bp, Homo sapien
acctacagagaatctacggaatcaagtgcatta

SEQ ID NO: 283991 - DNA, 33 bp, Homo sapien
ttttgggaattgaccacgtttgtaacatctcag

SEQ ID NO: 283992 - DNA, 33 bp, Homo sapien
ttttgggaattgaccatgtttgtaacatctcag

SEQ ID NO: 283993 - DNA, 33 bp, Homo sapien
tgtatcattgtacttaagtttgcaaaataatta

SEQ ID NO: 283994 - DNA, 33 bp, Homo sapien
tgtatcattgtacttacgtttgcaaaataatta

SEQ ID NO: 283995 - DNA, 33 bp, Homo sapien
ggaatattgataaagaatcaaaatttgtcgttt

SEQ ID NO: 283996 - DNA, 33 bp, Homo sapien
ggaatattgataaagattcaaaatttgtcgttt

SEQ ID NO: 283997 - DNA, 33 bp, Homo sapien
atgttggctgggagaaatattaattgtctgctg

SEQ ID NO: 283998 - DNA, 33 bp, Homo sapien
atgttggctgggagaagtattaattgtctgctg

SEQ ID NO: 283999 - DNA, 33 bp, Homo sapien
tcatcctgcttgctctaacattatcagacttca

SEQ ID NO: 284000 - DNA, 33 bp, Homo sapien
tcatcctgcttgctctgacattatcagacttca

SEQ ID NO: 284001 - DNA, 33 bp, Homo sapien
aatgaacaaagtggacaatatttttcacctgaa

SEQ ID NO: 284002 - DNA, 33 bp, Homo sapien
aatgaacaaagtggactatatttttcacctgaa

SEQ ID NO: 284003 - DNA, 33 bp, Homo sapien
tagtactcataggttccacagagatgtaccaat

SEQ ID NO: 284004 - DNA, 33 bp, Homo sapien
tagtactcataggttctacagagatgtaccaat

SEQ ID NO: 284005 - DNA, 33 bp, Homo sapien
agttctgttattttcaactgttacaggtagagc

SEQ ID NO: 284006 - DNA, 33 bp, Homo sapien
agttctgttattttcagctgttacaggtagagc

SEQ ID NO: 284007 - DNA, 33 bp, Homo sapien
aaagatttgagagttaataaaataggcttgttc

SEQ ID NO: 284008 - DNA, 33 bp, Homo sapien
aaagatttgagagttagtaaaataggcttgttc

SEQ ID NO: 284009 - DNA, 33 bp, Homo sapien
tttaggtttcaaaccactggacagagttagggt

SEQ ID NO: 284010 - DNA, 33 bp, Homo sapien
tttaggtttcaaaccattggacagagttagggt

SEQ ID NO: 284011 - DNA, 33 bp, Homo sapien
gaaaaccattgaagcactattgttcatccttct

SEQ ID NO: 284012 - DNA, 33 bp, Homo sapien
gaaaaccattgaagcattattgttcatccttct

SEQ ID NO: 284013 - DNA, 33 bp, Homo sapien
caaatgggacgttaacacaggacatcatctcaa

SEQ ID NO: 284014 - DNA, 33 bp, Homo sapien
caaatgggacgttaacgcaggacatcatctcaa

SEQ ID NO: 284015 - DNA, 33 bp, Homo sapien
gccctcaggtaaaatccgatctgcgagataact

SEQ ID NO: 284016 - DNA, 33 bp, Homo sapien
gccctcaggtaaaatctgatctgcgagataact

SEQ ID NO: 284017 - DNA, 33 bp, Homo sapien
cagaaagatcatgtagaaaaataattagacagt

SEQ ID NO: 284018 - DNA, 33 bp, Homo sapien
cagaaagatcatgtaggaaaataattagacagt

SEQ ID NO: 284019 - DNA, 33 bp, Homo sapien
acacattccttcaacaactttacttcctgctca

SEQ ID NO: 284020 - DNA, 33 bp, Homo sapien
acacattccttcaacagctttacttcctgctca

SEQ ID NO: 284021 - DNA, 33 bp, Homo sapien
tttgtacaggtgttaacgtgcttgtgttttaag

SEQ ID NO: 284022 - DNA, 33 bp, Homo sapien
tttgtacaggtgttaatgtgcttgtgttttaag

SEQ ID NO: 284023 - DNA, 33 bp, Homo sapien
ccctttcctgaggacccgaactttaactagaaa

SEQ ID NO: 284024 - DNA, 33 bp, Homo sapien
ccctttcctgaggacctgaactttaactagaaa

SEQ ID NO: 284025 - DNA, 33 bp, Homo sapien
tactttcattacctacagataagtatgatgtca

SEQ ID NO: 284026 - DNA, 33 bp, Homo sapien
tactttcattacctacggataagtatgatgtca

SEQ ID NO: 284027 - DNA, 33 bp, Homo sapien
tatatgtgtgctttagaaaatctggtagaatta

SEQ ID NO: 284028 - DNA, 33 bp, Homo sapien
tatatgtgtgctttagcaaatctggtagaatta

SEQ ID NO: 284029 - DNA, 33 bp, Homo sapien
agcagacatcttcctcgctgttcgtgttaaaat

SEQ ID NO: 284030 - DNA, 33 bp, Homo sapien
agcagacatcttcctctctgttcgtgttaaaat

SEQ ID NO: 284031 - DNA, 33 bp, Homo sapien
agcatctggatgaaaactgaaaatgtgaaccat

SEQ ID NO: 284032 - DNA, 33 bp, Homo sapien
agcatctggatgaaaattgaaaatgtgaaccat

SEQ ID NO: 284033 - DNA, 33 bp, Homo sapien
ttttcagttaatttccacatgacaaactgagac

SEQ ID NO: 284034 - DNA, 33 bp, Homo sapien
ttttcagttaatttccgcatgacaaactgagac

SEQ ID NO: 284035 - DNA, 33 bp, Homo sapien
aggtctagcaatctaacgtatagaattaggact

SEQ ID NO: 284036 - DNA, 33 bp, Homo sapien
aggtctagcaatctaatgtatagaattaggact

SEQ ID NO: 284037 - DNA, 33 bp, Homo sapien
tatagatggatgggggaataaaaacattgtggt

SEQ ID NO: 284038 - DNA, 33 bp, Homo sapien
tatagatggatggggggataaaaacattgtggt

SEQ ID NO: 284039 - DNA, 33 bp, Homo sapien
tagattagttaatgaacagatgtgaaatagttt

SEQ ID NO: 284040 - DNA, 33 bp, Homo sapien
tagattagttaatgaatagatgtgaaatagttt

SEQ ID NO: 284041 - DNA, 33 bp, Homo sapien
aaacattggatagataacagagttaatgtgaat

SEQ ID NO: 284042 - DNA, 33 bp, Homo sapien
aaacattggatagataccagagttaatgtgaat

SEQ ID NO: 284043 - DNA, 33 bp, Homo sapien
ggtatcttatttcctccgaacttgaggggtgtt

SEQ ID NO: 284044 - DNA, 33 bp, Homo sapien
ggtatcttatttcctctgaacttgaggggtgtt

SEQ ID NO: 284045 - DNA, 33 bp, Homo sapien
gatatcgctgaattcaaacattttataagcaca

SEQ ID NO: 284046 - DNA, 33 bp, Homo sapien
gatatcgctgaattcacacattttataagcaca

SEQ ID NO: 284047 - DNA, 33 bp, Homo sapien
ttaaagacttgttctacggatatgaggtagaag

SEQ ID NO: 284048 - DNA, 33 bp, Homo sapien
ttaaagacttgttctatggatatgaggtagaag

SEQ ID NO: 284049 - DNA, 33 bp, Homo sapien
taacatcaagcattcaccatttatatgtgttag

SEQ ID NO: 284050 - DNA, 33 bp, Homo sapien
taacatcaagcattcatcatttatatgtgttag

SEQ ID NO: 284051 - DNA, 33 bp, Homo sapien
ttcttctagacactcaaaaaccatgatttagga

SEQ ID NO: 284052 - DNA, 33 bp, Homo sapien
ttcttctagacactcagaaaccatgatttagga

SEQ ID NO: 284053 - DNA, 33 bp, Homo sapien
agatgatttctacaaaagttttattggactagt

SEQ ID NO: 284054 - DNA, 33 bp, Homo sapien
agatgatttctacaaaggttttattggactagt

SEQ ID NO: 284055 - DNA, 33 bp, Homo sapien
tttttaaatgagagtaccgatagcctaaaagag

SEQ ID NO: 284056 - DNA, 33 bp, Homo sapien
tttttaaatgagagtatcgatagcctaaaagag

SEQ ID NO: 284057 - DNA, 33 bp, Homo sapien
gtgaagtgtgtccaaacgttcagactaaataca

SEQ ID NO: 284058 - DNA, 33 bp, Homo sapien
gtgaagtgtgtccaaatgttcagactaaataca

SEQ ID NO: 284059 - DNA, 33 bp, Homo sapien
aaatattcagatgctaccattgttacacttctc

SEQ ID NO: 284060 - DNA, 33 bp, Homo sapien
aaatattcagatgctatcattgttacacttctc

SEQ ID NO: 284061 - DNA, 33 bp, Homo sapien
ttccattcaatctgacactacctgaagatagtg

SEQ ID NO: 284062 - DNA, 33 bp, Homo sapien
ttccattcaatctgacgctacctgaagatagtg

SEQ ID NO: 284063 - DNA, 33 bp, Homo sapien
tttagaaattatcaacagatacatacttgttac

SEQ ID NO: 284064 - DNA, 33 bp, Homo sapien
tttagaaattatcaactgatacatacttgttac

SEQ ID NO: 284065 - DNA, 33 bp, Homo sapien
caaaaggaatgatatccctgaatcttaacactc

SEQ ID NO: 284066 - DNA, 33 bp, Homo sapien
caaaaggaatgatatctctgaatcttaacactc

SEQ ID NO: 284067 - DNA, 33 bp, Homo sapien
ttcaaggtgaacactacgttctctgttacgtga

SEQ ID NO: 284068 - DNA, 33 bp, Homo sapien
ttcaaggtgaacactaggttctctgttacgtga

SEQ ID NO: 284069 - DNA, 33 bp, Homo sapien
gtgtaggatggtaacacaggccatagaaaaaga

SEQ ID NO: 284070 - DNA, 33 bp, Homo sapien
gtgtaggatggtaacataggccatagaaaaaga

SEQ ID NO: 284071 - DNA, 33 bp, Homo sapien
atgttaaggttcactacgcaaagatgaattggg

SEQ ID NO: 284072 - DNA, 33 bp, Homo sapien
atgttaaggttcactatgcaaagatgaattggg

SEQ ID NO: 284073 - DNA, 33 bp, Homo sapien
tcatattaccatcctaatacagcttacagctac

SEQ ID NO: 284074 - DNA, 33 bp, Homo sapien
tcatattaccatcctagtacagcttacagctac

SEQ ID NO: 284075 - DNA, 33 bp, Homo sapien
gttgtcgaatctcaaaacattgtctggaaccaa

SEQ ID NO: 284076 - DNA, 33 bp, Homo sapien
gttgtcgaatctcaaagcattgtctggaaccaa

SEQ ID NO: 284077 - DNA, 33 bp, Homo sapien
caaatggctcctggaacgaagaagtaacttcag

SEQ ID NO: 284078 - DNA, 33 bp, Homo sapien
caaatggctcctggaatgaagaagtaacttcag

SEQ ID NO: 284079 - DNA, 33 bp, Homo sapien
attcaagctaagaataaaatcaagaatgcaatc

SEQ ID NO: 284080 - DNA, 33 bp, Homo sapien
attcaagctaagaatacaatcaagaatgcaatc

SEQ ID NO: 284081 - DNA, 33 bp, Homo sapien
tccaagaggcaggacactgatgaatgaagcaat

SEQ ID NO: 284082 - DNA, 33 bp, Homo sapien
tccaagaggcaggacattgatgaatgaagcaat

SEQ ID NO: 284083 - DNA, 33 bp, Homo sapien
ttattaactgtcctcactccaatactgctgtgt

SEQ ID NO: 284084 - DNA, 33 bp, Homo sapien
ttattaactgtcctcattccaatactgctgtgt

SEQ ID NO: 284085 - DNA, 33 bp, Homo sapien
ttcaggcagcttcaaactctggcaagtgcctgg

SEQ ID NO: 284086 - DNA, 33 bp, Homo sapien
ttcaggcagcttcaaattctggcaagtgcctgg

SEQ ID NO: 284087 - DNA, 33 bp, Homo sapien
aatggcagctagctccaagtgattaccacaagc

SEQ ID NO: 284088 - DNA, 33 bp, Homo sapien
aatggcagctagctccgagtgattaccacaagc

SEQ ID NO: 284089 - DNA, 33 bp, Homo sapien
tggggaatctggagtgaatttgcatataatata

SEQ ID NO: 284090 - DNA, 33 bp, Homo sapien
tggggaatctggagtggatttgcatataatata

SEQ ID NO: 284091 - DNA, 33 bp, Homo sapien
aagttgaaaaatgggggcaaccaaacatccaac

SEQ ID NO: 284092 - DNA, 33 bp, Homo sapien
aagttgaaaaatggggtcaaccaaacatccaac

SEQ ID NO: 284093 - DNA, 33 bp, Homo sapien
tttggatttttagaaccatggccagaaatgagt

SEQ ID NO: 284094 - DNA, 33 bp, Homo sapien
tttggatttttagaactatggccagaaatgagt

SEQ ID NO: 284095 - DNA, 33 bp, Homo sapien
gcattgcattgtgtaactaaggggtataggttg

SEQ ID NO: 284096 - DNA, 33 bp, Homo sapien
gcattgcattgtgtaagtaaggggtataggttg

SEQ ID NO: 284097 - DNA, 33 bp, Homo sapien
atgtcatagtctcatccataagccaggttccca

SEQ ID NO: 284098 - DNA, 33 bp, Homo sapien
atgtcatagtctcatctataagccaggttccca

SEQ ID NO: 284099 - DNA, 33 bp, Homo sapien
gcatctcaagagtgaaaggcttttagcgattta

SEQ ID NO: 284100 - DNA, 33 bp, Homo sapien
gcatctcaagagtgaagggcttttagcgattta

SEQ ID NO: 284101 - DNA, 33 bp, Homo sapien
aatagttgagacatttaaaaaaaggagagaaga

SEQ ID NO: 284102 - DNA, 33 bp, Homo sapien
aatagttgagacattttaaaaaaggagagaaga

SEQ ID NO: 284103 - DNA, 33 bp, Homo sapien
tgacttactaggttacaaaaacaccatggctct

SEQ ID NO: 284104 - DNA, 33 bp, Homo sapien
tgacttactaggttaccaaaacaccatggctct

SEQ ID NO: 284105 - DNA, 33 bp, Homo sapien
atagaatatatgtacacgagtttgtgtgtgtga

SEQ ID NO: 284106 - DNA, 33 bp, Homo sapien
atagaatatatgtacatgagtttgtgtgtgtga

SEQ ID NO: 284107 - DNA, 33 bp, Homo sapien
agttttttactgttgaagtgaaagattatagac

SEQ ID NO: 284108 - DNA, 33 bp, Homo sapien
agttttttactgttgaggtgaaagattatagac

SEQ ID NO: 284109 - DNA, 33 bp, Homo sapien
tgaaactgaacatttaagttaaccgatggtgga

SEQ ID NO: 284110 - DNA, 33 bp, Homo sapien
tgaaactgaacatttacgttaaccgatggtgga

SEQ ID NO: 284111 - DNA, 33 bp, Homo sapien
ttttacccgttccataagctgcctttttatttt

SEQ ID NO: 284112 - DNA, 33 bp, Homo sapien
ttttacccgttccataggctgcctttttatttt

SEQ ID NO: 284113 - DNA, 33 bp, Homo sapien
ctagttcagcgctttacctaattcttaaatgag

SEQ ID NO: 284114 - DNA, 33 bp, Homo sapien
ctagttcagcgctttatctaattcttaaatgag

SEQ ID NO: 284115 - DNA, 33 bp, Homo sapien
tagaaagctgtaattgcaacaagatttgtcatc

SEQ ID NO: 284116 - DNA, 33 bp, Homo sapien
tagaaagctgtaattggaacaagatttgtcatc

SEQ ID NO: 284117 - DNA, 33 bp, Homo sapien
agactgtttattccaggaaagaacatgaaaaga

SEQ ID NO: 284118 - DNA, 33 bp, Homo sapien
agactgtttattccagtaaagaacatgaaaaga

SEQ ID NO: 284119 - DNA, 33 bp, Homo sapien
tatttcagtcctgttacgatgttagacattttt

SEQ ID NO: 284120 - DNA, 33 bp, Homo sapien
tatttcagtcctgttatgatgttagacattttt

SEQ ID NO: 284121 - DNA, 33 bp, Homo sapien
atgactacccagaataacttcataaaacacaaa

SEQ ID NO: 284122 - DNA, 33 bp, Homo sapien
atgactacccagaatatcttcataaaacacaaa

SEQ ID NO: 284123 - DNA, 33 bp, Homo sapien
tgatgggagaggcatccctgaaggtttctgaca

SEQ ID NO: 284124 - DNA, 33 bp, Homo sapien
tgatgggagaggcatctctgaaggtttctgaca

SEQ ID NO: 284125 - DNA, 33 bp, Homo sapien
ccctggagtttagcaagaccccaagctggtgca

SEQ ID NO: 284126 - DNA, 33 bp, Homo sapien
ccctggagtttagcaataccccaagctggtgca

SEQ ID NO: 284127 - DNA, 33 bp, Homo sapien
ttatctatctgaggcaatctattcttttttgtt

SEQ ID NO: 284128 - DNA, 33 bp, Homo sapien
ttatctatctgaggcagtctattcttttttgtt

SEQ ID NO: 284129 - DNA, 33 bp, Homo sapien
aaatgtgtataagatccccatgaggaaaactac

SEQ ID NO: 284130 - DNA, 33 bp, Homo sapien
aaatgtgtataagatctccatgaggaaaactac

SEQ ID NO: 284131 - DNA, 33 bp, Homo sapien
tagaccaaaacaaatacagtctgctgatctttg

SEQ ID NO: 284132 - DNA, 33 bp, Homo sapien
tagaccaaaacaaatatagtctgctgatctttg

SEQ ID NO: 284133 - DNA, 33 bp, Homo sapien
taaaccatcttccaaagtgaatgtaccattttg

SEQ ID NO: 284134 - DNA, 33 bp, Homo sapien
taaaccatcttccaaattgaatgtaccattttg

SEQ ID NO: 284135 - DNA, 33 bp, Homo sapien
attatctgtactaccactcattatcctgtaaaa

SEQ ID NO: 284136 - DNA, 33 bp, Homo sapien
attatctgtactaccattcattatcctgtaaaa

SEQ ID NO: 284137 - DNA, 33 bp, Homo sapien
ccaacaaaccactatcaactgttgtttcttata

SEQ ID NO: 284138 - DNA, 33 bp, Homo sapien
ccaacaaaccactatcgactgttgtttcttata

SEQ ID NO: 284139 - DNA, 33 bp, Homo sapien
acctcactctacctaaactagatagaatggatt

SEQ ID NO: 284140 - DNA, 33 bp, Homo sapien
acctcactctacctaacctagatagaatggatt

SEQ ID NO: 284141 - DNA, 33 bp, Homo sapien
tgtttgtgttctttgcaactaaaagaagctaac

SEQ ID NO: 284142 - DNA, 33 bp, Homo sapien
tgtttgtgttctttgccactaaaagaagctaac

SEQ ID NO: 284143 - DNA, 33 bp, Homo sapien
atgaataaaagacagaagatccaactgaaagga

SEQ ID NO: 284144 - DNA, 33 bp, Homo sapien
atgaataaaagacagacgatccaactgaaagga

SEQ ID NO: 284145 - DNA, 33 bp, Homo sapien
tgattctgactgacctaagacaccctggttttc

SEQ ID NO: 284146 - DNA, 33 bp, Homo sapien
tgattctgactgacctgagacaccctggttttc

SEQ ID NO: 284147 - DNA, 33 bp, Homo sapien
aagaaaaaagcaacagacctttaatatttcaag

SEQ ID NO: 284148 - DNA, 33 bp, Homo sapien
aagaaaaaagcaacaggcctttaatatttcaag

SEQ ID NO: 284149 - DNA, 33 bp, Homo sapien
ttaaaactgcaacttagatgccttcttttagat

SEQ ID NO: 284150 - DNA, 33 bp, Homo sapien
ttaaaactgcaacttatatgccttcttttagat

SEQ ID NO: 284151 - DNA, 33 bp, Homo sapien
aaagaaaagggtactacagctgcatgaatagaa

SEQ ID NO: 284152 - DNA, 33 bp, Homo sapien
aaagaaaagggtactatagctgcatgaatagaa

SEQ ID NO: 284153 - DNA, 33 bp, Homo sapien
tattctcacaatccacaaactcttcctgttagt

SEQ ID NO: 284154 - DNA, 33 bp, Homo sapien
tattctcacaatccacgaactcttcctgttagt

SEQ ID NO: 284155 - DNA, 33 bp, Homo sapien
attcctgctaagacaaagctattggtagaagac

SEQ ID NO: 284156 - DNA, 33 bp, Homo sapien
attcctgctaagacaaggctattggtagaagac

SEQ ID NO: 284157 - DNA, 33 bp, Homo sapien
gtcagtttagtaagaaatgtcctacccttgatg

SEQ ID NO: 284158 - DNA, 33 bp, Homo sapien
gtcagtttagtaagaattgtcctacccttgatg

SEQ ID NO: 284159 - DNA, 33 bp, Homo sapien
aacaatagctgggaaactatatgatttgatgaa

SEQ ID NO: 284160 - DNA, 33 bp, Homo sapien
aacaatagctgggaaagtatatgatttgatgaa

SEQ ID NO: 284161 - DNA, 33 bp, Homo sapien
taatacatggaacaacaactgtaaaaatcaatg

SEQ ID NO: 284162 - DNA, 33 bp, Homo sapien
taatacatggaacaaccactgtaaaaatcaatg

SEQ ID NO: 284163 - DNA, 33 bp, Homo sapien
caaaataaatgctacaaggacataaaaatgttt

SEQ ID NO: 284164 - DNA, 33 bp, Homo sapien
caaaataaatgctacagggacataaaaatgttt

SEQ ID NO: 284165 - DNA, 33 bp, Homo sapien
aactactcccattactcaattgcaaagctgctt

SEQ ID NO: 284166 - DNA, 33 bp, Homo sapien
aactactcccattactgaattgcaaagctgctt

SEQ ID NO: 284167 - DNA, 33 bp, Homo sapien
aatgtgtaggactttcgctctattctctctctc

SEQ ID NO: 284168 - DNA, 33 bp, Homo sapien
aatgtgtaggactttctctctattctctctctc

SEQ ID NO: 284169 - DNA, 33 bp, Homo sapien
atatgagaaggaaaaaattactgatgcagccag

SEQ ID NO: 284170 - DNA, 33 bp, Homo sapien
atatgagaaggaaaaatttactgatgcagccag

SEQ ID NO: 284171 - DNA, 33 bp, Homo sapien
tctagaactgcccaagaagaacctatccaccca

SEQ ID NO: 284172 - DNA, 33 bp, Homo sapien
tctagaactgcccaagcagaacctatccaccca

SEQ ID NO: 284173 - DNA, 33 bp, Homo sapien
atgtcagagcaggcacaggtactaacagaagta

SEQ ID NO: 284174 - DNA, 33 bp, Homo sapien
atgtcagagcaggcacgggtactaacagaagta

SEQ ID NO: 284175 - DNA, 33 bp, Homo sapien
taacaagagaaattagacagtttcaaaccaatt

SEQ ID NO: 284176 - DNA, 33 bp, Homo sapien
taacaagagaaattagtcagtttcaaaccaatt

SEQ ID NO: 284177 - DNA, 33 bp, Homo sapien
gcatccattgtaataacaagcaattggaatcaa

SEQ ID NO: 284178 - DNA, 33 bp, Homo sapien
gcatccattgtaataataagcaattggaatcaa

SEQ ID NO: 284179 - DNA, 33 bp, Homo sapien
catccataccacaaaacataaatgagtgaaatt

SEQ ID NO: 284180 - DNA, 33 bp, Homo sapien
catccataccacaaaatataaatgagtgaaatt

SEQ ID NO: 284181 - DNA, 33 bp, Homo sapien
atcattactccctaacaattctttgccctcatt

SEQ ID NO: 284182 - DNA, 33 bp, Homo sapien
atcattactccctaacgattctttgccctcatt

SEQ ID NO: 284183 - DNA, 33 bp, Homo sapien
acaaaagtaaactgccaaaagtataaccctact

SEQ ID NO: 284184 - DNA, 33 bp, Homo sapien
acaaaagtaaactgcccaaagtataaccctact

SEQ ID NO: 284185 - DNA, 33 bp, Homo sapien
gacaattcatcaattacattctctgtattttcc

SEQ ID NO: 284186 - DNA, 33 bp, Homo sapien
gacaattcatcaattatattctctgtattttcc

SEQ ID NO: 284187 - DNA, 33 bp, Homo sapien
cgatcgtttctatccaatgaataattaggggaa

SEQ ID NO: 284188 - DNA, 33 bp, Homo sapien
cgatcgtttctatccagtgaataattaggggaa

SEQ ID NO: 284189 - DNA, 33 bp, Homo sapien
ttccttgaatcagacaaatctgtgtcaataccc

SEQ ID NO: 284190 - DNA, 33 bp, Homo sapien
ttccttgaatcagacagatctgtgtcaataccc

SEQ ID NO: 284191 - DNA, 33 bp, Homo sapien
ataaagtgcatactcacgaggggaaaatgataa

SEQ ID NO: 284192 - DNA, 33 bp, Homo sapien
ataaagtgcatactcaggaggggaaaatgataa

SEQ ID NO: 284193 - DNA, 33 bp, Homo sapien
ttaaaaaaagatgcaactgtgtcatttaaagtt

SEQ ID NO: 284194 - DNA, 33 bp, Homo sapien
ttaaaaaaagatgcaattgtgtcatttaaagtt

SEQ ID NO: 284195 - DNA, 33 bp, Homo sapien
ataaacacatttctgactatagcatgaaataaa

SEQ ID NO: 284196 - DNA, 33 bp, Homo sapien
ataaacacatttctgagtatagcatgaaataaa

SEQ ID NO: 284197 - DNA, 33 bp, Homo sapien
aaaagaaaaactcgcacactgtgatgggtatgt

SEQ ID NO: 284198 - DNA, 33 bp, Homo sapien
aaaagaaaaactcgcatactgtgatgggtatgt

SEQ ID NO: 284199 - DNA, 33 bp, Homo sapien
tatgctgaataatctaagcaacagtaacacaat

SEQ ID NO: 284200 - DNA, 33 bp, Homo sapien
tatgctgaataatctaggcaacagtaacacaat

SEQ ID NO: 284201 - DNA, 33 bp, Homo sapien
atcatttaccaaaacaatgttccatgacatgtt

SEQ ID NO: 284202 - DNA, 33 bp, Homo sapien
atcatttaccaaaacattgttccatgacatgtt

SEQ ID NO: 284203 - DNA, 33 bp, Homo sapien
tcttgtgagaaatggaccaaattatatatatgt

SEQ ID NO: 284204 - DNA, 33 bp, Homo sapien
tcttgtgagaaatggatcaaattatatatatgt

SEQ ID NO: 284205 - DNA, 33 bp, Homo sapien
aagggaatgcataaacaacttctaccaatgtca

SEQ ID NO: 284206 - DNA, 33 bp, Homo sapien
aagggaatgcataaacgacttctaccaatgtca

SEQ ID NO: 284207 - DNA, 33 bp, Homo sapien
tttagtaagcaaataactgtggatttattgtga

SEQ ID NO: 284208 - DNA, 33 bp, Homo sapien
tttagtaagcaaataattgtggatttattgtga

SEQ ID NO: 284209 - DNA, 33 bp, Homo sapien
gcttatttttgctaaacgtattggccatttgaa

SEQ ID NO: 284210 - DNA, 33 bp, Homo sapien
gcttatttttgctaaaggtattggccatttgaa

SEQ ID NO: 284211 - DNA, 33 bp, Homo sapien
cgtaatcttgagaaaaacaaatttggaatgtaa

SEQ ID NO: 284212 - DNA, 33 bp, Homo sapien
cgtaatcttgagaaaagcaaatttggaatgtaa

SEQ ID NO: 284213 - DNA, 33 bp, Homo sapien
tcatgacactaaagcaatattacatagtagtta

SEQ ID NO: 284214 - DNA, 33 bp, Homo sapien
tcatgacactaaagcagtattacatagtagtta

SEQ ID NO: 284215 - DNA, 33 bp, Homo sapien
ttagtttttctctacaatcaatgtgtttctctt

SEQ ID NO: 284216 - DNA, 33 bp, Homo sapien
ttagtttttctctacattcaatgtgtttctctt

SEQ ID NO: 284217 - DNA, 33 bp, Homo sapien
attttggcccttgacaaaggtgactaccagaca

SEQ ID NO: 284218 - DNA, 33 bp, Homo sapien
attttggcccttgacagaggtgactaccagaca

SEQ ID NO: 284219 - DNA, 33 bp, Homo sapien
taactcatttaaaaaacgtcaaatgcagtgtca

SEQ ID NO: 284220 - DNA, 33 bp, Homo sapien
taactcatttaaaaaatgtcaaatgcagtgtca

SEQ ID NO: 284221 - DNA, 33 bp, Homo sapien
tcaagttaaaaacacaaatcgtaagcatctttc

SEQ ID NO: 284222 - DNA, 33 bp, Homo sapien
tcaagttaaaaacacatatcgtaagcatctttc

SEQ ID NO: 284223 - DNA, 33 bp, Homo sapien
ttcctaacagtgaaagcctaaggaagaagttaa

SEQ ID NO: 284224 - DNA, 33 bp, Homo sapien
ttcctaacagtgaaaggctaaggaagaagttaa

SEQ ID NO: 284225 - DNA, 33 bp, Homo sapien
ggagtaacgatggaataactaataaaatccaag

SEQ ID NO: 284226 - DNA, 33 bp, Homo sapien
ggagtaacgatggaatgactaataaaatccaag

SEQ ID NO: 284227 - DNA, 33 bp, Homo sapien
ttttaggtgaaacaggaaaaggataagtcaata

SEQ ID NO: 284228 - DNA, 33 bp, Homo sapien
ttttaggtgaaacaggcaaaggataagtcaata

SEQ ID NO: 284229 - DNA, 33 bp, Homo sapien
aatatataacaactcactctcacaagagcgaat

SEQ ID NO: 284230 - DNA, 33 bp, Homo sapien
aatatataacaactcagtctcacaagagcgaat

SEQ ID NO: 284231 - DNA, 33 bp, Homo sapien
ctggtcacgtatccaactgaatcaagagctaat

SEQ ID NO: 284232 - DNA, 33 bp, Homo sapien
ctggtcacgtatccaattgaatcaagagctaat

SEQ ID NO: 284233 - DNA, 33 bp, Homo sapien
ggggccgtactttgcaacgtcacaggggtagag

SEQ ID NO: 284234 - DNA, 33 bp, Homo sapien
ggggccgtactttgcatcgtcacaggggtagag

SEQ ID NO: 284235 - DNA, 33 bp, Homo sapien
aaggctctgcccctgaagcagacttgtgcctgg

SEQ ID NO: 284236 - DNA, 33 bp, Homo sapien
aaggctctgcccctgacgcagacttgtgcctgg

SEQ ID NO: 284237 - DNA, 33 bp, Homo sapien
tttctgattaatgacaacttatttaatatatat

SEQ ID NO: 284238 - DNA, 33 bp, Homo sapien
tttctgattaatgacaccttatttaatatatat

SEQ ID NO: 284239 - DNA, 33 bp, Homo sapien
taccagttgaagaagacacaatttccgcctgag

SEQ ID NO: 284240 - DNA, 33 bp, Homo sapien
taccagttgaagaagatacaatttccgcctgag

SEQ ID NO: 284241 - DNA, 33 bp, Homo sapien
gtgtagttatgggttcggaaaataaacattcac

SEQ ID NO: 284242 - DNA, 33 bp, Homo sapien
gtgtagttatgggttctgaaaataaacattcac

SEQ ID NO: 284243 - DNA, 33 bp, Homo sapien
tcaacacatgactaacacttctcatttcaaaaa

SEQ ID NO: 284244 - DNA, 33 bp, Homo sapien
tcaacacatgactaacgcttctcatttcaaaaa

SEQ ID NO: 284245 - DNA, 33 bp, Homo sapien
gctactgtttgtaaaaaaaagagcacataacac

SEQ ID NO: 284246 - DNA, 33 bp, Homo sapien
gctactgtttgtaaaataaagagcacataacac

SEQ ID NO: 284247 - DNA, 33 bp, Homo sapien
atgtagatatcttgacacctataataactacag

SEQ ID NO: 284248 - DNA, 33 bp, Homo sapien
atgtagatatcttgacgcctataataactacag

SEQ ID NO: 284249 - DNA, 33 bp, Homo sapien
tgtttttgtaaaaaaaatacctgttgatttaag

SEQ ID NO: 284250 - DNA, 33 bp, Homo sapien
tgtttttgtaaaaaaattacctgttgatttaag

SEQ ID NO: 284251 - DNA, 33 bp, Homo sapien
actcctctcatcattccctttgtgatacacttt

SEQ ID NO: 284252 - DNA, 33 bp, Homo sapien
actcctctcatcattctctttgtgatacacttt

SEQ ID NO: 284253 - DNA, 33 bp, Homo sapien
cttactctttaattcacactttatgtgcctcaa

SEQ ID NO: 284254 - DNA, 33 bp, Homo sapien
cttactctttaattcatactttatgtgcctcaa

SEQ ID NO: 284255 - DNA, 33 bp, Homo sapien
tattgtttatttacacacattctgaagtttttt

SEQ ID NO: 284256 - DNA, 33 bp, Homo sapien
tattgtttatttacacgcattctgaagtttttt

SEQ ID NO: 284257 - DNA, 33 bp, Homo sapien
atgaagccaaagatggaatataagtgaatggaa

SEQ ID NO: 284258 - DNA, 33 bp, Homo sapien
atgaagccaaagatggtatataagtgaatggaa

SEQ ID NO: 284259 - DNA, 33 bp, Homo sapien
agaaacctatagggtcacatttgatcttgggaa

SEQ ID NO: 284260 - DNA, 33 bp, Homo sapien
agaaacctatagggtcgcatttgatcttgggaa

SEQ ID NO: 284261 - DNA, 33 bp, Homo sapien
cagaggaaataaaagacgaattgctgtctctaa

SEQ ID NO: 284262 - DNA, 33 bp, Homo sapien
cagaggaaataaaagatgaattgctgtctctaa

SEQ ID NO: 284263 - DNA, 33 bp, Homo sapien
gaaaaacaatatgagaaaatgacaacttgagaa

SEQ ID NO: 284264 - DNA, 33 bp, Homo sapien
gaaaaacaatatgagagaatgacaacttgagaa

SEQ ID NO: 284265 - DNA, 33 bp, Homo sapien
gatttctctgtctcataaatatataaaacctga

SEQ ID NO: 284266 - DNA, 33 bp, Homo sapien
gatttctctgtctcattaatatataaaacctga

SEQ ID NO: 284267 - DNA, 33 bp, Homo sapien
gcagacaattttaaaaaggcagattctaagtaa

SEQ ID NO: 284268 - DNA, 33 bp, Homo sapien
gcagacaattttaaaagggcagattctaagtaa

SEQ ID NO: 284269 - DNA, 33 bp, Homo sapien
tagctatttacatgaaagttgtgtaatatcagc

SEQ ID NO: 284270 - DNA, 33 bp, Homo sapien
tagctatttacatgaaggttgtgtaatatcagc

SEQ ID NO: 284271 - DNA, 33 bp, Homo sapien
aatctcatatcttctcaaggttgatcaacacca

SEQ ID NO: 284272 - DNA, 33 bp, Homo sapien
aatctcatatcttctcgaggttgatcaacacca

SEQ ID NO: 284273 - DNA, 33 bp, Homo sapien
attccttctgaatgcaaactgttgatatccttc

SEQ ID NO: 284274 - DNA, 33 bp, Homo sapien
attccttctgaatgcagactgttgatatccttc

SEQ ID NO: 284275 - DNA, 33 bp, Homo sapien
tgttaaatgtcatataaatgctgaagtaatata

SEQ ID NO: 284276 - DNA, 33 bp, Homo sapien
tgttaaatgtcatatagatgctgaagtaatata

SEQ ID NO: 284277 - DNA, 33 bp, Homo sapien
ttttcagtcatgtgaacaaagatcttacgaatg

SEQ ID NO: 284278 - DNA, 33 bp, Homo sapien
ttttcagtcatgtgaataaagatcttacgaatg

SEQ ID NO: 284279 - DNA, 33 bp, Homo sapien
gagaaatgaggattccagaagtatggcaatgaa

SEQ ID NO: 284280 - DNA, 33 bp, Homo sapien
gagaaatgaggattccggaagtatggcaatgaa

SEQ ID NO: 284281 - DNA, 33 bp, Homo sapien
agctggaagattgagacagttgactggtcaggg

SEQ ID NO: 284282 - DNA, 33 bp, Homo sapien
agctggaagattgagagagttgactggtcaggg

SEQ ID NO: 284283 - DNA, 33 bp, Homo sapien
ttcctccccttcactgaaatagccaggtttcaa

SEQ ID NO: 284284 - DNA, 33 bp, Homo sapien
ttcctccccttcactggaatagccaggtttcaa

SEQ ID NO: 284285 - DNA, 33 bp, Homo sapien
caatatatgcatggaaaatttggctgcattcat

SEQ ID NO: 284286 - DNA, 33 bp, Homo sapien
caatatatgcatggaacatttggctgcattcat

SEQ ID NO: 284287 - DNA, 33 bp, Homo sapien
attcatttaattcatcacaatttcacctggatt

SEQ ID NO: 284288 - DNA, 33 bp, Homo sapien
attcatttaattcatcgcaatttcacctggatt

SEQ ID NO: 284289 - DNA, 33 bp, Homo sapien
tatgcaccacttcaaaatcctctgtcctcacct

SEQ ID NO: 284290 - DNA, 33 bp, Homo sapien
tatgcaccacttcaaactcctctgtcctcacct

SEQ ID NO: 284291 - DNA, 33 bp, Homo sapien
atacatacttgacctagtacttctctattttcc

SEQ ID NO: 284292 - DNA, 33 bp, Homo sapien
atacatacttgacctattacttctctattttcc

SEQ ID NO: 284293 - DNA, 33 bp, Homo sapien
ttggcataaatgtagcagatagtgagaataggt

SEQ ID NO: 284294 - DNA, 33 bp, Homo sapien
ttggcataaatgtagcggatagtgagaataggt

SEQ ID NO: 284295 - DNA, 33 bp, Homo sapien
tttctctgactaccaccggaggcataacaaacg

SEQ ID NO: 284296 - DNA, 33 bp, Homo sapien
tttctctgactaccactggaggcataacaaacg

SEQ ID NO: 284297 - DNA, 33 bp, Homo sapien
tggagatacatccaaaacagcaatgcatacatt

SEQ ID NO: 284298 - DNA, 33 bp, Homo sapien
tggagatacatccaaagcagcaatgcatacatt

SEQ ID NO: 284299 - DNA, 33 bp, Homo sapien
agttataaactctccccagatgcaaatgcagag

SEQ ID NO: 284300 - DNA, 33 bp, Homo sapien
agttataaactctccctagatgcaaatgcagag

SEQ ID NO: 284301 - DNA, 33 bp, Homo sapien
tgttccatgtgttttacgtgggtataagcctac

SEQ ID NO: 284302 - DNA, 33 bp, Homo sapien
tgttccatgtgttttatgtgggtataagcctac

SEQ ID NO: 284303 - DNA, 33 bp, Homo sapien
atttaataacttgcaaatccaccttcttctacc

SEQ ID NO: 284304 - DNA, 33 bp, Homo sapien
atttaataacttgcaagtccaccttcttctacc

SEQ ID NO: 284305 - DNA, 33 bp, Homo sapien
tacacatattgcacaacgttccaggctgttcga

SEQ ID NO: 284306 - DNA, 33 bp, Homo sapien
tacacatattgcacaatgttccaggctgttcga

SEQ ID NO: 284307 - DNA, 33 bp, Homo sapien
ttgtctactcttcgtgaactttagtgtttatct

SEQ ID NO: 284308 - DNA, 33 bp, Homo sapien
ttgtctactcttcgtgcactttagtgtttatct

SEQ ID NO: 284309 - DNA, 33 bp, Homo sapien
tcccaaaacagacagacaataggaagtagcatt

SEQ ID NO: 284310 - DNA, 33 bp, Homo sapien
tcccaaaacagacagagaataggaagtagcatt

SEQ ID NO: 284311 - DNA, 33 bp, Homo sapien
aacctgctcccactaacattataaccagaatga

SEQ ID NO: 284312 - DNA, 33 bp, Homo sapien
aacctgctcccactaatattataaccagaatga

SEQ ID NO: 284313 - DNA, 33 bp, Homo sapien
gtataactaagatggaccctaaggctaaggaga

SEQ ID NO: 284314 - DNA, 33 bp, Homo sapien
gtataactaagatggatcctaaggctaaggaga

SEQ ID NO: 284315 - DNA, 33 bp, Homo sapien
atttcataaaacgattcaagtcttccatttttt

SEQ ID NO: 284316 - DNA, 33 bp, Homo sapien
atttcataaaacgatttaagtcttccatttttt

SEQ ID NO: 284317 - DNA, 33 bp, Homo sapien
taaagaataaagtctgcatatatgacataaata

SEQ ID NO: 284318 - DNA, 33 bp, Homo sapien
taaagaataaagtctgtatatatgacataaata

SEQ ID NO: 284319 - DNA, 33 bp, Homo sapien
aatcattggacatacactctatgcagttactct

SEQ ID NO: 284320 - DNA, 33 bp, Homo sapien
aatcattggacatacattctatgcagttactct

SEQ ID NO: 284321 - DNA, 33 bp, Homo sapien
gtctttcattaggttcccaacatcttcctaaaa

SEQ ID NO: 284322 - DNA, 33 bp, Homo sapien
gtctttcattaggttctcaacatcttcctaaaa

SEQ ID NO: 284323 - DNA, 33 bp, Homo sapien
aggtaagatagttacaagacacaacacattgat

SEQ ID NO: 284324 - DNA, 33 bp, Homo sapien
aggtaagatagttacatgacacaacacattgat

SEQ ID NO: 284325 - DNA, 33 bp, Homo sapien
agacagtattgctctacattcaaagggaataat

SEQ ID NO: 284326 - DNA, 33 bp, Homo sapien
agacagtattgctctagattcaaagggaataat

SEQ ID NO: 284327 - DNA, 33 bp, Homo sapien
taaacagtatctggaacgtgataaactaaaatt

SEQ ID NO: 284328 - DNA, 33 bp, Homo sapien
taaacagtatctggaatgtgataaactaaaatt

SEQ ID NO: 284329 - DNA, 33 bp, Homo sapien
aaaacaatattttgaacgccttagggatgatat

SEQ ID NO: 284330 - DNA, 33 bp, Homo sapien
aaaacaatattttgaatgccttagggatgatat

SEQ ID NO: 284331 - DNA, 33 bp, Homo sapien
gaagaaagtaaactagaacaagatagtcattgt

SEQ ID NO: 284332 - DNA, 33 bp, Homo sapien
gaagaaagtaaactaggacaagatagtcattgt

SEQ ID NO: 284333 - DNA, 33 bp, Homo sapien
tcatgaacaaaacaaactgtcactgttgcaaaa

SEQ ID NO: 284334 - DNA, 33 bp, Homo sapien
tcatgaacaaaacaaattgtcactgttgcaaaa

SEQ ID NO: 284335 - DNA, 33 bp, Homo sapien
acttcacttttcaccaactgcattaattattct

SEQ ID NO: 284336 - DNA, 33 bp, Homo sapien
acttcacttttcaccagctgcattaattattct

SEQ ID NO: 284337 - DNA, 33 bp, Homo sapien
taaagtttgttgcctaagaaaataataagccat

SEQ ID NO: 284338 - DNA, 33 bp, Homo sapien
taaagtttgttgcctaggaaaataataagccat

SEQ ID NO: 284339 - DNA, 33 bp, Homo sapien
gacagaaaaatcctgaagttgttgctgagatac

SEQ ID NO: 284340 - DNA, 33 bp, Homo sapien
gacagaaaaatcctgacgttgttgctgagatac

SEQ ID NO: 284341 - DNA, 33 bp, Homo sapien
aagactggtattagaacctttgcaaaacacaca

SEQ ID NO: 284342 - DNA, 33 bp, Homo sapien
aagactggtattagaatctttgcaaaacacaca

SEQ ID NO: 284343 - DNA, 33 bp, Homo sapien
tctgcaatcttgctataactgctaattagttcc

SEQ ID NO: 284344 - DNA, 33 bp, Homo sapien
tctgcaatcttgctatgactgctaattagttcc

SEQ ID NO: 284345 - DNA, 33 bp, Homo sapien
tgtatgtggaaaatcccaaagaataaacaaaca

SEQ ID NO: 284346 - DNA, 33 bp, Homo sapien
tgtatgtggaaaatcctaaagaataaacaaaca

SEQ ID NO: 284347 - DNA, 33 bp, Homo sapien
caattataacagctgcaaacaaagacagtttta

SEQ ID NO: 284348 - DNA, 33 bp, Homo sapien
caattataacagctgcgaacaaagacagtttta

SEQ ID NO: 284349 - DNA, 33 bp, Homo sapien
aacaatttctcatcaacgggactaatttcagct

SEQ ID NO: 284350 - DNA, 33 bp, Homo sapien
aacaatttctcatcaatgggactaatttcagct

SEQ ID NO: 284351 - DNA, 33 bp, Homo sapien
tgaaggtttgcccttgaacttaacatcactgcc

SEQ ID NO: 284352 - DNA, 33 bp, Homo sapien
tgaaggtttgcccttggacttaacatcactgcc

SEQ ID NO: 284353 - DNA, 33 bp, Homo sapien
atgccacagtgtgtgaagcatctgttacttctt

SEQ ID NO: 284354 - DNA, 33 bp, Homo sapien
atgccacagtgtgtgacgcatctgttacttctt

SEQ ID NO: 284355 - DNA, 33 bp, Homo sapien
tcctagatgtgtaagacccataattcatgcaac

SEQ ID NO: 284356 - DNA, 33 bp, Homo sapien
tcctagatgtgtaagatccataattcatgcaac

SEQ ID NO: 284357 - DNA, 33 bp, Homo sapien
tttttttgaagctctacgaccaactataatttt

SEQ ID NO: 284358 - DNA, 33 bp, Homo sapien
tttttttgaagctctatgaccaactataatttt

SEQ ID NO: 284359 - DNA, 33 bp, Homo sapien
tgtgataatacaggcaataaagaggatccatgc

SEQ ID NO: 284360 - DNA, 33 bp, Homo sapien
tgtgataatacaggcagtaaagaggatccatgc

SEQ ID NO: 284361 - DNA, 33 bp, Homo sapien
gatcaaatgctcttcaagttatcctaaaaatgt

SEQ ID NO: 284362 - DNA, 33 bp, Homo sapien
gatcaaatgctcttcacgttatcctaaaaatgt

SEQ ID NO: 284363 - DNA, 33 bp, Homo sapien
attaagcactgaaaacagatcaaatgctcttca

SEQ ID NO: 284364 - DNA, 33 bp, Homo sapien
attaagcactgaaaacggatcaaatgctcttca

SEQ ID NO: 284365 - DNA, 33 bp, Homo sapien
cattatgccattctaacaaatgtagagctcatg

SEQ ID NO: 284366 - DNA, 33 bp, Homo sapien
cattatgccattctaagaaatgtagagctcatg

SEQ ID NO: 284367 - DNA, 33 bp, Homo sapien
cattctgcaataaaaagacatccacatgaatgt

SEQ ID NO: 284368 - DNA, 33 bp, Homo sapien
cattctgcaataaaaatacatccacatgaatgt

SEQ ID NO: 284369 - DNA, 33 bp, Homo sapien
ctgaggttttaatgcacaaagaagtataaattt

SEQ ID NO: 284370 - DNA, 33 bp, Homo sapien
ctgaggttttaatgcagaaagaagtataaattt

SEQ ID NO: 284371 - DNA, 33 bp, Homo sapien
aaaaggaggttggcaaaaagaaagtataaacat

SEQ ID NO: 284372 - DNA, 33 bp, Homo sapien
aaaaggaggttggcaagaagaaagtataaacat

SEQ ID NO: 284373 - DNA, 33 bp, Homo sapien
gaaatgttttcactgacatgattcttcatgtcc

SEQ ID NO: 284374 - DNA, 33 bp, Homo sapien
gaaatgttttcactgatatgattcttcatgtcc

SEQ ID NO: 284375 - DNA, 33 bp, Homo sapien
aagaaccaaaagaccacctttatctcctcttaa

SEQ ID NO: 284376 - DNA, 33 bp, Homo sapien
aagaaccaaaagaccatctttatctcctcttaa

SEQ ID NO: 284377 - DNA, 33 bp, Homo sapien
ggtcaatctgggttagcaaatcaagatcatcca

SEQ ID NO: 284378 - DNA, 33 bp, Homo sapien
ggtcaatctgggttagtaaatcaagatcatcca

SEQ ID NO: 284379 - DNA, 33 bp, Homo sapien
aacctaacgagattacaaaaactctatctaaat

SEQ ID NO: 284380 - DNA, 33 bp, Homo sapien
aacctaacgagattacgaaaactctatctaaat

SEQ ID NO: 284381 - DNA, 33 bp, Homo sapien
tagtcaaatttctcatcacttgctccaacacat

SEQ ID NO: 284382 - DNA, 33 bp, Homo sapien
tagtcaaatttctcattacttgctccaacacat

SEQ ID NO: 284383 - DNA, 33 bp, Homo sapien
gtctgagttcagatcacgtattaggcactgact

SEQ ID NO: 284384 - DNA, 33 bp, Homo sapien
gtctgagttcagatcatgtattaggcactgact

SEQ ID NO: 284385 - DNA, 33 bp, Homo sapien
agattatctgagacaaagtaccatgagaatgat

SEQ ID NO: 284386 - DNA, 33 bp, Homo sapien
agattatctgagacaatgtaccatgagaatgat

SEQ ID NO: 284387 - DNA, 33 bp, Homo sapien
gaaatctctctcctcaaagatgtagctccagta

SEQ ID NO: 284388 - DNA, 33 bp, Homo sapien
gaaatctctctcctcacagatgtagctccagta

SEQ ID NO: 284389 - DNA, 33 bp, Homo sapien
atgagaggcttaaaaaggatttcaatgactaaa

SEQ ID NO: 284390 - DNA, 33 bp, Homo sapien
atgagaggcttaaaaatgatttcaatgactaaa

SEQ ID NO: 284391 - DNA, 33 bp, Homo sapien
ttttaaccactgcacaatgccatcttgtatctg

SEQ ID NO: 284392 - DNA, 33 bp, Homo sapien
ttttaaccactgcacattgccatcttgtatctg

SEQ ID NO: 284393 - DNA, 33 bp, Homo sapien
tatagagtttactcagaattttgtgttcagata

SEQ ID NO: 284394 - DNA, 33 bp, Homo sapien
tatagagtttactcaggattttgtgttcagata

SEQ ID NO: 284395 - DNA, 33 bp, Homo sapien
cattattccttataaccaaagcatggaagcaac

SEQ ID NO: 284396 - DNA, 33 bp, Homo sapien
cattattccttataactaaagcatggaagcaac

SEQ ID NO: 284397 - DNA, 33 bp, Homo sapien
catgtaaatatgagtacgggaattgatcataac

SEQ ID NO: 284398 - DNA, 33 bp, Homo sapien
catgtaaatatgagtaggggaattgatcataac

SEQ ID NO: 284399 - DNA, 33 bp, Homo sapien
agatgattagaacaaactgaaagtcaaattaga

SEQ ID NO: 284400 - DNA, 33 bp, Homo sapien
agatgattagaacaaattgaaagtcaaattaga

SEQ ID NO: 284401 - DNA, 33 bp, Homo sapien
attggatgactttgacaaaatgctactcatctc

SEQ ID NO: 284402 - DNA, 33 bp, Homo sapien
attggatgactttgaccaaatgctactcatctc

SEQ ID NO: 284403 - DNA, 33 bp, Homo sapien
gattcatgttaagtaactcaaatttttggcagc

SEQ ID NO: 284404 - DNA, 33 bp, Homo sapien
gattcatgttaagtaattcaaatttttggcagc

SEQ ID NO: 284405 - DNA, 33 bp, Homo sapien
gcagtctcagttaccccacttcccctttgcaga

SEQ ID NO: 284406 - DNA, 33 bp, Homo sapien
gcagtctcagttaccctacttcccctttgcaga

SEQ ID NO: 284407 - DNA, 33 bp, Homo sapien
aatagcaaagaagaaacgtaactctgtgtgaga

SEQ ID NO: 284408 - DNA, 33 bp, Homo sapien
aatagcaaagaagaaatgtaactctgtgtgaga

SEQ ID NO: 284409 - DNA, 33 bp, Homo sapien
ggaaggtcaatttctaccttcatttaacaaact

SEQ ID NO: 284410 - DNA, 33 bp, Homo sapien
ggaaggtcaatttctatcttcatttaacaaact

SEQ ID NO: 284411 - DNA, 33 bp, Homo sapien
tttacacaagatgctggaatgcttatatttgtg

SEQ ID NO: 284412 - DNA, 33 bp, Homo sapien
tttacacaagatgctgtaatgcttatatttgtg

SEQ ID NO: 284413 - DNA, 33 bp, Homo sapien
ctcaagctagtaacagcatctgcagtaagaaat

SEQ ID NO: 284414 - DNA, 33 bp, Homo sapien
ctcaagctagtaacagtatctgcagtaagaaat

SEQ ID NO: 284415 - DNA, 33 bp, Homo sapien
taatttaaatatagtcaagtagcccataaaaca

SEQ ID NO: 284416 - DNA, 33 bp, Homo sapien
taatttaaatatagtcgagtagcccataaaaca

SEQ ID NO: 284417 - DNA, 33 bp, Homo sapien
aacaatcgggcactccaaattaattaagtaggg

SEQ ID NO: 284418 - DNA, 33 bp, Homo sapien
aacaatcgggcactccgaattaattaagtaggg

SEQ ID NO: 284419 - DNA, 33 bp, Homo sapien
ggtagagaaaagttacagaacttgccaaactat

SEQ ID NO: 284420 - DNA, 33 bp, Homo sapien
ggtagagaaaagttacggaacttgccaaactat

SEQ ID NO: 284421 - DNA, 33 bp, Homo sapien
aactcatatacaatgacatgaccaattataata

SEQ ID NO: 284422 - DNA, 33 bp, Homo sapien
aactcatatacaatgagatgaccaattataata

SEQ ID NO: 284423 - DNA, 33 bp, Homo sapien
cttaaaagttttaaataagctgctgttgaagag

SEQ ID NO: 284424 - DNA, 33 bp, Homo sapien
cttaaaagttttaaatgagctgctgttgaagag

SEQ ID NO: 284425 - DNA, 33 bp, Homo sapien
tacacagatttggcaaaagactaatgccaatga

SEQ ID NO: 284426 - DNA, 33 bp, Homo sapien
tacacagatttggcaagagactaatgccaatga

SEQ ID NO: 284427 - DNA, 33 bp, Homo sapien
tataccatgcccaaaaagaatgaggatatgctg

SEQ ID NO: 284428 - DNA, 33 bp, Homo sapien
tataccatgcccaaaatgaatgaggatatgctg

SEQ ID NO: 284429 - DNA, 33 bp, Homo sapien
catttattttgtaaagactcaaatgatggtggg

SEQ ID NO: 284430 - DNA, 33 bp, Homo sapien
catttattttgtaaaggctcaaatgatggtggg

SEQ ID NO: 284431 - DNA, 33 bp, Homo sapien
tttctgcctttacaaaatagccaagtaccttga

SEQ ID NO: 284432 - DNA, 33 bp, Homo sapien
tttctgcctttacaaagtagccaagtaccttga

SEQ ID NO: 284433 - DNA, 33 bp, Homo sapien
ttgcaatattttgcaacgctgatgaagtacatt

SEQ ID NO: 284434 - DNA, 33 bp, Homo sapien
ttgcaatattttgcaatgctgatgaagtacatt

SEQ ID NO: 284435 - DNA, 33 bp, Homo sapien
atgagggattgagtcaccagtcttcactccttc

SEQ ID NO: 284436 - DNA, 33 bp, Homo sapien
atgagggattgagtcagcagtcttcactccttc

SEQ ID NO: 284437 - DNA, 33 bp, Homo sapien
aaagagaaaatatcagccaagattctccttggg

SEQ ID NO: 284438 - DNA, 33 bp, Homo sapien
aaagagaaaatatcagtcaagattctccttggg

SEQ ID NO: 284439 - DNA, 33 bp, Homo sapien
tgaaatagttttatacagcacataccatactgt

SEQ ID NO: 284440 - DNA, 33 bp, Homo sapien
tgaaatagttttatacggcacataccatactgt

SEQ ID NO: 284441 - DNA, 33 bp, Homo sapien
aggactaatggaaggagagcttatttacagaga

SEQ ID NO: 284442 - DNA, 33 bp, Homo sapien
aggactaatggaaggatagcttatttacagaga

SEQ ID NO: 284443 - DNA, 33 bp, Homo sapien
ttgattccttagatgaaattctgtaacagaaaa

SEQ ID NO: 284444 - DNA, 33 bp, Homo sapien
ttgattccttagatgagattctgtaacagaaaa

SEQ ID NO: 284445 - DNA, 33 bp, Homo sapien
taagcaacagcaacacgccattaaacatacttc

SEQ ID NO: 284446 - DNA, 33 bp, Homo sapien
taagcaacagcaacactccattaaacatacttc

SEQ ID NO: 284447 - DNA, 33 bp, Homo sapien
ggaatcttgtattatcacaccaaataggataca

SEQ ID NO: 284448 - DNA, 33 bp, Homo sapien
ggaatcttgtattatctcaccaaataggataca

SEQ ID NO: 284449 - DNA, 33 bp, Homo sapien
ttgaatcaggcattggaccaaaaactcttatta

SEQ ID NO: 284450 - DNA, 33 bp, Homo sapien
ttgaatcaggcattggtccaaaaactcttatta

SEQ ID NO: 284451 - DNA, 33 bp, Homo sapien
ttttgaaatctggtagaatgatgtttccatttt

SEQ ID NO: 284452 - DNA, 33 bp, Homo sapien
ttttgaaatctggtagcatgatgtttccatttt

SEQ ID NO: 284453 - DNA, 33 bp, Homo sapien
agagagaaagtgtagacaagacccttacataag

SEQ ID NO: 284454 - DNA, 33 bp, Homo sapien
agagagaaagtgtagagaagacccttacataag

SEQ ID NO: 284455 - DNA, 33 bp, Homo sapien
ggataaggcaaaccaactcctctctctatgagc

SEQ ID NO: 284456 - DNA, 33 bp, Homo sapien
ggataaggcaaaccaattcctctctctatgagc

SEQ ID NO: 284457 - DNA, 33 bp, Homo sapien
ttattgttgccaggcaaattggttgaaatggta

SEQ ID NO: 284458 - DNA, 33 bp, Homo sapien
ttattgttgccaggcagattggttgaaatggta

SEQ ID NO: 284459 - DNA, 33 bp, Homo sapien
tcctgtgtaggcaagaccttcagcagctagaac

SEQ ID NO: 284460 - DNA, 33 bp, Homo sapien
tcctgtgtaggcaagatcttcagcagctagaac

SEQ ID NO: 284461 - DNA, 33 bp, Homo sapien
caattttggtaatcacactcaaagctaacaaat

SEQ ID NO: 284462 - DNA, 33 bp, Homo sapien
caattttggtaatcactctcaaagctaacaaat

SEQ ID NO: 284463 - DNA, 33 bp, Homo sapien
ggatgataggtgttggaatttcaaaaggtatta

SEQ ID NO: 284464 - DNA, 33 bp, Homo sapien
ggatgataggtgttggtatttcaaaaggtatta

SEQ ID NO: 284465 - DNA, 33 bp, Homo sapien
ttataaaccaatgaaacgaccaataattgtcta

SEQ ID NO: 284466 - DNA, 33 bp, Homo sapien
ttataaaccaatgaaatgaccaataattgtcta

SEQ ID NO: 284467 - DNA, 33 bp, Homo sapien
cagctactgtgttacaagcagaagactatgaca

SEQ ID NO: 284468 - DNA, 33 bp, Homo sapien
cagctactgtgttacaggcagaagactatgaca

SEQ ID NO: 284469 - DNA, 33 bp, Homo sapien
acaaagatttcaaaccaactttattaactatcc

SEQ ID NO: 284470 - DNA, 33 bp, Homo sapien
acaaagatttcaaaccgactttattaactatcc

SEQ ID NO: 284471 - DNA, 33 bp, Homo sapien
aaagagctttcactgacgatctctttgaggaag

SEQ ID NO: 284472 - DNA, 33 bp, Homo sapien
aaagagctttcactgatgatctctttgaggaag

SEQ ID NO: 284473 - DNA, 33 bp, Homo sapien
ctggccagttccttacggatttcaggtcttcac

SEQ ID NO: 284474 - DNA, 33 bp, Homo sapien
ctggccagttccttactgatttcaggtcttcac

SEQ ID NO: 284475 - DNA, 33 bp, Homo sapien
tagttttaacattttccagttgtcagatatctg

SEQ ID NO: 284476 - DNA, 33 bp, Homo sapien
tagttttaacattttctagttgtcagatatctg

SEQ ID NO: 284477 - DNA, 33 bp, Homo sapien
actatatcagttttccaaggtacactgctatga

SEQ ID NO: 284478 - DNA, 33 bp, Homo sapien
actatatcagttttccgaggtacactgctatga

SEQ ID NO: 284479 - DNA, 33 bp, Homo sapien
aatgttgggcccaagcagcaaagtagccatctg

SEQ ID NO: 284480 - DNA, 33 bp, Homo sapien
aatgttgggcccaagccgcaaagtagccatctg

SEQ ID NO: 284481 - DNA, 33 bp, Homo sapien
gcccacaggaaaaggagaaactgacccaatgga

SEQ ID NO: 284482 - DNA, 33 bp, Homo sapien
gcccacaggaaaaggataaactgacccaatgga

SEQ ID NO: 284483 - DNA, 33 bp, Homo sapien
ctactcttgacagataaaattcagcaggacttt

SEQ ID NO: 284484 - DNA, 33 bp, Homo sapien
ctactcttgacagatacaattcagcaggacttt

SEQ ID NO: 284485 - DNA, 33 bp, Homo sapien
tttggccatttagacaacagggagatgtagtaa

SEQ ID NO: 284486 - DNA, 33 bp, Homo sapien
tttggccatttagacaccagggagatgtagtaa

SEQ ID NO: 284487 - DNA, 33 bp, Homo sapien
ttagagaaatggtgataaaaacataatcaaaac

SEQ ID NO: 284488 - DNA, 33 bp, Homo sapien
ttagagaaatggtgatcaaaacataatcaaaac

SEQ ID NO: 284489 - DNA, 33 bp, Homo sapien
ccatggaaaccaccgaagtcaatctcaattata

SEQ ID NO: 284490 - DNA, 33 bp, Homo sapien
ccatggaaaccaccgaggtcaatctcaattata

SEQ ID NO: 284491 - DNA, 33 bp, Homo sapien
tcggtgttgctttatagacattggttcagcttc

SEQ ID NO: 284492 - DNA, 33 bp, Homo sapien
tcggtgttgctttatatacattggttcagcttc

SEQ ID NO: 284493 - DNA, 33 bp, Homo sapien
gggactttaatgcagaggattggttattgatgt

SEQ ID NO: 284494 - DNA, 33 bp, Homo sapien
gggactttaatgcagatgattggttattgatgt

SEQ ID NO: 284495 - DNA, 33 bp, Homo sapien
ttcataatgagttatacacatggcccagttgca

SEQ ID NO: 284496 - DNA, 33 bp, Homo sapien
ttcataatgagttatatacatggcccagttgca

SEQ ID NO: 284497 - DNA, 33 bp, Homo sapien
ataactcattatgaatgaagctaagcaaatggc

SEQ ID NO: 284498 - DNA, 33 bp, Homo sapien
ataactcattatgaattaagctaagcaaatggc

SEQ ID NO: 284499 - DNA, 33 bp, Homo sapien
ttctataaatctcatacgctttcttcaaccttt

SEQ ID NO: 284500 - DNA, 33 bp, Homo sapien
ttctataaatctcatatgctttcttcaaccttt

SEQ ID NO: 284501 - DNA, 33 bp, Homo sapien
catcttaatagataaaatatcagccttttttcc

SEQ ID NO: 284502 - DNA, 33 bp, Homo sapien
catcttaatagataaagtatcagccttttttcc

SEQ ID NO: 284503 - DNA, 33 bp, Homo sapien
aatatatttgcaaatgaagaaagggaccagaag

SEQ ID NO: 284504 - DNA, 33 bp, Homo sapien
aatatatttgcaaatggagaaagggaccagaag

SEQ ID NO: 284505 - DNA, 33 bp, Homo sapien
cagtggccaatagtcaggagaaagcctgtttac

SEQ ID NO: 284506 - DNA, 33 bp, Homo sapien
cagtggccaatagtcatgagaaagcctgtttac

SEQ ID NO: 284507 - DNA, 33 bp, Homo sapien
ttggtgagtttgcactgaagaatgatattagcc

SEQ ID NO: 284508 - DNA, 33 bp, Homo sapien
ttggtgagtttgcacttaagaatgatattagcc

SEQ ID NO: 284509 - DNA, 33 bp, Homo sapien
tctcatttaattacaaaaggtgtgttgaaatta

SEQ ID NO: 284510 - DNA, 33 bp, Homo sapien
tctcatttaattacaagaggtgtgttgaaatta

SEQ ID NO: 284511 - DNA, 33 bp, Homo sapien
gttttttcgaaacttgcaatgagagctagaata

SEQ ID NO: 284512 - DNA, 33 bp, Homo sapien
gttttttcgaaacttgtaatgagagctagaata

SEQ ID NO: 284513 - DNA, 33 bp, Homo sapien
tgatattgatgttggaagtaactgatccactct

SEQ ID NO: 284514 - DNA, 33 bp, Homo sapien
tgatattgatgttggaggtaactgatccactct

SEQ ID NO: 284515 - DNA, 33 bp, Homo sapien
aatcaaaaattgaggcagaatcttttacatttg

SEQ ID NO: 284516 - DNA, 33 bp, Homo sapien
aatcaaaaattgaggctgaatcttttacatttg

SEQ ID NO: 284517 - DNA, 33 bp, Homo sapien
atgtactgagtaataagggcgtttgtcatcttt

SEQ ID NO: 284518 - DNA, 33 bp, Homo sapien
atgtactgagtaataatggcgtttgtcatcttt

SEQ ID NO: 284519 - DNA, 33 bp, Homo sapien
ctcagcagttgattcaataggcactaatgagag

SEQ ID NO: 284520 - DNA, 33 bp, Homo sapien
ctcagcagttgattcagtaggcactaatgagag

SEQ ID NO: 284521 - DNA, 33 bp, Homo sapien
cttgcaagctgagtagccaaaacttgctttgag

SEQ ID NO: 284522 - DNA, 33 bp, Homo sapien
cttgcaagctgagtaggcaaaacttgctttgag

SEQ ID NO: 284523 - DNA, 33 bp, Homo sapien
aagagtatgtggacagaacattaatggattttg

SEQ ID NO: 284524 - DNA, 33 bp, Homo sapien
aagagtatgtggacagcacattaatggattttg

SEQ ID NO: 284525 - DNA, 33 bp, Homo sapien
taacaaacaatgcaaaagtatttctatcacatt

SEQ ID NO: 284526 - DNA, 33 bp, Homo sapien
taacaaacaatgcaaacgtatttctatcacatt

SEQ ID NO: 284527 - DNA, 33 bp, Homo sapien
ctctaaaatacccaacccatgatggacaattgt

SEQ ID NO: 284528 - DNA, 33 bp, Homo sapien
ctctaaaatacccaactcatgatggacaattgt

SEQ ID NO: 284529 - DNA, 33 bp, Homo sapien
ttcactatgcacagaaaaacctttactgaactt

SEQ ID NO: 284530 - DNA, 33 bp, Homo sapien
ttcactatgcacagaagaacctttactgaactt

SEQ ID NO: 284531 - DNA, 33 bp, Homo sapien
attaggctctccaaaacgaagagaaaaatataa

SEQ ID NO: 284532 - DNA, 33 bp, Homo sapien
attaggctctccaaaatgaagagaaaaatataa

SEQ ID NO: 284533 - DNA, 33 bp, Homo sapien
cacaccttgtatatcaatacctcgggtaaacag

SEQ ID NO: 284534 - DNA, 33 bp, Homo sapien
cacaccttgtatatcagtacctcgggtaaacag

SEQ ID NO: 284535 - DNA, 33 bp, Homo sapien
tcatctagagtctaaagtctcatccacagatta

SEQ ID NO: 284536 - DNA, 33 bp, Homo sapien
tcatctagagtctaaattctcatccacagatta

SEQ ID NO: 284537 - DNA, 33 bp, Homo sapien
tgcaatcttacatccaaaaacgagtatttcaag

SEQ ID NO: 284538 - DNA, 33 bp, Homo sapien
tgcaatcttacatccagaaacgagtatttcaag

SEQ ID NO: 284539 - DNA, 33 bp, Homo sapien
ctctactagctaggtaacattggacaagctcat

SEQ ID NO: 284540 - DNA, 33 bp, Homo sapien
ctctactagctaggtagcattggacaagctcat

SEQ ID NO: 284541 - DNA, 33 bp, Homo sapien
ggtctccagctatcccagcaacatttattaaat

SEQ ID NO: 284542 - DNA, 33 bp, Homo sapien
ggtctccagctatcccggcaacatttattaaat

SEQ ID NO: 284543 - DNA, 33 bp, Homo sapien
gcataaagccactaggaaagtatgtgggtgaga

SEQ ID NO: 284544 - DNA, 33 bp, Homo sapien
gcataaagccactagggaagtatgtgggtgaga

SEQ ID NO: 284545 - DNA, 33 bp, Homo sapien
tgtgacactggaaagcaacatgaggcagaaatc

SEQ ID NO: 284546 - DNA, 33 bp, Homo sapien
tgtgacactggaaagccacatgaggcagaaatc

SEQ ID NO: 284547 - DNA, 33 bp, Homo sapien
tagagatctcacagaaaagtggtacatttgtta

SEQ ID NO: 284548 - DNA, 33 bp, Homo sapien
tagagatctcacagaagagtggtacatttgtta

SEQ ID NO: 284549 - DNA, 33 bp, Homo sapien
gaaacgcctgatcagacaagagtacaagactct

SEQ ID NO: 284550 - DNA, 33 bp, Homo sapien
gaaacgcctgatcagagaagagtacaagactct

SEQ ID NO: 284551 - DNA, 33 bp, Homo sapien
aagcttcagtgtataggcacccacataaatatt

SEQ ID NO: 284552 - DNA, 33 bp, Homo sapien
aagcttcagtgtatagtcacccacataaatatt

SEQ ID NO: 284553 - DNA, 33 bp, Homo sapien
aatccaaccaacaaaaaagggcaatgttgcaac

SEQ ID NO: 284554 - DNA, 33 bp, Homo sapien
aatccaaccaacaaaacagggcaatgttgcaac

SEQ ID NO: 284555 - DNA, 33 bp, Homo sapien
tgagtgcacttaccataaaagtgttagattaag

SEQ ID NO: 284556 - DNA, 33 bp, Homo sapien
tgagtgcacttaccattaaagtgttagattaag

SEQ ID NO: 284557 - DNA, 33 bp, Homo sapien
aagtctactgattcaaatgctaatattttccag

SEQ ID NO: 284558 - DNA, 33 bp, Homo sapien
aagtctactgattcaagtgctaatattttccag

SEQ ID NO: 284559 - DNA, 33 bp, Homo sapien
ctctactatagctagcaaacataattacagagc

SEQ ID NO: 284560 - DNA, 33 bp, Homo sapien
ctctactatagctagcgaacataattacagagc

SEQ ID NO: 284561 - DNA, 33 bp, Homo sapien
ttaaatttactcaaacggtgatttcaaagacaa

SEQ ID NO: 284562 - DNA, 33 bp, Homo sapien
ttaaatttactcaaactgtgatttcaaagacaa

SEQ ID NO: 284563 - DNA, 33 bp, Homo sapien
tttttagaactgtaacagcaaattgtgcttatt

SEQ ID NO: 284564 - DNA, 33 bp, Homo sapien
tttttagaactgtaacggcaaattgtgcttatt

SEQ ID NO: 284565 - DNA, 33 bp, Homo sapien
cttaaacttaacacaaatcagtggtgatgctta

SEQ ID NO: 284566 - DNA, 33 bp, Homo sapien
cttaaacttaacacaagtcagtggtgatgctta

SEQ ID NO: 284567 - DNA, 33 bp, Homo sapien
attttgtgaatctgggaaaaggagtagtagatg

SEQ ID NO: 284568 - DNA, 33 bp, Homo sapien
attttgtgaatctgggtaaaggagtagtagatg

SEQ ID NO: 284569 - DNA, 33 bp, Homo sapien
ttgtaccaaatagcttcaactcagcattgaaat

SEQ ID NO: 284570 - DNA, 33 bp, Homo sapien
ttgtaccaaatagctttaactcagcattgaaat

SEQ ID NO: 284571 - DNA, 33 bp, Homo sapien
gataaaatgttagaaaagctgctaactagaata

SEQ ID NO: 284572 - DNA, 33 bp, Homo sapien
gataaaatgttagaaaggctgctaactagaata

SEQ ID NO: 284573 - DNA, 33 bp, Homo sapien
taagcagaagaaagaacgtaagaatgtgaagac

SEQ ID NO: 284574 - DNA, 33 bp, Homo sapien
taagcagaagaaagaatgtaagaatgtgaagac

SEQ ID NO: 284575 - DNA, 33 bp, Homo sapien
gtcattgctcagtaaactctagatcccatccaa

SEQ ID NO: 284576 - DNA, 33 bp, Homo sapien
gtcattgctcagtaaattctagatcccatccaa

SEQ ID NO: 284577 - DNA, 33 bp, Homo sapien
gtgtccattccttaatcagctagatccaccata

SEQ ID NO: 284578 - DNA, 33 bp, Homo sapien
gtgtccattccttaattagctagatccaccata

SEQ ID NO: 284579 - DNA, 33 bp, Homo sapien
tatatcttacaaattacgaagttctttgtaggt

SEQ ID NO: 284580 - DNA, 33 bp, Homo sapien
tatatcttacaaattaggaagttctttgtaggt

SEQ ID NO: 284581 - DNA, 33 bp, Homo sapien
actttctgcacgaaacaagtaaaaacccagaca

SEQ ID NO: 284582 - DNA, 33 bp, Homo sapien
actttctgcacgaaacgagtaaaaacccagaca

SEQ ID NO: 284583 - DNA, 33 bp, Homo sapien
gcaatcacatgtatcagctggaggtctcactag

SEQ ID NO: 284584 - DNA, 33 bp, Homo sapien
gcaatcacatgtatcatctggaggtctcactag

SEQ ID NO: 284585 - DNA, 33 bp, Homo sapien
agatgatttgcctccacaaagtttattgggtag

SEQ ID NO: 284586 - DNA, 33 bp, Homo sapien
agatgatttgcctccagaaagtttattgggtag

SEQ ID NO: 284587 - DNA, 33 bp, Homo sapien
aaaagttatacctaaaatggatggagacaggtg

SEQ ID NO: 284588 - DNA, 33 bp, Homo sapien
aaaagttatacctaaattggatggagacaggtg

SEQ ID NO: 284589 - DNA, 33 bp, Homo sapien
aagctcacagaatttaacacacaactcagggac

SEQ ID NO: 284590 - DNA, 33 bp, Homo sapien
aagctcacagaatttatcacacaactcagggac

SEQ ID NO: 284591 - DNA, 33 bp, Homo sapien
cactcataaagattaacgccaggccatgattaa

SEQ ID NO: 284592 - DNA, 33 bp, Homo sapien
cactcataaagattaatgccaggccatgattaa

SEQ ID NO: 284593 - DNA, 33 bp, Homo sapien
ctgcaaagttaaataaatgcctctctctctctc

SEQ ID NO: 284594 - DNA, 33 bp, Homo sapien
ctgcaaagttaaataattgcctctctctctctc

SEQ ID NO: 284595 - DNA, 33 bp, Homo sapien
tctccaagtttttgtcacacctgtgctttgtgt

SEQ ID NO: 284596 - DNA, 33 bp, Homo sapien
tctccaagtttttgtctcacctgtgctttgtgt

SEQ ID NO: 284597 - DNA, 33 bp, Homo sapien
ataagttattttcccaatctaaaagtctcaggg

SEQ ID NO: 284598 - DNA, 33 bp, Homo sapien
ataagttattttcccagtctaaaagtctcaggg

SEQ ID NO: 284599 - DNA, 33 bp, Homo sapien
catgctcttatttatgcaatacacttggtaaag

SEQ ID NO: 284600 - DNA, 33 bp, Homo sapien
catgctcttatttatggaatacacttggtaaag

SEQ ID NO: 284601 - DNA, 33 bp, Homo sapien
aaagtgaattctttccagcaagagaaaaatatg

SEQ ID NO: 284602 - DNA, 33 bp, Homo sapien
aaagtgaattctttcccgcaagagaaaaatatg

SEQ ID NO: 284603 - DNA, 33 bp, Homo sapien
cttatgaacctatgaaaccaaaaaatcagttta

SEQ ID NO: 284604 - DNA, 33 bp, Homo sapien
cttatgaacctatgaagccaaaaaatcagttta

SEQ ID NO: 284605 - DNA, 33 bp, Homo sapien
tttgtgtaaatttgcacctcagctgtatccctt

SEQ ID NO: 284606 - DNA, 33 bp, Homo sapien
tttgtgtaaatttgcatctcagctgtatccctt

SEQ ID NO: 284607 - DNA, 33 bp, Homo sapien
ttaagaatcaatgtggaacagaggctttatgcc

SEQ ID NO: 284608 - DNA, 33 bp, Homo sapien
ttaagaatcaatgtggcacagaggctttatgcc

SEQ ID NO: 284609 - DNA, 33 bp, Homo sapien
tgaggacaaccagaaaaccaagtagaatataca

SEQ ID NO: 284610 - DNA, 33 bp, Homo sapien
tgaggacaaccagaaagccaagtagaatataca

SEQ ID NO: 284611 - DNA, 33 bp, Homo sapien
cagagttatgtaagaaaaaaaatgctccaagtg

SEQ ID NO: 284612 - DNA, 33 bp, Homo sapien
cagagttatgtaagaacaaaaatgctccaagtg

SEQ ID NO: 284613 - DNA, 33 bp, Homo sapien
agtgtccttgccagaacattgacttctaaatca

SEQ ID NO: 284614 - DNA, 33 bp, Homo sapien
agtgtccttgccagaatattgacttctaaatca

SEQ ID NO: 284615 - DNA, 33 bp, Homo sapien
ctgaaaaatcaattcactaaggcagattaacta

SEQ ID NO: 284616 - DNA, 33 bp, Homo sapien
ctgaaaaatcaattcattaaggcagattaacta

SEQ ID NO: 284617 - DNA, 33 bp, Homo sapien
gaaacctactcaggaaaagccaagaagaatctg

SEQ ID NO: 284618 - DNA, 33 bp, Homo sapien
gaaacctactcaggaatagccaagaagaatctg

SEQ ID NO: 284619 - DNA, 33 bp, Homo sapien
taggttaatgctgaaacgggttaaaatgttggg

SEQ ID NO: 284620 - DNA, 33 bp, Homo sapien
taggttaatgctgaaatgggttaaaatgttggg

SEQ ID NO: 284621 - DNA, 33 bp, Homo sapien
tagatcaatttccatacgttgaatcatccttgc

SEQ ID NO: 284622 - DNA, 33 bp, Homo sapien
tagatcaatttccatatgttgaatcatccttgc

SEQ ID NO: 284623 - DNA, 33 bp, Homo sapien
ttgacggcttttcctcaaagatcaaggcaagaa

SEQ ID NO: 284624 - DNA, 33 bp, Homo sapien
ttgacggcttttcctcgaagatcaaggcaagaa

SEQ ID NO: 284625 - DNA, 33 bp, Homo sapien
tgagaatatgtgtatacggttttctgttcctgt

SEQ ID NO: 284626 - DNA, 33 bp, Homo sapien
tgagaatatgtgtatatggttttctgttcctgt

SEQ ID NO: 284627 - DNA, 33 bp, Homo sapien
acaacaaatcctctgacatgaatttacctatat

SEQ ID NO: 284628 - DNA, 33 bp, Homo sapien
acaacaaatcctctgatatgaatttacctatat

SEQ ID NO: 284629 - DNA, 33 bp, Homo sapien
ccaaaatcttggtatgccaaatgttatattttt

SEQ ID NO: 284630 - DNA, 33 bp, Homo sapien
ccaaaatcttggtatgtcaaatgttatattttt

SEQ ID NO: 284631 - DNA, 33 bp, Homo sapien
ccttctgcatctttaacgtttctgatgttagtg

SEQ ID NO: 284632 - DNA, 33 bp, Homo sapien
ccttctgcatctttaatgtttctgatgttagtg

SEQ ID NO: 284633 - DNA, 33 bp, Homo sapien
acttaaatatatcttaagttgacaagccttatt

SEQ ID NO: 284634 - DNA, 33 bp, Homo sapien
acttaaatatatcttaggttgacaagccttatt

SEQ ID NO: 284635 - DNA, 33 bp, Homo sapien
taactgtcaaagaaaaatgagtattatttccat

SEQ ID NO: 284636 - DNA, 33 bp, Homo sapien
taactgtcaaagaaaattgagtattatttccat

SEQ ID NO: 284637 - DNA, 33 bp, Homo sapien
caaaggccagatggcaatacataactgtcaaag

SEQ ID NO: 284638 - DNA, 33 bp, Homo sapien
caaaggccagatggcagtacataactgtcaaag

SEQ ID NO: 284639 - DNA, 33 bp, Homo sapien
cagccaccagtcaagcgctttctgtatatcact

SEQ ID NO: 284640 - DNA, 33 bp, Homo sapien
cagccaccagtcaagctctttctgtatatcact

SEQ ID NO: 284641 - DNA, 33 bp, Homo sapien
attgtctactttaactgactactgcaaagacta

SEQ ID NO: 284642 - DNA, 33 bp, Homo sapien
attgtctactttaacttactactgcaaagacta

SEQ ID NO: 284643 - DNA, 33 bp, Homo sapien
agagtagatgataagaaacaagacaagaattgt

SEQ ID NO: 284644 - DNA, 33 bp, Homo sapien
agagtagatgataagagacaagacaagaattgt

SEQ ID NO: 284645 - DNA, 33 bp, Homo sapien
catactccttctaccaacttttcacagtctcct

SEQ ID NO: 284646 - DNA, 33 bp, Homo sapien
catactccttctaccaccttttcacagtctcct

SEQ ID NO: 284647 - DNA, 33 bp, Homo sapien
attttttattgctctgcattattgtagaactta

SEQ ID NO: 284648 - DNA, 33 bp, Homo sapien
attttttattgctctgtattattgtagaactta

SEQ ID NO: 284649 - DNA, 33 bp, Homo sapien
aatatttttggttcaacgaatttggatatttta

SEQ ID NO: 284650 - DNA, 33 bp, Homo sapien
aatatttttggttcaatgaatttggatatttta

SEQ ID NO: 284651 - DNA, 33 bp, Homo sapien
ttttcatacaatagcaacatcacaaaatcaaat

SEQ ID NO: 284652 - DNA, 33 bp, Homo sapien
ttttcatacaatagcagcatcacaaaatcaaat

SEQ ID NO: 284653 - DNA, 33 bp, Homo sapien
ctttagctcttgtgaaaatacttgtgtatgtgg

SEQ ID NO: 284654 - DNA, 33 bp, Homo sapien
ctttagctcttgtgaagatacttgtgtatgtgg

SEQ ID NO: 284655 - DNA, 33 bp, Homo sapien
gtttaaacaaggaagacgcatgaaaatgtctta

SEQ ID NO: 284656 - DNA, 33 bp, Homo sapien
gtttaaacaaggaagatgcatgaaaatgtctta

SEQ ID NO: 284657 - DNA, 33 bp, Homo sapien
ctgtataggtcacttaacatgaattaaatttgc

SEQ ID NO: 284658 - DNA, 33 bp, Homo sapien
ctgtataggtcacttatcatgaattaaatttgc

SEQ ID NO: 284659 - DNA, 33 bp, Homo sapien
cctcaacagtggaacaaaattattagtaaactg

SEQ ID NO: 284660 - DNA, 33 bp, Homo sapien
cctcaacagtggaacagaattattagtaaactg

SEQ ID NO: 284661 - DNA, 33 bp, Homo sapien
cctggcgctctcacagaaatagaatatttttac

SEQ ID NO: 284662 - DNA, 33 bp, Homo sapien
cctggcgctctcacaggaatagaatatttttac

SEQ ID NO: 284663 - DNA, 33 bp, Homo sapien
gagcacataaggtacaatgagaaaaattaatat

SEQ ID NO: 284664 - DNA, 33 bp, Homo sapien
gagcacataaggtacagtgagaaaaattaatat

SEQ ID NO: 284665 - DNA, 33 bp, Homo sapien
cattacacactgactacctctaaaaatagcagt

SEQ ID NO: 284666 - DNA, 33 bp, Homo sapien
cattacacactgactagctctaaaaatagcagt

SEQ ID NO: 284667 - DNA, 33 bp, Homo sapien
taaaatgtgcaacttacgcaaaatggtaacgac

SEQ ID NO: 284668 - DNA, 33 bp, Homo sapien
taaaatgtgcaacttatgcaaaatggtaacgac

SEQ ID NO: 284669 - DNA, 33 bp, Homo sapien
aaatttctcttgaaaaatctactggattaatat

SEQ ID NO: 284670 - DNA, 33 bp, Homo sapien
aaatttctcttgaaaagtctactggattaatat

SEQ ID NO: 284671 - DNA, 33 bp, Homo sapien
ttacaacctagcatcaaaacaatccatctgaat

SEQ ID NO: 284672 - DNA, 33 bp, Homo sapien
ttacaacctagcatcacaacaatccatctgaat

SEQ ID NO: 284673 - DNA, 33 bp, Homo sapien
tgtcaaggttgactgaaccctacttgtggtaca

SEQ ID NO: 284674 - DNA, 33 bp, Homo sapien
tgtcaaggttgactgatccctacttgtggtaca

SEQ ID NO: 284675 - DNA, 33 bp, Homo sapien
gggtaacatgctggaccccaagaaaggccttga

SEQ ID NO: 284676 - DNA, 33 bp, Homo sapien
gggtaacatgctggactccaagaaaggccttga

SEQ ID NO: 284677 - DNA, 33 bp, Homo sapien
ttttatggcatatggaaaaaaatcaggcatgac

SEQ ID NO: 284678 - DNA, 33 bp, Homo sapien
ttttatggcatatggagaaaaatcaggcatgac

SEQ ID NO: 284679 - DNA, 33 bp, Homo sapien
gtggctttatgctgccccctatgtaatttagtt

SEQ ID NO: 284680 - DNA, 33 bp, Homo sapien
gtggctttatgctgcctcctatgtaatttagtt

SEQ ID NO: 284681 - DNA, 33 bp, Homo sapien
aacagaaattcaaataccaagtgttctcactta

SEQ ID NO: 284682 - DNA, 33 bp, Homo sapien
aacagaaattcaaatagcaagtgttctcactta

SEQ ID NO: 284683 - DNA, 33 bp, Homo sapien
aacaaattgtatgaaacaggatgaatgtgattg

SEQ ID NO: 284684 - DNA, 33 bp, Homo sapien
aacaaattgtatgaaataggatgaatgtgattg

SEQ ID NO: 284685 - DNA, 33 bp, Homo sapien
aggaatgctctttgcaatgaaagtcagctggac

SEQ ID NO: 284686 - DNA, 33 bp, Homo sapien
aggaatgctctttgcagtgaaagtcagctggac

SEQ ID NO: 284687 - DNA, 33 bp, Homo sapien
gagaatggattccataagatttcctgtatttta

SEQ ID NO: 284688 - DNA, 33 bp, Homo sapien
gagaatggattccatacgatttcctgtatttta

SEQ ID NO: 284689 - DNA, 33 bp, Homo sapien
tattatcatcatcatcaccaagttacgaattaa

SEQ ID NO: 284690 - DNA, 33 bp, Homo sapien
tattatcatcatcatcgccaagttacgaattaa

SEQ ID NO: 284691 - DNA, 33 bp, Homo sapien
ttgaattcagaatggaactcactggaataagta

SEQ ID NO: 284692 - DNA, 33 bp, Homo sapien
ttgaattcagaatggatctcactggaataagta

SEQ ID NO: 284693 - DNA, 33 bp, Homo sapien
aacacgggcagaataaaagggtgtaatgtcagt

SEQ ID NO: 284694 - DNA, 33 bp, Homo sapien
aacacgggcagaataacagggtgtaatgtcagt

SEQ ID NO: 284695 - DNA, 33 bp, Homo sapien
tgtttttaagttttacaggtcttcagacaaaga

SEQ ID NO: 284696 - DNA, 33 bp, Homo sapien
tgtttttaagttttacgggtcttcagacaaaga

SEQ ID NO: 284697 - DNA, 33 bp, Homo sapien
agagctttatcgattacgcttggtatgttgctt

SEQ ID NO: 284698 - DNA, 33 bp, Homo sapien
agagctttatcgattatgcttggtatgttgctt

SEQ ID NO: 284699 - DNA, 33 bp, Homo sapien
aattttggcttcctcacggaataggctttctca

SEQ ID NO: 284700 - DNA, 33 bp, Homo sapien
aattttggcttcctcatggaataggctttctca

SEQ ID NO: 284701 - DNA, 33 bp, Homo sapien
acaaaacagagaacaactgattgtgttacatag

SEQ ID NO: 284702 - DNA, 33 bp, Homo sapien
acaaaacagagaacaattgattgtgttacatag

SEQ ID NO: 284703 - DNA, 33 bp, Homo sapien
ctaggatttagaatccagaatagttcattggct

SEQ ID NO: 284704 - DNA, 33 bp, Homo sapien
ctaggatttagaatccggaatagttcattggct

SEQ ID NO: 284705 - DNA, 33 bp, Homo sapien
tctatattattttcccaacagatgaagaaaaag

SEQ ID NO: 284706 - DNA, 33 bp, Homo sapien
tctatattattttcccgacagatgaagaaaaag

SEQ ID NO: 284707 - DNA, 33 bp, Homo sapien
ctctcaaaagaccttagggacatatagagggca

SEQ ID NO: 284708 - DNA, 33 bp, Homo sapien
ctctcaaaagaccttatggacatatagagggca

SEQ ID NO: 284709 - DNA, 33 bp, Homo sapien
gagataagttgaggtgccacataggaagaatat

SEQ ID NO: 284710 - DNA, 33 bp, Homo sapien
gagataagttgaggtgtcacataggaagaatat

SEQ ID NO: 284711 - DNA, 33 bp, Homo sapien
cataaattcacaacagaaaggtttcagctatta

SEQ ID NO: 284712 - DNA, 33 bp, Homo sapien
cataaattcacaacaggaaggtttcagctatta

SEQ ID NO: 284713 - DNA, 33 bp, Homo sapien
aggtttcagctattaaagaaaaatttacaacaa

SEQ ID NO: 284714 - DNA, 33 bp, Homo sapien
aggtttcagctattaatgaaaaatttacaacaa

SEQ ID NO: 284715 - DNA, 33 bp, Homo sapien
atcttggtttgaatccactgctggagggttagg

SEQ ID NO: 284716 - DNA, 33 bp, Homo sapien
atcttggtttgaatccgctgctggagggttagg

SEQ ID NO: 284717 - DNA, 33 bp, Homo sapien
acttagggaataacaacatgcagtggatttttt

SEQ ID NO: 284718 - DNA, 33 bp, Homo sapien
acttagggaataacaatatgcagtggatttttt

SEQ ID NO: 284719 - DNA, 33 bp, Homo sapien
aatgagagtttgtttacaatttggctctctgca

SEQ ID NO: 284720 - DNA, 33 bp, Homo sapien
aatgagagtttgtttataatttggctctctgca

SEQ ID NO: 284721 - DNA, 33 bp, Homo sapien
cttatcagtgaacaaggacccttgaaatgtaat

SEQ ID NO: 284722 - DNA, 33 bp, Homo sapien
cttatcagtgaacaagtacccttgaaatgtaat

SEQ ID NO: 284723 - DNA, 33 bp, Homo sapien
gagcatagttatgaatcaaggagcaaaatgaat

SEQ ID NO: 284724 - DNA, 33 bp, Homo sapien
gagcatagttatgaatgaaggagcaaaatgaat

SEQ ID NO: 284725 - DNA, 33 bp, Homo sapien
ggagaagttaggggtgaaatgatgttgtttggc

SEQ ID NO: 284726 - DNA, 33 bp, Homo sapien
ggagaagttaggggtggaatgatgttgtttggc

SEQ ID NO: 284727 - DNA, 33 bp, Homo sapien; identical to SEQ ID NO: 284725

SEQ ID NO: 284728 - DNA, 33 bp, Homo sapien; identical to SEQ ID NO: 284726

SEQ ID NO: 284729 - DNA, 33 bp, Homo sapien
cacccttatttgaccacggaaagatgtgcctgc

SEQ ID NO: 284730 - DNA, 33 bp, Homo sapien
cacccttatttgaccatggaaagatgtgcctgc

SEQ ID NO: 284731 - DNA, 33 bp, Homo sapien
ctctcatggctgctcacaagaactggcactgag

SEQ ID NO: 284732 - DNA, 33 bp, Homo sapien
ctctcatggctgctcagaagaactggcactgag

SEQ ID NO: 284733 - DNA, 33 bp, Homo sapien
ttttcatcctgtcaacaaaagatccaaaggctt

SEQ ID NO: 284734 - DNA, 33 bp, Homo sapien
ttttcatcctgtcaacgaaagatccaaaggctt

SEQ ID NO: 284735 - DNA, 33 bp, Homo sapien
atatctgagtatctcacggtgttcacttctatc

SEQ ID NO: 284736 - DNA, 33 bp, Homo sapien
atatctgagtatctcatggtgttcacttctatc

SEQ ID NO: 284737 - DNA, 33 bp, Homo sapien
tgtacctgtggaccaaacaaacataaaagtgga

SEQ ID NO: 284738 - DNA, 33 bp, Homo sapien
tgtacctgtggaccaagcaaacataaaagtgga

SEQ ID NO: 284739 - DNA, 33 bp, Homo sapien
gagtcagtttcttaaacggaaggagtgagttgc

SEQ ID NO: 284740 - DNA, 33 bp, Homo sapien
gagtcagtttcttaaagggaaggagtgagttgc

SEQ ID NO: 284741 - DNA, 33 bp, Homo sapien
aaggaattggaattgggagtagagataaggtct

SEQ ID NO: 284742 - DNA, 33 bp, Homo sapien
aaggaattggaattggtagtagagataaggtct

SEQ ID NO: 284743 - DNA, 33 bp, Homo sapien
gcaggaaatacgtgcggcaggaagatgttacta

SEQ ID NO: 284744 - DNA, 33 bp, Homo sapien
gcaggaaatacgtgcgtcaggaagatgttacta

SEQ ID NO: 284745 - DNA, 33 bp, Homo sapien; identical to SEQ ID NO: 284743

SEQ ID NO: 284746 - DNA, 33 bp, Homo sapien; identical to SEQ ID NO: 284744

SEQ ID NO: 284747 - DNA, 33 bp, Homo sapien
tcagttttttgatgagaacattttacatctctc

SEQ ID NO: 284748 - DNA, 33 bp, Homo sapien
tcagttttttgatgagtacattttacatctctc

SEQ ID NO: 284749 - DNA, 33 bp, Homo sapien
agcagtagtttggccacgtgaataaggaaattt

SEQ ID NO: 284750 - DNA, 33 bp, Homo sapien
agcagtagtttggccatgtgaataaggaaattt

SEQ ID NO: 284751 - DNA, 33 bp, Homo sapien
ctaacaataacagtggaagaattcaacacctca

SEQ ID NO: 284752 - DNA, 33 bp, Homo sapien
ctaacaataacagtgggagaattcaacacctca

SEQ ID NO: 284753 - DNA, 33 bp, Homo sapien
tcttcaaccaacaatgaagcagcttgtgcacct

SEQ ID NO: 284754 - DNA, 33 bp, Homo sapien
tcttcaaccaacaatggagcagcttgtgcacct

SEQ ID NO: 284755 - DNA, 33 bp, Homo sapien
gtgatgattgcctaacacttagaaactgtttcc

SEQ ID NO: 284756 - DNA, 33 bp, Homo sapien
gtgatgattgcctaacgcttagaaactgtttcc

SEQ ID NO: 284757 - DNA, 33 bp, Homo sapien
aataaatatccgagaaaagctgaaccataatgt

SEQ ID NO: 284758 - DNA, 33 bp, Homo sapien
aataaatatccgagaagagctgaaccataatgt

SEQ ID NO: 284759 - DNA, 33 bp, Homo sapien
accccaacttttttcagagactattgacctatt

SEQ ID NO: 284760 - DNA, 33 bp, Homo sapien
accccaacttttttcatagactattgacctatt

SEQ ID NO: 284761 - DNA, 33 bp, Homo sapien
cgtgctcgtggctatcaaggttataagtgatca

SEQ ID NO: 284762 - DNA, 33 bp, Homo sapien
cgtgctcgtggctatcgaggttataagtgatca

SEQ ID NO: 284763 - DNA, 33 bp, Homo sapien
ctaggtatcgatgaaacgtatctcagaataata

SEQ ID NO: 284764 - DNA, 33 bp, Homo sapien
ctaggtatcgatgaaatgtatctcagaataata

SEQ ID NO: 284765 - DNA, 33 bp, Homo sapien
aaccaccaggaaatcagtctcttgaactcggaa

SEQ ID NO: 284766 - DNA, 33 bp, Homo sapien
aaccaccaggaaatcattctcttgaactcggaa

SEQ ID NO: 284767 - DNA, 33 bp, Homo sapien
aatatatcaattgccaatatgtactcaaaagat

SEQ ID NO: 284768 - DNA, 33 bp, Homo sapien
aatatatcaattgccagtatgtactcaaaagat

SEQ ID NO: 284769 - DNA, 33 bp, Homo sapien
cttgttttgattgctgaattatggcacattgtc

SEQ ID NO: 284770 - DNA, 33 bp, Homo sapien
cttgttttgattgctggattatggcacattgtc

SEQ ID NO: 284771 - DNA, 33 bp, Homo sapien
ttattgctacgactaccgaaaatttagaagagc

SEQ ID NO: 284772 - DNA, 33 bp, Homo sapien
ttattgctacgactactgaaaatttagaagagc

SEQ ID NO: 284773 - DNA, 33 bp, Homo sapien
acatatacactgtaaaacattagaatatgtaat

SEQ ID NO: 284774 - DNA, 33 bp, Homo sapien
acatatacactgtaaagcattagaatatgtaat

SEQ ID NO: 284775 - DNA, 33 bp, Homo sapien
tatattcaaatgtgccactaagccagtaaaatg

SEQ ID NO: 284776 - DNA, 33 bp, Homo sapien
tatattcaaatgtgccgctaagccagtaaaatg

SEQ ID NO: 284777 - DNA, 33 bp, Homo sapien
tatatcatgccaaatgaagtaaagtaaagcagt

SEQ ID NO: 284778 - DNA, 33 bp, Homo sapien
tatatcatgccaaatgcagtaaagtaaagcagt

SEQ ID NO: 284779 - DNA, 33 bp, Homo sapien
tgttgtgagttttaagccagttaatgtatgttt

SEQ ID NO: 284780 - DNA, 33 bp, Homo sapien
tgttgtgagttttaagtcagttaatgtatgttt

SEQ ID NO: 284781 - DNA, 33 bp, Homo sapien
aggttacaaaaattggacacatcaaggaagcag

SEQ ID NO: 284782 - DNA, 33 bp, Homo sapien
aggttacaaaaattgggcacatcaaggaagcag

SEQ ID NO: 284783 - DNA, 33 bp, Homo sapien
tgtctgggtattcatggcatatcagaactttgt

SEQ ID NO: 284784 - DNA, 33 bp, Homo sapien
tgtctgggtattcatgtcatatcagaactttgt

SEQ ID NO: 284785 - DNA, 33 bp, Homo sapien
aatgtggtcaaaatgaacactagtataaaatca

SEQ ID NO: 284786 - DNA, 33 bp, Homo sapien
aatgtggtcaaaatgagcactagtataaaatca

SEQ ID NO: 284787 - DNA, 33 bp, Homo sapien
tgctttgtttgaaagaagtctaaaatgtggtag

SEQ ID NO: 284788 - DNA, 33 bp, Homo sapien
tgctttgtttgaaagaggtctaaaatgtggtag

SEQ ID NO: 284789 - DNA, 33 bp, Homo sapien
aatacatttctcaaacagtcacttatcaatata

SEQ ID NO: 284790 - DNA, 33 bp, Homo sapien
aatacatttctcaaaccgtcacttatcaatata

SEQ ID NO: 284791 - DNA, 33 bp, Homo sapien
aagcagaggtgtttaacagtaagcaaaaattac

SEQ ID NO: 284792 - DNA, 33 bp, Homo sapien
aagcagaggtgtttaatagtaagcaaaaattac

SEQ ID NO: 284793 - DNA, 33 bp, Homo sapien
ttcacaacctgttattcaaaggtccaccgtatt

SEQ ID NO: 284794 - DNA, 33 bp, Homo sapien
ttcacaacctgttatttaaaggtccaccgtatt

SEQ ID NO: 284795 - DNA, 33 bp, Homo sapien
tttttccacagtcaaaattcaagacaagttcaa

SEQ ID NO: 284796 - DNA, 33 bp, Homo sapien
tttttccacagtcaaacttcaagacaagttcaa

SEQ ID NO: 284797 - DNA, 33 bp, Homo sapien
tgctgccattagaaaaattattgtgtatttttt

SEQ ID NO: 284798 - DNA, 33 bp, Homo sapien
tgctgccattagaaaatttattgtgtatttttt

SEQ ID NO: 284799 - DNA, 33 bp, Homo sapien
ctgtctctagtcaaaacatcaggaagagtgcag

SEQ ID NO: 284800 - DNA, 33 bp, Homo sapien
ctgtctctagtcaaaatatcaggaagagtgcag

SEQ ID NO: 284801 - DNA, 33 bp, Homo sapien
cgctattaaattctcaacttcatacttaaaaca

SEQ ID NO: 284802 - DNA, 33 bp, Homo sapien
cgctattaaattctcagcttcatacttaaaaca

SEQ ID NO: 284803 - DNA, 33 bp, Homo sapien
acagatatgggcacaaaaagttttacatcaatt

SEQ ID NO: 284804 - DNA, 33 bp, Homo sapien
acagatatgggcacaagaagttttacatcaatt

SEQ ID NO: 284805 - DNA, 33 bp, Homo sapien
gacaagcacatatgaaatagtaaggactgcatt

SEQ ID NO: 284806 - DNA, 33 bp, Homo sapien
gacaagcacatatgaagtagtaaggactgcatt

SEQ ID NO: 284807 - DNA, 33 bp, Homo sapien
ttattgctatgtgaataaaaaggcatatataac

SEQ ID NO: 284808 - DNA, 33 bp, Homo sapien
ttattgctatgtgaattaaaaggcatatataac

SEQ ID NO: 284809 - DNA, 33 bp, Homo sapien
tgtcagcagataaaacaacaaggaaatttgaac

SEQ ID NO: 284810 - DNA, 33 bp, Homo sapien
tgtcagcagataaaacgacaaggaaatttgaac

SEQ ID NO: 284811 - DNA, 33 bp, Homo sapien
ttagttctccagataaagttgggactgccaaaa

SEQ ID NO: 284812 - DNA, 33 bp, Homo sapien
ttagttctccagataaggttgggactgccaaaa

SEQ ID NO: 284813 - DNA, 33 bp, Homo sapien
agttgcatataagaaaagtgcatcttaaaatat

SEQ ID NO: 284814 - DNA, 33 bp, Homo sapien
agttgcatataagaaaggtgcatcttaaaatat

SEQ ID NO: 284815 - DNA, 33 bp, Homo sapien
ccaaacaaaccaaggaaaagcatttcaataaaa

SEQ ID NO: 284816 - DNA, 33 bp, Homo sapien
ccaaacaaaccaaggataagcatttcaataaaa

SEQ ID NO: 284817 - DNA, 33 bp, Homo sapien
aacctatgtaaattacagcagaattttttgaca

SEQ ID NO: 284818 - DNA, 33 bp, Homo sapien
aacctatgtaaattacggcagaattttttgaca

SEQ ID NO: 284819 - DNA, 33 bp, Homo sapien
tttatttgtgaaactcaagtcagagtcagcaga

SEQ ID NO: 284820 - DNA, 33 bp, Homo sapien
tttatttgtgaaactcgagtcagagtcagcaga

SEQ ID NO: 284821 - DNA, 33 bp, Homo sapien
taaagaaggctgatacacaattattaaaatata

SEQ ID NO: 284822 - DNA, 33 bp, Homo sapien
taaagaaggctgatacgcaattattaaaatata

SEQ ID NO: 284823 - DNA, 33 bp, Homo sapien
acttattcatcacctaaaatgtatgactttttt

SEQ ID NO: 284824 - DNA, 33 bp, Homo sapien
acttattcatcacctacaatgtatgactttttt

SEQ ID NO: 284825 - DNA, 33 bp, Homo sapien
atacatatacacgataaaaatatacacatacat

SEQ ID NO: 284826 - DNA, 33 bp, Homo sapien
atacatatacacgatagaaatatacacatacat

SEQ ID NO: 284827 - DNA, 33 bp, Homo sapien
atttcctaggctcttaactaaagtatctggcta

SEQ ID NO: 284828 - DNA, 33 bp, Homo sapien
atttcctaggctcttacctaaagtatctggcta

SEQ ID NO: 284829 - DNA, 33 bp, Homo sapien
atatggactttaatgtaaaacactgtgaaaaga

SEQ ID NO: 284830 - DNA, 33 bp, Homo sapien
atatggactttaatgtgaaacactgtgaaaaga

SEQ ID NO: 284831 - DNA, 33 bp, Homo sapien
agtttgccatgacaataagaagagatgaatatt

SEQ ID NO: 284832 - DNA, 33 bp, Homo sapien
agtttgccatgacaatgagaagagatgaatatt

SEQ ID NO: 284833 - DNA, 33 bp, Homo sapien
aaaggagataggcacccgagttcggagaagttt

SEQ ID NO: 284834 - DNA, 33 bp, Homo sapien
aaaggagataggcacctgagttcggagaagttt

SEQ ID NO: 284835 - DNA, 33 bp, Homo sapien
acataaattgtttgtacccaaatactcactgca

SEQ ID NO: 284836 - DNA, 33 bp, Homo sapien
acataaattgtttgtatccaaatactcactgca

SEQ ID NO: 284837 - DNA, 33 bp, Homo sapien
attctgtctttcttgcacagttcaaataagggc

SEQ ID NO: 284838 - DNA, 33 bp, Homo sapien
attctgtctttcttgcgcagttcaaataagggc

SEQ ID NO: 284839 - DNA, 33 bp, Homo sapien
ccaaagtgtacaatacagagtgaacttgaatgt

SEQ ID NO: 284840 - DNA, 33 bp, Homo sapien
ccaaagtgtacaatacggagtgaacttgaatgt

SEQ ID NO: 284841 - DNA, 33 bp, Homo sapien
gaaatttgctttgatacgctttgttttgttatt

SEQ ID NO: 284842 - DNA, 33 bp, Homo sapien
gaaatttgctttgatatgctttgttttgttatt

SEQ ID NO: 284843 - DNA, 33 bp, Homo sapien
tgtatctacatatatccgaacatagaaacatac

SEQ ID NO: 284844 - DNA, 33 bp, Homo sapien
tgtatctacatatatctgaacatagaaacatac

SEQ ID NO: 284845 - DNA, 33 bp, Homo sapien
gggtgaaagtatctaaaaggtcaaagacctagg

SEQ ID NO: 284846 - DNA, 33 bp, Homo sapien
gggtgaaagtatctaagaggtcaaagacctagg

SEQ ID NO: 284847 - DNA, 33 bp, Homo sapien
ggcaacattgacgaataacagttacatttattt

SEQ ID NO: 284848 - DNA, 33 bp, Homo sapien
ggcaacattgacgaatgacagttacatttattt

SEQ ID NO: 284849 - DNA, 33 bp, Homo sapien
gaatttggctcaacccagatacatgtccccttc

SEQ ID NO: 284850 - DNA, 33 bp, Homo sapien
gaatttggctcaacccggatacatgtccccttc

SEQ ID NO: 284851 - DNA, 33 bp, Homo sapien; identical to SEQ ID NO: 284849

SEQ ID NO: 284852 - DNA, 33 bp, Homo sapien; identical to SEQ ID NO: 284850

SEQ ID NO: 284853 - DNA, 33 bp, Homo sapien
gagatcctagaattgtaaagcctgatagtcaac

SEQ ID NO: 284854 - DNA, 33 bp, Homo sapien
gagatcctagaattgtcaagcctgatagtcaac

SEQ ID NO: 284855 - DNA, 33 bp, Homo sapien
tggggcctctgataaaccataaaggttctccgc

SEQ ID NO: 284856 - DNA, 33 bp, Homo sapien
tggggcctctgataaagcataaaggttctccgc

SEQ ID NO: 284857 - DNA, 33 bp, Homo sapien
cagtgcacaccttgaacgatttatagatagttt

SEQ ID NO: 284858 - DNA, 33 bp, Homo sapien
cagtgcacaccttgaatgatttatagatagttt

SEQ ID NO: 284859 - DNA, 33 bp, Homo sapien
ccacttcttcctgaaaagtcctcaattactttt

SEQ ID NO: 284860 - DNA, 33 bp, Homo sapien
ccacttcttcctgaaaggtcctcaattactttt

SEQ ID NO: 284861 - DNA, 33 bp, Homo sapien
gatatgtagtcaccctaaaagatacgttagttg

SEQ ID NO: 284862 - DNA, 33 bp, Homo sapien
gatatgtagtcaccctgaaagatacgttagttg

SEQ ID NO: 284863 - DNA, 33 bp, Homo sapien
tgtgtcgaaggcagcacatttaactccgtcttt

SEQ ID NO: 284864 - DNA, 33 bp, Homo sapien
tgtgtcgaaggcagcagatttaactccgtcttt

SEQ ID NO: 284865 - DNA, 33 bp, Homo sapien
gtattgtgcttgcttagcagaagaacataaagg

SEQ ID NO: 284866 - DNA, 33 bp, Homo sapien
gtattgtgcttgcttatcagaagaacataaagg

SEQ ID NO: 284867 - DNA, 33 bp, Homo sapien
gagatcctaagcatgcagcatcttcacaaaacc

SEQ ID NO: 284868 - DNA, 33 bp, Homo sapien
gagatcctaagcatgcggcatcttcacaaaacc

SEQ ID NO: 284869 - DNA, 33 bp, Homo sapien
aggtacctcaagtaccagattcacaggcaattt

SEQ ID NO: 284870 - DNA, 33 bp, Homo sapien
aggtacctcaagtaccggattcacaggcaattt

SEQ ID NO: 284871 - DNA, 33 bp, Homo sapien
ccattgatgtagactaagtaccttgtgacaaga

SEQ ID NO: 284872 - DNA, 33 bp, Homo sapien
ccattgatgtagactaggtaccttgtgacaaga

SEQ ID NO: 284873 - DNA, 33 bp, Homo sapien
aaagaagctagtgcagaaaaaaggggaatggac

SEQ ID NO: 284874 - DNA, 33 bp, Homo sapien
aaagaagctagtgcaggaaaaaggggaatggac

SEQ ID NO: 284875 - DNA, 33 bp, Homo sapien
cttccacaacctgaaaatagttacctccaaaag

SEQ ID NO: 284876 - DNA, 33 bp, Homo sapien
cttccacaacctgaaagtagttacctccaaaag

SEQ ID NO: 284877 - DNA, 33 bp, Homo sapien
ttggttttgcccacctaacagtttacagtagtg

SEQ ID NO: 284878 - DNA, 33 bp, Homo sapien
ttggttttgcccaccttacagtttacagtagtg

SEQ ID NO: 284879 - DNA, 33 bp, Homo sapien
tctatagacatcatcacccttgtgcaaaagtag

SEQ ID NO: 284880 - DNA, 33 bp, Homo sapien
tctatagacatcatcatccttgtgcaaaagtag

SEQ ID NO: 284881 - DNA, 33 bp, Homo sapien
aagaatagaaaaaaggaagtactccataacaca

SEQ ID NO: 284882 - DNA, 33 bp, Homo sapien
aagaatagaaaaaaggtagtactccataacaca

SEQ ID NO: 284883 - DNA, 33 bp, Homo sapien
ctaccagtagcagtaaagattatgcaaactcaa

SEQ ID NO: 284884 - DNA, 33 bp, Homo sapien
ctaccagtagcagtaacgattatgcaaactcaa

SEQ ID NO: 284885 - DNA, 33 bp, Homo sapien
caagcatttggaaagaaccagtgattgattaaa

SEQ ID NO: 284886 - DNA, 33 bp, Homo sapien
caagcatttggaaagatccagtgattgattaaa

SEQ ID NO: 284887 - DNA, 33 bp, Homo sapien
aggaattctgtattgaaaactggttgttaagct

SEQ ID NO: 284888 - DNA, 33 bp, Homo sapien
aggaattctgtattgagaactggttgttaagct

SEQ ID NO: 284889 - DNA, 33 bp, Homo sapien
ccagtttaccttagcacctcaaatcccagtatt

SEQ ID NO: 284890 - DNA, 33 bp, Homo sapien
ccagtttaccttagcatctcaaatcccagtatt

SEQ ID NO: 284891 - DNA, 33 bp, Homo sapien
tctttgtcataaaacaactcctacatttttgct

SEQ ID NO: 284892 - DNA, 33 bp, Homo sapien
tctttgtcataaaacagctcctacatttttgct

SEQ ID NO: 284893 - DNA, 33 bp, Homo sapien
ataggagtgaaactaaaaggaaaagaaaggagt

SEQ ID NO: 284894 - DNA, 33 bp, Homo sapien
ataggagtgaaactaagaggaaaagaaaggagt

SEQ ID NO: 284895 - DNA, 33 bp, Homo sapien
ttaatccaattgtgaaacttaaatgttggtgat

SEQ ID NO: 284896 - DNA, 33 bp, Homo sapien
ttaatccaattgtgaagcttaaatgttggtgat

SEQ ID NO: 284897 - DNA, 33 bp, Homo sapien
tcatattaattaaccaataacaccataaattat

SEQ ID NO: 284898 - DNA, 33 bp, Homo sapien
tcatattaattaaccagtaacaccataaattat

SEQ ID NO: 284899 - DNA, 33 bp, Homo sapien
tttgtgatttaaaaaaatctgttgatcacgagg

SEQ ID NO: 284900 - DNA, 33 bp, Homo sapien
tttgtgatttaaaaaattctgttgatcacgagg

SEQ ID NO: 284901 - DNA, 33 bp, Homo sapien
attcttatacaggaaacgtgagattataggatt

SEQ ID NO: 284902 - DNA, 33 bp, Homo sapien
attcttatacaggaaatgtgagattataggatt

SEQ ID NO: 284903 - DNA, 33 bp, Homo sapien
ggtgacttgaatgacaaaaatttatttctcata

SEQ ID NO: 284904 - DNA, 33 bp, Homo sapien
ggtgacttgaatgacagaaatttatttctcata

SEQ ID NO: 284905 - DNA, 33 bp, Homo sapien
ttgttactgaaattcaactgtcatgatgtgaag

SEQ ID NO: 284906 - DNA, 33 bp, Homo sapien
ttgttactgaaattcagctgtcatgatgtgaag

SEQ ID NO: 284907 - DNA, 33 bp, Homo sapien
atcacaaaggatgatacggtgaaattgaacaac

SEQ ID NO: 284908 - DNA, 33 bp, Homo sapien
atcacaaaggatgatatggtgaaattgaacaac

SEQ ID NO: 284909 - DNA, 33 bp, Homo sapien
ggggtcatactctatacattgaactgcaatttg

SEQ ID NO: 284910 - DNA, 33 bp, Homo sapien
ggggtcatactctatatattgaactgcaatttg

SEQ ID NO: 284911 - DNA, 33 bp, Homo sapien
caaagtgcaaattctacgctctaggatgttgaa

SEQ ID NO: 284912 - DNA, 33 bp, Homo sapien
caaagtgcaaattctatgctctaggatgttgaa

SEQ ID NO: 284913 - DNA, 33 bp, Homo sapien
catttagcctctagaagtaatatcaatatcatc

SEQ ID NO: 284914 - DNA, 33 bp, Homo sapien
catttagcctctagaattaatatcaatatcatc

SEQ ID NO: 284915 - DNA, 33 bp, Homo sapien
tttttggagatttataagcctcattgtaatatg

SEQ ID NO: 284916 - DNA, 33 bp, Homo sapien
tttttggagatttataggcctcattgtaatatg

SEQ ID NO: 284917 - DNA, 33 bp, Homo sapien
gtttgctttagaaatacgattctgattgtgtta

SEQ ID NO: 284918 - DNA, 33 bp, Homo sapien
gtttgctttagaaatatgattctgattgtgtta

SEQ ID NO: 284919 - DNA, 33 bp, Homo sapien
aacttcattctcatagacagtagtgcagatgga

SEQ ID NO: 284920 - DNA, 33 bp, Homo sapien
aacttcattctcatagccagtagtgcagatgga

SEQ ID NO: 284921 - DNA, 33 bp, Homo sapien
aggttgaccagagaaaaggcataggttcctaga

SEQ ID NO: 284922 - DNA, 33 bp, Homo sapien
aggttgaccagagaaacggcataggttcctaga

SEQ ID NO: 284923 - DNA, 33 bp, Homo sapien
ctggtaacataatccacgcttgtctagtgacat

SEQ ID NO: 284924 - DNA, 33 bp, Homo sapien
ctggtaacataatccatgcttgtctagtgacat

SEQ ID NO: 284925 - DNA, 33 bp, Homo sapien
ctttctaggctaaatgccatgttgaaaaattgt

SEQ ID NO: 284926 - DNA, 33 bp, Homo sapien
ctttctaggctaaatgtcatgttgaaaaattgt

SEQ ID NO: 284927 - DNA, 33 bp, Homo sapien
aaaagaggcatagttaactcccacttaggaaac

SEQ ID NO: 284928 - DNA, 33 bp, Homo sapien
aaaagaggcatagttacctcccacttaggaaac

SEQ ID NO: 284929 - DNA, 33 bp, Homo sapien
ttgataagtaataaaacacgggatactgacaaa

SEQ ID NO: 284930 - DNA, 33 bp, Homo sapien
ttgataagtaataaaagacgggatactgacaaa

SEQ ID NO: 284931 - DNA, 33 bp, Homo sapien
gcaaaaatctgtcaatgagtgtattaggagcca

SEQ ID NO: 284932 - DNA, 33 bp, Homo sapien
gcaaaaatctgtcaattagtgtattaggagcca

SEQ ID NO: 284933 - DNA, 33 bp, Homo sapien
catactggtacagaagcattatgtagttgcttt

SEQ ID NO: 284934 - DNA, 33 bp, Homo sapien
catactggtacagaagtattatgtagttgcttt

SEQ ID NO: 284935 - DNA, 33 bp, Homo sapien
ttttatttctttggcaatctatcttttagtgtg

SEQ ID NO: 284936 - DNA, 33 bp, Homo sapien
ttttatttctttggcagtctatcttttagtgtg

SEQ ID NO: 284937 - DNA, 33 bp, Homo sapien
atataaagatcactgaaaaaacttgaatgggat

SEQ ID NO: 284938 - DNA, 33 bp, Homo sapien
atataaagatcactgacaaaacttgaatgggat

SEQ ID NO: 284939 - DNA, 33 bp, Homo sapien
agatcatgaaagtcaaagaaacactgagaatgt

SEQ ID NO: 284940 - DNA, 33 bp, Homo sapien
agatcatgaaagtcaaggaaacactgagaatgt

SEQ ID NO: 284941 - DNA, 33 bp, Homo sapien
gtgcagtttctacagacagcaaaatgtgaaact

SEQ ID NO: 284942 - DNA, 33 bp, Homo sapien
gtgcagtttctacagagagcaaaatgtgaaact

SEQ ID NO: 284943 - DNA, 33 bp, Homo sapien
agcaaaaagtccttcaaaagataaagcaaaaat

SEQ ID NO: 284944 - DNA, 33 bp, Homo sapien
agcaaaaagtccttcagaagataaagcaaaaat

SEQ ID NO: 284945 - DNA, 33 bp, Homo sapien
ttgtgataccaaaatcaacgtgtctgacctcag

SEQ ID NO: 284946 - DNA, 33 bp, Homo sapien
ttgtgataccaaaatcgacgtgtctgacctcag

SEQ ID NO: 284947 - DNA, 33 bp, Homo sapien
aacattaacaaaatgcaaccacgataaatttta

SEQ ID NO: 284948 - DNA, 33 bp, Homo sapien
aacattaacaaaatgcgaccacgataaatttta

SEQ ID NO: 284949 - DNA, 33 bp, Homo sapien
attttataaggaattgaaagtcattgaaaatat

SEQ ID NO: 284950 - DNA, 33 bp, Homo sapien
attttataaggaattggaagtcattgaaaatat

SEQ ID NO: 284951 - DNA, 33 bp, Homo sapien
attagtcaccagtgaaaatggttatataaaatc

SEQ ID NO: 284952 - DNA, 33 bp, Homo sapien
attagtcaccagtgaagatggttatataaaatc

SEQ ID NO: 284953 - DNA, 33 bp, Homo sapien
ttatctaatcttacaaaaacagaacctctgttc

SEQ ID NO: 284954 - DNA, 33 bp, Homo sapien
ttatctaatcttacaacaacagaacctctgttc

SEQ ID NO: 284955 - DNA, 33 bp, Homo sapien
tctaaagcctaatgaaaaattcaacaattatgg

SEQ ID NO: 284956 - DNA, 33 bp, Homo sapien
tctaaagcctaatgaacaattcaacaattatgg

SEQ ID NO: 284957 - DNA, 33 bp, Homo sapien
tttatactactgcatacaaggaaagcatggtta

SEQ ID NO: 284958 - DNA, 33 bp, Homo sapien
tttatactactgcatataaggaaagcatggtta

SEQ ID NO: 284959 - DNA, 33 bp, Homo sapien
tgatatgctgagtagcactaattatcaattcat

SEQ ID NO: 284960 - DNA, 33 bp, Homo sapien
tgatatgctgagtagcgctaattatcaattcat

SEQ ID NO: 284961 - DNA, 33 bp, Homo sapien
gaaatagatatacacacgggaaagtactaaatt

SEQ ID NO: 284962 - DNA, 33 bp, Homo sapien
gaaatagatatacacatgggaaagtactaaatt

SEQ ID NO: 284963 - DNA, 33 bp, Homo sapien
atgggataaagctgcactgaaattcttttattt

SEQ ID NO: 284964 - DNA, 33 bp, Homo sapien
atgggataaagctgcattgaaattcttttattt

SEQ ID NO: 284965 - DNA, 33 bp, Homo sapien
tttgttctggccaacaccagaagataggttcct

SEQ ID NO: 284966 - DNA, 33 bp, Homo sapien
tttgttctggccaacatcagaagataggttcct

SEQ ID NO: 284967 - DNA, 33 bp, Homo sapien
aaggacagtggcaagaataaaccagtgcaattt

SEQ ID NO: 284968 - DNA, 33 bp, Homo sapien
aaggacagtggcaagagtaaaccagtgcaattt

SEQ ID NO: 284969 - DNA, 33 bp, Homo sapien
agtcagccactgagaaacgattgccatcccaca

SEQ ID NO: 284970 - DNA, 33 bp, Homo sapien
agtcagccactgagaagcgattgccatcccaca

SEQ ID NO: 284971 - DNA, 33 bp, Homo sapien
ttcgtatcattctgcaatattatttttttcact

SEQ ID NO: 284972 - DNA, 33 bp, Homo sapien
ttcgtatcattctgcagtattatttttttcact

SEQ ID NO: 284973 - DNA, 33 bp, Homo sapien
tttaagaggagattagaccattagagtttcttc

SEQ ID NO: 284974 - DNA, 33 bp, Homo sapien
tttaagaggagattaggccattagagtttcttc

SEQ ID NO: 284975 - DNA, 33 bp, Homo sapien
cataattctagacacaacctttattttttctct

SEQ ID NO: 284976 - DNA, 33 bp, Homo sapien
cataattctagacacatcctttattttttctct

SEQ ID NO: 284977 - DNA, 33 bp, Homo sapien
acacaaacttaactgacccattgaggaacagtt

SEQ ID NO: 284978 - DNA, 33 bp, Homo sapien
acacaaacttaactgagccattgaggaacagtt

SEQ ID NO: 284979 - DNA, 33 bp, Homo sapien
cgctcattaattctgaaatgtcacaaacagaag

SEQ ID NO: 284980 - DNA, 33 bp, Homo sapien
cgctcattaattctgatatgtcacaaacagaag

SEQ ID NO: 284981 - DNA, 33 bp, Homo sapien
agattaataaaaatgaacccaagtttgaagctg

SEQ ID NO: 284982 - DNA, 33 bp, Homo sapien
agattaataaaaatgagcccaagtttgaagctg

SEQ ID NO: 284983 - DNA, 33 bp, Homo sapien
gttgtatgtgcaagtcactgaaattaccaaatt

SEQ ID NO: 284984 - DNA, 33 bp, Homo sapien
gttgtatgtgcaagtcgctgaaattaccaaatt

SEQ ID NO: 284985 - DNA, 33 bp, Homo sapien
tgaaaaatagtgcaaactttatgacctgaacta

SEQ ID NO: 284986 - DNA, 33 bp, Homo sapien
tgaaaaatagtgcaaagtttatgacctgaacta

SEQ ID NO: 284987 - DNA, 33 bp, Homo sapien
acaaatccataggaacaatctgtgatccatacc

SEQ ID NO: 284988 - DNA, 33 bp, Homo sapien
acaaatccataggaacgatctgtgatccatacc

SEQ ID NO: 284989 - DNA, 33 bp, Homo sapien
acaaaaacacgactaacacatttatttgaaggc

SEQ ID NO: 284990 - DNA, 33 bp, Homo sapien
acaaaaacacgactaagacatttatttgaaggc

SEQ ID NO: 284991 - DNA, 33 bp, Homo sapien
aagagacaaggaaaagaccttctcccattacca

SEQ ID NO: 284992 - DNA, 33 bp, Homo sapien
aagagacaaggaaaaggccttctcccattacca

SEQ ID NO: 284993 - DNA, 33 bp, Homo sapien
gggctgattgttcccactggcagatgctcttca

SEQ ID NO: 284994 - DNA, 33 bp, Homo sapien
gggctgattgttcccattggcagatgctcttca

SEQ ID NO: 284995 - DNA, 33 bp, Homo sapien
taatatgccaagttaaacaaaaccattttaatg

SEQ ID NO: 284996 - DNA, 33 bp, Homo sapien
taatatgccaagttaatcaaaaccattttaatg

SEQ ID NO: 284997 - DNA, 33 bp, Homo sapien
tttgagagttacctcacgctgactctgaccata

SEQ ID NO: 284998 - DNA, 33 bp, Homo sapien
tttgagagttacctcatgctgactctgaccata

SEQ ID NO: 284999 - DNA, 33 bp, Homo sapien
caagagtttctgaggacgtggaataacagtaac

SEQ ID NO: 285000 - DNA, 33 bp, Homo sapien
caagagtttctgaggatgtggaataacagtaac

SEQ ID NO: 285001 - DNA, 33 bp, Homo sapien
tttggaaagagaagtgaattaatataaccattt

SEQ ID NO: 285002 - DNA, 33 bp, Homo sapien
tttggaaagagaagtggattaatataaccattt

SEQ ID NO: 285003 - DNA, 33 bp, Homo sapien
agctgccataaacataagagtgtagctatctct

SEQ ID NO: 285004 - DNA, 33 bp, Homo sapien
agctgccataaacataggagtgtagctatctct

SEQ ID NO: 285005 - DNA, 33 bp, Homo sapien
gaaaggcaaaatagaacggtgactgccaggagg

SEQ ID NO: 285006 - DNA, 33 bp, Homo sapien
gaaaggcaaaatagaatggtgactgccaggagg

SEQ ID NO: 285007 - DNA, 33 bp, Homo sapien
tgaggttatggtatcacgggtgtacacttatat

SEQ ID NO: 285008 - DNA, 33 bp, Homo sapien
tgaggttatggtatcatgggtgtacacttatat

SEQ ID NO: 285009 - DNA, 33 bp, Homo sapien
tgtgattacgtttatcacttttatacactgaaa

SEQ ID NO: 285010 - DNA, 33 bp, Homo sapien
tgtgattacgtttatcgcttttatacactgaaa

SEQ ID NO: 285011 - DNA, 33 bp, Homo sapien
atgatacatacagatacagaaatagagagatac

SEQ ID NO: 285012 - DNA, 33 bp, Homo sapien
atgatacatacagatatagaaatagagagatac

SEQ ID NO: 285013 - DNA, 33 bp, Homo sapien
ctgtggcaagctcccaaattttaaccgtccact

SEQ ID NO: 285014 - DNA, 33 bp, Homo sapien
ctgtggcaagctcccagattttaaccgtccact

SEQ ID NO: 285015 - DNA, 33 bp, Homo sapien
taagacttaagggagacagattggcctacttgg

SEQ ID NO: 285016 - DNA, 33 bp, Homo sapien
taagacttaagggagatagattggcctacttgg

SEQ ID NO: 285017 - DNA, 33 bp, Homo sapien
ttaatgtggtctcttaaaaaggaggagattaat

SEQ ID NO: 285018 - DNA, 33 bp, Homo sapien
ttaatgtggtctcttagaaaggaggagattaat

SEQ ID NO: 285019 - DNA, 33 bp, Homo sapien
cccttctcacactatccgaggaaggaatgagac

SEQ ID NO: 285020 - DNA, 33 bp, Homo sapien
cccttctcacactatctgaggaaggaatgagac

SEQ ID NO: 285021 - DNA, 33 bp, Homo sapien
gaggtgaaatttttcaataatgatactgctcta

SEQ ID NO: 285022 - DNA, 33 bp, Homo sapien
gaggtgaaatttttcattaatgatactgctcta

SEQ ID NO: 285023 - DNA, 33 bp, Homo sapien
ctgtacagtttctacaacactccaactaaaagt

SEQ ID NO: 285024 - DNA, 33 bp, Homo sapien
ctgtacagtttctacatcactccaactaaaagt

SEQ ID NO: 285025 - DNA, 33 bp, Homo sapien
aatgttctatgcaaaggaaaaattatagcctta

SEQ ID NO: 285026 - DNA, 33 bp, Homo sapien
aatgttctatgcaaagtaaaaattatagcctta

SEQ ID NO: 285027 - DNA, 33 bp, Homo sapien
ctgaaatgtggctgaacaaggtagtcagaaagt

SEQ ID NO: 285028 - DNA, 33 bp, Homo sapien
ctgaaatgtggctgaagaaggtagtcagaaagt

SEQ ID NO: 285029 - DNA, 33 bp, Homo sapien
ggagatcaccaattcaaatttgctcaggtttgg

SEQ ID NO: 285030 - DNA, 33 bp, Homo sapien
ggagatcaccaattcagatttgctcaggtttgg

SEQ ID NO: 285031 - DNA, 33 bp, Homo sapien
cttaacatcagcctaactgggttattgccaaat

SEQ ID NO: 285032 - DNA, 33 bp, Homo sapien
cttaacatcagcctaattgggttattgccaaat

SEQ ID NO: 285033 - DNA, 33 bp, Homo sapien
gcacagagacgtaaacaaattcttatgtatata

SEQ ID NO: 285034 - DNA, 33 bp, Homo sapien
gcacagagacgtaaacgaattcttatgtatata

SEQ ID NO: 285035 - DNA, 33 bp, Homo sapien
ttgtcctttcctcagaatatgctgtagactttg

SEQ ID NO: 285036 - DNA, 33 bp, Homo sapien
ttgtcctttcctcagagtatgctgtagactttg

SEQ ID NO: 285037 - DNA, 33 bp, Homo sapien
ttaaaaaatctgagaactaggaaaacatgataa

SEQ ID NO: 285038 - DNA, 33 bp, Homo sapien
ttaaaaaatctgagaagtaggaaaacatgataa

SEQ ID NO: 285039 - DNA, 33 bp, Homo sapien
aattttatagttcagaccagaaatgatgggggt

SEQ ID NO: 285040 - DNA, 33 bp, Homo sapien
aattttatagttcagagcagaaatgatgggggt

SEQ ID NO: 285041 - DNA, 33 bp, Homo sapien
tgatgcaattgtctcaacactaggatgcagcat

SEQ ID NO: 285042 - DNA, 33 bp, Homo sapien
tgatgcaattgtctcagcactaggatgcagcat

SEQ ID NO: 285043 - DNA, 33 bp, Homo sapien
tgtcattctccgttctaacactgaatcagctcc

SEQ ID NO: 285044 - DNA, 33 bp, Homo sapien
tgtcattctccgttctgacactgaatcagctcc

SEQ ID NO: 285045 - DNA, 33 bp, Homo sapien
tgtatttttcttaagcacaacattacagttatt

SEQ ID NO: 285046 - DNA, 33 bp, Homo sapien
tgtatttttcttaagcgcaacattacagttatt

SEQ ID NO: 285047 - DNA, 33 bp, Homo sapien
actcaaaatacagatcagaaagagccacacaac

SEQ ID NO: 285048 - DNA, 33 bp, Homo sapien
actcaaaatacagatcggaaagagccacacaac

SEQ ID NO: 285049 - DNA, 33 bp, Homo sapien
acaataattactggacaataacaattcatccaa

SEQ ID NO: 285050 - DNA, 33 bp, Homo sapien
acaataattactggaccataacaattcatccaa

SEQ ID NO: 285051 - DNA, 33 bp, Homo sapien
gtgcattttcctagagactcaggatgagaagaa

SEQ ID NO: 285052 - DNA, 33 bp, Homo sapien
gtgcattttcctagagtctcaggatgagaagaa

SEQ ID NO: 285053 - DNA, 33 bp, Homo sapien
ccttcagtcttctctacaagggtcataaaactt

SEQ ID NO: 285054 - DNA, 33 bp, Homo sapien
ccttcagtcttctctataagggtcataaaactt

SEQ ID NO: 285055 - DNA, 33 bp, Homo sapien
tacattgatattctaactccagatacctgtgaa

SEQ ID NO: 285056 - DNA, 33 bp, Homo sapien
tacattgatattctaattccagatacctgtgaa

SEQ ID NO: 285057 - DNA, 33 bp, Homo sapien
atactttagtaaataacgagccttcgatgtgac

SEQ ID NO: 285058 - DNA, 33 bp, Homo sapien
atactttagtaaataatgagccttcgatgtgac

SEQ ID NO: 285059 - DNA, 33 bp, Homo sapien
tccggaagaaggcaccacacatggtctccttgc

SEQ ID NO: 285060 - DNA, 33 bp, Homo sapien
tccggaagaaggcaccgcacatggtctccttgc

SEQ ID NO: 285061 - DNA, 33 bp, Homo sapien
tagtaatcactgtgtaaggaaatcttttgaatc

SEQ ID NO: 285062 - DNA, 33 bp, Homo sapien
tagtaatcactgtgtagggaaatcttttgaatc

SEQ ID NO: 285063 - DNA, 33 bp, Homo sapien
attcttatggatatataaagtagtccagaagaa

SEQ ID NO: 285064 - DNA, 33 bp, Homo sapien
attcttatggatatatgaagtagtccagaagaa

SEQ ID NO: 285065 - DNA, 33 bp, Homo sapien
tggaagatatccaaataaccagtagagaatccc

SEQ ID NO: 285066 - DNA, 33 bp, Homo sapien
tggaagatatccaaattaccagtagagaatccc

SEQ ID NO: 285067 - DNA, 33 bp, Homo sapien
aattcaatgaatactactacagcttcctgacag

SEQ ID NO: 285068 - DNA, 33 bp, Homo sapien
aattcaatgaatactagtacagcttcctgacag

SEQ ID NO: 285069 - DNA, 33 bp, Homo sapien
acaacagtaaagaagtaacaattattctgagaa

SEQ ID NO: 285070 - DNA, 33 bp, Homo sapien
acaacagtaaagaagtgacaattattctgagaa

SEQ ID NO: 285071 - DNA, 33 bp, Homo sapien
aacaaactgccaaaaacttggtggcctaaaata

SEQ ID NO: 285072 - DNA, 33 bp, Homo sapien
aacaaactgccaaaaatttggtggcctaaaata

SEQ ID NO: 285073 - DNA, 33 bp, Homo sapien
gaatatcacataaacacccaatcttaaaacaca

SEQ ID NO: 285074 - DNA, 33 bp, Homo sapien
gaatatcacataaacagccaatcttaaaacaca

SEQ ID NO: 285075 - DNA, 33 bp, Homo sapien
tgggttgttacagttccagccttctctatctag

SEQ ID NO: 285076 - DNA, 33 bp, Homo sapien
tgggttgttacagttctagccttctctatctag

SEQ ID NO: 285077 - DNA, 33 bp, Homo sapien
aaagtcttgcagcaagaaattttgtcagtaaag

SEQ ID NO: 285078 - DNA, 33 bp, Homo sapien
aaagtcttgcagcaagcaattttgtcagtaaag

SEQ ID NO: 285079 - DNA, 33 bp, Homo sapien
gtcagcggggtgcaaaaagaaaaggtctagaac

SEQ ID NO: 285080 - DNA, 33 bp, Homo sapien
gtcagcggggtgcaaagagaaaaggtctagaac

SEQ ID NO: 285081 - DNA, 33 bp, Homo sapien
tcaccacaactgggcacgagtttcttcaggtca

SEQ ID NO: 285082 - DNA, 33 bp, Homo sapien
tcaccacaactgggcaggagtttcttcaggtca

SEQ ID NO: 285083 - DNA, 33 bp, Homo sapien
ttagggagataagcacacatttacttacaaatt

SEQ ID NO: 285084 - DNA, 33 bp, Homo sapien
ttagggagataagcacgcatttacttacaaatt

SEQ ID NO: 285085 - DNA, 33 bp, Homo sapien
gtaggaactaaaagcaaaaactcaagaaagaaa

SEQ ID NO: 285086 - DNA, 33 bp, Homo sapien
gtaggaactaaaagcagaaactcaagaaagaaa

SEQ ID NO: 285087 - DNA, 33 bp, Homo sapien
taattggagctatgaacttacaatattattacc

SEQ ID NO: 285088 - DNA, 33 bp, Homo sapien
taattggagctatgaatttacaatattattacc

SEQ ID NO: 285089 - DNA, 33 bp, Homo sapien
taagtgtgctttaaacagaagttcaatttgcaa

SEQ ID NO: 285090 - DNA, 33 bp, Homo sapien
taagtgtgctttaaacggaagttcaatttgcaa

SEQ ID NO: 285091 - DNA, 33 bp, Homo sapien
gctgtgaataggaggacattatagaagaatcag

SEQ ID NO: 285092 - DNA, 33 bp, Homo sapien
gctgtgaataggaggatattatagaagaatcag

SEQ ID NO: 285093 - DNA, 33 bp, Homo sapien
ggaaagtgttacataacaggcagagctaaagca

SEQ ID NO: 285094 - DNA, 33 bp, Homo sapien
ggaaagtgttacataataggcagagctaaagca

SEQ ID NO: 285095 - DNA, 33 bp, Homo sapien
acagagctgatataccagaaaaagttctaaaaa

SEQ ID NO: 285096 - DNA, 33 bp, Homo sapien
acagagctgatatacctgaaaaagttctaaaaa

SEQ ID NO: 285097 - DNA, 33 bp, Homo sapien
caagcagtttttcctacgctatgtagcaatttt

SEQ ID NO: 285098 - DNA, 33 bp, Homo sapien
caagcagtttttcctatgctatgtagcaatttt

SEQ ID NO: 285099 - DNA, 33 bp, Homo sapien
tactcattccgagggactaaaaaagactaagcc

SEQ ID NO: 285100 - DNA, 33 bp, Homo sapien
tactcattccgagggattaaaaaagactaagcc

SEQ ID NO: 285101 - DNA, 33 bp, Homo sapien
ataattcaggtcaatagagctgctatgcgtgtg

SEQ ID NO: 285102 - DNA, 33 bp, Homo sapien
ataattcaggtcaatatagctgctatgcgtgtg

SEQ ID NO: 285103 - DNA, 33 bp, Homo sapien
aaaacagaaaaaaaacagtcctgaatttctgac

SEQ ID NO: 285104 - DNA, 33 bp, Homo sapien
aaaacagaaaaaaaactgtcctgaatttctgac

SEQ ID NO: 285105 - DNA, 33 bp, Homo sapien
agatacaactcctgtgaacaactctcatggatc

SEQ ID NO: 285106 - DNA, 33 bp, Homo sapien
agatacaactcctgtggacaactctcatggatc

SEQ ID NO: 285107 - DNA, 33 bp, Homo sapien
atctctagagatataaccacatttactcaagaa

SEQ ID NO: 285108 - DNA, 33 bp, Homo sapien
atctctagagatataatcacatttactcaagaa

SEQ ID NO: 285109 - DNA, 33 bp, Homo sapien
tccattaacacttacactgatgcactctgaagc

SEQ ID NO: 285110 - DNA, 33 bp, Homo sapien
tccattaacacttacattgatgcactctgaagc

SEQ ID NO: 285111 - DNA, 33 bp, Homo sapien
ttaccctgaattgaccatcacataatgtataca

SEQ ID NO: 285112 - DNA, 33 bp, Homo sapien
ttaccctgaattgaccgtcacataatgtataca

SEQ ID NO: 285113 - DNA, 33 bp, Homo sapien
ttagcaattatgcgtaaatctgatatagatatt

SEQ ID NO: 285114 - DNA, 33 bp, Homo sapien
ttagcaattatgcgtacatctgatatagatatt

SEQ ID NO: 285115 - DNA, 33 bp, Homo sapien
catttgaatagcaactcactcttttatttatta

SEQ ID NO: 285116 - DNA, 33 bp, Homo sapien
catttgaatagcaacttactcttttatttatta

SEQ ID NO: 285117 - DNA, 33 bp, Homo sapien
atgatgattgggtctacgtacctatgactagaa

SEQ ID NO: 285118 - DNA, 33 bp, Homo sapien
atgatgattgggtctatgtacctatgactagaa

SEQ ID NO: 285119 - DNA, 33 bp, Homo sapien
gctttccactgtgacaaggtagtgctgattcaa

SEQ ID NO: 285120 - DNA, 33 bp, Homo sapien
gctttccactgtgacagggtagtgctgattcaa

SEQ ID NO: 285121 - DNA, 33 bp, Homo sapien
tatagggttctaaataaacttcaaaagcaatct

SEQ ID NO: 285122 - DNA, 33 bp, Homo sapien
tatagggttctaaatacacttcaaaagcaatct

SEQ ID NO: 285123 - DNA, 33 bp, Homo sapien
tacaaatttgccagacgggaaagtgaagagcaa

SEQ ID NO: 285124 - DNA, 33 bp, Homo sapien
tacaaatttgccagactggaaagtgaagagcaa

SEQ ID NO: 285125 - DNA, 33 bp, Homo sapien
ctaggaaaggaattataagaaacagtgctagtt

SEQ ID NO: 285126 - DNA, 33 bp, Homo sapien
ctaggaaaggaattatcagaaacagtgctagtt

SEQ ID NO: 285127 - DNA, 33 bp, Homo sapien
tttatatagactgtaccctactgatacacactc

SEQ ID NO: 285128 - DNA, 33 bp, Homo sapien
tttatatagactgtactctactgatacacactc

SEQ ID NO: 285129 - DNA, 33 bp, Homo sapien
gacctgataccgttgccgcaaaatcaaaaaaat

SEQ ID NO: 285130 - DNA, 33 bp, Homo sapien
gacctgataccgttgctgcaaaatcaaaaaaat

SEQ ID NO: 285131 - DNA, 33 bp, Homo sapien
tggagataacagtggtaaattgtgtgccatttg

SEQ ID NO: 285132 - DNA, 33 bp, Homo sapien
tggagataacagtggttaattgtgtgccatttg

SEQ ID NO: 285133 - DNA, 33 bp, Homo sapien
gctattagccattctccaagagttcataaatat

SEQ ID NO: 285134 - DNA, 33 bp, Homo sapien
gctattagccattctctaagagttcataaatat

SEQ ID NO: 285135 - DNA, 33 bp, Homo sapien
agcagtgggcttataaattaagtagatgtacag

SEQ ID NO: 285136 - DNA, 33 bp, Homo sapien
agcagtgggcttataatttaagtagatgtacag

SEQ ID NO: 285137 - DNA, 33 bp, Homo sapien
ctcaaagaaatccaccagaagttgtgtcaagtt

SEQ ID NO: 285138 - DNA, 33 bp, Homo sapien
ctcaaagaaatccaccggaagttgtgtcaagtt

SEQ ID NO: 285139 - DNA, 33 bp, Homo sapien
ttacaaaaaacacaaaatgaccctgttcagaat

SEQ ID NO: 285140 - DNA, 33 bp, Homo sapien
ttacaaaaaacacaaattgaccctgttcagaat

SEQ ID NO: 285141 - DNA, 33 bp, Homo sapien
attttggcctgtgcagcatcagtgttgtgtggg

SEQ ID NO: 285142 - DNA, 33 bp, Homo sapien
attttggcctgtgcagtatcagtgttgtgtggg

SEQ ID NO: 285143 - DNA, 33 bp, Homo sapien
tttaaagacatacctaaagtgccaatttgaagc

SEQ ID NO: 285144 - DNA, 33 bp, Homo sapien
tttaaagacatacctacagtgccaatttgaagc

SEQ ID NO: 285145 - DNA, 33 bp, Homo sapien
atggacagtggattcccgaggtttccagactta

SEQ ID NO: 285146 - DNA, 33 bp, Homo sapien
atggacagtggattcctgaggtttccagactta

SEQ ID NO: 285147 - DNA, 33 bp, Homo sapien
atggccaccagaggtacagggatgtgagtcttg

SEQ ID NO: 285148 - DNA, 33 bp, Homo sapien
atggccaccagaggtatagggatgtgagtcttg

SEQ ID NO: 285149 - DNA, 33 bp, Homo sapien
gaggagatgtaaattcacaggcacttccagcta

SEQ ID NO: 285150 - DNA, 33 bp, Homo sapien
gaggagatgtaaattcgcaggcacttccagcta

SEQ ID NO: 285151 - DNA, 33 bp, Homo sapien
gggcctgagaaaggaacaagggcaagcacgttt

SEQ ID NO: 285152 - DNA, 33 bp, Homo sapien
gggcctgagaaaggaagaagggcaagcacgttt

SEQ ID NO: 285153 - DNA, 33 bp, Homo sapien
aaaaatcagctcattgcaaaaataatgttccaa

SEQ ID NO: 285154 - DNA, 33 bp, Homo sapien
aaaaatcagctcattgtaaaaataatgttccaa

SEQ ID NO: 285155 - DNA, 33 bp, Homo sapien
agctatcaagtggaacaagttattttgtgtgtg

SEQ ID NO: 285156 - DNA, 33 bp, Homo sapien
agctatcaagtggaaccagttattttgtgtgtg

SEQ ID NO: 285157 - DNA, 33 bp, Homo sapien
acatatataattgtaaacagacaaattcaaact

SEQ ID NO: 285158 - DNA, 33 bp, Homo sapien
acatatataattgtaagcagacaaattcaaact

SEQ ID NO: 285159 - DNA, 33 bp, Homo sapien
cattgaagcaccttccactagcattaagaggct

SEQ ID NO: 285160 - DNA, 33 bp, Homo sapien
cattgaagcaccttccgctagcattaagaggct

SEQ ID NO: 285161 - DNA, 33 bp, Homo sapien
cagtctgtcattatcacaatttgcactagagat

SEQ ID NO: 285162 - DNA, 33 bp, Homo sapien
cagtctgtcattatcataatttgcactagagat

SEQ ID NO: 285163 - DNA, 33 bp, Homo sapien
agaaattgccttgggcaactggatgagtgacag

SEQ ID NO: 285164 - DNA, 33 bp, Homo sapien
agaaattgccttgggctactggatgagtgacag

SEQ ID NO: 285165 - DNA, 33 bp, Homo sapien
atgtgaatgagacagacgtttggaacttgcatg

SEQ ID NO: 285166 - DNA, 33 bp, Homo sapien
atgtgaatgagacagatgtttggaacttgcatg

SEQ ID NO: 285167 - DNA, 33 bp, Homo sapien
atacttgacactggtacgaaaagatatatttaa

SEQ ID NO: 285168 - DNA, 33 bp, Homo sapien
atacttgacactggtatgaaaagatatatttaa

SEQ ID NO: 285169 - DNA, 33 bp, Homo sapien
gaagccacattgaaatgaattgtagtatagatt

SEQ ID NO: 285170 - DNA, 33 bp, Homo sapien
gaagccacattgaaattaattgtagtatagatt

SEQ ID NO: 285171 - DNA, 33 bp, Homo sapien
gttcaggtgggcatcacggtcgtagcaatatgt

SEQ ID NO: 285172 - DNA, 33 bp, Homo sapien
gttcaggtgggcatcatggtcgtagcaatatgt

SEQ ID NO: 285173 - DNA, 33 bp, Homo sapien
aaggtagattgtcctccctaatgtgagtaggca

SEQ ID NO: 285174 - DNA, 33 bp, Homo sapien
aaggtagattgtcctctctaatgtgagtaggca

SEQ ID NO: 285175 - DNA, 33 bp, Homo sapien
gactgaatcccaatgaaagttaatgcccccacc

SEQ ID NO: 285176 - DNA, 33 bp, Homo sapien
gactgaatcccaatgagagttaatgcccccacc

SEQ ID NO: 285177 - DNA, 33 bp, Homo sapien
gcaaacatgcattggaggataaccccagagtca

SEQ ID NO: 285178 - DNA, 33 bp, Homo sapien
gcaaacatgcattggatgataaccccagagtca

SEQ ID NO: 285179 - DNA, 33 bp, Homo sapien
tgttccagctcttccaggtactccgtgtgatct

SEQ ID NO: 285180 - DNA, 33 bp, Homo sapien
tgttccagctcttccatgtactccgtgtgatct

SEQ ID NO: 285181 - DNA, 33 bp, Homo sapien
ctggtttgtttgtttacgaaacagaaatatatg

SEQ ID NO: 285182 - DNA, 33 bp, Homo sapien
ctggtttgtttgtttatgaaacagaaatatatg

SEQ ID NO: 285183 - DNA, 33 bp, Homo sapien
aaagggaatggagtgcaaaggtggtctttcctg

SEQ ID NO: 285184 - DNA, 33 bp, Homo sapien
aaagggaatggagtgcgaaggtggtctttcctg

SEQ ID NO: 285185 - DNA, 33 bp, Homo sapien
gaattgtgtcctaccaagattcataagtttaaa

SEQ ID NO: 285186 - DNA, 33 bp, Homo sapien
gaattgtgtcctaccaggattcataagtttaaa

SEQ ID NO: 285187 - DNA, 33 bp, Homo sapien
agaaaattacttcaaggacatctggtaacaaaa

SEQ ID NO: 285188 - DNA, 33 bp, Homo sapien
agaaaattacttcaagtacatctggtaacaaaa

SEQ ID NO: 285189 - DNA, 33 bp, Homo sapien
tgccataacagtgatcggagaagaagctagatg

SEQ ID NO: 285190 - DNA, 33 bp, Homo sapien
tgccataacagtgatctgagaagaagctagatg

SEQ ID NO: 285191 - DNA, 33 bp, Homo sapien
ccagctgaaaaatccaataaatagttttacagg

SEQ ID NO: 285192 - DNA, 33 bp, Homo sapien
ccagctgaaaaatccagtaaatagttttacagg

SEQ ID NO: 285193 - DNA, 33 bp, Homo sapien
aatatttaaccgaacaaacaaggtgccaggact

SEQ ID NO: 285194 - DNA, 33 bp, Homo sapien
aatatttaaccgaacacacaaggtgccaggact

SEQ ID NO: 285195 - DNA, 33 bp, Homo sapien
catataaataacttggaaatatcttaccctaga

SEQ ID NO: 285196 - DNA, 33 bp, Homo sapien
catataaataacttgggaatatcttaccctaga

SEQ ID NO: 285197 - DNA, 33 bp, Homo sapien
tagtacttagaatccaggaatcatttccttttt

SEQ ID NO: 285198 - DNA, 33 bp, Homo sapien
tagtacttagaatccatgaatcatttccttttt

SEQ ID NO: 285199 - DNA, 33 bp, Homo sapien
ctcactctttgttaaaacccacagttatcattg

SEQ ID NO: 285200 - DNA, 33 bp, Homo sapien
ctcactctttgttaaatcccacagttatcattg

SEQ ID NO: 285201 - DNA, 33 bp, Homo sapien; identical to SEQ ID NO: 285199

SEQ ID NO: 285202 - DNA, 33 bp, Homo sapien; identical to SEQ ID NO: 285200

SEQ ID NO: 285203 - DNA, 33 bp, Homo sapien
gttcagatatggcttccaaacatcctggtattt

SEQ ID NO: 285204 - DNA, 33 bp, Homo sapien
gttcagatatggcttctaaacatcctggtattt

SEQ ID NO: 285205 - DNA, 33 bp, Homo sapien
ttgagatataattcacaaaccacataatgcaag

SEQ ID NO: 285206 - DNA, 33 bp, Homo sapien
ttgagatataattcacgaaccacataatgcaag

SEQ ID NO: 285207 - DNA, 33 bp, Homo sapien
agtcaggccactattacggttgcatctgtgagg

SEQ ID NO: 285208 - DNA, 33 bp, Homo sapien
agtcaggccactattatggttgcatctgtgagg

SEQ ID NO: 285209 - DNA, 33 bp, Homo sapien
ctatctattggtgaaacattttttggtttattt

SEQ ID NO: 285210 - DNA, 33 bp, Homo sapien
ctatctattggtgaaatattttttggtttattt

SEQ ID NO: 285211 - DNA, 33 bp, Homo sapien
tgttctggagaggaaacgaaggtcatagccgaa

SEQ ID NO: 285212 - DNA, 33 bp, Homo sapien
tgttctggagaggaaatgaaggtcatagccgaa

SEQ ID NO: 285213 - DNA, 33 bp, Homo sapien
ccagtgtgttctagaaagtttgacatggaatca

SEQ ID NO: 285214 - DNA, 33 bp, Homo sapien
ccagtgtgttctagaatgtttgacatggaatca

SEQ ID NO: 285215 - DNA, 33 bp, Homo sapien
ttacttgtaaacctccaaaattgaggcaagtta

SEQ ID NO: 285216 - DNA, 33 bp, Homo sapien
ttacttgtaaacctccgaaattgaggcaagtta

SEQ ID NO: 285217 - DNA, 33 bp, Homo sapien
ggtaccatatttgtcacgtggattgaaatctta

SEQ ID NO: 285218 - DNA, 33 bp, Homo sapien
ggtaccatatttgtcatgtggattgaaatctta

SEQ ID NO: 285219 - DNA, 33 bp, Homo sapien
aggccacagaaacaaaagtatctgacacagaca

SEQ ID NO: 285220 - DNA, 33 bp, Homo sapien
aggccacagaaacaaaggtatctgacacagaca

SEQ ID NO: 285221 - DNA, 33 bp, Homo sapien
agataggttgtatgagaaatttaaagtaggata

SEQ ID NO: 285222 - DNA, 33 bp, Homo sapien
agataggttgtatgaggaatttaaagtaggata

SEQ ID NO: 285223 - DNA, 33 bp, Homo sapien
gttcttacttgagtgaccatatatttccacagt

SEQ ID NO: 285224 - DNA, 33 bp, Homo sapien
gttcttacttgagtgatcatatatttccacagt

SEQ ID NO: 285225 - DNA, 33 bp, Homo sapien
gtttgtaattccgaccaaatccacattcacttg

SEQ ID NO: 285226 - DNA, 33 bp, Homo sapien
gtttgtaattccgaccgaatccacattcacttg

SEQ ID NO: 285227 - DNA, 33 bp, Homo sapien
tcctgtggcggtactcacatttccttctactct

SEQ ID NO: 285228 - DNA, 33 bp, Homo sapien
tcctgtggcggtactcgcatttccttctactct

SEQ ID NO: 285229 - DNA, 33 bp, Homo sapien
cttgagcatgagtgtacattcagagatgaattt

SEQ ID NO: 285230 - DNA, 33 bp, Homo sapien
cttgagcatgagtgtagattcagagatgaattt

SEQ ID NO: 285231 - DNA, 33 bp, Homo sapien
tcatttacttttagtagattgcacctctgctaa

SEQ ID NO: 285232 - DNA, 33 bp, Homo sapien
tcatttacttttagtatattgcacctctgctaa

SEQ ID NO: 285233 - DNA, 33 bp, Homo sapien
aaagaagagccttataccagcatgacttataat

SEQ ID NO: 285234 - DNA, 33 bp, Homo sapien
aaagaagagccttatatcagcatgacttataat

SEQ ID NO: 285235 - DNA, 33 bp, Homo sapien
ctacaaaaatttagccaagagtgggcacttacc

SEQ ID NO: 285236 - DNA, 33 bp, Homo sapien
ctacaaaaatttagccgagagtgggcacttacc

SEQ ID NO: 285237 - DNA, 33 bp, Homo sapien
aaattttggttgtaataatgattgctatttttt

SEQ ID NO: 285238 - DNA, 33 bp, Homo sapien
aaattttggttgtaatcatgattgctatttttt

SEQ ID NO: 285239 - DNA, 33 bp, Homo sapien
acagagacagacctcacctaacagaaacaaaaa

SEQ ID NO: 285240 - DNA, 33 bp, Homo sapien
acagagacagacctcatctaacagaaacaaaaa

SEQ ID NO: 285241 - DNA, 33 bp, Homo sapien
accccagaagatcacaagtggccaaggtgggag

SEQ ID NO: 285242 - DNA, 33 bp, Homo sapien
accccagaagatcacaggtggccaaggtgggag

SEQ ID NO: 285243 - DNA, 33 bp, Homo sapien
aaggtaattgataccccagatagtctgacttga

SEQ ID NO: 285244 - DNA, 33 bp, Homo sapien
aaggtaattgatacccgagatagtctgacttga

SEQ ID NO: 285245 - DNA, 33 bp, Homo sapien
ttagctgcttgagggaatatcaaagaaaagtag

SEQ ID NO: 285246 - DNA, 33 bp, Homo sapien
ttagctgcttgagggagtatcaaagaaaagtag

SEQ ID NO: 285247 - DNA, 33 bp, Homo sapien
gagggtctcgggagaaagacagagaagggcagt

SEQ ID NO: 285248 - DNA, 33 bp, Homo sapien
gagggtctcgggagaaggacagagaagggcagt

SEQ ID NO: 285249 - DNA, 33 bp, Homo sapien
caacagtattatgtgaatcacaaggcattcttc

SEQ ID NO: 285250 - DNA, 33 bp, Homo sapien
caacagtattatgtgagtcacaaggcattcttc

SEQ ID NO: 285251 - DNA, 33 bp, Homo sapien
aggaccagaacaattacactcatcattatacaa

SEQ ID NO: 285252 - DNA, 33 bp, Homo sapien
aggaccagaacaattatactcatcattatacaa

SEQ ID NO: 285253 - DNA, 33 bp, Homo sapien
aatattctgacccataggtaacctgcttaacca

SEQ ID NO: 285254 - DNA, 33 bp, Homo sapien
aatattctgacccatatgtaacctgcttaacca

SEQ ID NO: 285255 - DNA, 33 bp, Homo sapien
acagctcagcaatcagaagcattacagctcttt

SEQ ID NO: 285256 - DNA, 33 bp, Homo sapien
acagctcagcaatcaggagcattacagctcttt

SEQ ID NO: 285257 - DNA, 33 bp, Homo sapien
ggctcctgattttttcacattttgcttcagtca

SEQ ID NO: 285258 - DNA, 33 bp, Homo sapien
ggctcctgattttttcgcattttgcttcagtca

SEQ ID NO: 285259 - DNA, 33 bp, Homo sapien
gagtataaagaagataccatggaaggttaatta

SEQ ID NO: 285260 - DNA, 33 bp, Homo sapien
gagtataaagaagatatcatggaaggttaatta

SEQ ID NO: 285261 - DNA, 33 bp, Homo sapien
agtcagatctctcttacaggcctatgtaaggga

SEQ ID NO: 285262 - DNA, 33 bp, Homo sapien
agtcagatctctcttagaggcctatgtaaggga

SEQ ID NO: 285263 - DNA, 33 bp, Homo sapien
taaagaactgatacaaatcctattcaaactatt

SEQ ID NO: 285264 - DNA, 33 bp, Homo sapien
taaagaactgatacaagtcctattcaaactatt

SEQ ID NO: 285265 - DNA, 33 bp, Homo sapien
aatgcacctgttactcgattgcttgcttcacta

SEQ ID NO: 285266 - DNA, 33 bp, Homo sapien
aatgcacctgttactctattgcttgcttcacta

SEQ ID NO: 285267 - DNA, 33 bp, Homo sapien
agaatttgagtattcacgtaacagtttattgag

SEQ ID NO: 285268 - DNA, 33 bp, Homo sapien
agaatttgagtattcatgtaacagtttattgag

SEQ ID NO: 285269 - DNA, 33 bp, Homo sapien
gaaagacagtcaatggcaaaaatggagcattcc

SEQ ID NO: 285270 - DNA, 33 bp, Homo sapien
gaaagacagtcaatggtaaaaatggagcattcc

SEQ ID NO: 285271 - DNA, 33 bp, Homo sapien
atggggcttctcaatacctaacttctcacaggc

SEQ ID NO: 285272 - DNA, 33 bp, Homo sapien
atggggcttctcaatatctaacttctcacaggc

SEQ ID NO: 285273 - DNA, 33 bp, Homo sapien
tatgaataggtagatgcattctcattccacttt

SEQ ID NO: 285274 - DNA, 33 bp, Homo sapien
tatgaataggtagatgtattctcattccacttt

SEQ ID NO: 285275 - DNA, 33 bp, Homo sapien
ccgaaatatttcactaagttcttgaccactcga

SEQ ID NO: 285276 - DNA, 33 bp, Homo sapien
ccgaaatatttcactatgttcttgaccactcga

SEQ ID NO: 285277 - DNA, 33 bp, Homo sapien
gggtatgtatggttaccggacagctaaaggaac

SEQ ID NO: 285278 - DNA, 33 bp, Homo sapien
gggtatgtatggttactggacagctaaaggaac

SEQ ID NO: 285279 - DNA, 33 bp, Homo sapien
gtgcttccagagagtacaaaattcaatctagag

SEQ ID NO: 285280 - DNA, 33 bp, Homo sapien
gtgcttccagagagtataaaattcaatctagag

SEQ ID NO: 285281 - DNA, 33 bp, Homo sapien
ctttataactcactctaactaatccagtctcac

SEQ ID NO: 285282 - DNA, 33 bp, Homo sapien
ctttataactcactctcactaatccagtctcac

SEQ ID NO: 285283 - DNA, 33 bp, Homo sapien
tgggggctccaaccacacattgctcttctgccc

SEQ ID NO: 285284 - DNA, 33 bp, Homo sapien
tgggggctccaaccacgcattgctcttctgccc

SEQ ID NO: 285285 - DNA, 33 bp, Homo sapien
agaataaaaagttggccgaatcttgaagggagc

SEQ ID NO: 285286 - DNA, 33 bp, Homo sapien
agaataaaaagttggctgaatcttgaagggagc

SEQ ID NO: 285287 - DNA, 33 bp, Homo sapien
ccaaaaccttaatataactctcacggtcggact

SEQ ID NO: 285288 - DNA, 33 bp, Homo sapien
ccaaaaccttaatatatctctcacggtcggact

SEQ ID NO: 285289 - DNA, 33 bp, Homo sapien
caggcagacaaagggacgacctgtttgtgtaga

SEQ ID NO: 285290 - DNA, 33 bp, Homo sapien
caggcagacaaagggatgacctgtttgtgtaga

SEQ ID NO: 285291 - DNA, 33 bp, Homo sapien
atttttcttacttctccatatatgctggtacat

SEQ ID NO: 285292 - DNA, 33 bp, Homo sapien
atttttcttacttctctatatatgctggtacat

SEQ ID NO: 285293 - DNA, 33 bp, Homo sapien
tagcatatctcttgaaaataggagcaggaaaaa

SEQ ID NO: 285294 - DNA, 33 bp, Homo sapien
tagcatatctcttgaacataggagcaggaaaaa

SEQ ID NO: 285295 - DNA, 33 bp, Homo sapien
gcccatgtctacttcacgattagagttaatatt

SEQ ID NO: 285296 - DNA, 33 bp, Homo sapien
gcccatgtctacttcatgattagagttaatatt

SEQ ID NO: 285297 - DNA, 33 bp, Homo sapien
gatcacagcttgaataacagctacaattggagt

SEQ ID NO: 285298 - DNA, 33 bp, Homo sapien
gatcacagcttgaatagcagctacaattggagt

SEQ ID NO: 285299 - DNA, 33 bp, Homo sapien
tatgcacttttttctaataataagcaagattct

SEQ ID NO: 285300 - DNA, 33 bp, Homo sapien
tatgcacttttttctagtaataagcaagattct

SEQ ID NO: 285301 - DNA, 33 bp, Homo sapien
tagaaaaaagtgcataaaccagaaatcaataga

SEQ ID NO: 285302 - DNA, 33 bp, Homo sapien
tagaaaaaagtgcatacaccagaaatcaataga

SEQ ID NO: 285303 - DNA, 33 bp, Homo sapien
cctgctataaagatcgacacacaagctgttgta

SEQ ID NO: 285304 - DNA, 33 bp, Homo sapien
cctgctataaagatcggcacacaagctgttgta

SEQ ID NO: 285305 - DNA, 33 bp, Homo sapien
tatggctgtttttaaaaagctgaacatagtatt

SEQ ID NO: 285306 - DNA, 33 bp, Homo sapien
tatggctgtttttaaatagctgaacatagtatt

SEQ ID NO: 285307 - DNA, 33 bp, Homo sapien
gaggaatctggtgctacgtttacctaagatgga

SEQ ID NO: 285308 - DNA, 33 bp, Homo sapien
gaggaatctggtgctatgtttacctaagatgga

SEQ ID NO: 285309 - DNA, 33 bp, Homo sapien
catttttttccagtaaagtatatggcaggtcac

SEQ ID NO: 285310 - DNA, 33 bp, Homo sapien
catttttttccagtaaggtatatggcaggtcac

SEQ ID NO: 285311 - DNA, 33 bp, Homo sapien
tttcacatttaagccaaggcagacctaaatgat

SEQ ID NO: 285312 - DNA, 33 bp, Homo sapien
tttcacatttaagccagggcagacctaaatgat

SEQ ID NO: 285313 - DNA, 33 bp, Homo sapien
ttacataaacaaaaaaacaagcagataaacatg

SEQ ID NO: 285314 - DNA, 33 bp, Homo sapien
ttacataaacaaaaaaccaagcagataaacatg

SEQ ID NO: 285315 - DNA, 33 bp, Homo sapien
taaatctatgtttgtacggggggacaagggctg

SEQ ID NO: 285316 - DNA, 33 bp, Homo sapien
taaatctatgtttgtatggggggacaagggctg

SEQ ID NO: 285317 - DNA, 33 bp, Homo sapien
atatagaaaaaaattacaactggtgccacagaa

SEQ ID NO: 285318 - DNA, 33 bp, Homo sapien
atatagaaaaaaattataactggtgccacagaa

SEQ ID NO: 285319 - DNA, 33 bp, Homo sapien
taacaatactgagcagaagtattgttgtggtag

SEQ ID NO: 285320 - DNA, 33 bp, Homo sapien
taacaatactgagcaggagtattgttgtggtag

SEQ ID NO: 285321 - DNA, 33 bp, Homo sapien
gatgggagataatacacggcttcactggtgcaa

SEQ ID NO: 285322 - DNA, 33 bp, Homo sapien
gatgggagataatacatggcttcactggtgcaa

SEQ ID NO: 285323 - DNA, 33 bp, Homo sapien
tttgaaaatttccgttcaaagctctgcccttgt

SEQ ID NO: 285324 - DNA, 33 bp, Homo sapien
tttgaaaatttccgtttaaagctctgcccttgt

SEQ ID NO: 285325 - DNA, 33 bp, Homo sapien
aagtttttagcactgaaaccttgcgggacttct

SEQ ID NO: 285326 - DNA, 33 bp, Homo sapien
aagtttttagcactgagaccttgcgggacttct

SEQ ID NO: 285327 - DNA, 33 bp, Homo sapien
aaggtcttgcccagtaaccaggaagaatgaggt

SEQ ID NO: 285328 - DNA, 33 bp, Homo sapien
aaggtcttgcccagtatccaggaagaatgaggt

SEQ ID NO: 285329 - DNA, 33 bp, Homo sapien
cctctactgaatttagacagttaccttctgttg

SEQ ID NO: 285330 - DNA, 33 bp, Homo sapien
cctctactgaatttagtcagttaccttctgttg

SEQ ID NO: 285331 - DNA, 33 bp, Homo sapien
cagccaggttgtgacaatacccaagcttggctt

SEQ ID NO: 285332 - DNA, 33 bp, Homo sapien
cagccaggttgtgacagtacccaagcttggctt

SEQ ID NO: 285333 - DNA, 33 bp, Homo sapien
aaaataaagtaaggagcatcaaggccaaaatct

SEQ ID NO: 285334 - DNA, 33 bp, Homo sapien
aaaataaagtaaggagtatcaaggccaaaatct

SEQ ID NO: 285335 - DNA, 33 bp, Homo sapien
tttgtgtatttaggtacgtattcaatctctttt

SEQ ID NO: 285336 - DNA, 33 bp, Homo sapien
tttgtgtatttaggtatgtattcaatctctttt

SEQ ID NO: 285337 - DNA, 33 bp, Homo sapien
tatgtaagtgctaagcaattttatattaagtac

SEQ ID NO: 285338 - DNA, 33 bp, Homo sapien
tatgtaagtgctaagccattttatattaagtac

SEQ ID NO: 285339 - DNA, 33 bp, Homo sapien
catgaattttagatacacacatggttgagtcag

SEQ ID NO: 285340 - DNA, 33 bp, Homo sapien
catgaattttagatacccacatggttgagtcag

SEQ ID NO: 285341 - DNA, 33 bp, Homo sapien
tgataatcttcactacacaaaataatcagggga

SEQ ID NO: 285342 - DNA, 33 bp, Homo sapien
tgataatcttcactacgcaaaataatcagggga

SEQ ID NO: 285343 - DNA, 33 bp, Homo sapien
atacatatttcatacaaaagaagtaggattaga

SEQ ID NO: 285344 - DNA, 33 bp, Homo sapien
atacatatttcatacagaagaagtaggattaga

SEQ ID NO: 285345 - DNA, 33 bp, Homo sapien
tagtgaaatactttgaacctggtgacaaagaga

SEQ ID NO: 285346 - DNA, 33 bp, Homo sapien
tagtgaaatactttgatcctggtgacaaagaga

SEQ ID NO: 285347 - DNA, 33 bp, Homo sapien
atgaaggtcagtgttcaaaagtatttaaagaat

SEQ ID NO: 285348 - DNA, 33 bp, Homo sapien
atgaaggtcagtgttcgaaagtatttaaagaat

SEQ ID NO: 285349 - DNA, 33 bp, Homo sapien
tttcctttgtaaattacgcagtctcaagtatat

SEQ ID NO: 285350 - DNA, 33 bp, Homo sapien
tttcctttgtaaattatgcagtctcaagtatat

SEQ ID NO: 285351 - DNA, 33 bp, Homo sapien
gtctcttgcaagtctgaaaataattacaatccc

SEQ ID NO: 285352 - DNA, 33 bp, Homo sapien
gtctcttgcaagtctggaaataattacaatccc

SEQ ID NO: 285353 - DNA, 33 bp, Homo sapien
catgtatgtgattgtccctgcttaacaatgaat

SEQ ID NO: 285354 - DNA, 33 bp, Homo sapien
catgtatgtgattgtctctgcttaacaatgaat

SEQ ID NO: 285355 - DNA, 33 bp, Homo sapien
tggctgcatattagaaattagacaccaacaaat

SEQ ID NO: 285356 - DNA, 33 bp, Homo sapien
tggctgcatattagaagttagacaccaacaaat

SEQ ID NO: 285357 - DNA, 33 bp, Homo sapien
gcttgtactgtcagcactatttgacataagtac

SEQ ID NO: 285358 - DNA, 33 bp, Homo sapien
gcttgtactgtcagcattatttgacataagtac

SEQ ID NO: 285359 - DNA, 33 bp, Homo sapien
tttagttttcaggacacagtctttctgttctct

SEQ ID NO: 285360 - DNA, 33 bp, Homo sapien
tttagttttcaggacatagtctttctgttctct

SEQ ID NO: 285361 - DNA, 33 bp, Homo sapien
tccctctcacttctgaagcagattgaagagatg

SEQ ID NO: 285362 - DNA, 33 bp, Homo sapien
tccctctcacttctgaggcagattgaagagatg

SEQ ID NO: 285363 - DNA, 33 bp, Homo sapien
cattgtctcttcagaacgttataatacagggca

SEQ ID NO: 285364 - DNA, 33 bp, Homo sapien
cattgtctcttcagaatgttataatacagggca

SEQ ID NO: 285365 - DNA, 33 bp, Homo sapien
gtgtataacagtcaaagactatctgccatgtct

SEQ ID NO: 285366 - DNA, 33 bp, Homo sapien
gtgtataacagtcaaatactatctgccatgtct

SEQ ID NO: 285367 - DNA, 33 bp, Homo sapien
gagccagatttctctacaatttcatgacatagg

SEQ ID NO: 285368 - DNA, 33 bp, Homo sapien
gagccagatttctctataatttcatgacatagg

SEQ ID NO: 285369 - DNA, 33 bp, Homo sapien
tccctggcaacttacacgtagtaactgagtgaa

SEQ ID NO: 285370 - DNA, 33 bp, Homo sapien
tccctggcaacttacaggtagtaactgagtgaa

SEQ ID NO: 285371 - DNA, 33 bp, Homo sapien
gtgaaaagggggtaaacagccaagcaattctga

SEQ ID NO: 285372 - DNA, 33 bp, Homo sapien
gtgaaaagggggtaaagagccaagcaattctga

SEQ ID NO: 285373 - DNA, 33 bp, Homo sapien
aatgtaacttcggatacagtcatacaatgtgaa

SEQ ID NO: 285374 - DNA, 33 bp, Homo sapien
aatgtaacttcggatatagtcatacaatgtgaa

SEQ ID NO: 285375 - DNA, 33 bp, Homo sapien
ttttatttttggaagaactgtgatgccatcttt

SEQ ID NO: 285376 - DNA, 33 bp, Homo sapien
ttttatttttggaagatctgtgatgccatcttt

SEQ ID NO: 285377 - DNA, 33 bp, Homo sapien
aaatgaattcccaccaatgcccacagtatttca

SEQ ID NO: 285378 - DNA, 33 bp, Homo sapien
aaatgaattcccaccattgcccacagtatttca

SEQ ID NO: 285379 - DNA, 33 bp, Homo sapien
tagaagccggtgcgaccagccccatttttttta

SEQ ID NO: 285380 - DNA, 33 bp, Homo sapien
tagaagccggtgcgactagccccatttttttta

SEQ ID NO: 285381 - DNA, 33 bp, Homo sapien
gagagtggaatcagaacgttttcaatccaaata

SEQ ID NO: 285382 - DNA, 33 bp, Homo sapien
gagagtggaatcagaatgttttcaatccaaata

SEQ ID NO: 285383 - DNA, 33 bp, Homo sapien
taaagtggcaaaaccaacgaaataactgaggag

SEQ ID NO: 285384 - DNA, 33 bp, Homo sapien
taaagtggcaaaaccagcgaaataactgaggag

SEQ ID NO: 285385 - DNA, 33 bp, Homo sapien
taattttactatattcaccaacaggcctgtaac

SEQ ID NO: 285386 - DNA, 33 bp, Homo sapien
taattttactatattctccaacaggcctgtaac

SEQ ID NO: 285387 - DNA, 33 bp, Homo sapien
atttctatcatggaaaatagatacttcactata

SEQ ID NO: 285388 - DNA, 33 bp, Homo sapien
atttctatcatggaaagtagatacttcactata

SEQ ID NO: 285389 - DNA, 33 bp, Homo sapien
tctgtctcctctctcaatatgacacgtttgtta

SEQ ID NO: 285390 - DNA, 33 bp, Homo sapien
tctgtctcctctctcattatgacacgtttgtta

SEQ ID NO: 285391 - DNA, 33 bp, Homo sapien
aggcatgcacagatacaacacctccagggggca

SEQ ID NO: 285392 - DNA, 33 bp, Homo sapien
aggcatgcacagatacgacacctccagggggca

SEQ ID NO: 285393 - DNA, 33 bp, Homo sapien
gggtcttttatgtggcagaggcaaggaagtctt

SEQ ID NO: 285394 - DNA, 33 bp, Homo sapien
gggtcttttatgtggccgaggcaaggaagtctt

SEQ ID NO: 285395 - DNA, 33 bp, Homo sapien
acatgaaagtatgagacaactaagtttagaaat

SEQ ID NO: 285396 - DNA, 33 bp, Homo sapien
acatgaaagtatgagataactaagtttagaaat

SEQ ID NO: 285397 - DNA, 33 bp, Homo sapien
aaataggacaggtgtacgcagtgaatctccaga

SEQ ID NO: 285398 - DNA, 33 bp, Homo sapien
aaataggacaggtgtatgcagtgaatctccaga

SEQ ID NO: 285399 - DNA, 33 bp, Homo sapien
atccctttaataggtacccagtaacacaatgaa

SEQ ID NO: 285400 - DNA, 33 bp, Homo sapien
atccctttaataggtatccagtaacacaatgaa

SEQ ID NO: 285401 - DNA, 33 bp, Homo sapien
aggatcagaatagaacccagttgtagatgtgaa

SEQ ID NO: 285402 - DNA, 33 bp, Homo sapien
aggatcagaatagaactcagttgtagatgtgaa

SEQ ID NO: 285403 - DNA, 33 bp, Homo sapien
cttacactgctctaaagggctgcccaagactgt

SEQ ID NO: 285404 - DNA, 33 bp, Homo sapien
cttacactgctctaaatggctgcccaagactgt

SEQ ID NO: 285405 - DNA, 33 bp, Homo sapien
cattgtaggtttatgaaaaagtagaagaattga

SEQ ID NO: 285406 - DNA, 33 bp, Homo sapien
cattgtaggtttatgacaaagtagaagaattga

SEQ ID NO: 285407 - DNA, 33 bp, Homo sapien
aattcaagaatcttccgaaactgatcattgaag

SEQ ID NO: 285408 - DNA, 33 bp, Homo sapien
aattcaagaatcttcctaaactgatcattgaag

SEQ ID NO: 285409 - DNA, 33 bp, Homo sapien
tccttctttcaaaatacagctctccacaaaaac

SEQ ID NO: 285410 - DNA, 33 bp, Homo sapien
tccttctttcaaaatatagctctccacaaaaac

SEQ ID NO: 285411 - DNA, 33 bp, Homo sapien
aaaagagatcatgttacaagtgatatgaaactt

SEQ ID NO: 285412 - DNA, 33 bp, Homo sapien
aaaagagatcatgttagaagtgatatgaaactt

SEQ ID NO: 285413 - DNA, 33 bp, Homo sapien
atatctacaaggcttcacagggatacagctgta

SEQ ID NO: 285414 - DNA, 33 bp, Homo sapien
atatctacaaggcttcgcagggatacagctgta

SEQ ID NO: 285415 - DNA, 33 bp, Homo sapien
aatcaggattacctcaagagatagaagttaaga

SEQ ID NO: 285416 - DNA, 33 bp, Homo sapien
aatcaggattacctcaggagatagaagttaaga

SEQ ID NO: 285417 - DNA, 33 bp, Homo sapien
tgaaaaatattgccaaccaattaaacacaggta

SEQ ID NO: 285418 - DNA, 33 bp, Homo sapien
tgaaaaatattgccaatcaattaaacacaggta

SEQ ID NO: 285419 - DNA, 33 bp, Homo sapien
agttggtgttagaaccaaaagcaaatttaagtc

SEQ ID NO: 285420 - DNA, 33 bp, Homo sapien
agttggtgttagaaccgaaagcaaatttaagtc

SEQ ID NO: 285421 - DNA, 33 bp, Homo sapien
ctgcaattccagaaaactattacattgagcttt

SEQ ID NO: 285422 - DNA, 33 bp, Homo sapien
ctgcaattccagaaaagtattacattgagcttt

SEQ ID NO: 285423 - DNA, 33 bp, Homo sapien
gtacagcagattttgaatactgatgagcaccta

SEQ ID NO: 285424 - DNA, 33 bp, Homo sapien
gtacagcagattttgagtactgatgagcaccta

SEQ ID NO: 285425 - DNA, 33 bp, Homo sapien
tctctttttttgtcagcatttgatattaaactt

SEQ ID NO: 285426 - DNA, 33 bp, Homo sapien
tctctttttttgtcaggatttgatattaaactt

SEQ ID NO: 285427 - DNA, 33 bp, Homo sapien
ccatttgttaactccagtgaattgtctgtgcaa

SEQ ID NO: 285428 - DNA, 33 bp, Homo sapien
ccatttgttaactccattgaattgtctgtgcaa

SEQ ID NO: 285429 - DNA, 33 bp, Homo sapien
cggacatggcccttaacagcagaatcggaaatt

SEQ ID NO: 285430 - DNA, 33 bp, Homo sapien
cggacatggcccttaatagcagaatcggaaatt

SEQ ID NO: 285431 - DNA, 33 bp, Homo sapien
taaaatgcagtcaacaagaagataaaattgatt

SEQ ID NO: 285432 - DNA, 33 bp, Homo sapien
taaaatgcagtcaacaggaagataaaattgatt

SEQ ID NO: 285433 - DNA, 33 bp, Homo sapien
ataaataaacaaaccactatgctttcttaaagg

SEQ ID NO: 285434 - DNA, 33 bp, Homo sapien
ataaataaacaaaccattatgctttcttaaagg

SEQ ID NO: 285435 - DNA, 33 bp, Homo sapien
tgagactagccaactaacctgtgattgtaattt

SEQ ID NO: 285436 - DNA, 33 bp, Homo sapien
tgagactagccaactaccctgtgattgtaattt

SEQ ID NO: 285437 - DNA, 33 bp, Homo sapien
gtagttcttaaattacactgccttaataatata

SEQ ID NO: 285438 - DNA, 33 bp, Homo sapien
gtagttcttaaattacgctgccttaataatata

SEQ ID NO: 285439 - DNA, 33 bp, Homo sapien
gagatgggagatgttacgtgcctttgccttcat

SEQ ID NO: 285440 - DNA, 33 bp, Homo sapien
gagatgggagatgttatgtgcctttgccttcat

SEQ ID NO: 285441 - DNA, 33 bp, Homo sapien
cacacacacactaacacgatacaactaaaacat

SEQ ID NO: 285442 - DNA, 33 bp, Homo sapien
cacacacacactaacatgatacaactaaaacat

SEQ ID NO: 285443 - DNA, 33 bp, Homo sapien
tagcatgagtcctacacattttcttcctcaatt

SEQ ID NO: 285444 - DNA, 33 bp, Homo sapien
tagcatgagtcctacatattttcttcctcaatt

SEQ ID NO: 285445 - DNA, 33 bp, Homo sapien
acaatctaataatgctaaaaagttaaacatcaa

SEQ ID NO: 285446 - DNA, 33 bp, Homo sapien
acaatctaataatgcttaaaagttaaacatcaa

SEQ ID NO: 285447 - DNA, 33 bp, Homo sapien
tgaaaatgcaggaagagtataggctaggggaaa

SEQ ID NO: 285448 - DNA, 33 bp, Homo sapien
tgaaaatgcaggaagattataggctaggggaaa

SEQ ID NO: 285449 - DNA, 33 bp, Homo sapien
gtgcagtgcaaggctacactcaggagcagagtg

SEQ ID NO: 285450 - DNA, 33 bp, Homo sapien
gtgcagtgcaaggctatactcaggagcagagtg

SEQ ID NO: 285451 - DNA, 33 bp, Homo sapien
atcattataaaagaagacttcactcagagaaac

SEQ ID NO: 285452 - DNA, 33 bp, Homo sapien
atcattataaaagaaggcttcactcagagaaac

SEQ ID NO: 285453 - DNA, 33 bp, Homo sapien
ttataaacatacaaaaacttgataactgattgg

SEQ ID NO: 285454 - DNA, 33 bp, Homo sapien
ttataaacatacaaaagcttgataactgattgg

SEQ ID NO: 285455 - DNA, 33 bp, Homo sapien
atgtattggccataaacagaaggtaaagaaagg

SEQ ID NO: 285456 - DNA, 33 bp, Homo sapien
atgtattggccataaagagaaggtaaagaaagg

SEQ ID NO: 285457 - DNA, 33 bp, Homo sapien
tatgagcctgtaagaaccacagaattactgggc

SEQ ID NO: 285458 - DNA, 33 bp, Homo sapien
tatgagcctgtaagaatcacagaattactgggc

SEQ ID NO: 285459 - DNA, 33 bp, Homo sapien
ctcaaatggtagaagacgaaagagcaagaggga

SEQ ID NO: 285460 - DNA, 33 bp, Homo sapien
ctcaaatggtagaagatgaaagagcaagaggga

SEQ ID NO: 285461 - DNA, 33 bp, Homo sapien
gcttccaagatggaaccgtgaagacttcatatt

SEQ ID NO: 285462 - DNA, 33 bp, Homo sapien
gcttccaagatggaactgtgaagacttcatatt

SEQ ID NO: 285463 - DNA, 33 bp, Homo sapien
aaagggtagtttgataaggagatcaggatacaa

SEQ ID NO: 285464 - DNA, 33 bp, Homo sapien
aaagggtagtttgatacggagatcaggatacaa

SEQ ID NO: 285465 - DNA, 33 bp, Homo sapien
aagcataattagcaccacgtagacactgccaag

SEQ ID NO: 285466 - DNA, 33 bp, Homo sapien
aagcataattagcacctcgtagacactgccaag

SEQ ID NO: 285467 - DNA, 33 bp, Homo sapien
cacatatgcattaaacgcaaggtataattcatc

SEQ ID NO: 285468 - DNA, 33 bp, Homo sapien
cacatatgcattaaactcaaggtataattcatc

SEQ ID NO: 285469 - DNA, 33 bp, Homo sapien
tttttcactaagatgacaattgaaatatttgcc

SEQ ID NO: 285470 - DNA, 33 bp, Homo sapien
tttttcactaagatgataattgaaatatttgcc

SEQ ID NO: 285471 - DNA, 33 bp, Homo sapien
gattctttggacctggccattaattttgcctgc

SEQ ID NO: 285472 - DNA, 33 bp, Homo sapien
gattctttggacctggtcattaattttgcctgc

SEQ ID NO: 285473 - DNA, 33 bp, Homo sapien
actttgaaacttttccaacattccatattacct

SEQ ID NO: 285474 - DNA, 33 bp, Homo sapien
actttgaaacttttccgacattccatattacct

SEQ ID NO: 285475 - DNA, 33 bp, Homo sapien
aaagtggaggagacaaacttctgtaaagcaagc

SEQ ID NO: 285476 - DNA, 33 bp, Homo sapien
aaagtggaggagacaatcttctgtaaagcaagc

SEQ ID NO: 285477 - DNA, 33 bp, Homo sapien
ttggaacaattgttagaccaactttctttaacc

SEQ ID NO: 285478 - DNA, 33 bp, Homo sapien
ttggaacaattgttagcccaactttctttaacc

SEQ ID NO: 285479 - DNA, 33 bp, Homo sapien
atgattgtaagcagtcaaagccctcaccagaag

SEQ ID NO: 285480 - DNA, 33 bp, Homo sapien
atgattgtaagcagtcgaagccctcaccagaag

SEQ ID NO: 285481 - DNA, 33 bp, Homo sapien
tatctggtactgctttaaaaataagtagaattg

SEQ ID NO: 285482 - DNA, 33 bp, Homo sapien
tatctggtactgctttgaaaataagtagaattg

SEQ ID NO: 285483 - DNA, 33 bp, Homo sapien
gatgagaaacacttacccttcctgttatggtga

SEQ ID NO: 285484 - DNA, 33 bp, Homo sapien
gatgagaaacacttactcttcctgttatggtga

SEQ ID NO: 285485 - DNA, 33 bp, Homo sapien
tggattgtgttaaataagcatccactgcaggct

SEQ ID NO: 285486 - DNA, 33 bp, Homo sapien
tggattgtgttaaataggcatccactgcaggct

SEQ ID NO: 285487 - DNA, 33 bp, Homo sapien
aaggatgaagccagtcaagagaataccgtgata

SEQ ID NO: 285488 - DNA, 33 bp, Homo sapien
aaggatgaagccagtcgagagaataccgtgata

SEQ ID NO: 285489 - DNA, 33 bp, Homo sapien
cagtaactctagtctcaaaaacatagccataga

SEQ ID NO: 285490 - DNA, 33 bp, Homo sapien
cagtaactctagtctcgaaaacatagccataga

SEQ ID NO: 285491 - DNA, 33 bp, Homo sapien
gatggtatgcagaataagcagtttagagaggaa

SEQ ID NO: 285492 - DNA, 33 bp, Homo sapien
gatggtatgcagaataggcagtttagagaggaa

SEQ ID NO: 285493 - DNA, 33 bp, Homo sapien
tagaaggctcattatcacttattcccactctta

SEQ ID NO: 285494 - DNA, 33 bp, Homo sapien
tagaaggctcattatcgcttattcccactctta

SEQ ID NO: 285495 - DNA, 33 bp, Homo sapien
tggtatggcaagttgacagattgcccaactggg

SEQ ID NO: 285496 - DNA, 33 bp, Homo sapien
tggtatggcaagttgatagattgcccaactggg

SEQ ID NO: 285497 - DNA, 33 bp, Homo sapien
tctatctcatgggtcaacacaattttctaatga

SEQ ID NO: 285498 - DNA, 33 bp, Homo sapien
tctatctcatgggtcatcacaattttctaatga

SEQ ID NO: 285499 - DNA, 33 bp, Homo sapien
cccatgctgtaagtgaagaaaagtagtgttgcc

SEQ ID NO: 285500 - DNA, 33 bp, Homo sapien
cccatgctgtaagtgaggaaaagtagtgttgcc

SEQ ID NO: 285501 - DNA, 33 bp, Homo sapien
attcagaatatggatacgaataaaggtcattga

SEQ ID NO: 285502 - DNA, 33 bp, Homo sapien
attcagaatatggatatgaataaaggtcattga

SEQ ID NO: 285503 - DNA, 33 bp, Homo sapien
tttccagcaaggcttccgaaccaggctgaggtg

SEQ ID NO: 285504 - DNA, 33 bp, Homo sapien
tttccagcaaggcttctgaaccaggctgaggtg

SEQ ID NO: 285505 - DNA, 33 bp, Homo sapien
ggacacttattgtgccccagcttttctctctgg

SEQ ID NO: 285506 - DNA, 33 bp, Homo sapien
ggacacttattgtgccgcagcttttctctctgg

SEQ ID NO: 285507 - DNA, 33 bp, Homo sapien
acactgagcttttagcaatgattttaacataaa

SEQ ID NO: 285508 - DNA, 33 bp, Homo sapien
acactgagcttttagcgatgattttaacataaa

SEQ ID NO: 285509 - DNA, 33 bp, Homo sapien
gaaactatcctgtgtcaaatgacaataaaatag

SEQ ID NO: 285510 - DNA, 33 bp, Homo sapien
gaaactatcctgtgtcgaatgacaataaaatag

SEQ ID NO: 285511 - DNA, 33 bp, Homo sapien
catttattaacctttaccagcaagaatggcaac

SEQ ID NO: 285512 - DNA, 33 bp, Homo sapien
catttattaacctttagcagcaagaatggcaac

SEQ ID NO: 285513 - DNA, 33 bp, Homo sapien
tctttctcagaggttaaatttattgtccttgct

SEQ ID NO: 285514 - DNA, 33 bp, Homo sapien
tctttctcagaggttacatttattgtccttgct

SEQ ID NO: 285515 - DNA, 33 bp, Homo sapien
atgtatttagttttcacagccgtcattgttcta

SEQ ID NO: 285516 - DNA, 33 bp, Homo sapien
atgtatttagttttcatagccgtcattgttcta

SEQ ID NO: 285517 - DNA, 33 bp, Homo sapien
agaaaccacatctacgaattaggctcttggggg

SEQ ID NO: 285518 - DNA, 33 bp, Homo sapien
agaaaccacatctacggattaggctcttggggg

SEQ ID NO: 285519 - DNA, 33 bp, Homo sapien
agaacattactaggaaatattaggtatatgaat

SEQ ID NO: 285520 - DNA, 33 bp, Homo sapien
agaacattactaggaagtattaggtatatgaat

SEQ ID NO: 285521 - DNA, 33 bp, Homo sapien
aggtaatggttgagtaaattatagccaaacggc

SEQ ID NO: 285522 - DNA, 33 bp, Homo sapien
aggtaatggttgagtagattatagccaaacggc

SEQ ID NO: 285523 - DNA, 33 bp, Homo sapien
atctcctcagaggtaaaggagaaacaaaggtgg

SEQ ID NO: 285524 - DNA, 33 bp, Homo sapien
atctcctcagaggtaagggagaaacaaaggtgg

SEQ ID NO: 285525 - DNA, 33 bp, Homo sapien
gcagtgcagtcataataaaggtcttactcaatt

SEQ ID NO: 285526 - DNA, 33 bp, Homo sapien
gcagtgcagtcataatgaaggtcttactcaatt

SEQ ID NO: 285527 - DNA, 33 bp, Homo sapien
caacttgattttaatgccacttctacctgttct

SEQ ID NO: 285528 - DNA, 33 bp, Homo sapien
caacttgattttaatgtcacttctacctgttct

SEQ ID NO: 285529 - DNA, 33 bp, Homo sapien
taattaaaaaggtggaaatgtctttctctcaat

SEQ ID NO: 285530 - DNA, 33 bp, Homo sapien
taattaaaaaggtggatatgtctttctctcaat

SEQ ID NO: 285531 - DNA, 33 bp, Homo sapien
tatatcaccttatctacagttcttatgtaattg

SEQ ID NO: 285532 - DNA, 33 bp, Homo sapien
tatatcaccttatctatagttcttatgtaattg

SEQ ID NO: 285533 - DNA, 33 bp, Homo sapien
ctgtaaaatctaggtgaagcttaccaaacctca

SEQ ID NO: 285534 - DNA, 33 bp, Homo sapien
ctgtaaaatctaggtggagcttaccaaacctca

SEQ ID NO: 285535 - DNA, 33 bp, Homo sapien
atgacactgcaggaaaactttcctaatttcaca

SEQ ID NO: 285536 - DNA, 33 bp, Homo sapien
atgacactgcaggaaacctttcctaatttcaca

SEQ ID NO: 285537 - DNA, 33 bp, Homo sapien
tactgcaaggactgaaaggctaaaatctacatt

SEQ ID NO: 285538 - DNA, 33 bp, Homo sapien
tactgcaaggactgaagggctaaaatctacatt

SEQ ID NO: 285539 - DNA, 33 bp, Homo sapien
gttgacaagattcacacacacagtaattcggta

SEQ ID NO: 285540 - DNA, 33 bp, Homo sapien
gttgacaagattcacagacacagtaattcggta

SEQ ID NO: 285541 - DNA, 33 bp, Homo sapien
caaagatctgacagctaacatgacaaataacaa

SEQ ID NO: 285542 - DNA, 33 bp, Homo sapien
caaagatctgacagctgacatgacaaataacaa

SEQ ID NO: 285543 - DNA, 33 bp, Homo sapien
gtctcagaataactccaacatctgttcaagtgg

SEQ ID NO: 285544 - DNA, 33 bp, Homo sapien
gtctcagaataactccgacatctgttcaagtgg

SEQ ID NO: 285545 - DNA, 33 bp, Homo sapien
tgcttcatatatttttcaaactacctccatgat

SEQ ID NO: 285546 - DNA, 33 bp, Homo sapien
tgcttcatatatttttgaaactacctccatgat

SEQ ID NO: 285547 - DNA, 33 bp, Homo sapien
ttgaacttcgaaagcacattttctgtatacatg

SEQ ID NO: 285548 - DNA, 33 bp, Homo sapien
ttgaacttcgaaagcatattttctgtatacatg

SEQ ID NO: 285549 - DNA, 33 bp, Homo sapien
atgctatgcacacttgaatgaagtcttttgtgg

SEQ ID NO: 285550 - DNA, 33 bp, Homo sapien
atgctatgcacacttgtatgaagtcttttgtgg

SEQ ID NO: 285551 - DNA, 33 bp, Homo sapien
tgtatatgtttataccagggaattcaaattatc

SEQ ID NO: 285552 - DNA, 33 bp, Homo sapien
tgtatatgtttataccggggaattcaaattatc

SEQ ID NO: 285553 - DNA, 33 bp, Homo sapien
cctgggctactatataacttctgaaaccccagt

SEQ ID NO: 285554 - DNA, 33 bp, Homo sapien
cctgggctactatatatcttctgaaaccccagt

SEQ ID NO: 285555 - DNA, 33 bp, Homo sapien
ttgatttttttattgacaccacagcaacttact

SEQ ID NO: 285556 - DNA, 33 bp, Homo sapien
ttgatttttttattgataccacagcaacttact

SEQ ID NO: 285557 - DNA, 33 bp, Homo sapien
agaatctcattaacacagtctcccatttctgga

SEQ ID NO: 285558 - DNA, 33 bp, Homo sapien
agaatctcattaacacggtctcccatttctgga

SEQ ID NO: 285559 - DNA, 33 bp, Homo sapien
gttaggcctctatatacgatgcaagtgaacaaa

SEQ ID NO: 285560 - DNA, 33 bp, Homo sapien
gttaggcctctatatatgatgcaagtgaacaaa

SEQ ID NO: 285561 - DNA, 33 bp, Homo sapien
gttgaaattacaaacgacaattttacagatttt

SEQ ID NO: 285562 - DNA, 33 bp, Homo sapien
gttgaaattacaaacggcaattttacagatttt

SEQ ID NO: 285563 - DNA, 33 bp, Homo sapien
ctgtgtctgccttttaaatgtgtcagtattggc

SEQ ID NO: 285564 - DNA, 33 bp, Homo sapien
ctgtgtctgccttttagatgtgtcagtattggc

SEQ ID NO: 285565 - DNA, 33 bp, Homo sapien
agacaggaaagaaataactgcccatgaaaagga

SEQ ID NO: 285566 - DNA, 33 bp, Homo sapien
agacaggaaagaaatagctgcccatgaaaagga

SEQ ID NO: 285567 - DNA, 33 bp, Homo sapien
tgctgaagtaagccaaaaaataaaagatataag

SEQ ID NO: 285568 - DNA, 33 bp, Homo sapien
tgctgaagtaagccaacaaataaaagatataag

SEQ ID NO: 285569 - DNA, 33 bp, Homo sapien
aaattacatacttgataagataaaccaatgtat

SEQ ID NO: 285570 - DNA, 33 bp, Homo sapien
aaattacatacttgatgagataaaccaatgtat

SEQ ID NO: 285571 - DNA, 33 bp, Homo sapien
tgacaaggccagacaccgagcctccaaaatctc

SEQ ID NO: 285572 - DNA, 33 bp, Homo sapien
tgacaaggccagacacggagcctccaaaatctc

SEQ ID NO: 285573 - DNA, 33 bp, Homo sapien
aaacaatttagttaataatctgaggcaaagaat

SEQ ID NO: 285574 - DNA, 33 bp, Homo sapien
aaacaatttagttaatgatctgaggcaaagaat

SEQ ID NO: 285575 - DNA, 33 bp, Homo sapien
agactcagcagattaccagatgtagtggttatg

SEQ ID NO: 285576 - DNA, 33 bp, Homo sapien
agactcagcagattacgagatgtagtggttatg

SEQ ID NO: 285577 - DNA, 33 bp, Homo sapien
taggagtttaatatgaccatggtactacaaaat

SEQ ID NO: 285578 - DNA, 33 bp, Homo sapien
taggagtttaatatgatcatggtactacaaaat

SEQ ID NO: 285579 - DNA, 33 bp, Homo sapien
acaaggagtagatgaccggcagaattcgaataa

SEQ ID NO: 285580 - DNA, 33 bp, Homo sapien
acaaggagtagatgactggcagaattcgaataa

SEQ ID NO: 285581 - DNA, 33 bp, Homo sapien
ttaaatttctgttaataaaaatgtgcaatattc

SEQ ID NO: 285582 - DNA, 33 bp, Homo sapien
ttaaatttctgttaatgaaaatgtgcaatattc

SEQ ID NO: 285583 - DNA, 33 bp, Homo sapien
agaggactattcaaaaatgaagacagaacacag

SEQ ID NO: 285584 - DNA, 33 bp, Homo sapien
agaggactattcaaaactgaagacagaacacag

SEQ ID NO: 285585 - DNA, 33 bp, Homo sapien
gccaaagactgaagaccgcactgttggttaccc

SEQ ID NO: 285586 - DNA, 33 bp, Homo sapien
gccaaagactgaagactgcactgttggttaccc

SEQ ID NO: 285587 - DNA, 33 bp, Homo sapien
gtcaggatcctacccaagagagaaaagaatcct

SEQ ID NO: 285588 - DNA, 33 bp, Homo sapien
gtcaggatcctacccaggagagaaaagaatcct

SEQ ID NO: 285589 - DNA, 33 bp, Homo sapien
aagaagagaaaacacgaatgctagactttaaga

SEQ ID NO: 285590 - DNA, 33 bp, Homo sapien
aagaagagaaaacacgtatgctagactttaaga

SEQ ID NO: 285591 - DNA, 33 bp, Homo sapien
gtacatgatagcaacaagaagagaaaaagagag

SEQ ID NO: 285592 - DNA, 33 bp, Homo sapien
gtacatgatagcaacaggaagagaaaaagagag

SEQ ID NO: 285593 - DNA, 33 bp, Homo sapien
taaacaaagttgtgcccgaatagtagaattgtg

SEQ ID NO: 285594 - DNA, 33 bp, Homo sapien
taaacaaagttgtgcctgaatagtagaattgtg

SEQ ID NO: 285595 - DNA, 33 bp, Homo sapien
agagggatttaaaccaccttgtgacttaaggaa

SEQ ID NO: 285596 - DNA, 33 bp, Homo sapien
agagggatttaaaccatcttgtgacttaaggaa

SEQ ID NO: 285597 - DNA, 33 bp, Homo sapien
ctgatacagaacactgaaaggcattgccacaca

SEQ ID NO: 285598 - DNA, 33 bp, Homo sapien
ctgatacagaacactggaaggcattgccacaca

SEQ ID NO: 285599 - DNA, 33 bp, Homo sapien
tgaatattgtggtgcagcatcacatttagcctt

SEQ ID NO: 285600 - DNA, 33 bp, Homo sapien
tgaatattgtggtgcatcatcacatttagcctt

SEQ ID NO: 285601 - DNA, 33 bp, Homo sapien
acacagctcttgtggaatatgggcttctgggct

SEQ ID NO: 285602 - DNA, 33 bp, Homo sapien
acacagctcttgtggattatgggcttctgggct

SEQ ID NO: 285603 - DNA, 33 bp, Homo sapien
taccaggggtaaatgacagaagtcaagggaggt

SEQ ID NO: 285604 - DNA, 33 bp, Homo sapien
taccaggggtaaatgatagaagtcaagggaggt

SEQ ID NO: 285605 - DNA, 33 bp, Homo sapien
tcaattgaaagagagaacagcataaacataaat

SEQ ID NO: 285606 - DNA, 33 bp, Homo sapien
tcaattgaaagagagagcagcataaacataaat

SEQ ID NO: 285607 - DNA, 33 bp, Homo sapien
gagtagttgatacttgcaggaaaggcaattcag

SEQ ID NO: 285608 - DNA, 33 bp, Homo sapien
gagtagttgatacttgtaggaaaggcaattcag

SEQ ID NO: 285609 - DNA, 33 bp, Homo sapien
ctccaattcatatgttcaaaccttactcctcaa

SEQ ID NO: 285610 - DNA, 33 bp, Homo sapien
ctccaattcatatgttgaaaccttactcctcaa

SEQ ID NO: 285611 - DNA, 33 bp, Homo sapien
tctatttttcgaagcaggattttaagattttct

SEQ ID NO: 285612 - DNA, 33 bp, Homo sapien
tctatttttcgaagcatgattttaagattttct

SEQ ID NO: 285613 - DNA, 33 bp, Homo sapien
tatgaaataaaatggcaacgtgatatagattgt

SEQ ID NO: 285614 - DNA, 33 bp, Homo sapien
tatgaaataaaatggcgacgtgatatagattgt

SEQ ID NO: 285615 - DNA, 33 bp, Homo sapien
aaatggaagcagtgaacaggaataaagtagagt

SEQ ID NO: 285616 - DNA, 33 bp, Homo sapien
aaatggaagcagtgaataggaataaagtagagt

SEQ ID NO: 285617 - DNA, 33 bp, Homo sapien
gattgacactactcaaattcaaaacttaaaata

SEQ ID NO: 285618 - DNA, 33 bp, Homo sapien
gattgacactactcaatttcaaaacttaaaata

SEQ ID NO: 285619 - DNA, 33 bp, Homo sapien
tttttactttcagcacaatagtcaatatgttac

SEQ ID NO: 285620 - DNA, 33 bp, Homo sapien
tttttactttcagcactatagtcaatatgttac

SEQ ID NO: 285621 - DNA, 33 bp, Homo sapien
gtaagaaaaatcaccactcgaacaattgtaagt

SEQ ID NO: 285622 - DNA, 33 bp, Homo sapien
gtaagaaaaatcaccagtcgaacaattgtaagt

SEQ ID NO: 285623 - DNA, 33 bp, Homo sapien
ttatgtagaaattatacggaagactccctctgg

SEQ ID NO: 285624 - DNA, 33 bp, Homo sapien
ttatgtagaaattatatggaagactccctctgg

SEQ ID NO: 285625 - DNA, 33 bp, Homo sapien
ttctgcttccagtttcacagcctaaagttacat

SEQ ID NO: 285626 - DNA, 33 bp, Homo sapien
ttctgcttccagtttcgcagcctaaagttacat

SEQ ID NO: 285627 - DNA, 33 bp, Homo sapien
atagtatacttgctacactaattgtcttacata

SEQ ID NO: 285628 - DNA, 33 bp, Homo sapien
atagtatacttgctacgctaattgtcttacata

SEQ ID NO: 285629 - DNA, 33 bp, Homo sapien
aaattaaaaatttggaagcatcaatataaactc

SEQ ID NO: 285630 - DNA, 33 bp, Homo sapien
aaattaaaaatttggaggcatcaatataaactc

SEQ ID NO: 285631 - DNA, 33 bp, Homo sapien
tagaaaactctcaatgaatttagttactgccct

SEQ ID NO: 285632 - DNA, 33 bp, Homo sapien
tagaaaactctcaatggatttagttactgccct

SEQ ID NO: 285633 - DNA, 33 bp, Homo sapien
acaatgggagaaagaacagaggcatataagatg

SEQ ID NO: 285634 - DNA, 33 bp, Homo sapien
acaatgggagaaagaagagaggcatataagatg

SEQ ID NO: 285635 - DNA, 33 bp, Homo sapien
gtacctaaacatttagcatagctttactttaag

SEQ ID NO: 285636 - DNA, 33 bp, Homo sapien
gtacctaaacatttaggatagctttactttaag

SEQ ID NO: 285637 - DNA, 33 bp, Homo sapien
taatcaaatgatatcaagggccggaatatcaga

SEQ ID NO: 285638 - DNA, 33 bp, Homo sapien
taatcaaatgatatcaggggccggaatatcaga

SEQ ID NO: 285639 - DNA, 33 bp, Homo sapien
caatgttgctacaaataacataagtgtattctt

SEQ ID NO: 285640 - DNA, 33 bp, Homo sapien
caatgttgctacaaatgacataagtgtattctt

SEQ ID NO: 285641 - DNA, 33 bp, Homo sapien
caagaagcaaacaaataattcagtcgattttct

SEQ ID NO: 285642 - DNA, 33 bp, Homo sapien
caagaagcaaacaaatgattcagtcgattttct

SEQ ID NO: 285643 - DNA, 33 bp, Homo sapien
agatccatgcctaccaaaagcgagccaagcatg

SEQ ID NO: 285644 - DNA, 33 bp, Homo sapien
agatccatgcctaccagaagcgagccaagcatg

SEQ ID NO: 285645 - DNA, 33 bp, Homo sapien
gataaattaattcataacaaatccataaagctc

SEQ ID NO: 285646 - DNA, 33 bp, Homo sapien
gataaattaattcatatcaaatccataaagctc

SEQ ID NO: 285647 - DNA, 33 bp, Homo sapien
tggcctaactaagcaactctttaatcactggaa

SEQ ID NO: 285648 - DNA, 33 bp, Homo sapien
tggcctaactaagcaagtctttaatcactggaa

SEQ ID NO: 285649 - DNA, 33 bp, Homo sapien
atatgagtaacagttgaacattaaaatgagagt

SEQ ID NO: 285650 - DNA, 33 bp, Homo sapien
atatgagtaacagttggacattaaaatgagagt

SEQ ID NO: 285651 - DNA, 33 bp, Homo sapien
ctcttgactctggtggaaattccctaagatatt

SEQ ID NO: 285652 - DNA, 33 bp, Homo sapien
ctcttgactctggtggtaattccctaagatatt

SEQ ID NO: 285653 - DNA, 33 bp, Homo sapien
gaggcacttggcaagacctaaatgaagtaaaag

SEQ ID NO: 285654 - DNA, 33 bp, Homo sapien
gaggcacttggcaagatctaaatgaagtaaaag

SEQ ID NO: 285655 - DNA, 33 bp, Homo sapien
atccacattcatcattaaacctccatccccagc

SEQ ID NO: 285656 - DNA, 33 bp, Homo sapien
atccacattcatcattcaacctccatccccagc

SEQ ID NO: 285657 - DNA, 33 bp, Homo sapien
gtgtgaaatgaagccaaaaagaataacagagtt

SEQ ID NO: 285658 - DNA, 33 bp, Homo sapien
gtgtgaaatgaagccagaaagaataacagagtt

SEQ ID NO: 285659 - DNA, 33 bp, Homo sapien
atgtttcaagtgcccaatatgttaatatggcta

SEQ ID NO: 285660 - DNA, 33 bp, Homo sapien
atgtttcaagtgcccagtatgttaatatggcta

SEQ ID NO: 285661 - DNA, 33 bp, Homo sapien
ttaggcttacaaaaagactgctaacactaacac

SEQ ID NO: 285662 - DNA, 33 bp, Homo sapien
ttaggcttacaaaaagtctgctaacactaacac

SEQ ID NO: 285663 - DNA, 33 bp, Homo sapien
caatcatatgactgtacaaccaaccatttgtta

SEQ ID NO: 285664 - DNA, 33 bp, Homo sapien
caatcatatgactgtataaccaaccatttgtta

SEQ ID NO: 285665 - DNA, 33 bp, Homo sapien
tgtgagcacactgttacctacatcagaccaatc

SEQ ID NO: 285666 - DNA, 33 bp, Homo sapien
tgtgagcacactgttatctacatcagaccaatc

SEQ ID NO: 285667 - DNA, 33 bp, Homo sapien
ttatcagtgaagtggaagcatgtgtttttgctt

SEQ ID NO: 285668 - DNA, 33 bp, Homo sapien
ttatcagtgaagtggaggcatgtgtttttgctt

SEQ ID NO: 285669 - DNA, 33 bp, Homo sapien
tttgattaaaatgttcaaagtaacaacacaaat

SEQ ID NO: 285670 - DNA, 33 bp, Homo sapien
tttgattaaaatgttcgaagtaacaacacaaat

SEQ ID NO: 285671 - DNA, 33 bp, Homo sapien
tttgcttggccagtagaatgatttgatttgatt

SEQ ID NO: 285672 - DNA, 33 bp, Homo sapien
tttgcttggccagtagtatgatttgatttgatt

SEQ ID NO: 285673 - DNA, 33 bp, Homo sapien
aaatggaagaacattaagtgcattattactaag

SEQ ID NO: 285674 - DNA, 33 bp, Homo sapien
aaatggaagaacattacgtgcattattactaag

SEQ ID NO: 285675 - DNA, 33 bp, Homo sapien
aatatttaaaagagaaaatcatgacaggccttg

SEQ ID NO: 285676 - DNA, 33 bp, Homo sapien
aatatttaaaagagaatatcatgacaggccttg

SEQ ID NO: 285677 - DNA, 33 bp, Homo sapien
tattgaggccagactacatccattaaagaattc

SEQ ID NO: 285678 - DNA, 33 bp, Homo sapien
tattgaggccagactatatccattaaagaattc

SEQ ID NO: 285679 - DNA, 33 bp, Homo sapien
gcctataggatagcacaggtgaaatctgttgtt

SEQ ID NO: 285680 - DNA, 33 bp, Homo sapien
gcctataggatagcacgggtgaaatctgttgtt

SEQ ID NO: 285681 - DNA, 33 bp, Homo sapien
gaaagcaactttgcaacgtggtcagaatattgc

SEQ ID NO: 285682 - DNA, 33 bp, Homo sapien
gaaagcaactttgcaatgtggtcagaatattgc

SEQ ID NO: 285683 - DNA, 33 bp, Homo sapien
tttgatgaatatttacacacatttccatgagtt

SEQ ID NO: 285684 - DNA, 33 bp, Homo sapien
tttgatgaatatttactcacatttccatgagtt

SEQ ID NO: 285685 - DNA, 33 bp, Homo sapien
aaccaatacatggcacaagaagagacaaaaatt

SEQ ID NO: 285686 - DNA, 33 bp, Homo sapien
aaccaatacatggcacgagaagagacaaaaatt

SEQ ID NO: 285687 - DNA, 33 bp, Homo sapien
tcactttctctctctgacacatctctgaagcag

SEQ ID NO: 285688 - DNA, 33 bp, Homo sapien
tcactttctctctctgtcacatctctgaagcag

SEQ ID NO: 285689 - DNA, 33 bp, Homo sapien
acagttcttgactacaaccagaaatttctagtg

SEQ ID NO: 285690 - DNA, 33 bp, Homo sapien
acagttcttgactacacccagaaatttctagtg

SEQ ID NO: 285691 - DNA, 33 bp, Homo sapien
agctcaaaaagcagagcctaggatattggatga

SEQ ID NO: 285692 - DNA, 33 bp, Homo sapien
agctcaaaaagcagagtctaggatattggatga

SEQ ID NO: 285693 - DNA, 33 bp, Homo sapien
caccattatgattactcactgattattatattc

SEQ ID NO: 285694 - DNA, 33 bp, Homo sapien
caccattatgattactgactgattattatattc

SEQ ID NO: 285695 - DNA, 33 bp, Homo sapien
ggaatgaaagatgcaccggtgatttgagggcac

SEQ ID NO: 285696 - DNA, 33 bp, Homo sapien
ggaatgaaagatgcacgggtgatttgagggcac

SEQ ID NO: 285697 - DNA, 33 bp, Homo sapien
aataaatcaagaatgacagttttctggctttag

SEQ ID NO: 285698 - DNA, 33 bp, Homo sapien
aataaatcaagaatgatagttttctggctttag

SEQ ID NO: 285699 - DNA, 33 bp, Homo sapien
gaactgacctaactggaactgccttacaaagag

SEQ ID NO: 285700 - DNA, 33 bp, Homo sapien
gaactgacctaactggcactgccttacaaagag

SEQ ID NO: 285701 - DNA, 33 bp, Homo sapien
cataaatgtatttccaataattctgccagcttg

SEQ ID NO: 285702 - DNA, 33 bp, Homo sapien
cataaatgtatttccagtaattctgccagcttg

SEQ ID NO: 285703 - DNA, 33 bp, Homo sapien
agaagatctaccaaccactcagcttctttctta

SEQ ID NO: 285704 - DNA, 33 bp, Homo sapien
agaagatctaccaaccgctcagcttctttctta

SEQ ID NO: 285705 - DNA, 33 bp, Homo sapien
gggccttgtttttacacgaatccaggaagagga

SEQ ID NO: 285706 - DNA, 33 bp, Homo sapien
gggccttgtttttacatgaatccaggaagagga

SEQ ID NO: 285707 - DNA, 33 bp, Homo sapien
taggtaacttttgccactaatatcttcaaacta

SEQ ID NO: 285708 - DNA, 33 bp, Homo sapien
taggtaacttttgccattaatatcttcaaacta

SEQ ID NO: 285709 - DNA, 33 bp, Homo sapien
ctaatcttatccctcaaaatcggttcttacaat

SEQ ID NO: 285710 - DNA, 33 bp, Homo sapien
ctaatcttatccctcagaatcggttcttacaat

SEQ ID NO: 285711 - DNA, 33 bp, Homo sapien
tccttctcaggaagacacttataatcagctgct

SEQ ID NO: 285712 - DNA, 33 bp, Homo sapien
tccttctcaggaagacgcttataatcagctgct

SEQ ID NO: 285713 - DNA, 33 bp, Homo sapien
aacattgtaacacttaacttttgcaccttgttt

SEQ ID NO: 285714 - DNA, 33 bp, Homo sapien
aacattgtaacacttatcttttgcaccttgttt

SEQ ID NO: 285715 - DNA, 33 bp, Homo sapien
gaaagtgtctcagtgacattttgggacccaaaa

SEQ ID NO: 285716 - DNA, 33 bp, Homo sapien
gaaagtgtctcagtgatattttgggacccaaaa

SEQ ID NO: 285717 - DNA, 33 bp, Homo sapien
ctattcaaggtttcaactggttggatgaaggcc

SEQ ID NO: 285718 - DNA, 33 bp, Homo sapien
ctattcaaggtttcaattggttggatgaaggcc

SEQ ID NO: 285719 - DNA, 33 bp, Homo sapien
acccacaaagagcccacgtatcagcttgaatca

SEQ ID NO: 285720 - DNA, 33 bp, Homo sapien
acccacaaagagcccatgtatcagcttgaatca

SEQ ID NO: 285721 - DNA, 33 bp, Homo sapien
tccagctgttaaactacgttagataactcattt

SEQ ID NO: 285722 - DNA, 33 bp, Homo sapien
tccagctgttaaactatgttagataactcattt

SEQ ID NO: 285723 - DNA, 33 bp, Homo sapien
agttgtgcagatggaagtatgtgtgagatgata

SEQ ID NO: 285724 - DNA, 33 bp, Homo sapien
agttgtgcagatggaattatgtgtgagatgata

SEQ ID NO: 285725 - DNA, 33 bp, Homo sapien
ttaaatcacactcagaagaaaaataggaagttg

SEQ ID NO: 285726 - DNA, 33 bp, Homo sapien
ttaaatcacactcagacgaaaaataggaagttg

SEQ ID NO: 285727 - DNA, 33 bp, Homo sapien
aacttcttcagcttgagctaatgccagtggtca

SEQ ID NO: 285728 - DNA, 33 bp, Homo sapien
aacttcttcagcttgatctaatgccagtggtca

SEQ ID NO: 285729 - DNA, 33 bp, Homo sapien
tgagaagtagggctagaagaaatatcacaacat

SEQ ID NO: 285730 - DNA, 33 bp, Homo sapien
tgagaagtagggctaggagaaatatcacaacat

SEQ ID NO: 285731 - DNA, 33 bp, Homo sapien
gaagtcaccccaaatgaaaatttgcagtgactt

SEQ ID NO: 285732 - DNA, 33 bp, Homo sapien
gaagtcaccccaaatggaaatttgcagtgactt

SEQ ID NO: 285733 - DNA, 33 bp, Homo sapien
taaaagtaactggaaactagcatatcattctgg

SEQ ID NO: 285734 - DNA, 33 bp, Homo sapien
taaaagtaactggaaagtagcatatcattctgg

SEQ ID NO: 285735 - DNA, 33 bp, Homo sapien
attacaagcaaataaagagttttatgcaggatc

SEQ ID NO: 285736 - DNA, 33 bp, Homo sapien
attacaagcaaataaatagttttatgcaggatc

SEQ ID NO: 285737 - DNA, 33 bp, Homo sapien
atcagaaaatgtctgacgtttttgccttactgt

SEQ ID NO: 285738 - DNA, 33 bp, Homo sapien
atcagaaaatgtctgaggtttttgccttactgt

SEQ ID NO: 285739 - DNA, 33 bp, Homo sapien
ctcctattttaaacaacgtacctcagtatgctt

SEQ ID NO: 285740 - DNA, 33 bp, Homo sapien
ctcctattttaaacaatgtacctcagtatgctt

SEQ ID NO: 285741 - DNA, 33 bp, Homo sapien
gtttcttcacagttaaacatttttctgaataat

SEQ ID NO: 285742 - DNA, 33 bp, Homo sapien
gtttcttcacagttaagcatttttctgaataat

SEQ ID NO: 285743 - DNA, 33 bp, Homo sapien
tataaaaatatccacaccaagggaggtatatgc

SEQ ID NO: 285744 - DNA, 33 bp, Homo sapien
tataaaaatatccacatcaagggaggtatatgc

SEQ ID NO: 285745 - DNA, 33 bp, Homo sapien
aagtaacttgcaaccaagagataaatacatcca

SEQ ID NO: 285746 - DNA, 33 bp, Homo sapien
aagtaacttgcaaccaggagataaatacatcca

SEQ ID NO: 285747 - DNA, 33 bp, Homo sapien
tccaggcactgagaaactcataagcagtcagcc

SEQ ID NO: 285748 - DNA, 33 bp, Homo sapien
tccaggcactgagaaattcataagcagtcagcc

SEQ ID NO: 285749 - DNA, 33 bp, Homo sapien
gcgctggtttacattacgaattagagttggcta

SEQ ID NO: 285750 - DNA, 33 bp, Homo sapien
gcgctggtttacattatgaattagagttggcta

SEQ ID NO: 285751 - DNA, 33 bp, Homo sapien
taatgagtaagagacagtatttctgagaggtaa

SEQ ID NO: 285752 - DNA, 33 bp, Homo sapien
taatgagtaagagacattatttctgagaggtaa

SEQ ID NO: 285753 - DNA, 33 bp, Homo sapien
atagatatgtgcaaaacagtctgtaaatggctg

SEQ ID NO: 285754 - DNA, 33 bp, Homo sapien
atagatatgtgcaaaatagtctgtaaatggctg

SEQ ID NO: 285755 - DNA, 33 bp, Homo sapien
agactagcacataaaaagctttcagcaaatggg

SEQ ID NO: 285756 - DNA, 33 bp, Homo sapien
agactagcacataaaacgctttcagcaaatggg

SEQ ID NO: 285757 - DNA, 33 bp, Homo sapien
cctgataactccatcaccttagttttagaggca

SEQ ID NO: 285758 - DNA, 33 bp, Homo sapien
cctgataactccatcatcttagttttagaggca

SEQ ID NO: 285759 - DNA, 33 bp, Homo sapien
tcaaattcacctatgacctctaaaccctgcatc

SEQ ID NO: 285760 - DNA, 33 bp, Homo sapien
tcaaattcacctatgatctctaaaccctgcatc

SEQ ID NO: 285761 - DNA, 33 bp, Homo sapien
tatgtctagaagaatagcttgaagtatctatga

SEQ ID NO: 285762 - DNA, 33 bp, Homo sapien
tatgtctagaagaatatcttgaagtatctatga

SEQ ID NO: 285763 - DNA, 33 bp, Homo sapien
gtgtccccacccaaatcatgtcttgaattgcag

SEQ ID NO: 285764 - DNA, 33 bp, Homo sapien
gtgtccccacccaaattatgtcttgaattgcag

SEQ ID NO: 285765 - DNA, 33 bp, Homo sapien
tttcctaacatctaacacacactatagtttcct

SEQ ID NO: 285766 - DNA, 33 bp, Homo sapien
tttcctaacatctaacgcacactatagtttcct

SEQ ID NO: 285767 - DNA, 33 bp, Homo sapien
tgcaatttcgaacaggaagattaagaaagtatc

SEQ ID NO: 285768 - DNA, 33 bp, Homo sapien
tgcaatttcgaacagggagattaagaaagtatc

SEQ ID NO: 285769 - DNA, 33 bp, Homo sapien
aattgcagagtcaaaaaccttgaggtagagagc

SEQ ID NO: 285770 - DNA, 33 bp, Homo sapien
aattgcagagtcaaaatccttgaggtagagagc

SEQ ID NO: 285771 - DNA, 33 bp, Homo sapien
taaaaccatgtaaagcaaaaccccagataagga

SEQ ID NO: 285772 - DNA, 33 bp, Homo sapien
taaaaccatgtaaagcgaaaccccagataagga

SEQ ID NO: 285773 - DNA, 33 bp, Homo sapien
gttctcaggagagaaacggagagatcatcctct

SEQ ID NO: 285774 - DNA, 33 bp, Homo sapien
gttctcaggagagaaagggagagatcatcctct

SEQ ID NO: 285775 - DNA, 33 bp, Homo sapien
gtcattcagagtaaaagccagtctctagaatat

SEQ ID NO: 285776 - DNA, 33 bp, Homo sapien
gtcattcagagtaaaatccagtctctagaatat

SEQ ID NO: 285777 - DNA, 33 bp, Homo sapien
gaaatgttcaagaaacaatgaggacagcatggc

SEQ ID NO: 285778 - DNA, 33 bp, Homo sapien
gaaatgttcaagaaacgatgaggacagcatggc

SEQ ID NO: 285779 - DNA, 33 bp, Homo sapien
gatacctagaaaagaaagcaatgtttgtaggct

SEQ ID NO: 285780 - DNA, 33 bp, Homo sapien
gatacctagaaaagaaggcaatgtttgtaggct

SEQ ID NO: 285781 - DNA, 33 bp, Homo sapien
ctcaagcatggctgcacaccaaaagtgcctgtg

SEQ ID NO: 285782 - DNA, 33 bp, Homo sapien
ctcaagcatggctgcataccaaaagtgcctgtg

SEQ ID NO: 285783 - DNA, 33 bp, Homo sapien
aattcgaggcttaagaaatctgcccggtgcttt

SEQ ID NO: 285784 - DNA, 33 bp, Homo sapien
aattcgaggcttaagagatctgcccggtgcttt

SEQ ID NO: 285785 - DNA, 33 bp, Homo sapien
agtttgtttctctacaaattcaatcattcattc

SEQ ID NO: 285786 - DNA, 33 bp, Homo sapien
agtttgtttctctacacattcaatcattcattc

SEQ ID NO: 285787 - DNA, 33 bp, Homo sapien
gcaagatctgccaatgaaaagctttgctttgtt

SEQ ID NO: 285788 - DNA, 33 bp, Homo sapien
gcaagatctgccaatggaaagctttgctttgtt

SEQ ID NO: 285789 - DNA, 33 bp, Homo sapien
agtccatattctttaacgacttttcagtgtctg

SEQ ID NO: 285790 - DNA, 33 bp, Homo sapien
agtccatattctttaatgacttttcagtgtctg

SEQ ID NO: 285791 - DNA, 33 bp, Homo sapien
accttcctgtctgttacgaaaccatgctgtgct

SEQ ID NO: 285792 - DNA, 33 bp, Homo sapien
accttcctgtctgttatgaaaccatgctgtgct

SEQ ID NO: 285793 - DNA, 33 bp, Homo sapien
atctgtaccacagttaactatttctgacacagt

SEQ ID NO: 285794 - DNA, 33 bp, Homo sapien
atctgtaccacagttagctatttctgacacagt

SEQ ID NO: 285795 - DNA, 33 bp, Homo sapien
aaatatacaggtgtaccaatttgttctcacaca

SEQ ID NO: 285796 - DNA, 33 bp, Homo sapien
aaatatacaggtgtactaatttgttctcacaca

SEQ ID NO: 285797 - DNA, 33 bp, Homo sapien
ataaaaacaattagagcaggtcatatgaattga

SEQ ID NO: 285798 - DNA, 33 bp, Homo sapien
ataaaaacaattagaggaggtcatatgaattga

SEQ ID NO: 285799 - DNA, 33 bp, Homo sapien
ggaatagtatgtaggacatggtagataatatgt

SEQ ID NO: 285800 - DNA, 33 bp, Homo sapien
ggaatagtatgtaggatatggtagataatatgt

SEQ ID NO: 285801 - DNA, 33 bp, Homo sapien
acattacaattttgaccatgagcaattttggaa

SEQ ID NO: 285802 - DNA, 33 bp, Homo sapien
acattacaattttgactatgagcaattttggaa

SEQ ID NO: 285803 - DNA, 33 bp, Homo sapien
tgagcatgaagtgatacccaattttaattttga

SEQ ID NO: 285804 - DNA, 33 bp, Homo sapien
tgagcatgaagtgatatccaattttaattttga

SEQ ID NO: 285805 - DNA, 33 bp, Homo sapien
atgattcctatagctcaacaacaatgagaaaat

SEQ ID NO: 285806 - DNA, 33 bp, Homo sapien
atgattcctatagctcgacaacaatgagaaaat

SEQ ID NO: 285807 - DNA, 33 bp, Homo sapien
ttctgttcttgaatgccctatgcatttctttat

SEQ ID NO: 285808 - DNA, 33 bp, Homo sapien
ttctgttcttgaatgcgctatgcatttctttat

SEQ ID NO: 285809 - DNA, 33 bp, Homo sapien
aagtagagtagggtgaatatggtcagcaacaat

SEQ ID NO: 285810 - DNA, 33 bp, Homo sapien
aagtagagtagggtgagtatggtcagcaacaat

SEQ ID NO: 285811 - DNA, 33 bp, Homo sapien
attttctgccagactacggttagtttatttcgt

SEQ ID NO: 285812 - DNA, 33 bp, Homo sapien
attttctgccagactatggttagtttatttcgt

SEQ ID NO: 285813 - DNA, 33 bp, Homo sapien
actagaaaatggaccagtgcagctttattggcc

SEQ ID NO: 285814 - DNA, 33 bp, Homo sapien
actagaaaatggaccattgcagctttattggcc

SEQ ID NO: 285815 - DNA, 33 bp, Homo sapien
ttttcaacttactttaccatctgtccttctgct

SEQ ID NO: 285816 - DNA, 33 bp, Homo sapien
ttttcaacttactttatcatctgtccttctgct

SEQ ID NO: 285817 - DNA, 33 bp, Homo sapien
cataggtggtgattcagtagttagacaaataga

SEQ ID NO: 285818 - DNA, 33 bp, Homo sapien
cataggtggtgattcattagttagacaaataga

SEQ ID NO: 285819 - DNA, 33 bp, Homo sapien
tagagtatgttgcttccaagacatggttacata

SEQ ID NO: 285820 - DNA, 33 bp, Homo sapien
tagagtatgttgcttctaagacatggttacata

SEQ ID NO: 285821 - DNA, 33 bp, Homo sapien
gcctatcacaattccaagacaaaatcatttatt

SEQ ID NO: 285822 - DNA, 33 bp, Homo sapien
gcctatcacaattccacgacaaaatcatttatt

SEQ ID NO: 285823 - DNA, 33 bp, Homo sapien
ccatgcccaacttatcacaattttaatcagcac

SEQ ID NO: 285824 - DNA, 33 bp, Homo sapien
ccatgcccaacttatctcaattttaatcagcac

SEQ ID NO: 285825 - DNA, 33 bp, Homo sapien
tccttattactgctgaaaactcttccatgggat

SEQ ID NO: 285826 - DNA, 33 bp, Homo sapien
tccttattactgctgagaactcttccatgggat

SEQ ID NO: 285827 - DNA, 33 bp, Homo sapien
ttagtaaaagggttgacctagtttatgtggctg

SEQ ID NO: 285828 - DNA, 33 bp, Homo sapien
ttagtaaaagggttgatctagtttatgtggctg

SEQ ID NO: 285829 - DNA, 33 bp, Homo sapien
cgaacgttaatcaatccaacacagaaatatcaa

SEQ ID NO: 285830 - DNA, 33 bp, Homo sapien
cgaacgttaatcaatctaacacagaaatatcaa

SEQ ID NO: 285831 - DNA, 33 bp, Homo sapien
cagttcgccttgtcagaaaatagcaaagacttg

SEQ ID NO: 285832 - DNA, 33 bp, Homo sapien
cagttcgccttgtcaggaaatagcaaagacttg

SEQ ID NO: 285833 - DNA, 33 bp, Homo sapien
ttattaggaacatacacaatgaatgaaaacggt

SEQ ID NO: 285834 - DNA, 33 bp, Homo sapien
ttattaggaacatacagaatgaatgaaaacggt

SEQ ID NO: 285835 - DNA, 33 bp, Homo sapien
tatgtagtattctcatcacaaaacataataata

SEQ ID NO: 285836 - DNA, 33 bp, Homo sapien
tatgtagtattctcatgacaaaacataataata

SEQ ID NO: 285837 - DNA, 33 bp, Homo sapien
caagaaaatgcttcaaaaccaaaaatattaatt

SEQ ID NO: 285838 - DNA, 33 bp, Homo sapien
caagaaaatgcttcaagaccaaaaatattaatt

SEQ ID NO: 285839 - DNA, 33 bp, Homo sapien
cagaggacctgcctttaaaaagcctatttgtct

SEQ ID NO: 285840 - DNA, 33 bp, Homo sapien
cagaggacctgcctttgaaaagcctatttgtct

SEQ ID NO: 285841 - DNA, 33 bp, Homo sapien
ggtgctttatttcaggacattttgacaagtgaa

SEQ ID NO: 285842 - DNA, 33 bp, Homo sapien
ggtgctttatttcagggcattttgacaagtgaa

SEQ ID NO: 285843 - DNA, 33 bp, Homo sapien
catagcatgagaatagcagtaatggcagaatga

SEQ ID NO: 285844 - DNA, 33 bp, Homo sapien
catagcatgagaatagtagtaatggcagaatga

SEQ ID NO: 285845 - DNA, 33 bp, Homo sapien
ttttttgaacatagagcctacactcaagtttta

SEQ ID NO: 285846 - DNA, 33 bp, Homo sapien
ttttttgaacatagaggctacactcaagtttta

SEQ ID NO: 285847 - DNA, 33 bp, Homo sapien
agttttctttgtggtcagaaggaagttaatagt

SEQ ID NO: 285848 - DNA, 33 bp, Homo sapien
agttttctttgtggtcggaaggaagttaatagt

SEQ ID NO: 285849 - DNA, 33 bp, Homo sapien
tggggctttttgggcagcaggtaagtattccaa

SEQ ID NO: 285850 - DNA, 33 bp, Homo sapien
tggggctttttgggcatcaggtaagtattccaa

SEQ ID NO: 285851 - DNA, 33 bp, Homo sapien
taatttatgaaactccaactgttatgcatcaga

SEQ ID NO: 285852 - DNA, 33 bp, Homo sapien
taatttatgaaactcctactgttatgcatcaga

SEQ ID NO: 285853 - DNA, 33 bp, Homo sapien
acactattaattgctacgttgaacttgacattt

SEQ ID NO: 285854 - DNA, 33 bp, Homo sapien
acactattaattgctatgttgaacttgacattt

SEQ ID NO: 285855 - DNA, 33 bp, Homo sapien
accagcgaaagggctaaccaagtagttgtggag

SEQ ID NO: 285856 - DNA, 33 bp, Homo sapien
accagcgaaagggctacccaagtagttgtggag

SEQ ID NO: 285857 - DNA, 33 bp, Homo sapien
acaaaatattttgtacacaatctccaacaataa

SEQ ID NO: 285858 - DNA, 33 bp, Homo sapien
acaaaatattttgtacgcaatctccaacaataa

SEQ ID NO: 285859 - DNA, 33 bp, Homo sapien
tattacctggaagtaaaggtgtcattatcaaag

SEQ ID NO: 285860 - DNA, 33 bp, Homo sapien
tattacctggaagtaagggtgtcattatcaaag

SEQ ID NO: 285861 - DNA, 33 bp, Homo sapien
agagcaattttccagtcaatgtattcacagata

SEQ ID NO: 285862 - DNA, 33 bp, Homo sapien
agagcaattttccagttaatgtattcacagata

SEQ ID NO: 285863 - DNA, 33 bp, Homo sapien
tatttcactggtttcaagttggcagattttgtc

SEQ ID NO: 285864 - DNA, 33 bp, Homo sapien
tatttcactggtttcaggttggcagattttgtc

SEQ ID NO: 285865 - DNA, 33 bp, Homo sapien
aaggtagggaagctaaaagaggacttgggcgga

SEQ ID NO: 285866 - DNA, 33 bp, Homo sapien
aaggtagggaagctaagagaggacttgggcgga

SEQ ID NO: 285867 - DNA, 33 bp, Homo sapien
agagttacccacttcacgtttactgtccagccc

SEQ ID NO: 285868 - DNA, 33 bp, Homo sapien
agagttacccacttcatgtttactgtccagccc

SEQ ID NO: 285869 - DNA, 33 bp, Homo sapien; identical to SEQ ID NO: 285867

SEQ ID NO: 285870 - DNA, 33 bp, Homo sapien; identical to SEQ ID NO: 285868

SEQ ID NO: 285871 - DNA, 33 bp, Homo sapien
gtacccacattcgaaacgtcactggtgagtcaa

SEQ ID NO: 285872 - DNA, 33 bp, Homo sapien
gtacccacattcgaaatgtcactggtgagtcaa

SEQ ID NO: 285873 - DNA, 33 bp, Homo sapien
actgtccaattggaccaggacttgtctgtagtc

SEQ ID NO: 285874 - DNA, 33 bp, Homo sapien
actgtccaattggaccgggacttgtctgtagtc

SEQ ID NO: 285875 - DNA, 33 bp, Homo sapien
tgtacttttattcccaacaatactgccccagat

SEQ ID NO: 285876 - DNA, 33 bp, Homo sapien
tgtacttttattcccatcaatactgccccagat

SEQ ID NO: 285877 - DNA, 33 bp, Homo sapien
gctattaataaacaaaagcccatgagttactga

SEQ ID NO: 285878 - DNA, 33 bp, Homo sapien
gctattaataaacaaacgcccatgagttactga

SEQ ID NO: 285879 - DNA, 33 bp, Homo sapien
tgtgttacttgcaaaacatccttggcttaagaa

SEQ ID NO: 285880 - DNA, 33 bp, Homo sapien
tgtgttacttgcaaaatatccttggcttaagaa

SEQ ID NO: 285881 - DNA, 33 bp, Homo sapien
ctaaaatttgagagcaaacctcagctgacagtg

SEQ ID NO: 285882 - DNA, 33 bp, Homo sapien
ctaaaatttgagagcacacctcagctgacagtg

SEQ ID NO: 285883 - DNA, 33 bp, Homo sapien
agcaggcaaaggaagacgagaaagagtgattag

SEQ ID NO: 285884 - DNA, 33 bp, Homo sapien
agcaggcaaaggaagatgagaaagagtgattag

SEQ ID NO: 285885 - DNA, 33 bp, Homo sapien
cattataacgaccatccattggcacttaggttt

SEQ ID NO: 285886 - DNA, 33 bp, Homo sapien
cattataacgaccatctattggcacttaggttt

SEQ ID NO: 285887 - DNA, 33 bp, Homo sapien
gaatcataaaagtgtaacttaactggtataaaa

SEQ ID NO: 285888 - DNA, 33 bp, Homo sapien
gaatcataaaagtgtaccttaactggtataaaa

SEQ ID NO: 285889 - DNA, 33 bp, Homo sapien
tgtgatgcttcgtatacggataagtacataatg

SEQ ID NO: 285890 - DNA, 33 bp, Homo sapien
tgtgatgcttcgtatatggataagtacataatg

SEQ ID NO: 285891 - DNA, 33 bp, Homo sapien
gcgaagacctgaatgaagagaaattacatacaa

SEQ ID NO: 285892 - DNA, 33 bp, Homo sapien
gcgaagacctgaatgaggagaaattacatacaa

SEQ ID NO: 285893 - DNA, 33 bp, Homo sapien
ggcagggaaagatacacaggcagtgaaactact

SEQ ID NO: 285894 - DNA, 33 bp, Homo sapien
ggcagggaaagatacataggcagtgaaactact

SEQ ID NO: 285895 - DNA, 33 bp, Homo sapien
tactattatggtagacagatggcatgatacatt

SEQ ID NO: 285896 - DNA, 33 bp, Homo sapien
tactattatggtagactgatggcatgatacatt

SEQ ID NO: 285897 - DNA, 33 bp, Homo sapien
gtgtctagggatatcacattatttagtcaattg

SEQ ID NO: 285898 - DNA, 33 bp, Homo sapien
gtgtctagggatatcatattatttagtcaattg

SEQ ID NO: 285899 - DNA, 33 bp, Homo sapien
tgagataaaaaagaaacgataattgaagctggc

SEQ ID NO: 285900 - DNA, 33 bp, Homo sapien
tgagataaaaaagaaaggataattgaagctggc

SEQ ID NO: 285901 - DNA, 33 bp, Homo sapien
aataaataactaggcaataaagaagatggaaat

SEQ ID NO: 285902 - DNA, 33 bp, Homo sapien
aataaataactaggcagtaaagaagatggaaat

SEQ ID NO: 285903 - DNA, 33 bp, Homo sapien
gtgcacattatcattgaaatccatgtcagtctc

SEQ ID NO: 285904 - DNA, 33 bp, Homo sapien
gtgcacattatcattggaatccatgtcagtctc

SEQ ID NO: 285905 - DNA, 33 bp, Homo sapien
tgactgatgagcacaacatagtaaataggaaaa

SEQ ID NO: 285906 - DNA, 33 bp, Homo sapien
tgactgatgagcacaatatagtaaataggaaaa

SEQ ID NO: 285907 - DNA, 33 bp, Homo sapien
ggctaaaattcaatgaaaaattcagttacagag

SEQ ID NO: 285908 - DNA, 33 bp, Homo sapien
ggctaaaattcaatgagaaattcagttacagag

SEQ ID NO: 285909 - DNA, 33 bp, Homo sapien
ttcacatgtgtatttgaaggaaaaagaaaacct

SEQ ID NO: 285910 - DNA, 33 bp, Homo sapien
ttcacatgtgtatttggaggaaaaagaaaacct

SEQ ID NO: 285911 - DNA, 33 bp, Homo sapien
cgagacacaaaaaggaacaatcaaatgaataac

SEQ ID NO: 285912 - DNA, 33 bp, Homo sapien
cgagacacaaaaaggagcaatcaaatgaataac

SEQ ID NO: 285913 - DNA, 33 bp, Homo sapien
taggaaaacttgcaaacaattccaggttatgca

SEQ ID NO: 285914 - DNA, 33 bp, Homo sapien
taggaaaacttgcaaataattccaggttatgca

SEQ ID NO: 285915 - DNA, 33 bp, Homo sapien
atgttactgacctttacatctttttgcctaaat

SEQ ID NO: 285916 - DNA, 33 bp, Homo sapien
atgttactgacctttatatctttttgcctaaat

SEQ ID NO: 285917 - DNA, 33 bp, Homo sapien
gcaagacagatctataagaatagaagtccactg

SEQ ID NO: 285918 - DNA, 33 bp, Homo sapien
gcaagacagatctataggaatagaagtccactg

SEQ ID NO: 285919 - DNA, 33 bp, Homo sapien
cagaactggaattgcaagattcgatttatgtat

SEQ ID NO: 285920 - DNA, 33 bp, Homo sapien
cagaactggaattgcaggattcgatttatgtat

SEQ ID NO: 285921 - DNA, 33 bp, Homo sapien
cttgcatgtcactaaaggtggaatactactaaa

SEQ ID NO: 285922 - DNA, 33 bp, Homo sapien
cttgcatgtcactaaatgtggaatactactaaa

SEQ ID NO: 285923 - DNA, 33 bp, Homo sapien
actctaaggtaatccaaaataagccacatcctt

SEQ ID NO: 285924 - DNA, 33 bp, Homo sapien
actctaaggtaatccacaataagccacatcctt

SEQ ID NO: 285925 - DNA, 33 bp, Homo sapien
gattacttctaactaacacaatatggcacaaat

SEQ ID NO: 285926 - DNA, 33 bp, Homo sapien
gattacttctaactaatacaatatggcacaaat

SEQ ID NO: 285927 - DNA, 33 bp, Homo sapien
ggccgtagaattcataacagttggcttcttaaa

SEQ ID NO: 285928 - DNA, 33 bp, Homo sapien
ggccgtagaattcatagcagttggcttcttaaa

SEQ ID NO: 285929 - DNA, 33 bp, Homo sapien
aactcaatatcatagacggttgttgtagatggt

SEQ ID NO: 285930 - DNA, 33 bp, Homo sapien
aactcaatatcatagatggttgttgtagatggt

SEQ ID NO: 285931 - DNA, 33 bp, Homo sapien
acccaaaacttaaaaaatcaggcaagatggggc

SEQ ID NO: 285932 - DNA, 33 bp, Homo sapien
acccaaaacttaaaaagtcaggcaagatggggc

SEQ ID NO: 285933 - DNA, 33 bp, Homo sapien
tgtgttatctatactcaaagtccaatttgctta

SEQ ID NO: 285934 - DNA, 33 bp, Homo sapien
tgtgttatctatactcgaagtccaatttgctta

SEQ ID NO: 285935 - DNA, 33 bp, Homo sapien
ctttgccactttttatcaaattcagatgtctta

SEQ ID NO: 285936 - DNA, 33 bp, Homo sapien
ctttgccactttttattaaattcagatgtctta

SEQ ID NO: 285937 - DNA, 33 bp, Homo sapien
atggtattcagaaggaaatttatgctttacttg

SEQ ID NO: 285938 - DNA, 33 bp, Homo sapien
atggtattcagaaggagatttatgctttacttg

SEQ ID NO: 285939 - DNA, 33 bp, Homo sapien
aacccacaaaatgtacagcaccaagaataaaga

SEQ ID NO: 285940 - DNA, 33 bp, Homo sapien
aacccacaaaatgtacggcaccaagaataaaga

SEQ ID NO: 285941 - DNA, 33 bp, Homo sapien
tgatgagtacattacaataagacaaagtagatt

SEQ ID NO: 285942 - DNA, 33 bp, Homo sapien
tgatgagtacattacagtaagacaaagtagatt

SEQ ID NO: 285943 - DNA, 33 bp, Homo sapien
aatgcagtcagtgtaactcgccatatcaacaaa

SEQ ID NO: 285944 - DNA, 33 bp, Homo sapien
aatgcagtcagtgtaattcgccatatcaacaaa

SEQ ID NO: 285945 - DNA, 33 bp, Homo sapien
aaatgaaaagcatccaatgagcattaatcggag

SEQ ID NO: 285946 - DNA, 33 bp, Homo sapien
aaatgaaaagcatccagtgagcattaatcggag

SEQ ID NO: 285947 - DNA, 33 bp, Homo sapien
ttaacccaacattgataataggcacaaatgtga

SEQ ID NO: 285948 - DNA, 33 bp, Homo sapien
ttaacccaacattgatcataggcacaaatgtga

SEQ ID NO: 285949 - DNA, 33 bp, Homo sapien
taatttagaaaccagcaatccaatttacaaaac

SEQ ID NO: 285950 - DNA, 33 bp, Homo sapien
taatttagaaaccagcgatccaatttacaaaac

SEQ ID NO: 285951 - DNA, 33 bp, Homo sapien
tatttgtaatttaatgcaaggatcatagtggat

SEQ ID NO: 285952 - DNA, 33 bp, Homo sapien
tatttgtaatttaatgtaaggatcatagtggat

SEQ ID NO: 285953 - DNA, 33 bp, Homo sapien
ggcttttacatctctaagcattatacgtgtgct

SEQ ID NO: 285954 - DNA, 33 bp, Homo sapien
ggcttttacatctctaggcattatacgtgtgct

SEQ ID NO: 285955 - DNA, 33 bp, Homo sapien
cagtttaaatactaaacaagatgttggccacac

SEQ ID NO: 285956 - DNA, 33 bp, Homo sapien
cagtttaaatactaaataagatgttggccacac

SEQ ID NO: 285957 - DNA, 33 bp, Homo sapien
aattcatgggtaatcaataaagccattctgaaa

SEQ ID NO: 285958 - DNA, 33 bp, Homo sapien
aattcatgggtaatcagtaaagccattctgaaa

SEQ ID NO: 285959 - DNA, 33 bp, Homo sapien
taaatgtaaagcctaaaactataaaaactctgt

SEQ ID NO: 285960 - DNA, 33 bp, Homo sapien
taaatgtaaagcctaacactataaaaactctgt

SEQ ID NO: 285961 - DNA, 33 bp, Homo sapien
aagaagatggaattgaaattggttcccatatcc

SEQ ID NO: 285962 - DNA, 33 bp, Homo sapien
aagaagatggaattgagattggttcccatatcc

SEQ ID NO: 285963 - DNA, 33 bp, Homo sapien
tttgtgaggagataaaataggttaaagtgaaga

SEQ ID NO: 285964 - DNA, 33 bp, Homo sapien
tttgtgaggagataaagtaggttaaagtgaaga

SEQ ID NO: 285965 - DNA, 33 bp, Homo sapien
agtggcatatattccacgctgtctatgatgttt

SEQ ID NO: 285966 - DNA, 33 bp, Homo sapien
agtggcatatattccatgctgtctatgatgttt

SEQ ID NO: 285967 - DNA, 33 bp, Homo sapien
cagcttaaggctcaagaagaataactttagatc

SEQ ID NO: 285968 - DNA, 33 bp, Homo sapien
cagcttaaggctcaaggagaataactttagatc

SEQ ID NO: 285969 - DNA, 33 bp, Homo sapien
tatttctgaacctgtgcattatgaactatctgg

SEQ ID NO: 285970 - DNA, 33 bp, Homo sapien
tatttctgaacctgtggattatgaactatctgg

SEQ ID NO: 285971 - DNA, 33 bp, Homo sapien
tcctgacttaagtgcaaccattttccttacaat

SEQ ID NO: 285972 - DNA, 33 bp, Homo sapien
tcctgacttaagtgcagccattttccttacaat

SEQ ID NO: 285973 - DNA, 33 bp, Homo sapien
gtttatttataacatccatttgatcagtaagca

SEQ ID NO: 285974 - DNA, 33 bp, Homo sapien
gtttatttataacatctatttgatcagtaagca

SEQ ID NO: 285975 - DNA, 33 bp, Homo sapien
aagaatcaattaaaaaacagtgatcaatgtgca

SEQ ID NO: 285976 - DNA, 33 bp, Homo sapien
aagaatcaattaaaaagcagtgatcaatgtgca

SEQ ID NO: 285977 - DNA, 33 bp, Homo sapien
aggcttgagattgtacccttctgtgtattcctt

SEQ ID NO: 285978 - DNA, 33 bp, Homo sapien
aggcttgagattgtactcttctgtgtattcctt

SEQ ID NO: 285979 - DNA, 33 bp, Homo sapien
gtattttcgcatgtgaagccaacatttcaaaca

SEQ ID NO: 285980 - DNA, 33 bp, Homo sapien
gtattttcgcatgtgaggccaacatttcaaaca

SEQ ID NO: 285981 - DNA, 33 bp, Homo sapien
taatttcatctaaagaccgaactgggattatca

SEQ ID NO: 285982 - DNA, 33 bp, Homo sapien
taatttcatctaaagagcgaactgggattatca

SEQ ID NO: 285983 - DNA, 33 bp, Homo sapien
tggacttagcattacacaggctagtcacgtaac

SEQ ID NO: 285984 - DNA, 33 bp, Homo sapien
tggacttagcattacataggctagtcacgtaac

SEQ ID NO: 285985 - DNA, 33 bp, Homo sapien
agaggtagtttcacaaaaagtagatttgaagat

SEQ ID NO: 285986 - DNA, 33 bp, Homo sapien
agaggtagtttcacaacaagtagatttgaagat

SEQ ID NO: 285987 - DNA, 33 bp, Homo sapien
gctacacaatgactccaactacccccacttctt

SEQ ID NO: 285988 - DNA, 33 bp, Homo sapien
gctacacaatgactccgactacccccacttctt

SEQ ID NO: 285989 - DNA, 33 bp, Homo sapien
accatcacagtacctacggacccctttaatgca

SEQ ID NO: 285990 - DNA, 33 bp, Homo sapien
accatcacagtacctatggacccctttaatgca

SEQ ID NO: 285991 - DNA, 33 bp, Homo sapien
atgttgttttatgcaacgaattttgaacagaaa

SEQ ID NO: 285992 - DNA, 33 bp, Homo sapien
atgttgttttatgcaatgaattttgaacagaaa

SEQ ID NO: 285993 - DNA, 33 bp, Homo sapien
caaatgtttatcaaaggccaggaaacactgctg

SEQ ID NO: 285994 - DNA, 33 bp, Homo sapien
caaatgtttatcaaagtccaggaaacactgctg

SEQ ID NO: 285995 - DNA, 33 bp, Homo sapien
cgtggtactgtttataaatacaaagtgaacaag

SEQ ID NO: 285996 - DNA, 33 bp, Homo sapien
cgtggtactgtttatatatacaaagtgaacaag

SEQ ID NO: 285997 - DNA, 33 bp, Homo sapien
aggcagcagctacaataaaattcaagtacaaac

SEQ ID NO: 285998 - DNA, 33 bp, Homo sapien
aggcagcagctacaatgaaattcaagtacaaac

SEQ ID NO: 285999 - DNA, 33 bp, Homo sapien
tctggctgaaaaaggccatagcgttcatcactg

SEQ ID NO: 286000 - DNA, 33 bp, Homo sapien
tctggctgaaaaaggcgatagcgttcatcactg

SEQ ID NO: 286001 - DNA, 33 bp, Homo sapien
acttcaccaaagtccaaaataaatgggataatt

SEQ ID NO: 286002 - DNA, 33 bp, Homo sapien
acttcaccaaagtccagaataaatgggataatt

SEQ ID NO: 286003 - DNA, 33 bp, Homo sapien
ttctgcaagacaatacgaagaacgaatctatca

SEQ ID NO: 286004 - DNA, 33 bp, Homo sapien
ttctgcaagacaatactaagaacgaatctatca

SEQ ID NO: 286005 - DNA, 33 bp, Homo sapien
ctttctctcaccaaaacttcaagatcaatttca

SEQ ID NO: 286006 - DNA, 33 bp, Homo sapien
ctttctctcaccaaaagttcaagatcaatttca

SEQ ID NO: 286007 - DNA, 33 bp, Homo sapien
cacactatctgatttcaagctacagacataact

SEQ ID NO: 286008 - DNA, 33 bp, Homo sapien
cacactatctgatttcgagctacagacataact

SEQ ID NO: 286009 - DNA, 33 bp, Homo sapien
tctatgaaactgggcaagctaactagaaagcaa

SEQ ID NO: 286010 - DNA, 33 bp, Homo sapien
tctatgaaactgggcaggctaactagaaagcaa

SEQ ID NO: 286011 - DNA, 33 bp, Homo sapien
tcaaaaccatgtggaaagctaaacatatttttg

SEQ ID NO: 286012 - DNA, 33 bp, Homo sapien
tcaaaaccatgtggaaggctaaacatatttttg

SEQ ID NO: 286013 - DNA, 33 bp, Homo sapien
ggtggtttccgataaacgtattatgaaatggtc

SEQ ID NO: 286014 - DNA, 33 bp, Homo sapien
ggtggtttccgataaatgtattatgaaatggtc

SEQ ID NO: 286015 - DNA, 33 bp, Homo sapien
ttagaatattgcttaacaaatctgtctccaaat

SEQ ID NO: 286016 - DNA, 33 bp, Homo sapien
ttagaatattgcttaataaatctgtctccaaat

SEQ ID NO: 286017 - DNA, 33 bp, Homo sapien
ctatttcctcaacaatcatatcccagatgatat

SEQ ID NO: 286018 - DNA, 33 bp, Homo sapien
ctatttcctcaacaattatatcccagatgatat

SEQ ID NO: 286019 - DNA, 33 bp, Homo sapien
aaactgttgatcaaagaatttaagaatacctaa

SEQ ID NO: 286020 - DNA, 33 bp, Homo sapien
aaactgttgatcaaaggatttaagaatacctaa

SEQ ID NO: 286021 - DNA, 33 bp, Homo sapien
tgaacaagtgttgataaatacacagtagataaa

SEQ ID NO: 286022 - DNA, 33 bp, Homo sapien
tgaacaagtgttgatagatacacagtagataaa

SEQ ID NO: 286023 - DNA, 33 bp, Homo sapien
aatgcaaagcagcagaagtgaaagaccatccta

SEQ ID NO: 286024 - DNA, 33 bp, Homo sapien
aatgcaaagcagcagaggtgaaagaccatccta

SEQ ID NO: 286025 - DNA, 33 bp, Homo sapien
aatcaaaacccaaaacaagctccctgtcagaaa

SEQ ID NO: 286026 - DNA, 33 bp, Homo sapien
aatcaaaacccaaaacgagctccctgtcagaaa

SEQ ID NO: 286027 - DNA, 33 bp, Homo sapien
gttacttagtttggaacagtattgacgggccat

SEQ ID NO: 286028 - DNA, 33 bp, Homo sapien
gttacttagtttggaagagtattgacgggccat

SEQ ID NO: 286029 - DNA, 33 bp, Homo sapien
ggtgattgaaatatgacctatagaaacctagat

SEQ ID NO: 286030 - DNA, 33 bp, Homo sapien
ggtgattgaaatatgagctatagaaacctagat

SEQ ID NO: 286031 - DNA, 33 bp, Homo sapien
catatttcaatcacccaacttaccaaattttat

SEQ ID NO: 286032 - DNA, 33 bp, Homo sapien
catatttcaatcaccccacttaccaaattttat

SEQ ID NO: 286033 - DNA, 33 bp, Homo sapien
tcctttggcatactcccaagaatctgtctcatt

SEQ ID NO: 286034 - DNA, 33 bp, Homo sapien
tcctttggcatactcctaagaatctgtctcatt

SEQ ID NO: 286035 - DNA, 33 bp, Homo sapien
ccttactaggctggaacattggtttcctatatg

SEQ ID NO: 286036 - DNA, 33 bp, Homo sapien
ccttactaggctggaatattggtttcctatatg

SEQ ID NO: 286037 - DNA, 33 bp, Homo sapien
gcatgacaactttaaacgcatctatggtgttga

SEQ ID NO: 286038 - DNA, 33 bp, Homo sapien
gcatgacaactttaaatgcatctatggtgttga

SEQ ID NO: 286039 - DNA, 33 bp, Homo sapien
tcatagagccatttgaagcctttgaaaatttgt

SEQ ID NO: 286040 - DNA, 33 bp, Homo sapien
tcatagagccatttgacgcctttgaaaatttgt

SEQ ID NO: 286041 - DNA, 33 bp, Homo sapien
aatgacaaaaatgctaagagaaaatggaacaga

SEQ ID NO: 286042 - DNA, 33 bp, Homo sapien
aatgacaaaaatgctacgagaaaatggaacaga

SEQ ID NO: 286043 - DNA, 33 bp, Homo sapien
ttggttattggcttagcaggaacaaacaatgat

SEQ ID NO: 286044 - DNA, 33 bp, Homo sapien
ttggttattggcttagtaggaacaaacaatgat

SEQ ID NO: 286045 - DNA, 33 bp, Homo sapien
ctgtttgcaattgaacaggttagactgccacag

SEQ ID NO: 286046 - DNA, 33 bp, Homo sapien
ctgtttgcaattgaacgggttagactgccacag

SEQ ID NO: 286047 - DNA, 33 bp, Homo sapien
tgtttcttgagcaaacaccagcagatttcaaat

SEQ ID NO: 286048 - DNA, 33 bp, Homo sapien
tgtttcttgagcaaacgccagcagatttcaaat

SEQ ID NO: 286049 - DNA, 33 bp, Homo sapien
acattggaaagatagacgcaattttataatgaa

SEQ ID NO: 286050 - DNA, 33 bp, Homo sapien
acattggaaagatagatgcaattttataatgaa

SEQ ID NO: 286051 - DNA, 33 bp, Homo sapien
attgtaagaaaagaaactcctgatgtttaagtc

SEQ ID NO: 286052 - DNA, 33 bp, Homo sapien
attgtaagaaaagaaattcctgatgtttaagtc

SEQ ID NO: 286053 - DNA, 33 bp, Homo sapien
actaccaaataggaaacaaattcttagtaagcc

SEQ ID NO: 286054 - DNA, 33 bp, Homo sapien
actaccaaataggaaagaaattcttagtaagcc

SEQ ID NO: 286055 - DNA, 33 bp, Homo sapien
ttcagttaaattgacactctatgactaccaaat

SEQ ID NO: 286056 - DNA, 33 bp, Homo sapien
ttcagttaaattgacattctatgactaccaaat

SEQ ID NO: 286057 - DNA, 33 bp, Homo sapien
ttgaaagatctctgggcagtaaagaagtaagca

SEQ ID NO: 286058 - DNA, 33 bp, Homo sapien
ttgaaagatctctgggtagtaaagaagtaagca

SEQ ID NO: 286059 - DNA, 33 bp, Homo sapien
tctgtacatttctatacctctgattcaagtgta

SEQ ID NO: 286060 - DNA, 33 bp, Homo sapien
tctgtacatttctatatctctgattcaagtgta

SEQ ID NO: 286061 - DNA, 33 bp, Homo sapien
agaaatctcaaagtcaaatgaatggcaatattt

SEQ ID NO: 286062 - DNA, 33 bp, Homo sapien
agaaatctcaaagtcacatgaatggcaatattt

SEQ ID NO: 286063 - DNA, 33 bp, Homo sapien
aacaaatgtttgtgaaaaagcggctttgaaaat

SEQ ID NO: 286064 - DNA, 33 bp, Homo sapien
aacaaatgtttgtgaagaagcggctttgaaaat

SEQ ID NO: 286065 - DNA, 33 bp, Homo sapien
gcccactaacatctgggcaattttccaatgcaa

SEQ ID NO: 286066 - DNA, 33 bp, Homo sapien
gcccactaacatctggtcaattttccaatgcaa

SEQ ID NO: 286067 - DNA, 33 bp, Homo sapien
tataggccagtggaacaaaataggaaatccaga

SEQ ID NO: 286068 - DNA, 33 bp, Homo sapien
tataggccagtggaacgaaataggaaatccaga

SEQ ID NO: 286069 - DNA, 33 bp, Homo sapien
atttgcacaacagagaacttgagaggttaaagt

SEQ ID NO: 286070 - DNA, 33 bp, Homo sapien
atttgcacaacagagagcttgagaggttaaagt

SEQ ID NO: 286071 - DNA, 33 bp, Homo sapien
gaaccatggtctgtgccattattcgaataccat

SEQ ID NO: 286072 - DNA, 33 bp, Homo sapien
gaaccatggtctgtgctattattcgaataccat

SEQ ID NO: 286073 - DNA, 33 bp, Homo sapien
ttaaaaccattgctagacacagcttggatgtat

SEQ ID NO: 286074 - DNA, 33 bp, Homo sapien
ttaaaaccattgctagtcacagcttggatgtat

SEQ ID NO: 286075 - DNA, 33 bp, Homo sapien
aaggcagtaaaacatcacaatttaacttttata

SEQ ID NO: 286076 - DNA, 33 bp, Homo sapien
aaggcagtaaaacatcgcaatttaacttttata

SEQ ID NO: 286077 - DNA, 33 bp, Homo sapien
tagaaatgtttaaacaatagttagtgactgatt

SEQ ID NO: 286078 - DNA, 33 bp, Homo sapien
tagaaatgtttaaacagtagttagtgactgatt

SEQ ID NO: 286079 - DNA, 33 bp, Homo sapien
atcactagaaattggaagttcattgaaaatgca

SEQ ID NO: 286080 - DNA, 33 bp, Homo sapien
atcactagaaattggaggttcattgaaaatgca

SEQ ID NO: 286081 - DNA, 33 bp, Homo sapien
gaaggagaacttagtccgagtaaaggtcacaag

SEQ ID NO: 286082 - DNA, 33 bp, Homo sapien
gaaggagaacttagtctgagtaaaggtcacaag

SEQ ID NO: 286083 - DNA, 33 bp, Homo sapien
ccattggcaactaacaagaattgtacaaaacca

SEQ ID NO: 286084 - DNA, 33 bp, Homo sapien
ccattggcaactaacacgaattgtacaaaacca

SEQ ID NO: 286085 - DNA, 33 bp, Homo sapien
ctatgggtatgctagccctaattcttgctcact

SEQ ID NO: 286086 - DNA, 33 bp, Homo sapien
ctatgggtatgctagctctaattcttgctcact

SEQ ID NO: 286087 - DNA, 33 bp, Homo sapien
attacagtgtggttcacgtctttttaaataatt

SEQ ID NO: 286088 - DNA, 33 bp, Homo sapien
attacagtgtggttcatgtctttttaaataatt

SEQ ID NO: 286089 - DNA, 33 bp, Homo sapien
gagagtggtaagctgaataaatggggcactcat

SEQ ID NO: 286090 - DNA, 33 bp, Homo sapien
gagagtggtaagctgagtaaatggggcactcat

SEQ ID NO: 286091 - DNA, 33 bp, Homo sapien
aaaccatttcaatcaaataattcagaataaagc

SEQ ID NO: 286092 - DNA, 33 bp, Homo sapien
aaaccatttcaatcaagtaattcagaataaagc

SEQ ID NO: 286093 - DNA, 33 bp, Homo sapien
atgctgtcattgctcaaaacactttatttggtc

SEQ ID NO: 286094 - DNA, 33 bp, Homo sapien
atgctgtcattgctcacaacactttatttggtc

SEQ ID NO: 286095 - DNA, 33 bp, Homo sapien
gactccagcgccttacacatcattgtgcacatt

SEQ ID NO: 286096 - DNA, 33 bp, Homo sapien
gactccagcgccttacccatcattgtgcacatt

SEQ ID NO: 286097 - DNA, 33 bp, Homo sapien
gttccttgcgatggtacagtaaggcttgaaggc

SEQ ID NO: 286098 - DNA, 33 bp, Homo sapien
gttccttgcgatggtatagtaaggcttgaaggc

SEQ ID NO: 286099 - DNA, 33 bp, Homo sapien
ccttagtgtctagtcaactacttcccacaaaaa

SEQ ID NO: 286100 - DNA, 33 bp, Homo sapien
ccttagtgtctagtcatctacttcccacaaaaa

SEQ ID NO: 286101 - DNA, 33 bp, Homo sapien
atgataatagtacttcactacattcttgatcct

SEQ ID NO: 286102 - DNA, 33 bp, Homo sapien
atgataatagtacttcgctacattcttgatcct

SEQ ID NO: 286103 - DNA, 33 bp, Homo sapien
ttcaagattcagattcagaagaggagaaatgat

SEQ ID NO: 286104 - DNA, 33 bp, Homo sapien
ttcaagattcagattccgaagaggagaaatgat

SEQ ID NO: 286105 - DNA, 33 bp, Homo sapien
ctgaagctaaggggaaacatggtacacaatata

SEQ ID NO: 286106 - DNA, 33 bp, Homo sapien
ctgaagctaaggggaaccatggtacacaatata

SEQ ID NO: 286107 - DNA, 33 bp, Homo sapien
atgcttttgaggtgggaaacactgataaataca

SEQ ID NO: 286108 - DNA, 33 bp, Homo sapien
atgcttttgaggtgggcaacactgataaataca

SEQ ID NO: 286109 - DNA, 33 bp, Homo sapien
tggtgcatttgccaaaacctgaggtagtatgtc

SEQ ID NO: 286110 - DNA, 33 bp, Homo sapien
tggtgcatttgccaaagcctgaggtagtatgtc

SEQ ID NO: 286111 - DNA, 33 bp, Homo sapien
gactgcaggaagaactaaaaaacatatttacct

SEQ ID NO: 286112 - DNA, 33 bp, Homo sapien
gactgcaggaagaactgaaaaacatatttacct

SEQ ID NO: 286113 - DNA, 33 bp, Homo sapien
gccttggttacccgtacaaatttggaagtcatt

SEQ ID NO: 286114 - DNA, 33 bp, Homo sapien
gccttggttacccgtataaatttggaagtcatt

SEQ ID NO: 286115 - DNA, 33 bp, Homo sapien
agcctttatggtgtgactcaactttattagaga

SEQ ID NO: 286116 - DNA, 33 bp, Homo sapien
agcctttatggtgtgagtcaactttattagaga

SEQ ID NO: 286117 - DNA, 33 bp, Homo sapien
cctggctgtatatgaaagaggatcaaacacaaa

SEQ ID NO: 286118 - DNA, 33 bp, Homo sapien
cctggctgtatatgaaggaggatcaaacacaaa

SEQ ID NO: 286119 - DNA, 33 bp, Homo sapien
taatggagaaaaattccactgagctaaatatat

SEQ ID NO: 286120 - DNA, 33 bp, Homo sapien
taatggagaaaaattctactgagctaaatatat

SEQ ID NO: 286121 - DNA, 33 bp, Homo sapien
agacctgtcaatgtgtaaaaatattatctagaa

SEQ ID NO: 286122 - DNA, 33 bp, Homo sapien
agacctgtcaatgtgttaaaatattatctagaa

SEQ ID NO: 286123 - DNA, 33 bp, Homo sapien
tcatgcttgtcaaagaatagcacaggatataaa

SEQ ID NO: 286124 - DNA, 33 bp, Homo sapien
tcatgcttgtcaaagagtagcacaggatataaa

SEQ ID NO: 286125 - DNA, 33 bp, Homo sapien
tctccagacacataaaccttattacctaagcac

SEQ ID NO: 286126 - DNA, 33 bp, Homo sapien
tctccagacacataaatcttattacctaagcac

SEQ ID NO: 286127 - DNA, 33 bp, Homo sapien
tgtgcacactctcctgaattctgatctggatta

SEQ ID NO: 286128 - DNA, 33 bp, Homo sapien
tgtgcacactctcctgcattctgatctggatta

SEQ ID NO: 286129 - DNA, 33 bp, Homo sapien
atcatgctcctcacgaacccagcatggagtctg

SEQ ID NO: 286130 - DNA, 33 bp, Homo sapien
atcatgctcctcacgatcccagcatggagtctg

SEQ ID NO: 286131 - DNA, 33 bp, Homo sapien
gcagatatagccactgcatagaaaactggtaat

SEQ ID NO: 286132 - DNA, 33 bp, Homo sapien
gcagatatagccactggatagaaaactggtaat

SEQ ID NO: 286133 - DNA, 33 bp, Homo sapien
ggttctgcttttattaactgactcagtagacct

SEQ ID NO: 286134 - DNA, 33 bp, Homo sapien
ggttctgcttttattatctgactcagtagacct

SEQ ID NO: 286135 - DNA, 33 bp, Homo sapien
tcacagcattaaagaacgaaatgccaggccata

SEQ ID NO: 286136 - DNA, 33 bp, Homo sapien
tcacagcattaaagaatgaaatgccaggccata

SEQ ID NO: 286137 - DNA, 33 bp, Homo sapien
ataagcatagttttaaatgtttattgacaattc

SEQ ID NO: 286138 - DNA, 33 bp, Homo sapien
ataagcatagttttaagtgtttattgacaattc

SEQ ID NO: 286139 - DNA, 33 bp, Homo sapien
tttttacaagtgtcataaaaaacaacatctcat

SEQ ID NO: 286140 - DNA, 33 bp, Homo sapien
tttttacaagtgtcattaaaaacaacatctcat

SEQ ID NO: 286141 - DNA, 33 bp, Homo sapien
actcattacaatcaggaaaagagctatacatga

SEQ ID NO: 286142 - DNA, 33 bp, Homo sapien
actcattacaatcagggaaagagctatacatga

SEQ ID NO: 286143 - DNA, 33 bp, Homo sapien
ggagttaagataagaactgtagggcatatttac

SEQ ID NO: 286144 - DNA, 33 bp, Homo sapien
ggagttaagataagaattgtagggcatatttac

SEQ ID NO: 286145 - DNA, 33 bp, Homo sapien
ggatctggcattgcacaacaggtgaaaataagg

SEQ ID NO: 286146 - DNA, 33 bp, Homo sapien
ggatctggcattgcacgacaggtgaaaataagg

SEQ ID NO: 286147 - DNA, 33 bp, Homo sapien
ttggtaaaggtcttccacttgttacagtaggta

SEQ ID NO: 286148 - DNA, 33 bp, Homo sapien
ttggtaaaggtcttcctcttgttacagtaggta

SEQ ID NO: 286149 - DNA, 33 bp, Homo sapien
attgttcagacttcaaacaagggttagaggtta

SEQ ID NO: 286150 - DNA, 33 bp, Homo sapien
attgttcagacttcaagcaagggttagaggtta

SEQ ID NO: 286151 - DNA, 33 bp, Homo sapien
ataacacagataaagaggaattaagagagcaat

SEQ ID NO: 286152 - DNA, 33 bp, Homo sapien
ataacacagataaagatgaattaagagagcaat

SEQ ID NO: 286153 - DNA, 33 bp, Homo sapien
ttgcaatagagaaaataaacatcttccatcatt

SEQ ID NO: 286154 - DNA, 33 bp, Homo sapien
ttgcaatagagaaaattaacatcttccatcatt

SEQ ID NO: 286155 - DNA, 33 bp, Homo sapien
tgattttgatcatataagccagataattaaaac

SEQ ID NO: 286156 - DNA, 33 bp, Homo sapien
tgattttgatcatatatgccagataattaaaac

SEQ ID NO: 286157 - DNA, 33 bp, Homo sapien
tgtaaatcacctctccactactccttaggctcc

SEQ ID NO: 286158 - DNA, 33 bp, Homo sapien
tgtaaatcacctctccgctactccttaggctcc

SEQ ID NO: 286159 - DNA, 33 bp, Homo sapien
tggttaaaaaaaatccacaagtcaggaatatca

SEQ ID NO: 286160 - DNA, 33 bp, Homo sapien
tggttaaaaaaaatccgcaagtcaggaatatca

SEQ ID NO: 286161 - DNA, 33 bp, Homo sapien
ttcagaattggctggacacagaccctgagatct

SEQ ID NO: 286162 - DNA, 33 bp, Homo sapien
ttcagaattggctggagacagaccctgagatct

SEQ ID NO: 286163 - DNA, 33 bp, Homo sapien
tacataaaactcttcactctctcccaagcctca

SEQ ID NO: 286164 - DNA, 33 bp, Homo sapien
tacataaaactcttcagtctctcccaagcctca

SEQ ID NO: 286165 - DNA, 33 bp, Homo sapien
tcaatctgtgcttctcataactactgggttata

SEQ ID NO: 286166 - DNA, 33 bp, Homo sapien
tcaatctgtgcttctcctaactactgggttata

SEQ ID NO: 286167 - DNA, 33 bp, Homo sapien
aacaactaatcacataacgtttgcactatacct

SEQ ID NO: 286168 - DNA, 33 bp, Homo sapien
aacaactaatcacatagcgtttgcactatacct

SEQ ID NO: 286169 - DNA, 33 bp, Homo sapien
attcatatggaattacaaagtatgtttgagtaa

SEQ ID NO: 286170 - DNA, 33 bp, Homo sapien
attcatatggaattacgaagtatgtttgagtaa

SEQ ID NO: 286171 - DNA, 33 bp, Homo sapien
tgctcgtggaatgtaaatagaacagacctgcag

SEQ ID NO: 286172 - DNA, 33 bp, Homo sapien
tgctcgtggaatgtaattagaacagacctgcag

SEQ ID NO: 286173 - DNA, 33 bp, Homo sapien
aattaaaaagcagaaaggttacactgtcctgta

SEQ ID NO: 286174 - DNA, 33 bp, Homo sapien
aattaaaaagcagaaatgttacactgtcctgta

SEQ ID NO: 286175 - DNA, 33 bp, Homo sapien
ctgcagtgaaaattaactgtggtctgctctctt

SEQ ID NO: 286176 - DNA, 33 bp, Homo sapien
ctgcagtgaaaattaattgtggtctgctctctt

SEQ ID NO: 286177 - DNA, 33 bp, Homo sapien
aaaagacacattccaaattcctctgtccactgc

SEQ ID NO: 286178 - DNA, 33 bp, Homo sapien
aaaagacacattccaagttcctctgtccactgc

SEQ ID NO: 286179 - DNA, 33 bp, Homo sapien
ttggtataaagtccaggcatcctgattcaagtg

SEQ ID NO: 286180 - DNA, 33 bp, Homo sapien
ttggtataaagtccagtcatcctgattcaagtg

SEQ ID NO: 286181 - DNA, 33 bp, Homo sapien
caaatgtactcttttaagcctacatgaactggg

SEQ ID NO: 286182 - DNA, 33 bp, Homo sapien
caaatgtactcttttaggcctacatgaactggg

SEQ ID NO: 286183 - DNA, 33 bp, Homo sapien
atacctataggttgcaaaatctgtgcattgcac

SEQ ID NO: 286184 - DNA, 33 bp, Homo sapien
atacctataggttgcagaatctgtgcattgcac

SEQ ID NO: 286185 - DNA, 33 bp, Homo sapien
tcagtcacaaactgcacctcttgcaaaaacagc

SEQ ID NO: 286186 - DNA, 33 bp, Homo sapien
tcagtcacaaactgcatctcttgcaaaaacagc

SEQ ID NO: 286187 - DNA, 33 bp, Homo sapien
cagttgatttgaatccaggaaatctaaggaaaa

SEQ ID NO: 286188 - DNA, 33 bp, Homo sapien
cagttgatttgaatccgggaaatctaaggaaaa

SEQ ID NO: 286189 - DNA, 33 bp, Homo sapien
atatgattgatagcagacactgtttttattctt

SEQ ID NO: 286190 - DNA, 33 bp, Homo sapien
atatgattgatagcaggcactgtttttattctt

SEQ ID NO: 286191 - DNA, 33 bp, Homo sapien
gtttacactgtagtcactgaaatcaatctacgc

SEQ ID NO: 286192 - DNA, 33 bp, Homo sapien
gtttacactgtagtcattgaaatcaatctacgc

SEQ ID NO: 286193 - DNA, 33 bp, Homo sapien
gatgctgattagcaaacgataagtcttttaggg

SEQ ID NO: 286194 - DNA, 33 bp, Homo sapien
gatgctgattagcaaatgataagtcttttaggg

SEQ ID NO: 286195 - DNA, 33 bp, Homo sapien
tttgctaatcagcatcacgttaatctttgtccg

SEQ ID NO: 286196 - DNA, 33 bp, Homo sapien
tttgctaatcagcatcgcgttaatctttgtccg

SEQ ID NO: 286197 - DNA, 33 bp, Homo sapien
tgtttcctttttggaccctgtctcgtacagtaa

SEQ ID NO: 286198 - DNA, 33 bp, Homo sapien
tgtttcctttttggactctgtctcgtacagtaa

SEQ ID NO: 286199 - DNA, 33 bp, Homo sapien
tgggtcctcataaaaacgtcagtgcatcatctg

SEQ ID NO: 286200 - DNA, 33 bp, Homo sapien
tgggtcctcataaaaatgtcagtgcatcatctg

SEQ ID NO: 286201 - DNA, 33 bp, Homo sapien
gttagattgaggtcctaacttaattcctcagag

SEQ ID NO: 286202 - DNA, 33 bp, Homo sapien
gttagattgaggtcctgacttaattcctcagag

SEQ ID NO: 286203 - DNA, 33 bp, Homo sapien
ttataaaagatttggacgcttataactaatctg

SEQ ID NO: 286204 - DNA, 33 bp, Homo sapien
ttataaaagatttggatgcttataactaatctg

SEQ ID NO: 286205 - DNA, 33 bp, Homo sapien
ataattactttgtgaaagcaggcattattatcc

SEQ ID NO: 286206 - DNA, 33 bp, Homo sapien
ataattactttgtgaaggcaggcattattatcc

SEQ ID NO: 286207 - DNA, 33 bp, Homo sapien
cttatctttatgatcacctccaatactttataa

SEQ ID NO: 286208 - DNA, 33 bp, Homo sapien
cttatctttatgatcatctccaatactttataa

SEQ ID NO: 286209 - DNA, 33 bp, Homo sapien
acagaaggaaagatccaactgagattgttctga

SEQ ID NO: 286210 - DNA, 33 bp, Homo sapien
acagaaggaaagatccgactgagattgttctga

SEQ ID NO: 286211 - DNA, 33 bp, Homo sapien
gtatttatttcaaaaccactgtaagttctatgt

SEQ ID NO: 286212 - DNA, 33 bp, Homo sapien
gtatttatttcaaaactactgtaagttctatgt

SEQ ID NO: 286213 - DNA, 33 bp, Homo sapien
atttccttacagatgacgggtacagaagtcact

SEQ ID NO: 286214 - DNA, 33 bp, Homo sapien
atttccttacagatgatgggtacagaagtcact

SEQ ID NO: 286215 - DNA, 33 bp, Homo sapien
gggaggcaaaaaaggaactacaagaacagttat

SEQ ID NO: 286216 - DNA, 33 bp, Homo sapien
gggaggcaaaaaaggagctacaagaacagttat

SEQ ID NO: 286217 - DNA, 33 bp, Homo sapien
atctttatatgcccaccgtcgattttaactgat

SEQ ID NO: 286218 - DNA, 33 bp, Homo sapien
atctttatatgcccactgtcgattttaactgat

SEQ ID NO: 286219 - DNA, 33 bp, Homo sapien
agctgaacagtaatgaaattctaggttgaaaga

SEQ ID NO: 286220 - DNA, 33 bp, Homo sapien
agctgaacagtaatgatattctaggttgaaaga

SEQ ID NO: 286221 - DNA, 33 bp, Homo sapien
agaaatccatccaaaacaggaaggttaggggtg

SEQ ID NO: 286222 - DNA, 33 bp, Homo sapien
agaaatccatccaaaataggaaggttaggggtg

SEQ ID NO: 286223 - DNA, 33 bp, Homo sapien
taaaacttcaatataacgtgatgagttaaataa

SEQ ID NO: 286224 - DNA, 33 bp, Homo sapien
taaaacttcaatataaggtgatgagttaaataa

SEQ ID NO: 286225 - DNA, 33 bp, Homo sapien
atttcagatttcttcacgttgttcatgtagtgg

SEQ ID NO: 286226 - DNA, 33 bp, Homo sapien
atttcagatttcttcaggttgttcatgtagtgg

SEQ ID NO: 286227 - DNA, 33 bp, Homo sapien
ttctgggccactggtacgaggaagtgcttcctg

SEQ ID NO: 286228 - DNA, 33 bp, Homo sapien
ttctgggccactggtatgaggaagtgcttcctg

SEQ ID NO: 286229 - DNA, 33 bp, Homo sapien
agactattgagaagaacatacactgtggagaag

SEQ ID NO: 286230 - DNA, 33 bp, Homo sapien
agactattgagaagaatatacactgtggagaag

SEQ ID NO: 286231 - DNA, 33 bp, Homo sapien
tgggaagatagaggccaaagctttctccccttt

SEQ ID NO: 286232 - DNA, 33 bp, Homo sapien
tgggaagatagaggccgaagctttctccccttt

SEQ ID NO: 286233 - DNA, 33 bp, Homo sapien
ctatagacaattgtgccattcagtcactgctag

SEQ ID NO: 286234 - DNA, 33 bp, Homo sapien
ctatagacaattgtgctattcagtcactgctag

SEQ ID NO: 286235 - DNA, 33 bp, Homo sapien
cactaatgaaaattcacagagtgccttataaat

SEQ ID NO: 286236 - DNA, 33 bp, Homo sapien
cactaatgaaaattcatagagtgccttataaat

SEQ ID NO: 286237 - DNA, 33 bp, Homo sapien
atattcccctaagaaactttcactgacagattt

SEQ ID NO: 286238 - DNA, 33 bp, Homo sapien
atattcccctaagaaattttcactgacagattt

SEQ ID NO: 286239 - DNA, 33 bp, Homo sapien
cactagtcatacttccaccttgagattttaagt

SEQ ID NO: 286240 - DNA, 33 bp, Homo sapien
cactagtcatacttccgccttgagattttaagt

SEQ ID NO: 286241 - DNA, 33 bp, Homo sapien
caggaactcaaacctacgtcttggactcagaat

SEQ ID NO: 286242 - DNA, 33 bp, Homo sapien
caggaactcaaacctatgtcttggactcagaat

SEQ ID NO: 286243 - DNA, 33 bp, Homo sapien
tgagacctgagtaatgccactctgaaggttacc

SEQ ID NO: 286244 - DNA, 33 bp, Homo sapien
tgagacctgagtaatggcactctgaaggttacc

SEQ ID NO: 286245 - DNA, 33 bp, Homo sapien
aataataatggcaccaataataacaataaacat

SEQ ID NO: 286246 - DNA, 33 bp, Homo sapien
aataataatggcaccagtaataacaataaacat

SEQ ID NO: 286247 - DNA, 33 bp, Homo sapien
atttatgcttagtttccataaccaagaagcatt

SEQ ID NO: 286248 - DNA, 33 bp, Homo sapien
atttatgcttagtttctataaccaagaagcatt

SEQ ID NO: 286249 - DNA, 33 bp, Homo sapien
cttgctcaacttgctaacttaaaagcaggttaa

SEQ ID NO: 286250 - DNA, 33 bp, Homo sapien
cttgctcaacttgctagcttaaaagcaggttaa

SEQ ID NO: 286251 - DNA, 33 bp, Homo sapien
cagatggcattcttaaaaacttgggtgtctaat

SEQ ID NO: 286252 - DNA, 33 bp, Homo sapien
cagatggcattcttaacaacttgggtgtctaat

SEQ ID NO: 286253 - DNA, 33 bp, Homo sapien
ggggagtcttagctagaagcaaacatagatcct

SEQ ID NO: 286254 - DNA, 33 bp, Homo sapien
ggggagtcttagctagtagcaaacatagatcct

SEQ ID NO: 286255 - DNA, 33 bp, Homo sapien
ttaggattgcaaatccaagtccagagttaaaat

SEQ ID NO: 286256 - DNA, 33 bp, Homo sapien
ttaggattgcaaatcccagtccagagttaaaat

SEQ ID NO: 286257 - DNA, 33 bp, Homo sapien
tgagtggaatgtaagacaagcattaatgaacaa

SEQ ID NO: 286258 - DNA, 33 bp, Homo sapien
tgagtggaatgtaagataagcattaatgaacaa

SEQ ID NO: 286259 - DNA, 33 bp, Homo sapien
tatatatagataacaactacctagatcagggtt

SEQ ID NO: 286260 - DNA, 33 bp, Homo sapien
tatatatagataacaattacctagatcagggtt

SEQ ID NO: 286261 - DNA, 33 bp, Homo sapien
tggtagttgtgggatacgcatttttcacagacc

SEQ ID NO: 286262 - DNA, 33 bp, Homo sapien
tggtagttgtgggatatgcatttttcacagacc

SEQ ID NO: 286263 - DNA, 33 bp, Homo sapien
gcaacactaaataaacaaaaatggctatacaag

SEQ ID NO: 286264 - DNA, 33 bp, Homo sapien
gcaacactaaataaacgaaaatggctatacaag

SEQ ID NO: 286265 - DNA, 33 bp, Homo sapien
ttcaattagcttttacaaaattaactgtgtgta

SEQ ID NO: 286266 - DNA, 33 bp, Homo sapien
ttcaattagcttttacgaaattaactgtgtgta

SEQ ID NO: 286267 - DNA, 33 bp, Homo sapien
aggttatgttttagtaactttgcaaccatcagt

SEQ ID NO: 286268 - DNA, 33 bp, Homo sapien
aggttatgttttagtacctttgcaaccatcagt

SEQ ID NO: 286269 - DNA, 33 bp, Homo sapien
aaaaacactgattaaacaatagatagaccaata

SEQ ID NO: 286270 - DNA, 33 bp, Homo sapien
aaaaacactgattaaagaatagatagaccaata

SEQ ID NO: 286271 - DNA, 33 bp, Homo sapien
agtataagatgaacccagaatgaaaatcttatt

SEQ ID NO: 286272 - DNA, 33 bp, Homo sapien
agtataagatgaacccggaatgaaaatcttatt

SEQ ID NO: 286273 - DNA, 33 bp, Homo sapien
ggtttcttgtggaataatattagacaccaatat

SEQ ID NO: 286274 - DNA, 33 bp, Homo sapien
ggtttcttgtggaatagtattagacaccaatat

SEQ ID NO: 286275 - DNA, 33 bp, Homo sapien
catgtttgaaataatgaatgacacatagtaggt

SEQ ID NO: 286276 - DNA, 33 bp, Homo sapien
catgtttgaaataatgcatgacacatagtaggt

SEQ ID NO: 286277 - DNA, 33 bp, Homo sapien
tagtctaatttcaatgccaggttaagtaccata

SEQ ID NO: 286278 - DNA, 33 bp, Homo sapien
tagtctaatttcaatgtcaggttaagtaccata

SEQ ID NO: 286279 - DNA, 33 bp, Homo sapien
tttcatttcttaaatcacaaaacatcaaaaata

SEQ ID NO: 286280 - DNA, 33 bp, Homo sapien
tttcatttcttaaatcgcaaaacatcaaaaata

SEQ ID NO: 286281 - DNA, 33 bp, Homo sapien
cctactccttactcaagtatgcaagctaatcat

SEQ ID NO: 286282 - DNA, 33 bp, Homo sapien
cctactccttactcaattatgcaagctaatcat

SEQ ID NO: 286283 - DNA, 33 bp, Homo sapien
agaaatgagcatttccaatcaacatagttgact

SEQ ID NO: 286284 - DNA, 33 bp, Homo sapien
agaaatgagcatttcctatcaacatagttgact

SEQ ID NO: 286285 - DNA, 33 bp, Homo sapien
aacagaagagcagggactaatgagatacacaca

SEQ ID NO: 286286 - DNA, 33 bp, Homo sapien
aacagaagagcagggattaatgagatacacaca

SEQ ID NO: 286287 - DNA, 33 bp, Homo sapien
agcaatgagaaactggcccaggatattgcaact

SEQ ID NO: 286288 - DNA, 33 bp, Homo sapien
agcaatgagaaactggtccaggatattgcaact

SEQ ID NO: 286289 - DNA, 33 bp, Homo sapien
tatgtatgctaaactaaatgcagtaacaagact

SEQ ID NO: 286290 - DNA, 33 bp, Homo sapien
tatgtatgctaaactagatgcagtaacaagact

SEQ ID NO: 286291 - DNA, 33 bp, Homo sapien
taatgataggatctagaatatggaagtagtgat

SEQ ID NO: 286292 - DNA, 33 bp, Homo sapien
taatgataggatctaggatatggaagtagtgat

SEQ ID NO: 286293 - DNA, 33 bp, Homo sapien
gtatatttgtattagcaaacaaaatgctttcaa

SEQ ID NO: 286294 - DNA, 33 bp, Homo sapien
gtatatttgtattagcgaacaaaatgctttcaa

SEQ ID NO: 286295 - DNA, 33 bp, Homo sapien
atgggaataattatcacagcaattacctcagac

SEQ ID NO: 286296 - DNA, 33 bp, Homo sapien
atgggaataattatcatagcaattacctcagac

SEQ ID NO: 286297 - DNA, 33 bp, Homo sapien
gcatagttaaagccaactccctagcaccaggtc

SEQ ID NO: 286298 - DNA, 33 bp, Homo sapien
gcatagttaaagccaattccctagcaccaggtc

SEQ ID NO: 286299 - DNA, 33 bp, Homo sapien
atggtcttaaatactacacctcactgagaaatc

SEQ ID NO: 286300 - DNA, 33 bp, Homo sapien
atggtcttaaatactatacctcactgagaaatc

SEQ ID NO: 286301 - DNA, 33 bp, Homo sapien
ggagttgttcagggtacggtatgacttctattg

SEQ ID NO: 286302 - DNA, 33 bp, Homo sapien
ggagttgttcagggtatggtatgacttctattg

SEQ ID NO: 286303 - DNA, 33 bp, Homo sapien
agactaattttgtgacaattggagtttttctga

SEQ ID NO: 286304 - DNA, 33 bp, Homo sapien
agactaattttgtgaccattggagtttttctga

SEQ ID NO: 286305 - DNA, 33 bp, Homo sapien
agagcaaaaaggcaacaagcatttctgagggca

SEQ ID NO: 286306 - DNA, 33 bp, Homo sapien
agagcaaaaaggcaacgagcatttctgagggca

SEQ ID NO: 286307 - DNA, 33 bp, Homo sapien
agatcttttaagcgcacacagtgagggttgtaa

SEQ ID NO: 286308 - DNA, 33 bp, Homo sapien
agatcttttaagcgcatacagtgagggttgtaa

SEQ ID NO: 286309 - DNA, 33 bp, Homo sapien
aaaccgtgtccctcaaagttgcaatatacattg

SEQ ID NO: 286310 - DNA, 33 bp, Homo sapien
aaaccgtgtccctcaaggttgcaatatacattg

SEQ ID NO: 286311 - DNA, 33 bp, Homo sapien
ctggaatctctaaaacagtgtgtcttgcaagga

SEQ ID NO: 286312 - DNA, 33 bp, Homo sapien
ctggaatctctaaaacggtgtgtcttgcaagga

SEQ ID NO: 286313 - DNA, 33 bp, Homo sapien
tttatatatgatctacaacatttaacatgattg

SEQ ID NO: 286314 - DNA, 33 bp, Homo sapien
tttatatatgatctacgacatttaacatgattg

SEQ ID NO: 286315 - DNA, 33 bp, Homo sapien
taatgttctcttgtcaacctattgaaatttttt

SEQ ID NO: 286316 - DNA, 33 bp, Homo sapien
taatgttctcttgtcaccctattgaaatttttt

SEQ ID NO: 286317 - DNA, 33 bp, Homo sapien
taggtagtaagtgatgaagtgaagactaaccta

SEQ ID NO: 286318 - DNA, 33 bp, Homo sapien
taggtagtaagtgatggagtgaagactaaccta

SEQ ID NO: 286319 - DNA, 33 bp, Homo sapien
ttaagacatcattgaaaggaaaaagcaaatatg

SEQ ID NO: 286320 - DNA, 33 bp, Homo sapien
ttaagacatcattgaacggaaaaagcaaatatg

SEQ ID NO: 286321 - DNA, 33 bp, Homo sapien
ccctcagaggttctaaaaattctgccttctaaa

SEQ ID NO: 286322 - DNA, 33 bp, Homo sapien
ccctcagaggttctaacaattctgccttctaaa

SEQ ID NO: 286323 - DNA, 33 bp, Homo sapien
gtatttgtgttatctcaagttccatctctcagt

SEQ ID NO: 286324 - DNA, 33 bp, Homo sapien
gtatttgtgttatctcgagttccatctctcagt

SEQ ID NO: 286325 - DNA, 33 bp, Homo sapien
gttaggagtccataacaaaagttcttgttataa

SEQ ID NO: 286326 - DNA, 33 bp, Homo sapien
gttaggagtccataacgaaagttcttgttataa

SEQ ID NO: 286327 - DNA, 33 bp, Homo sapien
aaatgaagtcagttgcatcacaccctaagaaaa

SEQ ID NO: 286328 - DNA, 33 bp, Homo sapien
aaatgaagtcagttgcgtcacaccctaagaaaa

SEQ ID NO: 286329 - DNA, 33 bp, Homo sapien
ttgcatttcctgtgtcccatgatcctggtatcc

SEQ ID NO: 286330 - DNA, 33 bp, Homo sapien
ttgcatttcctgtgtctcatgatcctggtatcc

SEQ ID NO: 286331 - DNA, 33 bp, Homo sapien
tacaataaatggataccatggagagtgggacac

SEQ ID NO: 286332 - DNA, 33 bp, Homo sapien
tacaataaatggatactatggagagtgggacac

SEQ ID NO: 286333 - DNA, 33 bp, Homo sapien
gcaggtgactggagaaactatggtggatccaga

SEQ ID NO: 286334 - DNA, 33 bp, Homo sapien
gcaggtgactggagaacctatggtggatccaga

SEQ ID NO: 286335 - DNA, 33 bp, Homo sapien
atccaagaactgagacaagttttggaaatgtta

SEQ ID NO: 286336 - DNA, 33 bp, Homo sapien
atccaagaactgagacgagttttggaaatgtta

SEQ ID NO: 286337 - DNA, 33 bp, Homo sapien
gaaaaatgacaattggcaaacttgctcctccta

SEQ ID NO: 286338 - DNA, 33 bp, Homo sapien
gaaaaatgacaattggtaaacttgctcctccta

SEQ ID NO: 286339 - DNA, 33 bp, Homo sapien
tgtatgtcaccatgagaatgcaatcagcaatat

SEQ ID NO: 286340 - DNA, 33 bp, Homo sapien
tgtatgtcaccatgagtatgcaatcagcaatat

SEQ ID NO: 286341 - DNA, 33 bp, Homo sapien
ccaactaacgtcttgccgaaggaatcaaacatg

SEQ ID NO: 286342 - DNA, 33 bp, Homo sapien
ccaactaacgtcttgctgaaggaatcaaacatg

SEQ ID NO: 286343 - DNA, 33 bp, Homo sapien
aatggggagaaaccagcaataggcacaagatct

SEQ ID NO: 286344 - DNA, 33 bp, Homo sapien
aatggggagaaaccaggaataggcacaagatct

SEQ ID NO: 286345 - DNA, 33 bp, Homo sapien
atcagtatcgcctataagataagcttaaataat

SEQ ID NO: 286346 - DNA, 33 bp, Homo sapien
atcagtatcgcctatatgataagcttaaataat

SEQ ID NO: 286347 - DNA, 33 bp, Homo sapien
ttggataatcagggaaaaagtggcatttcagca

SEQ ID NO: 286348 - DNA, 33 bp, Homo sapien
ttggataatcagggaagaagtggcatttcagca

SEQ ID NO: 286349 - DNA, 33 bp, Homo sapien
cctaacaggccccagacgacctggcctcggtga

SEQ ID NO: 286350 - DNA, 33 bp, Homo sapien
cctaacaggccccagatgacctggcctcggtga

SEQ ID NO: 286351 - DNA, 33 bp, Homo sapien
tcttacagatacgcaacgatatttcacattttc

SEQ ID NO: 286352 - DNA, 33 bp, Homo sapien
tcttacagatacgcaatgatatttcacattttc

SEQ ID NO: 286353 - DNA, 33 bp, Homo sapien
tttcataaaagggaaaattgggccttgtgaaaa

SEQ ID NO: 286354 - DNA, 33 bp, Homo sapien
tttcataaaagggaaagttgggccttgtgaaaa

SEQ ID NO: 286355 - DNA, 33 bp, Homo sapien
catccaaatctgaaccaggtccttgctttacac

SEQ ID NO: 286356 - DNA, 33 bp, Homo sapien
catccaaatctgaaccgggtccttgctttacac

SEQ ID NO: 286357 - DNA, 33 bp, Homo sapien
tgaactaatgttcttgaaaaaacagcatcaaca

SEQ ID NO: 286358 - DNA, 33 bp, Homo sapien
tgaactaatgttcttggaaaaacagcatcaaca

SEQ ID NO: 286359 - DNA, 33 bp, Homo sapien
aatctctttccacatccacctttgagagtctga

SEQ ID NO: 286360 - DNA, 33 bp, Homo sapien
aatctctttccacatctacctttgagagtctga

SEQ ID NO: 286361 - DNA, 33 bp, Homo sapien
gtagtgtcacccatagaaaatatccaataagtg

SEQ ID NO: 286362 - DNA, 33 bp, Homo sapien
gtagtgtcacccatagtaaatatccaataagtg

SEQ ID NO: 286363 - DNA, 33 bp, Homo sapien
aggatcttccacttcaacccaaaagagcaataa

SEQ ID NO: 286364 - DNA, 33 bp, Homo sapien
aggatcttccacttcaccccaaaagagcaataa

SEQ ID NO: 286365 - DNA, 33 bp, Homo sapien
ttagctgtagagcccacgttacccagcagcttt

SEQ ID NO: 286366 - DNA, 33 bp, Homo sapien
ttagctgtagagcccaggttacccagcagcttt

SEQ ID NO: 286367 - DNA, 33 bp, Homo sapien
tctacatttaggagtacagctgaaattgaagtc

SEQ ID NO: 286368 - DNA, 33 bp, Homo sapien
tctacatttaggagtatagctgaaattgaagtc

SEQ ID NO: 286369 - DNA, 33 bp, Homo sapien
gagtcatgctggataacaaatatacgtgaaaac

SEQ ID NO: 286370 - DNA, 33 bp, Homo sapien
gagtcatgctggataataaatatacgtgaaaac

SEQ ID NO: 286371 - DNA, 33 bp, Homo sapien
tggcagatttggtgtacggtaagggcctagttc

SEQ ID NO: 286372 - DNA, 33 bp, Homo sapien
tggcagatttggtgtatggtaagggcctagttc

SEQ ID NO: 286373 - DNA, 33 bp, Homo sapien
atattactacttacaacggcctgtgaatctatc

SEQ ID NO: 286374 - DNA, 33 bp, Homo sapien
atattactacttacaatggcctgtgaatctatc

SEQ ID NO: 286375 - DNA, 33 bp, Homo sapien
acctgtaccctcattgaatccaggtactagcta

SEQ ID NO: 286376 - DNA, 33 bp, Homo sapien
acctgtaccctcattgtatccaggtactagcta

SEQ ID NO: 286377 - DNA, 33 bp, Homo sapien
ggtgtcagaatcgaatcagaagacacccaactg

SEQ ID NO: 286378 - DNA, 33 bp, Homo sapien
ggtgtcagaatcgaattagaagacacccaactg

SEQ ID NO: 286379 - DNA, 33 bp, Homo sapien
gtacgttgagtgtcagaaacatatttattaata

SEQ ID NO: 286380 - DNA, 33 bp, Homo sapien
gtacgttgagtgtcaggaacatatttattaata

SEQ ID NO: 286381 - DNA, 33 bp, Homo sapien
gctgcacacattctacaaggggaaggaaagaag

SEQ ID NO: 286382 - DNA, 33 bp, Homo sapien
gctgcacacattctacgaggggaaggaaagaag

SEQ ID NO: 286383 - DNA, 33 bp, Homo sapien
aagagtgactgctaacagatacagggtgttttt

SEQ ID NO: 286384 - DNA, 33 bp, Homo sapien
aagagtgactgctaaccgatacagggtgttttt

SEQ ID NO: 286385 - DNA, 33 bp, Homo sapien
caccaaaggcacaataaatgaaaaacataactg

SEQ ID NO: 286386 - DNA, 33 bp, Homo sapien
caccaaaggcacaatatatgaaaaacataactg

SEQ ID NO: 286387 - DNA, 33 bp, Homo sapien
ttatgtatttctaatgacactgtttagcaataa

SEQ ID NO: 286388 - DNA, 33 bp, Homo sapien
ttatgtatttctaatgtcactgtttagcaataa

SEQ ID NO: 286389 - DNA, 33 bp, Homo sapien
ggaatgataggacaaaaggaaatggattgtatt

SEQ ID NO: 286390 - DNA, 33 bp, Homo sapien
ggaatgataggacaaagggaaatggattgtatt

SEQ ID NO: 286391 - DNA, 33 bp, Homo sapien
catatgttctatgattaaaccattctttctttt

SEQ ID NO: 286392 - DNA, 33 bp, Homo sapien
catatgttctatgattgaaccattctttctttt

SEQ ID NO: 286393 - DNA, 33 bp, Homo sapien
tcggataatatttgctcaacttattggcccaga

SEQ ID NO: 286394 - DNA, 33 bp, Homo sapien
tcggataatatttgcttaacttattggcccaga

SEQ ID NO: 286395 - DNA, 33 bp, Homo sapien
ctattgaactataaaaatcgccataaacaaact

SEQ ID NO: 286396 - DNA, 33 bp, Homo sapien
ctattgaactataaaagtcgccataaacaaact

SEQ ID NO: 286397 - DNA, 33 bp, Homo sapien
cctcgtggactcttggaattacaaagtatgtta

SEQ ID NO: 286398 - DNA, 33 bp, Homo sapien
cctcgtggactcttgggattacaaagtatgtta

SEQ ID NO: 286399 - DNA, 33 bp, Homo sapien
tatgacctttcatatcacaaactgctatttatt

SEQ ID NO: 286400 - DNA, 33 bp, Homo sapien
tatgacctttcatatctcaaactgctatttatt

SEQ ID NO: 286401 - DNA, 33 bp, Homo sapien
gaacattgaatgtatgaatttccacacattgag

SEQ ID NO: 286402 - DNA, 33 bp, Homo sapien
gaacattgaatgtatgcatttccacacattgag

SEQ ID NO: 286403 - DNA, 33 bp, Homo sapien
agactgcttgggatcaaattgtctctgttcctt

SEQ ID NO: 286404 - DNA, 33 bp, Homo sapien
agactgcttgggatcagattgtctctgttcctt

SEQ ID NO: 286405 - DNA, 33 bp, Homo sapien
gaagggggtgagatgcgcaagtttgtgggctgt

SEQ ID NO: 286406 - DNA, 33 bp, Homo sapien
gaagggggtgagatgctcaagtttgtgggctgt

SEQ ID NO: 286407 - DNA, 33 bp, Homo sapien
atctcatgccacacaagataaaaagtgcatcgt

SEQ ID NO: 286408 - DNA, 33 bp, Homo sapien
atctcatgccacacaatataaaaagtgcatcgt

SEQ ID NO: 286409 - DNA, 33 bp, Homo sapien
actggcattcttgtaggcccaaagttcttgtat

SEQ ID NO: 286410 - DNA, 33 bp, Homo sapien
actggcattcttgtagtcccaaagttcttgtat

SEQ ID NO: 286411 - DNA, 33 bp, Homo sapien
gagaacatacaatatgcacttatctctctttct

SEQ ID NO: 286412 - DNA, 33 bp, Homo sapien
gagaacatacaatatggacttatctctctttct

SEQ ID NO: 286413 - DNA, 33 bp, Homo sapien
aatgcatcggcttcttcaaatgtgacagtagtt

SEQ ID NO: 286414 - DNA, 33 bp, Homo sapien
aatgcatcggcttctttaaatgtgacagtagtt

SEQ ID NO: 286415 - DNA, 33 bp, Homo sapien
gaataagtgtgacgaacggtaaatttctaaatt

SEQ ID NO: 286416 - DNA, 33 bp, Homo sapien
gaataagtgtgacgaatggtaaatttctaaatt

SEQ ID NO: 286417 - DNA, 33 bp, Homo sapien
tgcatattccttggcaatcctgacacccatcac

SEQ ID NO: 286418 - DNA, 33 bp, Homo sapien
tgcatattccttggcagtcctgacacccatcac

SEQ ID NO: 286419 - DNA, 33 bp, Homo sapien
gtacagccaaggtggacacttatttctttctct

SEQ ID NO: 286420 - DNA, 33 bp, Homo sapien
gtacagccaaggtggatacttatttctttctct

SEQ ID NO: 286421 - DNA, 33 bp, Homo sapien
tcaataagttttgagaaagaaatatcaatgata

SEQ ID NO: 286422 - DNA, 33 bp, Homo sapien
tcaataagttttgagagagaaatatcaatgata

SEQ ID NO: 286423 - DNA, 33 bp, Homo sapien
ccagtgattatattgaaagatactggtgaaaac

SEQ ID NO: 286424 - DNA, 33 bp, Homo sapien
ccagtgattatattgacagatactggtgaaaac

SEQ ID NO: 286425 - DNA, 33 bp, Homo sapien
gccctttctcattcctaagcatgtgtagggttg

SEQ ID NO: 286426 - DNA, 33 bp, Homo sapien
gccctttctcattccttagcatgtgtagggttg

SEQ ID NO: 286427 - DNA, 33 bp, Homo sapien
ccacagtgtcctggacccatttagatcaattgt

SEQ ID NO: 286428 - DNA, 33 bp, Homo sapien
ccacagtgtcctggactcatttagatcaattgt

SEQ ID NO: 286429 - DNA, 33 bp, Homo sapien
attgcctgtgtccttaaggaatatgcccaagag

SEQ ID NO: 286430 - DNA, 33 bp, Homo sapien
attgcctgtgtccttagggaatatgcccaagag

SEQ ID NO: 286431 - DNA, 33 bp, Homo sapien
aaaataaagccattaaaccattatgttagatca

SEQ ID NO: 286432 - DNA, 33 bp, Homo sapien
aaaataaagccattaagccattatgttagatca

SEQ ID NO: 286433 - DNA, 33 bp, Homo sapien
tatacacttaagtaaacttgaggccaataatga

SEQ ID NO: 286434 - DNA, 33 bp, Homo sapien
tatacacttaagtaaatttgaggccaataatga

SEQ ID NO: 286435 - DNA, 33 bp, Homo sapien
ctgcaatcagagaacacgattacaggctctcat

SEQ ID NO: 286436 - DNA, 33 bp, Homo sapien
ctgcaatcagagaacaggattacaggctctcat

SEQ ID NO: 286437 - DNA, 33 bp, Homo sapien
ctgaaaacaggacttacatttgcaatcccagtg

SEQ ID NO: 286438 - DNA, 33 bp, Homo sapien
ctgaaaacaggacttatatttgcaatcccagtg

SEQ ID NO: 286439 - DNA, 33 bp, Homo sapien
ctcacattctgaataaaaacatatctgataaat

SEQ ID NO: 286440 - DNA, 33 bp, Homo sapien
ctcacattctgaataagaacatatctgataaat

SEQ ID NO: 286441 - DNA, 33 bp, Homo sapien
gaagggtcatctcttcaaaatggagtgatgaga

SEQ ID NO: 286442 - DNA, 33 bp, Homo sapien
gaagggtcatctcttcgaaatggagtgatgaga

SEQ ID NO: 286443 - DNA, 33 bp, Homo sapien
caatagcctgataacactaaaatggagtggggc

SEQ ID NO: 286444 - DNA, 33 bp, Homo sapien
caatagcctgataacattaaaatggagtggggc

SEQ ID NO: 286445 - DNA, 33 bp, Homo sapien
ctcacaacatggacaaacatatattggtatgta

SEQ ID NO: 286446 - DNA, 33 bp, Homo sapien
ctcacaacatggacaagcatatattggtatgta

SEQ ID NO: 286447 - DNA, 33 bp, Homo sapien
ttgcaaattcttaacccaaattctcaaatgcat

SEQ ID NO: 286448 - DNA, 33 bp, Homo sapien
ttgcaaattcttaaccgaaattctcaaatgcat

SEQ ID NO: 286449 - DNA, 33 bp, Homo sapien
gataatgaccggacaacaatgaccattgcctac

SEQ ID NO: 286450 - DNA, 33 bp, Homo sapien
gataatgaccggacaagaatgaccattgcctac

SEQ ID NO: 286451 - DNA, 33 bp, Homo sapien
tgcttagcgtcagtcaatctagtgcagtgtggg

SEQ ID NO: 286452 - DNA, 33 bp, Homo sapien
tgcttagcgtcagtcagtctagtgcagtgtggg

SEQ ID NO: 286453 - DNA, 33 bp, Homo sapien
tggggagcagttaaatgaattcaagtttctaac

SEQ ID NO: 286454 - DNA, 33 bp, Homo sapien
tggggagcagttaaattaattcaagtttctaac

SEQ ID NO: 286455 - DNA, 33 bp, Homo sapien
agtcatgagagaagaccgaatgctaaaggaacc

SEQ ID NO: 286456 - DNA, 33 bp, Homo sapien
agtcatgagagaagactgaatgctaaaggaacc

SEQ ID NO: 286457 - DNA, 33 bp, Homo sapien
cgaatagataccactaactatgggaagctttcc

SEQ ID NO: 286458 - DNA, 33 bp, Homo sapien
cgaatagataccactacctatgggaagctttcc

SEQ ID NO: 286459 - DNA, 33 bp, Homo sapien
catgtactttaatagacctggaacatgacagga

SEQ ID NO: 286460 - DNA, 33 bp, Homo sapien
catgtactttaatagatctggaacatgacagga

SEQ ID NO: 286461 - DNA, 33 bp, Homo sapien
agatgactattgtgtgcaggctttccctgaact

SEQ ID NO: 286462 - DNA, 33 bp, Homo sapien
agatgactattgtgtgtaggctttccctgaact

SEQ ID NO: 286463 - DNA, 33 bp, Homo sapien
tgatctgcgtggaaaccacccacatttccctct

SEQ ID NO: 286464 - DNA, 33 bp, Homo sapien
tgatctgcgtggaaacgacccacatttccctct

SEQ ID NO: 286465 - DNA, 33 bp, Homo sapien
gtatgtgccaaagaaacgctataagccatgagt

SEQ ID NO: 286466 - DNA, 33 bp, Homo sapien
gtatgtgccaaagaaatgctataagccatgagt

SEQ ID NO: 286467 - DNA, 33 bp, Homo sapien
tctttgaacttcttaaacaaaggcatctttaaa

SEQ ID NO: 286468 - DNA, 33 bp, Homo sapien
tctttgaacttcttaagcaaaggcatctttaaa

SEQ ID NO: 286469 - DNA, 33 bp, Homo sapien
acagaatctgcaatcacgatccagtgtgccttg

SEQ ID NO: 286470 - DNA, 33 bp, Homo sapien
acagaatctgcaatcatgatccagtgtgccttg

SEQ ID NO: 286471 - DNA, 33 bp, Homo sapien
tgaaatatgatggacacggtggtagaaatgtga

SEQ ID NO: 286472 - DNA, 33 bp, Homo sapien
tgaaatatgatggacatggtggtagaaatgtga

SEQ ID NO: 286473 - DNA, 33 bp, Homo sapien
tttaggtaaaagcgagaaagggaagcaagggca

SEQ ID NO: 286474 - DNA, 33 bp, Homo sapien
tttaggtaaaagcgagcaagggaagcaagggca

SEQ ID NO: 286475 - DNA, 33 bp, Homo sapien
tctctgctcaaaaaggcaaaattgtgatgcttt

SEQ ID NO: 286476 - DNA, 33 bp, Homo sapien
tctctgctcaaaaagggaaaattgtgatgcttt

SEQ ID NO: 286477 - DNA, 33 bp, Homo sapien
atacatgagtgaagacaaaggaattaatggttt

SEQ ID NO: 286478 - DNA, 33 bp, Homo sapien
atacatgagtgaagactaaggaattaatggttt

SEQ ID NO: 286479 - DNA, 33 bp, Homo sapien
aaaaccaaacatccacaataaaggccatcaaaa

SEQ ID NO: 286480 - DNA, 33 bp, Homo sapien
aaaaccaaacatccaccataaaggccatcaaaa

SEQ ID NO: 286481 - DNA, 33 bp, Homo sapien
acttcattttaaaaacaatcaggtctcaggatt

SEQ ID NO: 286482 - DNA, 33 bp, Homo sapien
acttcattttaaaaacgatcaggtctcaggatt

SEQ ID NO: 286483 - DNA, 33 bp, Homo sapien
tattctttctgctttacgcaattcatttctcaa

SEQ ID NO: 286484 - DNA, 33 bp, Homo sapien
tattctttctgctttatgcaattcatttctcaa

SEQ ID NO: 286485 - DNA, 33 bp, Homo sapien
ccaacaatgactatggaaatgaaaccttcactc

SEQ ID NO: 286486 - DNA, 33 bp, Homo sapien
ccaacaatgactatgggaatgaaaccttcactc

SEQ ID NO: 286487 - DNA, 33 bp, Homo sapien
tgagaaaactgcagcactgataagtcgaatcca

SEQ ID NO: 286488 - DNA, 33 bp, Homo sapien
tgagaaaactgcagcattgataagtcgaatcca

SEQ ID NO: 286489 - DNA, 33 bp, Homo sapien
tgaataggcaagaaaaccatcactaacttacat

SEQ ID NO: 286490 - DNA, 33 bp, Homo sapien
tgaataggcaagaaaagcatcactaacttacat

SEQ ID NO: 286491 - DNA, 33 bp, Homo sapien
ctgatagagtgtgataaactgagaacttgtaat

SEQ ID NO: 286492 - DNA, 33 bp, Homo sapien
ctgatagagtgtgatatactgagaacttgtaat

SEQ ID NO: 286493 - DNA, 33 bp, Homo sapien; identical to SEQ ID NO: 286491

SEQ ID NO: 286494 - DNA, 33 bp, Homo sapien; identical to SEQ ID NO: 286492

SEQ ID NO: 286495 - DNA, 33 bp, Homo sapien
cagtagaatttgtacagtgtaatcccataatca

SEQ ID NO: 286496 - DNA, 33 bp, Homo sapien
cagtagaatttgtacattgtaatcccataatca

SEQ ID NO: 286497 - DNA, 33 bp, Homo sapien
aaactacatgggtctaagaatgaaagggtgaaa

SEQ ID NO: 286498 - DNA, 33 bp, Homo sapien
aaactacatgggtctaggaatgaaagggtgaaa

SEQ ID NO: 286499 - DNA, 33 bp, Homo sapien
ggaaagtccatcttttcgaggccattcatgtta

SEQ ID NO: 286500 - DNA, 33 bp, Homo sapien
ggaaagtccatctttttgaggccattcatgtta

SEQ ID NO: 286501 - DNA, 33 bp, Homo sapien
catgttaaacccttcaagtcgttccattgaaac

SEQ ID NO: 286502 - DNA, 33 bp, Homo sapien
catgttaaacccttcacgtcgttccattgaaac

SEQ ID NO: 286503 - DNA, 33 bp, Homo sapien
gtcgttccattgaaacccttctcactaggctaa

SEQ ID NO: 286504 - DNA, 33 bp, Homo sapien
gtcgttccattgaaactcttctcactaggctaa

SEQ ID NO: 286505 - DNA, 33 bp, Homo sapien
agccctctactgtctcactagtctaagataaaa

SEQ ID NO: 286506 - DNA, 33 bp, Homo sapien
agccctctactgtctctctagtctaagataaaa

SEQ ID NO: 286507 - DNA, 33 bp, Homo sapien
ttcaccaagtatactcacaagctatgacccatg

SEQ ID NO: 286508 - DNA, 33 bp, Homo sapien
ttcaccaagtatactcgcaagctatgacccatg

SEQ ID NO: 286509 - DNA, 33 bp, Homo sapien
gatctggagggttggaagtcaaaatggcgggtc

SEQ ID NO: 286510 - DNA, 33 bp, Homo sapien
gatctggagggttggaggtcaaaatggcgggtc

SEQ ID NO: 286511 - DNA, 33 bp, Homo sapien
agcccaacgtccattaactagctattcttcttg

SEQ ID NO: 286512 - DNA, 33 bp, Homo sapien
agcccaacgtccattagctagctattcttcttg

SEQ ID NO: 286513 - DNA, 33 bp, Homo sapien
acataatttggaaaaaattcttgacatcttttg

SEQ ID NO: 286514 - DNA, 33 bp, Homo sapien
acataatttggaaaaatttcttgacatcttttg

SEQ ID NO: 286515 - DNA, 33 bp, Homo sapien
tttgatgtgcaaaaatgatctcctgagaacagt

SEQ ID NO: 286516 - DNA, 33 bp, Homo sapien
tttgatgtgcaaaaattatctcctgagaacagt

SEQ ID NO: 286517 - DNA, 33 bp, Homo sapien; identical to SEQ ID NO: 286515

SEQ ID NO: 286518 - DNA, 33 bp, Homo sapien; identical to SEQ ID NO: 286516

SEQ ID NO: 286519 - DNA, 33 bp, Homo sapien
ggcaggtctttcttgcacttttgccctgccaaa

SEQ ID NO: 286520 - DNA, 33 bp, Homo sapien
ggcaggtctttcttgcgcttttgccctgccaaa

SEQ ID NO: 286521 - DNA, 33 bp, Homo sapien
acacatctccagtaaaatctcactgtaatgggc

SEQ ID NO: 286522 - DNA, 33 bp, Homo sapien
acacatctccagtaaagtctcactgtaatgggc

SEQ ID NO: 286523 - DNA, 33 bp, Homo sapien
agtaagcatgtatctcacaacacacaagacgtg

SEQ ID NO: 286524 - DNA, 33 bp, Homo sapien
agtaagcatgtatctcgcaacacacaagacgtg

SEQ ID NO: 286525 - DNA, 33 bp, Homo sapien
caatgtagcatctccaagataatttaaaactaa

SEQ ID NO: 286526 - DNA, 33 bp, Homo sapien
caatgtagcatctccaggataatttaaaactaa

SEQ ID NO: 286527 - DNA, 33 bp, Homo sapien
ataaactcttcaattacgtagtctgtataagag

SEQ ID NO: 286528 - DNA, 33 bp, Homo sapien
ataaactcttcaattatgtagtctgtataagag

SEQ ID NO: 286529 - DNA, 33 bp, Homo sapien; identical to SEQ ID NO: 286527

SEQ ID NO: 286530 - DNA, 33 bp, Homo sapien; identical to SEQ ID NO: 286528

SEQ ID NO: 286531 - DNA, 33 bp, Homo sapien
ttcagagcatgggtctaactcattcacactgca

SEQ ID NO: 286532 - DNA, 33 bp, Homo sapien
ttcagagcatgggtctgactcattcacactgca

SEQ ID NO: 286533 - DNA, 33 bp, Homo sapien; identical to SEQ ID NO: 286531

SEQ ID NO: 286534 - DNA, 33 bp, Homo sapien; identical to SEQ ID NO: 286532

SEQ ID NO: 286535 - DNA, 33 bp, Homo sapien
tttctccattgaataccaaaactgtgcaaataa

SEQ ID NO: 286536 - DNA, 33 bp, Homo sapien
tttctccattgaatactaaaactgtgcaaataa

SEQ ID NO: 286537 - DNA, 33 bp, Homo sapien; identical to SEQ ID NO: 286535

SEQ ID NO: 286538 - DNA, 33 bp, Homo sapien; identical to SEQ ID NO: 286536

SEQ ID NO: 286539 - DNA, 33 bp, Homo sapien
ttcaactttaaagagcacgtctcattttcaata

SEQ ID NO: 286540 - DNA, 33 bp, Homo sapien
ttcaactttaaagagcgcgtctcattttcaata

SEQ ID NO: 286541 - DNA, 33 bp, Homo sapien
aggtgtgatatatgtacgtaatggcaaataaac

SEQ ID NO: 286542 - DNA, 33 bp, Homo sapien
aggtgtgatatatgtatgtaatggcaaataaac

SEQ ID NO: 286543 - DNA, 33 bp, Homo sapien
gcttcagggatagttacgcctttaatagataaa

SEQ ID NO: 286544 - DNA, 33 bp, Homo sapien
gcttcagggatagttatgcctttaatagataaa

SEQ ID NO: 286545 - DNA, 33 bp, Homo sapien
aaaactaatttttccacggcagttgtcgatctg

SEQ ID NO: 286546 - DNA, 33 bp, Homo sapien
aaaactaatttttccatggcagttgtcgatctg

SEQ ID NO: 286547 - DNA, 33 bp, Homo sapien
gaaagtcagacacaaaaccttggtaattctggg

SEQ ID NO: 286548 - DNA, 33 bp, Homo sapien
gaaagtcagacacaaagccttggtaattctggg

SEQ ID NO: 286549 - DNA, 33 bp, Homo sapien
gtctgtgagacagtgaacaataacctttacaat

SEQ ID NO: 286550 - DNA, 33 bp, Homo sapien
gtctgtgagacagtgagcaataacctttacaat

SEQ ID NO: 286551 - DNA, 33 bp, Homo sapien
acaggttactgccaggacataagaaatagaaag

SEQ ID NO: 286552 - DNA, 33 bp, Homo sapien
acaggttactgccagggcataagaaatagaaag

SEQ ID NO: 286553 - DNA, 33 bp, Homo sapien
caggaaacatctgataatagctcaagatatttt

SEQ ID NO: 286554 - DNA, 33 bp, Homo sapien
caggaaacatctgatagtagctcaagatatttt

SEQ ID NO: 286555 - DNA, 33 bp, Homo sapien
atagaaaagatagaagacaaccgcaataagtgg

SEQ ID NO: 286556 - DNA, 33 bp, Homo sapien
atagaaaagatagaaggcaaccgcaataagtgg

SEQ ID NO: 286557 - DNA, 33 bp, Homo sapien
ccactcaataacaaagaatgaattgagtgtatg

SEQ ID NO: 286558 - DNA, 33 bp, Homo sapien
ccactcaataacaaaggatgaattgagtgtatg

SEQ ID NO: 286559 - DNA, 33 bp, Homo sapien
gtgatatgtgccatataaaaaacattagggggg

SEQ ID NO: 286560 - DNA, 33 bp, Homo sapien
gtgatatgtgccatatgaaaaacattagggggg

SEQ ID NO: 286561 - DNA, 33 bp, Homo sapien
aggcttgaggctttcaacctccaaagacatggt

SEQ ID NO: 286562 - DNA, 33 bp, Homo sapien
aggcttgaggctttcaccctccaaagacatggt

SEQ ID NO: 286563 - DNA, 33 bp, Homo sapien
gactgagaaaggagaacgggggaagtatgaagg

SEQ ID NO: 286564 - DNA, 33 bp, Homo sapien
gactgagaaaggagaatgggggaagtatgaagg

SEQ ID NO: 286565 - DNA, 33 bp, Homo sapien
agagacaagattgaaactgtgttatgctcaaat

SEQ ID NO: 286566 - DNA, 33 bp, Homo sapien
agagacaagattgaaattgtgttatgctcaaat

SEQ ID NO: 286567 - DNA, 33 bp, Homo sapien
tattcactatcattacaaatattcaacacatta

SEQ ID NO: 286568 - DNA, 33 bp, Homo sapien
tattcactatcattacgaatattcaacacatta

SEQ ID NO: 286569 - DNA, 33 bp, Homo sapien
agaaattgtaacttgaagtagcctttgatgtat

SEQ ID NO: 286570 - DNA, 33 bp, Homo sapien
agaaattgtaacttgaggtagcctttgatgtat

SEQ ID NO: 286571 - DNA, 33 bp, Homo sapien; identical to SEQ ID NO: 286569

SEQ ID NO: 286572 - DNA, 33 bp, Homo sapien; identical to SEQ ID NO: 286570

SEQ ID NO: 286573 - DNA, 33 bp, Homo sapien
cagtaaacccggcagaaaaacagctcaagtctt

SEQ ID NO: 286574 - DNA, 33 bp, Homo sapien
cagtaaacccggcagataaacagctcaagtctt

SEQ ID NO: 286575 - DNA, 33 bp, Homo sapien
ggtgcagacaaggggaacaattagaagatgagg

SEQ ID NO: 286576 - DNA, 33 bp, Homo sapien
ggtgcagacaaggggagcaattagaagatgagg

SEQ ID NO: 286577 - DNA, 33 bp, Homo sapien
tcagggagtacaaaaacgattaaatgaggggat

SEQ ID NO: 286578 - DNA, 33 bp, Homo sapien
tcagggagtacaaaaatgattaaatgaggggat

SEQ ID NO: 286579 - DNA, 33 bp, Homo sapien
attacatctctgtttacagactccgttttgctt

SEQ ID NO: 286580 - DNA, 33 bp, Homo sapien
attacatctctgtttatagactccgttttgctt

SEQ ID NO: 286581 - DNA, 33 bp, Homo sapien; identical to SEQ ID NO: 286579

SEQ ID NO: 286582 - DNA, 33 bp, Homo sapien; identical to SEQ ID NO: 286580

SEQ ID NO: 286583 - DNA, 33 bp, Homo sapien
atttttctttcttaaagcatacagtcttgttat

SEQ ID NO: 286584 - DNA, 33 bp, Homo sapien
atttttctttcttaaatcatacagtcttgttat

SEQ ID NO: 286585 - DNA, 33 bp, Homo sapien
ttaagtagttaagtgacctcatcagatttacac

SEQ ID NO: 286586 - DNA, 33 bp, Homo sapien
ttaagtagttaagtgatctcatcagatttacac

SEQ ID NO: 286587 - DNA, 33 bp, Homo sapien
gtcctttgcagcaaaagaggtgtagcttgaggc

SEQ ID NO: 286588 - DNA, 33 bp, Homo sapien
gtcctttgcagcaaaataggtgtagcttgaggc

SEQ ID NO: 286589 - DNA, 33 bp, Homo sapien
tagtaagctgtaccaccgacataccatatgtct

SEQ ID NO: 286590 - DNA, 33 bp, Homo sapien
tagtaagctgtaccactgacataccatatgtct

SEQ ID NO: 286591 - DNA, 33 bp, Homo sapien
cagattgtggcatatcaatattattatctgtgt

SEQ ID NO: 286592 - DNA, 33 bp, Homo sapien
cagattgtggcatatcgatattattatctgtgt

SEQ ID NO: 286593 - DNA, 33 bp, Homo sapien
catcttgtacgaagaaagtgttctatgattgat

SEQ ID NO: 286594 - DNA, 33 bp, Homo sapien
catcttgtacgaagaaggtgttctatgattgat

SEQ ID NO: 286595 - DNA, 33 bp, Homo sapien
tagtagcaataacaaaagcaaatgtttgtgaga

SEQ ID NO: 286596 - DNA, 33 bp, Homo sapien
tagtagcaataacaaaggcaaatgtttgtgaga

SEQ ID NO: 286597 - DNA, 33 bp, Homo sapien
agtggctgcacagttacctgaagagcattaaca

SEQ ID NO: 286598 - DNA, 33 bp, Homo sapien
agtggctgcacagttagctgaagagcattaaca

SEQ ID NO: 286599 - DNA, 33 bp, Homo sapien
taataacaacaacaaaatgcaaccatcacttct

SEQ ID NO: 286600 - DNA, 33 bp, Homo sapien
taataacaacaacaaagtgcaaccatcacttct

SEQ ID NO: 286601 - DNA, 33 bp, Homo sapien
tgaattattaaaatcacggagaatatgttctct

SEQ ID NO: 286602 - DNA, 33 bp, Homo sapien
tgaattattaaaatcatggagaatatgttctct

SEQ ID NO: 286603 - DNA, 33 bp, Homo sapien
ggaaggagtgtggccactgaggctccaatctaa

SEQ ID NO: 286604 - DNA, 33 bp, Homo sapien
ggaaggagtgtggccattgaggctccaatctaa

SEQ ID NO: 286605 - DNA, 33 bp, Homo sapien
aatgtgcaaaatattacatcgtgtctagaatat

SEQ ID NO: 286606 - DNA, 33 bp, Homo sapien
aatgtgcaaaatattatatcgtgtctagaatat

SEQ ID NO: 286607 - DNA, 33 bp, Homo sapien
aatttttttcaatctcaatctatcccacacatc

SEQ ID NO: 286608 - DNA, 33 bp, Homo sapien
aatttttttcaatctccatctatcccacacatc

SEQ ID NO: 286609 - DNA, 33 bp, Homo sapien
gcatatgtaccctataagattcaacagtcatct

SEQ ID NO: 286610 - DNA, 33 bp, Homo sapien
gcatatgtaccctataggattcaacagtcatct

SEQ ID NO: 286611 - DNA, 33 bp, Homo sapien
gaactaagaagaataacgccaggacctggggag

SEQ ID NO: 286612 - DNA, 33 bp, Homo sapien
gaactaagaagaataatgccaggacctggggag

SEQ ID NO: 286613 - DNA, 33 bp, Homo sapien
tgattttaaaacattcaatggtatcatataggc

SEQ ID NO: 286614 - DNA, 33 bp, Homo sapien
tgattttaaaacattcgatggtatcatataggc

SEQ ID NO: 286615 - DNA, 33 bp, Homo sapien
aaatctgagctccagaaaaaaagacaccaggaa

SEQ ID NO: 286616 - DNA, 33 bp, Homo sapien
aaatctgagctccagataaaaagacaccaggaa

SEQ ID NO: 286617 - DNA, 33 bp, Homo sapien
atttaactgtctctgcacctattgaatatagca

SEQ ID NO: 286618 - DNA, 33 bp, Homo sapien
atttaactgtctctgcgcctattgaatatagca

SEQ ID NO: 286619 - DNA, 33 bp, Homo sapien
aggcagaatgagagtagtaatgtgtctggagac

SEQ ID NO: 286620 - DNA, 33 bp, Homo sapien
aggcagaatgagagtattaatgtgtctggagac

SEQ ID NO: 286621 - DNA, 33 bp, Homo sapien
cggatgttttgactccaaaaagactcaaaattt

SEQ ID NO: 286622 - DNA, 33 bp, Homo sapien
cggatgttttgactcctaaaagactcaaaattt

SEQ ID NO: 286623 - DNA, 33 bp, Homo sapien
tattaaggctgtagccacaagtaaaggatatat

SEQ ID NO: 286624 - DNA, 33 bp, Homo sapien
tattaaggctgtagccgcaagtaaaggatatat

SEQ ID NO: 286625 - DNA, 33 bp, Homo sapien
cgtaggaaagtcatcaccctgcagcaggcaatt

SEQ ID NO: 286626 - DNA, 33 bp, Homo sapien
cgtaggaaagtcatcatcctgcagcaggcaatt

SEQ ID NO: 286627 - DNA, 33 bp, Homo sapien
gacagacgtgaattgacagagatacagggaaag

SEQ ID NO: 286628 - DNA, 33 bp, Homo sapien
gacagacgtgaattgatagagatacagggaaag

SEQ ID NO: 286629 - DNA, 33 bp, Homo sapien; identical to SEQ ID NO: 286627

SEQ ID NO: 286630 - DNA, 33 bp, Homo sapien; identical to SEQ ID NO: 286628

SEQ ID NO: 286631 - DNA, 33 bp, Homo sapien
gctacctatgtatctacgtatgcctgtatgtat

SEQ ID NO: 286632 - DNA, 33 bp, Homo sapien
gctacctatgtatctatgtatgcctgtatgtat

SEQ ID NO: 286633 - DNA, 33 bp, Homo sapien
tactagtgccagatgaagatggtctgttcaaat

SEQ ID NO: 286634 - DNA, 33 bp, Homo sapien
tactagtgccagatgaggatggtctgttcaaat

SEQ ID NO: 286635 - DNA, 33 bp, Homo sapien
agtccctcgtgaaagccgcctttttagactaca

SEQ ID NO: 286636 - DNA, 33 bp, Homo sapien
agtccctcgtgaaagctgcctttttagactaca

SEQ ID NO: 286637 - DNA, 33 bp, Homo sapien
agaattatgctgccaaccacaaatagcttggga

SEQ ID NO: 286638 - DNA, 33 bp, Homo sapien
agaattatgctgccaatcacaaatagcttggga

SEQ ID NO: 286639 - DNA, 33 bp, Homo sapien
atatgaggacaaagcactcactcttcctgctct

SEQ ID NO: 286640 - DNA, 33 bp, Homo sapien
atatgaggacaaagcattcactcttcctgctct

SEQ ID NO: 286641 - DNA, 33 bp, Homo sapien
gaaacatatgaattaacgaatttgaaatgaaat

SEQ ID NO: 286642 - DNA, 33 bp, Homo sapien
gaaacatatgaattaatgaatttgaaatgaaat

SEQ ID NO: 286643 - DNA, 33 bp, Homo sapien
catggccagtccgtggaaactgacataatctgt

SEQ ID NO: 286644 - DNA, 33 bp, Homo sapien
catggccagtccgtggtaactgacataatctgt

SEQ ID NO: 286645 - DNA, 33 bp, Homo sapien
gtcactcatgtttaaactctttcatcctaattg

SEQ ID NO: 286646 - DNA, 33 bp, Homo sapien
gtcactcatgtttaaattctttcatcctaattg

SEQ ID NO: 286647 - DNA, 33 bp, Homo sapien
attcgctctatggatacgccaaaaatttcctat

SEQ ID NO: 286648 - DNA, 33 bp, Homo sapien
attcgctctatggatatgccaaaaatttcctat

SEQ ID NO: 286649 - DNA, 33 bp, Homo sapien; identical to SEQ ID NO: 286647

SEQ ID NO: 286650 - DNA, 33 bp, Homo sapien; identical to SEQ ID NO: 286648

SEQ ID NO: 286651 - DNA, 33 bp, Homo sapien
taacatgaaatacaaaaagaattactgtagtct

SEQ ID NO: 286652 - DNA, 33 bp, Homo sapien
taacatgaaatacaaagagaattactgtagtct

SEQ ID NO: 286653 - DNA, 33 bp, Homo sapien
agagtaccatagaagacatctagctcaaatatt

SEQ ID NO: 286654 - DNA, 33 bp, Homo sapien
agagtaccatagaagatatctagctcaaatatt

SEQ ID NO: 286655 - DNA, 33 bp, Homo sapien
gatagccttccataaaaccaatgtagtatgccc

SEQ ID NO: 286656 - DNA, 33 bp, Homo sapien
gatagccttccataaagccaatgtagtatgccc

SEQ ID NO: 286657 - DNA, 33 bp, Homo sapien
aatggcgactctctgactaatttcaaaactggg

SEQ ID NO: 286658 - DNA, 33 bp, Homo sapien
aatggcgactctctgattaatttcaaaactggg

SEQ ID NO: 286659 - DNA, 33 bp, Homo sapien
aactcctatactgaccgctgtttacatagattc

SEQ ID NO: 286660 - DNA, 33 bp, Homo sapien
aactcctatactgacctctgtttacatagattc

SEQ ID NO: 286661 - DNA, 33 bp, Homo sapien; identical to SEQ ID NO: 286659

SEQ ID NO: 286662 - DNA, 33 bp, Homo sapien; identical to SEQ ID NO: 286660

SEQ ID NO: 286663 - DNA, 33 bp, Homo sapien
tgacagtaaagaatcacagagagcagtaaggct

SEQ ID NO: 286664 - DNA, 33 bp, Homo sapien
tgacagtaaagaatcagagagagcagtaaggct

SEQ ID NO: 286665 - DNA, 33 bp, Homo sapien
ggaaatgtagtttacgaaagcacaatttacaga

SEQ ID NO: 286666 - DNA, 33 bp, Homo sapien
ggaaatgtagtttacgtaagcacaatttacaga

SEQ ID NO: 286667 - DNA, 33 bp, Homo sapien
agtcagttatccttcacgtactgtgtagaagct

SEQ ID NO: 286668 - DNA, 33 bp, Homo sapien
agtcagttatccttcatgtactgtgtagaagct

SEQ ID NO: 286669 - DNA, 33 bp, Homo sapien
taagtatgaaagaaaacagtggattaataaatg

SEQ ID NO: 286670 - DNA, 33 bp, Homo sapien
taagtatgaaagaaaatagtggattaataaatg

SEQ ID NO: 286671 - DNA, 33 bp, Homo sapien
gtaattacctgtgcaacaaaaagctgtatggag

SEQ ID NO: 286672 - DNA, 33 bp, Homo sapien
gtaattacctgtgcaataaaaagctgtatggag

SEQ ID NO: 286673 - DNA, 33 bp, Homo sapien
aggaataggaaaataacaagtgcaaggactttg

SEQ ID NO: 286674 - DNA, 33 bp, Homo sapien
aggaataggaaaataataagtgcaaggactttg

SEQ ID NO: 286675 - DNA, 33 bp, Homo sapien
agctttgggcacatgacccaatcgaatccagtt

SEQ ID NO: 286676 - DNA, 33 bp, Homo sapien
agctttgggcacatgatccaatcgaatccagtt

SEQ ID NO: 286677 - DNA, 33 bp, Homo sapien
gatgacgttcagtatacccttaatgatagggaa

SEQ ID NO: 286678 - DNA, 33 bp, Homo sapien
gatgacgttcagtatatccttaatgatagggaa

SEQ ID NO: 286679 - DNA, 33 bp, Homo sapien
cactgctgtgttctagaaactttctgtgaagac

SEQ ID NO: 286680 - DNA, 33 bp, Homo sapien
cactgctgtgttctagtaactttctgtgaagac

SEQ ID NO: 286681 - DNA, 33 bp, Homo sapien
atactaattgtaaaaaatgtgcttcagaagaat

SEQ ID NO: 286682 - DNA, 33 bp, Homo sapien
atactaattgtaaaaactgtgcttcagaagaat

SEQ ID NO: 286683 - DNA, 33 bp, Homo sapien
ttataaatatacctaacgtttggaggagccatt

SEQ ID NO: 286684 - DNA, 33 bp, Homo sapien
ttataaatatacctaatgtttggaggagccatt

SEQ ID NO: 286685 - DNA, 33 bp, Homo sapien
ccacttcctggttccaatcgccttctgatcttg

SEQ ID NO: 286686 - DNA, 33 bp, Homo sapien
ccacttcctggttccagtcgccttctgatcttg

SEQ ID NO: 286687 - DNA, 33 bp, Homo sapien
ctccaacagatcttaactgttatgaatattttt

SEQ ID NO: 286688 - DNA, 33 bp, Homo sapien
ctccaacagatcttaattgttatgaatattttt

SEQ ID NO: 286689 - DNA, 33 bp, Homo sapien
tagaaaacatataaaacacccattgtgcttgtt

SEQ ID NO: 286690 - DNA, 33 bp, Homo sapien
tagaaaacatataaaatacccattgtgcttgtt

SEQ ID NO: 286691 - DNA, 33 bp, Homo sapien
ttctgcactattaaagaaaagctaatacaaaag

SEQ ID NO: 286692 - DNA, 33 bp, Homo sapien
ttctgcactattaaaggaaagctaatacaaaag

SEQ ID NO: 286693 - DNA, 33 bp, Homo sapien
aggcagagggtgtctaaatgacagttccacaac

SEQ ID NO: 286694 - DNA, 33 bp, Homo sapien
aggcagagggtgtctacatgacagttccacaac

SEQ ID NO: 286695 - DNA, 33 bp, Homo sapien
aaaaatctcggtatcaatgaacccgtgttgttc

SEQ ID NO: 286696 - DNA, 33 bp, Homo sapien
aaaaatctcggtatcagtgaacccgtgttgttc

SEQ ID NO: 286697 - DNA, 33 bp, Homo sapien
ttattacatcaagaacaagataggtgccacaac

SEQ ID NO: 286698 - DNA, 33 bp, Homo sapien
ttattacatcaagaacgagataggtgccacaac

SEQ ID NO: 286699 - DNA, 33 bp, Homo sapien
aaactaaaagtcatacagaaattcaagggaaat

SEQ ID NO: 286700 - DNA, 33 bp, Homo sapien
aaactaaaagtcatacggaaattcaagggaaat

SEQ ID NO: 286701 - DNA, 33 bp, Homo sapien
aataggagagttttgccatcttaaaaatgaaca

SEQ ID NO: 286702 - DNA, 33 bp, Homo sapien
aataggagagttttgctatcttaaaaatgaaca

SEQ ID NO: 286703 - DNA, 33 bp, Homo sapien
ttttaatcattgtataacattgtaaaaaacaaa

SEQ ID NO: 286704 - DNA, 33 bp, Homo sapien
ttttaatcattgtataccattgtaaaaaacaaa

SEQ ID NO: 286705 - DNA, 33 bp, Homo sapien
gtgggattattaaagaccagcagtgttcacaga

SEQ ID NO: 286706 - DNA, 33 bp, Homo sapien
gtgggattattaaagatcagcagtgttcacaga

SEQ ID NO: 286707 - DNA, 33 bp, Homo sapien
atgctcaatggtttaggatatttgagttagtgg

SEQ ID NO: 286708 - DNA, 33 bp, Homo sapien
atgctcaatggtttagtatatttgagttagtgg

SEQ ID NO: 286709 - DNA, 33 bp, Homo sapien
aatctgttcggaaaaaatgggcataggatcaga

SEQ ID NO: 286710 - DNA, 33 bp, Homo sapien
aatctgttcggaaaaattgggcataggatcaga

SEQ ID NO: 286711 - DNA, 33 bp, Homo sapien; identical to SEQ ID NO: 286709

SEQ ID NO: 286712 - DNA, 33 bp, Homo sapien; identical to SEQ ID NO: 286710

SEQ ID NO: 286713 - DNA, 33 bp, Homo sapien
acatctcttccttgtcaatggaaaaccaatatg

SEQ ID NO: 286714 - DNA, 33 bp, Homo sapien
acatctcttccttgtctatggaaaaccaatatg

SEQ ID NO: 286715 - DNA, 33 bp, Homo sapien
agtatttcctgaggtgaattgatttatattgtt

SEQ ID NO: 286716 - DNA, 33 bp, Homo sapien
agtatttcctgaggtgtattgatttatattgtt

SEQ ID NO: 286717 - DNA, 33 bp, Homo sapien
agctccaaatagtcacaccacttaaggaatcta

SEQ ID NO: 286718 - DNA, 33 bp, Homo sapien
agctccaaatagtcactccacttaaggaatcta

SEQ ID NO: 286719 - DNA, 33 bp, Homo sapien
tcactcttggataataaaattccttcagttgag

SEQ ID NO: 286720 - DNA, 33 bp, Homo sapien
tcactcttggataatagaattccttcagttgag

SEQ ID NO: 286721 - DNA, 33 bp, Homo sapien
gatgggaatgatagggaagactattcaaagaat

SEQ ID NO: 286722 - DNA, 33 bp, Homo sapien
gatgggaatgatagggtagactattcaaagaat

SEQ ID NO: 286723 - DNA, 33 bp, Homo sapien
ttctggctgttcaggccctatcaccctctaagt

SEQ ID NO: 286724 - DNA, 33 bp, Homo sapien
ttctggctgttcaggctctatcaccctctaagt

SEQ ID NO: 286725 - DNA, 33 bp, Homo sapien
ttctgaggagacctccacaaacttacaatcacg

SEQ ID NO: 286726 - DNA, 33 bp, Homo sapien
ttctgaggagacctccgcaaacttacaatcacg

SEQ ID NO: 286727 - DNA, 33 bp, Homo sapien
aaaagactcatctgcccgacttctgaggagacc

SEQ ID NO: 286728 - DNA, 33 bp, Homo sapien
aaaagactcatctgcctgacttctgaggagacc

SEQ ID NO: 286729 - DNA, 33 bp, Homo sapien
taaaatagctctttcacattcaaatacaaagca

SEQ ID NO: 286730 - DNA, 33 bp, Homo sapien
taaaatagctctttcatattcaaatacaaagca

SEQ ID NO: 286731 - DNA, 33 bp, Homo sapien
ccaaaccaaatatttcaaaaggtagtgtgcttg

SEQ ID NO: 286732 - DNA, 33 bp, Homo sapien
ccaaaccaaatatttctaaaggtagtgtgcttg

SEQ ID NO: 286733 - DNA, 33 bp, Homo sapien
ataggtcagctcccaaactcccagtagacctca

SEQ ID NO: 286734 - DNA, 33 bp, Homo sapien
ataggtcagctcccaagctcccagtagacctca

SEQ ID NO: 286735 - DNA, 33 bp, Homo sapien
gccttacatccttactaaacgtgcctattaata

SEQ ID NO: 286736 - DNA, 33 bp, Homo sapien
gccttacatccttactgaacgtgcctattaata

SEQ ID NO: 286737 - DNA, 33 bp, Homo sapien
atggcattggaaagtgcaattatcagtctcttg

SEQ ID NO: 286738 - DNA, 33 bp, Homo sapien
atggcattggaaagtgtaattatcagtctcttg

SEQ ID NO: 286739 - DNA, 33 bp, Homo sapien
attgatcaaagccaaaaattgatgttaatgtta

SEQ ID NO: 286740 - DNA, 33 bp, Homo sapien
attgatcaaagccaaacattgatgttaatgtta

SEQ ID NO: 286741 - DNA, 33 bp, Homo sapien
cccccaccttgttgacaacgagaaaagtaatgg

SEQ ID NO: 286742 - DNA, 33 bp, Homo sapien
cccccaccttgttgacgacgagaaaagtaatgg

SEQ ID NO: 286743 - DNA, 33 bp, Homo sapien
caggggaaatagttacaacccaagtatttaatc

SEQ ID NO: 286744 - DNA, 33 bp, Homo sapien
caggggaaatagttacgacccaagtatttaatc

SEQ ID NO: 286745 - DNA, 33 bp, Homo sapien
gactgtcattttcctacggattaaatacttggg

SEQ ID NO: 286746 - DNA, 33 bp, Homo sapien
gactgtcattttcctatggattaaatacttggg

SEQ ID NO: 286747 - DNA, 33 bp, Homo sapien
tacccccaacaaagaactgcaaatgtcaaccta

SEQ ID NO: 286748 - DNA, 33 bp, Homo sapien
tacccccaacaaagaattgcaaatgtcaaccta

SEQ ID NO: 286749 - DNA, 33 bp, Homo sapien
aacaaaaataattcagcattaaggtgaccatta

SEQ ID NO: 286750 - DNA, 33 bp, Homo sapien
aacaaaaataattcaggattaaggtgaccatta

SEQ ID NO: 286751 - DNA, 33 bp, Homo sapien
gccatcttctgtgataccattctgccaaaacac

SEQ ID NO: 286752 - DNA, 33 bp, Homo sapien
gccatcttctgtgatatcattctgccaaaacac

SEQ ID NO: 286753 - DNA, 33 bp, Homo sapien
tgatggtcttgggaaactgttatcaagggccaa

SEQ ID NO: 286754 - DNA, 33 bp, Homo sapien
tgatggtcttgggaaattgttatcaagggccaa

SEQ ID NO: 286755 - DNA, 33 bp, Homo sapien
atataaataccaaaataaatgaaagactggtaa

SEQ ID NO: 286756 - DNA, 33 bp, Homo sapien
atataaataccaaaatgaatgaaagactggtaa

SEQ ID NO: 286757 - DNA, 33 bp, Homo sapien
atgcaaaatgtgagtaactttactttcgctact

SEQ ID NO: 286758 - DNA, 33 bp, Homo sapien
atgcaaaatgtgagtatctttactttcgctact

SEQ ID NO: 286759 - DNA, 33 bp, Homo sapien
tttctccaatttccaacaatagagtctccaaag

SEQ ID NO: 286760 - DNA, 33 bp, Homo sapien
tttctccaatttccaataatagagtctccaaag

SEQ ID NO: 286761 - DNA, 33 bp, Homo sapien
gttcttgcaaaataccaactcttcatttattag

SEQ ID NO: 286762 - DNA, 33 bp, Homo sapien
gttcttgcaaaataccgactcttcatttattag

SEQ ID NO: 286763 - DNA, 33 bp, Homo sapien
cagtggaattatgctcactttagaagtaaataa

SEQ ID NO: 286764 - DNA, 33 bp, Homo sapien
cagtggaattatgctcgctttagaagtaaataa

SEQ ID NO: 286765 - DNA, 33 bp, Homo sapien
tttagttggcaaattacgttgcataggcactga

SEQ ID NO: 286766 - DNA, 33 bp, Homo sapien
tttagttggcaaattatgttgcataggcactga

SEQ ID NO: 286767 - DNA, 33 bp, Homo sapien
atgtgtgaagaccctcaaaagagaaggagcaga

SEQ ID NO: 286768 - DNA, 33 bp, Homo sapien
atgtgtgaagaccctcgaaagagaaggagcaga

SEQ ID NO: 286769 - DNA, 33 bp, Homo sapien
atttgttgttcctataacatctgacttattccg

SEQ ID NO: 286770 - DNA, 33 bp, Homo sapien
atttgttgttcctatatcatctgacttattccg

SEQ ID NO: 286771 - DNA, 33 bp, Homo sapien
taaatactgaaccttcccagggtagcattttat

SEQ ID NO: 286772 - DNA, 33 bp, Homo sapien
taaatactgaaccttctcagggtagcattttat

SEQ ID NO: 286773 - DNA, 33 bp, Homo sapien
tttttctagctgttcaacttttacctttcaatc

SEQ ID NO: 286774 - DNA, 33 bp, Homo sapien
tttttctagctgttcagcttttacctttcaatc

SEQ ID NO: 286775 - DNA, 33 bp, Homo sapien
atgttttgttattgctaaatgcagtctcactag

SEQ ID NO: 286776 - DNA, 33 bp, Homo sapien
atgttttgttattgcttaatgcagtctcactag

SEQ ID NO: 286777 - DNA, 33 bp, Homo sapien
agtgcaacttcttatacgtctgagagatgtttc

SEQ ID NO: 286778 - DNA, 33 bp, Homo sapien
agtgcaacttcttatatgtctgagagatgtttc

SEQ ID NO: 286779 - DNA, 33 bp, Homo sapien
tcacagtgccacaagaagtgtacgcaaagctcc

SEQ ID NO: 286780 - DNA, 33 bp, Homo sapien
tcacagtgccacaagaggtgtacgcaaagctcc

SEQ ID NO: 286781 - DNA, 33 bp, Homo sapien
ttgaatacttaagagcacaggaataacatcaat

SEQ ID NO: 286782 - DNA, 33 bp, Homo sapien
ttgaatacttaagagcccaggaataacatcaat

SEQ ID NO: 286783 - DNA, 33 bp, Homo sapien
taaaaaatatgttatcgctagcttcagcgtcct

SEQ ID NO: 286784 - DNA, 33 bp, Homo sapien
taaaaaatatgttatctctagcttcagcgtcct

SEQ ID NO: 286785 - DNA, 33 bp, Homo sapien
ggaagttgatgaatgccgaaatttgaagtttca

SEQ ID NO: 286786 - DNA, 33 bp, Homo sapien
ggaagttgatgaatgctgaaatttgaagtttca

SEQ ID NO: 286787 - DNA, 33 bp, Homo sapien
acactggcagtgttaacaactggtaagatttca

SEQ ID NO: 286788 - DNA, 33 bp, Homo sapien
acactggcagtgttaataactggtaagatttca

SEQ ID NO: 286789 - DNA, 33 bp, Homo sapien
ttctggtttccagttccacttataagtcatcac

SEQ ID NO: 286790 - DNA, 33 bp, Homo sapien
ttctggtttccagttctacttataagtcatcac

SEQ ID NO: 286791 - DNA, 33 bp, Homo sapien
tttactaattaaggtcacaatcaggaaatagtt

SEQ ID NO: 286792 - DNA, 33 bp, Homo sapien
tttactaattaaggtcccaatcaggaaatagtt

SEQ ID NO: 286793 - DNA, 33 bp, Homo sapien
tcacctgttttcatcactatataccattatggt

SEQ ID NO: 286794 - DNA, 33 bp, Homo sapien
tcacctgttttcatcattatataccattatggt

SEQ ID NO: 286795 - DNA, 33 bp, Homo sapien
gctctgtattctgttccactaatccatttgtct

SEQ ID NO: 286796 - DNA, 33 bp, Homo sapien
gctctgtattctgttcgactaatccatttgtct

SEQ ID NO: 286797 - DNA, 33 bp, Homo sapien
taattactctcaggctgaaagatcacttcagtc

SEQ ID NO: 286798 - DNA, 33 bp, Homo sapien
taattactctcaggcttaaagatcacttcagtc

SEQ ID NO: 286799 - DNA, 33 bp, Homo sapien
ccataactatagaatccaacttgataaattctt

SEQ ID NO: 286800 - DNA, 33 bp, Homo sapien
ccataactatagaatcgaacttgataaattctt

SEQ ID NO: 286801 - DNA, 33 bp, Homo sapien
tgtcaaaatactgcaacgaactcaagtattata

SEQ ID NO: 286802 - DNA, 33 bp, Homo sapien
tgtcaaaatactgcaatgaactcaagtattata

SEQ ID NO: 286803 - DNA, 33 bp, Homo sapien
tgttggctaggattggaaggcctagattcactg

SEQ ID NO: 286804 - DNA, 33 bp, Homo sapien
tgttggctaggattggcaggcctagattcactg

SEQ ID NO: 286805 - DNA, 33 bp, Homo sapien
tacatagagaaacaaaacaatcctaatcatatc

SEQ ID NO: 286806 - DNA, 33 bp, Homo sapien
tacatagagaaacaaagcaatcctaatcatatc

SEQ ID NO: 286807 - DNA, 33 bp, Homo sapien
accacaatatgcagcaagtataacatcacaaat

SEQ ID NO: 286808 - DNA, 33 bp, Homo sapien
accacaatatgcagcaggtataacatcacaaat

SEQ ID NO: 286809 - DNA, 33 bp, Homo sapien
cattgctcccatcagactattcaaaccttcctg

SEQ ID NO: 286810 - DNA, 33 bp, Homo sapien
cattgctcccatcagattattcaaaccttcctg

SEQ ID NO: 286811 - DNA, 33 bp, Homo sapien
ttaaataaccttccaaataaagagataactgtg

SEQ ID NO: 286812 - DNA, 33 bp, Homo sapien
ttaaataaccttccaagtaaagagataactgtg

SEQ ID NO: 286813 - DNA, 33 bp, Homo sapien
acattcttccttaacacgaacattgagtctgca

SEQ ID NO: 286814 - DNA, 33 bp, Homo sapien
acattcttccttaacatgaacattgagtctgca

SEQ ID NO: 286815 - DNA, 33 bp, Homo sapien
cttctcatggaaaggaaaaatgagtgagttaag

SEQ ID NO: 286816 - DNA, 33 bp, Homo sapien
cttctcatggaaaggataaatgagtgagttaag

SEQ ID NO: 286817 - DNA, 33 bp, Homo sapien
tctatcactgcacaaacatagattgaatacaga

SEQ ID NO: 286818 - DNA, 33 bp, Homo sapien
tctatcactgcacaaatatagattgaatacaga

SEQ ID NO: 286819 - DNA, 33 bp, Homo sapien
tctttaccagatgccaatcacttgctccctagg

SEQ ID NO: 286820 - DNA, 33 bp, Homo sapien
tctttaccagatgccagtcacttgctccctagg

SEQ ID NO: 286821 - DNA, 33 bp, Homo sapien
tcaagagagtgaaatacaatcaaggttcaacca

SEQ ID NO: 286822 - DNA, 33 bp, Homo sapien
tcaagagagtgaaatataatcaaggttcaacca

SEQ ID NO: 286823 - DNA, 33 bp, Homo sapien
aatcaattctgttttcactacccttgatcctca

SEQ ID NO: 286824 - DNA, 33 bp, Homo sapien
aatcaattctgttttccctacccttgatcctca

SEQ ID NO: 286825 - DNA, 33 bp, Homo sapien
tccaccaaggtggacccaactagaagacatcta

SEQ ID NO: 286826 - DNA, 33 bp, Homo sapien
tccaccaaggtggaccgaactagaagacatcta

SEQ ID NO: 286827 - DNA, 33 bp, Homo sapien
tggggattaagtttcaacatacgcattttcggg

SEQ ID NO: 286828 - DNA, 33 bp, Homo sapien
tggggattaagtttcagcatacgcattttcggg

SEQ ID NO: 286829 - DNA, 33 bp, Homo sapien
aagtgggagatgcgagaaacataaagctggaga

SEQ ID NO: 286830 - DNA, 33 bp, Homo sapien
aagtgggagatgcgaggaacataaagctggaga

SEQ ID NO: 286831 - DNA, 33 bp, Homo sapien
agacacccactcgtctaactagatacttgcaga

SEQ ID NO: 286832 - DNA, 33 bp, Homo sapien
agacacccactcgtctgactagatacttgcaga

SEQ ID NO: 286833 - DNA, 33 bp, Homo sapien
ggctagtgtttaaggaaatggagacaggccaga

SEQ ID NO: 286834 - DNA, 33 bp, Homo sapien
ggctagtgtttaaggagatggagacaggccaga

SEQ ID NO: 286835 - DNA, 33 bp, Homo sapien
cctcacagatgagcccaatttacatgaggaaaa

SEQ ID NO: 286836 - DNA, 33 bp, Homo sapien
cctcacagatgagcccgatttacatgaggaaaa

SEQ ID NO: 286837 - DNA, 33 bp, Homo sapien
tccatttttctagccccgataaggacacggctg

SEQ ID NO: 286838 - DNA, 33 bp, Homo sapien
tccatttttctagccctgataaggacacggctg

SEQ ID NO: 286839 - DNA, 33 bp, Homo sapien
agatgtgtaacctctacgtatatttagtttcta

SEQ ID NO: 286840 - DNA, 33 bp, Homo sapien
agatgtgtaacctctatgtatatttagtttcta

SEQ ID NO: 286841 - DNA, 33 bp, Homo sapien; identical to SEQ ID NO: 286839

SEQ ID NO: 286842 - DNA, 33 bp, Homo sapien; identical to SEQ ID NO: 286840

SEQ ID NO: 286843 - DNA, 33 bp, Homo sapien
aaataaggattatggcccacttttggatcataa

SEQ ID NO: 286844 - DNA, 33 bp, Homo sapien
aaataaggattatggctcacttttggatcataa

SEQ ID NO: 286845 - DNA, 33 bp, Homo sapien
atgtggacataagacaagtttgaaatgtatttt

SEQ ID NO: 286846 - DNA, 33 bp, Homo sapien
atgtggacataagacacgtttgaaatgtatttt

SEQ ID NO: 286847 - DNA, 33 bp, Homo sapien
tcagcgcattgtttcccgaaaactccaagctga

SEQ ID NO: 286848 - DNA, 33 bp, Homo sapien
tcagcgcattgtttcctgaaaactccaagctga

SEQ ID NO: 286849 - DNA, 33 bp, Homo sapien
atctcctttgaaccaacagagaagaaaactgag

SEQ ID NO: 286850 - DNA, 33 bp, Homo sapien
atctcctttgaaccaagagagaagaaaactgag

SEQ ID NO: 286851 - DNA, 33 bp, Homo sapien
ctaaaagtctcctaaacttacagttcacattaa

SEQ ID NO: 286852 - DNA, 33 bp, Homo sapien
ctaaaagtctcctaaagttacagttcacattaa

SEQ ID NO: 286853 - DNA, 33 bp, Homo sapien
aaagatgtgatcgagacgaaagagaaaaatggc

SEQ ID NO: 286854 - DNA, 33 bp, Homo sapien
aaagatgtgatcgagatgaaagagaaaaatggc

SEQ ID NO: 286855 - DNA, 33 bp, Homo sapien
attaggatggtaaccccatttatgttatttgta

SEQ ID NO: 286856 - DNA, 33 bp, Homo sapien
attaggatggtaaccctatttatgttatttgta

SEQ ID NO: 286857 - DNA, 33 bp, Homo sapien
caccatataacaagcagaacctactgagatgga

SEQ ID NO: 286858 - DNA, 33 bp, Homo sapien
caccatataacaagcataacctactgagatgga

SEQ ID NO: 286859 - DNA, 33 bp, Homo sapien
gggagctgcagactcaataatctgttcttgatc

SEQ ID NO: 286860 - DNA, 33 bp, Homo sapien
gggagctgcagactcagtaatctgttcttgatc

SEQ ID NO: 286861 - DNA, 33 bp, Homo sapien
tgtaatgattcaccaaactcaattagaaagagt

SEQ ID NO: 286862 - DNA, 33 bp, Homo sapien
tgtaatgattcaccaatctcaattagaaagagt

SEQ ID NO: 286863 - DNA, 33 bp, Homo sapien
atcttttcaaacatacacttaccctctatttaa

SEQ ID NO: 286864 - DNA, 33 bp, Homo sapien
atcttttcaaacatacgcttaccctctatttaa

SEQ ID NO: 286865 - DNA, 33 bp, Homo sapien
aagatacaaagttgacactagttgcatgaggaa

SEQ ID NO: 286866 - DNA, 33 bp, Homo sapien
aagatacaaagttgacgctagttgcatgaggaa

SEQ ID NO: 286867 - DNA, 33 bp, Homo sapien
aataacactatccaaactgactgttgtgaccga

SEQ ID NO: 286868 - DNA, 33 bp, Homo sapien
aataacactatccaaattgactgttgtgaccga

SEQ ID NO: 286869 - DNA, 33 bp, Homo sapien
tctcatgagtaaaaataaaaatgtttggagata

SEQ ID NO: 286870 - DNA, 33 bp, Homo sapien
tctcatgagtaaaaatcaaaatgtttggagata

SEQ ID NO: 286871 - DNA, 33 bp, Homo sapien
tttttataattatctgaaaattgtcccggtccc

SEQ ID NO: 286872 - DNA, 33 bp, Homo sapien
tttttataattatctggaaattgtcccggtccc

SEQ ID NO: 286873 - DNA, 33 bp, Homo sapien
ggcatcctgggtcataaagcaaataaaaatact

SEQ ID NO: 286874 - DNA, 33 bp, Homo sapien
ggcatcctgggtcatacagcaaataaaaatact

SEQ ID NO: 286875 - DNA, 33 bp, Homo sapien
ttagaggttgttgggaacagacaacgtgcacac

SEQ ID NO: 286876 - DNA, 33 bp, Homo sapien
ttagaggttgttgggatcagacaacgtgcacac

SEQ ID NO: 286877 - DNA, 33 bp, Homo sapien
gaatgcccttttctaccctgggtgctttgtcac

SEQ ID NO: 286878 - DNA, 33 bp, Homo sapien
gaatgcccttttctactctgggtgctttgtcac

SEQ ID NO: 286879 - DNA, 33 bp, Homo sapien
tgcagagctgctggtcaccttcagggctgtgga

SEQ ID NO: 286880 - DNA, 33 bp, Homo sapien
tgcagagctgctggtcgccttcagggctgtgga

SEQ ID NO: 286881 - DNA, 33 bp, Homo sapien
ggatttgaggacatcaagtctgctcagctaact

SEQ ID NO: 286882 - DNA, 33 bp, Homo sapien
ggatttgaggacatcaggtctgctcagctaact

SEQ ID NO: 286883 - DNA, 33 bp, Homo sapien
gggatcaggtagaagaagttacagcggacaacc

SEQ ID NO: 286884 - DNA, 33 bp, Homo sapien
gggatcaggtagaagacgttacagcggacaacc

SEQ ID NO: 286885 - DNA, 33 bp, Homo sapien
gaataaaatcctgtaagtatgtaacacctatag

SEQ ID NO: 286886 - DNA, 33 bp, Homo sapien
gaataaaatcctgtaattatgtaacacctatag

SEQ ID NO: 286887 - DNA, 33 bp, Homo sapien
ttaagagctgcacataactgaagcattaggtgt

SEQ ID NO: 286888 - DNA, 33 bp, Homo sapien
ttaagagctgcacatatctgaagcattaggtgt

SEQ ID NO: 286889 - DNA, 33 bp, Homo sapien
ttcatattttgccttccataacatcaaataata

SEQ ID NO: 286890 - DNA, 33 bp, Homo sapien
ttcatattttgccttctataacatcaaataata

SEQ ID NO: 286891 - DNA, 33 bp, Homo sapien
attcgtgtggaatacaagagatatgaagcaata

SEQ ID NO: 286892 - DNA, 33 bp, Homo sapien
attcgtgtggaatacaggagatatgaagcaata

SEQ ID NO: 286893 - DNA, 33 bp, Homo sapien
gctattcatcaaaataagaaacataggaaggaa

SEQ ID NO: 286894 - DNA, 33 bp, Homo sapien
gctattcatcaaaataggaaacataggaaggaa

SEQ ID NO: 286895 - DNA, 33 bp, Homo sapien
tttaagaaagtgtgcactgaaagcttgaagcaa

SEQ ID NO: 286896 - DNA, 33 bp, Homo sapien
tttaagaaagtgtgcattgaaagcttgaagcaa

SEQ ID NO: 286897 - DNA, 33 bp, Homo sapien
tttttatgttcttaccaaaaataatgaagtgaa

SEQ ID NO: 286898 - DNA, 33 bp, Homo sapien
tttttatgttcttaccgaaaataatgaagtgaa

SEQ ID NO: 286899 - DNA, 33 bp, Homo sapien
gcccattaatggacttaaaaaaagacagcatac

SEQ ID NO: 286900 - DNA, 33 bp, Homo sapien
gcccattaatggacttcaaaaaagacagcatac

SEQ ID NO: 286901 - DNA, 33 bp, Homo sapien
ggtaatcctaggactcaccaacactggagtgga

SEQ ID NO: 286902 - DNA, 33 bp, Homo sapien
ggtaatcctaggactcgccaacactggagtgga

SEQ ID NO: 286903 - DNA, 33 bp, Homo sapien
tccactaaccagtgaccgaaagatactcaccaa

SEQ ID NO: 286904 - DNA, 33 bp, Homo sapien
tccactaaccagtgactgaaagatactcaccaa

SEQ ID NO: 286905 - DNA, 33 bp, Homo sapien
atttttgaagagcgatcacaaatatctggcaga

SEQ ID NO: 286906 - DNA, 33 bp, Homo sapien
atttttgaagagcgattacaaatatctggcaga

SEQ ID NO: 286907 - DNA, 33 bp, Homo sapien
ttatatacagtggctacgtatcatttacaatac

SEQ ID NO: 286908 - DNA, 33 bp, Homo sapien
ttatatacagtggctatgtatcatttacaatac

SEQ ID NO: 286909 - DNA, 33 bp, Homo sapien
tacatagatcaattctgacaaatgttctaattt

SEQ ID NO: 286910 - DNA, 33 bp, Homo sapien
tacatagatcaattcttacaaatgttctaattt

SEQ ID NO: 286911 - DNA, 33 bp, Homo sapien
aaattgcctgtcttacaaagtatatttacacat

SEQ ID NO: 286912 - DNA, 33 bp, Homo sapien
aaattgcctgtcttacgaagtatatttacacat

SEQ ID NO: 286913 - DNA, 33 bp, Homo sapien
tatatttggcactgtaaggagtaaaagattgag

SEQ ID NO: 286914 - DNA, 33 bp, Homo sapien
tatatttggcactgtagggagtaaaagattgag

SEQ ID NO: 286915 - DNA, 33 bp, Homo sapien
cctttcttaattacacagaaaacctcaatttca

SEQ ID NO: 286916 - DNA, 33 bp, Homo sapien
cctttcttaattacacggaaaacctcaatttca

SEQ ID NO: 286917 - DNA, 33 bp, Homo sapien
tatagttctggaattacacattcaaaacacaag

SEQ ID NO: 286918 - DNA, 33 bp, Homo sapien
tatagttctggaattatacattcaaaacacaag

SEQ ID NO: 286919 - DNA, 33 bp, Homo sapien
cctttttgccacaaaaagtagtcatgttactgc

SEQ ID NO: 286920 - DNA, 33 bp, Homo sapien
cctttttgccacaaaaggtagtcatgttactgc

SEQ ID NO: 286921 - DNA, 33 bp, Homo sapien
atcacccgtaagcataatagtacaggggtagtc

SEQ ID NO: 286922 - DNA, 33 bp, Homo sapien
atcacccgtaagcatagtagtacaggggtagtc

SEQ ID NO: 286923 - DNA, 33 bp, Homo sapien
cgtccttactgtataaaaacattctccatcaag

SEQ ID NO: 286924 - DNA, 33 bp, Homo sapien
cgtccttactgtataagaacattctccatcaag

SEQ ID NO: 286925 - DNA, 33 bp, Homo sapien
agcaatagaaatccataaggaaatcctctcgat

SEQ ID NO: 286926 - DNA, 33 bp, Homo sapien
agcaatagaaatccatgaggaaatcctctcgat

SEQ ID NO: 286927 - DNA, 33 bp, Homo sapien
aggtgagtctgcatcacacgagaggcacaggtg

SEQ ID NO: 286928 - DNA, 33 bp, Homo sapien
aggtgagtctgcatcatacgagaggcacaggtg

SEQ ID NO: 286929 - DNA, 33 bp, Homo sapien
tataattacagttggagcatttaatatctctgt

SEQ ID NO: 286930 - DNA, 33 bp, Homo sapien
tataattacagttggatcatttaatatctctgt

SEQ ID NO: 286931 - DNA, 33 bp, Homo sapien
aaacatttcatcaaaaaagatatgctcatcaat

SEQ ID NO: 286932 - DNA, 33 bp, Homo sapien
aaacatttcatcaaaagagatatgctcatcaat

SEQ ID NO: 286933 - DNA, 33 bp, Homo sapien
ttagcccaggattcaacattcatactggtttgg

SEQ ID NO: 286934 - DNA, 33 bp, Homo sapien
ttagcccaggattcaatattcatactggtttgg

SEQ ID NO: 286935 - DNA, 33 bp, Homo sapien
gttacagctcagaaaacgtctaacccacgcaat

SEQ ID NO: 286936 - DNA, 33 bp, Homo sapien
gttacagctcagaaaatgtctaacccacgcaat

SEQ ID NO: 286937 - DNA, 33 bp, Homo sapien
cttggccaaaaacacaatgtggcttaggcaatt

SEQ ID NO: 286938 - DNA, 33 bp, Homo sapien
cttggccaaaaacacattgtggcttaggcaatt

SEQ ID NO: 286939 - DNA, 33 bp, Homo sapien
ctgatagccagccttcactaagccagtctgcta

SEQ ID NO: 286940 - DNA, 33 bp, Homo sapien
ctgatagccagccttcgctaagccagtctgcta

SEQ ID NO: 286941 - DNA, 33 bp, Homo sapien
atttcagtcatgttcaaccagcagaaatttgca

SEQ ID NO: 286942 - DNA, 33 bp, Homo sapien
atttcagtcatgttcagccagcagaaatttgca

SEQ ID NO: 286943 - DNA, 33 bp, Homo sapien
tttctgaattcatcatgaggagagtgaactcca

SEQ ID NO: 286944 - DNA, 33 bp, Homo sapien
tttctgaattcatcattaggagagtgaactcca

SEQ ID NO: 286945 - DNA, 33 bp, Homo sapien
tttgccacatcctggaacctcaagcacacattg

SEQ ID NO: 286946 - DNA, 33 bp, Homo sapien
tttgccacatcctggagcctcaagcacacattg

SEQ ID NO: 286947 - DNA, 33 bp, Homo sapien
atagcaccttttcataaactaagcaaatgaatg

SEQ ID NO: 286948 - DNA, 33 bp, Homo sapien
atagcaccttttcatagactaagcaaatgaatg

SEQ ID NO: 286949 - DNA, 33 bp, Homo sapien
aaagagccgtggcttaacaatataaagattttg

SEQ ID NO: 286950 - DNA, 33 bp, Homo sapien
aaagagccgtggcttagcaatataaagattttg

SEQ ID NO: 286951 - DNA, 33 bp, Homo sapien
aaccattcattgcttaagactcttccctttatt

SEQ ID NO: 286952 - DNA, 33 bp, Homo sapien
aaccattcattgcttaggactcttccctttatt

SEQ ID NO: 286953 - DNA, 33 bp, Homo sapien
caaaagttaactgatacatagaactctttattt

SEQ ID NO: 286954 - DNA, 33 bp, Homo sapien
caaaagttaactgatatatagaactctttattt

SEQ ID NO: 286955 - DNA, 33 bp, Homo sapien
tgtatgagtttggacacattatttagcctcttg

SEQ ID NO: 286956 - DNA, 33 bp, Homo sapien
tgtatgagtttggacatattatttagcctcttg

SEQ ID NO: 286957 - DNA, 33 bp, Homo sapien
aaaataaattgaaatacgatgtgctggaaatat

SEQ ID NO: 286958 - DNA, 33 bp, Homo sapien
aaaataaattgaaataggatgtgctggaaatat

SEQ ID NO: 286959 - DNA, 33 bp, Homo sapien
ctctccaatcaatcacagagtctcgctaaattt

SEQ ID NO: 286960 - DNA, 33 bp, Homo sapien
ctctccaatcaatcacggagtctcgctaaattt

SEQ ID NO: 286961 - DNA, 33 bp, Homo sapien
ttttaaaagcggaactcaagtgtaccactgttt

SEQ ID NO: 286962 - DNA, 33 bp, Homo sapien
ttttaaaagcggaactgaagtgtaccactgttt

SEQ ID NO: 286963 - DNA, 33 bp, Homo sapien
ccaaagagatagcttcacattagataccaatta

SEQ ID NO: 286964 - DNA, 33 bp, Homo sapien
ccaaagagatagcttcgcattagataccaatta

SEQ ID NO: 286965 - DNA, 33 bp, Homo sapien
gaaagtgaagtgactacactgctgatccagcca

SEQ ID NO: 286966 - DNA, 33 bp, Homo sapien
gaaagtgaagtgactatactgctgatccagcca

SEQ ID NO: 286967 - DNA, 33 bp, Homo sapien
cttctggtcatagaacaattatttcaacagttt

SEQ ID NO: 286968 - DNA, 33 bp, Homo sapien
cttctggtcatagaacgattatttcaacagttt

SEQ ID NO: 286969 - DNA, 33 bp, Homo sapien
tatgaggacaaggacaaaaagaactgacatgat

SEQ ID NO: 286970 - DNA, 33 bp, Homo sapien
tatgaggacaaggacagaaagaactgacatgat

SEQ ID NO: 286971 - DNA, 33 bp, Homo sapien
tgctctcaggcaagacactggaagagtcttctc

SEQ ID NO: 286972 - DNA, 33 bp, Homo sapien
tgctctcaggcaagacgctggaagagtcttctc

SEQ ID NO: 286973 - DNA, 33 bp, Homo sapien
caaccacagttgctaaacacgctacaacgtaat

SEQ ID NO: 286974 - DNA, 33 bp, Homo sapien
caaccacagttgctaaccacgctacaacgtaat

SEQ ID NO: 286975 - DNA, 33 bp, Homo sapien
atggtgactccaaaaagagggagggcaggagga

SEQ ID NO: 286976 - DNA, 33 bp, Homo sapien
atggtgactccaaaaatagggagggcaggagga

SEQ ID NO: 286977 - DNA, 33 bp, Homo sapien
acaatagggatgtaaactagtcattgttctatc

SEQ ID NO: 286978 - DNA, 33 bp, Homo sapien
acaatagggatgtaaattagtcattgttctatc

SEQ ID NO: 286979 - DNA, 33 bp, Homo sapien
cactgtgaaagagcccaattaatacacatttgt

SEQ ID NO: 286980 - DNA, 33 bp, Homo sapien
cactgtgaaagagccccattaatacacatttgt

SEQ ID NO: 286981 - DNA, 33 bp, Homo sapien
agctggtagttgtacaagcgaatcaggtataaa

SEQ ID NO: 286982 - DNA, 33 bp, Homo sapien
agctggtagttgtacaggcgaatcaggtataaa

SEQ ID NO: 286983 - DNA, 33 bp, Homo sapien
ttccatttctcaaaccaatatcccccgtctcaa

SEQ ID NO: 286984 - DNA, 33 bp, Homo sapien
ttccatttctcaaacccatatcccccgtctcaa

SEQ ID NO: 286985 - DNA, 33 bp, Homo sapien
catcactctttagggacgaaagcacatatggaa

SEQ ID NO: 286986 - DNA, 33 bp, Homo sapien
catcactctttagggatgaaagcacatatggaa

SEQ ID NO: 286987 - DNA, 33 bp, Homo sapien
tgcaagtttgttcaaaactcagaatcctctctc

SEQ ID NO: 286988 - DNA, 33 bp, Homo sapien
tgcaagtttgttcaaacctcagaatcctctctc

SEQ ID NO: 286989 - DNA, 33 bp, Homo sapien
tatgcctctaactccaccttttttctcaataag

SEQ ID NO: 286990 - DNA, 33 bp, Homo sapien
tatgcctctaactccatcttttttctcaataag

SEQ ID NO: 286991 - DNA, 33 bp, Homo sapien
atttatgagaaagaaacgcccctttgtcagaag

SEQ ID NO: 286992 - DNA, 33 bp, Homo sapien
atttatgagaaagaaatgcccctttgtcagaag

SEQ ID NO: 286993 - DNA, 33 bp, Homo sapien
cctgctgctgtatacacctatgaaatctaagat

SEQ ID NO: 286994 - DNA, 33 bp, Homo sapien
cctgctgctgtatacatctatgaaatctaagat

SEQ ID NO: 286995 - DNA, 33 bp, Homo sapien
ggtcactgtctgcggtaaaaatgtgaatgtctg

SEQ ID NO: 286996 - DNA, 33 bp, Homo sapien
ggtcactgtctgcggtcaaaatgtgaatgtctg

SEQ ID NO: 286997 - DNA, 33 bp, Homo sapien
actggtagtgaacatccagtaataacaataaca

SEQ ID NO: 286998 - DNA, 33 bp, Homo sapien
actggtagtgaacatctagtaataacaataaca

SEQ ID NO: 286999 - DNA, 33 bp, Homo sapien
aatggcttggaagagagtccttatcagtagaat

SEQ ID NO: 287000 - DNA, 33 bp, Homo sapien
aatggcttggaagagattccttatcagtagaat

SEQ ID NO: 287001 - DNA, 33 bp, Homo sapien
gctttccattacttcacgtctgagtccagtttc

SEQ ID NO: 287002 - DNA, 33 bp, Homo sapien
gctttccattacttcatgtctgagtccagtttc

SEQ ID NO: 287003 - DNA, 33 bp, Homo sapien
acaaataaaaatagctaacattgatccactgct

SEQ ID NO: 287004 - DNA, 33 bp, Homo sapien
acaaataaaaatagctgacattgatccactgct

SEQ ID NO: 287005 - DNA, 33 bp, Homo sapien
gtttagcaaggttacacggtacaagatcaatat

SEQ ID NO: 287006 - DNA, 33 bp, Homo sapien
gtttagcaaggttacatggtacaagatcaatat

SEQ ID NO: 287007 - DNA, 33 bp, Homo sapien
aacactgtgactatcagacgatgtgaatgactc

SEQ ID NO: 287008 - DNA, 33 bp, Homo sapien
aacactgtgactatcatacgatgtgaatgactc

SEQ ID NO: 287009 - DNA, 33 bp, Homo sapien
caggtgaggaaacatacgccccacctctttatg

SEQ ID NO: 287010 - DNA, 33 bp, Homo sapien
caggtgaggaaacatatgccccacctctttatg

SEQ ID NO: 287011 - DNA, 33 bp, Homo sapien
ctaattttctgagacagcatggaattgggcctg

SEQ ID NO: 287012 - DNA, 33 bp, Homo sapien
ctaattttctgagacatcatggaattgggcctg

SEQ ID NO: 287013 - DNA, 33 bp, Homo sapien
tttaatagctttctacacttgaataagaatcct

SEQ ID NO: 287014 - DNA, 33 bp, Homo sapien
tttaatagctttctacgcttgaataagaatcct

SEQ ID NO: 287015 - DNA, 33 bp, Homo sapien
tcctgtcttaggtatacagtcaggtctgatgaa

SEQ ID NO: 287016 - DNA, 33 bp, Homo sapien
tcctgtcttaggtatatagtcaggtctgatgaa

SEQ ID NO: 287017 - DNA, 33 bp, Homo sapien
tagaactagctaagaacggttgcctgtttatat

SEQ ID NO: 287018 - DNA, 33 bp, Homo sapien
tagaactagctaagaatggttgcctgtttatat

SEQ ID NO: 287019 - DNA, 33 bp, Homo sapien
gacatgaaccgacataataactaaaggaagaac

SEQ ID NO: 287020 - DNA, 33 bp, Homo sapien
gacatgaaccgacatattaactaaaggaagaac

SEQ ID NO: 287021 - DNA, 33 bp, Homo sapien
cttaagcttccctcgacaaaccaatcaactgta

SEQ ID NO: 287022 - DNA, 33 bp, Homo sapien
cttaagcttccctcgataaaccaatcaactgta

SEQ ID NO: 287023 - DNA, 33 bp, Homo sapien
atgcagtaaacctgaacgaagcacagatgaatt

SEQ ID NO: 287024 - DNA, 33 bp, Homo sapien
atgcagtaaacctgaatgaagcacagatgaatt

SEQ ID NO: 287025 - DNA, 33 bp, Homo sapien
ttcagcctggcttaggcagatagtaaatatttt

SEQ ID NO: 287026 - DNA, 33 bp, Homo sapien
ttcagcctggcttaggtagatagtaaatatttt

SEQ ID NO: 287027 - DNA, 33 bp, Homo sapien
taaaataaaagtgcacccaataagctgctatga

SEQ ID NO: 287028 - DNA, 33 bp, Homo sapien
taaaataaaagtgcacgcaataagctgctatga

SEQ ID NO: 287029 - DNA, 33 bp, Homo sapien
tcaccctttcatcaccaatcaatataccacctc

SEQ ID NO: 287030 - DNA, 33 bp, Homo sapien
tcaccctttcatcaccgatcaatataccacctc

SEQ ID NO: 287031 - DNA, 33 bp, Homo sapien
catggatttattacaccctgttcaatgtgtgta

SEQ ID NO: 287032 - DNA, 33 bp, Homo sapien
catggatttattacactctgttcaatgtgtgta

SEQ ID NO: 287033 - DNA, 33 bp, Homo sapien
gggaatgtttatccaactcctgtaccaccatag

SEQ ID NO: 287034 - DNA, 33 bp, Homo sapien
gggaatgtttatccaattcctgtaccaccatag

SEQ ID NO: 287035 - DNA, 33 bp, Homo sapien
aaacaaatcttttagccgaacatattgctacac

SEQ ID NO: 287036 - DNA, 33 bp, Homo sapien
aaacaaatcttttagctgaacatattgctacac

SEQ ID NO: 287037 - DNA, 33 bp, Homo sapien
atccaatagctggtagaaaaaaatgacacaagc

SEQ ID NO: 287038 - DNA, 33 bp, Homo sapien
atccaatagctggtagcaaaaaatgacacaagc

SEQ ID NO: 287039 - DNA, 33 bp, Homo sapien
gctctggtcccatcacagaaatcattggaatgc

SEQ ID NO: 287040 - DNA, 33 bp, Homo sapien
gctctggtcccatcactgaaatcattggaatgc

SEQ ID NO: 287041 - DNA, 33 bp, Homo sapien
ccaactatattttaaccgcctgtgcttgcaaga

SEQ ID NO: 287042 - DNA, 33 bp, Homo sapien
ccaactatattttaactgcctgtgcttgcaaga

SEQ ID NO: 287043 - DNA, 33 bp, Homo sapien
tgatgagatacattctcaagttgtcaaatttgt

SEQ ID NO: 287044 - DNA, 33 bp, Homo sapien
tgatgagatacattcttaagttgtcaaatttgt

SEQ ID NO: 287045 - DNA, 33 bp, Homo sapien
aggataatctatttggaatgaacatttagaaat

SEQ ID NO: 287046 - DNA, 33 bp, Homo sapien
aggataatctatttgggatgaacatttagaaat

SEQ ID NO: 287047 - DNA, 33 bp, Homo sapien
gaattgagttatggaaagaacaatggattagat

SEQ ID NO: 287048 - DNA, 33 bp, Homo sapien
gaattgagttatggaaggaacaatggattagat

SEQ ID NO: 287049 - DNA, 33 bp, Homo sapien
ggaagagtgatcttcacggcacatatgaggaaa

SEQ ID NO: 287050 - DNA, 33 bp, Homo sapien
ggaagagtgatcttcatggcacatatgaggaaa

SEQ ID NO: 287051 - DNA, 33 bp, Homo sapien
tttacactcgtcttccccttcctcatctgaatc

SEQ ID NO: 287052 - DNA, 33 bp, Homo sapien
tttacactcgtcttcctcttcctcatctgaatc

SEQ ID NO: 287053 - DNA, 33 bp, Homo sapien
ttaatgtttcaactacaggagcagtaagttttg

SEQ ID NO: 287054 - DNA, 33 bp, Homo sapien
ttaatgtttcaactacgggagcagtaagttttg

SEQ ID NO: 287055 - DNA, 33 bp, Homo sapien
ttcttcatgctgaataaggtctcttgtctcttg

SEQ ID NO: 287056 - DNA, 33 bp, Homo sapien
ttcttcatgctgaatagggtctcttgtctcttg

SEQ ID NO: 287057 - DNA, 33 bp, Homo sapien
caccccaacaggaatccactggaagcttggctt

SEQ ID NO: 287058 - DNA, 33 bp, Homo sapien
caccccaacaggaatctactggaagcttggctt

SEQ ID NO: 287059 - DNA, 33 bp, Homo sapien
catttgtttaggcctcactaaccatagtaagtc

SEQ ID NO: 287060 - DNA, 33 bp, Homo sapien
catttgtttaggcctcgctaaccatagtaagtc

SEQ ID NO: 287061 - DNA, 33 bp, Homo sapien
aggaattttggagacacagtattgttatttctt

SEQ ID NO: 287062 - DNA, 33 bp, Homo sapien
aggaattttggagacagagtattgttatttctt

SEQ ID NO: 287063 - DNA, 33 bp, Homo sapien
gataaagtggcaaatcagattaaaaagacaaga

SEQ ID NO: 287064 - DNA, 33 bp, Homo sapien
gataaagtggcaaatcggattaaaaagacaaga

SEQ ID NO: 287065 - DNA, 33 bp, Homo sapien
ttctaaatatggaaacaaaaggacaatttttac

SEQ ID NO: 287066 - DNA, 33 bp, Homo sapien
ttctaaatatggaaacgaaaggacaatttttac

SEQ ID NO: 287067 - DNA, 33 bp, Homo sapien
taacagcagacttttcacagaagtcctacaagt

SEQ ID NO: 287068 - DNA, 33 bp, Homo sapien
taacagcagacttttcgcagaagtcctacaagt

SEQ ID NO: 287069 - DNA, 33 bp, Homo sapien
aggtcaaatcacctataaaggaaaaccaagcag

SEQ ID NO: 287070 - DNA, 33 bp, Homo sapien
aggtcaaatcacctatcaaggaaaaccaagcag

SEQ ID NO: 287071 - DNA, 33 bp, Homo sapien
attgatatgttgtaacaaactcctttggcaatt

SEQ ID NO: 287072 - DNA, 33 bp, Homo sapien
attgatatgttgtaacgaactcctttggcaatt

SEQ ID NO: 287073 - DNA, 33 bp, Homo sapien
agaaacaaacaacaaacgaaggtggtgtgtatt

SEQ ID NO: 287074 - DNA, 33 bp, Homo sapien
agaaacaaacaacaaatgaaggtggtgtgtatt

SEQ ID NO: 287075 - DNA, 33 bp, Homo sapien
gcagaattcaagcagtaaaggataatgttttgt

SEQ ID NO: 287076 - DNA, 33 bp, Homo sapien
gcagaattcaagcagtgaaggataatgttttgt

SEQ ID NO: 287077 - DNA, 33 bp, Homo sapien
agggaaacagggagtgcatcttactgggataag

SEQ ID NO: 287078 - DNA, 33 bp, Homo sapien
agggaaacagggagtgtatcttactgggataag

SEQ ID NO: 287079 - DNA, 33 bp, Homo sapien
cagtgactgtatcaaaatggccctgttgccttc

SEQ ID NO: 287080 - DNA, 33 bp, Homo sapien
cagtgactgtatcaaagtggccctgttgccttc

SEQ ID NO: 287081 - DNA, 33 bp, Homo sapien
acttagacgattttcaaaagaagagatacacac

SEQ ID NO: 287082 - DNA, 33 bp, Homo sapien
acttagacgattttcagaagaagagatacacac

SEQ ID NO: 287083 - DNA, 33 bp, Homo sapien
ttcaaagtatgttaaaatgatgcagaacttttt

SEQ ID NO: 287084 - DNA, 33 bp, Homo sapien
ttcaaagtatgttaaagtgatgcagaacttttt

SEQ ID NO: 287085 - DNA, 33 bp, Homo sapien
tagacaaattctgaagccaactgtaggctttta

SEQ ID NO: 287086 - DNA, 33 bp, Homo sapien
tagacaaattctgaaggcaactgtaggctttta

SEQ ID NO: 287087 - DNA, 33 bp, Homo sapien
ggactaattgccataacacatggttattgatgc

SEQ ID NO: 287088 - DNA, 33 bp, Homo sapien
ggactaattgccataatacatggttattgatgc

SEQ ID NO: 287089 - DNA, 33 bp, Homo sapien
gccttaaaagaatgtcaaaagaaagaaggaaag

SEQ ID NO: 287090 - DNA, 33 bp, Homo sapien
gccttaaaagaatgtcgaaagaaagaaggaaag

SEQ ID NO: 287091 - DNA, 33 bp, Homo sapien
gccttttacataacaagttaacaagtttgccaa

SEQ ID NO: 287092 - DNA, 33 bp, Homo sapien
gccttttacataacaatttaacaagtttgccaa

SEQ ID NO: 287093 - DNA, 33 bp, Homo sapien
aaagcagattctagaactgggatctctgatgat

SEQ ID NO: 287094 - DNA, 33 bp, Homo sapien
aaagcagattctagaattgggatctctgatgat

SEQ ID NO: 287095 - DNA, 33 bp, Homo sapien
gcacagactagttaaagcataaacaacgtaaat

SEQ ID NO: 287096 - DNA, 33 bp, Homo sapien
gcacagactagttaaatcataaacaacgtaaat

SEQ ID NO: 287097 - DNA, 33 bp, Homo sapien
catgtgaggaacacagaaagaaggtaccatctc

SEQ ID NO: 287098 - DNA, 33 bp, Homo sapien
catgtgaggaacacagcaagaaggtaccatctc

SEQ ID NO: 287099 - DNA, 33 bp, Homo sapien
ctattaaagaaacaaacctagtgtcagattcta

SEQ ID NO: 287100 - DNA, 33 bp, Homo sapien
ctattaaagaaacaaatctagtgtcagattcta

SEQ ID NO: 287101 - DNA, 33 bp, Homo sapien
agcaactggattgggacagcttttaacacatga

SEQ ID NO: 287102 - DNA, 33 bp, Homo sapien
agcaactggattgggatagcttttaacacatga

SEQ ID NO: 287103 - DNA, 33 bp, Homo sapien
agcagctgctaaagggaccaaataatgtaaccc

SEQ ID NO: 287104 - DNA, 33 bp, Homo sapien
agcagctgctaaaggggccaaataatgtaaccc

SEQ ID NO: 287105 - DNA, 33 bp, Homo sapien
ttcttgacttaaacaccgagccagttttacaga

SEQ ID NO: 287106 - DNA, 33 bp, Homo sapien
ttcttgacttaaacactgagccagttttacaga

SEQ ID NO: 287107 - DNA, 33 bp, Homo sapien
catccaaggacaaggaagcattatggagatgtc

SEQ ID NO: 287108 - DNA, 33 bp, Homo sapien
catccaaggacaaggaggcattatggagatgtc

SEQ ID NO: 287109 - DNA, 33 bp, Homo sapien
gagtgaagaggaaccacaagttctaagcactaa

SEQ ID NO: 287110 - DNA, 33 bp, Homo sapien
gagtgaagaggaaccagaagttctaagcactaa

SEQ ID NO: 287111 - DNA, 33 bp, Homo sapien
cttttgaaccatctcaacacaaaaggactgatt

SEQ ID NO: 287112 - DNA, 33 bp, Homo sapien
cttttgaaccatctcagcacaaaaggactgatt

SEQ ID NO: 287113 - DNA, 33 bp, Homo sapien
accataatccatctaactggcatatctaccacc

SEQ ID NO: 287114 - DNA, 33 bp, Homo sapien
accataatccatctaattggcatatctaccacc

SEQ ID NO: 287115 - DNA, 33 bp, Homo sapien
atcacttcaaatgatgcaatcttcctgtgggat

SEQ ID NO: 287116 - DNA, 33 bp, Homo sapien
atcacttcaaatgatgtaatcttcctgtgggat

SEQ ID NO: 287117 - DNA, 33 bp, Homo sapien
tattgttgtttcttacactacacaggctatgat

SEQ ID NO: 287118 - DNA, 33 bp, Homo sapien
tattgttgtttcttaccctacacaggctatgat

SEQ ID NO: 287119 - DNA, 33 bp, Homo sapien
caaagaacgcttaatggaaggaagaagtattag

SEQ ID NO: 287120 - DNA, 33 bp, Homo sapien
caaagaacgcttaatgtaaggaagaagtattag

SEQ ID NO: 287121 - DNA, 33 bp, Homo sapien
tattgtatttggccatcacataattacttgttc

SEQ ID NO: 287122 - DNA, 33 bp, Homo sapien
tattgtatttggccattacataattacttgttc

SEQ ID NO: 287123 - DNA, 33 bp, Homo sapien
caaggaaaagtgggaacggagctatctctaaaa

SEQ ID NO: 287124 - DNA, 33 bp, Homo sapien
caaggaaaagtgggaatggagctatctctaaaa

SEQ ID NO: 287125 - DNA, 33 bp, Homo sapien
attctaagttcaaccaatcaagtctggaagaag

SEQ ID NO: 287126 - DNA, 33 bp, Homo sapien
attctaagttcaaccagtcaagtctggaagaag

SEQ ID NO: 287127 - DNA, 33 bp, Homo sapien
aatggttaatttctcaggtgtggcaagaaatta

SEQ ID NO: 287128 - DNA, 33 bp, Homo sapien
aatggttaatttctcatgtgtggcaagaaatta

SEQ ID NO: 287129 - DNA, 33 bp, Homo sapien
attgtctgtttctgtccactttatcaaagaaca

SEQ ID NO: 287130 - DNA, 33 bp, Homo sapien
attgtctgtttctgtcgactttatcaaagaaca

SEQ ID NO: 287131 - DNA, 33 bp, Homo sapien
acttataagttagacaaaagcattgagtacata

SEQ ID NO: 287132 - DNA, 33 bp, Homo sapien
acttataagttagacataagcattgagtacata

SEQ ID NO: 287133 - DNA, 33 bp, Homo sapien
aggggtaaagcatataagagggtcttcaggcca

SEQ ID NO: 287134 - DNA, 33 bp, Homo sapien
aggggtaaagcatatatgagggtcttcaggcca

SEQ ID NO: 287135 - DNA, 33 bp, Homo sapien
ctgaagtcttaatgtaaacaagcctgagagata

SEQ ID NO: 287136 - DNA, 33 bp, Homo sapien
ctgaagtcttaatgtagacaagcctgagagata

SEQ ID NO: 287137 - DNA, 33 bp, Homo sapien
aggtaatgtagaaatactaccctgaagctcagg

SEQ ID NO: 287138 - DNA, 33 bp, Homo sapien
aggtaatgtagaaatagtaccctgaagctcagg

SEQ ID NO: 287139 - DNA, 33 bp, Homo sapien
tatgactacctccataaccataaataaataata

SEQ ID NO: 287140 - DNA, 33 bp, Homo sapien
tatgactacctccatagccataaataaataata

SEQ ID NO: 287141 - DNA, 33 bp, Homo sapien
acattgcctggtatcaaatggatttaggactga

SEQ ID NO: 287142 - DNA, 33 bp, Homo sapien
acattgcctggtatcagatggatttaggactga

SEQ ID NO: 287143 - DNA, 33 bp, Homo sapien
ctgttcttttctaaatcactatatcaaatgtcc

SEQ ID NO: 287144 - DNA, 33 bp, Homo sapien
ctgttcttttctaaatgactatatcaaatgtcc

SEQ ID NO: 287145 - DNA, 33 bp, Homo sapien
cctcaacaatacaggcaagtgcattaatagcat

SEQ ID NO: 287146 - DNA, 33 bp, Homo sapien
cctcaacaatacaggccagtgcattaatagcat

SEQ ID NO: 287147 - DNA, 33 bp, Homo sapien
tgaagtctggctgggacatatctgattagtggt

SEQ ID NO: 287148 - DNA, 33 bp, Homo sapien
tgaagtctggctgggatatatctgattagtggt

SEQ ID NO: 287149 - DNA, 33 bp, Homo sapien
cttagctctctcactaaccattggacagccaca

SEQ ID NO: 287150 - DNA, 33 bp, Homo sapien
cttagctctctcactagccattggacagccaca

SEQ ID NO: 287151 - DNA, 33 bp, Homo sapien
ctgttgttgcccatacacatgctggagagatcc

SEQ ID NO: 287152 - DNA, 33 bp, Homo sapien
ctgttgttgcccatactcatgctggagagatcc

SEQ ID NO: 287153 - DNA, 33 bp, Homo sapien
tatgagagtgaacaaaataatagaatagaaagt

SEQ ID NO: 287154 - DNA, 33 bp, Homo sapien
tatgagagtgaacaaattaatagaatagaaagt

SEQ ID NO: 287155 - DNA, 33 bp, Homo sapien
tctattgcacaaaccagacacacaattagtaga

SEQ ID NO: 287156 - DNA, 33 bp, Homo sapien
tctattgcacaaaccatacacacaattagtaga

SEQ ID NO: 287157 - DNA, 33 bp, Homo sapien
taatggcattggcagcaatctggatggagttgg

SEQ ID NO: 287158 - DNA, 33 bp, Homo sapien
taatggcattggcagcgatctggatggagttgg

SEQ ID NO: 287159 - DNA, 33 bp, Homo sapien
gacacaaaatttttaaatgatttgaacacacaa

SEQ ID NO: 287160 - DNA, 33 bp, Homo sapien
gacacaaaatttttaattgatttgaacacacaa

SEQ ID NO: 287161 - DNA, 33 bp, Homo sapien
actttcaatattccctcaataccttacactgtt

SEQ ID NO: 287162 - DNA, 33 bp, Homo sapien
actttcaatattccctgaataccttacactgtt

SEQ ID NO: 287163 - DNA, 33 bp, Homo sapien
caaatggtggtcaaaacaactataataatgaga

SEQ ID NO: 287164 - DNA, 33 bp, Homo sapien
caaatggtggtcaaaataactataataatgaga

SEQ ID NO: 287165 - DNA, 33 bp, Homo sapien
gaacttgaatgaattacaagaacttccaaaaca

SEQ ID NO: 287166 - DNA, 33 bp, Homo sapien
gaacttgaatgaattataagaacttccaaaaca

SEQ ID NO: 287167 - DNA, 33 bp, Homo sapien
aatgatgtttagtcaaaaattttggaagtggat

SEQ ID NO: 287168 - DNA, 33 bp, Homo sapien
aatgatgtttagtcaataattttggaagtggat

SEQ ID NO: 287169 - DNA, 33 bp, Homo sapien
aatttgaagcctctggacaacccacgtcaaaaa

SEQ ID NO: 287170 - DNA, 33 bp, Homo sapien
aatttgaagcctctggtcaacccacgtcaaaaa

SEQ ID NO: 287171 - DNA, 33 bp, Homo sapien
gtggtcttttgtgatacctcccaattttaaatg

SEQ ID NO: 287172 - DNA, 33 bp, Homo sapien
gtggtcttttgtgatatctcccaattttaaatg

SEQ ID NO: 287173 - DNA, 33 bp, Homo sapien
tcaaggttctataatacgaaatggcagtcccag

SEQ ID NO: 287174 - DNA, 33 bp, Homo sapien
tcaaggttctataatatgaaatggcagtcccag

SEQ ID NO: 287175 - DNA, 33 bp, Homo sapien
atgattttgaaggaaacaacagcttatatttat

SEQ ID NO: 287176 - DNA, 33 bp, Homo sapien
atgattttgaaggaaataacagcttatatttat

SEQ ID NO: 287177 - DNA, 33 bp, Homo sapien
aggggaaactctgtcagctacttgcttccttca

SEQ ID NO: 287178 - DNA, 33 bp, Homo sapien
aggggaaactctgtcatctacttgcttccttca

SEQ ID NO: 287179 - DNA, 33 bp, Homo sapien
ccattatggttcagcccatagacaggacacagg

SEQ ID NO: 287180 - DNA, 33 bp, Homo sapien
ccattatggttcagcctatagacaggacacagg

SEQ ID NO: 287181 - DNA, 33 bp, Homo sapien
cagccagacattggtgaaaacacatcaatcatc

SEQ ID NO: 287182 - DNA, 33 bp, Homo sapien
cagccagacattggtgcaaacacatcaatcatc

SEQ ID NO: 287183 - DNA, 33 bp, Homo sapien
cttatgtgactaaatccacctggaattggcaag

SEQ ID NO: 287184 - DNA, 33 bp, Homo sapien
cttatgtgactaaatctacctggaattggcaag

SEQ ID NO: 287185 - DNA, 33 bp, Homo sapien
aaaataaaggaggttcaatttcttatacctgag

SEQ ID NO: 287186 - DNA, 33 bp, Homo sapien
aaaataaaggaggttccatttcttatacctgag

SEQ ID NO: 287187 - DNA, 33 bp, Homo sapien
ttacttaaccatcatgaaaaactattatgtatt

SEQ ID NO: 287188 - DNA, 33 bp, Homo sapien
ttacttaaccatcatgcaaaactattatgtatt

SEQ ID NO: 287189 - DNA, 33 bp, Homo sapien
acatggaacttccaaccggctagctcagacttt

SEQ ID NO: 287190 - DNA, 33 bp, Homo sapien
acatggaacttccaactggctagctcagacttt

SEQ ID NO: 287191 - DNA, 33 bp, Homo sapien
ttaaaatcaaccaacccagtaagatcatattgg

SEQ ID NO: 287192 - DNA, 33 bp, Homo sapien
ttaaaatcaaccaacctagtaagatcatattgg

SEQ ID NO: 287193 - DNA, 33 bp, Homo sapien
ggaaataccaggtaaaactgattagaatgtggt

SEQ ID NO: 287194 - DNA, 33 bp, Homo sapien
ggaaataccaggtaaagctgattagaatgtggt

SEQ ID NO: 287195 - DNA, 33 bp, Homo sapien
gccaatgtgatttatgaagatttctgaaaaaaa

SEQ ID NO: 287196 - DNA, 33 bp, Homo sapien
gccaatgtgatttatggagatttctgaaaaaaa

SEQ ID NO: 287197 - DNA, 33 bp, Homo sapien
taggcattgtcatgagaccttagctcctggaac

SEQ ID NO: 287198 - DNA, 33 bp, Homo sapien
taggcattgtcatgaggccttagctcctggaac

SEQ ID NO: 287199 - DNA, 33 bp, Homo sapien
gggtccagctgaaagaccatatcctttgccttc

SEQ ID NO: 287200 - DNA, 33 bp, Homo sapien
gggtccagctgaaagatcatatcctttgccttc

SEQ ID NO: 287201 - DNA, 33 bp, Homo sapien
ccctattcacacacccactacattgctactaaa

SEQ ID NO: 287202 - DNA, 33 bp, Homo sapien
ccctattcacacacccgctacattgctactaaa

SEQ ID NO: 287203 - DNA, 33 bp, Homo sapien
aagtcccctctacgtcacttcatgagtactggg

SEQ ID NO: 287204 - DNA, 33 bp, Homo sapien
aagtcccctctacgtcccttcatgagtactggg

SEQ ID NO: 287205 - DNA, 33 bp, Homo sapien
tccccagatcgcagcccgctccagtacttgggc

SEQ ID NO: 287206 - DNA, 33 bp, Homo sapien
tccccagatcgcagcctgctccagtacttgggc

SEQ ID NO: 287207 - DNA, 33 bp, Homo sapien
gtgctttggctccctaagtgtgagtgcaagcag

SEQ ID NO: 287208 - DNA, 33 bp, Homo sapien
gtgctttggctccctaggtgtgagtgcaagcag

SEQ ID NO: 287209 - DNA, 33 bp, Homo sapien
aacatttttcactatacaccaggttgacacctc

SEQ ID NO: 287210 - DNA, 33 bp, Homo sapien
aacatttttcactatataccaggttgacacctc

SEQ ID NO: 287211 - DNA, 33 bp, Homo sapien
taggagataaatgtgaataatgccagaaagtct

SEQ ID NO: 287212 - DNA, 33 bp, Homo sapien
taggagataaatgtgactaatgccagaaagtct

SEQ ID NO: 287213 - DNA, 33 bp, Homo sapien
gttagaaagcccagacccttgaaaaactaccaa

SEQ ID NO: 287214 - DNA, 33 bp, Homo sapien
gttagaaagcccagactcttgaaaaactaccaa

SEQ ID NO: 287215 - DNA, 33 bp, Homo sapien
gttttagcataaaaaagtcacaaccagaaatta

SEQ ID NO: 287216 - DNA, 33 bp, Homo sapien
gttttagcataaaaaattcacaaccagaaatta

SEQ ID NO: 287217 - DNA, 33 bp, Homo sapien
ttttgaattctacttacagttctcactgaagca

SEQ ID NO: 287218 - DNA, 33 bp, Homo sapien
ttttgaattctacttatagttctcactgaagca

SEQ ID NO: 287219 - DNA, 33 bp, Homo sapien
gacagttgataaaatgaaggcgtgacatgtatc

SEQ ID NO: 287220 - DNA, 33 bp, Homo sapien
gacagttgataaaatgcaggcgtgacatgtatc

SEQ ID NO: 287221 - DNA, 33 bp, Homo sapien
tattattttagacaacaagtgctgcagagggaa

SEQ ID NO: 287222 - DNA, 33 bp, Homo sapien
tattattttagacaacgagtgctgcagagggaa

SEQ ID NO: 287223 - DNA, 33 bp, Homo sapien
agctccccatatcctccgagctttgttctgcct

SEQ ID NO: 287224 - DNA, 33 bp, Homo sapien
agctccccatatcctctgagctttgttctgcct

SEQ ID NO: 287225 - DNA, 33 bp, Homo sapien
gtcagaccactctgataagatgcacagaatgcc

SEQ ID NO: 287226 - DNA, 33 bp, Homo sapien
gtcagaccactctgatgagatgcacagaatgcc

SEQ ID NO: 287227 - DNA, 33 bp, Homo sapien
cctacaaggagtcaacagtcagaccactctgat

SEQ ID NO: 287228 - DNA, 33 bp, Homo sapien
cctacaaggagtcaacggtcagaccactctgat

SEQ ID NO: 287229 - DNA, 33 bp, Homo sapien
caagagtctcgttacaataacctccttgcttca

SEQ ID NO: 287230 - DNA, 33 bp, Homo sapien
caagagtctcgttacattaacctccttgcttca

SEQ ID NO: 287231 - DNA, 33 bp, Homo sapien
taactttggatggctacgactcctgaagggtcc

SEQ ID NO: 287232 - DNA, 33 bp, Homo sapien
taactttggatggctatgactcctgaagggtcc

SEQ ID NO: 287233 - DNA, 33 bp, Homo sapien
ctaactccagcctacacgtgactcagcttctct

SEQ ID NO: 287234 - DNA, 33 bp, Homo sapien
ctaactccagcctacaggtgactcagcttctct

SEQ ID NO: 287235 - DNA, 33 bp, Homo sapien
cctctgtcttacaatacagctgtcaccacaatt

SEQ ID NO: 287236 - DNA, 33 bp, Homo sapien
cctctgtcttacaatatagctgtcaccacaatt

SEQ ID NO: 287237 - DNA, 33 bp, Homo sapien
aattctatataaaggaaagaactgatacctcta

SEQ ID NO: 287238 - DNA, 33 bp, Homo sapien
aattctatataaaggagagaactgatacctcta

SEQ ID NO: 287239 - DNA, 33 bp, Homo sapien
tgtttgcaggaagcaccagatttcagactccag

SEQ ID NO: 287240 - DNA, 33 bp, Homo sapien
tgtttgcaggaagcacgagatttcagactccag

SEQ ID NO: 287241 - DNA, 33 bp, Homo sapien
gaaattaaattacccacgacagcccagtgcagt

SEQ ID NO: 287242 - DNA, 33 bp, Homo sapien
gaaattaaattacccatgacagcccagtgcagt

SEQ ID NO: 287243 - DNA, 33 bp, Homo sapien
tttggatgattaactacgtggtcactgccatca

SEQ ID NO: 287244 - DNA, 33 bp, Homo sapien
tttggatgattaactatgtggtcactgccatca

SEQ ID NO: 287245 - DNA, 33 bp, Homo sapien
tacaagaaagactgaaagggagatttggacatg

SEQ ID NO: 287246 - DNA, 33 bp, Homo sapien
tacaagaaagactgaatgggagatttggacatg

SEQ ID NO: 287247 - DNA, 33 bp, Homo sapien
tgcattgttttttatacggtttctccagctgca

SEQ ID NO: 287248 - DNA, 33 bp, Homo sapien
tgcattgttttttatatggtttctccagctgca

SEQ ID NO: 287249 - DNA, 33 bp, Homo sapien
gtttgccattcaaatactagattggaagtagtt

SEQ ID NO: 287250 - DNA, 33 bp, Homo sapien
gtttgccattcaaatattagattggaagtagtt

SEQ ID NO: 287251 - DNA, 33 bp, Homo sapien
cacagtacattgtttacgaaatagccagttgga

SEQ ID NO: 287252 - DNA, 33 bp, Homo sapien
cacagtacattgtttatgaaatagccagttgga

SEQ ID NO: 287253 - DNA, 33 bp, Homo sapien
acaatgtactgtgcaaacttttctgtatcaggc

SEQ ID NO: 287254 - DNA, 33 bp, Homo sapien
acaatgtactgtgcaaccttttctgtatcaggc

SEQ ID NO: 287255 - DNA, 33 bp, Homo sapien
tacagtttagaaggcaatataccatggatgcat

SEQ ID NO: 287256 - DNA, 33 bp, Homo sapien
tacagtttagaaggcagtataccatggatgcat

SEQ ID NO: 287257 - DNA, 33 bp, Homo sapien
tctcttactgagtataagctacccattgctacc

SEQ ID NO: 287258 - DNA, 33 bp, Homo sapien
tctcttactgagtatacgctacccattgctacc

SEQ ID NO: 287259 - DNA, 33 bp, Homo sapien
acatccaaatctggggaaacaattattgctcct

SEQ ID NO: 287260 - DNA, 33 bp, Homo sapien
acatccaaatctgggggaacaattattgctcct

SEQ ID NO: 287261 - DNA, 33 bp, Homo sapien
ctctaaaaaacagcaccaagaatagatgggcta

SEQ ID NO: 287262 - DNA, 33 bp, Homo sapien
ctctaaaaaacagcacgaagaatagatgggcta

SEQ ID NO: 287263 - DNA, 33 bp, Homo sapien
agggctatgcatttcaaattagacagtatttgc

SEQ ID NO: 287264 - DNA, 33 bp, Homo sapien
agggctatgcatttcacattagacagtatttgc

SEQ ID NO: 287265 - DNA, 33 bp, Homo sapien
acaccttctgaatgcccgactttgttgagacac

SEQ ID NO: 287266 - DNA, 33 bp, Homo sapien
acaccttctgaatgcctgactttgttgagacac

SEQ ID NO: 287267 - DNA, 33 bp, Homo sapien
ccacttgctttttaagactcccctcctgggatc

SEQ ID NO: 287268 - DNA, 33 bp, Homo sapien
ccacttgctttttaaggctcccctcctgggatc

SEQ ID NO: 287269 - DNA, 33 bp, Homo sapien
gagctggatgaaataacatcacccatttaggtg

SEQ ID NO: 287270 - DNA, 33 bp, Homo sapien
gagctggatgaaataatatcacccatttaggtg

SEQ ID NO: 287271 - DNA, 33 bp, Homo sapien
attcattaaattctcccaatgcttgctgatgta

SEQ ID NO: 287272 - DNA, 33 bp, Homo sapien
attcattaaattctcctaatgcttgctgatgta

SEQ ID NO: 287273 - DNA, 33 bp, Homo sapien
ttatacactacaaatgaaaatagcaggaggaaa

SEQ ID NO: 287274 - DNA, 33 bp, Homo sapien
ttatacactacaaatgcaaatagcaggaggaaa

SEQ ID NO: 287275 - DNA, 33 bp, Homo sapien
aacctgcagcgaataaaaaccacctaagagcaa

SEQ ID NO: 287276 - DNA, 33 bp, Homo sapien
aacctgcagcgaataagaaccacctaagagcaa

SEQ ID NO: 287277 - DNA, 33 bp, Homo sapien
agcagcattggtgaataaaattgttcaattttg

SEQ ID NO: 287278 - DNA, 33 bp, Homo sapien
agcagcattggtgaattaaattgttcaattttg

SEQ ID NO: 287279 - DNA, 33 bp, Homo sapien
ttgacagacataacaaccacctaaaacactttc

SEQ ID NO: 287280 - DNA, 33 bp, Homo sapien
ttgacagacataacaatcacctaaaacactttc

SEQ ID NO: 287281 - DNA, 33 bp, Homo sapien
atcaaaacaggataaacagtgtctcctactgag

SEQ ID NO: 287282 - DNA, 33 bp, Homo sapien
atcaaaacaggataaagagtgtctcctactgag

SEQ ID NO: 287283 - DNA, 33 bp, Homo sapien
cttcagagggcccttcacccagtggccattctg

SEQ ID NO: 287284 - DNA, 33 bp, Homo sapien
cttcagagggcccttcgcccagtggccattctg

SEQ ID NO: 287285 - DNA, 33 bp, Homo sapien
cccctgtaattatgaccggtaagtagtcagcaa

SEQ ID NO: 287286 - DNA, 33 bp, Homo sapien
cccctgtaattatgactggtaagtagtcagcaa

SEQ ID NO: 287287 - DNA, 33 bp, Homo sapien
tacattctagtggtagacagataataaagaaag

SEQ ID NO: 287288 - DNA, 33 bp, Homo sapien
tacattctagtggtaggcagataataaagaaag

SEQ ID NO: 287289 - DNA, 33 bp, Homo sapien
ccaggcacactacccacgataaagcagattctt

SEQ ID NO: 287290 - DNA, 33 bp, Homo sapien
ccaggcacactacccatgataaagcagattctt

SEQ ID NO: 287291 - DNA, 33 bp, Homo sapien
gtccttagcgctacaccgtactgacagtagcca

SEQ ID NO: 287292 - DNA, 33 bp, Homo sapien
gtccttagcgctacactgtactgacagtagcca

SEQ ID NO: 287293 - DNA, 33 bp, Homo sapien
gatagaaatcaaggcacatatggctactgtcag

SEQ ID NO: 287294 - DNA, 33 bp, Homo sapien
gatagaaatcaaggcatatatggctactgtcag

SEQ ID NO: 287295 - DNA, 33 bp, Homo sapien
tagtagacaatttccaaagtcttatccaagtgt

SEQ ID NO: 287296 - DNA, 33 bp, Homo sapien
tagtagacaatttccatagtcttatccaagtgt

SEQ ID NO: 287297 - DNA, 33 bp, Homo sapien
attcaatgatcaaggaatacaggaaagaagcac

SEQ ID NO: 287298 - DNA, 33 bp, Homo sapien
attcaatgatcaaggagtacaggaaagaagcac

SEQ ID NO: 287299 - DNA, 33 bp, Homo sapien
gcattaaaataatgtgcatcctaagcaaccaac

SEQ ID NO: 287300 - DNA, 33 bp, Homo sapien
gcattaaaataatgtgtatcctaagcaaccaac

SEQ ID NO: 287301 - DNA, 33 bp, Homo sapien
acatgtggaatgcaaacatgatctggatttcca

SEQ ID NO: 287302 - DNA, 33 bp, Homo sapien
acatgtggaatgcaaatatgatctggatttcca

SEQ ID NO: 287303 - DNA, 33 bp, Homo sapien
cacacatttaatctcaagtcattttcagatagg

SEQ ID NO: 287304 - DNA, 33 bp, Homo sapien
cacacatttaatctcaggtcattttcagatagg

SEQ ID NO: 287305 - DNA, 33 bp, Homo sapien
cctgtggtccccatcaataatagagctacgaat

SEQ ID NO: 287306 - DNA, 33 bp, Homo sapien
cctgtggtccccatcactaatagagctacgaat

SEQ ID NO: 287307 - DNA, 33 bp, Homo sapien
tcagcacactatgtaccgcatttacttaattta

SEQ ID NO: 287308 - DNA, 33 bp, Homo sapien
tcagcacactatgtactgcatttacttaattta

SEQ ID NO: 287309 - DNA, 33 bp, Homo sapien
aaatcctacctccactcacaactgggcttgcaa

SEQ ID NO: 287310 - DNA, 33 bp, Homo sapien
aaatcctacctccactgacaactgggcttgcaa

SEQ ID NO: 287311 - DNA, 33 bp, Homo sapien
aactcttttctgaaaaaccctttgataatgatg

SEQ ID NO: 287312 - DNA, 33 bp, Homo sapien
aactcttttctgaaaagccctttgataatgatg

SEQ ID NO: 287313 - DNA, 33 bp, Homo sapien
gtcattcaacaagtgtaaacttagaaaaacttc

SEQ ID NO: 287314 - DNA, 33 bp, Homo sapien
gtcattcaacaagtgtgaacttagaaaaacttc

SEQ ID NO: 287315 - DNA, 33 bp, Homo sapien
tgcttccatgatctccaaagtaagggaagaaag

SEQ ID NO: 287316 - DNA, 33 bp, Homo sapien
tgcttccatgatctcccaagtaagggaagaaag

SEQ ID NO: 287317 - DNA, 33 bp, Homo sapien
ggagaggcagaaaggaaaactaattaatggctc

SEQ ID NO: 287318 - DNA, 33 bp, Homo sapien
ggagaggcagaaaggagaactaattaatggctc

SEQ ID NO: 287319 - DNA, 33 bp, Homo sapien
aatataagcagaaaaaatgcttttgtcttttat

SEQ ID NO: 287320 - DNA, 33 bp, Homo sapien
aatataagcagaaaaagtgcttttgtcttttat

SEQ ID NO: 287321 - DNA, 33 bp, Homo sapien
tttcatttagaccaccaatgaatccttttataa

SEQ ID NO: 287322 - DNA, 33 bp, Homo sapien
tttcatttagaccaccgatgaatccttttataa

SEQ ID NO: 287323 - DNA, 33 bp, Homo sapien
tggttttcttacatagacgagttcagagaaagt

SEQ ID NO: 287324 - DNA, 33 bp, Homo sapien
tggttttcttacataggcgagttcagagaaagt

SEQ ID NO: 287325 - DNA, 33 bp, Homo sapien
ttctaaatcaatgacacctgttcacatgttaag

SEQ ID NO: 287326 - DNA, 33 bp, Homo sapien
ttctaaatcaatgacatctgttcacatgttaag

SEQ ID NO: 287327 - DNA, 33 bp, Homo sapien
tcacatgttaagctgcccttctcaaggctaact

SEQ ID NO: 287328 - DNA, 33 bp, Homo sapien
tcacatgttaagctgctcttctcaaggctaact

SEQ ID NO: 287329 - DNA, 33 bp, Homo sapien
tatttagaacattacacaactgagttgataaag

SEQ ID NO: 287330 - DNA, 33 bp, Homo sapien
tatttagaacattacataactgagttgataaag

SEQ ID NO: 287331 - DNA, 33 bp, Homo sapien
acgtgatatacgtgacaaaaacaaatgagtgaa

SEQ ID NO: 287332 - DNA, 33 bp, Homo sapien
acgtgatatacgtgacgaaaacaaatgagtgaa

SEQ ID NO: 287333 - DNA, 33 bp, Homo sapien
ccatagtagtactccaccagcacatgagaataa

SEQ ID NO: 287334 - DNA, 33 bp, Homo sapien
ccatagtagtactccatcagcacatgagaataa

SEQ ID NO: 287335 - DNA, 33 bp, Homo sapien
cacttttataaggttaacagatcagaggcaggg

SEQ ID NO: 287336 - DNA, 33 bp, Homo sapien
cacttttataaggttatcagatcagaggcaggg

SEQ ID NO: 287337 - DNA, 33 bp, Homo sapien
agattcagttgacttacggaaattttcagtgct

SEQ ID NO: 287338 - DNA, 33 bp, Homo sapien
agattcagttgacttatggaaattttcagtgct

SEQ ID NO: 287339 - DNA, 33 bp, Homo sapien
aagagccagcaagaacagagaagcactgaaaat

SEQ ID NO: 287340 - DNA, 33 bp, Homo sapien
aagagccagcaagaacggagaagcactgaaaat

SEQ ID NO: 287341 - DNA, 33 bp, Homo sapien
aatatgtgactatgaaacatgattattttcttg

SEQ ID NO: 287342 - DNA, 33 bp, Homo sapien
aatatgtgactatgaagcatgattattttcttg

SEQ ID NO: 287343 - DNA, 33 bp, Homo sapien
taaactgttttttccacgaatgagagaaaggaa

SEQ ID NO: 287344 - DNA, 33 bp, Homo sapien
taaactgttttttccatgaatgagagaaaggaa

SEQ ID NO: 287345 - DNA, 33 bp, Homo sapien
atgagataccactttacgaccactgcgatgact

SEQ ID NO: 287346 - DNA, 33 bp, Homo sapien
atgagataccactttatgaccactgcgatgact

SEQ ID NO: 287347 - DNA, 33 bp, Homo sapien
ggagtgagcaaactgcaaggtatcagccctgct

SEQ ID NO: 287348 - DNA, 33 bp, Homo sapien
ggagtgagcaaactgcgaggtatcagccctgct

SEQ ID NO: 287349 - DNA, 33 bp, Homo sapien
ctaggcaattggaggagtatgaacaccaaccca

SEQ ID NO: 287350 - DNA, 33 bp, Homo sapien
ctaggcaattggaggattatgaacaccaaccca

SEQ ID NO: 287351 - DNA, 33 bp, Homo sapien
taaacttagtttgtaccctgtattaactgaacc

SEQ ID NO: 287352 - DNA, 33 bp, Homo sapien
taaacttagtttgtactctgtattaactgaacc

SEQ ID NO: 287353 - DNA, 33 bp, Homo sapien
aacagcactagggttaaacataactttgacttg

SEQ ID NO: 287354 - DNA, 33 bp, Homo sapien
aacagcactagggttagacataactttgacttg

SEQ ID NO: 287355 - DNA, 33 bp, Homo sapien
attgatggcagagcaaaccttcagagtagtgag

SEQ ID NO: 287356 - DNA, 33 bp, Homo sapien
attgatggcagagcaagccttcagagtagtgag

SEQ ID NO: 287357 - DNA, 33 bp, Homo sapien
acccataaaattatgcaaaaattggtttgaggg

SEQ ID NO: 287358 - DNA, 33 bp, Homo sapien
acccataaaattatgccaaaattggtttgaggg

SEQ ID NO: 287359 - DNA, 33 bp, Homo sapien
caaacaaacaaaaacacatttggcattgcttgt

SEQ ID NO: 287360 - DNA, 33 bp, Homo sapien
caaacaaacaaaaacatatttggcattgcttgt

SEQ ID NO: 287361 - DNA, 33 bp, Homo sapien
tgttttcaaggccaagcctccttttcaggcaac

SEQ ID NO: 287362 - DNA, 33 bp, Homo sapien
tgttttcaaggccaagtctccttttcaggcaac

SEQ ID NO: 287363 - DNA, 33 bp, Homo sapien
tcatatgctaacttggaaaaattattcattttt

SEQ ID NO: 287364 - DNA, 33 bp, Homo sapien
tcatatgctaacttgggaaaattattcattttt

SEQ ID NO: 287365 - DNA, 33 bp, Homo sapien
gtaatttttttagtcaaatctgcccagaacatc

SEQ ID NO: 287366 - DNA, 33 bp, Homo sapien
gtaatttttttagtcagatctgcccagaacatc

SEQ ID NO: 287367 - DNA, 33 bp, Homo sapien
taccagtaaatgcactaaagggtaactttgaga

SEQ ID NO: 287368 - DNA, 33 bp, Homo sapien
taccagtaaatgcactgaagggtaactttgaga

SEQ ID NO: 287369 - DNA, 33 bp, Homo sapien
aatcaaagacaaacaggagtatgcttcctaagt

SEQ ID NO: 287370 - DNA, 33 bp, Homo sapien
aatcaaagacaaacagtagtatgcttcctaagt

SEQ ID NO: 287371 - DNA, 33 bp, Homo sapien
tattagtaggagtctacagcttccattagagtc

SEQ ID NO: 287372 - DNA, 33 bp, Homo sapien
tattagtaggagtctatagcttccattagagtc

SEQ ID NO: 287373 - DNA, 33 bp, Homo sapien
tctcttgggattcagaataaattctcttttctt

SEQ ID NO: 287374 - DNA, 33 bp, Homo sapien
tctcttgggattcagagtaaattctcttttctt

SEQ ID NO: 287375 - DNA, 33 bp, Homo sapien
tatcagagtatgggacagaatatttaaaagttg

SEQ ID NO: 287376 - DNA, 33 bp, Homo sapien
tatcagagtatgggacggaatatttaaaagttg

SEQ ID NO: 287377 - DNA, 33 bp, Homo sapien
cttcaaagattgaatgccatcccactctagccc

SEQ ID NO: 287378 - DNA, 33 bp, Homo sapien
cttcaaagattgaatgtcatcccactctagccc

SEQ ID NO: 287379 - DNA, 33 bp, Homo sapien
aggatgacaataatacaggtagtttgaatgata

SEQ ID NO: 287380 - DNA, 33 bp, Homo sapien
aggatgacaataatactggtagtttgaatgata

SEQ ID NO: 287381 - DNA, 33 bp, Homo sapien
gctcaacacaataatcagaaatcttccaacttt

SEQ ID NO: 287382 - DNA, 33 bp, Homo sapien
gctcaacacaataatcggaaatcttccaacttt

SEQ ID NO: 287383 - DNA, 33 bp, Homo sapien
ttacaaagaaagcaagactcagactgaattcag

SEQ ID NO: 287384 - DNA, 33 bp, Homo sapien
ttacaaagaaagcaaggctcagactgaattcag

SEQ ID NO: 287385 - DNA, 33 bp, Homo sapien
tctactagccagtaaacgtctgaatgtgtggct

SEQ ID NO: 287386 - DNA, 33 bp, Homo sapien
tctactagccagtaaatgtctgaatgtgtggct

SEQ ID NO: 287387 - DNA, 33 bp, Homo sapien
actactctgagaccacaaaaaaaatcgaccaag

SEQ ID NO: 287388 - DNA, 33 bp, Homo sapien
actactctgagaccacgaaaaaaatcgaccaag

SEQ ID NO: 287389 - DNA, 33 bp, Homo sapien
acagaataccaacctcagacaagactactctga

SEQ ID NO: 287390 - DNA, 33 bp, Homo sapien
acagaataccaacctcggacaagactactctga

SEQ ID NO: 287391 - DNA, 33 bp, Homo sapien
aggaaatggagaacagacaaatattcagctagt

SEQ ID NO: 287392 - DNA, 33 bp, Homo sapien
aggaaatggagaacaggcaaatattcagctagt

SEQ ID NO: 287393 - DNA, 33 bp, Homo sapien
atgtaatatttctgtggattgtgctgcggctgt

SEQ ID NO: 287394 - DNA, 33 bp, Homo sapien
atgtaatatttctgtgtattgtgctgcggctgt

SEQ ID NO: 287395 - DNA, 33 bp, Homo sapien
ctgctatttgtaggggaacttggaaccctcaag

SEQ ID NO: 287396 - DNA, 33 bp, Homo sapien
ctgctatttgtagggggacttggaaccctcaag

SEQ ID NO: 287397 - DNA, 33 bp, Homo sapien
aagtcgtggaactaacagaaggttttcactgat

SEQ ID NO: 287398 - DNA, 33 bp, Homo sapien
aagtcgtggaactaacggaaggttttcactgat

SEQ ID NO: 287399 - DNA, 33 bp, Homo sapien
agagcaaaatatgctcaagtggttccgtatatc

SEQ ID NO: 287400 - DNA, 33 bp, Homo sapien
agagcaaaatatgctccagtggttccgtatatc

SEQ ID NO: 287401 - DNA, 33 bp, Homo sapien
tatgcgctacttcaaacaatctttaactcctag

SEQ ID NO: 287402 - DNA, 33 bp, Homo sapien
tatgcgctacttcaaataatctttaactcctag

SEQ ID NO: 287403 - DNA, 33 bp, Homo sapien
acaatgagtaatgaccaattcaattaatatcat

SEQ ID NO: 287404 - DNA, 33 bp, Homo sapien
acaatgagtaatgaccgattcaattaatatcat

SEQ ID NO: 287405 - DNA, 33 bp, Homo sapien
tctggcagttatttgacattggaacagcaccat

SEQ ID NO: 287406 - DNA, 33 bp, Homo sapien
tctggcagttatttgatattggaacagcaccat

SEQ ID NO: 287407 - DNA, 33 bp, Homo sapien
aggcaaaaggctgctacaagtgacgacagagga

SEQ ID NO: 287408 - DNA, 33 bp, Homo sapien
aggcaaaaggctgctataagtgacgacagagga

SEQ ID NO: 287409 - DNA, 33 bp, Homo sapien
cctagaacactcatacccaatggactcatgata

SEQ ID NO: 287410 - DNA, 33 bp, Homo sapien
cctagaacactcatactcaatggactcatgata

SEQ ID NO: 287411 - DNA, 33 bp, Homo sapien
gtgctaaaatataagccccataaagacacctat

SEQ ID NO: 287412 - DNA, 33 bp, Homo sapien
gtgctaaaatataagctccataaagacacctat

SEQ ID NO: 287413 - DNA, 33 bp, Homo sapien
aaaaatgcgattttcaggttatgcaatagatgc

SEQ ID NO: 287414 - DNA, 33 bp, Homo sapien
aaaaatgcgattttcatgttatgcaatagatgc

SEQ ID NO: 287415 - DNA, 33 bp, Homo sapien
tcttatgataaagcaaacgacaatacttttgga

SEQ ID NO: 287416 - DNA, 33 bp, Homo sapien
tcttatgataaagcaaccgacaatacttttgga

SEQ ID NO: 287417 - DNA, 33 bp, Homo sapien
gataagagatatcagaaatttatgacgattccc

SEQ ID NO: 287418 - DNA, 33 bp, Homo sapien
gataagagatatcagacatttatgacgattccc

SEQ ID NO: 287419 - DNA, 33 bp, Homo sapien
atgggaaagaataataccagagaggaaatgaac

SEQ ID NO: 287420 - DNA, 33 bp, Homo sapien
atgggaaagaataatatcagagaggaaatgaac

SEQ ID NO: 287421 - DNA, 33 bp, Homo sapien
cttaaatatttgaagccgctctctggaaatcag

SEQ ID NO: 287422 - DNA, 33 bp, Homo sapien
cttaaatatttgaagctgctctctggaaatcag

SEQ ID NO: 287423 - DNA, 33 bp, Homo sapien
tcaatcaacagttgctcagaaaaccacaataaa

SEQ ID NO: 287424 - DNA, 33 bp, Homo sapien
tcaatcaacagttgctgagaaaaccacaataaa

SEQ ID NO: 287425 - DNA, 33 bp, Homo sapien
ctcccatcctaaggtcagacatagttataaaag

SEQ ID NO: 287426 - DNA, 33 bp, Homo sapien
ctcccatcctaaggtcggacatagttataaaag

SEQ ID NO: 287427 - DNA, 33 bp, Homo sapien
aatcatgatggaacaaaaaaaaatcatgctttc

SEQ ID NO: 287428 - DNA, 33 bp, Homo sapien
aatcatgatggaacaagaaaaaatcatgctttc

SEQ ID NO: 287429 - DNA, 33 bp, Homo sapien
caactaataaattgatcaaaggcacttccattt

SEQ ID NO: 287430 - DNA, 33 bp, Homo sapien
caactaataaattgatgaaaggcacttccattt

SEQ ID NO: 287431 - DNA, 33 bp, Homo sapien
agggctgctataaaaaatagtatcacagagtca

SEQ ID NO: 287432 - DNA, 33 bp, Homo sapien
agggctgctataaaaagtagtatcacagagtca

SEQ ID NO: 287433 - DNA, 33 bp, Homo sapien
gaagcctgctaaaaatcaacacatattgccata

SEQ ID NO: 287434 - DNA, 33 bp, Homo sapien
gaagcctgctaaaaattaacacatattgccata

SEQ ID NO: 287435 - DNA, 33 bp, Homo sapien
gcacactgtggaaatacagtgacacattgtagc

SEQ ID NO: 287436 - DNA, 33 bp, Homo sapien
gcacactgtggaaatagagtgacacattgtagc

SEQ ID NO: 287437 - DNA, 33 bp, Homo sapien
catagagtgctgcaaactgatttttacatttat

SEQ ID NO: 287438 - DNA, 33 bp, Homo sapien
catagagtgctgcaaattgatttttacatttat

SEQ ID NO: 287439 - DNA, 33 bp, Homo sapien
agttgcataaacattacaaataggttttaagca

SEQ ID NO: 287440 - DNA, 33 bp, Homo sapien
agttgcataaacattagaaataggttttaagca

SEQ ID NO: 287441 - DNA, 33 bp, Homo sapien
tatgaatgacacattaagaataaattacagatt

SEQ ID NO: 287442 - DNA, 33 bp, Homo sapien
tatgaatgacacattaggaataaattacagatt

SEQ ID NO: 287443 - DNA, 33 bp, Homo sapien
acttttgccaccttcgacataattctgataaaa

SEQ ID NO: 287444 - DNA, 33 bp, Homo sapien
acttttgccaccttcggcataattctgataaaa

SEQ ID NO: 287445 - DNA, 33 bp, Homo sapien
gctatcattcacttcacggaggacaacaaatgc

SEQ ID NO: 287446 - DNA, 33 bp, Homo sapien
gctatcattcacttcatggaggacaacaaatgc

SEQ ID NO: 287447 - DNA, 33 bp, Homo sapien
atacaattcacgctcacatccatatctataatc

SEQ ID NO: 287448 - DNA, 33 bp, Homo sapien
atacaattcacgctcatatccatatctataatc

SEQ ID NO: 287449 - DNA, 33 bp, Homo sapien
cctaatgacaaaactcaatgactgctggcaata

SEQ ID NO: 287450 - DNA, 33 bp, Homo sapien
cctaatgacaaaactctatgactgctggcaata

SEQ ID NO: 287451 - DNA, 33 bp, Homo sapien
tagtcctgaaatttccaagtggcatactggaag

SEQ ID NO: 287452 - DNA, 33 bp, Homo sapien
tagtcctgaaatttccgagtggcatactggaag

SEQ ID NO: 287453 - DNA, 33 bp, Homo sapien
aaatttatccttctacactcatcttactgtgac

SEQ ID NO: 287454 - DNA, 33 bp, Homo sapien
aaatttatccttctacgctcatcttactgtgac

SEQ ID NO: 287455 - DNA, 33 bp, Homo sapien
agaaaccaggtatgcacgaaatagttaattgag

SEQ ID NO: 287456 - DNA, 33 bp, Homo sapien
agaaaccaggtatgcatgaaatagttaattgag

SEQ ID NO: 287457 - DNA, 33 bp, Homo sapien
caggttagtcatgaaactgattcttctgaaaag

SEQ ID NO: 287458 - DNA, 33 bp, Homo sapien
caggttagtcatgaaattgattcttctgaaaag

SEQ ID NO: 287459 - DNA, 33 bp, Homo sapien
cttcttatcagtgtgaagatctttgataacagt

SEQ ID NO: 287460 - DNA, 33 bp, Homo sapien
cttcttatcagtgtgatgatctttgataacagt

SEQ ID NO: 287461 - DNA, 33 bp, Homo sapien
ctttatctgacctaaagaaacttcatcatcctt

SEQ ID NO: 287462 - DNA, 33 bp, Homo sapien
ctttatctgacctaaataaacttcatcatcctt

SEQ ID NO: 287463 - DNA, 33 bp, Homo sapien
aagtcagtgacttaacaaggtgatgagaggagg

SEQ ID NO: 287464 - DNA, 33 bp, Homo sapien
aagtcagtgacttaacgaggtgatgagaggagg

SEQ ID NO: 287465 - DNA, 33 bp, Homo sapien
tggaggcaaaacaacaccatattcaagactctt

SEQ ID NO: 287466 - DNA, 33 bp, Homo sapien
tggaggcaaaacaacatcatattcaagactctt

SEQ ID NO: 287467 - DNA, 33 bp, Homo sapien
catattgctgctatgccatagacacctttgggc

SEQ ID NO: 287468 - DNA, 33 bp, Homo sapien
catattgctgctatgctatagacacctttgggc

SEQ ID NO: 287469 - DNA, 33 bp, Homo sapien
tttggttgtgttccataacaaatctttacatca

SEQ ID NO: 287470 - DNA, 33 bp, Homo sapien
tttggttgtgttccatgacaaatctttacatca

SEQ ID NO: 287471 - DNA, 33 bp, Homo sapien
ccatcttacaaaatacagtatggaggagttaga

SEQ ID NO: 287472 - DNA, 33 bp, Homo sapien
ccatcttacaaaatacggtatggaggagttaga

SEQ ID NO: 287473 - DNA, 33 bp, Homo sapien
aattcagactgagaatgaaagaaaggatgtaaa

SEQ ID NO: 287474 - DNA, 33 bp, Homo sapien
aattcagactgagaattaaagaaaggatgtaaa

SEQ ID NO: 287475 - DNA, 33 bp, Homo sapien
gggagttcttgcttgcactctggtaggctttgg

SEQ ID NO: 287476 - DNA, 33 bp, Homo sapien
gggagttcttgcttgcgctctggtaggctttgg

SEQ ID NO: 287477 - DNA, 33 bp, Homo sapien
aaattgcacacttcagaatgtttggcaccctgg

SEQ ID NO: 287478 - DNA, 33 bp, Homo sapien
aaattgcacacttcaggatgtttggcaccctgg

SEQ ID NO: 287479 - DNA, 33 bp, Homo sapien
ccctttctcttcaaacaccatagaagttgaaca

SEQ ID NO: 287480 - DNA, 33 bp, Homo sapien
ccctttctcttcaaacgccatagaagttgaaca

SEQ ID NO: 287481 - DNA, 33 bp, Homo sapien
tattaaaacaagggtacagacagtgtttcctga

SEQ ID NO: 287482 - DNA, 33 bp, Homo sapien
tattaaaacaagggtatagacagtgtttcctga

SEQ ID NO: 287483 - DNA, 33 bp, Homo sapien
ctactaaattttgaaccacttggcaaataaata

SEQ ID NO: 287484 - DNA, 33 bp, Homo sapien
ctactaaattttgaactacttggcaaataaata

SEQ ID NO: 287485 - DNA, 33 bp, Homo sapien
actattcctaagtaacacaggtggccaggagag

SEQ ID NO: 287486 - DNA, 33 bp, Homo sapien
actattcctaagtaacgcaggtggccaggagag

SEQ ID NO: 287487 - DNA, 33 bp, Homo sapien
ataagatactttgtgacatggtccctaatattc

SEQ ID NO: 287488 - DNA, 33 bp, Homo sapien
ataagatactttgtgatatggtccctaatattc

SEQ ID NO: 287489 - DNA, 33 bp, Homo sapien
tgctgcatatataataaaacagtgataacaaca

SEQ ID NO: 287490 - DNA, 33 bp, Homo sapien
tgctgcatatataatagaacagtgataacaaca

SEQ ID NO: 287491 - DNA, 33 bp, Homo sapien
aagagtatagtctttcaaaaacttctgtaagtt

SEQ ID NO: 287492 - DNA, 33 bp, Homo sapien
aagagtatagtctttcgaaaacttctgtaagtt

SEQ ID NO: 287493 - DNA, 33 bp, Homo sapien
aatcgtgatctacgtaacatctgtgtcagaaac

SEQ ID NO: 287494 - DNA, 33 bp, Homo sapien
aatcgtgatctacgtaccatctgtgtcagaaac

SEQ ID NO: 287495 - DNA, 33 bp, Homo sapien
gttttaaactttattcactagacatttgttaat

SEQ ID NO: 287496 - DNA, 33 bp, Homo sapien
gttttaaactttattcgctagacatttgttaat

SEQ ID NO: 287497 - DNA, 33 bp, Homo sapien
catatggctatcagtaagaaggtcattttgaat

SEQ ID NO: 287498 - DNA, 33 bp, Homo sapien
catatggctatcagtaggaaggtcattttgaat

SEQ ID NO: 287499 - DNA, 33 bp, Homo sapien
tgacgagttcacattcaccgtgtaatcaagcaa

SEQ ID NO: 287500 - DNA, 33 bp, Homo sapien
tgacgagttcacattctccgtgtaatcaagcaa

SEQ ID NO: 287501 - DNA, 33 bp, Homo sapien
ataatattccactgtacggttactccacatata

SEQ ID NO: 287502 - DNA, 33 bp, Homo sapien
ataatattccactgtatggttactccacatata

SEQ ID NO: 287503 - DNA, 33 bp, Homo sapien
gtagacagaatttgtacatctaacccctctact

SEQ ID NO: 287504 - DNA, 33 bp, Homo sapien
gtagacagaatttgtatatctaacccctctact

SEQ ID NO: 287505 - DNA, 33 bp, Homo sapien
tccgtgaactagagaacagaaagggtcatttct

SEQ ID NO: 287506 - DNA, 33 bp, Homo sapien
tccgtgaactagagaatagaaagggtcatttct

SEQ ID NO: 287507 - DNA, 33 bp, Homo sapien
gcctctcccttctttccactcctcagatctaaa

SEQ ID NO: 287508 - DNA, 33 bp, Homo sapien
gcctctcccttctttcgactcctcagatctaaa

SEQ ID NO: 287509 - DNA, 33 bp, Homo sapien
tgaagcctccaaataaatggactgaaaggtaag

SEQ ID NO: 287510 - DNA, 33 bp, Homo sapien
tgaagcctccaaataagtggactgaaaggtaag

SEQ ID NO: 287511 - DNA, 33 bp, Homo sapien
gactaatgagtaccaaatatagattctcctaga

SEQ ID NO: 287512 - DNA, 33 bp, Homo sapien
gactaatgagtaccaagtatagattctcctaga

SEQ ID NO: 287513 - DNA, 33 bp, Homo sapien
taatcagggtgacagacgtatggataaaatact

SEQ ID NO: 287514 - DNA, 33 bp, Homo sapien
taatcagggtgacagatgtatggataaaatact

SEQ ID NO: 287515 - DNA, 33 bp, Homo sapien
ggacagggccctaaaccatgcatcgtggctgtt

SEQ ID NO: 287516 - DNA, 33 bp, Homo sapien
ggacagggccctaaactatgcatcgtggctgtt

SEQ ID NO: 287517 - DNA, 33 bp, Homo sapien
tttgccacaagatacacaccaaaattgaaagtt

SEQ ID NO: 287518 - DNA, 33 bp, Homo sapien
tttgccacaagatacataccaaaattgaaagtt

SEQ ID NO: 287519 - DNA, 33 bp, Homo sapien
acaattcactgaatccaacagagacctaacaga

SEQ ID NO: 287520 - DNA, 33 bp, Homo sapien
acaattcactgaatcccacagagacctaacaga

SEQ ID NO: 287521 - DNA, 33 bp, Homo sapien
tatcagaggtgttgcaaaagatttggaaatggt

SEQ ID NO: 287522 - DNA, 33 bp, Homo sapien
tatcagaggtgttgcataagatttggaaatggt

SEQ ID NO: 287523 - DNA, 33 bp, Homo sapien
taacaggaagctcagaacctaattctctcccaa

SEQ ID NO: 287524 - DNA, 33 bp, Homo sapien
taacaggaagctcagagcctaattctctcccaa

SEQ ID NO: 287525 - DNA, 33 bp, Homo sapien
agaagatgtaaaataacgtccagaaggatgaag

SEQ ID NO: 287526 - DNA, 33 bp, Homo sapien
agaagatgtaaaataaggtccagaaggatgaag

SEQ ID NO: 287527 - DNA, 33 bp, Homo sapien
ccaaattgcacaaaaacttctataatcacccaa

SEQ ID NO: 287528 - DNA, 33 bp, Homo sapien
ccaaattgcacaaaaatttctataatcacccaa

SEQ ID NO: 287529 - DNA, 33 bp, Homo sapien
ttctgcatggcacttaaccaattttggtctatg

SEQ ID NO: 287530 - DNA, 33 bp, Homo sapien
ttctgcatggcacttagccaattttggtctatg

SEQ ID NO: 287531 - DNA, 33 bp, Homo sapien
catcttgaaaagctcacagtggagcaggagaag

SEQ ID NO: 287532 - DNA, 33 bp, Homo sapien
catcttgaaaagctcatagtggagcaggagaag

SEQ ID NO: 287533 - DNA, 33 bp, Homo sapien
ctgatggtgagtgtacactaaaagttgtggtgc

SEQ ID NO: 287534 - DNA, 33 bp, Homo sapien
ctgatggtgagtgtactctaaaagttgtggtgc

SEQ ID NO: 287535 - DNA, 33 bp, Homo sapien
catgggatagtttttacatgaaaatttggaatg

SEQ ID NO: 287536 - DNA, 33 bp, Homo sapien
catgggatagtttttagatgaaaatttggaatg

SEQ ID NO: 287537 - DNA, 33 bp, Homo sapien
aagggctatgaagaagaagagtcagcatattgc

SEQ ID NO: 287538 - DNA, 33 bp, Homo sapien
aagggctatgaagaaggagagtcagcatattgc

SEQ ID NO: 287539 - DNA, 33 bp, Homo sapien
accttaatcccatgacaaagccaatagtaaaaa

SEQ ID NO: 287540 - DNA, 33 bp, Homo sapien
accttaatcccatgacgaagccaatagtaaaaa

SEQ ID NO: 287541 - DNA, 33 bp, Homo sapien
ctgccagacgtggtgacagcccaggattctgtg

SEQ ID NO: 287542 - DNA, 33 bp, Homo sapien
ctgccagacgtggtgagagcccaggattctgtg

SEQ ID NO: 287543 - DNA, 33 bp, Homo sapien
cctttctcctataaagacaccagttattgtatt

SEQ ID NO: 287544 - DNA, 33 bp, Homo sapien
cctttctcctataaaggcaccagttattgtatt

SEQ ID NO: 287545 - DNA, 33 bp, Homo sapien
atacataagaaccaaaacattgggcgtcagtga

SEQ ID NO: 287546 - DNA, 33 bp, Homo sapien
atacataagaaccaaagcattgggcgtcagtga

SEQ ID NO: 287547 - DNA, 33 bp, Homo sapien
tttctgtatcctttcacgcgaccattcttatca

SEQ ID NO: 287548 - DNA, 33 bp, Homo sapien
tttctgtatcctttcatgcgaccattcttatca

SEQ ID NO: 287549 - DNA, 33 bp, Homo sapien
gactgaaagcaatacaatgaaaattctgttgtt

SEQ ID NO: 287550 - DNA, 33 bp, Homo sapien
gactgaaagcaatacagtgaaaattctgttgtt

SEQ ID NO: 287551 - DNA, 33 bp, Homo sapien
tatgggctaccagaccgctgcttttgagcacac

SEQ ID NO: 287552 - DNA, 33 bp, Homo sapien
tatgggctaccagacctctgcttttgagcacac

SEQ ID NO: 287553 - DNA, 33 bp, Homo sapien
agactgtttaaatctacgacatcaccttcagtc

SEQ ID NO: 287554 - DNA, 33 bp, Homo sapien
agactgtttaaatctatgacatcaccttcagtc

SEQ ID NO: 287555 - DNA, 33 bp, Homo sapien
tcccttttaaactactaagctgccataacactg

SEQ ID NO: 287556 - DNA, 33 bp, Homo sapien
tcccttttaaactactcagctgccataacactg

SEQ ID NO: 287557 - DNA, 33 bp, Homo sapien
ccctgctataaaaactcaagcttctgcacatct

SEQ ID NO: 287558 - DNA, 33 bp, Homo sapien
ccctgctataaaaacttaagcttctgcacatct

SEQ ID NO: 287559 - DNA, 33 bp, Homo sapien
agataattttgccacactgtatcttgtcttttt

SEQ ID NO: 287560 - DNA, 33 bp, Homo sapien
agataattttgccacattgtatcttgtcttttt

SEQ ID NO: 287561 - DNA, 33 bp, Homo sapien
tttactatattctaagaaattcacatgcatttt

SEQ ID NO: 287562 - DNA, 33 bp, Homo sapien
tttactatattctaaggaattcacatgcatttt

SEQ ID NO: 287563 - DNA, 33 bp, Homo sapien
ggctgggaatcgaaagcacctgcttataaagag

SEQ ID NO: 287564 - DNA, 33 bp, Homo sapien
ggctgggaatcgaaagtacctgcttataaagag

SEQ ID NO: 287565 - DNA, 33 bp, Homo sapien
tgtttgatgcatgaaggaggctttacgtaaata

SEQ ID NO: 287566 - DNA, 33 bp, Homo sapien
tgtttgatgcatgaagtaggctttacgtaaata

SEQ ID NO: 287567 - DNA, 33 bp, Homo sapien
acacagggaagtataaaatatccacgcaaaatc

SEQ ID NO: 287568 - DNA, 33 bp, Homo sapien
acacagggaagtataagatatccacgcaaaatc

SEQ ID NO: 287569 - DNA, 33 bp, Homo sapien
cttcactgaaccaaaacgctggagaggttttag

SEQ ID NO: 287570 - DNA, 33 bp, Homo sapien
cttcactgaaccaaaatgctggagaggttttag

SEQ ID NO: 287571 - DNA, 33 bp, Homo sapien
taatttgtggtatagacaaaaatttcctctcca

SEQ ID NO: 287572 - DNA, 33 bp, Homo sapien
taatttgtggtatagataaaaatttcctctcca

SEQ ID NO: 287573 - DNA, 33 bp, Homo sapien
ctttactttagacagacattaacatcagaaggc

SEQ ID NO: 287574 - DNA, 33 bp, Homo sapien
ctttactttagacagagattaacatcagaaggc

SEQ ID NO: 287575 - DNA, 33 bp, Homo sapien
ttaaaaagaattctataaagccactgattaagt

SEQ ID NO: 287576 - DNA, 33 bp, Homo sapien
ttaaaaagaattctatcaagccactgattaagt

SEQ ID NO: 287577 - DNA, 33 bp, Homo sapien
gggtagaaggttgatacaaaaataatgttccta

SEQ ID NO: 287578 - DNA, 33 bp, Homo sapien
gggtagaaggttgatagaaaaataatgttccta

SEQ ID NO: 287579 - DNA, 33 bp, Homo sapien
attcatgactagatgtaaaaattgttgccatat

SEQ ID NO: 287580 - DNA, 33 bp, Homo sapien
attcatgactagatgtcaaaattgttgccatat

SEQ ID NO: 287581 - DNA, 33 bp, Homo sapien
gactatatgactccaaatgatgctacgaggttt

SEQ ID NO: 287582 - DNA, 33 bp, Homo sapien
gactatatgactccaagtgatgctacgaggttt

SEQ ID NO: 287583 - DNA, 33 bp, Homo sapien
gaaatactgtgctctcactggtcaatatatttc

SEQ ID NO: 287584 - DNA, 33 bp, Homo sapien
gaaatactgtgctctcgctggtcaatatatttc

SEQ ID NO: 287585 - DNA, 33 bp, Homo sapien
tgactttcgggggatacgtgatgaaagtagcgt

SEQ ID NO: 287586 - DNA, 33 bp, Homo sapien
tgactttcgggggatatgtgatgaaagtagcgt

SEQ ID NO: 287587 - DNA, 33 bp, Homo sapien
tgccagtgaccctccagaattccagttcagtag

SEQ ID NO: 287588 - DNA, 33 bp, Homo sapien
tgccagtgaccctccataattccagttcagtag

SEQ ID NO: 287589 - DNA, 33 bp, Homo sapien
tttctagagttttggacacacatgtcttgtaac

SEQ ID NO: 287590 - DNA, 33 bp, Homo sapien
tttctagagttttggatacacatgtcttgtaac

SEQ ID NO: 287591 - DNA, 33 bp, Homo sapien
tagccagtttttcatacgatttacagtttcatt

SEQ ID NO: 287592 - DNA, 33 bp, Homo sapien
tagccagtttttcatatgatttacagtttcatt

SEQ ID NO: 287593 - DNA, 33 bp, Homo sapien
cactgtgtttacttctaaaatggaaaggatcgc

SEQ ID NO: 287594 - DNA, 33 bp, Homo sapien
cactgtgtttacttctgaaatggaaaggatcgc

SEQ ID NO: 287595 - DNA, 33 bp, Homo sapien
ttgaagtgtgagataaatataaagacagggcca

SEQ ID NO: 287596 - DNA, 33 bp, Homo sapien
ttgaagtgtgagataagtataaagacagggcca

SEQ ID NO: 287597 - DNA, 33 bp, Homo sapien
aggctattgataaagacaatgactgctcaagag

SEQ ID NO: 287598 - DNA, 33 bp, Homo sapien
aggctattgataaagataatgactgctcaagag

SEQ ID NO: 287599 - DNA, 33 bp, Homo sapien
cttgaggtatacctaacgtgtggtctctatttt

SEQ ID NO: 287600 - DNA, 33 bp, Homo sapien
cttgaggtatacctaatgtgtggtctctatttt

SEQ ID NO: 287601 - DNA, 33 bp, Homo sapien
tatgcatcctcagtaacacataaatgtacatta

SEQ ID NO: 287602 - DNA, 33 bp, Homo sapien
tatgcatcctcagtaagacataaatgtacatta

SEQ ID NO: 287603 - DNA, 33 bp, Homo sapien
ataatataagatggtacgatattcccagtataa

SEQ ID NO: 287604 - DNA, 33 bp, Homo sapien
ataatataagatggtatgatattcccagtataa

SEQ ID NO: 287605 - DNA, 33 bp, Homo sapien
taaacaaggttattgacactggaaagcttatta

SEQ ID NO: 287606 - DNA, 33 bp, Homo sapien
taaacaaggttattgagactggaaagcttatta

SEQ ID NO: 287607 - DNA, 33 bp, Homo sapien
gaggaagaagaggtggccaaggcaaatcaagtc

SEQ ID NO: 287608 - DNA, 33 bp, Homo sapien
gaggaagaagaggtggtcaaggcaaatcaagtc

SEQ ID NO: 287609 - DNA, 33 bp, Homo sapien
cactttagacttttgacgaaaatttaggaaaga

SEQ ID NO: 287610 - DNA, 33 bp, Homo sapien
cactttagacttttgatgaaaatttaggaaaga

SEQ ID NO: 287611 - DNA, 33 bp, Homo sapien
taaagacgactggaacaattacaggaatggaag

SEQ ID NO: 287612 - DNA, 33 bp, Homo sapien
taaagacgactggaacgattacaggaatggaag

SEQ ID NO: 287613 - DNA, 33 bp, Homo sapien
tgtatatcaaaagtgacaccaaaaggcaatttc

SEQ ID NO: 287614 - DNA, 33 bp, Homo sapien
tgtatatcaaaagtgataccaaaaggcaatttc

SEQ ID NO: 287615 - DNA, 33 bp, Homo sapien
tgtgattgaccagatcagaaagcatttagataa

SEQ ID NO: 287616 - DNA, 33 bp, Homo sapien
tgtgattgaccagatccgaaagcatttagataa

SEQ ID NO: 287617 - DNA, 33 bp, Homo sapien
ccctcttagcctcttaagtccttcattttccta

SEQ ID NO: 287618 - DNA, 33 bp, Homo sapien
ccctcttagcctcttatgtccttcattttccta

SEQ ID NO: 287619 - DNA, 33 bp, Homo sapien
tcacaacccaaaaaaaagggcaccagaagcaat

SEQ ID NO: 287620 - DNA, 33 bp, Homo sapien
tcacaacccaaaaaaatgggcaccagaagcaat

SEQ ID NO: 287621 - DNA, 33 bp, Homo sapien
tttgacctgcagatgcagagtggaaattcttgg

SEQ ID NO: 287622 - DNA, 33 bp, Homo sapien
tttgacctgcagatgcggagtggaaattcttgg

SEQ ID NO: 287623 - DNA, 33 bp, Homo sapien
tactctataccttttccacagctttcattcaag

SEQ ID NO: 287624 - DNA, 33 bp, Homo sapien
tactctataccttttcgacagctttcattcaag

SEQ ID NO: 287625 - DNA, 33 bp, Homo sapien
tcctaaatggaaatagcagtcactgaagagtta

SEQ ID NO: 287626 - DNA, 33 bp, Homo sapien
tcctaaatggaaataggagtcactgaagagtta

SEQ ID NO: 287627 - DNA, 33 bp, Homo sapien
cagaatcgagactaaacccaagatgatccaaca

SEQ ID NO: 287628 - DNA, 33 bp, Homo sapien
cagaatcgagactaaagccaagatgatccaaca

SEQ ID NO: 287629 - DNA, 33 bp, Homo sapien
tctctgacatttatgacctttctgaaggatctg

SEQ ID NO: 287630 - DNA, 33 bp, Homo sapien
tctctgacatttatgatctttctgaaggatctg

SEQ ID NO: 287631 - DNA, 33 bp, Homo sapien
atccatattcattaccactttcagatctataac

SEQ ID NO: 287632 - DNA, 33 bp, Homo sapien
atccatattcattacccctttcagatctataac

SEQ ID NO: 287633 - DNA, 33 bp, Homo sapien
tgtactagtgctttcccccgacctggcatgtat

SEQ ID NO: 287634 - DNA, 33 bp, Homo sapien
tgtactagtgctttcctccgacctggcatgtat

SEQ ID NO: 287635 - DNA, 33 bp, Homo sapien
attatcaagtcaagtacagggaataaagctacc

SEQ ID NO: 287636 - DNA, 33 bp, Homo sapien
attatcaagtcaagtatagggaataaagctacc

SEQ ID NO: 287637 - DNA, 33 bp, Homo sapien
cttccttccagatcaccgtcattttaagaatca

SEQ ID NO: 287638 - DNA, 33 bp, Homo sapien
cttccttccagatcactgtcattttaagaatca

SEQ ID NO: 287639 - DNA, 33 bp, Homo sapien
atggagcttctgccacaggactttgtagtttca

SEQ ID NO: 287640 - DNA, 33 bp, Homo sapien
atggagcttctgccacgggactttgtagtttca

SEQ ID NO: 287641 - DNA, 33 bp, Homo sapien
ggcttcctggttaggacgtgtacagatggagtt

SEQ ID NO: 287642 - DNA, 33 bp, Homo sapien
ggcttcctggttaggatgtgtacagatggagtt

SEQ ID NO: 287643 - DNA, 33 bp, Homo sapien
gttctgtgaagttttccatgttctactttcttg

SEQ ID NO: 287644 - DNA, 33 bp, Homo sapien
gttctgtgaagttttcgatgttctactttcttg

SEQ ID NO: 287645 - DNA, 33 bp, Homo sapien
tattcttaatgcttcccgaaggccttatatgat

SEQ ID NO: 287646 - DNA, 33 bp, Homo sapien
tattcttaatgcttcctgaaggccttatatgat

SEQ ID NO: 287647 - DNA, 33 bp, Homo sapien
gataaaaatctagaccacgtgtatcttgtaaca

SEQ ID NO: 287648 - DNA, 33 bp, Homo sapien
gataaaaatctagaccgcgtgtatcttgtaaca

SEQ ID NO: 287649 - DNA, 33 bp, Homo sapien
ccccaatggctatataaatgagaaaaccaatat

SEQ ID NO: 287650 - DNA, 33 bp, Homo sapien
ccccaatggctatatacatgagaaaaccaatat

SEQ ID NO: 287651 - DNA, 33 bp, Homo sapien
acttattgctttactgaacatcataaagattgc

SEQ ID NO: 287652 - DNA, 33 bp, Homo sapien
acttattgctttactggacatcataaagattgc

SEQ ID NO: 287653 - DNA, 33 bp, Homo sapien
gggaagtgattgactacgtggtaccctttccct

SEQ ID NO: 287654 - DNA, 33 bp, Homo sapien
gggaagtgattgactatgtggtaccctttccct

SEQ ID NO: 287655 - DNA, 33 bp, Homo sapien
atcatctcatgaccaaataacagatgactagag

SEQ ID NO: 287656 - DNA, 33 bp, Homo sapien
atcatctcatgaccaagtaacagatgactagag

SEQ ID NO: 287657 - DNA, 33 bp, Homo sapien
ctgtttagaaaccaaaatgcagggatttgtcct

SEQ ID NO: 287658 - DNA, 33 bp, Homo sapien
ctgtttagaaaccaaagtgcagggatttgtcct

SEQ ID NO: 287659 - DNA, 33 bp, Homo sapien
ggatcactgcattcaacagaaaaattcaaactc

SEQ ID NO: 287660 - DNA, 33 bp, Homo sapien
ggatcactgcattcaatagaaaaattcaaactc

SEQ ID NO: 287661 - DNA, 33 bp, Homo sapien
cccctcattctacaaaatgtggatcactgcatt

SEQ ID NO: 287662 - DNA, 33 bp, Homo sapien
cccctcattctacaaagtgtggatcactgcatt

SEQ ID NO: 287663 - DNA, 33 bp, Homo sapien
ctcagcagcccgaaataagagcattttatgtgt

SEQ ID NO: 287664 - DNA, 33 bp, Homo sapien
ctcagcagcccgaaatgagagcattttatgtgt

SEQ ID NO: 287665 - DNA, 33 bp, Homo sapien
tctgtaatctatgtaaaccttacttcacgtgaa

SEQ ID NO: 287666 - DNA, 33 bp, Homo sapien
tctgtaatctatgtaatccttacttcacgtgaa

SEQ ID NO: 287667 - DNA, 33 bp, Homo sapien
tacctcagagtttagacgacaccctgtagtatg

SEQ ID NO: 287668 - DNA, 33 bp, Homo sapien
tacctcagagtttagatgacaccctgtagtatg

SEQ ID NO: 287669 - DNA, 33 bp, Homo sapien
tttatttctatcccccaaagatcctccctcagt

SEQ ID NO: 287670 - DNA, 33 bp, Homo sapien
tttatttctatcccccgaagatcctccctcagt

SEQ ID NO: 287671 - DNA, 33 bp, Homo sapien
aaatcattgcttccagaaaaaaaatcacagagg

SEQ ID NO: 287672 - DNA, 33 bp, Homo sapien
aaatcattgcttccagtaaaaaaatcacagagg

SEQ ID NO: 287673 - DNA, 33 bp, Homo sapien
tttctcaattctgctgacaaactaaccagtccg

SEQ ID NO: 287674 - DNA, 33 bp, Homo sapien
tttctcaattctgctggcaaactaaccagtccg

SEQ ID NO: 287675 - DNA, 33 bp, Homo sapien
ttgtgacagtaaatgacggaacactttatcaat

SEQ ID NO: 287676 - DNA, 33 bp, Homo sapien
ttgtgacagtaaatgatggaacactttatcaat

SEQ ID NO: 287677 - DNA, 33 bp, Homo sapien
tggctcttgacccttgcagagcattttaatggc

SEQ ID NO: 287678 - DNA, 33 bp, Homo sapien
tggctcttgacccttgtagagcattttaatggc

SEQ ID NO: 287679 - DNA, 33 bp, Homo sapien
tgatacttccaagtaagtaaggactttatgaag

SEQ ID NO: 287680 - DNA, 33 bp, Homo sapien
tgatacttccaagtaattaaggactttatgaag

SEQ ID NO: 287681 - DNA, 33 bp, Homo sapien
cgtgtggtttattctacggatggtgataaagta

SEQ ID NO: 287682 - DNA, 33 bp, Homo sapien
cgtgtggtttattctatggatggtgataaagta

SEQ ID NO: 287683 - DNA, 33 bp, Homo sapien
tctaggaagtattgaacctgtctaagaaaccct

SEQ ID NO: 287684 - DNA, 33 bp, Homo sapien
tctaggaagtattgaatctgtctaagaaaccct

SEQ ID NO: 287685 - DNA, 33 bp, Homo sapien
tgggagacaatagtagcagcagccacagactca

SEQ ID NO: 287686 - DNA, 33 bp, Homo sapien
tgggagacaatagtagtagcagccacagactca

SEQ ID NO: 287687 - DNA, 33 bp, Homo sapien
acttctgaccttgtcacatctttatttatttat

SEQ ID NO: 287688 - DNA, 33 bp, Homo sapien
acttctgaccttgtcatatctttatttatttat

SEQ ID NO: 287689 - DNA, 33 bp, Homo sapien
gctagcttcaggtgaggaaccatttctcccttg

SEQ ID NO: 287690 - DNA, 33 bp, Homo sapien
gctagcttcaggtgagtaaccatttctcccttg

SEQ ID NO: 287691 - DNA, 33 bp, Homo sapien
ttgccaaggtgccagacatataagcaaagccat

SEQ ID NO: 287692 - DNA, 33 bp, Homo sapien
ttgccaaggtgccagatatataagcaaagccat

SEQ ID NO: 287693 - DNA, 33 bp, Homo sapien
atgttatacaggtgcaataacctaaaaacgaag

SEQ ID NO: 287694 - DNA, 33 bp, Homo sapien
atgttatacaggtgcagtaacctaaaaacgaag

SEQ ID NO: 287695 - DNA, 33 bp, Homo sapien
tgtagcctactcaagaataaatgattgaaacac

SEQ ID NO: 287696 - DNA, 33 bp, Homo sapien
tgtagcctactcaagagtaaatgattgaaacac

SEQ ID NO: 287697 - DNA, 33 bp, Homo sapien
aaaaagtaaaacctcaataacaacagtaagcta

SEQ ID NO: 287698 - DNA, 33 bp, Homo sapien
aaaaagtaaaacctcagtaacaacagtaagcta

SEQ ID NO: 287699 - DNA, 33 bp, Homo sapien
cttcaggttgtgaacgacccggtcttgcctgaa

SEQ ID NO: 287700 - DNA, 33 bp, Homo sapien
cttcaggttgtgaacggcccggtcttgcctgaa

SEQ ID NO: 287701 - DNA, 33 bp, Homo sapien
tttcctgagtaactggaaacatttttgtgcaga

SEQ ID NO: 287702 - DNA, 33 bp, Homo sapien
tttcctgagtaactgggaacatttttgtgcaga

SEQ ID NO: 287703 - DNA, 33 bp, Homo sapien
ttccaatagctcctaaaggcacacatgaattgg

SEQ ID NO: 287704 - DNA, 33 bp, Homo sapien
ttccaatagctcctaatggcacacatgaattgg

SEQ ID NO: 287705 - DNA, 33 bp, Homo sapien
tactcttccatgaagcagagagcggtgccaatt

SEQ ID NO: 287706 - DNA, 33 bp, Homo sapien
tactcttccatgaagccgagagcggtgccaatt

SEQ ID NO: 287707 - DNA, 33 bp, Homo sapien
ttcttttctgggtccccattttcacttagtttg

SEQ ID NO: 287708 - DNA, 33 bp, Homo sapien
ttcttttctgggtccctattttcacttagtttg

SEQ ID NO: 287709 - DNA, 33 bp, Homo sapien
cagtgtgaaagcagacgactacacctacccagg

SEQ ID NO: 287710 - DNA, 33 bp, Homo sapien
cagtgtgaaagcagactactacacctacccagg

SEQ ID NO: 287711 - DNA, 33 bp, Homo sapien
gaaaacagtaatcaccacagtctggagcataat

SEQ ID NO: 287712 - DNA, 33 bp, Homo sapien
gaaaacagtaatcaccgcagtctggagcataat

SEQ ID NO: 287713 - DNA, 33 bp, Homo sapien
ttaaggctttcatagaaggtcctcggtggtgac

SEQ ID NO: 287714 - DNA, 33 bp, Homo sapien
ttaaggctttcatagatggtcctcggtggtgac

SEQ ID NO: 287715 - DNA, 33 bp, Homo sapien
gctaggccacaacacaagaaaaatggtgttttc

SEQ ID NO: 287716 - DNA, 33 bp, Homo sapien
gctaggccacaacacaggaaaaatggtgttttc

SEQ ID NO: 287717 - DNA, 33 bp, Homo sapien
caaatgtgattactcaacctctaaagtttcatc

SEQ ID NO: 287718 - DNA, 33 bp, Homo sapien
caaatgtgattactcagcctctaaagtttcatc

SEQ ID NO: 287719 - DNA, 33 bp, Homo sapien
tctcgtcaataagcgacggagaaatctaaagtc

SEQ ID NO: 287720 - DNA, 33 bp, Homo sapien
tctcgtcaataagcgatggagaaatctaaagtc

SEQ ID NO: 287721 - DNA, 33 bp, Homo sapien
tttaaaaaaatgaaatcacaactttgagtcaag

SEQ ID NO: 287722 - DNA, 33 bp, Homo sapien
tttaaaaaaatgaaatgacaactttgagtcaag

SEQ ID NO: 287723 - DNA, 33 bp, Homo sapien
cacaacctctctttcacggaaggtcactatatt

SEQ ID NO: 287724 - DNA, 33 bp, Homo sapien
cacaacctctctttcatggaaggtcactatatt

SEQ ID NO: 287725 - DNA, 33 bp, Homo sapien
aaatgaaacaacaatccccacgaagcagtctta

SEQ ID NO: 287726 - DNA, 33 bp, Homo sapien
aaatgaaacaacaatctccacgaagcagtctta

SEQ ID NO: 287727 - DNA, 33 bp, Homo sapien
gcacatgtttgctcagacacagtagaaataggg

SEQ ID NO: 287728 - DNA, 33 bp, Homo sapien
gcacatgtttgctcaggcacagtagaaataggg

SEQ ID NO: 287729 - DNA, 33 bp, Homo sapien
tcctgatgcactggaaagtcatagtataatgat

SEQ ID NO: 287730 - DNA, 33 bp, Homo sapien
tcctgatgcactggaaggtcatagtataatgat

SEQ ID NO: 287731 - DNA, 33 bp, Homo sapien
atccccgagaataaaactgtagattgttccact

SEQ ID NO: 287732 - DNA, 33 bp, Homo sapien
atccccgagaataaaattgtagattgttccact

SEQ ID NO: 287733 - DNA, 33 bp, Homo sapien
ttgatgaatttctcacaagatactcatgcaata

SEQ ID NO: 287734 - DNA, 33 bp, Homo sapien
ttgatgaatttctcacgagatactcatgcaata

SEQ ID NO: 287735 - DNA, 33 bp, Homo sapien
agcgaatgaataaatgaacaatcggcagagtag

SEQ ID NO: 287736 - DNA, 33 bp, Homo sapien
agcgaatgaataaatgcacaatcggcagagtag

SEQ ID NO: 287737 - DNA, 33 bp, Homo sapien
agtaccacaccaccgcaaaaatatatgtcatgt

SEQ ID NO: 287738 - DNA, 33 bp, Homo sapien
agtaccacaccaccgcgaaaatatatgtcatgt

SEQ ID NO: 287739 - DNA, 33 bp, Homo sapien
tgttatgtctctggaaactgatccaaacatata

SEQ ID NO: 287740 - DNA, 33 bp, Homo sapien
tgttatgtctctggaatctgatccaaacatata

SEQ ID NO: 287741 - DNA, 33 bp, Homo sapien
aagaaataacacctaacgtgcacctcccttgca

SEQ ID NO: 287742 - DNA, 33 bp, Homo sapien
aagaaataacacctaatgtgcacctcccttgca

SEQ ID NO: 287743 - DNA, 33 bp, Homo sapien
ctgatattagtccatacgcaatttcttacaaaa

SEQ ID NO: 287744 - DNA, 33 bp, Homo sapien
ctgatattagtccatatgcaatttcttacaaaa

SEQ ID NO: 287745 - DNA, 33 bp, Homo sapien
cctggatcagtcctcaagaaaaagatttaaatt

SEQ ID NO: 287746 - DNA, 33 bp, Homo sapien
cctggatcagtcctcaggaaaaagatttaaatt

SEQ ID NO: 287747 - DNA, 33 bp, Homo sapien
ataaaatgctgaccaaagatacaaagtattcat

SEQ ID NO: 287748 - DNA, 33 bp, Homo sapien
ataaaatgctgaccaaggatacaaagtattcat

SEQ ID NO: 287749 - DNA, 33 bp, Homo sapien
atattgtcctcaagaccgccaagtcactatctt

SEQ ID NO: 287750 - DNA, 33 bp, Homo sapien
atattgtcctcaagacggccaagtcactatctt

SEQ ID NO: 287751 - DNA, 33 bp, Homo sapien
agaaggtcacagtttacgttgaataatccaact

SEQ ID NO: 287752 - DNA, 33 bp, Homo sapien
agaaggtcacagtttatgttgaataatccaact

SEQ ID NO: 287753 - DNA, 33 bp, Homo sapien
tgagaaggagataaacagtaagcaagtgaacag

SEQ ID NO: 287754 - DNA, 33 bp, Homo sapien
tgagaaggagataaaccgtaagcaagtgaacag

SEQ ID NO: 287755 - DNA, 33 bp, Homo sapien
caaagtcagctcttcaatcatctcaccgctcag

SEQ ID NO: 287756 - DNA, 33 bp, Homo sapien
caaagtcagctcttcagtcatctcaccgctcag

SEQ ID NO: 287757 - DNA, 33 bp, Homo sapien
acacccacccagctgaagaaagtaacgggtaat

SEQ ID NO: 287758 - DNA, 33 bp, Homo sapien
acacccacccagctgacgaaagtaacgggtaat

SEQ ID NO: 287759 - DNA, 33 bp, Homo sapien
gttctaagttgttgataagttgaaaatgctctg

SEQ ID NO: 287760 - DNA, 33 bp, Homo sapien
gttctaagttgttgatgagttgaaaatgctctg

SEQ ID NO: 287761 - DNA, 33 bp, Homo sapien
agctctcaggatttgccagtaagtagtttgtag

SEQ ID NO: 287762 - DNA, 33 bp, Homo sapien
agctctcaggatttgctagtaagtagtttgtag

SEQ ID NO: 287763 - DNA, 33 bp, Homo sapien
gtgagaagtgtatcaacggtgtaaaagactatt

SEQ ID NO: 287764 - DNA, 33 bp, Homo sapien
gtgagaagtgtatcaatggtgtaaaagactatt

SEQ ID NO: 287765 - DNA, 33 bp, Homo sapien
tgatttccacccctacaaaggaagcactggtga

SEQ ID NO: 287766 - DNA, 33 bp, Homo sapien
tgatttccacccctacgaaggaagcactggtga

SEQ ID NO: 287767 - DNA, 33 bp, Homo sapien
tgttgaattactcaaaattgcctgaggcttatg

SEQ ID NO: 287768 - DNA, 33 bp, Homo sapien
tgttgaattactcaaagttgcctgaggcttatg

SEQ ID NO: 287769 - DNA, 33 bp, Homo sapien
agtgcctgtcattagacggggtggtttaaacaa

SEQ ID NO: 287770 - DNA, 33 bp, Homo sapien
agtgcctgtcattagatggggtggtttaaacaa

SEQ ID NO: 287771 - DNA, 33 bp, Homo sapien
cctccctgaccacagactcagtgctcgcttcta

SEQ ID NO: 287772 - DNA, 33 bp, Homo sapien
cctccctgaccacagattcagtgctcgcttcta

SEQ ID NO: 287773 - DNA, 33 bp, Homo sapien
aaagacactggggctaagaaagattgatgtatg

SEQ ID NO: 287774 - DNA, 33 bp, Homo sapien
aaagacactggggctaggaaagattgatgtatg

SEQ ID NO: 287775 - DNA, 33 bp, Homo sapien
ggcagagaattacctcaaattaagttcaaattt

SEQ ID NO: 287776 - DNA, 33 bp, Homo sapien
ggcagagaattacctcgaattaagttcaaattt

SEQ ID NO: 287777 - DNA, 33 bp, Homo sapien
agagatttccgtcatcaagtaaatttagagaag

SEQ ID NO: 287778 - DNA, 33 bp, Homo sapien
agagatttccgtcatcgagtaaatttagagaag

SEQ ID NO: 287779 - DNA, 33 bp, Homo sapien
tacaggatgtggaagacgaagtccctgctagct

SEQ ID NO: 287780 - DNA, 33 bp, Homo sapien
tacaggatgtggaagatgaagtccctgctagct

SEQ ID NO: 287781 - DNA, 33 bp, Homo sapien
aatgtgtctaggaaaccctctagtgcttagtcc

SEQ ID NO: 287782 - DNA, 33 bp, Homo sapien
aatgtgtctaggaaactctctagtgcttagtcc

SEQ ID NO: 287783 - DNA, 33 bp, Homo sapien
aattagcagaatgaaaagaatgaaaagatgctg

SEQ ID NO: 287784 - DNA, 33 bp, Homo sapien
aattagcagaatgaaaggaatgaaaagatgctg

SEQ ID NO: 287785 - DNA, 33 bp, Homo sapien
tttaagttgatttcaaatgcagtaaaaataaaa

SEQ ID NO: 287786 - DNA, 33 bp, Homo sapien
tttaagttgatttcaagtgcagtaaaaataaaa

SEQ ID NO: 287787 - DNA, 33 bp, Homo sapien
ctttgttagaaactgaatagcagaatccaagag

SEQ ID NO: 287788 - DNA, 33 bp, Homo sapien
ctttgttagaaactgagtagcagaatccaagag

SEQ ID NO: 287789 - DNA, 33 bp, Homo sapien
gacttgccagcttctcaaaatttagacttctac

SEQ ID NO: 287790 - DNA, 33 bp, Homo sapien
gacttgccagcttctcgaaatttagacttctac

SEQ ID NO: 287791 - DNA, 33 bp, Homo sapien
gaatctcctaattttacagcttttggcatctct

SEQ ID NO: 287792 - DNA, 33 bp, Homo sapien
gaatctcctaattttatagcttttggcatctct

SEQ ID NO: 287793 - DNA, 33 bp, Homo sapien
ttctataacccttcaaaatcatatgaaaaaata

SEQ ID NO: 287794 - DNA, 33 bp, Homo sapien
ttctataacccttcaacatcatatgaaaaaata

SEQ ID NO: 287795 - DNA, 33 bp, Homo sapien
gttgattaagctggatcacactttataaggttc

SEQ ID NO: 287796 - DNA, 33 bp, Homo sapien
gttgattaagctggattacactttataaggttc

SEQ ID NO: 287797 - DNA, 33 bp, Homo sapien
tctggctgttgtcctcaattctgagtttgcttc

SEQ ID NO: 287798 - DNA, 33 bp, Homo sapien
tctggctgttgtcctcgattctgagtttgcttc

SEQ ID NO: 287799 - DNA, 33 bp, Homo sapien
agagtctagatttggccgaaagtccgtttgtag

SEQ ID NO: 287800 - DNA, 33 bp, Homo sapien
agagtctagatttggctgaaagtccgtttgtag

SEQ ID NO: 287801 - DNA, 33 bp, Homo sapien
aatatacttgatattcagaaatcacgtatagtt

SEQ ID NO: 287802 - DNA, 33 bp, Homo sapien
aatatacttgatattcggaaatcacgtatagtt

SEQ ID NO: 287803 - DNA, 33 bp, Homo sapien
ctcaaataagatctccaaatgagtaaatatcat

SEQ ID NO: 287804 - DNA, 33 bp, Homo sapien
ctcaaataagatctccgaatgagtaaatatcat

SEQ ID NO: 287805 - DNA, 33 bp, Homo sapien
gcacagtcctaggccacgctcaaattttattat

SEQ ID NO: 287806 - DNA, 33 bp, Homo sapien
gcacagtcctaggccatgctcaaattttattat

SEQ ID NO: 287807 - DNA, 33 bp, Homo sapien
tcaaaaccaatttcaaaagcgtgttctaagaaa

SEQ ID NO: 287808 - DNA, 33 bp, Homo sapien
tcaaaaccaatttcaacagcgtgttctaagaaa

SEQ ID NO: 287809 - DNA, 33 bp, Homo sapien
aacatgtaaatatccaactctgtgaccacaccc

SEQ ID NO: 287810 - DNA, 33 bp, Homo sapien
aacatgtaaatatccacctctgtgaccacaccc

SEQ ID NO: 287811 - DNA, 33 bp, Homo sapien
ttcacaaaccataagactcactcattttaaata

SEQ ID NO: 287812 - DNA, 33 bp, Homo sapien
ttcacaaaccataagattcactcattttaaata

SEQ ID NO: 287813 - DNA, 33 bp, Homo sapien
gattcttcctgatataactgagaagaaaccagc

SEQ ID NO: 287814 - DNA, 33 bp, Homo sapien
gattcttcctgatatacctgagaagaaaccagc

SEQ ID NO: 287815 - DNA, 33 bp, Homo sapien
gagttaaaagccttgaagacagcacatgtggcc

SEQ ID NO: 287816 - DNA, 33 bp, Homo sapien
gagttaaaagccttgacgacagcacatgtggcc

SEQ ID NO: 287817 - DNA, 33 bp, Homo sapien
aattgcttgaagacagaaattgtgcattattca

SEQ ID NO: 287818 - DNA, 33 bp, Homo sapien
aattgcttgaagacaggaattgtgcattattca

SEQ ID NO: 287819 - DNA, 33 bp, Homo sapien
agaactagctcagaagccagtaaatgacaaaat

SEQ ID NO: 287820 - DNA, 33 bp, Homo sapien
agaactagctcagaagtcagtaaatgacaaaat

SEQ ID NO: 287821 - DNA, 33 bp, Homo sapien
tgaattggtaattggcagatcaagtaaaatgtt

SEQ ID NO: 287822 - DNA, 33 bp, Homo sapien
tgaattggtaattggcggatcaagtaaaatgtt

SEQ ID NO: 287823 - DNA, 33 bp, Homo sapien
gagtacaggatggaagaaacagctaagttttct

SEQ ID NO: 287824 - DNA, 33 bp, Homo sapien
gagtacaggatggaaggaacagctaagttttct

SEQ ID NO: 287825 - DNA, 33 bp, Homo sapien
ctgtccactgcccatcacaaatacaactgagac

SEQ ID NO: 287826 - DNA, 33 bp, Homo sapien
ctgtccactgcccatcgcaaatacaactgagac

SEQ ID NO: 287827 - DNA, 33 bp, Homo sapien
gtgggagaatagggtcaccacttactttagaga

SEQ ID NO: 287828 - DNA, 33 bp, Homo sapien
gtgggagaatagggtcgccacttactttagaga

SEQ ID NO: 287829 - DNA, 33 bp, Homo sapien
cttatagctgaatgaagtgtgcagactgacaaa

SEQ ID NO: 287830 - DNA, 33 bp, Homo sapien
cttatagctgaatgaattgtgcagactgacaaa

SEQ ID NO: 287831 - DNA, 33 bp, Homo sapien
gagtgcaggaatttcaactctatctttcaaatt

SEQ ID NO: 287832 - DNA, 33 bp, Homo sapien
gagtgcaggaatttcatctctatctttcaaatt

SEQ ID NO: 287833 - DNA, 33 bp, Homo sapien
gtgcagccatgtttgaaggccatgaatttatac

SEQ ID NO: 287834 - DNA, 33 bp, Homo sapien
gtgcagccatgtttgagggccatgaatttatac

SEQ ID NO: 287835 - DNA, 33 bp, Homo sapien
ataggattgttgtgcacgttaaagaagttacca

SEQ ID NO: 287836 - DNA, 33 bp, Homo sapien
ataggattgttgtgcatgttaaagaagttacca

SEQ ID NO: 287837 - DNA, 33 bp, Homo sapien
ggactacaatcatagaatacgttatctaatcac

SEQ ID NO: 287838 - DNA, 33 bp, Homo sapien
ggactacaatcatagagtacgttatctaatcac

SEQ ID NO: 287839 - DNA, 33 bp, Homo sapien
gacagaaagagcactaaccctaaagaaaaaggt

SEQ ID NO: 287840 - DNA, 33 bp, Homo sapien
gacagaaagagcactacccctaaagaaaaaggt

SEQ ID NO: 287841 - DNA, 33 bp, Homo sapien
ctgtatggatggcatcatttggttaaactgact

SEQ ID NO: 287842 - DNA, 33 bp, Homo sapien
ctgtatggatggcatcgtttggttaaactgact

SEQ ID NO: 287843 - DNA, 33 bp, Homo sapien
tcctctgccataagccaaagacattcaccagtc

SEQ ID NO: 287844 - DNA, 33 bp, Homo sapien
tcctctgccataagccgaagacattcaccagtc

SEQ ID NO: 287845 - DNA, 33 bp, Homo sapien
tgataagataaaagccagatgtttagaaatgaa

SEQ ID NO: 287846 - DNA, 33 bp, Homo sapien
tgataagataaaagccggatgtttagaaatgaa

SEQ ID NO: 287847 - DNA, 33 bp, Homo sapien
tttaaccaccaatgaacgaaattcccagttgta

SEQ ID NO: 287848 - DNA, 33 bp, Homo sapien
tttaaccaccaatgaatgaaattcccagttgta

SEQ ID NO: 287849 - DNA, 33 bp, Homo sapien
tgatagttacgctaacaagatgactcaaatagg

SEQ ID NO: 287850 - DNA, 33 bp, Homo sapien
tgatagttacgctaaccagatgactcaaatagg

SEQ ID NO: 287851 - DNA, 33 bp, Homo sapien
tttgttttgcacggataatcaggatatttgcaa

SEQ ID NO: 287852 - DNA, 33 bp, Homo sapien
tttgttttgcacggatcatcaggatatttgcaa

SEQ ID NO: 287853 - DNA, 33 bp, Homo sapien
tcttcctcttctctacactttgagctccttgag

SEQ ID NO: 287854 - DNA, 33 bp, Homo sapien
tcttcctcttctctacgctttgagctccttgag

SEQ ID NO: 287855 - DNA, 33 bp, Homo sapien
aggaatgagatcatcccgaagaagtccttaaaa

SEQ ID NO: 287856 - DNA, 33 bp, Homo sapien
aggaatgagatcatcctgaagaagtccttaaaa

SEQ ID NO: 287857 - DNA, 33 bp, Homo sapien
ttgcctggtcatctaaatagtctgtcacaaaag

SEQ ID NO: 287858 - DNA, 33 bp, Homo sapien
ttgcctggtcatctaactagtctgtcacaaaag

SEQ ID NO: 287859 - DNA, 33 bp, Homo sapien
ttcaatgttgttatcacgaccatttgaatatta

SEQ ID NO: 287860 - DNA, 33 bp, Homo sapien
ttcaatgttgttatcatgaccatttgaatatta

SEQ ID NO: 287861 - DNA, 33 bp, Homo sapien
aaactaggaagccaaaagtttagaaaataacaa

SEQ ID NO: 287862 - DNA, 33 bp, Homo sapien
aaactaggaagccaaaggtttagaaaataacaa

SEQ ID NO: 287863 - DNA, 33 bp, Homo sapien
ggctgagttgccctaccgaggcatttgactcaa

SEQ ID NO: 287864 - DNA, 33 bp, Homo sapien
ggctgagttgccctacggaggcatttgactcaa

SEQ ID NO: 287865 - DNA, 33 bp, Homo sapien
aaagaactaagcaaccaaaatggataatacttt

SEQ ID NO: 287866 - DNA, 33 bp, Homo sapien
aaagaactaagcaacctaaatggataatacttt

SEQ ID NO: 287867 - DNA, 33 bp, Homo sapien
cagacttggttagaataaaagaccagaagggca

SEQ ID NO: 287868 - DNA, 33 bp, Homo sapien
cagacttggttagaattaaagaccagaagggca

SEQ ID NO: 287869 - DNA, 33 bp, Homo sapien
aaccagttaggctcaaccaaaatctctgaaatg

SEQ ID NO: 287870 - DNA, 33 bp, Homo sapien
aaccagttaggctcaatcaaaatctctgaaatg

SEQ ID NO: 287871 - DNA, 33 bp, Homo sapien
attataacaaaatttcacaaactgggtgactta

SEQ ID NO: 287872 - DNA, 33 bp, Homo sapien
attataacaaaatttcgcaaactgggtgactta

SEQ ID NO: 287873 - DNA, 33 bp, Homo sapien
tctaacttaattcccacggtccttacatatggc

SEQ ID NO: 287874 - DNA, 33 bp, Homo sapien
tctaacttaattcccatggtccttacatatggc

SEQ ID NO: 287875 - DNA, 33 bp, Homo sapien
tttccaattgtctgtaagtccagaagttaccag

SEQ ID NO: 287876 - DNA, 33 bp, Homo sapien
tttccaattgtctgtaggtccagaagttaccag

SEQ ID NO: 287877 - DNA, 33 bp, Homo sapien
tgtccttgactacatcacacagtatattcacta

SEQ ID NO: 287878 - DNA, 33 bp, Homo sapien
tgtccttgactacatcgcacagtatattcacta

SEQ ID NO: 287879 - DNA, 33 bp, Homo sapien
ttttcagctcttgttcaaagggaagcaagctgc

SEQ ID NO: 287880 - DNA, 33 bp, Homo sapien
ttttcagctcttgttctaagggaagcaagctgc

SEQ ID NO: 287881 - DNA, 33 bp, Homo sapien
agagtgtgctcaagtgaaatcgacaaccagtaa

SEQ ID NO: 287882 - DNA, 33 bp, Homo sapien
agagtgtgctcaagtgtaatcgacaaccagtaa

SEQ ID NO: 287883 - DNA, 33 bp, Homo sapien
tttgattgtaattatgaacgtgaattaaaactg

SEQ ID NO: 287884 - DNA, 33 bp, Homo sapien
tttgattgtaattatggacgtgaattaaaactg

SEQ ID NO: 287885 - DNA, 33 bp, Homo sapien
aaatactatacactggaacataaagaacatatg

SEQ ID NO: 287886 - DNA, 33 bp, Homo sapien
aaatactatacactggcacataaagaacatatg

SEQ ID NO: 287887 - DNA, 33 bp, Homo sapien
ctcagaacaatgaaataaatggaaggatactaa

SEQ ID NO: 287888 - DNA, 33 bp, Homo sapien
ctcagaacaatgaaattaatggaaggatactaa

SEQ ID NO: 287889 - DNA, 33 bp, Homo sapien
tctgtggacctatggcaatggagcttagggagc

SEQ ID NO: 287890 - DNA, 33 bp, Homo sapien
tctgtggacctatggcgatggagcttagggagc

SEQ ID NO: 287891 - DNA, 33 bp, Homo sapien
cagaaaccacaaaaccactgatttatcagattg

SEQ ID NO: 287892 - DNA, 33 bp, Homo sapien
cagaaaccacaaaaccgctgatttatcagattg

SEQ ID NO: 287893 - DNA, 33 bp, Homo sapien
ccaaaatgctatttctgaaactggccaaaacaa

SEQ ID NO: 287894 - DNA, 33 bp, Homo sapien
ccaaaatgctatttcttaaactggccaaaacaa

SEQ ID NO: 287895 - DNA, 33 bp, Homo sapien
gagaaccagggcagccaatgatgatgtaagtct

SEQ ID NO: 287896 - DNA, 33 bp, Homo sapien
gagaaccagggcagccgatgatgatgtaagtct

SEQ ID NO: 287897 - DNA, 33 bp, Homo sapien
taaataaaagctgaataacaactgtgagatcac

SEQ ID NO: 287898 - DNA, 33 bp, Homo sapien
taaataaaagctgaatgacaactgtgagatcac

SEQ ID NO: 287899 - DNA, 33 bp, Homo sapien
gccctgaggaaaacaaatagtctcagaggtttg

SEQ ID NO: 287900 - DNA, 33 bp, Homo sapien
gccctgaggaaaacaagtagtctcagaggtttg

SEQ ID NO: 287901 - DNA, 33 bp, Homo sapien
acttcccatacgcacaatagtagtttatttaag

SEQ ID NO: 287902 - DNA, 33 bp, Homo sapien
acttcccatacgcacagtagtagtttatttaag

SEQ ID NO: 287903 - DNA, 33 bp, Homo sapien
gtagagatgaggtcgcactatgttgtccatgct

SEQ ID NO: 287904 - DNA, 33 bp, Homo sapien
gtagagatgaggtcgctctatgttgtccatgct

SEQ ID NO: 287905 - DNA, 33 bp, Homo sapien
tgaaaatttgttagcaaagctacctttatcaat

SEQ ID NO: 287906 - DNA, 33 bp, Homo sapien
tgaaaatttgttagcatagctacctttatcaat

SEQ ID NO: 287907 - DNA, 33 bp, Homo sapien
gcattctcattctaacacccaaatatattaggt

SEQ ID NO: 287908 - DNA, 33 bp, Homo sapien
gcattctcattctaacgcccaaatatattaggt

SEQ ID NO: 287909 - DNA, 33 bp, Homo sapien
tggcctcataactcttcaagagccttcctaatt

SEQ ID NO: 287910 - DNA, 33 bp, Homo sapien
tggcctcataactctttaagagccttcctaatt

SEQ ID NO: 287911 - DNA, 33 bp, Homo sapien
agtgggtcttctcttccagccatgaagaaccgc

SEQ ID NO: 287912 - DNA, 33 bp, Homo sapien
agtgggtcttctcttctagccatgaagaaccgc

SEQ ID NO: 287913 - DNA, 33 bp, Homo sapien
ctttgggtttatgagtcaaccagaaaacgttac

SEQ ID NO: 287914 - DNA, 33 bp, Homo sapien
ctttgggtttatgagttaaccagaaaacgttac

SEQ ID NO: 287915 - DNA, 33 bp, Homo sapien
gcctctgcttgctcaacgaaaggagtctttctg

SEQ ID NO: 287916 - DNA, 33 bp, Homo sapien
gcctctgcttgctcaatgaaaggagtctttctg

SEQ ID NO: 287917 - DNA, 33 bp, Homo sapien
attctattggtaaggcaacatcaaagcacaagt

SEQ ID NO: 287918 - DNA, 33 bp, Homo sapien
attctattggtaaggcgacatcaaagcacaagt

SEQ ID NO: 287919 - DNA, 33 bp, Homo sapien
tatccaatacctagcaaatccactattctaatt

SEQ ID NO: 287920 - DNA, 33 bp, Homo sapien
tatccaatacctagcagatccactattctaatt

SEQ ID NO: 287921 - DNA, 33 bp, Homo sapien
agctcaaaacctatacccgtgacaagtcttcca

SEQ ID NO: 287922 - DNA, 33 bp, Homo sapien
agctcaaaacctatactcgtgacaagtcttcca

SEQ ID NO: 287923 - DNA, 33 bp, Homo sapien
tataagttaaattggacaacaagattaaaatgg

SEQ ID NO: 287924 - DNA, 33 bp, Homo sapien
tataagttaaattggagaacaagattaaaatgg

SEQ ID NO: 287925 - DNA, 33 bp, Homo sapien
atggtcattcttaatacggagtgcacctatttc

SEQ ID NO: 287926 - DNA, 33 bp, Homo sapien
atggtcattcttaatatggagtgcacctatttc

SEQ ID NO: 287927 - DNA, 33 bp, Homo sapien
cccatcaacaagtgcaaagtgaatttcatgagc

SEQ ID NO: 287928 - DNA, 33 bp, Homo sapien
cccatcaacaagtgcagagtgaatttcatgagc

SEQ ID NO: 287929 - DNA, 33 bp, Homo sapien
agagccctttagtccagaaattcttcatagcaa

SEQ ID NO: 287930 - DNA, 33 bp, Homo sapien
agagccctttagtccataaattcttcatagcaa

SEQ ID NO: 287931 - DNA, 33 bp, Homo sapien
atacatttttttctacagcatatacctggaatt

SEQ ID NO: 287932 - DNA, 33 bp, Homo sapien
atacatttttttctacggcatatacctggaatt

SEQ ID NO: 287933 - DNA, 33 bp, Homo sapien
agctgctgctgccaaaatatgcaccatgggctg

SEQ ID NO: 287934 - DNA, 33 bp, Homo sapien
agctgctgctgccaaagtatgcaccatgggctg

SEQ ID NO: 287935 - DNA, 33 bp, Homo sapien
tttgcaatgtagtgacaaggtccttctttcacc

SEQ ID NO: 287936 - DNA, 33 bp, Homo sapien
tttgcaatgtagtgactaggtccttctttcacc

SEQ ID NO: 287937 - DNA, 33 bp, Homo sapien
ggatcatttgcgctgaagatgtctaggctgcag

SEQ ID NO: 287938 - DNA, 33 bp, Homo sapien
ggatcatttgcgctgaggatgtctaggctgcag

SEQ ID NO: 287939 - DNA, 33 bp, Homo sapien
attttccagttttgataaaatgaaaccacaggg

SEQ ID NO: 287940 - DNA, 33 bp, Homo sapien
attttccagttttgatcaaatgaaaccacaggg

SEQ ID NO: 287941 - DNA, 33 bp, Homo sapien
gattcacagagtccacaataaaaccaatccact

SEQ ID NO: 287942 - DNA, 33 bp, Homo sapien
gattcacagagtccacgataaaaccaatccact

SEQ ID NO: 287943 - DNA, 33 bp, Homo sapien
tcttaatttgcttacactgaggtcagcttgctt

SEQ ID NO: 287944 - DNA, 33 bp, Homo sapien
tcttaatttgcttacattgaggtcagcttgctt

SEQ ID NO: 287945 - DNA, 33 bp, Homo sapien
tccagaactatgagaaataaaggtctgctgttt

SEQ ID NO: 287946 - DNA, 33 bp, Homo sapien
tccagaactatgagaagtaaaggtctgctgttt

SEQ ID NO: 287947 - DNA, 33 bp, Homo sapien
attattcagattcaataacataaatggaagacc

SEQ ID NO: 287948 - DNA, 33 bp, Homo sapien
attattcagattcaatgacataaatggaagacc

SEQ ID NO: 287949 - DNA, 33 bp, Homo sapien
ctctccataggttagacggtgaaacagccttgg

SEQ ID NO: 287950 - DNA, 33 bp, Homo sapien
ctctccataggttagatggtgaaacagccttgg

SEQ ID NO: 287951 - DNA, 33 bp, Homo sapien
gtaaatctcaggaaggcatcattgacgccttaa

SEQ ID NO: 287952 - DNA, 33 bp, Homo sapien
gtaaatctcaggaaggtatcattgacgccttaa

SEQ ID NO: 287953 - DNA, 33 bp, Homo sapien
ccactataagttcttcacactatttgatttttt

SEQ ID NO: 287954 - DNA, 33 bp, Homo sapien
ccactataagttcttcgcactatttgatttttt

SEQ ID NO: 287955 - DNA, 33 bp, Homo sapien
cagctccagccaccaaattaacatctaaggcag

SEQ ID NO: 287956 - DNA, 33 bp, Homo sapien
cagctccagccaccaagttaacatctaaggcag

SEQ ID NO: 287957 - DNA, 33 bp, Homo sapien
aaatccatttacatgaatatggggcaatacagg

SEQ ID NO: 287958 - DNA, 33 bp, Homo sapien
aaatccatttacatgagtatggggcaatacagg

SEQ ID NO: 287959 - DNA, 33 bp, Homo sapien
gtggatccctaacagaacttcttccttgtggaa

SEQ ID NO: 287960 - DNA, 33 bp, Homo sapien
gtggatccctaacagagcttcttccttgtggaa

SEQ ID NO: 287961 - DNA, 33 bp, Homo sapien
tacagtgtccccactacacctcattgtctcaga

SEQ ID NO: 287962 - DNA, 33 bp, Homo sapien
tacagtgtccccactatacctcattgtctcaga

SEQ ID NO: 287963 - DNA, 33 bp, Homo sapien
tctgaatgttgatatcgcttacaaattcatagt

SEQ ID NO: 287964 - DNA, 33 bp, Homo sapien
tctgaatgttgatatctcttacaaattcatagt

SEQ ID NO: 287965 - DNA, 33 bp, Homo sapien
tagcccagtggattccaatgttctgaacaaaca

SEQ ID NO: 287966 - DNA, 33 bp, Homo sapien
tagcccagtggattcctatgttctgaacaaaca

SEQ ID NO: 287967 - DNA, 33 bp, Homo sapien
ctcaacctggaagaggaccgtcaacagaaaccc

SEQ ID NO: 287968 - DNA, 33 bp, Homo sapien
ctcaacctggaagaggtccgtcaacagaaaccc

SEQ ID NO: 287969 - DNA, 33 bp, Homo sapien
aaaacacaaagagttcacatatacctccacacc

SEQ ID NO: 287970 - DNA, 33 bp, Homo sapien
aaaacacaaagagttcgcatatacctccacacc

SEQ ID NO: 287971 - DNA, 33 bp, Homo sapien
agttaataaaatgtacggatattgtctcattag

SEQ ID NO: 287972 - DNA, 33 bp, Homo sapien
agttaataaaatgtactgatattgtctcattag

SEQ ID NO: 287973 - DNA, 33 bp, Homo sapien
atcaatacgatttagcactgtgaatattgacct

SEQ ID NO: 287974 - DNA, 33 bp, Homo sapien
atcaatacgatttagcgctgtgaatattgacct

SEQ ID NO: 287975 - DNA, 33 bp, Homo sapien
cctgtcaccaacctacaattctataaccagaaa

SEQ ID NO: 287976 - DNA, 33 bp, Homo sapien
cctgtcaccaacctacgattctataaccagaaa

SEQ ID NO: 287977 - DNA, 33 bp, Homo sapien
gggattcttgcatagcccagggttcacagagaa

SEQ ID NO: 287978 - DNA, 33 bp, Homo sapien
gggattcttgcatagctcagggttcacagagaa

SEQ ID NO: 287979 - DNA, 33 bp, Homo sapien
cagttatgttttgccaagtaacaaacgactcca

SEQ ID NO: 287980 - DNA, 33 bp, Homo sapien
cagttatgttttgccatgtaacaaacgactcca

SEQ ID NO: 287981 - DNA, 33 bp, Homo sapien
ctgaaaccaaggaagacgagagaagaaacccca

SEQ ID NO: 287982 - DNA, 33 bp, Homo sapien
ctgaaaccaaggaagatgagagaagaaacccca

SEQ ID NO: 287983 - DNA, 33 bp, Homo sapien
ggacgccttgggagtgccacactggcataggat

SEQ ID NO: 287984 - DNA, 33 bp, Homo sapien
ggacgccttgggagtgtcacactggcataggat

SEQ ID NO: 287985 - DNA, 33 bp, Homo sapien
aaaccaatgtacaagaatcatactgtgcaacac

SEQ ID NO: 287986 - DNA, 33 bp, Homo sapien
aaaccaatgtacaagagtcatactgtgcaacac

SEQ ID NO: 287987 - DNA, 33 bp, Homo sapien
cacacatacagataatcagtctggattacttta

SEQ ID NO: 287988 - DNA, 33 bp, Homo sapien
cacacatacagataattagtctggattacttta

SEQ ID NO: 287989 - DNA, 33 bp, Homo sapien
aattaggacaagagaactgaagtcatagaaggg

SEQ ID NO: 287990 - DNA, 33 bp, Homo sapien
aattaggacaagagaattgaagtcatagaaggg

SEQ ID NO: 287991 - DNA, 33 bp, Homo sapien
cttgatttttctatcaccagagtttaaattgtt

SEQ ID NO: 287992 - DNA, 33 bp, Homo sapien
cttgatttttctatcatcagagtttaaattgtt

SEQ ID NO: 287993 - DNA, 33 bp, Homo sapien
tttatgtctgtgagtacgcaaggtttagctccc

SEQ ID NO: 287994 - DNA, 33 bp, Homo sapien
tttatgtctgtgagtatgcaaggtttagctccc

SEQ ID NO: 287995 - DNA, 33 bp, Homo sapien
ggacacacttccttcacaggcctgcattttgta

SEQ ID NO: 287996 - DNA, 33 bp, Homo sapien
ggacacacttccttcataggcctgcattttgta

SEQ ID NO: 287997 - DNA, 33 bp, Homo sapien
atattaattgttttgagggcaatatattagcaa

SEQ ID NO: 287998 - DNA, 33 bp, Homo sapien
atattaattgttttgatggcaatatattagcaa

SEQ ID NO: 287999 - DNA, 33 bp, Homo sapien
gataggtttgaataaaatagtcctaaggcttaa

SEQ ID NO: 288000 - DNA, 33 bp, Homo sapien
gataggtttgaataaagtagtcctaaggcttaa

SEQ ID NO: 288001 - DNA, 33 bp, Homo sapien
cttggaggtagaagccacctagaaccatgcctt

SEQ ID NO: 288002 - DNA, 33 bp, Homo sapien
cttggaggtagaagccgcctagaaccatgcctt

SEQ ID NO: 288003 - DNA, 33 bp, Homo sapien
atgcaggctttatgaaactcattatctattcat

SEQ ID NO: 288004 - DNA, 33 bp, Homo sapien
atgcaggctttatgaagctcattatctattcat

SEQ ID NO: 288005 - DNA, 33 bp, Homo sapien
gactacctctgtaatccaactgaaacgtaggtt

SEQ ID NO: 288006 - DNA, 33 bp, Homo sapien
gactacctctgtaatctaactgaaacgtaggtt

SEQ ID NO: 288007 - DNA, 33 bp, Homo sapien
tctatgctcataaaaagattgaccaatgacttt

SEQ ID NO: 288008 - DNA, 33 bp, Homo sapien
tctatgctcataaaaatattgaccaatgacttt

SEQ ID NO: 288009 - DNA, 33 bp, Homo sapien
aattcaaatgatgcacacataatatgttctcta

SEQ ID NO: 288010 - DNA, 33 bp, Homo sapien
aattcaaatgatgcacccataatatgttctcta

SEQ ID NO: 288011 - DNA, 33 bp, Homo sapien
tgtggaggaatgtaatcagcaagaaaacttcaa

SEQ ID NO: 288012 - DNA, 33 bp, Homo sapien
tgtggaggaatgtaattagcaagaaaacttcaa

SEQ ID NO: 288013 - DNA, 33 bp, Homo sapien
tcgatggcattttagcgcctctgttattgtcta

SEQ ID NO: 288014 - DNA, 33 bp, Homo sapien
tcgatggcattttagctcctctgttattgtcta

SEQ ID NO: 288015 - DNA, 33 bp, Homo sapien
gttttggcctacccaacgttacctggtcatgac

SEQ ID NO: 288016 - DNA, 33 bp, Homo sapien
gttttggcctacccaatgttacctggtcatgac

SEQ ID NO: 288017 - DNA, 33 bp, Homo sapien
cccagagctgatgactcaagattctgggaggtt

SEQ ID NO: 288018 - DNA, 33 bp, Homo sapien
cccagagctgatgactgaagattctgggaggtt

SEQ ID NO: 288019 - DNA, 33 bp, Homo sapien
accgtgttgacagtgacgactgtattgcagcta

SEQ ID NO: 288020 - DNA, 33 bp, Homo sapien
accgtgttgacagtgatgactgtattgcagcta

SEQ ID NO: 288021 - DNA, 33 bp, Homo sapien
ttaaagcttcatgttccatcaaataacgtttac

SEQ ID NO: 288022 - DNA, 33 bp, Homo sapien
ttaaagcttcatgttctatcaaataacgtttac

SEQ ID NO: 288023 - DNA, 33 bp, Homo sapien
tgtttaaagtctagaaatgggaattggccaaga

SEQ ID NO: 288024 - DNA, 33 bp, Homo sapien
tgtttaaagtctagaagtgggaattggccaaga

SEQ ID NO: 288025 - DNA, 33 bp, Homo sapien
agaaaaatgtcacagaacacatacatattatat

SEQ ID NO: 288026 - DNA, 33 bp, Homo sapien
agaaaaatgtcacagaccacatacatattatat

SEQ ID NO: 288027 - DNA, 33 bp, Homo sapien
tctttctcccatactgaataattcctgctcttg

SEQ ID NO: 288028 - DNA, 33 bp, Homo sapien
tctttctcccatactggataattcctgctcttg

SEQ ID NO: 288029 - DNA, 33 bp, Homo sapien
gatgagtcttagaaaacgaagataaaatcccta

SEQ ID NO: 288030 - DNA, 33 bp, Homo sapien
gatgagtcttagaaaatgaagataaaatcccta

SEQ ID NO: 288031 - DNA, 33 bp, Homo sapien
atggtgacttttatgacggtgctctaacaattc

SEQ ID NO: 288032 - DNA, 33 bp, Homo sapien
atggtgacttttatgatggtgctctaacaattc

SEQ ID NO: 288033 - DNA, 33 bp, Homo sapien
agtggccagggagtaacaatacgggaagaagca

SEQ ID NO: 288034 - DNA, 33 bp, Homo sapien
agtggccagggagtaataatacgggaagaagca

SEQ ID NO: 288035 - DNA, 33 bp, Homo sapien
ttgggagacagttatgacaccttaatctttgtt

SEQ ID NO: 288036 - DNA, 33 bp, Homo sapien
ttgggagacagttatggcaccttaatctttgtt

SEQ ID NO: 288037 - DNA, 33 bp, Homo sapien
tcttaaattctgtctaacagagagagagagaga

SEQ ID NO: 288038 - DNA, 33 bp, Homo sapien
tcttaaattctgtctaccagagagagagagaga

SEQ ID NO: 288039 - DNA, 33 bp, Homo sapien
tatatccttgcatacaaattaagaaaaaatagc

SEQ ID NO: 288040 - DNA, 33 bp, Homo sapien
tatatccttgcatacacattaagaaaaaatagc

SEQ ID NO: 288041 - DNA, 33 bp, Homo sapien
tctcacgtgcagccacgcctgtatctattgact

SEQ ID NO: 288042 - DNA, 33 bp, Homo sapien
tctcacgtgcagccactcctgtatctattgact

SEQ ID NO: 288043 - DNA, 33 bp, Homo sapien
attttggagggcattacgagaaaccttttgaaa

SEQ ID NO: 288044 - DNA, 33 bp, Homo sapien
attttggagggcattatgagaaaccttttgaaa

SEQ ID NO: 288045 - DNA, 33 bp, Homo sapien
tactgtgcatggctaacgtgctactcacaccac

SEQ ID NO: 288046 - DNA, 33 bp, Homo sapien
tactgtgcatggctaatgtgctactcacaccac

SEQ ID NO: 288047 - DNA, 33 bp, Homo sapien
gtgctttgatactgaaagacacaaatgtgaccg

SEQ ID NO: 288048 - DNA, 33 bp, Homo sapien
gtgctttgatactgaaggacacaaatgtgaccg

SEQ ID NO: 288049 - DNA, 33 bp, Homo sapien
atgaccatgtttgacacaactcagccttttttc

SEQ ID NO: 288050 - DNA, 33 bp, Homo sapien
atgaccatgtttgacataactcagccttttttc

SEQ ID NO: 288051 - DNA, 33 bp, Homo sapien
gttttggtcctaaatccacactggttcaaaact

SEQ ID NO: 288052 - DNA, 33 bp, Homo sapien
gttttggtcctaaatctacactggttcaaaact

SEQ ID NO: 288053 - DNA, 33 bp, Homo sapien
gaccaaaaccattacacgaatcaaagaaaggtg

SEQ ID NO: 288054 - DNA, 33 bp, Homo sapien
gaccaaaaccattacatgaatcaaagaaaggtg

SEQ ID NO: 288055 - DNA, 33 bp, Homo sapien
gatgctatggttttcaatccacagatgttcata

SEQ ID NO: 288056 - DNA, 33 bp, Homo sapien
gatgctatggttttcagtccacagatgttcata

SEQ ID NO: 288057 - DNA, 33 bp, Homo sapien
tgttctttgggcattgaaaagatggtgttatct

SEQ ID NO: 288058 - DNA, 33 bp, Homo sapien
tgttctttgggcattggaaagatggtgttatct

SEQ ID NO: 288059 - DNA, 33 bp, Homo sapien
agaatacatcaacaaaatggagaagaaggtgcc

SEQ ID NO: 288060 - DNA, 33 bp, Homo sapien
agaatacatcaacaaagtggagaagaaggtgcc

SEQ ID NO: 288061 - DNA, 33 bp, Homo sapien
agtactttcactgttcacttcttcctgaaattt

SEQ ID NO: 288062 - DNA, 33 bp, Homo sapien
agtactttcactgttcgcttcttcctgaaattt

SEQ ID NO: 288063 - DNA, 33 bp, Homo sapien
tctggcattgagattcaccgtaaattccatttg

SEQ ID NO: 288064 - DNA, 33 bp, Homo sapien
tctggcattgagattcgccgtaaattccatttg

SEQ ID NO: 288065 - DNA, 33 bp, Homo sapien
ggaaagaagataaccacgttaaggattctgcaa

SEQ ID NO: 288066 - DNA, 33 bp, Homo sapien
ggaaagaagataaccatgttaaggattctgcaa

SEQ ID NO: 288067 - DNA, 33 bp, Homo sapien
cccaggaaatcattcaacagactgcctgggata

SEQ ID NO: 288068 - DNA, 33 bp, Homo sapien
cccaggaaatcattcagcagactgcctgggata

SEQ ID NO: 288069 - DNA, 33 bp, Homo sapien
acgatttaaggaagaaaatgtcaatcatacctc

SEQ ID NO: 288070 - DNA, 33 bp, Homo sapien
acgatttaaggaagaagatgtcaatcatacctc

SEQ ID NO: 288071 - DNA, 33 bp, Homo sapien
acatctttgcaagcaaccttaattggtttctta

SEQ ID NO: 288072 - DNA, 33 bp, Homo sapien
acatctttgcaagcaatcttaattggtttctta

SEQ ID NO: 288073 - DNA, 33 bp, Homo sapien
aatcctaaccaccttccaaagtctgtttcaaat

SEQ ID NO: 288074 - DNA, 33 bp, Homo sapien
aatcctaaccaccttctaaagtctgtttcaaat

SEQ ID NO: 288075 - DNA, 33 bp, Homo sapien
agtgatggaatgggacggaaacccaagtctgcc

SEQ ID NO: 288076 - DNA, 33 bp, Homo sapien
agtgatggaatgggactgaaacccaagtctgcc

SEQ ID NO: 288077 - DNA, 33 bp, Homo sapien
gatagaagacagagatcaccggaaaggtgcaaa

SEQ ID NO: 288078 - DNA, 33 bp, Homo sapien
gatagaagacagagatgaccggaaaggtgcaaa

SEQ ID NO: 288079 - DNA, 33 bp, Homo sapien
ggtggttcttgtcccactgcaattttaatcaaa

SEQ ID NO: 288080 - DNA, 33 bp, Homo sapien
ggtggttcttgtcccagtgcaattttaatcaaa

SEQ ID NO: 288081 - DNA, 33 bp, Homo sapien
ggcaaggagctggccacgtaaggatcagatctg

SEQ ID NO: 288082 - DNA, 33 bp, Homo sapien
ggcaaggagctggccatgtaaggatcagatctg

SEQ ID NO: 288083 - DNA, 33 bp, Homo sapien
tacctggcacaggacaggtactcagtaagtgag

SEQ ID NO: 288084 - DNA, 33 bp, Homo sapien
tacctggcacaggacatgtactcagtaagtgag

SEQ ID NO: 288085 - DNA, 33 bp, Homo sapien
cagccaatcagggtacaggaacacccaaatatg

SEQ ID NO: 288086 - DNA, 33 bp, Homo sapien
cagccaatcagggtacgggaacacccaaatatg

SEQ ID NO: 288087 - DNA, 33 bp, Homo sapien
aaaaaatcaaaaattcaagagacattggacaca

SEQ ID NO: 288088 - DNA, 33 bp, Homo sapien
aaaaaatcaaaaattcgagagacattggacaca

SEQ ID NO: 288089 - DNA, 33 bp, Homo sapien; identical to SEQ ID NO: 288087

SEQ ID NO: 288090 - DNA, 33 bp, Homo sapien; identical to SEQ ID NO: 288088

SEQ ID NO: 288091 - DNA, 33 bp, Homo sapien
tactgttgtattcatcacgctgtttgttgtctg

SEQ ID NO: 288092 - DNA, 33 bp, Homo sapien
tactgttgtattcatcgcgctgtttgttgtctg

SEQ ID NO: 288093 - DNA, 33 bp, Homo sapien
aagactggccatgcaacacctaatgctggagtg

SEQ ID NO: 288094 - DNA, 33 bp, Homo sapien
aagactggccatgcaatacctaatgctggagtg

SEQ ID NO: 288095 - DNA, 33 bp, Homo sapien
tatcccttctattgtaagtcttatcacacagca

SEQ ID NO: 288096 - DNA, 33 bp, Homo sapien
tatcccttctattgtaggtcttatcacacagca

SEQ ID NO: 288097 - DNA, 33 bp, Homo sapien
cccagaggggcagcgaaggtaatgtgtcacttt

SEQ ID NO: 288098 - DNA, 33 bp, Homo sapien
cccagaggggcagcgagggtaatgtgtcacttt

SEQ ID NO: 288099 - DNA, 33 bp, Homo sapien
gaatgagtccaaagtaagagattattgttaccc

SEQ ID NO: 288100 - DNA, 33 bp, Homo sapien
gaatgagtccaaagtaggagattattgttaccc

SEQ ID NO: 288101 - DNA, 33 bp, Homo sapien
ccagactgtgcaatcactgactttcttctgcct

SEQ ID NO: 288102 - DNA, 33 bp, Homo sapien
ccagactgtgcaatcattgactttcttctgcct

SEQ ID NO: 288103 - DNA, 33 bp, Homo sapien
atcctgccttcctggaagtagaggccaagtagc

SEQ ID NO: 288104 - DNA, 33 bp, Homo sapien
atcctgccttcctggaggtagaggccaagtagc

SEQ ID NO: 288105 - DNA, 33 bp, Homo sapien
agcccatttttgaaaacaaccttagaagtgaga

SEQ ID NO: 288106 - DNA, 33 bp, Homo sapien
agcccatttttgaaaagaaccttagaagtgaga

SEQ ID NO: 288107 - DNA, 33 bp, Homo sapien
gtctgttaagaagcctcacattttcagctgccc

SEQ ID NO: 288108 - DNA, 33 bp, Homo sapien
gtctgttaagaagccttacattttcagctgccc

SEQ ID NO: 288109 - DNA, 33 bp, Homo sapien
gacgagaaaggaaaaccggctcttggcagggcg

SEQ ID NO: 288110 - DNA, 33 bp, Homo sapien
gacgagaaaggaaaactggctcttggcagggcg

SEQ ID NO: 288111 - DNA, 33 bp, Homo sapien
atcaaccacttggaaaatactgggtatagttgg

SEQ ID NO: 288112 - DNA, 33 bp, Homo sapien
atcaaccacttggaaactactgggtatagttgg

SEQ ID NO: 288113 - DNA, 33 bp, Homo sapien
acacacccgctactcacctccttgacattcccc

SEQ ID NO: 288114 - DNA, 33 bp, Homo sapien
acacacccgctactcatctccttgacattcccc

SEQ ID NO: 288115 - DNA, 33 bp, Homo sapien
agaaagatcgaggtcacgtaacgacgcggcatt

SEQ ID NO: 288116 - DNA, 33 bp, Homo sapien
agaaagatcgaggtcatgtaacgacgcggcatt

SEQ ID NO: 288117 - DNA, 33 bp, Homo sapien
aagagtctggaaaatgaactctggcaaaggtta

SEQ ID NO: 288118 - DNA, 33 bp, Homo sapien
aagagtctggaaaatgcactctggcaaaggtta

SEQ ID NO: 288119 - DNA, 33 bp, Homo sapien
agtattatgctttgtcaacttatttcttaaata

SEQ ID NO: 288120 - DNA, 33 bp, Homo sapien
agtattatgctttgtccacttatttcttaaata

SEQ ID NO: 288121 - DNA, 33 bp, Homo sapien
aggaccatttctgtccagcaggttttgattaca

SEQ ID NO: 288122 - DNA, 33 bp, Homo sapien
aggaccatttctgtccggcaggttttgattaca

SEQ ID NO: 288123 - DNA, 33 bp, Homo sapien
gccagaataattccaggattgctattctctatg

SEQ ID NO: 288124 - DNA, 33 bp, Homo sapien
gccagaataattccagtattgctattctctatg

SEQ ID NO: 288125 - DNA, 33 bp, Homo sapien
gattaaaaattggaaacaacataatggtccaca

SEQ ID NO: 288126 - DNA, 33 bp, Homo sapien
gattaaaaattggaaataacataatggtccaca

SEQ ID NO: 288127 - DNA, 33 bp, Homo sapien
gagcacttacgacactaaactgaaatcacctgt

SEQ ID NO: 288128 - DNA, 33 bp, Homo sapien
gagcacttacgacactgaactgaaatcacctgt

SEQ ID NO: 288129 - DNA, 33 bp, Homo sapien
gtggtatgggacacataaggggtcagttttcat

SEQ ID NO: 288130 - DNA, 33 bp, Homo sapien
gtggtatgggacacatgaggggtcagttttcat

SEQ ID NO: 288131 - DNA, 33 bp, Homo sapien
ccatgtgtaacacctcaaaattctctattaaat

SEQ ID NO: 288132 - DNA, 33 bp, Homo sapien
ccatgtgtaacacctcgaaattctctattaaat

SEQ ID NO: 288133 - DNA, 33 bp, Homo sapien
agtcttcaaagccaaactcatccccaaatctgg

SEQ ID NO: 288134 - DNA, 33 bp, Homo sapien
agtcttcaaagccaaattcatccccaaatctgg

SEQ ID NO: 288135 - DNA, 33 bp, Homo sapien
gaaggagtttaccatacgagcgccaacgctttc

SEQ ID NO: 288136 - DNA, 33 bp, Homo sapien
gaaggagtttaccatatgagcgccaacgctttc

SEQ ID NO: 288137 - DNA, 33 bp, Homo sapien
ttcttccctagctgcaaattggaccacaattcc

SEQ ID NO: 288138 - DNA, 33 bp, Homo sapien
ttcttccctagctgcatattggaccacaattcc

SEQ ID NO: 288139 - DNA, 33 bp, Homo sapien
aacaaatggcttcaataataaggggaaaatgag

SEQ ID NO: 288140 - DNA, 33 bp, Homo sapien
aacaaatggcttcaatgataaggggaaaatgag

SEQ ID NO: 288141 - DNA, 33 bp, Homo sapien
ctgggtaacacagcaagatctcatctttaaaaa

SEQ ID NO: 288142 - DNA, 33 bp, Homo sapien
ctgggtaacacagcaatatctcatctttaaaaa

SEQ ID NO: 288143 - DNA, 33 bp, Homo sapien
cacttgggttaacttcaattacaacccgagtat

SEQ ID NO: 288144 - DNA, 33 bp, Homo sapien
cacttgggttaacttctattacaacccgagtat

SEQ ID NO: 288145 - DNA, 33 bp, Homo sapien
gatttaatttcagcagacccttaatttctgtgt

SEQ ID NO: 288146 - DNA, 33 bp, Homo sapien
gatttaatttcagcaggcccttaatttctgtgt

SEQ ID NO: 288147 - DNA, 33 bp, Homo sapien
atttgctataacaggacgtcttagaagatagaa

SEQ ID NO: 288148 - DNA, 33 bp, Homo sapien
atttgctataacaggatgtcttagaagatagaa

SEQ ID NO: 288149 - DNA, 33 bp, Homo sapien
tttatttctcatttcactattgcagctctagag

SEQ ID NO: 288150 - DNA, 33 bp, Homo sapien
tttatttctcatttcagtattgcagctctagag

SEQ ID NO: 288151 - DNA, 33 bp, Homo sapien
aataaaccttaagcacaaatgaatccagtaaga

SEQ ID NO: 288152 - DNA, 33 bp, Homo sapien
aataaaccttaagcactaatgaatccagtaaga

SEQ ID NO: 288153 - DNA, 33 bp, Homo sapien
catgtttaatgctgaacgtcacttaccttccga

SEQ ID NO: 288154 - DNA, 33 bp, Homo sapien
catgtttaatgctgaatgtcacttaccttccga

SEQ ID NO: 288155 - DNA, 33 bp, Homo sapien
taccttctgaacaagacgtagggaatgcaattt

SEQ ID NO: 288156 - DNA, 33 bp, Homo sapien
taccttctgaacaagatgtagggaatgcaattt

SEQ ID NO: 288157 - DNA, 33 bp, Homo sapien
tgggctatcagccagacgctcagtgctctttgc

SEQ ID NO: 288158 - DNA, 33 bp, Homo sapien
tgggctatcagccagatgctcagtgctctttgc

SEQ ID NO: 288159 - DNA, 33 bp, Homo sapien
accagcattactcaccaatgagcccatttgctt

SEQ ID NO: 288160 - DNA, 33 bp, Homo sapien
accagcattactcaccgatgagcccatttgctt

SEQ ID NO: 288161 - DNA, 33 bp, Homo sapien
gttggtctctaaggtgaagaatttatgtgagtt

SEQ ID NO: 288162 - DNA, 33 bp, Homo sapien
gttggtctctaaggtggagaatttatgtgagtt

SEQ ID NO: 288163 - DNA, 33 bp, Homo sapien
gaacagaacagcccgcaaatttccagcacatct

SEQ ID NO: 288164 - DNA, 33 bp, Homo sapien
gaacagaacagcccgcgaatttccagcacatct

SEQ ID NO: 288165 - DNA, 33 bp, Homo sapien
aacctcaaagactccccgcaaactggtgtcacc

SEQ ID NO: 288166 - DNA, 33 bp, Homo sapien
aacctcaaagactccctgcaaactggtgtcacc

SEQ ID NO: 288167 - DNA, 33 bp, Homo sapien
agccatatactcttaactaagctgaaggcaagc

SEQ ID NO: 288168 - DNA, 33 bp, Homo sapien
agccatatactcttaagtaagctgaaggcaagc

SEQ ID NO: 288169 - DNA, 33 bp, Homo sapien
gggttaaaaaaggcctaaaagtcatcacagaag

SEQ ID NO: 288170 - DNA, 33 bp, Homo sapien
gggttaaaaaaggcctgaaagtcatcacagaag

SEQ ID NO: 288171 - DNA, 33 bp, Homo sapien
atcttcgtattttggacagtggaagctctaaac

SEQ ID NO: 288172 - DNA, 33 bp, Homo sapien
atcttcgtattttggatagtggaagctctaaac

SEQ ID NO: 288173 - DNA, 33 bp, Homo sapien
ggccccactctggtgcaaggagcatggtaatct

SEQ ID NO: 288174 - DNA, 33 bp, Homo sapien
ggccccactctggtgctaggagcatggtaatct

SEQ ID NO: 288175 - DNA, 33 bp, Homo sapien
tctcaggagaaattcacgcttctacagcctcta

SEQ ID NO: 288176 - DNA, 33 bp, Homo sapien
tctcaggagaaattcatgcttctacagcctcta

SEQ ID NO: 288177 - DNA, 33 bp, Homo sapien
tggtgactggactacaatgagatttgggtaagc

SEQ ID NO: 288178 - DNA, 33 bp, Homo sapien
tggtgactggactacagtgagatttgggtaagc

SEQ ID NO: 288179 - DNA, 33 bp, Homo sapien
ggccatgtggaaacaccatcgctgggacacccc

SEQ ID NO: 288180 - DNA, 33 bp, Homo sapien
ggccatgtggaaacactatcgctgggacacccc

SEQ ID NO: 288181 - DNA, 33 bp, Homo sapien
tccatgaaaaatcaaaaacagccagaagggcaa

SEQ ID NO: 288182 - DNA, 33 bp, Homo sapien
tccatgaaaaatcaaagacagccagaagggcaa

SEQ ID NO: 288183 - DNA, 33 bp, Homo sapien
gtcttccttgttgtcgaagtggattgctggttg

SEQ ID NO: 288184 - DNA, 33 bp, Homo sapien
gtcttccttgttgtcggagtggattgctggttg

SEQ ID NO: 288185 - DNA, 33 bp, Homo sapien
ttatcccagaacctacaatgaggaaaaagcttc

SEQ ID NO: 288186 - DNA, 33 bp, Homo sapien
ttatcccagaacctacgatgaggaaaaagcttc

SEQ ID NO: 288187 - DNA, 33 bp, Homo sapien
gccccatcagtagcacagataagccagacaacc

SEQ ID NO: 288188 - DNA, 33 bp, Homo sapien
gccccatcagtagcacggataagccagacaacc

SEQ ID NO: 288189 - DNA, 33 bp, Homo sapien
tctgtccctctaggtgaaagtgttgtggttgga

SEQ ID NO: 288190 - DNA, 33 bp, Homo sapien
tctgtccctctaggtggaagtgttgtggttgga

SEQ ID NO: 288191 - DNA, 33 bp, Homo sapien
agaacagtggaaactgaatgaggaataaaaggc

SEQ ID NO: 288192 - DNA, 33 bp, Homo sapien
agaacagtggaaactggatgaggaataaaaggc

SEQ ID NO: 288193 - DNA, 33 bp, Homo sapien
acatagatgccttgaaatcttggagtggaattg

SEQ ID NO: 288194 - DNA, 33 bp, Homo sapien
acatagatgccttgaactcttggagtggaattg

SEQ ID NO: 288195 - DNA, 33 bp, Homo sapien
tctaggaactctaagcagacaaagctagaatgt

SEQ ID NO: 288196 - DNA, 33 bp, Homo sapien
tctaggaactctaagcggacaaagctagaatgt

SEQ ID NO: 288197 - DNA, 33 bp, Homo sapien
gtgtgcctccggatacaatgcactgaggatact

SEQ ID NO: 288198 - DNA, 33 bp, Homo sapien
gtgtgcctccggatacgatgcactgaggatact

SEQ ID NO: 288199 - DNA, 33 bp, Homo sapien
ggtatttctgctatgaagtcacatcacattttt

SEQ ID NO: 288200 - DNA, 33 bp, Homo sapien
ggtatttctgctatgaggtcacatcacattttt

SEQ ID NO: 288201 - DNA, 33 bp, Homo sapien
agtgtgtgccaggcaccggttcaagcattttaa

SEQ ID NO: 288202 - DNA, 33 bp, Homo sapien
agtgtgtgccaggcactggttcaagcattttaa

SEQ ID NO: 288203 - DNA, 33 bp, Homo sapien
gactcatgatttaatgaatttaaggctatgcag

SEQ ID NO: 288204 - DNA, 33 bp, Homo sapien
gactcatgatttaatggatttaaggctatgcag

SEQ ID NO: 288205 - DNA, 33 bp, Homo sapien
tcacattgcacactaacgtaatccgtcggcagc

SEQ ID NO: 288206 - DNA, 33 bp, Homo sapien
tcacattgcacactaatgtaatccgtcggcagc

SEQ ID NO: 288207 - DNA, 33 bp, Homo sapien
tgcccaagcaactttccccttcagccaggccag

SEQ ID NO: 288208 - DNA, 33 bp, Homo sapien
tgcccaagcaactttctccttcagccaggccag

SEQ ID NO: 288209 - DNA, 33 bp, Homo sapien
ctggttagaaaaaaaaatgagttgtgggttgta

SEQ ID NO: 288210 - DNA, 33 bp, Homo sapien
ctggttagaaaaaaaagtgagttgtgggttgta

SEQ ID NO: 288211 - DNA, 33 bp, Homo sapien
cgcagagatcacaaaacgtgtcccgcagaaggg

SEQ ID NO: 288212 - DNA, 33 bp, Homo sapien
cgcagagatcacaaaatgtgtcccgcagaaggg

SEQ ID NO: 288213 - DNA, 33 bp, Homo sapien
tacaggtgaaaaggataactgaaacggcagagg

SEQ ID NO: 288214 - DNA, 33 bp, Homo sapien
tacaggtgaaaaggatgactgaaacggcagagg

SEQ ID NO: 288215 - DNA, 33 bp, Homo sapien
ggacctcttgaggccacaaatttgaggatgtag

SEQ ID NO: 288216 - DNA, 33 bp, Homo sapien
ggacctcttgaggccataaatttgaggatgtag

SEQ ID NO: 288217 - DNA, 33 bp, Homo sapien
attggatcacctggacagccataaaaatatgga

SEQ ID NO: 288218 - DNA, 33 bp, Homo sapien
attggatcacctggaccgccataaaaatatgga

SEQ ID NO: 288219 - DNA, 33 bp, Homo sapien
gccaagttaatctagcaaccacagtgttgatta

SEQ ID NO: 288220 - DNA, 33 bp, Homo sapien
gccaagttaatctagcgaccacagtgttgatta

SEQ ID NO: 288221 - DNA, 33 bp, Homo sapien
tgtaactgctcttctacccctatgcaaattcat

SEQ ID NO: 288222 - DNA, 33 bp, Homo sapien
tgtaactgctcttctatccctatgcaaattcat

SEQ ID NO: 288223 - DNA, 33 bp, Homo sapien
ggtttttgtgttccaggcgtggaagcgagacac

SEQ ID NO: 288224 - DNA, 33 bp, Homo sapien
ggtttttgtgttccagtcgtggaagcgagacac

SEQ ID NO: 288225 - DNA, 33 bp, Homo sapien
ttgtgcaaggaaacaaacggagaaagactcggg

SEQ ID NO: 288226 - DNA, 33 bp, Homo sapien
ttgtgcaaggaaacaagcggagaaagactcggg

SEQ ID NO: 288227 - DNA, 33 bp, Homo sapien
cattgttaatgttcagaaaagaatgttaagaag

SEQ ID NO: 288228 - DNA, 33 bp, Homo sapien
cattgttaatgttcaggaaagaatgttaagaag

SEQ ID NO: 288229 - DNA, 33 bp, Homo sapien
ctcatacatggcttaacgataggaatatattct

SEQ ID NO: 288230 - DNA, 33 bp, Homo sapien
ctcatacatggcttaatgataggaatatattct

SEQ ID NO: 288231 - DNA, 33 bp, Homo sapien
ctctatccatttccagaacttttcatagatgag

SEQ ID NO: 288232 - DNA, 33 bp, Homo sapien
ctctatccatttccagtacttttcatagatgag

SEQ ID NO: 288233 - DNA, 33 bp, Homo sapien
ataaataaatgaaaaccgcacacctcaatacca

SEQ ID NO: 288234 - DNA, 33 bp, Homo sapien
ataaataaatgaaaactgcacacctcaatacca

SEQ ID NO: 288235 - DNA, 33 bp, Homo sapien
gcagagccagattgccacctgtgaaaagaccat

SEQ ID NO: 288236 - DNA, 33 bp, Homo sapien
gcagagccagattgccgcctgtgaaaagaccat

SEQ ID NO: 288237 - DNA, 33 bp, Homo sapien
gaatgtcataagaataagaggcaacccatacac

SEQ ID NO: 288238 - DNA, 33 bp, Homo sapien
gaatgtcataagaataggaggcaacccatacac

SEQ ID NO: 288239 - DNA, 33 bp, Homo sapien
ctgaaaaaaatatagaatcactttgagaattca

SEQ ID NO: 288240 - DNA, 33 bp, Homo sapien
ctgaaaaaaatatagactcactttgagaattca

SEQ ID NO: 288241 - DNA, 33 bp, Homo sapien
cagactatttaatataccgtaagcaacataaga

SEQ ID NO: 288242 - DNA, 33 bp, Homo sapien
cagactatttaatatatcgtaagcaacataaga

SEQ ID NO: 288243 - DNA, 33 bp, Homo sapien
tcttgttaattccaaaatttatgcaagcaccat

SEQ ID NO: 288244 - DNA, 33 bp, Homo sapien
tcttgttaattccaaagtttatgcaagcaccat

SEQ ID NO: 288245 - DNA, 33 bp, Homo sapien
cctacttattccttaaatctgagtcttaatcag

SEQ ID NO: 288246 - DNA, 33 bp, Homo sapien
cctacttattccttaagtctgagtcttaatcag

SEQ ID NO: 288247 - DNA, 33 bp, Homo sapien
ctacatagcaatccaccctaagacacaggtgat

SEQ ID NO: 288248 - DNA, 33 bp, Homo sapien
ctacatagcaatccactctaagacacaggtgat

SEQ ID NO: 288249 - DNA, 33 bp, Homo sapien
gcagagctacccgatcaaccttcacaattgtgc

SEQ ID NO: 288250 - DNA, 33 bp, Homo sapien
gcagagctacccgatcgaccttcacaattgtgc

SEQ ID NO: 288251 - DNA, 33 bp, Homo sapien
aagtgtgttggttgaaaagttttcatttttgct

SEQ ID NO: 288252 - DNA, 33 bp, Homo sapien
aagtgtgttggttgaacagttttcatttttgct

SEQ ID NO: 288253 - DNA, 33 bp, Homo sapien
tgaagaaattcaaaagaacttggatgccaaaaa

SEQ ID NO: 288254 - DNA, 33 bp, Homo sapien
tgaagaaattcaaaaggacttggatgccaaaaa

SEQ ID NO: 288255 - DNA, 33 bp, Homo sapien
agagtacttccttaagaatgactggtagcgttg

SEQ ID NO: 288256 - DNA, 33 bp, Homo sapien
agagtacttccttaaggatgactggtagcgttg

SEQ ID NO: 288257 - DNA, 33 bp, Homo sapien
acagactgccttattaacacttctaaaatttat

SEQ ID NO: 288258 - DNA, 33 bp, Homo sapien
acagactgccttattagcacttctaaaatttat

SEQ ID NO: 288259 - DNA, 33 bp, Homo sapien
agaaactgggctacaaataagtcaggactcaca

SEQ ID NO: 288260 - DNA, 33 bp, Homo sapien
agaaactgggctacaagtaagtcaggactcaca

SEQ ID NO: 288261 - DNA, 33 bp, Homo sapien
atacctgctctgtgtccagcaaatttctataca

SEQ ID NO: 288262 - DNA, 33 bp, Homo sapien
atacctgctctgtgtctagcaaatttctataca

SEQ ID NO: 288263 - DNA, 33 bp, Homo sapien
atgtctctgcagatcaatgaaggttgtatcctt

SEQ ID NO: 288264 - DNA, 33 bp, Homo sapien
atgtctctgcagatcagtgaaggttgtatcctt

SEQ ID NO: 288265 - DNA, 33 bp, Homo sapien
atacagttactgttaacaatgagtttctccaag

SEQ ID NO: 288266 - DNA, 33 bp, Homo sapien
atacagttactgttaataatgagtttctccaag

SEQ ID NO: 288267 - DNA, 33 bp, Homo sapien
tgtgaactgaaatataggattaattcaaccttc

SEQ ID NO: 288268 - DNA, 33 bp, Homo sapien
tgtgaactgaaatatatgattaattcaaccttc

SEQ ID NO: 288269 - DNA, 33 bp, Homo sapien
gggttaccacaacctcgcttggtctagttctga

SEQ ID NO: 288270 - DNA, 33 bp, Homo sapien
gggttaccacaacctctcttggtctagttctga

SEQ ID NO: 288271 - DNA, 33 bp, Homo sapien
accttaagatgtttcaacatgaactactcctct

SEQ ID NO: 288272 - DNA, 33 bp, Homo sapien
accttaagatgtttcagcatgaactactcctct

SEQ ID NO: 288273 - DNA, 33 bp, Homo sapien
aaacatcttaaggttcgccgggtatggtggctt

SEQ ID NO: 288274 - DNA, 33 bp, Homo sapien
aaacatcttaaggttctccgggtatggtggctt

SEQ ID NO: 288275 - DNA, 33 bp, Homo sapien
ctcctttgtcaaataaaataaatgtcattcttt

SEQ ID NO: 288276 - DNA, 33 bp, Homo sapien
ctcctttgtcaaataagataaatgtcattcttt

SEQ ID NO: 288277 - DNA, 33 bp, Homo sapien
gtttttctgtcatatcaacgttaataggaatgc

SEQ ID NO: 288278 - DNA, 33 bp, Homo sapien
gtttttctgtcatatctacgttaataggaatgc

SEQ ID NO: 288279 - DNA, 33 bp, Homo sapien
cgatgtcagttactcactaaagatgtggatcta

SEQ ID NO: 288280 - DNA, 33 bp, Homo sapien
cgatgtcagttactcattaaagatgtggatcta

SEQ ID NO: 288281 - DNA, 33 bp, Homo sapien
tatttccaccggcaagccttgagccagtcatat

SEQ ID NO: 288282 - DNA, 33 bp, Homo sapien
tatttccaccggcaagtcttgagccagtcatat

SEQ ID NO: 288283 - DNA, 33 bp, Homo sapien
gaaactggactgttagaagtggaattatagcat

SEQ ID NO: 288284 - DNA, 33 bp, Homo sapien
gaaactggactgttagtagtggaattatagcat

SEQ ID NO: 288285 - DNA, 33 bp, Homo sapien
ggcataaattaggcatcactcttttgtatccct

SEQ ID NO: 288286 - DNA, 33 bp, Homo sapien
ggcataaattaggcattactcttttgtatccct

SEQ ID NO: 288287 - DNA, 33 bp, Homo sapien
ccattgttttgcccataagagcatttgagtttg

SEQ ID NO: 288288 - DNA, 33 bp, Homo sapien
ccattgttttgcccatgagagcatttgagtttg

SEQ ID NO: 288289 - DNA, 33 bp, Homo sapien
ggagttcagggaattcaaggaactgaaagagta

SEQ ID NO: 288290 - DNA, 33 bp, Homo sapien
ggagttcagggaattcgaggaactgaaagagta

SEQ ID NO: 288291 - DNA, 33 bp, Homo sapien
tcagggaagataagaaaaggttagccacggctt

SEQ ID NO: 288292 - DNA, 33 bp, Homo sapien
tcagggaagataagaacaggttagccacggctt

SEQ ID NO: 288293 - DNA, 33 bp, Homo sapien
cttcctaactgatagacaatgtcttcttactgt

SEQ ID NO: 288294 - DNA, 33 bp, Homo sapien
cttcctaactgatagagaatgtcttcttactgt

SEQ ID NO: 288295 - DNA, 33 bp, Homo sapien
tcaaactaaataagaccccatcataccatgttg

SEQ ID NO: 288296 - DNA, 33 bp, Homo sapien
tcaaactaaataagacgccatcataccatgttg

SEQ ID NO: 288297 - DNA, 33 bp, Homo sapien
gagggattccgccctacagttgagaggatggtt

SEQ ID NO: 288298 - DNA, 33 bp, Homo sapien
gagggattccgccctagagttgagaggatggtt

SEQ ID NO: 288299 - DNA, 33 bp, Homo sapien
tgttcccttggtcaacggagccttttatttgag

SEQ ID NO: 288300 - DNA, 33 bp, Homo sapien
tgttcccttggtcaactgagccttttatttgag

SEQ ID NO: 288301 - DNA, 33 bp, Homo sapien
aagtaggttctcaccaaatttatcccaagaaca

SEQ ID NO: 288302 - DNA, 33 bp, Homo sapien
aagtaggttctcaccagatttatcccaagaaca

SEQ ID NO: 288303 - DNA, 33 bp, Homo sapien
tgttttcttttgagagaaaaatgtttggcaact

SEQ ID NO: 288304 - DNA, 33 bp, Homo sapien
tgttttcttttgagaggaaaatgtttggcaact

SEQ ID NO: 288305 - DNA, 33 bp, Homo sapien
atagacagagattacaatgaaaattccatgaga

SEQ ID NO: 288306 - DNA, 33 bp, Homo sapien
atagacagagattacagtgaaaattccatgaga

SEQ ID NO: 288307 - DNA, 33 bp, Homo sapien
tatgtttgataatcaacgaacagtccattttaa

SEQ ID NO: 288308 - DNA, 33 bp, Homo sapien
tatgtttgataatcaatgaacagtccattttaa

SEQ ID NO: 288309 - DNA, 33 bp, Homo sapien
aagaaacctagaaaaactgatgatctaagtcac

SEQ ID NO: 288310 - DNA, 33 bp, Homo sapien
aagaaacctagaaaaattgatgatctaagtcac

SEQ ID NO: 288311 - DNA, 33 bp, Homo sapien
ctgtggcagcttggtgcactgttaagagttagg

SEQ ID NO: 288312 - DNA, 33 bp, Homo sapien
ctgtggcagcttggtgtactgttaagagttagg

SEQ ID NO: 288313 - DNA, 33 bp, Homo sapien
gttgaaagaacccggacgcaaagaccacatatt

SEQ ID NO: 288314 - DNA, 33 bp, Homo sapien
gttgaaagaacccggatgcaaagaccacatatt

SEQ ID NO: 288315 - DNA, 33 bp, Homo sapien
tgccagactcttttccacagcggctgcatcatt

SEQ ID NO: 288316 - DNA, 33 bp, Homo sapien
tgccagactcttttccgcagcggctgcatcatt

SEQ ID NO: 288317 - DNA, 33 bp, Homo sapien
gaaatcttactcctaaatagaagtatcccagaa

SEQ ID NO: 288318 - DNA, 33 bp, Homo sapien
gaaatcttactcctaactagaagtatcccagaa

SEQ ID NO: 288319 - DNA, 33 bp, Homo sapien
gtgagtgtgtcaaaacaagtctcaaaagctctg

SEQ ID NO: 288320 - DNA, 33 bp, Homo sapien
gtgagtgtgtcaaaacgagtctcaaaagctctg

SEQ ID NO: 288321 - DNA, 33 bp, Homo sapien
accaagatgtgccttacgtagagttgtcctgga

SEQ ID NO: 288322 - DNA, 33 bp, Homo sapien
accaagatgtgccttatgtagagttgtcctgga

SEQ ID NO: 288323 - DNA, 33 bp, Homo sapien
aagtgagaaatgaggcaccgagtcataatagtt

SEQ ID NO: 288324 - DNA, 33 bp, Homo sapien
aagtgagaaatgaggcgccgagtcataatagtt

SEQ ID NO: 288325 - DNA, 33 bp, Homo sapien
ccgtaaacaggttctgaaagacacacctagata

SEQ ID NO: 288326 - DNA, 33 bp, Homo sapien
ccgtaaacaggttctggaagacacacctagata

SEQ ID NO: 288327 - DNA, 33 bp, Homo sapien
aaaatccaactgtgaactggtcgcatctctagg

SEQ ID NO: 288328 - DNA, 33 bp, Homo sapien
aaaatccaactgtgaattggtcgcatctctagg

SEQ ID NO: 288329 - DNA, 33 bp, Homo sapien
cgaacatgatggtagccaaatatgccgcaaact

SEQ ID NO: 288330 - DNA, 33 bp, Homo sapien
cgaacatgatggtagctaaatatgccgcaaact

SEQ ID NO: 288331 - DNA, 33 bp, Homo sapien
ttatggtctgtatgtaccttgactagtttgcgg

SEQ ID NO: 288332 - DNA, 33 bp, Homo sapien
ttatggtctgtatgtatcttgactagtttgcgg

SEQ ID NO: 288333 - DNA, 33 bp, Homo sapien
aaaaaggaaacagatcagaagcatgagggagac

SEQ ID NO: 288334 - DNA, 33 bp, Homo sapien
aaaaaggaaacagatcggaagcatgagggagac

SEQ ID NO: 288335 - DNA, 33 bp, Homo sapien
ttcttgaaggcttgaacacacagacagacagac

SEQ ID NO: 288336 - DNA, 33 bp, Homo sapien
ttcttgaaggcttgaagacacagacagacagac

SEQ ID NO: 288337 - DNA, 33 bp, Homo sapien
ataattacttgaaaaacactgtagcaatcctca

SEQ ID NO: 288338 - DNA, 33 bp, Homo sapien
ataattacttgaaaaagactgtagcaatcctca

SEQ ID NO: 288339 - DNA, 33 bp, Homo sapien
gtgggtgctaagcagcaaaggagttggatttaa

SEQ ID NO: 288340 - DNA, 33 bp, Homo sapien
gtgggtgctaagcagcgaaggagttggatttaa

SEQ ID NO: 288341 - DNA, 33 bp, Homo sapien
gtactttgttgtagtgccacaaaacagactaag

SEQ ID NO: 288342 - DNA, 33 bp, Homo sapien
gtactttgttgtagtggcacaaaacagactaag

SEQ ID NO: 288343 - DNA, 33 bp, Homo sapien
aattcagatggccataaaagagggtcctgcata

SEQ ID NO: 288344 - DNA, 33 bp, Homo sapien
aattcagatggccatagaagagggtcctgcata

SEQ ID NO: 288345 - DNA, 33 bp, Homo sapien
aaaacctctgggatacaacaaaagctgtgctat

SEQ ID NO: 288346 - DNA, 33 bp, Homo sapien
aaaacctctgggataccacaaaagctgtgctat

SEQ ID NO: 288347 - DNA, 33 bp, Homo sapien
tagttgttgagtaggaagataataccagtattt

SEQ ID NO: 288348 - DNA, 33 bp, Homo sapien
tagttgttgagtaggaggataataccagtattt

SEQ ID NO: 288349 - DNA, 33 bp, Homo sapien; identical to SEQ ID NO: 288347

SEQ ID NO: 288350 - DNA, 33 bp, Homo sapien; identical to SEQ ID NO: 288348

SEQ ID NO: 288351 - DNA, 33 bp, Homo sapien
caggctggggtttagagcttattggagaaggta

SEQ ID NO: 288352 - DNA, 33 bp, Homo sapien
caggctggggtttagatcttattggagaaggta

SEQ ID NO: 288353 - DNA, 33 bp, Homo sapien
tctacccagaatcctaaaactatcaaacaattc

SEQ ID NO: 288354 - DNA, 33 bp, Homo sapien
tctacccagaatcctagaactatcaaacaattc

SEQ ID NO: 288355 - DNA, 33 bp, Homo sapien
ccacttaacaggacagcccaaatttctctgcca

SEQ ID NO: 288356 - DNA, 33 bp, Homo sapien
ccacttaacaggacaggccaaatttctctgcca

SEQ ID NO: 288357 - DNA, 33 bp, Homo sapien
ttttatttgaggcgccagaagtagaggtgcagt

SEQ ID NO: 288358 - DNA, 33 bp, Homo sapien
ttttatttgaggcgccggaagtagaggtgcagt

SEQ ID NO: 288359 - DNA, 33 bp, Homo sapien
acactacgtacagaaacgaaccaccaccacctt

SEQ ID NO: 288360 - DNA, 33 bp, Homo sapien
acactacgtacagaaatgaaccaccaccacctt

SEQ ID NO: 288361 - DNA, 33 bp, Homo sapien
cctgagcccagttccaaaggtccagttttatgc

SEQ ID NO: 288362 - DNA, 33 bp, Homo sapien
cctgagcccagttccagaggtccagttttatgc

SEQ ID NO: 288363 - DNA, 33 bp, Homo sapien
taacgaaatttccaggccatattactgtatggc

SEQ ID NO: 288364 - DNA, 33 bp, Homo sapien
taacgaaatttccagggcatattactgtatggc

SEQ ID NO: 288365 - DNA, 33 bp, Homo sapien
tgcattatactcattcaaagtctacagtttaca

SEQ ID NO: 288366 - DNA, 33 bp, Homo sapien
tgcattatactcattcgaagtctacagtttaca

SEQ ID NO: 288367 - DNA, 33 bp, Homo sapien
ccttatcaatgaagtcaatttcctctgactgct

SEQ ID NO: 288368 - DNA, 33 bp, Homo sapien
ccttatcaatgaagtccatttcctctgactgct

SEQ ID NO: 288369 - DNA, 33 bp, Homo sapien
gagtgaagagagggtcaaggcaaagctgaactg

SEQ ID NO: 288370 - DNA, 33 bp, Homo sapien
gagtgaagagagggtccaggcaaagctgaactg

SEQ ID NO: 288371 - DNA, 33 bp, Homo sapien
ttatctgctagacacactgaaacaactggggaa

SEQ ID NO: 288372 - DNA, 33 bp, Homo sapien
ttatctgctagacacattgaaacaactggggaa

SEQ ID NO: 288373 - DNA, 33 bp, Homo sapien
tgatttagtccactgccgaagcttttcaataca

SEQ ID NO: 288374 - DNA, 33 bp, Homo sapien
tgatttagtccactgctgaagcttttcaataca

SEQ ID NO: 288375 - DNA, 33 bp, Homo sapien
aggcttgggttgctcacaccttggatattccca

SEQ ID NO: 288376 - DNA, 33 bp, Homo sapien
aggcttgggttgctcataccttggatattccca

SEQ ID NO: 288377 - DNA, 33 bp, Homo sapien
ttttgcacagttaggaacctgagccatgctgca

SEQ ID NO: 288378 - DNA, 33 bp, Homo sapien
ttttgcacagttaggaccctgagccatgctgca

SEQ ID NO: 288379 - DNA, 33 bp, Homo sapien
ttcattaatttaatggaatcataaactggagcg

SEQ ID NO: 288380 - DNA, 33 bp, Homo sapien
ttcattaatttaatggcatcataaactggagcg

SEQ ID NO: 288381 - DNA, 33 bp, Homo sapien
tatactgtaatttgtgaaaacaagaggtattaa

SEQ ID NO: 288382 - DNA, 33 bp, Homo sapien
tatactgtaatttgtggaaacaagaggtattaa

SEQ ID NO: 288383 - DNA, 33 bp, Homo sapien
aaatgccacaaattaacatctgttcttgcaata

SEQ ID NO: 288384 - DNA, 33 bp, Homo sapien
aaatgccacaaattaatatctgttcttgcaata

SEQ ID NO: 288385 - DNA, 33 bp, Homo sapien
cataagccttgtaaaaccaaaagctgaagtggt

SEQ ID NO: 288386 - DNA, 33 bp, Homo sapien
cataagccttgtaaaagcaaaagctgaagtggt

SEQ ID NO: 288387 - DNA, 33 bp, Homo sapien
caaatatgaggacaacagacagtaatttcctaa

SEQ ID NO: 288388 - DNA, 33 bp, Homo sapien
caaatatgaggacaaccgacagtaatttcctaa

SEQ ID NO: 288389 - DNA, 33 bp, Homo sapien
gtcagtgttccagagacagcaagacaggatttt

SEQ ID NO: 288390 - DNA, 33 bp, Homo sapien
gtcagtgttccagagagagcaagacaggatttt

SEQ ID NO: 288391 - DNA, 33 bp, Homo sapien
ttgtaaatgaagttgacgatatttacatgagat

SEQ ID NO: 288392 - DNA, 33 bp, Homo sapien
ttgtaaatgaagttgatgatatttacatgagat

SEQ ID NO: 288393 - DNA, 33 bp, Homo sapien
ccggtgcatatagcccaactcctggttccagtt

SEQ ID NO: 288394 - DNA, 33 bp, Homo sapien
ccggtgcatatagccccactcctggttccagtt

SEQ ID NO: 288395 - DNA, 33 bp, Homo sapien
caaaaagtaataggaaactcaactacttaagct

SEQ ID NO: 288396 - DNA, 33 bp, Homo sapien
caaaaagtaataggaagctcaactacttaagct

SEQ ID NO: 288397 - DNA, 33 bp, Homo sapien
tttacattagttctgcactgacttgtctgtgta

SEQ ID NO: 288398 - DNA, 33 bp, Homo sapien
tttacattagttctgcgctgacttgtctgtgta

SEQ ID NO: 288399 - DNA, 33 bp, Homo sapien
aactctgttaataaccaacatcatcaggtgcat

SEQ ID NO: 288400 - DNA, 33 bp, Homo sapien
aactctgttaataaccgacatcatcaggtgcat

SEQ ID NO: 288401 - DNA, 33 bp, Homo sapien
ttctcttatgagtgccccaagtcaatggcaaaa

SEQ ID NO: 288402 - DNA, 33 bp, Homo sapien
ttctcttatgagtgccgcaagtcaatggcaaaa

SEQ ID NO: 288403 - DNA, 33 bp, Homo sapien
tgcatagctcaataacggacacatattagaggc

SEQ ID NO: 288404 - DNA, 33 bp, Homo sapien
tgcatagctcaataactgacacatattagaggc

SEQ ID NO: 288405 - DNA, 33 bp, Homo sapien
gtaggaacacactgaacgatttgccaaaggagt

SEQ ID NO: 288406 - DNA, 33 bp, Homo sapien
gtaggaacacactgaatgatttgccaaaggagt

SEQ ID NO: 288407 - DNA, 33 bp, Homo sapien
acgatagttctgggaactgcattttgaatattg

SEQ ID NO: 288408 - DNA, 33 bp, Homo sapien
acgatagttctgggaattgcattttgaatattg

SEQ ID NO: 288409 - DNA, 33 bp, Homo sapien
cttattagacgtttaaggtatggtatgctacca

SEQ ID NO: 288410 - DNA, 33 bp, Homo sapien
cttattagacgtttaatgtatggtatgctacca

SEQ ID NO: 288411 - DNA, 33 bp, Homo sapien
gcaataattgaaggagaaagttccagactagga

SEQ ID NO: 288412 - DNA, 33 bp, Homo sapien
gcaataattgaaggaggaagttccagactagga

SEQ ID NO: 288413 - DNA, 33 bp, Homo sapien
gtatcccagaaaatctcaataatgtgggactcc

SEQ ID NO: 288414 - DNA, 33 bp, Homo sapien
gtatcccagaaaatctgaataatgtgggactcc

SEQ ID NO: 288415 - DNA, 33 bp, Homo sapien
gtagcacctgaaatacaatctcctcccagagct

SEQ ID NO: 288416 - DNA, 33 bp, Homo sapien
gtagcacctgaaataccatctcctcccagagct

SEQ ID NO: 288417 - DNA, 33 bp, Homo sapien
agtgttgggccagggacgagacaacattaacac

SEQ ID NO: 288418 - DNA, 33 bp, Homo sapien
agtgttgggccagggaggagacaacattaacac

SEQ ID NO: 288419 - DNA, 33 bp, Homo sapien
ttctttctcgtgaccccgagttcatttaacttc

SEQ ID NO: 288420 - DNA, 33 bp, Homo sapien
ttctttctcgtgaccctgagttcatttaacttc

SEQ ID NO: 288421 - DNA, 33 bp, Homo sapien
ttcttatttactaggcaccaattaaaatgaaaa

SEQ ID NO: 288422 - DNA, 33 bp, Homo sapien
ttcttatttactaggcgccaattaaaatgaaaa

SEQ ID NO: 288423 - DNA, 33 bp, Homo sapien
gtaatctgtaggtaaaacatacttgtcacactg

SEQ ID NO: 288424 - DNA, 33 bp, Homo sapien
gtaatctgtaggtaaaccatacttgtcacactg

SEQ ID NO: 288425 - DNA, 33 bp, Homo sapien
ataaaatagcaggaaacacaaaacataagtaaa

SEQ ID NO: 288426 - DNA, 33 bp, Homo sapien
ataaaatagcaggaaatacaaaacataagtaaa

SEQ ID NO: 288427 - DNA, 33 bp, Homo sapien
atcagccttccgagtcaaatgtgcctcctgcgc

SEQ ID NO: 288428 - DNA, 33 bp, Homo sapien
atcagccttccgagtcgaatgtgcctcctgcgc

SEQ ID NO: 288429 - DNA, 33 bp, Homo sapien
gagaaaaggatgcaaactttacattcgagtagc

SEQ ID NO: 288430 - DNA, 33 bp, Homo sapien
gagaaaaggatgcaaattttacattcgagtagc

SEQ ID NO: 288431 - DNA, 33 bp, Homo sapien
attggatgtgtgggaaaagagaaaaggatgcaa

SEQ ID NO: 288432 - DNA, 33 bp, Homo sapien
attggatgtgtgggaagagagaaaaggatgcaa

SEQ ID NO: 288433 - DNA, 33 bp, Homo sapien
caaaagttttacaaagccacactaaagcccaga

SEQ ID NO: 288434 - DNA, 33 bp, Homo sapien
caaaagttttacaaaggcacactaaagcccaga

SEQ ID NO: 288435 - DNA, 33 bp, Homo sapien
tagtgagtgagaatacagggaaataaaaataaa

SEQ ID NO: 288436 - DNA, 33 bp, Homo sapien
tagtgagtgagaatactgggaaataaaaataaa

SEQ ID NO: 288437 - DNA, 33 bp, Homo sapien
gcactgaatgtctttacgctggaatggacttga

SEQ ID NO: 288438 - DNA, 33 bp, Homo sapien
gcactgaatgtctttatgctggaatggacttga

SEQ ID NO: 288439 - DNA, 33 bp, Homo sapien
agtgctttgtaaataaaatatgctgtataaaag

SEQ ID NO: 288440 - DNA, 33 bp, Homo sapien
agtgctttgtaaataagatatgctgtataaaag

SEQ ID NO: 288441 - DNA, 33 bp, Homo sapien
ggattaaaggagataacaaaagtgcttagaaaa

SEQ ID NO: 288442 - DNA, 33 bp, Homo sapien
ggattaaaggagataataaaagtgcttagaaaa

SEQ ID NO: 288443 - DNA, 33 bp, Homo sapien
ttttttaaaaaccgtcaaagctatacagtagtt

SEQ ID NO: 288444 - DNA, 33 bp, Homo sapien
ttttttaaaaaccgtcgaagctatacagtagtt

SEQ ID NO: 288445 - DNA, 33 bp, Homo sapien
atcccaggaaccaaacaatttctttctatttta

SEQ ID NO: 288446 - DNA, 33 bp, Homo sapien
atcccaggaaccaaacgatttctttctatttta

SEQ ID NO: 288447 - DNA, 33 bp, Homo sapien
agaccagataagaagagagatttgagtaggagg

SEQ ID NO: 288448 - DNA, 33 bp, Homo sapien
agaccagataagaagatagatttgagtaggagg

SEQ ID NO: 288449 - DNA, 33 bp, Homo sapien
acagcaaagcattcaccggtcccatggccttga

SEQ ID NO: 288450 - DNA, 33 bp, Homo sapien
acagcaaagcattcactggtcccatggccttga

SEQ ID NO: 288451 - DNA, 33 bp, Homo sapien
aaataggaaagatgataaagtcaagaaagtagg

SEQ ID NO: 288452 - DNA, 33 bp, Homo sapien
aaataggaaagatgatcaagtcaagaaagtagg

SEQ ID NO: 288453 - DNA, 33 bp, Homo sapien
tgtgctccaatattgcactcttataaagcatac

SEQ ID NO: 288454 - DNA, 33 bp, Homo sapien
tgtgctccaatattgccctcttataaagcatac

SEQ ID NO: 288455 - DNA, 33 bp, Homo sapien
atatctgttgcttttgaatatcttcccccaaac

SEQ ID NO: 288456 - DNA, 33 bp, Homo sapien
atatctgttgcttttggatatcttcccccaaac

SEQ ID NO: 288457 - DNA, 33 bp, Homo sapien
tggattagtgcaagctaaagtgtcatcatatat

SEQ ID NO: 288458 - DNA, 33 bp, Homo sapien
tggattagtgcaagctgaagtgtcatcatatat

SEQ ID NO: 288459 - DNA, 33 bp, Homo sapien
aactatattggaagggaaaatgggcaaacagaa

SEQ ID NO: 288460 - DNA, 33 bp, Homo sapien
aactatattggaaggggaaatgggcaaacagaa

SEQ ID NO: 288461 - DNA, 33 bp, Homo sapien
aggtaacaagatcagcaaatgctaacagcagct

SEQ ID NO: 288462 - DNA, 33 bp, Homo sapien
aggtaacaagatcagcgaatgctaacagcagct

SEQ ID NO: 288463 - DNA, 33 bp, Homo sapien
ctgaatgattgtgtaactgttattatattgtac

SEQ ID NO: 288464 - DNA, 33 bp, Homo sapien
ctgaatgattgtgtaagtgttattatattgtac

SEQ ID NO: 288465 - DNA, 33 bp, Homo sapien
taagagcactgaacagaaagataacagtacaat

SEQ ID NO: 288466 - DNA, 33 bp, Homo sapien
taagagcactgaacagtaagataacagtacaat

SEQ ID NO: 288467 - DNA, 33 bp, Homo sapien
tactggtcctctttccaaaataaagaaactgag

SEQ ID NO: 288468 - DNA, 33 bp, Homo sapien
tactggtcctctttccgaaataaagaaactgag

SEQ ID NO: 288469 - DNA, 33 bp, Homo sapien
catgcctatagacctacagattctattcatctg

SEQ ID NO: 288470 - DNA, 33 bp, Homo sapien
catgcctatagacctagagattctattcatctg

SEQ ID NO: 288471 - DNA, 33 bp, Homo sapien
tgcaggttttaaaagacggattaagagttccgc

SEQ ID NO: 288472 - DNA, 33 bp, Homo sapien
tgcaggttttaaaagatggattaagagttccgc

SEQ ID NO: 288473 - DNA, 33 bp, Homo sapien
accaggagtccatgaaacatttagcagagtggt

SEQ ID NO: 288474 - DNA, 33 bp, Homo sapien
accaggagtccatgaagcatttagcagagtggt

SEQ ID NO: 288475 - DNA, 33 bp, Homo sapien
atcctctgggtgttcaaactaaaaatcttgtat

SEQ ID NO: 288476 - DNA, 33 bp, Homo sapien
atcctctgggtgttcagactaaaaatcttgtat

SEQ ID NO: 288477 - DNA, 33 bp, Homo sapien
gtaccttagtcaactgcagccatgcataccagc

SEQ ID NO: 288478 - DNA, 33 bp, Homo sapien
gtaccttagtcaactgtagccatgcataccagc

SEQ ID NO: 288479 - DNA, 33 bp, Homo sapien
cttatagtgaagggccaactctaacaaattccc

SEQ ID NO: 288480 - DNA, 33 bp, Homo sapien
cttatagtgaagggcccactctaacaaattccc

SEQ ID NO: 288481 - DNA, 33 bp, Homo sapien
aacaagacagaatccacacaaagcaataatctg

SEQ ID NO: 288482 - DNA, 33 bp, Homo sapien
aacaagacagaatccagacaaagcaataatctg

SEQ ID NO: 288483 - DNA, 33 bp, Homo sapien
ctatttctgtgtagcacattatcataaaactta

SEQ ID NO: 288484 - DNA, 33 bp, Homo sapien
ctatttctgtgtagcatattatcataaaactta

SEQ ID NO: 288485 - DNA, 33 bp, Homo sapien
tttgatgtagtatcaccggggtaatattcttgc

SEQ ID NO: 288486 - DNA, 33 bp, Homo sapien
tttgatgtagtatcactggggtaatattcttgc

SEQ ID NO: 288487 - DNA, 33 bp, Homo sapien
aggttaacaacttacccccacactgtggtatac

SEQ ID NO: 288488 - DNA, 33 bp, Homo sapien
aggttaacaacttacctccacactgtggtatac

SEQ ID NO: 288489 - DNA, 33 bp, Homo sapien
attgaggtcttatagacatgaaatagctgcaga

SEQ ID NO: 288490 - DNA, 33 bp, Homo sapien
attgaggtcttatagatatgaaatagctgcaga

SEQ ID NO: 288491 - DNA, 33 bp, Homo sapien
tacagtacctaaaatactaagcactcaaaaaag

SEQ ID NO: 288492 - DNA, 33 bp, Homo sapien
tacagtacctaaaatagtaagcactcaaaaaag

SEQ ID NO: 288493 - DNA, 33 bp, Homo sapien
tctgtgagatgtccaacgaacgtgtcaggctaa

SEQ ID NO: 288494 - DNA, 33 bp, Homo sapien
tctgtgagatgtccaatgaacgtgtcaggctaa

SEQ ID NO: 288495 - DNA, 33 bp, Homo sapien
ttgccattccacaaataactatgaaagtgcatg

SEQ ID NO: 288496 - DNA, 33 bp, Homo sapien
ttgccattccacaaatgactatgaaagtgcatg

SEQ ID NO: 288497 - DNA, 33 bp, Homo sapien
agcaagctgttataatcatccaggaaactatta

SEQ ID NO: 288498 - DNA, 33 bp, Homo sapien
agcaagctgttataattatccaggaaactatta

SEQ ID NO: 288499 - DNA, 33 bp, Homo sapien
aattactaagaaaggactcaggttataaaatga

SEQ ID NO: 288500 - DNA, 33 bp, Homo sapien
aattactaagaaaggattcaggttataaaatga

SEQ ID NO: 288501 - DNA, 33 bp, Homo sapien
caaggccttgaatttccatactgggctgggcag

SEQ ID NO: 288502 - DNA, 33 bp, Homo sapien
caaggccttgaatttctatactgggctgggcag

SEQ ID NO: 288503 - DNA, 33 bp, Homo sapien
attgttttacctttcacattgtgggaacagacc

SEQ ID NO: 288504 - DNA, 33 bp, Homo sapien
attgttttacctttcatattgtgggaacagacc

SEQ ID NO: 288505 - DNA, 33 bp, Homo sapien
agcaaaagaatcaagacgctacgcacaaagttg

SEQ ID NO: 288506 - DNA, 33 bp, Homo sapien
agcaaaagaatcaagatgctacgcacaaagttg

SEQ ID NO: 288507 - DNA, 33 bp, Homo sapien
attacattgaatgcaactggaataatttggcta

SEQ ID NO: 288508 - DNA, 33 bp, Homo sapien
attacattgaatgcaattggaataatttggcta

SEQ ID NO: 288509 - DNA, 33 bp, Homo sapien
agtatgaaacattatcaagtctgaagctgctat

SEQ ID NO: 288510 - DNA, 33 bp, Homo sapien
agtatgaaacattatctagtctgaagctgctat

SEQ ID NO: 288511 - DNA, 33 bp, Homo sapien
atggaaacatggagacagaaggcattcaattct

SEQ ID NO: 288512 - DNA, 33 bp, Homo sapien
atggaaacatggagacggaaggcattcaattct

SEQ ID NO: 288513 - DNA, 33 bp, Homo sapien
gacacagtggtgtttacattgaatgaatgaacc

SEQ ID NO: 288514 - DNA, 33 bp, Homo sapien
gacacagtggtgtttatattgaatgaatgaacc

SEQ ID NO: 288515 - DNA, 33 bp, Homo sapien
taagtgaatttgtgtacgtgaatatgtacagca

SEQ ID NO: 288516 - DNA, 33 bp, Homo sapien
taagtgaatttgtgtatgtgaatatgtacagca

SEQ ID NO: 288517 - DNA, 33 bp, Homo sapien
ctttacatagctatagaatgagggcgtagtcct

SEQ ID NO: 288518 - DNA, 33 bp, Homo sapien
ctttacatagctataggatgagggcgtagtcct

SEQ ID NO: 288519 - DNA, 33 bp, Homo sapien
tctctggccagaaaccaggaagcgcactcattt

SEQ ID NO: 288520 - DNA, 33 bp, Homo sapien
tctctggccagaaaccgggaagcgcactcattt

SEQ ID NO: 288521 - DNA, 33 bp, Homo sapien
aattattccaatatcacgtatcaccctgcatgc

SEQ ID NO: 288522 - DNA, 33 bp, Homo sapien
aattattccaatatcatgtatcaccctgcatgc

SEQ ID NO: 288523 - DNA, 33 bp, Homo sapien
ggaaatgaagaaaatacaaagatctggagagag

SEQ ID NO: 288524 - DNA, 33 bp, Homo sapien
ggaaatgaagaaaatataaagatctggagagag

SEQ ID NO: 288525 - DNA, 33 bp, Homo sapien
ggaaggggagagaggaagttttttggacaagag

SEQ ID NO: 288526 - DNA, 33 bp, Homo sapien
ggaaggggagagaggatgttttttggacaagag

SEQ ID NO: 288527 - DNA, 33 bp, Homo sapien
tagatgttcattattacagagaatgcaagtagt

SEQ ID NO: 288528 - DNA, 33 bp, Homo sapien
tagatgttcattattatagagaatgcaagtagt

SEQ ID NO: 288529 - DNA, 33 bp, Homo sapien
tagccattggagactccaaaaggtgagagagtt

SEQ ID NO: 288530 - DNA, 33 bp, Homo sapien
tagccattggagactctaaaaggtgagagagtt

SEQ ID NO: 288531 - DNA, 33 bp, Homo sapien
aagaaaagatactacacgttagtaggcaaattg

SEQ ID NO: 288532 - DNA, 33 bp, Homo sapien
aagaaaagatactacaggttagtaggcaaattg

SEQ ID NO: 288533 - DNA, 33 bp, Homo sapien
aaaaaagggctatcagaaccattatgggcttgc

SEQ ID NO: 288534 - DNA, 33 bp, Homo sapien
aaaaaagggctatcaggaccattatgggcttgc

SEQ ID NO: 288535 - DNA, 33 bp, Homo sapien
aactgcgtgcctaccccgatagcagaaatatta

SEQ ID NO: 288536 - DNA, 33 bp, Homo sapien
aactgcgtgcctaccctgatagcagaaatatta

SEQ ID NO: 288537 - DNA, 33 bp, Homo sapien
ttattagaatcttataactgaagctcaagatag

SEQ ID NO: 288538 - DNA, 33 bp, Homo sapien
ttattagaatcttatacctgaagctcaagatag

SEQ ID NO: 288539 - DNA, 33 bp, Homo sapien
aagtttaagaaaatgacaaatcagccttagaaa

SEQ ID NO: 288540 - DNA, 33 bp, Homo sapien
aagtttaagaaaatgagaaatcagccttagaaa

SEQ ID NO: 288541 - DNA, 33 bp, Homo sapien
aaatctctactttggaacttttggcatgaaaca

SEQ ID NO: 288542 - DNA, 33 bp, Homo sapien
aaatctctactttggatcttttggcatgaaaca

SEQ ID NO: 288543 - DNA, 33 bp, Homo sapien
tcctacatacccatgaacaagaaaaatagatgc

SEQ ID NO: 288544 - DNA, 33 bp, Homo sapien
tcctacatacccatgagcaagaaaaatagatgc

SEQ ID NO: 288545 - DNA, 33 bp, Homo sapien
cactggtgagagaatacagttgcatttagcttt

SEQ ID NO: 288546 - DNA, 33 bp, Homo sapien
cactggtgagagaatagagttgcatttagcttt

SEQ ID NO: 288547 - DNA, 33 bp, Homo sapien
aaactagcttgaaggacacattatatatttatt

SEQ ID NO: 288548 - DNA, 33 bp, Homo sapien
aaactagcttgaaggagacattatatatttatt

SEQ ID NO: 288549 - DNA, 33 bp, Homo sapien
tcaggatatataatcacctgtccccttgacact

SEQ ID NO: 288550 - DNA, 33 bp, Homo sapien
tcaggatatataatcatctgtccccttgacact

SEQ ID NO: 288551 - DNA, 33 bp, Homo sapien
acttcttaaggctgaactgagtgctccagtgtc

SEQ ID NO: 288552 - DNA, 33 bp, Homo sapien
acttcttaaggctgaattgagtgctccagtgtc

SEQ ID NO: 288553 - DNA, 33 bp, Homo sapien
attgtctggtagcaagaagttcagggaataagt

SEQ ID NO: 288554 - DNA, 33 bp, Homo sapien
attgtctggtagcaagcagttcagggaataagt

SEQ ID NO: 288555 - DNA, 33 bp, Homo sapien
acttgccaaagagttaggtgggtagtagggtgt

SEQ ID NO: 288556 - DNA, 33 bp, Homo sapien
acttgccaaagagttatgtgggtagtagggtgt

SEQ ID NO: 288557 - DNA, 33 bp, Homo sapien
taaacactcctggaaccctatctttttgcccct

SEQ ID NO: 288558 - DNA, 33 bp, Homo sapien
taaacactcctggaacgctatctttttgcccct

SEQ ID NO: 288559 - DNA, 33 bp, Homo sapien
ctttcctatctctacacctgctctttcctcagc

SEQ ID NO: 288560 - DNA, 33 bp, Homo sapien
ctttcctatctctacatctgctctttcctcagc

SEQ ID NO: 288561 - DNA, 33 bp, Homo sapien
gaaagctctggaactaccacctgaagcttcaac

SEQ ID NO: 288562 - DNA, 33 bp, Homo sapien
gaaagctctggaactatcacctgaagcttcaac

SEQ ID NO: 288563 - DNA, 33 bp, Homo sapien
cagacctccctaatgcaatttattgtaccaata

SEQ ID NO: 288564 - DNA, 33 bp, Homo sapien
cagacctccctaatgcgatttattgtaccaata

SEQ ID NO: 288565 - DNA, 33 bp, Homo sapien
tcatgctgtgaatagaataagtgaacattcatt

SEQ ID NO: 288566 - DNA, 33 bp, Homo sapien
tcatgctgtgaatagagtaagtgaacattcatt

SEQ ID NO: 288567 - DNA, 33 bp, Homo sapien
accagggttttaatcaatcttggcccattcatc

SEQ ID NO: 288568 - DNA, 33 bp, Homo sapien
accagggttttaatcagtcttggcccattcatc

SEQ ID NO: 288569 - DNA, 33 bp, Homo sapien
aagattggattctgagaaagatattggcacata

SEQ ID NO: 288570 - DNA, 33 bp, Homo sapien
aagattggattctgagcaagatattggcacata

SEQ ID NO: 288571 - DNA, 33 bp, Homo sapien
tcccaagcatagcgaagaattaaatgtgtctcc

SEQ ID NO: 288572 - DNA, 33 bp, Homo sapien
tcccaagcatagcgaataattaaatgtgtctcc

SEQ ID NO: 288573 - DNA, 33 bp, Homo sapien
agtaaaagctcacatcagaatggcttgttttgt

SEQ ID NO: 288574 - DNA, 33 bp, Homo sapien
agtaaaagctcacatcggaatggcttgttttgt

SEQ ID NO: 288575 - DNA, 33 bp, Homo sapien
gtgtcaatcctgggaaagtctcaggcaaagcat

SEQ ID NO: 288576 - DNA, 33 bp, Homo sapien
gtgtcaatcctgggaaggtctcaggcaaagcat

SEQ ID NO: 288577 - DNA, 33 bp, Homo sapien
actcttgttaggtccacatatgtttaaaattgc

SEQ ID NO: 288578 - DNA, 33 bp, Homo sapien
actcttgttaggtccatatatgtttaaaattgc

SEQ ID NO: 288579 - DNA, 33 bp, Homo sapien
aggtcaaacacacttacggagatttcaatgcat

SEQ ID NO: 288580 - DNA, 33 bp, Homo sapien
aggtcaaacacacttatggagatttcaatgcat

SEQ ID NO: 288581 - DNA, 33 bp, Homo sapien
ctcatccctttatgccaatgaaagtggatcaat

SEQ ID NO: 288582 - DNA, 33 bp, Homo sapien
ctcatccctttatgccgatgaaagtggatcaat

SEQ ID NO: 288583 - DNA, 33 bp, Homo sapien
ccaagctggggatatcagaggaggcaagatttt

SEQ ID NO: 288584 - DNA, 33 bp, Homo sapien
ccaagctggggatatccgaggaggcaagatttt

SEQ ID NO: 288585 - DNA, 33 bp, Homo sapien
cttaaagcatcgtaaaagtgaatgagttctagg

SEQ ID NO: 288586 - DNA, 33 bp, Homo sapien
cttaaagcatcgtaaaggtgaatgagttctagg

SEQ ID NO: 288587 - DNA, 33 bp, Homo sapien
cagatctagactcacaaagagaagaccccatgt

SEQ ID NO: 288588 - DNA, 33 bp, Homo sapien
cagatctagactcacagagagaagaccccatgt

SEQ ID NO: 288589 - DNA, 33 bp, Homo sapien
gtattttcttagcaacagattatttcttcagag

SEQ ID NO: 288590 - DNA, 33 bp, Homo sapien
gtattttcttagcaaccgattatttcttcagag

SEQ ID NO: 288591 - DNA, 33 bp, Homo sapien
cctgaattggaggagacgtgtatggtaatgaga

SEQ ID NO: 288592 - DNA, 33 bp, Homo sapien
cctgaattggaggagatgtgtatggtaatgaga

SEQ ID NO: 288593 - DNA, 33 bp, Homo sapien
atctctctgttttcaccggtgagcttgacaatt

SEQ ID NO: 288594 - DNA, 33 bp, Homo sapien
atctctctgttttcactggtgagcttgacaatt

SEQ ID NO: 288595 - DNA, 33 bp, Homo sapien
ccctggaactctaatccaattaatggtattata

SEQ ID NO: 288596 - DNA, 33 bp, Homo sapien
ccctggaactctaatctaattaatggtattata

SEQ ID NO: 288597 - DNA, 33 bp, Homo sapien
tcatatataagtctgacccctatgccttctgtt

SEQ ID NO: 288598 - DNA, 33 bp, Homo sapien
tcatatataagtctgatccctatgccttctgtt

SEQ ID NO: 288599 - DNA, 33 bp, Homo sapien
agcttacatgggagagcaaaagtataacggctt

SEQ ID NO: 288600 - DNA, 33 bp, Homo sapien
agcttacatgggagaggaaaagtataacggctt

SEQ ID NO: 288601 - DNA, 33 bp, Homo sapien
ttccagctctaacaaactctgggaggattctga

SEQ ID NO: 288602 - DNA, 33 bp, Homo sapien
ttccagctctaacaaattctgggaggattctga

SEQ ID NO: 288603 - DNA, 33 bp, Homo sapien
cacaatggctttcttgaatcagcaatgtatgga

SEQ ID NO: 288604 - DNA, 33 bp, Homo sapien
cacaatggctttcttggatcagcaatgtatgga

SEQ ID NO: 288605 - DNA, 33 bp, Homo sapien
tgctttcctgtttgcacgagtccctcagtttgg

SEQ ID NO: 288606 - DNA, 33 bp, Homo sapien
tgctttcctgtttgcatgagtccctcagtttgg

SEQ ID NO: 288607 - DNA, 33 bp, Homo sapien
catgcaacactggcatcaacaaacacttgtcca

SEQ ID NO: 288608 - DNA, 33 bp, Homo sapien
catgcaacactggcatgaacaaacacttgtcca

SEQ ID NO: 288609 - DNA, 33 bp, Homo sapien
tagcctcctgtaaaaagttcccgcttcttaatc

SEQ ID NO: 288610 - DNA, 33 bp, Homo sapien
tagcctcctgtaaaaatttcccgcttcttaatc

SEQ ID NO: 288611 - DNA, 33 bp, Homo sapien
gaagcccaagactttaagcaatttttcttttac

SEQ ID NO: 288612 - DNA, 33 bp, Homo sapien
gaagcccaagactttaggcaatttttcttttac

SEQ ID NO: 288613 - DNA, 33 bp, Homo sapien
aggtactgtgatcagacgagagcatagcaggaa

SEQ ID NO: 288614 - DNA, 33 bp, Homo sapien
aggtactgtgatcagaggagagcatagcaggaa

SEQ ID NO: 288615 - DNA, 33 bp, Homo sapien
aaaccaaattatgctgaaaataatgcagagccc

SEQ ID NO: 288616 - DNA, 33 bp, Homo sapien
aaaccaaattatgctggaaataatgcagagccc

SEQ ID NO: 288617 - DNA, 33 bp, Homo sapien
agtgatgcagcgcaaaacagggcgcctctgaac

SEQ ID NO: 288618 - DNA, 33 bp, Homo sapien
agtgatgcagcgcaaagcagggcgcctctgaac

SEQ ID NO: 288619 - DNA, 33 bp, Homo sapien
tgacttgcctatccaaagagaatacacttgaaa

SEQ ID NO: 288620 - DNA, 33 bp, Homo sapien
tgacttgcctatccaatgagaatacacttgaaa

SEQ ID NO: 288621 - DNA, 33 bp, Homo sapien
gctccacttgagaccacgtatcaggatgttcag

SEQ ID NO: 288622 - DNA, 33 bp, Homo sapien
gctccacttgagaccaggtatcaggatgttcag

SEQ ID NO: 288623 - DNA, 33 bp, Homo sapien
aaaggcataacaaggaatcctcatacttcaaac

SEQ ID NO: 288624 - DNA, 33 bp, Homo sapien
aaaggcataacaaggagtcctcatacttcaaac

SEQ ID NO: 288625 - DNA, 33 bp, Homo sapien
ccagtgagtatgcaaaaggactcatttaacagc

SEQ ID NO: 288626 - DNA, 33 bp, Homo sapien
ccagtgagtatgcaaagggactcatttaacagc

SEQ ID NO: 288627 - DNA, 33 bp, Homo sapien
ctggctctataatgtacggattttaaactagta

SEQ ID NO: 288628 - DNA, 33 bp, Homo sapien
ctggctctataatgtatggattttaaactagta

SEQ ID NO: 288629 - DNA, 33 bp, Homo sapien
cataattgctaatgcacaaaaagtacggaaaga

SEQ ID NO: 288630 - DNA, 33 bp, Homo sapien
cataattgctaatgcataaaaagtacggaaaga

SEQ ID NO: 288631 - DNA, 33 bp, Homo sapien
cagggtgagagttttcactttgtataatttccc

SEQ ID NO: 288632 - DNA, 33 bp, Homo sapien
cagggtgagagttttctctttgtataatttccc

SEQ ID NO: 288633 - DNA, 33 bp, Homo sapien
agctacaccctgcttcccaagtggcagagttaa

SEQ ID NO: 288634 - DNA, 33 bp, Homo sapien
agctacaccctgcttctcaagtggcagagttaa

SEQ ID NO: 288635 - DNA, 33 bp, Homo sapien
ttggtgactaattataagtttggtgtaatcaag

SEQ ID NO: 288636 - DNA, 33 bp, Homo sapien
ttggtgactaattatatgtttggtgtaatcaag

SEQ ID NO: 288637 - DNA, 33 bp, Homo sapien
agaggacacatctctgaaagttaactcatgact

SEQ ID NO: 288638 - DNA, 33 bp, Homo sapien
agaggacacatctctggaagttaactcatgact

SEQ ID NO: 288639 - DNA, 33 bp, Homo sapien
gctggtattgtgctgacctacgaggtttccaaa

SEQ ID NO: 288640 - DNA, 33 bp, Homo sapien
gctggtattgtgctgatctacgaggtttccaaa

SEQ ID NO: 288641 - DNA, 33 bp, Homo sapien
ggctttaaaagatctacccaatttctcctctcc

SEQ ID NO: 288642 - DNA, 33 bp, Homo sapien
ggctttaaaagatctatccaatttctcctctcc

SEQ ID NO: 288643 - DNA, 33 bp, Homo sapien
tttcatggccttgcacactgggtcccactgttg

SEQ ID NO: 288644 - DNA, 33 bp, Homo sapien
tttcatggccttgcacgctgggtcccactgttg

SEQ ID NO: 288645 - DNA, 33 bp, Homo sapien
aagacaggaatttttgaagagtttgatttgctt

SEQ ID NO: 288646 - DNA, 33 bp, Homo sapien
aagacaggaatttttggagagtttgatttgctt

SEQ ID NO: 288647 - DNA, 33 bp, Homo sapien
agtgtgagctggccagaaaatccactaataaat

SEQ ID NO: 288648 - DNA, 33 bp, Homo sapien
agtgtgagctggccaggaaatccactaataaat

SEQ ID NO: 288649 - DNA, 33 bp, Homo sapien
atcaactatatcaccaccttcttccatacccta

SEQ ID NO: 288650 - DNA, 33 bp, Homo sapien
atcaactatatcaccatcttcttccatacccta

SEQ ID NO: 288651 - DNA, 33 bp, Homo sapien
agcactgtgttttatcaaccacgattccctcat

SEQ ID NO: 288652 - DNA, 33 bp, Homo sapien
agcactgtgttttatcgaccacgattccctcat

SEQ ID NO: 288653 - DNA, 33 bp, Homo sapien
tcaagactcctctggaagtgaatgtactggctt

SEQ ID NO: 288654 - DNA, 33 bp, Homo sapien
tcaagactcctctggaggtgaatgtactggctt

SEQ ID NO: 288655 - DNA, 33 bp, Homo sapien
tccctctggaacacataaagacgtgcacacaag

SEQ ID NO: 288656 - DNA, 33 bp, Homo sapien
tccctctggaacacatcaagacgtgcacacaag

SEQ ID NO: 288657 - DNA, 33 bp, Homo sapien
agggaagatgttcatacgccttgaaaagctgga

SEQ ID NO: 288658 - DNA, 33 bp, Homo sapien
agggaagatgttcatatgccttgaaaagctgga

SEQ ID NO: 288659 - DNA, 33 bp, Homo sapien
ttcataaataattcggaaaccattgccaagtct

SEQ ID NO: 288660 - DNA, 33 bp, Homo sapien
ttcataaataattcgggaaccattgccaagtct

SEQ ID NO: 288661 - DNA, 33 bp, Homo sapien; identical to SEQ ID NO: 288659

SEQ ID NO: 288662 - DNA, 33 bp, Homo sapien; identical to SEQ ID NO: 288660

SEQ ID NO: 288663 - DNA, 33 bp, Homo sapien
cggggtgtattcctgaaggttgggcatgatgtc

SEQ ID NO: 288664 - DNA, 33 bp, Homo sapien
cggggtgtattcctgagggttgggcatgatgtc

SEQ ID NO: 288665 - DNA, 33 bp, Homo sapien
ggtaaagagctgaacactgacatcatgcccaac

SEQ ID NO: 288666 - DNA, 33 bp, Homo sapien
ggtaaagagctgaacattgacatcatgcccaac

SEQ ID NO: 288667 - DNA, 33 bp, Homo sapien
aatttctaagtggtaaagtgtttgagaggaagc

SEQ ID NO: 288668 - DNA, 33 bp, Homo sapien
aatttctaagtggtaaggtgtttgagaggaagc

SEQ ID NO: 288669 - DNA, 33 bp, Homo sapien
ccaagaaagcaaaaccactatgagtaatatgga

SEQ ID NO: 288670 - DNA, 33 bp, Homo sapien
ccaagaaagcaaaaccgctatgagtaatatgga

SEQ ID NO: 288671 - DNA, 33 bp, Homo sapien
tagaaccataagcaggaaaaatagcaaaagcag

SEQ ID NO: 288672 - DNA, 33 bp, Homo sapien
tagaaccataagcaggcaaaatagcaaaagcag

SEQ ID NO: 288673 - DNA, 33 bp, Homo sapien
tctttctttcaaatgcacactttcacacacaac

SEQ ID NO: 288674 - DNA, 33 bp, Homo sapien
tctttctttcaaatgcgcactttcacacacaac

SEQ ID NO: 288675 - DNA, 33 bp, Homo sapien
gggtaatggattagtaactatggggaaatgtat

SEQ ID NO: 288676 - DNA, 33 bp, Homo sapien
gggtaatggattagtagctatggggaaatgtat

SEQ ID NO: 288677 - DNA, 33 bp, Homo sapien
ggtaaacctaagatacaacccagtttctatcta

SEQ ID NO: 288678 - DNA, 33 bp, Homo sapien
ggtaaacctaagatacgacccagtttctatcta

SEQ ID NO: 288679 - DNA, 33 bp, Homo sapien
gttgttggggcactgacgttattcaactaaacc

SEQ ID NO: 288680 - DNA, 33 bp, Homo sapien
gttgttggggcactgatgttattcaactaaacc

SEQ ID NO: 288681 - DNA, 33 bp, Homo sapien
cagtccacagaagggaaatcaaagggagcagcc

SEQ ID NO: 288682 - DNA, 33 bp, Homo sapien
cagtccacagaagggacatcaaagggagcagcc

SEQ ID NO: 288683 - DNA, 33 bp, Homo sapien
gcaagtgtgatgttacaatatctgagatctcct

SEQ ID NO: 288684 - DNA, 33 bp, Homo sapien
gcaagtgtgatgttacgatatctgagatctcct

SEQ ID NO: 288685 - DNA, 33 bp, Homo sapien
tagttgcagtcaaaatcaggttgtaccacttaa

SEQ ID NO: 288686 - DNA, 33 bp, Homo sapien
tagttgcagtcaaaattaggttgtaccacttaa

SEQ ID NO: 288687 - DNA, 33 bp, Homo sapien
acaagttagaggtttagagaccattacaagcta

SEQ ID NO: 288688 - DNA, 33 bp, Homo sapien
acaagttagaggtttatagaccattacaagcta

SEQ ID NO: 288689 - DNA, 33 bp, Homo sapien
gtgtggtgttggaaacgaccaaagactctgccc

SEQ ID NO: 288690 - DNA, 33 bp, Homo sapien
gtgtggtgttggaaactaccaaagactctgccc

SEQ ID NO: 288691 - DNA, 33 bp, Homo sapien
ttaggaatttcaagacagccacaacagaacatc

SEQ ID NO: 288692 - DNA, 33 bp, Homo sapien
ttaggaatttcaagacggccacaacagaacatc

SEQ ID NO: 288693 - DNA, 33 bp, Homo sapien
aaatgacttcctaactcaaggccaggtctgact

SEQ ID NO: 288694 - DNA, 33 bp, Homo sapien
aaatgacttcctaactgaaggccaggtctgact

SEQ ID NO: 288695 - DNA, 33 bp, Homo sapien
ttttcagaagtatcaaataaaaggaagcattta

SEQ ID NO: 288696 - DNA, 33 bp, Homo sapien
ttttcagaagtatcaattaaaaggaagcattta

SEQ ID NO: 288697 - DNA, 33 bp, Homo sapien
cctaagctctccatagaacacaaaaagactcat

SEQ ID NO: 288698 - DNA, 33 bp, Homo sapien
cctaagctctccatagtacacaaaaagactcat

SEQ ID NO: 288699 - DNA, 33 bp, Homo sapien
tgcctgtgtgtccagacagcaataaaaatttcc

SEQ ID NO: 288700 - DNA, 33 bp, Homo sapien
tgcctgtgtgtccagatagcaataaaaatttcc

SEQ ID NO: 288701 - DNA, 33 bp, Homo sapien
gtagaaggcgctccctcacagaactaaagcagc

SEQ ID NO: 288702 - DNA, 33 bp, Homo sapien
gtagaaggcgctcccttacagaactaaagcagc

SEQ ID NO: 288703 - DNA, 33 bp, Homo sapien
cctgtgagtagatctcagaaggaaaacaaaagc

SEQ ID NO: 288704 - DNA, 33 bp, Homo sapien
cctgtgagtagatctcggaaggaaaacaaaagc

SEQ ID NO: 288705 - DNA, 33 bp, Homo sapien
tgttgacccgataaaagacgattagctagcaga

SEQ ID NO: 288706 - DNA, 33 bp, Homo sapien
tgttgacccgataaaatacgattagctagcaga

SEQ ID NO: 288707 - DNA, 33 bp, Homo sapien
atgtaacagaaatgcaaaaatgattataggcag

SEQ ID NO: 288708 - DNA, 33 bp, Homo sapien
atgtaacagaaatgcagaaatgattataggcag

SEQ ID NO: 288709 - DNA, 33 bp, Homo sapien
tcagtctaattttcaaaatgtacagcagcaaga

SEQ ID NO: 288710 - DNA, 33 bp, Homo sapien
tcagtctaattttcaagatgtacagcagcaaga

SEQ ID NO: 288711 - DNA, 33 bp, Homo sapien
cacacctggtccattcaaagggcaagtctttgg

SEQ ID NO: 288712 - DNA, 33 bp, Homo sapien
cacacctggtccattcgaagggcaagtctttgg

SEQ ID NO: 288713 - DNA, 33 bp, Homo sapien
gggcccatctatgaccacaaaacccacatcaaa

SEQ ID NO: 288714 - DNA, 33 bp, Homo sapien
gggcccatctatgaccgcaaaacccacatcaaa

SEQ ID NO: 288715 - DNA, 33 bp, Homo sapien
gagatgcaaaagattacatggaattctcttgta

SEQ ID NO: 288716 - DNA, 33 bp, Homo sapien
gagatgcaaaagattagatggaattctcttgta

SEQ ID NO: 288717 - DNA, 33 bp, Homo sapien
ctctggaggagaaaccaagagtttggctagaca

SEQ ID NO: 288718 - DNA, 33 bp, Homo sapien
ctctggaggagaaaccgagagtttggctagaca

SEQ ID NO: 288719 - DNA, 33 bp, Homo sapien
ttcattcttttctagcaatgagtagtattcagt

SEQ ID NO: 288720 - DNA, 33 bp, Homo sapien
ttcattcttttctagcgatgagtagtattcagt

SEQ ID NO: 288721 - DNA, 33 bp, Homo sapien
aacttcagctctcgagaaactgatagaccaggc

SEQ ID NO: 288722 - DNA, 33 bp, Homo sapien
aacttcagctctcgagcaactgatagaccaggc

SEQ ID NO: 288723 - DNA, 33 bp, Homo sapien
tagaatgtaggcttcacgagaacatatactgtg

SEQ ID NO: 288724 - DNA, 33 bp, Homo sapien
tagaatgtaggcttcatgagaacatatactgtg

SEQ ID NO: 288725 - DNA, 33 bp, Homo sapien
ttcagagtgtaagtgacctttggtggcatggga

SEQ ID NO: 288726 - DNA, 33 bp, Homo sapien
ttcagagtgtaagtgatctttggtggcatggga

SEQ ID NO: 288727 - DNA, 33 bp, Homo sapien
cataggggcaaaaatccgagtctctggctgctc

SEQ ID NO: 288728 - DNA, 33 bp, Homo sapien
cataggggcaaaaatctgagtctctggctgctc

SEQ ID NO: 288729 - DNA, 33 bp, Homo sapien
ttgatttccacttaacaaaaaattctggttggg

SEQ ID NO: 288730 - DNA, 33 bp, Homo sapien
ttgatttccacttaaccaaaaattctggttggg

SEQ ID NO: 288731 - DNA, 33 bp, Homo sapien
agagatgtgtcacaggaatatttgtggtttttt

SEQ ID NO: 288732 - DNA, 33 bp, Homo sapien
agagatgtgtcacaggcatatttgtggtttttt

SEQ ID NO: 288733 - DNA, 33 bp, Homo sapien
ctacatgataagaaacacatagacaacccaaac

SEQ ID NO: 288734 - DNA, 33 bp, Homo sapien
ctacatgataagaaacgcatagacaacccaaac

SEQ ID NO: 288735 - DNA, 33 bp, Homo sapien
tacatcacttgatcccaaacagtttctcttctc

SEQ ID NO: 288736 - DNA, 33 bp, Homo sapien
tacatcacttgatccccaacagtttctcttctc

SEQ ID NO: 288737 - DNA, 33 bp, Homo sapien
gcttggcgaaccaaaaccagtgggccaaattga

SEQ ID NO: 288738 - DNA, 33 bp, Homo sapien
gcttggcgaaccaaaatcagtgggccaaattga

SEQ ID NO: 288739 - DNA, 33 bp, Homo sapien
tgaggacccagaaagtgaagcataaggactgtt

SEQ ID NO: 288740 - DNA, 33 bp, Homo sapien
tgaggacccagaaagttaagcataaggactgtt

SEQ ID NO: 288741 - DNA, 33 bp, Homo sapien
cttctgattgtaagtccaaatgtgtgagtctcc

SEQ ID NO: 288742 - DNA, 33 bp, Homo sapien
cttctgattgtaagtctaaatgtgtgagtctcc

SEQ ID NO: 288743 - DNA, 33 bp, Homo sapien
aggcactggggccaaccatttccatagcagggg

SEQ ID NO: 288744 - DNA, 33 bp, Homo sapien
aggcactggggccaacgatttccatagcagggg

SEQ ID NO: 288745 - DNA, 33 bp, Homo sapien
gtagtggaggacaaaacgaaagtttcaaataag

SEQ ID NO: 288746 - DNA, 33 bp, Homo sapien
gtagtggaggacaaaatgaaagtttcaaataag

SEQ ID NO: 288747 - DNA, 33 bp, Homo sapien
taagtgcaattaggaacgagtggaaacaatgag

SEQ ID NO: 288748 - DNA, 33 bp, Homo sapien
taagtgcaattaggaatgagtggaaacaatgag

SEQ ID NO: 288749 - DNA, 33 bp, Homo sapien
agaggtagagtaggcacgagagttaaggggtga

SEQ ID NO: 288750 - DNA, 33 bp, Homo sapien
agaggtagagtaggcatgagagttaaggggtga

SEQ ID NO: 288751 - DNA, 33 bp, Homo sapien
cctctgacacttgatacacacacatgcgtgcac

SEQ ID NO: 288752 - DNA, 33 bp, Homo sapien
cctctgacacttgatatacacacatgcgtgcac

SEQ ID NO: 288753 - DNA, 33 bp, Homo sapien
cagttagcaaatgctaagagaggtcaaagctgg

SEQ ID NO: 288754 - DNA, 33 bp, Homo sapien
cagttagcaaatgctacgagaggtcaaagctgg

SEQ ID NO: 288755 - DNA, 33 bp, Homo sapien
tctagaatcaggagaccaggattcacactccaa

SEQ ID NO: 288756 - DNA, 33 bp, Homo sapien
tctagaatcaggagactaggattcacactccaa

SEQ ID NO: 288757 - DNA, 33 bp, Homo sapien
ccaccacatgacggcgcaggatgaggaggaaat

SEQ ID NO: 288758 - DNA, 33 bp, Homo sapien
ccaccacatgacggcggaggatgaggaggaaat

SEQ ID NO: 288759 - DNA, 33 bp, Homo sapien
tagccaataatagcaaacacttaagaagcttat

SEQ ID NO: 288760 - DNA, 33 bp, Homo sapien
tagccaataatagcaatcacttaagaagcttat

SEQ ID NO: 288761 - DNA, 33 bp, Homo sapien
acaaaaaaattccaaactccatgtgtgtaatta

SEQ ID NO: 288762 - DNA, 33 bp, Homo sapien
acaaaaaaattccaaagtccatgtgtgtaatta

SEQ ID NO: 288763 - DNA, 33 bp, Homo sapien
gcttactggattgcaaacttgcataagtggaaa

SEQ ID NO: 288764 - DNA, 33 bp, Homo sapien
gcttactggattgcaaccttgcataagtggaaa

SEQ ID NO: 288765 - DNA, 33 bp, Homo sapien
tgcatagcaaccatgcgccacccagaaaggctt

SEQ ID NO: 288766 - DNA, 33 bp, Homo sapien
tgcatagcaaccatgctccacccagaaaggctt

SEQ ID NO: 288767 - DNA, 33 bp, Homo sapien
acatgaatagtatgaactgaaaacaatccttgt

SEQ ID NO: 288768 - DNA, 33 bp, Homo sapien
acatgaatagtatgaattgaaaacaatccttgt

SEQ ID NO: 288769 - DNA, 33 bp, Homo sapien
aggctataaagactaaggagaggccagggcagg

SEQ ID NO: 288770 - DNA, 33 bp, Homo sapien
aggctataaagactaatgagaggccagggcagg

SEQ ID NO: 288771 - DNA, 33 bp, Homo sapien
ctaaccaagtcattaccaagtcttgtagagttt

SEQ ID NO: 288772 - DNA, 33 bp, Homo sapien
ctaaccaagtcattactaagtcttgtagagttt

SEQ ID NO: 288773 - DNA, 33 bp, Homo sapien
agtgtagcatcttcaactcaatctctctctctc

SEQ ID NO: 288774 - DNA, 33 bp, Homo sapien
agtgtagcatcttcaagtcaatctctctctctc

SEQ ID NO: 288775 - DNA, 33 bp, Homo sapien
tgtctgactcagggaaaagatggaggaataaat

SEQ ID NO: 288776 - DNA, 33 bp, Homo sapien
tgtctgactcagggaagagatggaggaataaat

SEQ ID NO: 288777 - DNA, 33 bp, Homo sapien
tagacaacagtggaatgattaggtctgatttta

SEQ ID NO: 288778 - DNA, 33 bp, Homo sapien
tagacaacagtggaattattaggtctgatttta

SEQ ID NO: 288779 - DNA, 33 bp, Homo sapien
ggtttctcttttcttcacttctgacttcctcct

SEQ ID NO: 288780 - DNA, 33 bp, Homo sapien
ggtttctcttttcttcgcttctgacttcctcct

SEQ ID NO: 288781 - DNA, 33 bp, Homo sapien
attgaagatgctcgagaaagacagttaagggca

SEQ ID NO: 288782 - DNA, 33 bp, Homo sapien
attgaagatgctcgaggaagacagttaagggca

SEQ ID NO: 288783 - DNA, 33 bp, Homo sapien
agtgtcctgagacgacaatgttccatcgagagg

SEQ ID NO: 288784 - DNA, 33 bp, Homo sapien
agtgtcctgagacgacgatgttccatcgagagg

SEQ ID NO: 288785 - DNA, 33 bp, Homo sapien
ttaaaattatttagcactcctttgtcattcaaa

SEQ ID NO: 288786 - DNA, 33 bp, Homo sapien
ttaaaattatttagcattcctttgtcattcaaa

SEQ ID NO: 288787 - DNA, 33 bp, Homo sapien
tgaaggaaagctgagaaatcttaatatatgaaa

SEQ ID NO: 288788 - DNA, 33 bp, Homo sapien
tgaaggaaagctgagagatcttaatatatgaaa

SEQ ID NO: 288789 - DNA, 33 bp, Homo sapien
aaaataatgacaaaacaaggaaagagccagggc

SEQ ID NO: 288790 - DNA, 33 bp, Homo sapien
aaaataatgacaaaactaggaaagagccagggc

SEQ ID NO: 288791 - DNA, 33 bp, Homo sapien
ggccagccaaccagctaaaaaggtacaataaat

SEQ ID NO: 288792 - DNA, 33 bp, Homo sapien
ggccagccaaccagctcaaaaggtacaataaat

SEQ ID NO: 288793 - DNA, 33 bp, Homo sapien
cattttattcatcgtaacaattgtcacagtaca

SEQ ID NO: 288794 - DNA, 33 bp, Homo sapien
cattttattcatcgtagcaattgtcacagtaca

SEQ ID NO: 288795 - DNA, 33 bp, Homo sapien
aatgtttgagaaactaaagaacaagtagcaaga

SEQ ID NO: 288796 - DNA, 33 bp, Homo sapien
aatgtttgagaaactagagaacaagtagcaaga

SEQ ID NO: 288797 - DNA, 33 bp, Homo sapien
tgaagcaaacaacatccataaacattttggtgc

SEQ ID NO: 288798 - DNA, 33 bp, Homo sapien
tgaagcaaacaacatctataaacattttggtgc

SEQ ID NO: 288799 - DNA, 33 bp, Homo sapien
ttttcatgtagagaagacccagagcttgatctg

SEQ ID NO: 288800 - DNA, 33 bp, Homo sapien
ttttcatgtagagaaggcccagagcttgatctg

SEQ ID NO: 288801 - DNA, 33 bp, Homo sapien
cagttacattttctgaacaattattgaatgagg

SEQ ID NO: 288802 - DNA, 33 bp, Homo sapien
cagttacattttctgatcaattattgaatgagg

SEQ ID NO: 288803 - DNA, 33 bp, Homo sapien
gaacttcattcttgagaaagctcaatgcctgtt

SEQ ID NO: 288804 - DNA, 33 bp, Homo sapien
gaacttcattcttgagtaagctcaatgcctgtt

SEQ ID NO: 288805 - DNA, 33 bp, Homo sapien
gctggagattaatagggaaagtcagatagctac

SEQ ID NO: 288806 - DNA, 33 bp, Homo sapien
gctggagattaataggtaaagtcagatagctac

SEQ ID NO: 288807 - DNA, 33 bp, Homo sapien
tatatctaaacacagcacatgaggtcctaaaca

SEQ ID NO: 288808 - DNA, 33 bp, Homo sapien
tatatctaaacacagcgcatgaggtcctaaaca

SEQ ID NO: 288809 - DNA, 33 bp, Homo sapien
gtgtaggaaatagatgaatcaaaacggacttca

SEQ ID NO: 288810 - DNA, 33 bp, Homo sapien
gtgtaggaaatagatggatcaaaacggacttca

SEQ ID NO: 288811 - DNA, 33 bp, Homo sapien
ggtagagcagaaaggtcaaaaattacactgcag

SEQ ID NO: 288812 - DNA, 33 bp, Homo sapien
ggtagagcagaaaggttaaaaattacactgcag

SEQ ID NO: 288813 - DNA, 33 bp, Homo sapien
tcacgtccattgcaagacatcaaaatcctgtac

SEQ ID NO: 288814 - DNA, 33 bp, Homo sapien
tcacgtccattgcaagccatcaaaatcctgtac

SEQ ID NO: 288815 - DNA, 33 bp, Homo sapien
tttaaaaaccgctggactaaagatctgggcatt

SEQ ID NO: 288816 - DNA, 33 bp, Homo sapien
tttaaaaaccgctggagtaaagatctgggcatt

SEQ ID NO: 288817 - DNA, 33 bp, Homo sapien
acagtaagctcatcaaaggtgccatctgaatca

SEQ ID NO: 288818 - DNA, 33 bp, Homo sapien
acagtaagctcatcaagggtgccatctgaatca

SEQ ID NO: 288819 - DNA, 33 bp, Homo sapien
ttggtaaccttgctgaagtcttgcagagatgta

SEQ ID NO: 288820 - DNA, 33 bp, Homo sapien
ttggtaaccttgctgacgtcttgcagagatgta

SEQ ID NO: 288821 - DNA, 33 bp, Homo sapien
agaaaactgaagccaacgaggtaaaataactcg

SEQ ID NO: 288822 - DNA, 33 bp, Homo sapien
agaaaactgaagccaatgaggtaaaataactcg

SEQ ID NO: 288823 - DNA, 33 bp, Homo sapien
ttggtctggagatcacggatggagcagcactag

SEQ ID NO: 288824 - DNA, 33 bp, Homo sapien
ttggtctggagatcactgatggagcagcactag

SEQ ID NO: 288825 - DNA, 33 bp, Homo sapien
ctagttctttcaccacactcaccgcccttccta

SEQ ID NO: 288826 - DNA, 33 bp, Homo sapien
ctagttctttcaccacgctcaccgcccttccta

SEQ ID NO: 288827 - DNA, 33 bp, Homo sapien
tgtttttcaggttgtaaggaagtataatacctt

SEQ ID NO: 288828 - DNA, 33 bp, Homo sapien
tgtttttcaggttgtagggaagtataatacctt

SEQ ID NO: 288829 - DNA, 33 bp, Homo sapien
aaaggaaggtgatatgaacaaatgactcagctc

SEQ ID NO: 288830 - DNA, 33 bp, Homo sapien
aaaggaaggtgatatggacaaatgactcagctc

SEQ ID NO: 288831 - DNA, 33 bp, Homo sapien
cagtcttcaaaacagaccctaaactagagcact

SEQ ID NO: 288832 - DNA, 33 bp, Homo sapien
cagtcttcaaaacagatcctaaactagagcact

SEQ ID NO: 288833 - DNA, 33 bp, Homo sapien
aataacctgtcgtgacacatcagcttttctaat

SEQ ID NO: 288834 - DNA, 33 bp, Homo sapien
aataacctgtcgtgacgcatcagcttttctaat

SEQ ID NO: 288835 - DNA, 33 bp, Homo sapien
atccattctttttctaaggtttgcctcccagtt

SEQ ID NO: 288836 - DNA, 33 bp, Homo sapien
atccattctttttctatggtttgcctcccagtt

SEQ ID NO: 288837 - DNA, 33 bp, Homo sapien
tgtaactggccttttacccttgcactcggattt

SEQ ID NO: 288838 - DNA, 33 bp, Homo sapien
tgtaactggccttttatccttgcactcggattt

SEQ ID NO: 288839 - DNA, 33 bp, Homo sapien
agttggagtgatgagacggaattgtcattgaca

SEQ ID NO: 288840 - DNA, 33 bp, Homo sapien
agttggagtgatgagatggaattgtcattgaca

SEQ ID NO: 288841 - DNA, 33 bp, Homo sapien
gatggaagggagctaaatgtggtccatcaaggg

SEQ ID NO: 288842 - DNA, 33 bp, Homo sapien
gatggaagggagctaagtgtggtccatcaaggg

SEQ ID NO: 288843 - DNA, 33 bp, Homo sapien
aactcccccaaagtgaaggcttgtatcttttgt

SEQ ID NO: 288844 - DNA, 33 bp, Homo sapien
aactcccccaaagtgacggcttgtatcttttgt

SEQ ID NO: 288845 - DNA, 33 bp, Homo sapien
ctgtggggagcttgcacgcccaagtgaggaatt

SEQ ID NO: 288846 - DNA, 33 bp, Homo sapien
ctgtggggagcttgcatgcccaagtgaggaatt

SEQ ID NO: 288847 - DNA, 33 bp, Homo sapien
agcttccatgacctcaaagcaaacaaggaggac

SEQ ID NO: 288848 - DNA, 33 bp, Homo sapien
agcttccatgacctcagagcaaacaaggaggac

SEQ ID NO: 288849 - DNA, 33 bp, Homo sapien
attaaatggggttggcagaagtttgaccaggac

SEQ ID NO: 288850 - DNA, 33 bp, Homo sapien
attaaatggggttggccgaagtttgaccaggac

SEQ ID NO: 288851 - DNA, 33 bp, Homo sapien
aatatgttctagtgcactaaccctccattgatt

SEQ ID NO: 288852 - DNA, 33 bp, Homo sapien
aatatgttctagtgcattaaccctccattgatt

SEQ ID NO: 288853 - DNA, 33 bp, Homo sapien
ttgcttattgataaagcagacagtcatatattt

SEQ ID NO: 288854 - DNA, 33 bp, Homo sapien
ttgcttattgataaagtagacagtcatatattt

SEQ ID NO: 288855 - DNA, 33 bp, Homo sapien
tttaggcacatatcaacgctttgcttatggcaa

SEQ ID NO: 288856 - DNA, 33 bp, Homo sapien
tttaggcacatatcaatgctttgcttatggcaa

SEQ ID NO: 288857 - DNA, 33 bp, Homo sapien
tcaaatgtatttacaaactgaattgatgcatta

SEQ ID NO: 288858 - DNA, 33 bp, Homo sapien
tcaaatgtatttacaagctgaattgatgcatta

SEQ ID NO: 288859 - DNA, 33 bp, Homo sapien
gcttttaagaaactcacgatggaacttctatat

SEQ ID NO: 288860 - DNA, 33 bp, Homo sapien
gcttttaagaaactcatgatggaacttctatat

SEQ ID NO: 288861 - DNA, 33 bp, Homo sapien
aactgaatgtttagtaaatgttgggttctattt

SEQ ID NO: 288862 - DNA, 33 bp, Homo sapien
aactgaatgtttagtacatgttgggttctattt

SEQ ID NO: 288863 - DNA, 33 bp, Homo sapien
gccagaagactcagcaagttgttcattccacat

SEQ ID NO: 288864 - DNA, 33 bp, Homo sapien
gccagaagactcagcaggttgttcattccacat

SEQ ID NO: 288865 - DNA, 33 bp, Homo sapien
aagcaatggatttctacgatctacaattcagtt

SEQ ID NO: 288866 - DNA, 33 bp, Homo sapien
aagcaatggatttctatgatctacaattcagtt

SEQ ID NO: 288867 - DNA, 33 bp, Homo sapien
accctcggagactctacgtaacagaattttagt

SEQ ID NO: 288868 - DNA, 33 bp, Homo sapien
accctcggagactctaggtaacagaattttagt

SEQ ID NO: 288869 - DNA, 33 bp, Homo sapien
attttgttatgcatcccattattatacgaaaga

SEQ ID NO: 288870 - DNA, 33 bp, Homo sapien
attttgttatgcatcctattattatacgaaaga

SEQ ID NO: 288871 - DNA, 33 bp, Homo sapien
ggaggataaaaatctacgatgatctttcgtata

SEQ ID NO: 288872 - DNA, 33 bp, Homo sapien
ggaggataaaaatctatgatgatctttcgtata

SEQ ID NO: 288873 - DNA, 33 bp, Homo sapien
ggaaagcagaattccacaaaatgaggatggaat

SEQ ID NO: 288874 - DNA, 33 bp, Homo sapien
ggaaagcagaattccagaaaatgaggatggaat

SEQ ID NO: 288875 - DNA, 33 bp, Homo sapien
gatccttgcttttgtgcataagaagtgattgtt

SEQ ID NO: 288876 - DNA, 33 bp, Homo sapien
gatccttgcttttgtgtataagaagtgattgtt

SEQ ID NO: 288877 - DNA, 33 bp, Homo sapien
tggtggccgtgttaacaagagaatcccatccct

SEQ ID NO: 288878 - DNA, 33 bp, Homo sapien
tggtggccgtgttaacgagagaatcccatccct

SEQ ID NO: 288879 - DNA, 33 bp, Homo sapien
aatggccaagtggcccaaggtatttcatggctc

SEQ ID NO: 288880 - DNA, 33 bp, Homo sapien
aatggccaagtggcccgaggtatttcatggctc

SEQ ID NO: 288881 - DNA, 33 bp, Homo sapien
agcaacaacacaatcacaactaatatgccagaa

SEQ ID NO: 288882 - DNA, 33 bp, Homo sapien
agcaacaacacaatcagaactaatatgccagaa

SEQ ID NO: 288883 - DNA, 33 bp, Homo sapien
gaattggagcctaaaaataaataacttacgatt

SEQ ID NO: 288884 - DNA, 33 bp, Homo sapien
gaattggagcctaaaagtaaataacttacgatt

SEQ ID NO: 288885 - DNA, 33 bp, Homo sapien
tgagcgattatgtctccaaaggctgatattcat

SEQ ID NO: 288886 - DNA, 33 bp, Homo sapien
tgagcgattatgtctctaaaggctgatattcat

SEQ ID NO: 288887 - DNA, 33 bp, Homo sapien
agccaatgtagccgtacgggtccttcatgagat

SEQ ID NO: 288888 - DNA, 33 bp, Homo sapien
agccaatgtagccgtatgggtccttcatgagat

SEQ ID NO: 288889 - DNA, 33 bp, Homo sapien
actgaagccaaagtaacatgactgatcctagcc

SEQ ID NO: 288890 - DNA, 33 bp, Homo sapien
actgaagccaaagtaatatgactgatcctagcc

SEQ ID NO: 288891 - DNA, 33 bp, Homo sapien
actgtttgttttcgtacctaatattgtgtaatt

SEQ ID NO: 288892 - DNA, 33 bp, Homo sapien
actgtttgttttcgtatctaatattgtgtaatt

SEQ ID NO: 288893 - DNA, 33 bp, Homo sapien
gacatatgggttgttaaatggtctgaggacaag

SEQ ID NO: 288894 - DNA, 33 bp, Homo sapien
gacatatgggttgttagatggtctgaggacaag

SEQ ID NO: 288895 - DNA, 33 bp, Homo sapien
gaaaatgattttgctacgacccaagagagaaga

SEQ ID NO: 288896 - DNA, 33 bp, Homo sapien
gaaaatgattttgctatgacccaagagagaaga

SEQ ID NO: 288897 - DNA, 33 bp, Homo sapien
cagagatgaaatatgccacctgaggtctgggat

SEQ ID NO: 288898 - DNA, 33 bp, Homo sapien
cagagatgaaatatgctacctgaggtctgggat

SEQ ID NO: 288899 - DNA, 33 bp, Homo sapien
gcattttgtaatacacgcattagaggctcaaaa

SEQ ID NO: 288900 - DNA, 33 bp, Homo sapien
gcattttgtaatacactcattagaggctcaaaa

SEQ ID NO: 288901 - DNA, 33 bp, Homo sapien
taagatcttacaaaaaagctgaaaattttctca

SEQ ID NO: 288902 - DNA, 33 bp, Homo sapien
taagatcttacaaaaaggctgaaaattttctca

SEQ ID NO: 288903 - DNA, 33 bp, Homo sapien
caattgaatcaaaatagtaacagcattatttat

SEQ ID NO: 288904 - DNA, 33 bp, Homo sapien
caattgaatcaaaatattaacagcattatttat

SEQ ID NO: 288905 - DNA, 33 bp, Homo sapien
cttatagacacacaaaatagaatgagataatga

SEQ ID NO: 288906 - DNA, 33 bp, Homo sapien
cttatagacacacaaagtagaatgagataatga

SEQ ID NO: 288907 - DNA, 33 bp, Homo sapien
tttatcattcaggaaactggataataggcaggt

SEQ ID NO: 288908 - DNA, 33 bp, Homo sapien
tttatcattcaggaaagtggataataggcaggt

SEQ ID NO: 288909 - DNA, 33 bp, Homo sapien
tacttgacggaatacactggttagaagctctat

SEQ ID NO: 288910 - DNA, 33 bp, Homo sapien
tacttgacggaatacattggttagaagctctat

SEQ ID NO: 288911 - DNA, 33 bp, Homo sapien
tcaggtcatgtggatccgaaggtgccagaagct

SEQ ID NO: 288912 - DNA, 33 bp, Homo sapien
tcaggtcatgtggatctgaaggtgccagaagct

SEQ ID NO: 288913 - DNA, 33 bp, Homo sapien
acccagcctgtaacagcagagccttgaagccct

SEQ ID NO: 288914 - DNA, 33 bp, Homo sapien
acccagcctgtaacagtagagccttgaagccct

SEQ ID NO: 288915 - DNA, 33 bp, Homo sapien
tggatgccaattaatcaactatgtggcctgtgg

SEQ ID NO: 288916 - DNA, 33 bp, Homo sapien
tggatgccaattaatcgactatgtggcctgtgg

SEQ ID NO: 288917 - DNA, 33 bp, Homo sapien
tactgtgtggtgcagactataaatgcagaatgt

SEQ ID NO: 288918 - DNA, 33 bp, Homo sapien
tactgtgtggtgcagattataaatgcagaatgt

SEQ ID NO: 288919 - DNA, 33 bp, Homo sapien
caaagaatgaagaaaaagatacgtagcacatgc

SEQ ID NO: 288920 - DNA, 33 bp, Homo sapien
caaagaatgaagaaaatgatacgtagcacatgc

SEQ ID NO: 288921 - DNA, 33 bp, Homo sapien
ggtcaagtatatttaactgtttgatcatataac

SEQ ID NO: 288922 - DNA, 33 bp, Homo sapien
ggtcaagtatatttaagtgtttgatcatataac

SEQ ID NO: 288923 - DNA, 33 bp, Homo sapien
tcagttcaaatcccaacgaaggaaatggcagga

SEQ ID NO: 288924 - DNA, 33 bp, Homo sapien
tcagttcaaatcccaaggaaggaaatggcagga

SEQ ID NO: 288925 - DNA, 33 bp, Homo sapien
taatagttccaaataaccaagctttaggtggtg

SEQ ID NO: 288926 - DNA, 33 bp, Homo sapien
taatagttccaaataatcaagctttaggtggtg

SEQ ID NO: 288927 - DNA, 33 bp, Homo sapien
acaagggaaggagacacggaaactcaaccacaa

SEQ ID NO: 288928 - DNA, 33 bp, Homo sapien
acaagggaaggagacatggaaactcaaccacaa

SEQ ID NO: 288929 - DNA, 33 bp, Homo sapien
aaaaaatactaaacgcaaatatgatctaaaaca

SEQ ID NO: 288930 - DNA, 33 bp, Homo sapien
aaaaaatactaaacgcgaatatgatctaaaaca

SEQ ID NO: 288931 - DNA, 33 bp, Homo sapien
aaatatttaacataaaaattagccatagtcagg

SEQ ID NO: 288932 - DNA, 33 bp, Homo sapien
aaatatttaacataaacattagccatagtcagg

SEQ ID NO: 288933 - DNA, 33 bp, Homo sapien
actgtatcaatatcatcatcctagtgtttttgt

SEQ ID NO: 288934 - DNA, 33 bp, Homo sapien
actgtatcaatatcattatcctagtgtttttgt

SEQ ID NO: 288935 - DNA, 33 bp, Homo sapien
tttgtttgaaaatatccgagcctctgcctcaca

SEQ ID NO: 288936 - DNA, 33 bp, Homo sapien
tttgtttgaaaatatctgagcctctgcctcaca

SEQ ID NO: 288937 - DNA, 33 bp, Homo sapien
caattctaactttatacgcaccagagtgaccaa

SEQ ID NO: 288938 - DNA, 33 bp, Homo sapien
caattctaactttatatgcaccagagtgaccaa

SEQ ID NO: 288939 - DNA, 33 bp, Homo sapien
gacatacaaagaaaagaagagcaattacagggt

SEQ ID NO: 288940 - DNA, 33 bp, Homo sapien
gacatacaaagaaaagcagagcaattacagggt

SEQ ID NO: 288941 - DNA, 33 bp, Homo sapien
acacaatgcattataactggggagactggatac

SEQ ID NO: 288942 - DNA, 33 bp, Homo sapien
acacaatgcattataattggggagactggatac

SEQ ID NO: 288943 - DNA, 33 bp, Homo sapien
gaaacccaacttccatcagaaaagctgaaaaat

SEQ ID NO: 288944 - DNA, 33 bp, Homo sapien
gaaacccaacttccattagaaaagctgaaaaat

SEQ ID NO: 288945 - DNA, 33 bp, Homo sapien
tcttcacccataccaaagcatgactagtttttt

SEQ ID NO: 288946 - DNA, 33 bp, Homo sapien
tcttcacccataccaatgcatgactagtttttt

SEQ ID NO: 288947 - DNA, 33 bp, Homo sapien
aaacccaaagctactacgacaaatacaagtcag

SEQ ID NO: 288948 - DNA, 33 bp, Homo sapien
aaacccaaagctactatgacaaatacaagtcag

SEQ ID NO: 288949 - DNA, 33 bp, Homo sapien
cctaacagccctgtgaagagagaaagacaggga

SEQ ID NO: 288950 - DNA, 33 bp, Homo sapien
cctaacagccctgtgaggagagaaagacaggga

SEQ ID NO: 288951 - DNA, 33 bp, Homo sapien
aagctccaggagaaaacttacacccctttccat

SEQ ID NO: 288952 - DNA, 33 bp, Homo sapien
aagctccaggagaaaatttacacccctttccat

SEQ ID NO: 288953 - DNA, 33 bp, Homo sapien
ctttggtcccagttaaatatatccatctagttt

SEQ ID NO: 288954 - DNA, 33 bp, Homo sapien
ctttggtcccagttaattatatccatctagttt

SEQ ID NO: 288955 - DNA, 33 bp, Homo sapien
gtcagtggaggaaaacacactcattatctggca

SEQ ID NO: 288956 - DNA, 33 bp, Homo sapien
gtcagtggaggaaaactcactcattatctggca

SEQ ID NO: 288957 - DNA, 33 bp, Homo sapien
atgcctattgttcacacatccagaccctaaaca

SEQ ID NO: 288958 - DNA, 33 bp, Homo sapien
atgcctattgttcacatatccagaccctaaaca

SEQ ID NO: 288959 - DNA, 33 bp, Homo sapien
ttctttgttcatttgacggtaggaaggtgtttt

SEQ ID NO: 288960 - DNA, 33 bp, Homo sapien
ttctttgttcatttgatggtaggaaggtgtttt

SEQ ID NO: 288961 - DNA, 33 bp, Homo sapien
ctgcccagtttcttagaagatgaaaatgataac

SEQ ID NO: 288962 - DNA, 33 bp, Homo sapien
ctgcccagtttcttaggagatgaaaatgataac

SEQ ID NO: 288963 - DNA, 33 bp, Homo sapien
catacccctgctgcgacgaggttatcagaaagg

SEQ ID NO: 288964 - DNA, 33 bp, Homo sapien
catacccctgctgcgaggaggttatcagaaagg

SEQ ID NO: 288965 - DNA, 33 bp, Homo sapien
aaaagaaaagattaacagatttgactacataaa

SEQ ID NO: 288966 - DNA, 33 bp, Homo sapien
aaaagaaaagattaacggatttgactacataaa

SEQ ID NO: 288967 - DNA, 33 bp, Homo sapien
agctagaatttcaccaacctctgtcaaaagcaa

SEQ ID NO: 288968 - DNA, 33 bp, Homo sapien
agctagaatttcaccagcctctgtcaaaagcaa

SEQ ID NO: 288969 - DNA, 33 bp, Homo sapien
aggactaaataagtgcaacagggactcaggaga

SEQ ID NO: 288970 - DNA, 33 bp, Homo sapien
aggactaaataagtgcgacagggactcaggaga

SEQ ID NO: 288971 - DNA, 33 bp, Homo sapien
attctcattatatagacgtggttgaagatgtca

SEQ ID NO: 288972 - DNA, 33 bp, Homo sapien
attctcattatatagatgtggttgaagatgtca

SEQ ID NO: 288973 - DNA, 33 bp, Homo sapien
gggcaccaatgattccacttgtgtagagctggt

SEQ ID NO: 288974 - DNA, 33 bp, Homo sapien
gggcaccaatgattccgcttgtgtagagctggt

SEQ ID NO: 288975 - DNA, 33 bp, Homo sapien
agaaagcatttatttgcatcaagtctttcagta

SEQ ID NO: 288976 - DNA, 33 bp, Homo sapien
agaaagcatttatttgtatcaagtctttcagta

SEQ ID NO: 288977 - DNA, 33 bp, Homo sapien
ttatttttctttcttccattacaccaggaaata

SEQ ID NO: 288978 - DNA, 33 bp, Homo sapien
ttatttttctttcttctattacaccaggaaata

SEQ ID NO: 288979 - DNA, 33 bp, Homo sapien
gtgaaaataaaacctgaaagtgaccaggaacac

SEQ ID NO: 288980 - DNA, 33 bp, Homo sapien
gtgaaaataaaacctgcaagtgaccaggaacac

SEQ ID NO: 288981 - DNA, 33 bp, Homo sapien
atgtgaggataaaggaagaacttcccagccagc

SEQ ID NO: 288982 - DNA, 33 bp, Homo sapien
atgtgaggataaaggaggaacttcccagccagc

SEQ ID NO: 288983 - DNA, 33 bp, Homo sapien
ctcatttttgaagtgacctaaagagtgtcattg

SEQ ID NO: 288984 - DNA, 33 bp, Homo sapien
ctcatttttgaagtgatctaaagagtgtcattg

SEQ ID NO: 288985 - DNA, 33 bp, Homo sapien
gttctccagggtgggcactacatgaatggcaac

SEQ ID NO: 288986 - DNA, 33 bp, Homo sapien
gttctccagggtgggcgctacatgaatggcaac

SEQ ID NO: 288987 - DNA, 33 bp, Homo sapien
gtcttctttgcatagaacattgctaggcactga

SEQ ID NO: 288988 - DNA, 33 bp, Homo sapien
gtcttctttgcatagagcattgctaggcactga

SEQ ID NO: 288989 - DNA, 33 bp, Homo sapien
actaaatcagtcaaaagggaactctggtttctg

SEQ ID NO: 288990 - DNA, 33 bp, Homo sapien
actaaatcagtcaaaatggaactctggtttctg

SEQ ID NO: 288991 - DNA, 33 bp, Homo sapien
gtgaggtctcaatctacgccttcaagaagctca

SEQ ID NO: 288992 - DNA, 33 bp, Homo sapien
gtgaggtctcaatctatgccttcaagaagctca

SEQ ID NO: 288993 - DNA, 33 bp, Homo sapien
cccaagcaagctccctcacaactgtaccagcct

SEQ ID NO: 288994 - DNA, 33 bp, Homo sapien
cccaagcaagctccctgacaactgtaccagcct

SEQ ID NO: 288995 - DNA, 33 bp, Homo sapien
aacttttcctgatgacgaaccctgggcatatac

SEQ ID NO: 288996 - DNA, 33 bp, Homo sapien
aacttttcctgatgactaaccctgggcatatac

SEQ ID NO: 288997 - DNA, 33 bp, Homo sapien
cagggtcggcttaagcaattcttaaacaaaatc

SEQ ID NO: 288998 - DNA, 33 bp, Homo sapien
cagggtcggcttaagcgattcttaaacaaaatc

SEQ ID NO: 288999 - DNA, 33 bp, Homo sapien
agaagttcagtacatccagttgtgtaaaagcac

SEQ ID NO: 289000 - DNA, 33 bp, Homo sapien
agaagttcagtacatcgagttgtgtaaaagcac

SEQ ID NO: 289001 - DNA, 33 bp, Homo sapien
ttgattgtgagaatcagtacaaaaggtatattt

SEQ ID NO: 289002 - DNA, 33 bp, Homo sapien
ttgattgtgagaatcattacaaaaggtatattt

SEQ ID NO: 289003 - DNA, 33 bp, Homo sapien
tcagaagccttggaaaataatagtccacattcc

SEQ ID NO: 289004 - DNA, 33 bp, Homo sapien
tcagaagccttggaaagtaatagtccacattcc

SEQ ID NO: 289005 - DNA, 33 bp, Homo sapien
ggcagctgtatcagcaaggtattacaatagctt

SEQ ID NO: 289006 - DNA, 33 bp, Homo sapien
ggcagctgtatcagcacggtattacaatagctt

SEQ ID NO: 289007 - DNA, 33 bp, Homo sapien
gtagctctctctttgaaggttgcttggcagctt

SEQ ID NO: 289008 - DNA, 33 bp, Homo sapien
gtagctctctctttgagggttgcttggcagctt

SEQ ID NO: 289009 - DNA, 33 bp, Homo sapien
tctttttgtgtcttcacatggtggaaggggctt

SEQ ID NO: 289010 - DNA, 33 bp, Homo sapien
tctttttgtgtcttcatatggtggaaggggctt

SEQ ID NO: 289011 - DNA, 33 bp, Homo sapien
ttgggcatttagggaacaattaggtcatggggg

SEQ ID NO: 289012 - DNA, 33 bp, Homo sapien
ttgggcatttagggaataattaggtcatggggg

SEQ ID NO: 289013 - DNA, 33 bp, Homo sapien
gaaaaaggtgttaactcagaagaggtccctggc

SEQ ID NO: 289014 - DNA, 33 bp, Homo sapien
gaaaaaggtgttaacttagaagaggtccctggc

SEQ ID NO: 289015 - DNA, 33 bp, Homo sapien
acaagaggttgggatgccaacatataaatatta

SEQ ID NO: 289016 - DNA, 33 bp, Homo sapien
acaagaggttgggatgtcaacatataaatatta

SEQ ID NO: 289017 - DNA, 33 bp, Homo sapien
atctggaagattgtgaaaattcacattggaaaa

SEQ ID NO: 289018 - DNA, 33 bp, Homo sapien
atctggaagattgtgagaattcacattggaaaa

SEQ ID NO: 289019 - DNA, 33 bp, Homo sapien
ctggccacaaagaaacagttgagaagcatcata

SEQ ID NO: 289020 - DNA, 33 bp, Homo sapien
ctggccacaaagaaaccgttgagaagcatcata

SEQ ID NO: 289021 - DNA, 33 bp, Homo sapien
gaagcaactttgggaccgggtaatgagcagagg

SEQ ID NO: 289022 - DNA, 33 bp, Homo sapien
gaagcaactttgggactgggtaatgagcagagg

SEQ ID NO: 289023 - DNA, 33 bp, Homo sapien
aagcaagaaaatatgaaccagaatgaggagaaa

SEQ ID NO: 289024 - DNA, 33 bp, Homo sapien
aagcaagaaaatatgacccagaatgaggagaaa

SEQ ID NO: 289025 - DNA, 33 bp, Homo sapien
atagcaggaaatttgcaaaagtaagattttttt

SEQ ID NO: 289026 - DNA, 33 bp, Homo sapien
atagcaggaaatttgcgaaagtaagattttttt

SEQ ID NO: 289027 - DNA, 33 bp, Homo sapien
aatcagatatttgcaacgtaataacttcatcca

SEQ ID NO: 289028 - DNA, 33 bp, Homo sapien
aatcagatatttgcaatgtaataacttcatcca

SEQ ID NO: 289029 - DNA, 33 bp, Homo sapien
gcttatctaagttctgacactctgcaaatggca

SEQ ID NO: 289030 - DNA, 33 bp, Homo sapien
gcttatctaagttctgtcactctgcaaatggca

SEQ ID NO: 289031 - DNA, 33 bp, Homo sapien
tcaatcctgacgtctgccaagtgtggagatgaa

SEQ ID NO: 289032 - DNA, 33 bp, Homo sapien
tcaatcctgacgtctggcaagtgtggagatgaa

SEQ ID NO: 289033 - DNA, 33 bp, Homo sapien
tactcctttactttctgaatgcacccacaaaca

SEQ ID NO: 289034 - DNA, 33 bp, Homo sapien
tactcctttactttcttaatgcacccacaaaca

SEQ ID NO: 289035 - DNA, 33 bp, Homo sapien
cttggatcgacagagaacagaacacagcctggg

SEQ ID NO: 289036 - DNA, 33 bp, Homo sapien
cttggatcgacagagagcagaacacagcctggg

SEQ ID NO: 289037 - DNA, 33 bp, Homo sapien
agctttgctgagaacacaaaggctagcattata

SEQ ID NO: 289038 - DNA, 33 bp, Homo sapien
agctttgctgagaacataaaggctagcattata

SEQ ID NO: 289039 - DNA, 33 bp, Homo sapien
ccttttatcatagctgcacaatgaattcctctt

SEQ ID NO: 289040 - DNA, 33 bp, Homo sapien
ccttttatcatagctggacaatgaattcctctt

SEQ ID NO: 289041 - DNA, 33 bp, Homo sapien
aagaccacgaccaacacatagtaagcacttgat

SEQ ID NO: 289042 - DNA, 33 bp, Homo sapien
aagaccacgaccaacatatagtaagcacttgat

SEQ ID NO: 289043 - DNA, 33 bp, Homo sapien
accaacagtacacgagcattccaattttgccac

SEQ ID NO: 289044 - DNA, 33 bp, Homo sapien
accaacagtacacgaggattccaattttgccac

SEQ ID NO: 289045 - DNA, 33 bp, Homo sapien
tcctgtgggccactacactagcaatttcttttt

SEQ ID NO: 289046 - DNA, 33 bp, Homo sapien
tcctgtgggccactaccctagcaatttcttttt

SEQ ID NO: 289047 - DNA, 33 bp, Homo sapien
ctttcaacttagacaaaccaacattttcctgga

SEQ ID NO: 289048 - DNA, 33 bp, Homo sapien
ctttcaacttagacaagccaacattttcctgga

SEQ ID NO: 289049 - DNA, 33 bp, Homo sapien
atagcacctttcctgcaatcagaccatattgtc

SEQ ID NO: 289050 - DNA, 33 bp, Homo sapien
atagcacctttcctgccatcagaccatattgtc

SEQ ID NO: 289051 - DNA, 33 bp, Homo sapien
taattctgatgaggagccctatttttaactccc

SEQ ID NO: 289052 - DNA, 33 bp, Homo sapien
taattctgatgaggagtcctatttttaactccc

SEQ ID NO: 289053 - DNA, 33 bp, Homo sapien
caagtgcatatgctaaaggttgcatctggtgga

SEQ ID NO: 289054 - DNA, 33 bp, Homo sapien
caagtgcatatgctaacggttgcatctggtgga

SEQ ID NO: 289055 - DNA, 33 bp, Homo sapien
tgaactaaagatttcaagatgatctgtggcagt

SEQ ID NO: 289056 - DNA, 33 bp, Homo sapien
tgaactaaagatttcatgatgatctgtggcagt

SEQ ID NO: 289057 - DNA, 33 bp, Homo sapien
gtagaaagttaatgagccaagagcccttataat

SEQ ID NO: 289058 - DNA, 33 bp, Homo sapien
gtagaaagttaatgagtcaagagcccttataat

SEQ ID NO: 289059 - DNA, 33 bp, Homo sapien
gactagaggggatagacgtgtcagaagaacagt

SEQ ID NO: 289060 - DNA, 33 bp, Homo sapien
gactagaggggatagatgtgtcagaagaacagt

SEQ ID NO: 289061 - DNA, 33 bp, Homo sapien
gcactagggggcgatagagcattgctttcagcc

SEQ ID NO: 289062 - DNA, 33 bp, Homo sapien
gcactagggggcgatatagcattgctttcagcc

SEQ ID NO: 289063 - DNA, 33 bp, Homo sapien
aagtcattggctcttacgtcacttggcaaagca

SEQ ID NO: 289064 - DNA, 33 bp, Homo sapien
aagtcattggctcttatgtcacttggcaaagca

SEQ ID NO: 289065 - DNA, 33 bp, Homo sapien
gccctctgtattctgacggtgaagtttgtggtt

SEQ ID NO: 289066 - DNA, 33 bp, Homo sapien
gccctctgtattctgatggtgaagtttgtggtt

SEQ ID NO: 289067 - DNA, 33 bp, Homo sapien
cacaatgcaatgttaaaacaaaaggccaagcag

SEQ ID NO: 289068 - DNA, 33 bp, Homo sapien
cacaatgcaatgttaagacaaaaggccaagcag

SEQ ID NO: 289069 - DNA, 33 bp, Homo sapien
atgaaagaaaaatgcacggagtttatgtcaacc

SEQ ID NO: 289070 - DNA, 33 bp, Homo sapien
atgaaagaaaaatgcatggagtttatgtcaacc

SEQ ID NO: 289071 - DNA, 33 bp, Homo sapien
gccctcaaaatcatccacggagaaaggcataga

SEQ ID NO: 289072 - DNA, 33 bp, Homo sapien
gccctcaaaatcatcctcggagaaaggcataga

SEQ ID NO: 289073 - DNA, 33 bp, Homo sapien
gttgtggattggaaaacgatttagttaagaaaa

SEQ ID NO: 289074 - DNA, 33 bp, Homo sapien
gttgtggattggaaaaggatttagttaagaaaa

SEQ ID NO: 289075 - DNA, 33 bp, Homo sapien
cactaagtgctattcacattacttagtcttcat

SEQ ID NO: 289076 - DNA, 33 bp, Homo sapien
cactaagtgctattcatattacttagtcttcat

SEQ ID NO: 289077 - DNA, 33 bp, Homo sapien
gagacagatgtgagcgcactttaaagttataaa

SEQ ID NO: 289078 - DNA, 33 bp, Homo sapien
gagacagatgtgagcgtactttaaagttataaa

SEQ ID NO: 289079 - DNA, 33 bp, Homo sapien
agggtttgagaacttaagctcatttctatcact

SEQ ID NO: 289080 - DNA, 33 bp, Homo sapien
agggtttgagaacttaggctcatttctatcact

SEQ ID NO: 289081 - DNA, 33 bp, Homo sapien
actgagcctgttatacagatggctaacagagtc

SEQ ID NO: 289082 - DNA, 33 bp, Homo sapien
actgagcctgttatacggatggctaacagagtc

SEQ ID NO: 289083 - DNA, 33 bp, Homo sapien
gggtacactcacacaacgttggcaggaatataa

SEQ ID NO: 289084 - DNA, 33 bp, Homo sapien
gggtacactcacacaatgttggcaggaatataa

SEQ ID NO: 289085 - DNA, 33 bp, Homo sapien
attactatttggccccaaaatcctatcactggg

SEQ ID NO: 289086 - DNA, 33 bp, Homo sapien
attactatttggccccgaaatcctatcactggg

SEQ ID NO: 289087 - DNA, 33 bp, Homo sapien
gcagaaactgctgaagaattataagtggcctat

SEQ ID NO: 289088 - DNA, 33 bp, Homo sapien
gcagaaactgctgaagcattataagtggcctat

SEQ ID NO: 289089 - DNA, 33 bp, Homo sapien
cacccttgtctgtaaaatggacaaaacatatta

SEQ ID NO: 289090 - DNA, 33 bp, Homo sapien
cacccttgtctgtaaagtggacaaaacatatta

SEQ ID NO: 289091 - DNA, 33 bp, Homo sapien
cctggtgtcaaatttacgtgccaaagtagacct

SEQ ID NO: 289092 - DNA, 33 bp, Homo sapien
cctggtgtcaaatttatgtgccaaagtagacct

SEQ ID NO: 289093 - DNA, 33 bp, Homo sapien
gagcagaactattaaacaacaaggtctatatgg

SEQ ID NO: 289094 - DNA, 33 bp, Homo sapien
gagcagaactattaaataacaaggtctatatgg

SEQ ID NO: 289095 - DNA, 33 bp, Homo sapien
tagggtatgaccccacaccaaatccagtcattc

SEQ ID NO: 289096 - DNA, 33 bp, Homo sapien
tagggtatgaccccactccaaatccagtcattc

SEQ ID NO: 289097 - DNA, 33 bp, Homo sapien
cttactatgcgtatgaaaaaaactagggcatgg

SEQ ID NO: 289098 - DNA, 33 bp, Homo sapien
cttactatgcgtatgagaaaaactagggcatgg

SEQ ID NO: 289099 - DNA, 33 bp, Homo sapien
cctttagacttagctgcagagttgcttccaagt

SEQ ID NO: 289100 - DNA, 33 bp, Homo sapien
cctttagacttagctgtagagttgcttccaagt

SEQ ID NO: 289101 - DNA, 33 bp, Homo sapien
taaataaggacatataaagatgctgagaaactg

SEQ ID NO: 289102 - DNA, 33 bp, Homo sapien
taaataaggacatatacagatgctgagaaactg

SEQ ID NO: 289103 - DNA, 33 bp, Homo sapien
tctgagatgtacttacagcagggttctaagagc

SEQ ID NO: 289104 - DNA, 33 bp, Homo sapien
tctgagatgtacttacggcagggttctaagagc

SEQ ID NO: 289105 - DNA, 33 bp, Homo sapien
agaagaaagtgaatgacccacaatgtatgcaca

SEQ ID NO: 289106 - DNA, 33 bp, Homo sapien
agaagaaagtgaatgatccacaatgtatgcaca

SEQ ID NO: 289107 - DNA, 33 bp, Homo sapien
acagatgggtagaaaacgtaagagtttggatca

SEQ ID NO: 289108 - DNA, 33 bp, Homo sapien
acagatgggtagaaaatgtaagagtttggatca

SEQ ID NO: 289109 - DNA, 33 bp, Homo sapien
atatttactatctcgaacttagagaacacattt

SEQ ID NO: 289110 - DNA, 33 bp, Homo sapien
atatttactatctcgatcttagagaacacattt

SEQ ID NO: 289111 - DNA, 33 bp, Homo sapien
atagggtctcacaaaccgcttagccgttgcagt

SEQ ID NO: 289112 - DNA, 33 bp, Homo sapien
atagggtctcacaaactgcttagccgttgcagt

SEQ ID NO: 289113 - DNA, 33 bp, Homo sapien
acctctgaatcaaatcactgtgtcagttaaaaa

SEQ ID NO: 289114 - DNA, 33 bp, Homo sapien
acctctgaatcaaatccctgtgtcagttaaaaa

SEQ ID NO: 289115 - DNA, 33 bp, Homo sapien
aatgagtaagaatttgaagaaaccttgagagtt

SEQ ID NO: 289116 - DNA, 33 bp, Homo sapien
aatgagtaagaatttggagaaaccttgagagtt

SEQ ID NO: 289117 - DNA, 33 bp, Homo sapien
aggctatgcaattttgcacacgtataggttgtg

SEQ ID NO: 289118 - DNA, 33 bp, Homo sapien
aggctatgcaattttgtacacgtataggttgtg

SEQ ID NO: 289119 - DNA, 33 bp, Homo sapien
gtttttgatgtcatgtaaaagagctctttgcct

SEQ ID NO: 289120 - DNA, 33 bp, Homo sapien
gtttttgatgtcatgtcaaagagctctttgcct

SEQ ID NO: 289121 - DNA, 33 bp, Homo sapien
cctctacagaaggtacaaataattagcagggtg

SEQ ID NO: 289122 - DNA, 33 bp, Homo sapien
cctctacagaaggtaccaataattagcagggtg

SEQ ID NO: 289123 - DNA, 33 bp, Homo sapien
caagagtggatgaaccaattgtagtatatacac

SEQ ID NO: 289124 - DNA, 33 bp, Homo sapien
caagagtggatgaaccgattgtagtatatacac

SEQ ID NO: 289125 - DNA, 33 bp, Homo sapien
tattggaggaagctgacgaaaataactccattc

SEQ ID NO: 289126 - DNA, 33 bp, Homo sapien
tattggaggaagctgaggaaaataactccattc

SEQ ID NO: 289127 - DNA, 33 bp, Homo sapien
aatgatgaaggatagcaccatgtcacagttaca

SEQ ID NO: 289128 - DNA, 33 bp, Homo sapien
aatgatgaaggatagctccatgtcacagttaca

SEQ ID NO: 289129 - DNA, 33 bp, Homo sapien
aatcaccctgaggaaaagtaagaaatagttgtt

SEQ ID NO: 289130 - DNA, 33 bp, Homo sapien
aatcaccctgaggaaatgtaagaaatagttgtt

SEQ ID NO: 289131 - DNA, 33 bp, Homo sapien
ggaaagtaggtcacgacataaagggtcaaataa

SEQ ID NO: 289132 - DNA, 33 bp, Homo sapien
ggaaagtaggtcacgatataaagggtcaaataa

SEQ ID NO: 289133 - DNA, 33 bp, Homo sapien
acctatctctgccaccaacaatagcaaaaagtc

SEQ ID NO: 289134 - DNA, 33 bp, Homo sapien
acctatctctgccaccgacaatagcaaaaagtc

SEQ ID NO: 289135 - DNA, 33 bp, Homo sapien
gccaactaaaacaggaactctgcacaatataag

SEQ ID NO: 289136 - DNA, 33 bp, Homo sapien
gccaactaaaacaggagctctgcacaatataag

SEQ ID NO: 289137 - DNA, 33 bp, Homo sapien
agtttagtgagaagcccagctgaaacttacttg

SEQ ID NO: 289138 - DNA, 33 bp, Homo sapien
agtttagtgagaagcctagctgaaacttacttg

SEQ ID NO: 289139 - DNA, 33 bp, Homo sapien
tctcagtaggtcctccagaaataactgtcaaag

SEQ ID NO: 289140 - DNA, 33 bp, Homo sapien
tctcagtaggtcctccggaaataactgtcaaag

SEQ ID NO: 289141 - DNA, 33 bp, Homo sapien
gcacttttggaataacagagttagcatttccaa

SEQ ID NO: 289142 - DNA, 33 bp, Homo sapien
gcacttttggaataacggagttagcatttccaa

SEQ ID NO: 289143 - DNA, 33 bp, Homo sapien
ttctgcatctgaaagaagggtcattgccataag

SEQ ID NO: 289144 - DNA, 33 bp, Homo sapien
ttctgcatctgaaagaggggtcattgccataag

SEQ ID NO: 289145 - DNA, 33 bp, Homo sapien
gggagattggtcaagcaaagtggttcacacctg

SEQ ID NO: 289146 - DNA, 33 bp, Homo sapien
gggagattggtcaagcgaagtggttcacacctg

SEQ ID NO: 289147 - DNA, 33 bp, Homo sapien
ggtgcaaatccccatccagtttgcctgttttgt

SEQ ID NO: 289148 - DNA, 33 bp, Homo sapien
ggtgcaaatccccatctagtttgcctgttttgt

SEQ ID NO: 289149 - DNA, 33 bp, Homo sapien
agggtaggcaataatccgatatggcttgtttcc

SEQ ID NO: 289150 - DNA, 33 bp, Homo sapien
agggtaggcaataatctgatatggcttgtttcc

SEQ ID NO: 289151 - DNA, 33 bp, Homo sapien
atgttttgctgaatgagctagtcgccacattga

SEQ ID NO: 289152 - DNA, 33 bp, Homo sapien
atgttttgctgaatgatctagtcgccacattga

SEQ ID NO: 289153 - DNA, 33 bp, Homo sapien
gtgctactggcccaaaaagtcgctaatcacttg

SEQ ID NO: 289154 - DNA, 33 bp, Homo sapien
gtgctactggcccaaatagtcgctaatcacttg

SEQ ID NO: 289155 - DNA, 33 bp, Homo sapien
aacatgatgacaatcaaaaaacgatactgatca

SEQ ID NO: 289156 - DNA, 33 bp, Homo sapien
aacatgatgacaatcagaaaacgatactgatca

SEQ ID NO: 289157 - DNA, 33 bp, Homo sapien
tgtcatgaaggcagaaacttgtattattctcat

SEQ ID NO: 289158 - DNA, 33 bp, Homo sapien
tgtcatgaaggcagaagcttgtattattctcat

SEQ ID NO: 289159 - DNA, 33 bp, Homo sapien
ggagcagggggtactccgacaagggattttgtt

SEQ ID NO: 289160 - DNA, 33 bp, Homo sapien
ggagcagggggtactctgacaagggattttgtt

SEQ ID NO: 289161 - DNA, 33 bp, Homo sapien
gtgtaccaaactcccaactctcagaaggaaagc

SEQ ID NO: 289162 - DNA, 33 bp, Homo sapien
gtgtaccaaactcccacctctcagaaggaaagc

SEQ ID NO: 289163 - DNA, 33 bp, Homo sapien
cacagatgcccgctgcactggttcagagaagga

SEQ ID NO: 289164 - DNA, 33 bp, Homo sapien
cacagatgcccgctgcgctggttcagagaagga

SEQ ID NO: 289165 - DNA, 33 bp, Homo sapien
tctctccacgtgcacacaccaagaaaaggccat

SEQ ID NO: 289166 - DNA, 33 bp, Homo sapien
tctctccacgtgcacataccaagaaaaggccat

SEQ ID NO: 289167 - DNA, 33 bp, Homo sapien
ctccatatctctttcacgtcgcacatctaattt

SEQ ID NO: 289168 - DNA, 33 bp, Homo sapien
ctccatatctctttcatgtcgcacatctaattt

SEQ ID NO: 289169 - DNA, 33 bp, Homo sapien
tatttaagcatcgataggaaattatttccgaca

SEQ ID NO: 289170 - DNA, 33 bp, Homo sapien
tatttaagcatcgatatgaaattatttccgaca

SEQ ID NO: 289171 - DNA, 33 bp, Homo sapien
tccatctgtgctcactcactcttgcctgagttt

SEQ ID NO: 289172 - DNA, 33 bp, Homo sapien
tccatctgtgctcactgactcttgcctgagttt

SEQ ID NO: 289173 - DNA, 33 bp, Homo sapien
tgagtctatcctgagccatctgtaactagcaat

SEQ ID NO: 289174 - DNA, 33 bp, Homo sapien
tgagtctatcctgagctatctgtaactagcaat

SEQ ID NO: 289175 - DNA, 33 bp, Homo sapien
tacatggccactcagacctccaagaacaagtgt

SEQ ID NO: 289176 - DNA, 33 bp, Homo sapien
tacatggccactcagatctccaagaacaagtgt

SEQ ID NO: 289177 - DNA, 33 bp, Homo sapien
gcctgcaaacctcagaacggctcctttaaaagt

SEQ ID NO: 289178 - DNA, 33 bp, Homo sapien
gcctgcaaacctcagatcggctcctttaaaagt

SEQ ID NO: 289179 - DNA, 33 bp, Homo sapien
cttttgatactaatccagcgagactgaaactga

SEQ ID NO: 289180 - DNA, 33 bp, Homo sapien
cttttgatactaatccggcgagactgaaactga

SEQ ID NO: 289181 - DNA, 33 bp, Homo sapien
agttttcttagtttaacgtgggatggaaattat

SEQ ID NO: 289182 - DNA, 33 bp, Homo sapien
agttttcttagtttaatgtgggatggaaattat

SEQ ID NO: 289183 - DNA, 33 bp, Homo sapien
atgtgcagatagatgacattctaggttgacaga

SEQ ID NO: 289184 - DNA, 33 bp, Homo sapien
atgtgcagatagatgatattctaggttgacaga

SEQ ID NO: 289185 - DNA, 33 bp, Homo sapien
atatgatttgcttaaaatcctcctccccaccaa

SEQ ID NO: 289186 - DNA, 33 bp, Homo sapien
atatgatttgcttaaagtcctcctccccaccaa

SEQ ID NO: 289187 - DNA, 33 bp, Homo sapien
tgttcgtttcatagccaagcattttaagggtgc

SEQ ID NO: 289188 - DNA, 33 bp, Homo sapien
tgttcgtttcatagccgagcattttaagggtgc

SEQ ID NO: 289189 - DNA, 33 bp, Homo sapien
ttaacattcaacagacagaagcagagaaaagtt

SEQ ID NO: 289190 - DNA, 33 bp, Homo sapien
ttaacattcaacagaccgaagcagagaaaagtt

SEQ ID NO: 289191 - DNA, 33 bp, Homo sapien
tgtcccttcctagacactggactcagctacgct

SEQ ID NO: 289192 - DNA, 33 bp, Homo sapien
tgtcccttcctagacagtggactcagctacgct

SEQ ID NO: 289193 - DNA, 33 bp, Homo sapien
ttcaaggtcaaaatcacgtggaaagttttgccg

SEQ ID NO: 289194 - DNA, 33 bp, Homo sapien
ttcaaggtcaaaatcatgtggaaagttttgccg

SEQ ID NO: 289195 - DNA, 33 bp, Homo sapien
attgcaagagagattaacgctatcttttagaaa

SEQ ID NO: 289196 - DNA, 33 bp, Homo sapien
attgcaagagagattagcgctatcttttagaaa

SEQ ID NO: 289197 - DNA, 33 bp, Homo sapien
ctagtaccgtgtctaccctcttttgtggattaa

SEQ ID NO: 289198 - DNA, 33 bp, Homo sapien
ctagtaccgtgtctactctcttttgtggattaa

SEQ ID NO: 289199 - DNA, 33 bp, Homo sapien
tcacctacgaagttgaataagttatttcgcctg

SEQ ID NO: 289200 - DNA, 33 bp, Homo sapien
tcacctacgaagttgagtaagttatttcgcctg

SEQ ID NO: 289201 - DNA, 33 bp, Homo sapien
ataaaaaggctataaacgcaaagaaaggttaac

SEQ ID NO: 289202 - DNA, 33 bp, Homo sapien
ataaaaaggctataaatgcaaagaaaggttaac

SEQ ID NO: 289203 - DNA, 33 bp, Homo sapien
gtgttcctagtgtatgcaaccatcagtggcggg

SEQ ID NO: 289204 - DNA, 33 bp, Homo sapien
gtgttcctagtgtatgtaaccatcagtggcggg

SEQ ID NO: 289205 - DNA, 33 bp, Homo sapien
gaggcactgtaagttacctattacctcatgttt

SEQ ID NO: 289206 - DNA, 33 bp, Homo sapien
gaggcactgtaagttagctattacctcatgttt

SEQ ID NO: 289207 - DNA, 33 bp, Homo sapien
aaatacctaaaaagacagtccaagttcaaccac

SEQ ID NO: 289208 - DNA, 33 bp, Homo sapien
aaatacctaaaaagactgtccaagttcaaccac

SEQ ID NO: 289209 - DNA, 33 bp, Homo sapien
gctgcacgtaagtccacaaaaacgcagtaaacg

SEQ ID NO: 289210 - DNA, 33 bp, Homo sapien
gctgcacgtaagtccataaaaacgcagtaaacg

SEQ ID NO: 289211 - DNA, 33 bp, Homo sapien
cctgttgcatttctaaagttcatgttcattccg

SEQ ID NO: 289212 - DNA, 33 bp, Homo sapien
cctgttgcatttctaacgttcatgttcattccg

SEQ ID NO: 289213 - DNA, 33 bp, Homo sapien
ctgagttcagaactaactaagaaagaggcatga

SEQ ID NO: 289214 - DNA, 33 bp, Homo sapien
ctgagttcagaactaattaagaaagaggcatga

SEQ ID NO: 289215 - DNA, 33 bp, Homo sapien
agggttccccagctgaaacttgtccacgggtac

SEQ ID NO: 289216 - DNA, 33 bp, Homo sapien
agggttccccagctgagacttgtccacgggtac

SEQ ID NO: 289217 - DNA, 33 bp, Homo sapien
tcagtgatttcaacacaagatcaccatactgac

SEQ ID NO: 289218 - DNA, 33 bp, Homo sapien
tcagtgatttcaacacgagatcaccatactgac

SEQ ID NO: 289219 - DNA, 33 bp, Homo sapien
catggcagtcgaagaacagagtgtagacagtgg

SEQ ID NO: 289220 - DNA, 33 bp, Homo sapien
catggcagtcgaagaagagagtgtagacagtgg

SEQ ID NO: 289221 - DNA, 33 bp, Homo sapien
aagggagagaggtggggaaccagactgttcatt

SEQ ID NO: 289222 - DNA, 33 bp, Homo sapien
aagggagagaggtgggtaaccagactgttcatt

SEQ ID NO: 289223 - DNA, 33 bp, Homo sapien
gggcagcctgtgaatacggtttttctctgtgtt

SEQ ID NO: 289224 - DNA, 33 bp, Homo sapien
gggcagcctgtgaatatggtttttctctgtgtt

SEQ ID NO: 289225 - DNA, 33 bp, Homo sapien
gtgatccatctgaaaaaccgcgagacagaggga

SEQ ID NO: 289226 - DNA, 33 bp, Homo sapien
gtgatccatctgaaaagccgcgagacagaggga

SEQ ID NO: 289227 - DNA, 33 bp, Homo sapien
aacacgacgggaatccagacagtgtatgtcccc

SEQ ID NO: 289228 - DNA, 33 bp, Homo sapien
aacacgacgggaatccggacagtgtatgtcccc

SEQ ID NO: 289229 - DNA, 33 bp, Homo sapien
tgaccaaatgagaaggaatgggcttaacacatg

SEQ ID NO: 289230 - DNA, 33 bp, Homo sapien
tgaccaaatgagaagggatgggcttaacacatg

SEQ ID NO: 289231 - DNA, 33 bp, Homo sapien
cgtatcttccttgggaaaattcattttgttgaa

SEQ ID NO: 289232 - DNA, 33 bp, Homo sapien
cgtatcttccttgggagaattcattttgttgaa

SEQ ID NO: 289233 - DNA, 33 bp, Homo sapien
ggtgccaggagctaccccatttctaggaaggga

SEQ ID NO: 289234 - DNA, 33 bp, Homo sapien
ggtgccaggagctacctcatttctaggaaggga

SEQ ID NO: 289235 - DNA, 33 bp, Homo sapien
ctcaacttccacccccaagaaattctgattcaa

SEQ ID NO: 289236 - DNA, 33 bp, Homo sapien
ctcaacttccaccccccagaaattctgattcaa

SEQ ID NO: 289237 - DNA, 33 bp, Homo sapien
tgtcctccctggagaacatccttcgttttctgg

SEQ ID NO: 289238 - DNA, 33 bp, Homo sapien
tgtcctccctggagaatatccttcgttttctgg

SEQ ID NO: 289239 - DNA, 33 bp, Homo sapien
caggaagaacgattccagagcctggttttaatc

SEQ ID NO: 289240 - DNA, 33 bp, Homo sapien
caggaagaacgattccggagcctggttttaatc

SEQ ID NO: 289241 - DNA, 33 bp, Homo sapien
gaaaataaaatgcttacagtaggaagcttacta

SEQ ID NO: 289242 - DNA, 33 bp, Homo sapien
gaaaataaaatgcttatagtaggaagcttacta

SEQ ID NO: 289243 - DNA, 33 bp, Homo sapien
attactacagggacccaatgagatggaattaaa

SEQ ID NO: 289244 - DNA, 33 bp, Homo sapien
attactacagggacccgatgagatggaattaaa

SEQ ID NO: 289245 - DNA, 33 bp, Homo sapien
agtgtttcatacacacacgtacttctccccaca

SEQ ID NO: 289246 - DNA, 33 bp, Homo sapien
agtgtttcatacacacgcgtacttctccccaca

SEQ ID NO: 289247 - DNA, 33 bp, Homo sapien
cttacagctcccattcccctaatttaagaaaat

SEQ ID NO: 289248 - DNA, 33 bp, Homo sapien
cttacagctcccattctcctaatttaagaaaat

SEQ ID NO: 289249 - DNA, 33 bp, Homo sapien
atttgccttacaatccaaaaaacatctgggaac

SEQ ID NO: 289250 - DNA, 33 bp, Homo sapien
atttgccttacaatcccaaaaacatctgggaac

SEQ ID NO: 289251 - DNA, 33 bp, Homo sapien
aataaagtcagatacacatgatgacgtgttgtt

SEQ ID NO: 289252 - DNA, 33 bp, Homo sapien
aataaagtcagatacatatgatgacgtgttgtt

SEQ ID NO: 289253 - DNA, 33 bp, Homo sapien
ggaaaaaccacgtaaacaaagtcaaatgtgata

SEQ ID NO: 289254 - DNA, 33 bp, Homo sapien
ggaaaaaccacgtaaagaaagtcaaatgtgata

SEQ ID NO: 289255 - DNA, 33 bp, Homo sapien
caggcaaacccatcatcacggtagccattcctg

SEQ ID NO: 289256 - DNA, 33 bp, Homo sapien
caggcaaacccatcattacggtagccattcctg

SEQ ID NO: 289257 - DNA, 33 bp, Homo sapien
gcaaggtcaaatggagaaagtgcggcagccctg

SEQ ID NO: 289258 - DNA, 33 bp, Homo sapien
gcaaggtcaaatggagcaagtgcggcagccctg

SEQ ID NO: 289259 - DNA, 33 bp, Homo sapien
catggacaagagggaaagactttatcagaaact

SEQ ID NO: 289260 - DNA, 33 bp, Homo sapien
catggacaagagggaaggactttatcagaaact

SEQ ID NO: 289261 - DNA, 33 bp, Homo sapien
ggttatttttgtacataatcgacggaagtagtc

SEQ ID NO: 289262 - DNA, 33 bp, Homo sapien
ggttatttttgtacatcatcgacggaagtagtc

SEQ ID NO: 289263 - DNA, 33 bp, Homo sapien
aatggtgcagccactacggaaaaacagtacagc

SEQ ID NO: 289264 - DNA, 33 bp, Homo sapien
aatggtgcagccactatggaaaaacagtacagc

SEQ ID NO: 289265 - DNA, 33 bp, Homo sapien
ttaaaatggagggaaagcttgttgtatgccact

SEQ ID NO: 289266 - DNA, 33 bp, Homo sapien
ttaaaatggagggaaatcttgttgtatgccact

SEQ ID NO: 289267 - DNA, 33 bp, Homo sapien
atggccaagaggtgaccgcaatgtaagtgtcca

SEQ ID NO: 289268 - DNA, 33 bp, Homo sapien
atggccaagaggtgacggcaatgtaagtgtcca

SEQ ID NO: 289269 - DNA, 33 bp, Homo sapien
gtggtaggtattctataacccaaattttacagt

SEQ ID NO: 289270 - DNA, 33 bp, Homo sapien
gtggtaggtattctatcacccaaattttacagt

SEQ ID NO: 289271 - DNA, 33 bp, Homo sapien
agaagtaacgtgcccaatccttaacaatgaaat

SEQ ID NO: 289272 - DNA, 33 bp, Homo sapien
agaagtaacgtgcccagtccttaacaatgaaat

SEQ ID NO: 289273 - DNA, 33 bp, Homo sapien
caagaacaactgaagacgtaacaaccagtggaa

SEQ ID NO: 289274 - DNA, 33 bp, Homo sapien
caagaacaactgaagaggtaacaaccagtggaa

SEQ ID NO: 289275 - DNA, 33 bp, Homo sapien
ccaggcaagacaggacagtattttggaccagaa

SEQ ID NO: 289276 - DNA, 33 bp, Homo sapien
ccaggcaagacaggacggtattttggaccagaa

SEQ ID NO: 289277 - DNA, 33 bp, Homo sapien
tttggcaatctcttaaatataggagcggtctgg

SEQ ID NO: 289278 - DNA, 33 bp, Homo sapien
tttggcaatctcttaattataggagcggtctgg

SEQ ID NO: 289279 - DNA, 33 bp, Homo sapien
gaactgctaacagtggcaaggtatatctttggc

SEQ ID NO: 289280 - DNA, 33 bp, Homo sapien
gaactgctaacagtgggaaggtatatctttggc

SEQ ID NO: 289281 - DNA, 33 bp, Homo sapien
acaatggtggtgttgacagttaccatttacagt

SEQ ID NO: 289282 - DNA, 33 bp, Homo sapien
acaatggtggtgttgatagttaccatttacagt

SEQ ID NO: 289283 - DNA, 33 bp, Homo sapien
tgaacaccatgtatgacaagaattaggctggtt

SEQ ID NO: 289284 - DNA, 33 bp, Homo sapien
tgaacaccatgtatgataagaattaggctggtt

SEQ ID NO: 289285 - DNA, 33 bp, Homo sapien
agggccagatctcagaaacgggatgccaggata

SEQ ID NO: 289286 - DNA, 33 bp, Homo sapien
agggccagatctcagagacgggatgccaggata

SEQ ID NO: 289287 - DNA, 33 bp, Homo sapien
cttctcctgggaaataaaaaggcatttcatcac

SEQ ID NO: 289288 - DNA, 33 bp, Homo sapien
cttctcctgggaaatacaaaggcatttcatcac

SEQ ID NO: 289289 - DNA, 33 bp, Homo sapien
caggatggtacctggcacttcctaagtcctggc

SEQ ID NO: 289290 - DNA, 33 bp, Homo sapien
caggatggtacctggcgcttcctaagtcctggc

SEQ ID NO: 289291 - DNA, 33 bp, Homo sapien
gacacatggcagacaacgatttgttaaaaatga

SEQ ID NO: 289292 - DNA, 33 bp, Homo sapien
gacacatggcagacaatgatttgttaaaaatga

SEQ ID NO: 289293 - DNA, 33 bp, Homo sapien
actacttagaattaacagccattaacagttgga

SEQ ID NO: 289294 - DNA, 33 bp, Homo sapien
actacttagaattaacggccattaacagttgga

SEQ ID NO: 289295 - DNA, 33 bp, Homo sapien
gcagcaatcacggaggcacatctgggcatgatc

SEQ ID NO: 289296 - DNA, 33 bp, Homo sapien
gcagcaatcacggaggtacatctgggcatgatc

SEQ ID NO: 289297 - DNA, 33 bp, Homo sapien
tgggtgggaatgtagaaaaggcctcacctgact

SEQ ID NO: 289298 - DNA, 33 bp, Homo sapien
tgggtgggaatgtagagaaggcctcacctgact

SEQ ID NO: 289299 - DNA, 33 bp, Homo sapien
ttctggcagattttgcggacaaggctcaattta

SEQ ID NO: 289300 - DNA, 33 bp, Homo sapien
ttctggcagattttgctgacaaggctcaattta

SEQ ID NO: 289301 - DNA, 33 bp, Homo sapien
cctgtcaagggcctaacacaatccacagcccag

SEQ ID NO: 289302 - DNA, 33 bp, Homo sapien
cctgtcaagggcctaatacaatccacagcccag

SEQ ID NO: 289303 - DNA, 33 bp, Homo sapien
cagttgatttaaataaagttggagaggccacac

SEQ ID NO: 289304 - DNA, 33 bp, Homo sapien
cagttgatttaaataaggttggagaggccacac

SEQ ID NO: 289305 - DNA, 33 bp, Homo sapien
cctaaaccaaatacaccacactggtcagggatc

SEQ ID NO: 289306 - DNA, 33 bp, Homo sapien
cctaaaccaaatacacgacactggtcagggatc

SEQ ID NO: 289307 - DNA, 33 bp, Homo sapien
ggctcctcgttgaagtcacctcaagcagcctga

SEQ ID NO: 289308 - DNA, 33 bp, Homo sapien
ggctcctcgttgaagttacctcaagcagcctga

SEQ ID NO: 289309 - DNA, 33 bp, Homo sapien
gtctacaagcaatgcaggaaggaatatattaat

SEQ ID NO: 289310 - DNA, 33 bp, Homo sapien
gtctacaagcaatgcatgaaggaatatattaat

SEQ ID NO: 289311 - DNA, 33 bp, Homo sapien
tttcatgttcttgataatacagtgaccttttag

SEQ ID NO: 289312 - DNA, 33 bp, Homo sapien
tttcatgttcttgatactacagtgaccttttag

SEQ ID NO: 289313 - DNA, 33 bp, Homo sapien
ttatggggtcatggaacgttatcgttggaagga

SEQ ID NO: 289314 - DNA, 33 bp, Homo sapien
ttatggggtcatggaatgttatcgttggaagga

SEQ ID NO: 289315 - DNA, 33 bp, Homo sapien
ggtagaagtgtcagaaagaggtacaggtggtag

SEQ ID NO: 289316 - DNA, 33 bp, Homo sapien
ggtagaagtgtcagaaggaggtacaggtggtag

SEQ ID NO: 289317 - DNA, 33 bp, Homo sapien
tttcttcctgctaggcaaccaggccagcttccc

SEQ ID NO: 289318 - DNA, 33 bp, Homo sapien
tttcttcctgctaggcgaccaggccagcttccc

SEQ ID NO: 289319 - DNA, 33 bp, Homo sapien
tgagagggcatcatcacgttgtaacatcctggc

SEQ ID NO: 289320 - DNA, 33 bp, Homo sapien
tgagagggcatcatcatgttgtaacatcctggc

SEQ ID NO: 289321 - DNA, 33 bp, Homo sapien
cccaggacacaaaaaccgagtttgctttcttca

SEQ ID NO: 289322 - DNA, 33 bp, Homo sapien
cccaggacacaaaaactgagtttgctttcttca

SEQ ID NO: 289323 - DNA, 33 bp, Homo sapien
gggtcctgacgatcatcagcaccttctttacgg

SEQ ID NO: 289324 - DNA, 33 bp, Homo sapien
gggtcctgacgatcattagcaccttctttacgg

SEQ ID NO: 289325 - DNA, 33 bp, Homo sapien
agaacatagcttgtaacaaatcctgttgctcat

SEQ ID NO: 289326 - DNA, 33 bp, Homo sapien
agaacatagcttgtaagaaatcctgttgctcat

SEQ ID NO: 289327 - DNA, 33 bp, Homo sapien
atgggcacattacaaacgaccggtagcaatgag

SEQ ID NO: 289328 - DNA, 33 bp, Homo sapien
atgggcacattacaaatgaccggtagcaatgag

SEQ ID NO: 289329 - DNA, 33 bp, Homo sapien
gtacagtatcaggtacacagcacctggcctggg

SEQ ID NO: 289330 - DNA, 33 bp, Homo sapien
gtacagtatcaggtacgcagcacctggcctggg

SEQ ID NO: 289331 - DNA, 33 bp, Homo sapien
actgtgacaccagacacaacgacttccgttcag

SEQ ID NO: 289332 - DNA, 33 bp, Homo sapien
actgtgacaccagacagaacgacttccgttcag

SEQ ID NO: 289333 - DNA, 33 bp, Homo sapien
gacagaaagcagcggcgacatcccactgcgccc

SEQ ID NO: 289334 - DNA, 33 bp, Homo sapien
gacagaaagcagcggctacatcccactgcgccc

SEQ ID NO: 289335 - DNA, 33 bp, Homo sapien
gcttgttctagaaaaaccgttgttaatatctag

SEQ ID NO: 289336 - DNA, 33 bp, Homo sapien
gcttgttctagaaaaatcgttgttaatatctag

SEQ ID NO: 289337 - DNA, 33 bp, Homo sapien
acagaaggggaacacaagtgcctcctgacatgg

SEQ ID NO: 289338 - DNA, 33 bp, Homo sapien
acagaaggggaacacaggtgcctcctgacatgg

SEQ ID NO: 289339 - DNA, 33 bp, Homo sapien
agaatagtggcattaactacattgcagagcaca

SEQ ID NO: 289340 - DNA, 33 bp, Homo sapien
agaatagtggcattaattacattgcagagcaca

SEQ ID NO: 289341 - DNA, 33 bp, Homo sapien
ctgcgattcactgcaccattgctctgccccagg

SEQ ID NO: 289342 - DNA, 33 bp, Homo sapien
ctgcgattcactgcacgattgctctgccccagg

SEQ ID NO: 289343 - DNA, 33 bp, Homo sapien
gagaagtctcagacccacaagctttgcgcacag

SEQ ID NO: 289344 - DNA, 33 bp, Homo sapien
gagaagtctcagacccgcaagctttgcgcacag

SEQ ID NO: 289345 - DNA, 33 bp, Homo sapien
gaaaggagacccccgaagcggaggagcagggaa

SEQ ID NO: 289346 - DNA, 33 bp, Homo sapien
gaaaggagacccccgacgcggaggagcagggaa

SEQ ID NO: 289347 - DNA, 33 bp, Homo sapien
acttaacgatttttacaggaacaattcagtggc

SEQ ID NO: 289348 - DNA, 33 bp, Homo sapien
acttaacgatttttacgggaacaattcagtggc

SEQ ID NO: 289349 - DNA, 33 bp, Homo sapien
actagttaccctgcaacgagcctatttccaaat

SEQ ID NO: 289350 - DNA, 33 bp, Homo sapien
actagttaccctgcaatgagcctatttccaaat

SEQ ID NO: 289351 - DNA, 33 bp, Homo sapien
aagaatctatttcctacaactgcttccgaaata

SEQ ID NO: 289352 - DNA, 33 bp, Homo sapien
aagaatctatttcctagaactgcttccgaaata

SEQ ID NO: 289353 - DNA, 33 bp, Homo sapien; identical to SEQ ID NO: 289351

SEQ ID NO: 289354 - DNA, 33 bp, Homo sapien; identical to SEQ ID NO: 289352

SEQ ID NO: 289355 - DNA, 33 bp, Homo sapien
gaggcctgcaagataaaaggaacagacaggcca

SEQ ID NO: 289356 - DNA, 33 bp, Homo sapien
gaggcctgcaagataacaggaacagacaggcca

SEQ ID NO: 289357 - DNA, 33 bp, Homo sapien
gttgatcctacaagtcccgctttgataagtgaa

SEQ ID NO: 289358 - DNA, 33 bp, Homo sapien
gttgatcctacaagtcgcgctttgataagtgaa

SEQ ID NO: 289359 - DNA, 33 bp, Homo sapien
agtggcttactgagaactgctgtcaagtttggc

SEQ ID NO: 289360 - DNA, 33 bp, Homo sapien
agtggcttactgagaattgctgtcaagtttggc

SEQ ID NO: 289361 - DNA, 33 bp, Homo sapien
gaagacatgcctgcacacatctccactggtgct

SEQ ID NO: 289362 - DNA, 33 bp, Homo sapien
gaagacatgcctgcacgcatctccactggtgct

SEQ ID NO: 289363 - DNA, 33 bp, Homo sapien
tagctctttcatctaacgtcacaggactttgac

SEQ ID NO: 289364 - DNA, 33 bp, Homo sapien
tagctctttcatctaatgtcacaggactttgac

SEQ ID NO: 289365 - DNA, 33 bp, Homo sapien
acagatgagagaaacacggctcagaggttagct

SEQ ID NO: 289366 - DNA, 33 bp, Homo sapien
acagatgagagaaacagggctcagaggttagct

SEQ ID NO: 289367 - DNA, 33 bp, Homo sapien
tgtgagagatgtattcaattctcactgaagttc

SEQ ID NO: 289368 - DNA, 33 bp, Homo sapien
tgtgagagatgtattcgattctcactgaagttc

SEQ ID NO: 289369 - DNA, 33 bp, Homo sapien
ttattctcagtgaagacgaaaagctgccagcaa

SEQ ID NO: 289370 - DNA, 33 bp, Homo sapien
ttattctcagtgaagatgaaaagctgccagcaa

SEQ ID NO: 289371 - DNA, 33 bp, Homo sapien
aggcagacaggacagccctcgaataaaggttct

SEQ ID NO: 289372 - DNA, 33 bp, Homo sapien
aggcagacaggacagctctcgaataaaggttct

SEQ ID NO: 289373 - DNA, 33 bp, Homo sapien
gtcctgtgttagggacactctcctaatttttct

SEQ ID NO: 289374 - DNA, 33 bp, Homo sapien
gtcctgtgttagggacgctctcctaatttttct

SEQ ID NO: 289375 - DNA, 33 bp, Homo sapien
ggaacgagaatcctcagaactaaaaataatagg

SEQ ID NO: 289376 - DNA, 33 bp, Homo sapien
ggaacgagaatcctcataactaaaaataatagg

SEQ ID NO: 289377 - DNA, 33 bp, Homo sapien
acattaaaggtaagagaacatccgttttcattc

SEQ ID NO: 289378 - DNA, 33 bp, Homo sapien
acattaaaggtaagaggacatccgttttcattc

SEQ ID NO: 289379 - DNA, 33 bp, Homo sapien
gatttgtggttttaaaaagagaactctgcaagt

SEQ ID NO: 289380 - DNA, 33 bp, Homo sapien
gatttgtggttttaaagagagaactctgcaagt

SEQ ID NO: 289381 - DNA, 33 bp, Homo sapien
ctaaacacatcagcaacgacgaaacaaatcagc

SEQ ID NO: 289382 - DNA, 33 bp, Homo sapien
ctaaacacatcagcaaggacgaaacaaatcagc

SEQ ID NO: 289383 - DNA, 33 bp, Homo sapien
tccttttgaaagttgacatcccgttcagaggct

SEQ ID NO: 289384 - DNA, 33 bp, Homo sapien
tccttttgaaagttgagatcccgttcagaggct

SEQ ID NO: 289385 - DNA, 33 bp, Homo sapien
agtagcagtggatctacagctcttttttgagaa

SEQ ID NO: 289386 - DNA, 33 bp, Homo sapien
agtagcagtggatctatagctcttttttgagaa

SEQ ID NO: 289387 - DNA, 33 bp, Homo sapien
gactcctttctagccaataaaatgacctgtttc

SEQ ID NO: 289388 - DNA, 33 bp, Homo sapien
gactcctttctagccagtaaaatgacctgtttc

SEQ ID NO: 289389 - DNA, 33 bp, Homo sapien
agcagaagacaccacaaatgagagggagcccct

SEQ ID NO: 289390 - DNA, 33 bp, Homo sapien
agcagaagacaccacagatgagagggagcccct

SEQ ID NO: 289391 - DNA, 33 bp, Homo sapien
taggagagttcacccacaccaagcatatatctg

SEQ ID NO: 289392 - DNA, 33 bp, Homo sapien
taggagagttcacccataccaagcatatatctg

SEQ ID NO: 289393 - DNA, 33 bp, Homo sapien
gcagtagtgttctagtaaattcagagttggatt

SEQ ID NO: 289394 - DNA, 33 bp, Homo sapien
gcagtagtgttctagttaattcagagttggatt

SEQ ID NO: 289395 - DNA, 33 bp, Homo sapien
ttcaccaaaacaataaaaatctaaccagattcc

SEQ ID NO: 289396 - DNA, 33 bp, Homo sapien
ttcaccaaaacaataacaatctaaccagattcc

SEQ ID NO: 289397 - DNA, 33 bp, Homo sapien
ctcaaaatgccaatggcaccccggtgacaagca

SEQ ID NO: 289398 - DNA, 33 bp, Homo sapien
ctcaaaatgccaatggtaccccggtgacaagca

SEQ ID NO: 289399 - DNA, 33 bp, Homo sapien
cattcttgcagaaatacatgggagttcagaaga

SEQ ID NO: 289400 - DNA, 33 bp, Homo sapien
cattcttgcagaaatatatgggagttcagaaga

SEQ ID NO: 289401 - DNA, 33 bp, Homo sapien
gtaccagaatagaggactaggagaaagaagtgg

SEQ ID NO: 289402 - DNA, 33 bp, Homo sapien
gtaccagaatagaggattaggagaaagaagtgg

SEQ ID NO: 289403 - DNA, 33 bp, Homo sapien
cacgtccaagtaccaacgcttaccctgtatgtc

SEQ ID NO: 289404 - DNA, 33 bp, Homo sapien
cacgtccaagtaccaatgcttaccctgtatgtc

SEQ ID NO: 289405 - DNA, 33 bp, Homo sapien
gacgcctctacaaggaaagacagtggtgaaaaa

SEQ ID NO: 289406 - DNA, 33 bp, Homo sapien
gacgcctctacaaggacagacagtggtgaaaaa

SEQ ID NO: 289407 - DNA, 33 bp, Homo sapien
aaaacaaaattaatgaccaactatgataaaaag

SEQ ID NO: 289408 - DNA, 33 bp, Homo sapien
aaaacaaaattaatgatcaactatgataaaaag

SEQ ID NO: 289409 - DNA, 33 bp, Homo sapien
tggggaggcaagattaagagtaaaatcaatagc

SEQ ID NO: 289410 - DNA, 33 bp, Homo sapien
tggggaggcaagattaggagtaaaatcaatagc

SEQ ID NO: 289411 - DNA, 33 bp, Homo sapien
cttttacctgggaaaccgcaatgagacctagct

SEQ ID NO: 289412 - DNA, 33 bp, Homo sapien
cttttacctgggaaactgcaatgagacctagct

SEQ ID NO: 289413 - DNA, 33 bp, Homo sapien
tgccacttgaactccagatgaagaaaggtattg

SEQ ID NO: 289414 - DNA, 33 bp, Homo sapien
tgccacttgaactccatatgaagaaaggtattg

SEQ ID NO: 289415 - DNA, 33 bp, Homo sapien
atttctttagccaatccaactagcaatgagata

SEQ ID NO: 289416 - DNA, 33 bp, Homo sapien
atttctttagccaatctaactagcaatgagata

SEQ ID NO: 289417 - DNA, 33 bp, Homo sapien
gatctcactggaagagacgagcagaccccagag

SEQ ID NO: 289418 - DNA, 33 bp, Homo sapien
gatctcactggaagaggcgagcagaccccagag

SEQ ID NO: 289419 - DNA, 33 bp, Homo sapien
tgaacagggcttgtcaccctctaaacagtggcc

SEQ ID NO: 289420 - DNA, 33 bp, Homo sapien
tgaacagggcttgtcatcctctaaacagtggcc

SEQ ID NO: 289421 - DNA, 33 bp, Homo sapien
ccacttgaccctgccaatctgctcataaagact

SEQ ID NO: 289422 - DNA, 33 bp, Homo sapien
ccacttgaccctgccagtctgctcataaagact

SEQ ID NO: 289423 - DNA, 33 bp, Homo sapien
gtttcttgatgtcgataaggaagcaccattgta

SEQ ID NO: 289424 - DNA, 33 bp, Homo sapien
gtttcttgatgtcgatgaggaagcaccattgta

SEQ ID NO: 289425 - DNA, 33 bp, Homo sapien
agaacattataatacaaatgtcaatggaagaga

SEQ ID NO: 289426 - DNA, 33 bp, Homo sapien
agaacattataatacagatgtcaatggaagaga

SEQ ID NO: 289427 - DNA, 33 bp, Homo sapien
agcttaggaaacatccaaatgaagtgggcaggg

SEQ ID NO: 289428 - DNA, 33 bp, Homo sapien
agcttaggaaacatccgaatgaagtgggcaggg

SEQ ID NO: 289429 - DNA, 33 bp, Homo sapien
tggtctgattagtcgacgttgggaacaagagaa

SEQ ID NO: 289430 - DNA, 33 bp, Homo sapien
tggtctgattagtcgatgttgggaacaagagaa

SEQ ID NO: 289431 - DNA, 33 bp, Homo sapien
attgctgtttctcaaacgctcaatgcaccaggc

SEQ ID NO: 289432 - DNA, 33 bp, Homo sapien
attgctgtttctcaaatgctcaatgcaccaggc

SEQ ID NO: 289433 - DNA, 33 bp, Homo sapien
cagttcccagtgataccacttcctacataacat

SEQ ID NO: 289434 - DNA, 33 bp, Homo sapien
cagttcccagtgatactacttcctacataacat

SEQ ID NO: 289435 - DNA, 33 bp, Homo sapien
ttatatttttggtcctaactatgctaatctaat

SEQ ID NO: 289436 - DNA, 33 bp, Homo sapien
ttatatttttggtcctgactatgctaatctaat

SEQ ID NO: 289437 - DNA, 33 bp, Homo sapien
gattaagtaattagcccaagatgcacagttagt

SEQ ID NO: 289438 - DNA, 33 bp, Homo sapien
gattaagtaattagcctaagatgcacagttagt

SEQ ID NO: 289439 - DNA, 33 bp, Homo sapien
ggatgtctctgcaagaaaattaaacttccacct

SEQ ID NO: 289440 - DNA, 33 bp, Homo sapien
ggatgtctctgcaagataattaaacttccacct

SEQ ID NO: 289441 - DNA, 33 bp, Homo sapien
agcaagtgcaaagccaatgagaactgagtgtaa

SEQ ID NO: 289442 - DNA, 33 bp, Homo sapien
agcaagtgcaaagccagtgagaactgagtgtaa

SEQ ID NO: 289443 - DNA, 33 bp, Homo sapien
acacccctcgggatggcaagcttgagaaactgg

SEQ ID NO: 289444 - DNA, 33 bp, Homo sapien
acacccctcgggatggtaagcttgagaaactgg

SEQ ID NO: 289445 - DNA, 33 bp, Homo sapien
atatagtcttgtccaacccttcatggtcgacat

SEQ ID NO: 289446 - DNA, 33 bp, Homo sapien
atatagtcttgtccaatccttcatggtcgacat

SEQ ID NO: 289447 - DNA, 33 bp, Homo sapien
tctccctgtgatcagcacaacctgaaatggagg

SEQ ID NO: 289448 - DNA, 33 bp, Homo sapien
tctccctgtgatcagcgcaacctgaaatggagg

SEQ ID NO: 289449 - DNA, 33 bp, Homo sapien
tctcttccatttgtgcacttactcaccttacga

SEQ ID NO: 289450 - DNA, 33 bp, Homo sapien
tctcttccatttgtgcgcttactcaccttacga

SEQ ID NO: 289451 - DNA, 33 bp, Homo sapien
aatgtgaggctgcccacgaacctgagaacggct

SEQ ID NO: 289452 - DNA, 33 bp, Homo sapien
aatgtgaggctgcccatgaacctgagaacggct

SEQ ID NO: 289453 - DNA, 33 bp, Homo sapien
cctctgtgttccaaagacctttcaatataattc

SEQ ID NO: 289454 - DNA, 33 bp, Homo sapien
cctctgtgttccaaagccctttcaatataattc

SEQ ID NO: 289455 - DNA, 33 bp, Homo sapien
cttcctcttactttccagaatgccctactctgt

SEQ ID NO: 289456 - DNA, 33 bp, Homo sapien
cttcctcttactttccggaatgccctactctgt

SEQ ID NO: 289457 - DNA, 33 bp, Homo sapien
ctgtgcattgcttaaagaatgtgttttctgggt

SEQ ID NO: 289458 - DNA, 33 bp, Homo sapien
ctgtgcattgcttaaataatgtgttttctgggt

SEQ ID NO: 289459 - DNA, 33 bp, Homo sapien
cagagtcaggagattgaataataacactcttct

SEQ ID NO: 289460 - DNA, 33 bp, Homo sapien
cagagtcaggagattggataataacactcttct

SEQ ID NO: 289461 - DNA, 33 bp, Homo sapien
aattggagaccaaaaccaaaaggctgaggaact

SEQ ID NO: 289462 - DNA, 33 bp, Homo sapien
aattggagaccaaaacgaaaaggctgaggaact

SEQ ID NO: 289463 - DNA, 33 bp, Homo sapien
tgcaaatcttggactcaacagcttccacagttg

SEQ ID NO: 289464 - DNA, 33 bp, Homo sapien
tgcaaatcttggactcgacagcttccacagttg

SEQ ID NO: 289465 - DNA, 33 bp, Homo sapien
ggaagataaagatccaaatgaactgcaatcata

SEQ ID NO: 289466 - DNA, 33 bp, Homo sapien
ggaagataaagatccagatgaactgcaatcata

SEQ ID NO: 289467 - DNA, 33 bp, Homo sapien
gggcgctgtgtcttaaatcccaccggcttctcc

SEQ ID NO: 289468 - DNA, 33 bp, Homo sapien
gggcgctgtgtcttaagtcccaccggcttctcc

SEQ ID NO: 289469 - DNA, 33 bp, Homo sapien
caaagacaatgccctcacttatctgtgacctgg

SEQ ID NO: 289470 - DNA, 33 bp, Homo sapien
caaagacaatgccctctcttatctgtgacctgg

SEQ ID NO: 289471 - DNA, 33 bp, Homo sapien
tgttcggtccccttaacgcaaattctggcaaca

SEQ ID NO: 289472 - DNA, 33 bp, Homo sapien
tgttcggtccccttaatgcaaattctggcaaca

SEQ ID NO: 289473 - DNA, 33 bp, Homo sapien
cgtgaaatttaagtaactggtccaaggccatat

SEQ ID NO: 289474 - DNA, 33 bp, Homo sapien
cgtgaaatttaagtaattggtccaaggccatat

SEQ ID NO: 289475 - DNA, 33 bp, Homo sapien
cagtgttagtgggctacgtattaatcagatatc

SEQ ID NO: 289476 - DNA, 33 bp, Homo sapien
cagtgttagtgggctatgtattaatcagatatc

SEQ ID NO: 289477 - DNA, 33 bp, Homo sapien
catgtcagaatcacccagagagctttgaaaatt

SEQ ID NO: 289478 - DNA, 33 bp, Homo sapien
catgtcagaatcacccggagagctttgaaaatt

SEQ ID NO: 289479 - DNA, 33 bp, Homo sapien
aatttggcaatgtgtagcaagagtctcaggtgt

SEQ ID NO: 289480 - DNA, 33 bp, Homo sapien
aatttggcaatgtgtatcaagagtctcaggtgt

SEQ ID NO: 289481 - DNA, 33 bp, Homo sapien
tagcttcttctaaatgcaaaaagacacaaacag

SEQ ID NO: 289482 - DNA, 33 bp, Homo sapien
tagcttcttctaaatggaaaaagacacaaacag

SEQ ID NO: 289483 - DNA, 33 bp, Homo sapien
atattagtggtaaaagaaaacatagactcaatc

SEQ ID NO: 289484 - DNA, 33 bp, Homo sapien
atattagtggtaaaaggaaacatagactcaatc

SEQ ID NO: 289485 - DNA, 33 bp, Homo sapien
gcaagttatagatacgcacatgttgacaagaac

SEQ ID NO: 289486 - DNA, 33 bp, Homo sapien
gcaagttatagatacgtacatgttgacaagaac

SEQ ID NO: 289487 - DNA, 33 bp, Homo sapien
tctagtagaacatagacgtaggagaggtgagcg

SEQ ID NO: 289488 - DNA, 33 bp, Homo sapien
tctagtagaacatagaggtaggagaggtgagcg

SEQ ID NO: 289489 - DNA, 33 bp, Homo sapien
cgatttccttatattacagttctttgttgccag

SEQ ID NO: 289490 - DNA, 33 bp, Homo sapien
cgatttccttatattagagttctttgttgccag

SEQ ID NO: 289491 - DNA, 33 bp, Homo sapien
tcaattaggaaaagaactgaatagtcaaattgt

SEQ ID NO: 289492 - DNA, 33 bp, Homo sapien
tcaattaggaaaagaattgaatagtcaaattgt

SEQ ID NO: 289493 - DNA, 33 bp, Homo sapien
tgaggaggtagccatcaaagaagaaagagcccc

SEQ ID NO: 289494 - DNA, 33 bp, Homo sapien
tgaggaggtagccatcgaagaagaaagagcccc

SEQ ID NO: 289495 - DNA, 33 bp, Homo sapien
acaggaggctctgtgacgtttttctgaagtaca

SEQ ID NO: 289496 - DNA, 33 bp, Homo sapien
acaggaggctctgtgatgtttttctgaagtaca

SEQ ID NO: 289497 - DNA, 33 bp, Homo sapien
acaggcgatttacctccagttctaaaaacgacg

SEQ ID NO: 289498 - DNA, 33 bp, Homo sapien
acaggcgatttacctctagttctaaaaacgacg

SEQ ID NO: 289499 - DNA, 33 bp, Homo sapien
agctccacctttctacgcccgggatatctcgca

SEQ ID NO: 289500 - DNA, 33 bp, Homo sapien
agctccacctttctactcccgggatatctcgca

SEQ ID NO: 289501 - DNA, 33 bp, Homo sapien
acattcttatccgttacagcacggccagaagag

SEQ ID NO: 289502 - DNA, 33 bp, Homo sapien
acattcttatccgttatagcacggccagaagag

SEQ ID NO: 289503 - DNA, 33 bp, Homo sapien
agcgtcagagagtaacacaggcagctctccact

SEQ ID NO: 289504 - DNA, 33 bp, Homo sapien
agcgtcagagagtaacgcaggcagctctccact

SEQ ID NO: 289505 - DNA, 33 bp, Homo sapien
actaaagatgactgaagtgtgtactataaaagt

SEQ ID NO: 289506 - DNA, 33 bp, Homo sapien
actaaagatgactgaattgtgtactataaaagt

SEQ ID NO: 289507 - DNA, 33 bp, Homo sapien
tagtgtacaatgccaaatagctttcctaagtgt

SEQ ID NO: 289508 - DNA, 33 bp, Homo sapien
tagtgtacaatgccaagtagctttcctaagtgt

SEQ ID NO: 289509 - DNA, 33 bp, Homo sapien
tggtctcattgtgaagacagacttccagctgct

SEQ ID NO: 289510 - DNA, 33 bp, Homo sapien
tggtctcattgtgaaggcagacttccagctgct

SEQ ID NO: 289511 - DNA, 33 bp, Homo sapien
ctcacagttcctatcacggggctgaaaccaaaa

SEQ ID NO: 289512 - DNA, 33 bp, Homo sapien
ctcacagttcctatcatggggctgaaaccaaaa

SEQ ID NO: 289513 - DNA, 33 bp, Homo sapien
ttcctcatctattgaaaactgcatttctttttc

SEQ ID NO: 289514 - DNA, 33 bp, Homo sapien
ttcctcatctattgaagactgcatttctttttc

SEQ ID NO: 289515 - DNA, 33 bp, Homo sapien
catgggatgtgaaagaaatgacaaagaaagaaa

SEQ ID NO: 289516 - DNA, 33 bp, Homo sapien
catgggatgtgaaagacatgacaaagaaagaaa

SEQ ID NO: 289517 - DNA, 33 bp, Homo sapien
gagaaccaccgattaggagactttcaaagactc

SEQ ID NO: 289518 - DNA, 33 bp, Homo sapien
gagaaccaccgattagtagactttcaaagactc

SEQ ID NO: 289519 - DNA, 33 bp, Homo sapien
ataaatggaaggagaagtcaaaacctttcaaat

SEQ ID NO: 289520 - DNA, 33 bp, Homo sapien
ataaatggaaggagaattcaaaacctttcaaat

SEQ ID NO: 289521 - DNA, 33 bp, Homo sapien
tacatctgttttctcgcataattggctttggag

SEQ ID NO: 289522 - DNA, 33 bp, Homo sapien
tacatctgttttctcgtataattggctttggag

SEQ ID NO: 289523 - DNA, 33 bp, Homo sapien
gtgttttgggggttgaagagtgggagaatgtga

SEQ ID NO: 289524 - DNA, 33 bp, Homo sapien
gtgttttgggggttgaggagtgggagaatgtga

SEQ ID NO: 289525 - DNA, 33 bp, Homo sapien
aggtaaatcttcaccaagacagtaggaataatg

SEQ ID NO: 289526 - DNA, 33 bp, Homo sapien
aggtaaatcttcaccaggacagtaggaataatg

SEQ ID NO: 289527 - DNA, 33 bp, Homo sapien
aatgagctctgagtcacgttgaaaatctggtaa

SEQ ID NO: 289528 - DNA, 33 bp, Homo sapien
aatgagctctgagtcatgttgaaaatctggtaa

SEQ ID NO: 289529 - DNA, 33 bp, Homo sapien
taggaagtctacaacaactagaaatgtaggaaa

SEQ ID NO: 289530 - DNA, 33 bp, Homo sapien
taggaagtctacaacatctagaaatgtaggaaa

SEQ ID NO: 289531 - DNA, 33 bp, Homo sapien
ttagccaggtgggaacaaatagagccagaccct

SEQ ID NO: 289532 - DNA, 33 bp, Homo sapien
ttagccaggtgggaaccaatagagccagaccct

SEQ ID NO: 289533 - DNA, 33 bp, Homo sapien
tttatctaatctaaagcagtctctaacaaaatg

SEQ ID NO: 289534 - DNA, 33 bp, Homo sapien
tttatctaatctaaagtagtctctaacaaaatg

SEQ ID NO: 289535 - DNA, 33 bp, Homo sapien
acattacattgctatgaaacttatccaaacatg

SEQ ID NO: 289536 - DNA, 33 bp, Homo sapien
acattacattgctatgcaacttatccaaacatg

SEQ ID NO: 289537 - DNA, 33 bp, Homo sapien
atgggtctaaaaatccagctgaaatgggctttc

SEQ ID NO: 289538 - DNA, 33 bp, Homo sapien
atgggtctaaaaatcctgctgaaatgggctttc

SEQ ID NO: 289539 - DNA, 33 bp, Homo sapien
gtttgtagatgtcggcaatgagctcgtagcgct

SEQ ID NO: 289540 - DNA, 33 bp, Homo sapien
gtttgtagatgtcggcgatgagctcgtagcgct

SEQ ID NO: 289541 - DNA, 33 bp, Homo sapien
ttaacatcaatcaatccaaacctttaacagagt

SEQ ID NO: 289542 - DNA, 33 bp, Homo sapien
ttaacatcaatcaatctaaacctttaacagagt

SEQ ID NO: 289543 - DNA, 33 bp, Homo sapien
acagcctcatctcttaccactctgattgcgatt

SEQ ID NO: 289544 - DNA, 33 bp, Homo sapien
acagcctcatctcttatcactctgattgcgatt

SEQ ID NO: 289545 - DNA, 33 bp, Homo sapien
gtcttctattataggcagcaatgtgctatgtcc

SEQ ID NO: 289546 - DNA, 33 bp, Homo sapien
gtcttctattataggcggcaatgtgctatgtcc

SEQ ID NO: 289547 - DNA, 33 bp, Homo sapien
attaattgggagttgacataaatggcagtaaat

SEQ ID NO: 289548 - DNA, 33 bp, Homo sapien
attaattgggagttgagataaatggcagtaaat

SEQ ID NO: 289549 - DNA, 33 bp, Homo sapien
gtgcacgtgtgtcaacaaatgttagcagcgtgg

SEQ ID NO: 289550 - DNA, 33 bp, Homo sapien
gtgcacgtgtgtcaacgaatgttagcagcgtgg

SEQ ID NO: 289551 - DNA, 33 bp, Homo sapien
cataactccactctccaacagacttctctctgc

SEQ ID NO: 289552 - DNA, 33 bp, Homo sapien
cataactccactctcctacagacttctctctgc

SEQ ID NO: 289553 - DNA, 33 bp, Homo sapien
tccgaagcttctttcacgtttctagtagaggca

SEQ ID NO: 289554 - DNA, 33 bp, Homo sapien
tccgaagcttctttcatgtttctagtagaggca

SEQ ID NO: 289555 - DNA, 33 bp, Homo sapien
tgcagtttaagtgttacgaagattggctgggca

SEQ ID NO: 289556 - DNA, 33 bp, Homo sapien
tgcagtttaagtgttatgaagattggctgggca

SEQ ID NO: 289557 - DNA, 33 bp, Homo sapien
atgtcagaatgtggacgcttgatcaattacatg

SEQ ID NO: 289558 - DNA, 33 bp, Homo sapien
atgtcagaatgtggactcttgatcaattacatg

SEQ ID NO: 289559 - DNA, 33 bp, Homo sapien
agcggcctttagaatcagatgcacgcgatttaa

SEQ ID NO: 289560 - DNA, 33 bp, Homo sapien
agcggcctttagaatcggatgcacgcgatttaa

SEQ ID NO: 289561 - DNA, 33 bp, Homo sapien
ttatagcagattcccaaatattccccgttcaca

SEQ ID NO: 289562 - DNA, 33 bp, Homo sapien
ttatagcagattcccagatattccccgttcaca

SEQ ID NO: 289563 - DNA, 33 bp, Homo sapien
atcacataatttaaaacgactctttggacttgt

SEQ ID NO: 289564 - DNA, 33 bp, Homo sapien
atcacataatttaaaatgactctttggacttgt

SEQ ID NO: 289565 - DNA, 33 bp, Homo sapien
catatttcatatttaacgtagaacagcatttga

SEQ ID NO: 289566 - DNA, 33 bp, Homo sapien
catatttcatatttaatgtagaacagcatttga

SEQ ID NO: 289567 - DNA, 33 bp, Homo sapien
ggcattatgaagaaccaggatagaacattccca

SEQ ID NO: 289568 - DNA, 33 bp, Homo sapien
ggcattatgaagaaccgggatagaacattccca

SEQ ID NO: 289569 - DNA, 33 bp, Homo sapien
aagaaagattctcaggcccaacaaatgtaacta

SEQ ID NO: 289570 - DNA, 33 bp, Homo sapien
aagaaagattctcaggtccaacaaatgtaacta

SEQ ID NO: 289571 - DNA, 33 bp, Homo sapien
tatttgcctggtaaagcaaaattcaagagaagc

SEQ ID NO: 289572 - DNA, 33 bp, Homo sapien
tatttgcctggtaaaggaaaattcaagagaagc

SEQ ID NO: 289573 - DNA, 33 bp, Homo sapien
agggagggtgatgaataagctagtgtcagtctg

SEQ ID NO: 289574 - DNA, 33 bp, Homo sapien
agggagggtgatgaatgagctagtgtcagtctg

SEQ ID NO: 289575 - DNA, 33 bp, Homo sapien
agtgattgccctcatacgccgtaagtagcttac

SEQ ID NO: 289576 - DNA, 33 bp, Homo sapien
agtgattgccctcatatgccgtaagtagcttac

SEQ ID NO: 289577 - DNA, 33 bp, Homo sapien
aaatcctctttgtctcagaacaacaaacagaat

SEQ ID NO: 289578 - DNA, 33 bp, Homo sapien
aaatcctctttgtctctgaacaacaaacagaat

SEQ ID NO: 289579 - DNA, 33 bp, Homo sapien
agagtactttatttaacgcattctctagcagtg

SEQ ID NO: 289580 - DNA, 33 bp, Homo sapien
agagtactttatttaaggcattctctagcagtg

SEQ ID NO: 289581 - DNA, 33 bp, Homo sapien
tttaaaaaaataaaacagcttctctccagagac

SEQ ID NO: 289582 - DNA, 33 bp, Homo sapien
tttaaaaaaataaaaccgcttctctccagagac

SEQ ID NO: 289583 - DNA, 33 bp, Homo sapien
tcagaactgtctagtcaagtggatcattttatt

SEQ ID NO: 289584 - DNA, 33 bp, Homo sapien
tcagaactgtctagtctagtggatcattttatt

SEQ ID NO: 289585 - DNA, 33 bp, Homo sapien
tcagaagctgcccaagcaatctcagaatgaaga

SEQ ID NO: 289586 - DNA, 33 bp, Homo sapien
tcagaagctgcccaagtaatctcagaatgaaga

SEQ ID NO: 289587 - DNA, 33 bp, Homo sapien
aaaagtgggaccagagaaacatcaggattaata

SEQ ID NO: 289588 - DNA, 33 bp, Homo sapien
aaaagtgggaccagaggaacatcaggattaata

SEQ ID NO: 289589 - DNA, 33 bp, Homo sapien
aagtctgcacaaggacaaagtcacccaatgatg

SEQ ID NO: 289590 - DNA, 33 bp, Homo sapien
aagtctgcacaaggacgaagtcacccaatgatg

SEQ ID NO: 289591 - DNA, 33 bp, Homo sapien
acatctcgatacaccaatgaactttccttcggg

SEQ ID NO: 289592 - DNA, 33 bp, Homo sapien
acatctcgatacaccagtgaactttccttcggg

SEQ ID NO: 289593 - DNA, 33 bp, Homo sapien
attatctaggttcttccaggcaaccctggtaga

SEQ ID NO: 289594 - DNA, 33 bp, Homo sapien
attatctaggttcttctaggcaaccctggtaga

SEQ ID NO: 289595 - DNA, 33 bp, Homo sapien
attttatccatagtagacacttaataggtatta

SEQ ID NO: 289596 - DNA, 33 bp, Homo sapien
attttatccatagtaggcacttaataggtatta

SEQ ID NO: 289597 - DNA, 33 bp, Homo sapien
gactactgggttcatcaatatccttcattcagg

SEQ ID NO: 289598 - DNA, 33 bp, Homo sapien
gactactgggttcatcgatatccttcattcagg

SEQ ID NO: 289599 - DNA, 33 bp, Homo sapien
cagacaggcagtaggaaaggaattgagacagtg

SEQ ID NO: 289600 - DNA, 33 bp, Homo sapien
cagacaggcagtaggagaggaattgagacagtg

SEQ ID NO: 289601 - DNA, 33 bp, Homo sapien
accaaaactagcataccctaattgtagaaaata

SEQ ID NO: 289602 - DNA, 33 bp, Homo sapien
accaaaactagcatactctaattgtagaaaata

SEQ ID NO: 289603 - DNA, 33 bp, Homo sapien
tcaccatgcttagggaaaaatagtatcctgaaa

SEQ ID NO: 289604 - DNA, 33 bp, Homo sapien
tcaccatgcttagggagaaatagtatcctgaaa

SEQ ID NO: 289605 - DNA, 33 bp, Homo sapien
gcagccccttgggtgacggtctacaaagaacgc

SEQ ID NO: 289606 - DNA, 33 bp, Homo sapien
gcagccccttgggtgatggtctacaaagaacgc

SEQ ID NO: 289607 - DNA, 33 bp, Homo sapien
gaagagctgaaatcccaaatgccacttcttgaa

SEQ ID NO: 289608 - DNA, 33 bp, Homo sapien
gaagagctgaaatcccgaatgccacttcttgaa

SEQ ID NO: 289609 - DNA, 33 bp, Homo sapien
cagcaggcctcccagacggacgtgcttgaggag

SEQ ID NO: 289610 - DNA, 33 bp, Homo sapien
cagcaggcctcccagatggacgtgcttgaggag

SEQ ID NO: 289611 - DNA, 33 bp, Homo sapien
ctgttttggagatacaactattgaattcgagtt

SEQ ID NO: 289612 - DNA, 33 bp, Homo sapien
ctgttttggagatacagctattgaattcgagtt

SEQ ID NO: 289613 - DNA, 33 bp, Homo sapien
tggcatttggaataagactaaggtgtgtgttct

SEQ ID NO: 289614 - DNA, 33 bp, Homo sapien
tggcatttggaataaggctaaggtgtgtgttct

SEQ ID NO: 289615 - DNA, 33 bp, Homo sapien
tggtttccatctgaatcatccgggcagagtctc

SEQ ID NO: 289616 - DNA, 33 bp, Homo sapien
tggtttccatctgaatgatccgggcagagtctc

SEQ ID NO: 289617 - DNA, 33 bp, Homo sapien
tctgagaacttttccacgcactgtcctgacttc

SEQ ID NO: 289618 - DNA, 33 bp, Homo sapien
tctgagaacttttccatgcactgtcctgacttc

SEQ ID NO: 289619 - DNA, 33 bp, Homo sapien
taaatgttcctgcggacagtaaagatgatggtg

SEQ ID NO: 289620 - DNA, 33 bp, Homo sapien
taaatgttcctgcggatagtaaagatgatggtg

SEQ ID NO: 289621 - DNA, 33 bp, Homo sapien
cagtctggttcatgtaactgatcccagccaagt

SEQ ID NO: 289622 - DNA, 33 bp, Homo sapien
cagtctggttcatgtagctgatcccagccaagt

SEQ ID NO: 289623 - DNA, 33 bp, Homo sapien
aaacatacttaagaaaatggaatctactataag

SEQ ID NO: 289624 - DNA, 33 bp, Homo sapien
aaacatacttaagaaagtggaatctactataag

SEQ ID NO: 289625 - DNA, 33 bp, Homo sapien
agcagtgaataaagcgcacaaaaatcccaggta

SEQ ID NO: 289626 - DNA, 33 bp, Homo sapien
agcagtgaataaagcgtacaaaaatcccaggta

SEQ ID NO: 289627 - DNA, 33 bp, Homo sapien
cggtgactgcttgtcacgaagatggtacagtgg

SEQ ID NO: 289628 - DNA, 33 bp, Homo sapien
cggtgactgcttgtcatgaagatggtacagtgg

SEQ ID NO: 289629 - DNA, 33 bp, Homo sapien
tatgggatcacgtgcccggatggtattccctac

SEQ ID NO: 289630 - DNA, 33 bp, Homo sapien
tatgggatcacgtgcctggatggtattccctac

SEQ ID NO: 289631 - DNA, 33 bp, Homo sapien
tcatggtaattttcaacttagaacaactcaagt

SEQ ID NO: 289632 - DNA, 33 bp, Homo sapien
tcatggtaattttcaatttagaacaactcaagt

SEQ ID NO: 289633 - DNA, 33 bp, Homo sapien
tacaatgagtttctcaatatgattcatggtgac

SEQ ID NO: 289634 - DNA, 33 bp, Homo sapien
tacaatgagtttctcagtatgattcatggtgac

SEQ ID NO: 289635 - DNA, 33 bp, Homo sapien
gctacaagcacagataaatctcaaaagggacca

SEQ ID NO: 289636 - DNA, 33 bp, Homo sapien
gctacaagcacagatacatctcaaaagggacca

SEQ ID NO: 289637 - DNA, 33 bp, Homo sapien
taaatggaatcactcaataggtagcctttgcat

SEQ ID NO: 289638 - DNA, 33 bp, Homo sapien
taaatggaatcactcagtaggtagcctttgcat

SEQ ID NO: 289639 - DNA, 33 bp, Homo sapien
tttctgcaatagaatcccaatttgtaacattgt

SEQ ID NO: 289640 - DNA, 33 bp, Homo sapien
tttctgcaatagaatcgcaatttgtaacattgt

SEQ ID NO: 289641 - DNA, 33 bp, Homo sapien
ttataattaaccggaaataactattaagctgaa

SEQ ID NO: 289642 - DNA, 33 bp, Homo sapien
ttataattaaccggaagtaactattaagctgaa

SEQ ID NO: 289643 - DNA, 33 bp, Homo sapien
ttttaccacaagctaaaaatgaactacattgtc

SEQ ID NO: 289644 - DNA, 33 bp, Homo sapien
ttttaccacaagctaagaatgaactacattgtc

SEQ ID NO: 289645 - DNA, 33 bp, Homo sapien
cctcatcttacccacaacctttccacaatcagc

SEQ ID NO: 289646 - DNA, 33 bp, Homo sapien
cctcatcttacccacatcctttccacaatcagc

SEQ ID NO: 289647 - DNA, 33 bp, Homo sapien
acgcgacactgttgaacgctcgtaacaggaaag

SEQ ID NO: 289648 - DNA, 33 bp, Homo sapien
acgcgacactgttgaatgctcgtaacaggaaag

SEQ ID NO: 289649 - DNA, 33 bp, Homo sapien
aagtttagaacaaaaagctacggagctaactta

SEQ ID NO: 289650 - DNA, 33 bp, Homo sapien
aagtttagaacaaaaatctacggagctaactta

SEQ ID NO: 289651 - DNA, 33 bp, Homo sapien
acccatgagattaacaaaggaagtagtttgttg

SEQ ID NO: 289652 - DNA, 33 bp, Homo sapien
acccatgagattaacagaggaagtagtttgttg

SEQ ID NO: 289653 - DNA, 33 bp, Homo sapien
cacaggtgtgcgccacagcgttcagctaatttt

SEQ ID NO: 289654 - DNA, 33 bp, Homo sapien
cacaggtgtgcgccacggcgttcagctaatttt

SEQ ID NO: 289655 - DNA, 33 bp, Homo sapien
aaagagcaagaactgaactttggcgggaaaggg

SEQ ID NO: 289656 - DNA, 33 bp, Homo sapien
aaagagcaagaactgagctttggcgggaaaggg

SEQ ID NO: 289657 - DNA, 33 bp, Homo sapien
ctcagaaagttcttaccattggctttaaataaa

SEQ ID NO: 289658 - DNA, 33 bp, Homo sapien
ctcagaaagttcttactattggctttaaataaa

SEQ ID NO: 289659 - DNA, 33 bp, Homo sapien
cccatgacttggtatcagacccaatgtggatca

SEQ ID NO: 289660 - DNA, 33 bp, Homo sapien
cccatgacttggtatcggacccaatgtggatca

SEQ ID NO: 289661 - DNA, 33 bp, Homo sapien
cttgtctgtatgctagaaattagatgtgttaat

SEQ ID NO: 289662 - DNA, 33 bp, Homo sapien
cttgtctgtatgctaggaattagatgtgttaat

SEQ ID NO: 289663 - DNA, 33 bp, Homo sapien
gagtcagtggcttagtaaagaaatcagaggcgc

SEQ ID NO: 289664 - DNA, 33 bp, Homo sapien
gagtcagtggcttagtgaagaaatcagaggcgc

SEQ ID NO: 289665 - DNA, 33 bp, Homo sapien
gtcacaggtgtaggtacgggggctgagtcttga

SEQ ID NO: 289666 - DNA, 33 bp, Homo sapien
gtcacaggtgtaggtatgggggctgagtcttga

SEQ ID NO: 289667 - DNA, 33 bp, Homo sapien
atctcttccataaccaactaacttctgtgtggc

SEQ ID NO: 289668 - DNA, 33 bp, Homo sapien
atctcttccataaccagctaacttctgtgtggc

SEQ ID NO: 289669 - DNA, 33 bp, Homo sapien
ggcactcttaggtggaaggtcccaggagcgaac

SEQ ID NO: 289670 - DNA, 33 bp, Homo sapien
ggcactcttaggtggagggtcccaggagcgaac

SEQ ID NO: 289671 - DNA, 33 bp, Homo sapien
ataactggacaacggaaatccctggtatttaat

SEQ ID NO: 289672 - DNA, 33 bp, Homo sapien
ataactggacaacggacatccctggtatttaat

SEQ ID NO: 289673 - DNA, 33 bp, Homo sapien
gaaaggttcactagacacgaatagcaatagaaa

SEQ ID NO: 289674 - DNA, 33 bp, Homo sapien
gaaaggttcactagacccgaatagcaatagaaa

SEQ ID NO: 289675 - DNA, 33 bp, Homo sapien
cacaaagctggcattccacccaaaagcaaaagg

SEQ ID NO: 289676 - DNA, 33 bp, Homo sapien
cacaaagctggcattctacccaaaagcaaaagg

SEQ ID NO: 289677 - DNA, 33 bp, Homo sapien
ccagtgttttccgggaccctttctcaaattcct

SEQ ID NO: 289678 - DNA, 33 bp, Homo sapien
ccagtgttttccgggagcctttctcaaattcct

SEQ ID NO: 289679 - DNA, 33 bp, Homo sapien
ttcattttttggcataaggatgtccagtcattc

SEQ ID NO: 289680 - DNA, 33 bp, Homo sapien
ttcattttttggcatatggatgtccagtcattc

SEQ ID NO: 289681 - DNA, 33 bp, Homo sapien
tagacccttcacaacaatgaactcaaaatggac

SEQ ID NO: 289682 - DNA, 33 bp, Homo sapien
tagacccttcacaacagtgaactcaaaatggac

SEQ ID NO: 289683 - DNA, 33 bp, Homo sapien
agtgtaatcacagggtccctataagagaagact

SEQ ID NO: 289684 - DNA, 33 bp, Homo sapien
agtgtaatcacagggttcctataagagaagact

SEQ ID NO: 289685 - DNA, 33 bp, Homo sapien
acaccatcaattaggcaatcatctttggtaggt

SEQ ID NO: 289686 - DNA, 33 bp, Homo sapien
acaccatcaattaggcgatcatctttggtaggt

SEQ ID NO: 289687 - DNA, 33 bp, Homo sapien
tttatatagttcgacaatcaatgtttagctata

SEQ ID NO: 289688 - DNA, 33 bp, Homo sapien
tttatatagttcgacagtcaatgtttagctata

SEQ ID NO: 289689 - DNA, 33 bp, Homo sapien
atggcaggtgtccttacgaaaagagggatcagg

SEQ ID NO: 289690 - DNA, 33 bp, Homo sapien
atggcaggtgtccttatgaaaagagggatcagg

SEQ ID NO: 289691 - DNA, 33 bp, Homo sapien
tccgtaccgccatattgaatacatcagctaagc

SEQ ID NO: 289692 - DNA, 33 bp, Homo sapien
tccgtaccgccatatttaatacatcagctaagc

SEQ ID NO: 289693 - DNA, 33 bp, Homo sapien
ctcctctgggaactaaagccacttacaaggaaa

SEQ ID NO: 289694 - DNA, 33 bp, Homo sapien
ctcctctgggaactaaggccacttacaaggaaa

SEQ ID NO: 289695 - DNA, 33 bp, Homo sapien
taagactccagctctaaagaaataagcaaatag

SEQ ID NO: 289696 - DNA, 33 bp, Homo sapien
taagactccagctctacagaaataagcaaatag

SEQ ID NO: 289697 - DNA, 33 bp, Homo sapien
atataggaagagataacggaactgcctgccatt

SEQ ID NO: 289698 - DNA, 33 bp, Homo sapien
atataggaagagataatggaactgcctgccatt

SEQ ID NO: 289699 - DNA, 33 bp, Homo sapien
acaaagagtatgtatacagttgagatgggggga

SEQ ID NO: 289700 - DNA, 33 bp, Homo sapien
acaaagagtatgtatatagttgagatgggggga

SEQ ID NO: 289701 - DNA, 33 bp, Homo sapien
attggttggctcccacagatgtgtttaagtgag

SEQ ID NO: 289702 - DNA, 33 bp, Homo sapien
attggttggctcccacggatgtgtttaagtgag

SEQ ID NO: 289703 - DNA, 33 bp, Homo sapien
aacagaaaattcaactcacaatagtccatccaa

SEQ ID NO: 289704 - DNA, 33 bp, Homo sapien
aacagaaaattcaactgacaatagtccatccaa

SEQ ID NO: 289705 - DNA, 33 bp, Homo sapien
tcttaacaatatattacgttgtgtggtgcgctg

SEQ ID NO: 289706 - DNA, 33 bp, Homo sapien
tcttaacaatatattaggttgtgtggtgcgctg

SEQ ID NO: 289707 - DNA, 33 bp, Homo sapien
actttgtggctgagaaatccatctccgaatctc

SEQ ID NO: 289708 - DNA, 33 bp, Homo sapien
actttgtggctgagaagtccatctccgaatctc

SEQ ID NO: 289709 - DNA, 33 bp, Homo sapien
ttggcccggtattgccagatgtttagcagcacc

SEQ ID NO: 289710 - DNA, 33 bp, Homo sapien
ttggcccggtattgccggatgtttagcagcacc

SEQ ID NO: 289711 - DNA, 33 bp, Homo sapien
aggtgctgggaatgcaacaacgaacaggtcctg

SEQ ID NO: 289712 - DNA, 33 bp, Homo sapien
aggtgctgggaatgcagcaacgaacaggtcctg

SEQ ID NO: 289713 - DNA, 33 bp, Homo sapien
tactgcttctcagcctcaaagaagtttatctcc

SEQ ID NO: 289714 - DNA, 33 bp, Homo sapien
tactgcttctcagccttaaagaagtttatctcc

SEQ ID NO: 289715 - DNA, 33 bp, Homo sapien
tcttgccactaaccacacatttccccacttgaa

SEQ ID NO: 289716 - DNA, 33 bp, Homo sapien
tcttgccactaaccacgcatttccccacttgaa

SEQ ID NO: 289717 - DNA, 33 bp, Homo sapien
gtgagctgtaaaatttaaaatcctagtcctgaa

SEQ ID NO: 289718 - DNA, 33 bp, Homo sapien
gtgagctgtaaaattttaaatcctagtcctgaa

SEQ ID NO: 289719 - DNA, 33 bp, Homo sapien
aatatataagaaggaactatgataactttatat

SEQ ID NO: 289720 - DNA, 33 bp, Homo sapien
aatatataagaaggaagtatgataactttatat

SEQ ID NO: 289721 - DNA, 33 bp, Homo sapien
aaaatcagtaaggatacacaagacctgaaaaac

SEQ ID NO: 289722 - DNA, 33 bp, Homo sapien
aaaatcagtaaggatatacaagacctgaaaaac

SEQ ID NO: 289723 - DNA, 33 bp, Homo sapien
atggtggaagatagtaaaccagttagaaggctg

SEQ ID NO: 289724 - DNA, 33 bp, Homo sapien
atggtggaagatagtataccagttagaaggctg

SEQ ID NO: 289725 - DNA, 33 bp, Homo sapien
ctactgcagcataaccagggaaggaggggtgcc

SEQ ID NO: 289726 - DNA, 33 bp, Homo sapien
ctactgcagcataaccggggaaggaggggtgcc

SEQ ID NO: 289727 - DNA, 33 bp, Homo sapien
gaagtgaggtaatgcacgtagaaatggctagca

SEQ ID NO: 289728 - DNA, 33 bp, Homo sapien
gaagtgaggtaatgcatgtagaaatggctagca

SEQ ID NO: 289729 - DNA, 33 bp, Homo sapien
tcaatgaggcagtacaagagagcacataggaaa

SEQ ID NO: 289730 - DNA, 33 bp, Homo sapien
tcaatgaggcagtacacgagagcacataggaaa

SEQ ID NO: 289731 - DNA, 33 bp, Homo sapien
gtgggttggaaatagacagctgggaagcaaaca

SEQ ID NO: 289732 - DNA, 33 bp, Homo sapien
gtgggttggaaatagagagctgggaagcaaaca

SEQ ID NO: 289733 - DNA, 33 bp, Homo sapien
cttttcttttgagagacggtaagcttgaggttc

SEQ ID NO: 289734 - DNA, 33 bp, Homo sapien
cttttcttttgagagatggtaagcttgaggttc

SEQ ID NO: 289735 - DNA, 33 bp, Homo sapien
cataggagtttcacaactgctataccagtggtg

SEQ ID NO: 289736 - DNA, 33 bp, Homo sapien
cataggagtttcacaattgctataccagtggtg

SEQ ID NO: 289737 - DNA, 33 bp, Homo sapien
ggaaacaatgaaaagaaagcacaggccaacatg

SEQ ID NO: 289738 - DNA, 33 bp, Homo sapien
ggaaacaatgaaaagatagcacaggccaacatg

SEQ ID NO: 289739 - DNA, 33 bp, Homo sapien
gtatttggaggtaggaactttgggaggcaatta

SEQ ID NO: 289740 - DNA, 33 bp, Homo sapien
gtatttggaggtaggacctttgggaggcaatta

SEQ ID NO: 289741 - DNA, 33 bp, Homo sapien
taaagaacactcttcactactccatgctgaggg

SEQ ID NO: 289742 - DNA, 33 bp, Homo sapien
taaagaacactcttcattactccatgctgaggg

SEQ ID NO: 289743 - DNA, 33 bp, Homo sapien
atcttacctaagagagaagcatataatccattc

SEQ ID NO: 289744 - DNA, 33 bp, Homo sapien
atcttacctaagagaggagcatataatccattc

SEQ ID NO: 289745 - DNA, 33 bp, Homo sapien
taacaaaagcacattacatttcaagcacattag

SEQ ID NO: 289746 - DNA, 33 bp, Homo sapien
taacaaaagcacattagatttcaagcacattag

SEQ ID NO: 289747 - DNA, 33 bp, Homo sapien
aaactttaattttccaacagccttagaatatgt

SEQ ID NO: 289748 - DNA, 33 bp, Homo sapien
aaactttaattttccagcagccttagaatatgt

SEQ ID NO: 289749 - DNA, 33 bp, Homo sapien
actggagaatcggagacgccttgtgtaggataa

SEQ ID NO: 289750 - DNA, 33 bp, Homo sapien
actggagaatcggagatgccttgtgtaggataa

SEQ ID NO: 289751 - DNA, 33 bp, Homo sapien
aaaaggaacactgaacagcaagctttgaaaagc

SEQ ID NO: 289752 - DNA, 33 bp, Homo sapien
aaaaggaacactgaacggcaagctttgaaaagc

SEQ ID NO: 289753 - DNA, 33 bp, Homo sapien
gctgctgtgaggtttccacatgatgacacaatg

SEQ ID NO: 289754 - DNA, 33 bp, Homo sapien
gctgctgtgaggtttctacatgatgacacaatg

SEQ ID NO: 289755 - DNA, 33 bp, Homo sapien
gtcagaccagctcccaatagatctgcgaaaggc

SEQ ID NO: 289756 - DNA, 33 bp, Homo sapien
gtcagaccagctcccagtagatctgcgaaaggc

SEQ ID NO: 289757 - DNA, 33 bp, Homo sapien
tgctttatatgtgtcccgaacccagtggatgtg

SEQ ID NO: 289758 - DNA, 33 bp, Homo sapien
tgctttatatgtgtcctgaacccagtggatgtg

SEQ ID NO: 289759 - DNA, 33 bp, Homo sapien
agaaactaagaatcccaccataatactcatttt

SEQ ID NO: 289760 - DNA, 33 bp, Homo sapien
agaaactaagaatcccgccataatactcatttt

SEQ ID NO: 289761 - DNA, 33 bp, Homo sapien
cacacactcacattcacgttgactcatccatat

SEQ ID NO: 289762 - DNA, 33 bp, Homo sapien
cacacactcacattcatgttgactcatccatat

SEQ ID NO: 289763 - DNA, 33 bp, Homo sapien
tcaatctgaagtaaagaaacattcagagaaaac

SEQ ID NO: 289764 - DNA, 33 bp, Homo sapien
tcaatctgaagtaaaggaacattcagagaaaac

SEQ ID NO: 289765 - DNA, 33 bp, Homo sapien
agaaccgtgtaattgacgtccatgtttattagt

SEQ ID NO: 289766 - DNA, 33 bp, Homo sapien
agaaccgtgtaattgatgtccatgtttattagt

SEQ ID NO: 289767 - DNA, 33 bp, Homo sapien
ttccattgcaagtttacgtttggtgtcaggaag

SEQ ID NO: 289768 - DNA, 33 bp, Homo sapien
ttccattgcaagtttatgtttggtgtcaggaag

SEQ ID NO: 289769 - DNA, 33 bp, Homo sapien
aaagataccagttccacgaataggaagatgcaa

SEQ ID NO: 289770 - DNA, 33 bp, Homo sapien
aaagataccagttccatgaataggaagatgcaa

SEQ ID NO: 289771 - DNA, 33 bp, Homo sapien
agaaacagtacctgtcaagagctgatgggacag

SEQ ID NO: 289772 - DNA, 33 bp, Homo sapien
agaaacagtacctgtcgagagctgatgggacag

SEQ ID NO: 289773 - DNA, 33 bp, Homo sapien
agaggtgataatcaaccagttaacaccgggcag

SEQ ID NO: 289774 - DNA, 33 bp, Homo sapien
agaggtgataatcaactagttaacaccgggcag

SEQ ID NO: 289775 - DNA, 33 bp, Homo sapien
ggaagggaaaacagaacatacgatgcagaaatg

SEQ ID NO: 289776 - DNA, 33 bp, Homo sapien
ggaagggaaaacagaatatacgatgcagaaatg

SEQ ID NO: 289777 - DNA, 33 bp, Homo sapien
tgttgacaagaagtaacctcgctgttgtcattc

SEQ ID NO: 289778 - DNA, 33 bp, Homo sapien
tgttgacaagaagtaatctcgctgttgtcattc

SEQ ID NO: 289779 - DNA, 33 bp, Homo sapien
acttcccatattctgacgcttgcagaaagcgat

SEQ ID NO: 289780 - DNA, 33 bp, Homo sapien
acttcccatattctgatgcttgcagaaagcgat

SEQ ID NO: 289781 - DNA, 33 bp, Homo sapien
agaatgttatgctcaccatttaaaaagattgtt

SEQ ID NO: 289782 - DNA, 33 bp, Homo sapien
agaatgttatgctcactatttaaaaagattgtt

SEQ ID NO: 289783 - DNA, 33 bp, Homo sapien
aatgcaggccacaacacgtagtttattcagtgt

SEQ ID NO: 289784 - DNA, 33 bp, Homo sapien
aatgcaggccacaacatgtagtttattcagtgt

SEQ ID NO: 289785 - DNA, 33 bp, Homo sapien
atggcagtacaaatggaaagttccacacctgac

SEQ ID NO: 289786 - DNA, 33 bp, Homo sapien
atggcagtacaaatggcaagttccacacctgac

SEQ ID NO: 289787 - DNA, 33 bp, Homo sapien
tcaccagattaaaaacaattgctaagtagcaat

SEQ ID NO: 289788 - DNA, 33 bp, Homo sapien
tcaccagattaaaaactattgctaagtagcaat

SEQ ID NO: 289789 - DNA, 33 bp, Homo sapien
ctgagtgtggacagcaaatggattcgtttgtgc

SEQ ID NO: 289790 - DNA, 33 bp, Homo sapien
ctgagtgtggacagcagatggattcgtttgtgc

SEQ ID NO: 289791 - DNA, 33 bp, Homo sapien
ttaagcttttgccagacgtgaaacttcaattct

SEQ ID NO: 289792 - DNA, 33 bp, Homo sapien
ttaagcttttgccagatgtgaaacttcaattct

SEQ ID NO: 289793 - DNA, 33 bp, Homo sapien
cttcaaagggcaaaatcaagagctgtggcattg

SEQ ID NO: 289794 - DNA, 33 bp, Homo sapien
cttcaaagggcaaaatgaagagctgtggcattg

SEQ ID NO: 289795 - DNA, 33 bp, Homo sapien
aggttaattttgctcacaatatccagagttagc

SEQ ID NO: 289796 - DNA, 33 bp, Homo sapien
aggttaattttgctcagaatatccagagttagc

SEQ ID NO: 289797 - DNA, 33 bp, Homo sapien
tccaccatgtagcaccaagtagctcgctctctt

SEQ ID NO: 289798 - DNA, 33 bp, Homo sapien
tccaccatgtagcaccgagtagctcgctctctt

SEQ ID NO: 289799 - DNA, 33 bp, Homo sapien
cctcttgggtaggttgcaataaggtgtaaaatg

SEQ ID NO: 289800 - DNA, 33 bp, Homo sapien
cctcttgggtaggttgtaataaggtgtaaaatg

SEQ ID NO: 289801 - DNA, 33 bp, Homo sapien
ctacaaatatgatgtacgaaactttctgttctt

SEQ ID NO: 289802 - DNA, 33 bp, Homo sapien
ctacaaatatgatgtatgaaactttctgttctt

SEQ ID NO: 289803 - DNA, 33 bp, Homo sapien
ttaggttggtgcacaaatcacggcagaacagca

SEQ ID NO: 289804 - DNA, 33 bp, Homo sapien
ttaggttggtgcacaagtcacggcagaacagca

SEQ ID NO: 289805 - DNA, 33 bp, Homo sapien
caacctaatgctttacaaaacacaaaatcaccc

SEQ ID NO: 289806 - DNA, 33 bp, Homo sapien
caacctaatgctttacgaaacacaaaatcaccc

SEQ ID NO: 289807 - DNA, 33 bp, Homo sapien
cctcgatctagtctaaacattttgccttctaag

SEQ ID NO: 289808 - DNA, 33 bp, Homo sapien
cctcgatctagtctaaccattttgccttctaag

SEQ ID NO: 289809 - DNA, 33 bp, Homo sapien
caactgaagctaaaccaaaataccctgtggccc

SEQ ID NO: 289810 - DNA, 33 bp, Homo sapien
caactgaagctaaaccgaaataccctgtggccc

SEQ ID NO: 289811 - DNA, 33 bp, Homo sapien
gggcaaaaacattgagaccaatgcgagttttta

SEQ ID NO: 289812 - DNA, 33 bp, Homo sapien
gggcaaaaacattgaggccaatgcgagttttta

SEQ ID NO: 289813 - DNA, 33 bp, Homo sapien
ccttgtattatgaacacaggtggcaaccactta

SEQ ID NO: 289814 - DNA, 33 bp, Homo sapien
ccttgtattatgaacataggtggcaaccactta

SEQ ID NO: 289815 - DNA, 33 bp, Homo sapien
gccaggcttaggcccacgaaggattcattaaca

SEQ ID NO: 289816 - DNA, 33 bp, Homo sapien
gccaggcttaggcccatgaaggattcattaaca

SEQ ID NO: 289817 - DNA, 33 bp, Homo sapien
cagaggagcaaactgaagcccagaatgggaagc

SEQ ID NO: 289818 - DNA, 33 bp, Homo sapien
cagaggagcaaactgacgcccagaatgggaagc

SEQ ID NO: 289819 - DNA, 33 bp, Homo sapien
agttttctgtcaaagtaggatgagatttataca

SEQ ID NO: 289820 - DNA, 33 bp, Homo sapien
agttttctgtcaaagtgggatgagatttataca

SEQ ID NO: 289821 - DNA, 33 bp, Homo sapien
cagtctattacaattcgatcactcttctgtcca

SEQ ID NO: 289822 - DNA, 33 bp, Homo sapien
cagtctattacaattctatcactcttctgtcca

SEQ ID NO: 289823 - DNA, 33 bp, Homo sapien
catcagtttcctactcaataaaatggtgtagca

SEQ ID NO: 289824 - DNA, 33 bp, Homo sapien
catcagtttcctactcgataaaatggtgtagca

SEQ ID NO: 289825 - DNA, 33 bp, Homo sapien
taggctgaagtacaacagcacgatcattgctca

SEQ ID NO: 289826 - DNA, 33 bp, Homo sapien
taggctgaagtacaacggcacgatcattgctca

SEQ ID NO: 289827 - DNA, 33 bp, Homo sapien
acatctggcattactgcagtttattacccgctt

SEQ ID NO: 289828 - DNA, 33 bp, Homo sapien
acatctggcattactgtagtttattacccgctt

SEQ ID NO: 289829 - DNA, 33 bp, Homo sapien
aagttggtcatgtgcaatattcttttcttttga

SEQ ID NO: 289830 - DNA, 33 bp, Homo sapien
aagttggtcatgtgcattattcttttcttttga

SEQ ID NO: 289831 - DNA, 33 bp, Homo sapien
atacaatgccatgaaaacttcatatgagtgcaa

SEQ ID NO: 289832 - DNA, 33 bp, Homo sapien
atacaatgccatgaaagcttcatatgagtgcaa

SEQ ID NO: 289833 - DNA, 33 bp, Homo sapien
tttgtaaccccagcccagctgctttgtagacct

SEQ ID NO: 289834 - DNA, 33 bp, Homo sapien
tttgtaaccccagccccgctgctttgtagacct

SEQ ID NO: 289835 - DNA, 33 bp, Homo sapien
aaatgcaggtagttgaacctgagagatggtgcc

SEQ ID NO: 289836 - DNA, 33 bp, Homo sapien
aaatgcaggtagttgaccctgagagatggtgcc

SEQ ID NO: 289837 - DNA, 33 bp, Homo sapien
gatgggagctgttggaagcccagaatgttgctg

SEQ ID NO: 289838 - DNA, 33 bp, Homo sapien
gatgggagctgttggaggcccagaatgttgctg

SEQ ID NO: 289839 - DNA, 33 bp, Homo sapien
gggagtggagatgtcacagacagagtgatagag

SEQ ID NO: 289840 - DNA, 33 bp, Homo sapien
gggagtggagatgtcagagacagagtgatagag

SEQ ID NO: 289841 - DNA, 33 bp, Homo sapien
tcttcccttttttctcacagtacctcatcggtc

SEQ ID NO: 289842 - DNA, 33 bp, Homo sapien
tcttcccttttttctctcagtacctcatcggtc

SEQ ID NO: 289843 - DNA, 33 bp, Homo sapien
cattactggagaaacaacttttggatgagatgt

SEQ ID NO: 289844 - DNA, 33 bp, Homo sapien
cattactggagaaacatcttttggatgagatgt

SEQ ID NO: 289845 - DNA, 33 bp, Homo sapien
actgttggtattttcacgtgtgtctttccattc

SEQ ID NO: 289846 - DNA, 33 bp, Homo sapien
actgttggtattttcatgtgtgtctttccattc

SEQ ID NO: 289847 - DNA, 33 bp, Homo sapien
ttggacataaaacttaccctgaacagtaggctt

SEQ ID NO: 289848 - DNA, 33 bp, Homo sapien
ttggacataaaacttatcctgaacagtaggctt

SEQ ID NO: 289849 - DNA, 33 bp, Homo sapien
gccagcttgcagaggacatgagtttttgttagt

SEQ ID NO: 289850 - DNA, 33 bp, Homo sapien
gccagcttgcagaggatatgagtttttgttagt

SEQ ID NO: 289851 - DNA, 33 bp, Homo sapien; identical to SEQ ID NO: 289849

SEQ ID NO: 289852 - DNA, 33 bp, Homo sapien; identical to SEQ ID NO: 289850

SEQ ID NO: 289853 - DNA, 33 bp, Homo sapien; identical to SEQ ID NO: 289849

SEQ ID NO: 289854 - DNA, 33 bp, Homo sapien; identical to SEQ ID NO: 289850

SEQ ID NO: 289855 - DNA, 33 bp, Homo sapien
aggaacagccctgagaaagagaatgtgtgccta

SEQ ID NO: 289856 - DNA, 33 bp, Homo sapien
aggaacagccctgagacagagaatgtgtgccta

SEQ ID NO: 289857 - DNA, 33 bp, Homo sapien
ataaacaccagcttaaaaaaatcaaacttaata

SEQ ID NO: 289858 - DNA, 33 bp, Homo sapien
ataaacaccagcttaagaaaatcaaacttaata

SEQ ID NO: 289859 - DNA, 33 bp, Homo sapien
gactgtagagttctaaataaaaccacttctata

SEQ ID NO: 289860 - DNA, 33 bp, Homo sapien
gactgtagagttctaagtaaaaccacttctata

SEQ ID NO: 289861 - DNA, 33 bp, Homo sapien
atcttagctgaagggtcaaataaatgatttaaa

SEQ ID NO: 289862 - DNA, 33 bp, Homo sapien
atcttagctgaagggtgaaataaatgatttaaa

SEQ ID NO: 289863 - DNA, 33 bp, Homo sapien
gctatgtactgaaatgaaataagagtgatagta

SEQ ID NO: 289864 - DNA, 33 bp, Homo sapien
gctatgtactgaaatggaataagagtgatagta

SEQ ID NO: 289865 - DNA, 33 bp, Homo sapien
aatataaacaacaggacacaaagccttaagtca

SEQ ID NO: 289866 - DNA, 33 bp, Homo sapien
aatataaacaacaggatacaaagccttaagtca

SEQ ID NO: 289867 - DNA, 33 bp, Homo sapien
tagaagcagttcttcactagcctcctgacagga

SEQ ID NO: 289868 - DNA, 33 bp, Homo sapien
tagaagcagttcttcagtagcctcctgacagga

SEQ ID NO: 289869 - DNA, 33 bp, Homo sapien
ttatttggggctttagaacataatttgaggatc

SEQ ID NO: 289870 - DNA, 33 bp, Homo sapien
ttatttggggctttagcacataatttgaggatc

SEQ ID NO: 289871 - DNA, 33 bp, Homo sapien
ataggggcttgagaaaccacagtacttgtccac

SEQ ID NO: 289872 - DNA, 33 bp, Homo sapien
ataggggcttgagaaatcacagtacttgtccac

SEQ ID NO: 289873 - DNA, 33 bp, Homo sapien
tttataaacgtttgccaaatgattaccacatgt

SEQ ID NO: 289874 - DNA, 33 bp, Homo sapien
tttataaacgtttgccgaatgattaccacatgt

SEQ ID NO: 289875 - DNA, 33 bp, Homo sapien
tctggtcctagaagcaaaacccacttcctccca

SEQ ID NO: 289876 - DNA, 33 bp, Homo sapien
tctggtcctagaagcagaacccacttcctccca

SEQ ID NO: 289877 - DNA, 33 bp, Homo sapien
tctctatcacctccaccgaagattcacattctt

SEQ ID NO: 289878 - DNA, 33 bp, Homo sapien
tctctatcacctccactgaagattcacattctt

SEQ ID NO: 289879 - DNA, 33 bp, Homo sapien
ccctctgtcaactcacaaaggtgtccgtcctta

SEQ ID NO: 289880 - DNA, 33 bp, Homo sapien
ccctctgtcaactcacgaaggtgtccgtcctta

SEQ ID NO: 289881 - DNA, 33 bp, Homo sapien
tgtgagactagagggagaggtgcctgaaaagca

SEQ ID NO: 289882 - DNA, 33 bp, Homo sapien
tgtgagactagagggataggtgcctgaaaagca

SEQ ID NO: 289883 - DNA, 33 bp, Homo sapien
atggagaatacagaagcaggccctgtatccatg

SEQ ID NO: 289884 - DNA, 33 bp, Homo sapien
atggagaatacagaagtaggccctgtatccatg

SEQ ID NO: 289885 - DNA, 33 bp, Homo sapien
tttccctctcaccctccagtcggccttctctca

SEQ ID NO: 289886 - DNA, 33 bp, Homo sapien
tttccctctcaccctctagtcggccttctctca

SEQ ID NO: 289887 - DNA, 33 bp, Homo sapien
aaatgtctgaacaggcaaaacagacagaaagca

SEQ ID NO: 289888 - DNA, 33 bp, Homo sapien
aaatgtctgaacaggcgaaacagacagaaagca

SEQ ID NO: 289889 - DNA, 33 bp, Homo sapien
gaacagacaggaagaaagcggggtgaggctgta

SEQ ID NO: 289890 - DNA, 33 bp, Homo sapien
gaacagacaggaagaaggcggggtgaggctgta

SEQ ID NO: 289891 - DNA, 33 bp, Homo sapien
caaggttaccagcagaatcctcggaaaacaaga

SEQ ID NO: 289892 - DNA, 33 bp, Homo sapien
caaggttaccagcagagtcctcggaaaacaaga

SEQ ID NO: 289893 - DNA, 33 bp, Homo sapien
tgggtctgaaccttccgcatagaatcgcaagaa

SEQ ID NO: 289894 - DNA, 33 bp, Homo sapien
tgggtctgaaccttcctcatagaatcgcaagaa

SEQ ID NO: 289895 - DNA, 33 bp, Homo sapien
gtcaaagagggaaagacggaatagggcagcaac

SEQ ID NO: 289896 - DNA, 33 bp, Homo sapien
gtcaaagagggaaagatggaatagggcagcaac

SEQ ID NO: 289897 - DNA, 33 bp, Homo sapien
ctgtgaaagagggaaaagaagcaatgaaaagta

SEQ ID NO: 289898 - DNA, 33 bp, Homo sapien
ctgtgaaagagggaaacgaagcaatgaaaagta

SEQ ID NO: 289899 - DNA, 33 bp, Homo sapien
ctgctgtcacactaaccgtcatttgttctttta

SEQ ID NO: 289900 - DNA, 33 bp, Homo sapien
ctgctgtcacactaactgtcatttgttctttta

SEQ ID NO: 289901 - DNA, 33 bp, Homo sapien
agtggagcagggtaaaaagctcaaaagcaaatc

SEQ ID NO: 289902 - DNA, 33 bp, Homo sapien
agtggagcagggtaaagagctcaaaagcaaatc

SEQ ID NO: 289903 - DNA, 33 bp, Homo sapien
atacctttttggctgacatttggctgtaagtca

SEQ ID NO: 289904 - DNA, 33 bp, Homo sapien
atacctttttggctgatatttggctgtaagtca

SEQ ID NO: 289905 - DNA, 33 bp, Homo sapien
ggaacgattaggaaaacgaagctgaattcttct

SEQ ID NO: 289906 - DNA, 33 bp, Homo sapien
ggaacgattaggaaaatgaagctgaattcttct

SEQ ID NO: 289907 - DNA, 33 bp, Homo sapien
attttccgggtgcaacaagggccctcccaaagg

SEQ ID NO: 289908 - DNA, 33 bp, Homo sapien
attttccgggtgcaacgagggccctcccaaagg

SEQ ID NO: 289909 - DNA, 33 bp, Homo sapien
ttaacacagcggttcccaaacggtttggtctca

SEQ ID NO: 289910 - DNA, 33 bp, Homo sapien
ttaacacagcggttcctaaacggtttggtctca

SEQ ID NO: 289911 - DNA, 33 bp, Homo sapien
ggcgatgggcaagtgccagaccagcggttctca

SEQ ID NO: 289912 - DNA, 33 bp, Homo sapien
ggcgatgggcaagtgctagaccagcggttctca

SEQ ID NO: 289913 - DNA, 33 bp, Homo sapien
ggacctttgaaaatcccatcctccataaaatca

SEQ ID NO: 289914 - DNA, 33 bp, Homo sapien
ggacctttgaaaatcctatcctccataaaatca

SEQ ID NO: 289915 - DNA, 33 bp, Homo sapien
aaagaactcactcagaataaggatgaatgtgtg

SEQ ID NO: 289916 - DNA, 33 bp, Homo sapien
aaagaactcactcagagtaaggatgaatgtgtg

SEQ ID NO: 289917 - DNA, 33 bp, Homo sapien
actctgtccttgcaaagaactctccttagtgcc

SEQ ID NO: 289918 - DNA, 33 bp, Homo sapien
actctgtccttgcaaataactctccttagtgcc

SEQ ID NO: 289919 - DNA, 33 bp, Homo sapien
ttctagacgaatgaagcactcgtgccactcaaa

SEQ ID NO: 289920 - DNA, 33 bp, Homo sapien
ttctagacgaatgaagtactcgtgccactcaaa

SEQ ID NO: 289921 - DNA, 33 bp, Homo sapien
gtgtggaattaatgagcaattgtgtaacggcag

SEQ ID NO: 289922 - DNA, 33 bp, Homo sapien
gtgtggaattaatgaggaattgtgtaacggcag

SEQ ID NO: 289923 - DNA, 33 bp, Homo sapien
tcatacccaagtgaccgatatgaaaccacaaat

SEQ ID NO: 289924 - DNA, 33 bp, Homo sapien
tcatacccaagtgacctatatgaaaccacaaat

SEQ ID NO: 289925 - DNA, 33 bp, Homo sapien
tatgtgagtctatgtaggtgaagtacctagagt

SEQ ID NO: 289926 - DNA, 33 bp, Homo sapien
tatgtgagtctatgtatgtgaagtacctagagt

SEQ ID NO: 289927 - DNA, 33 bp, Homo sapien
aactggcaggaagaaacttgtccatcctccttt

SEQ ID NO: 289928 - DNA, 33 bp, Homo sapien
aactggcaggaagaaatttgtccatcctccttt

SEQ ID NO: 289929 - DNA, 33 bp, Homo sapien
cagatttgttaacttacgcttctgcagtttgga

SEQ ID NO: 289930 - DNA, 33 bp, Homo sapien
cagatttgttaacttatgcttctgcagtttgga

SEQ ID NO: 289931 - DNA, 33 bp, Homo sapien
ttcaagtgtactcttcaaggctgttttagtaca

SEQ ID NO: 289932 - DNA, 33 bp, Homo sapien
ttcaagtgtactcttcgaggctgttttagtaca

SEQ ID NO: 289933 - DNA, 33 bp, Homo sapien
ggaggcatcttagcgggatccaaaataacattc

SEQ ID NO: 289934 - DNA, 33 bp, Homo sapien
ggaggcatcttagcggtatccaaaataacattc

SEQ ID NO: 289935 - DNA, 33 bp, Homo sapien
ctttttatagatccaagttatcatctggggtta

SEQ ID NO: 289936 - DNA, 33 bp, Homo sapien
ctttttatagatccaatttatcatctggggtta

SEQ ID NO: 289937 - DNA, 33 bp, Homo sapien
caaggcatactgtgcacaacaaagttaataata

SEQ ID NO: 289938 - DNA, 33 bp, Homo sapien
caaggcatactgtgcataacaaagttaataata

SEQ ID NO: 289939 - DNA, 33 bp, Homo sapien
ttcagtttctaattgaacacttcagggctactt

SEQ ID NO: 289940 - DNA, 33 bp, Homo sapien
ttcagtttctaattgaccacttcagggctactt

SEQ ID NO: 289941 - DNA, 33 bp, Homo sapien
ccttcaattgcatggacgttgtacattttcttt

SEQ ID NO: 289942 - DNA, 33 bp, Homo sapien
ccttcaattgcatggatgttgtacattttcttt

SEQ ID NO: 289943 - DNA, 33 bp, Homo sapien
tgcatccagctttcaacagtcgattcttggttt

SEQ ID NO: 289944 - DNA, 33 bp, Homo sapien
tgcatccagctttcaatagtcgattcttggttt

SEQ ID NO: 289945 - DNA, 33 bp, Homo sapien
actgagggctggatccactttttcctgtaatgt

SEQ ID NO: 289946 - DNA, 33 bp, Homo sapien
actgagggctggatccgctttttcctgtaatgt

SEQ ID NO: 289947 - DNA, 33 bp, Homo sapien
caccaccacaggacggaacttgcctccttgtcg

SEQ ID NO: 289948 - DNA, 33 bp, Homo sapien
caccaccacaggacgggacttgcctccttgtcg

SEQ ID NO: 289949 - DNA, 33 bp, Homo sapien
tgggatgaagtgacaaccggcctgggctcctgg

SEQ ID NO: 289950 - DNA, 33 bp, Homo sapien
tgggatgaagtgacaatcggcctgggctcctgg

SEQ ID NO: 289951 - DNA, 33 bp, Homo sapien
ttgagttcttaatctcaaaacagtaccagaaag

SEQ ID NO: 289952 - DNA, 33 bp, Homo sapien
ttgagttcttaatctcgaaacagtaccagaaag

SEQ ID NO: 289953 - DNA, 33 bp, Homo sapien
aacaaagaggttaaaagtgagaacacaggattc

SEQ ID NO: 289954 - DNA, 33 bp, Homo sapien
aacaaagaggttaaaattgagaacacaggattc

SEQ ID NO: 289955 - DNA, 33 bp, Homo sapien
atactccacaccagaaaggtttcacttagcttt

SEQ ID NO: 289956 - DNA, 33 bp, Homo sapien
atactccacaccagaatggtttcacttagcttt

SEQ ID NO: 289957 - DNA, 33 bp, Homo sapien
gtttctccttgaagcacagactagaggagtcat

SEQ ID NO: 289958 - DNA, 33 bp, Homo sapien
gtttctccttgaagcatagactagaggagtcat

SEQ ID NO: 289959 - DNA, 33 bp, Homo sapien
tgggtaagctgttgaacggtaaggaattttcca

SEQ ID NO: 289960 - DNA, 33 bp, Homo sapien
tgggtaagctgttgaatggtaaggaattttcca

SEQ ID NO: 289961 - DNA, 33 bp, Homo sapien
agtgaccaaactaagcccctaagaacacagccc

SEQ ID NO: 289962 - DNA, 33 bp, Homo sapien
agtgaccaaactaagctcctaagaacacagccc

SEQ ID NO: 289963 - DNA, 33 bp, Homo sapien
gaagtccctgctgaaccaggagcttcatgctag

SEQ ID NO: 289964 - DNA, 33 bp, Homo sapien
gaagtccctgctgaactaggagcttcatgctag

SEQ ID NO: 289965 - DNA, 33 bp, Homo sapien
gaaggggagattcagacaattagtcatgaagtg

SEQ ID NO: 289966 - DNA, 33 bp, Homo sapien
gaaggggagattcagataattagtcatgaagtg

SEQ ID NO: 289967 - DNA, 33 bp, Homo sapien
ctggagcaagtcatcacgtgggcttcaatttca

SEQ ID NO: 289968 - DNA, 33 bp, Homo sapien
ctggagcaagtcatcatgtgggcttcaatttca

SEQ ID NO: 289969 - DNA, 33 bp, Homo sapien
catttcaggtataaaggcaggcgagacaggaag

SEQ ID NO: 289970 - DNA, 33 bp, Homo sapien
catttcaggtataaagtcaggcgagacaggaag

SEQ ID NO: 289971 - DNA, 33 bp, Homo sapien
gtgcatgactaagccacgaaggtctgatttgac

SEQ ID NO: 289972 - DNA, 33 bp, Homo sapien
gtgcatgactaagccatgaaggtctgatttgac

SEQ ID NO: 289973 - DNA, 33 bp, Homo sapien
ataggacagttcacaaccaaacattgatgtgag

SEQ ID NO: 289974 - DNA, 33 bp, Homo sapien
ataggacagttcacaagcaaacattgatgtgag

SEQ ID NO: 289975 - DNA, 33 bp, Homo sapien
cagggggtcaagtgcccattatccaggtaagca

SEQ ID NO: 289976 - DNA, 33 bp, Homo sapien
cagggggtcaagtgcctattatccaggtaagca

SEQ ID NO: 289977 - DNA, 33 bp, Homo sapien
ggaacagctgtcgctaccatgggaaaattcccc

SEQ ID NO: 289978 - DNA, 33 bp, Homo sapien
ggaacagctgtcgctagcatgggaaaattcccc

SEQ ID NO: 289979 - DNA, 33 bp, Homo sapien
gctggctctaggtgccactttctataccgcagt

SEQ ID NO: 289980 - DNA, 33 bp, Homo sapien
gctggctctaggtgccgctttctataccgcagt

SEQ ID NO: 289981 - DNA, 33 bp, Homo sapien
gctggaactggattgtaaaaagcaaataagaac

SEQ ID NO: 289982 - DNA, 33 bp, Homo sapien
gctggaactggattgtgaaaagcaaataagaac

SEQ ID NO: 289983 - DNA, 33 bp, Homo sapien
attgcctcatcccgaactctcaagccctgaaat

SEQ ID NO: 289984 - DNA, 33 bp, Homo sapien
attgcctcatcccgaattctcaagccctgaaat

SEQ ID NO: 289985 - DNA, 33 bp, Homo sapien
tttacagctaagcaagaaccacagaaatgaaat

SEQ ID NO: 289986 - DNA, 33 bp, Homo sapien
tttacagctaagcaaggaccacagaaatgaaat

SEQ ID NO: 289987 - DNA, 33 bp, Homo sapien
tggaagccgatccaaactgtccccttcacacag

SEQ ID NO: 289988 - DNA, 33 bp, Homo sapien
tggaagccgatccaaattgtccccttcacacag

SEQ ID NO: 289989 - DNA, 33 bp, Homo sapien
tcacctgtccctggcccgagcagtttagagtga

SEQ ID NO: 289990 - DNA, 33 bp, Homo sapien
tcacctgtccctggcctgagcagtttagagtga

SEQ ID NO: 289991 - DNA, 33 bp, Homo sapien
gaagaaagctaggtacaaggtcctttgatgaca

SEQ ID NO: 289992 - DNA, 33 bp, Homo sapien
gaagaaagctaggtacgaggtcctttgatgaca

SEQ ID NO: 289993 - DNA, 33 bp, Homo sapien
tcattttttcatatgcagcaaatgtgccctccc

SEQ ID NO: 289994 - DNA, 33 bp, Homo sapien
tcattttttcatatgcggcaaatgtgccctccc

SEQ ID NO: 289995 - DNA, 33 bp, Homo sapien
tgacacattttctgtcccagaacaacacagtga

SEQ ID NO: 289996 - DNA, 33 bp, Homo sapien
tgacacattttctgtctcagaacaacacagtga

SEQ ID NO: 289997 - DNA, 33 bp, Homo sapien
atgtacaccagatctacggcttggagaccaaag

SEQ ID NO: 289998 - DNA, 33 bp, Homo sapien
atgtacaccagatctatggcttggagaccaaag

SEQ ID NO: 289999 - DNA, 33 bp, Homo sapien
cattgtacgtgcataagtcattgattttttagt

SEQ ID NO: 290000 - DNA, 33 bp, Homo sapien
cattgtacgtgcataattcattgattttttagt

SEQ ID NO: 290001 - DNA, 33 bp, Homo sapien
catgcttactttaaacactgatccgagagacca

SEQ ID NO: 290002 - DNA, 33 bp, Homo sapien
catgcttactttaaacgctgatccgagagacca

SEQ ID NO: 290003 - DNA, 33 bp, Homo sapien
aaatgactattacttaagaactagaacgtttgc

SEQ ID NO: 290004 - DNA, 33 bp, Homo sapien
aaatgactattacttacgaactagaacgtttgc

SEQ ID NO: 290005 - DNA, 33 bp, Homo sapien
acctcgtaggtaaggaagagccgtatcccagga

SEQ ID NO: 290006 - DNA, 33 bp, Homo sapien
acctcgtaggtaaggaggagccgtatcccagga

SEQ ID NO: 290007 - DNA, 33 bp, Homo sapien
gacaatagtaatcacacctatgggaaattgtca

SEQ ID NO: 290008 - DNA, 33 bp, Homo sapien
gacaatagtaatcacatctatgggaaattgtca

SEQ ID NO: 290009 - DNA, 33 bp, Homo sapien
agttagattggggtgaaggctgcccataggaag

SEQ ID NO: 290010 - DNA, 33 bp, Homo sapien
agttagattggggtgagggctgcccataggaag

SEQ ID NO: 290011 - DNA, 33 bp, Homo sapien
aaccttccttttaagtcaagcattccccattgg

SEQ ID NO: 290012 - DNA, 33 bp, Homo sapien
aaccttccttttaagtgaagcattccccattgg

SEQ ID NO: 290013 - DNA, 33 bp, Homo sapien
ttagtgcaggagcctcaatttcataacaagaaa

SEQ ID NO: 290014 - DNA, 33 bp, Homo sapien
ttagtgcaggagcctcgatttcataacaagaaa

SEQ ID NO: 290015 - DNA, 33 bp, Homo sapien
cagaaatacatagtgaaaagccagggtcgtgga

SEQ ID NO: 290016 - DNA, 33 bp, Homo sapien
cagaaatacatagtgagaagccagggtcgtgga

SEQ ID NO: 290017 - DNA, 33 bp, Homo sapien
aatttgatagctgcctaaatttcaaggtctcct

SEQ ID NO: 290018 - DNA, 33 bp, Homo sapien
aatttgatagctgcctgaatttcaaggtctcct

SEQ ID NO: 290019 - DNA, 33 bp, Homo sapien
aacaatcatctccttacacctcttcctgccgct

SEQ ID NO: 290020 - DNA, 33 bp, Homo sapien
aacaatcatctccttatacctcttcctgccgct

SEQ ID NO: 290021 - DNA, 33 bp, Homo sapien
gccatgtaaaccagtacatcaaccagtgagtca

SEQ ID NO: 290022 - DNA, 33 bp, Homo sapien
gccatgtaaaccagtatatcaaccagtgagtca

SEQ ID NO: 290023 - DNA, 33 bp, Homo sapien
cacacaaagacacacacatagacacaaagacac

SEQ ID NO: 290024 - DNA, 33 bp, Homo sapien
cacacaaagacacacatatagacacaaagacac

SEQ ID NO: 290025 - DNA, 33 bp, Homo sapien
acagcatagtcaacaacatgaatggtgccttgg

SEQ ID NO: 290026 - DNA, 33 bp, Homo sapien
acagcatagtcaacaatatgaatggtgccttgg

SEQ ID NO: 290027 - DNA, 33 bp, Homo sapien
gccagtcacaataaaacggataaatactgtatg

SEQ ID NO: 290028 - DNA, 33 bp, Homo sapien
gccagtcacaataaaatggataaatactgtatg

SEQ ID NO: 290029 - DNA, 33 bp, Homo sapien
caaatatttgcctttaagtgaagctggaagagg

SEQ ID NO: 290030 - DNA, 33 bp, Homo sapien
caaatatttgcctttaggtgaagctggaagagg

SEQ ID NO: 290031 - DNA, 33 bp, Homo sapien
ggattgggaagaaagacgcataatatgaatatc

SEQ ID NO: 290032 - DNA, 33 bp, Homo sapien
ggattgggaagaaagaggcataatatgaatatc

SEQ ID NO: 290033 - DNA, 33 bp, Homo sapien
atgaatggaagtgggaagttttctggtgtgttt

SEQ ID NO: 290034 - DNA, 33 bp, Homo sapien
atgaatggaagtgggaggttttctggtgtgttt

SEQ ID NO: 290035 - DNA, 33 bp, Homo sapien
cataggaaggcttataaattaatgcttaatggc

SEQ ID NO: 290036 - DNA, 33 bp, Homo sapien
cataggaaggcttatacattaatgcttaatggc

SEQ ID NO: 290037 - DNA, 33 bp, Homo sapien
agtggcattgcttataataaaagattggaaaca

SEQ ID NO: 290038 - DNA, 33 bp, Homo sapien
agtggcattgcttatagtaaaagattggaaaca

SEQ ID NO: 290039 - DNA, 33 bp, Homo sapien
agggacataaaaactccagttgtgctaatgtca

SEQ ID NO: 290040 - DNA, 33 bp, Homo sapien
agggacataaaaactctagttgtgctaatgtca

SEQ ID NO: 290041 - DNA, 33 bp, Homo sapien
acatcagagtaaagtacgggacgtggcaaagtg

SEQ ID NO: 290042 - DNA, 33 bp, Homo sapien
acatcagagtaaagtatgggacgtggcaaagtg

SEQ ID NO: 290043 - DNA, 33 bp, Homo sapien
taaaatgatgtgtccacgtcctggaacctgtga

SEQ ID NO: 290044 - DNA, 33 bp, Homo sapien
taaaatgatgtgtccatgtcctggaacctgtga

SEQ ID NO: 290045 - DNA, 33 bp, Homo sapien
aaaaaaaaaaagtacaatgaagctaggtgtggt

SEQ ID NO: 290046 - DNA, 33 bp, Homo sapien
aaaaaaaaaaagtacagtgaagctaggtgtggt

SEQ ID NO: 290047 - DNA, 33 bp, Homo sapien
gctctgttacaatgcacgatgaaataccgtgtc

SEQ ID NO: 290048 - DNA, 33 bp, Homo sapien
gctctgttacaatgcatgatgaaataccgtgtc

SEQ ID NO: 290049 - DNA, 33 bp, Homo sapien
gaaaggatttttttccagccactgcaaacagga

SEQ ID NO: 290050 - DNA, 33 bp, Homo sapien
gaaaggatttttttccggccactgcaaacagga

SEQ ID NO: 290051 - DNA, 33 bp, Homo sapien
tgaaggaaaacgtttgaagaagtctgctaattt

SEQ ID NO: 290052 - DNA, 33 bp, Homo sapien
tgaaggaaaacgtttgtagaagtctgctaattt

SEQ ID NO: 290053 - DNA, 33 bp, Homo sapien
ggatagagcagggtcaaaaatgtcacagaccac

SEQ ID NO: 290054 - DNA, 33 bp, Homo sapien
ggatagagcagggtcagaaatgtcacagaccac

SEQ ID NO: 290055 - DNA, 33 bp, Homo sapien
gaaaagtctacctgtacatcagaattcaatcat

SEQ ID NO: 290056 - DNA, 33 bp, Homo sapien
gaaaagtctacctgtagatcagaattcaatcat

SEQ ID NO: 290057 - DNA, 33 bp, Homo sapien
aagactcaacacagtgaaaaatgtcaattcttc

SEQ ID NO: 290058 - DNA, 33 bp, Homo sapien
aagactcaacacagtggaaaatgtcaattcttc

SEQ ID NO: 290059 - DNA, 33 bp, Homo sapien
tggaagaacagaatacaagtacagttatgctcc

SEQ ID NO: 290060 - DNA, 33 bp, Homo sapien
tggaagaacagaatacgagtacagttatgctcc

SEQ ID NO: 290061 - DNA, 33 bp, Homo sapien
gacctctcatctatacagacttaaatgtaatac

SEQ ID NO: 290062 - DNA, 33 bp, Homo sapien
gacctctcatctatacggacttaaatgtaatac

SEQ ID NO: 290063 - DNA, 33 bp, Homo sapien
cctcctttctttcacacgagttttctttccaaa

SEQ ID NO: 290064 - DNA, 33 bp, Homo sapien
cctcctttctttcacatgagttttctttccaaa

SEQ ID NO: 290065 - DNA, 33 bp, Homo sapien
tggattcatagctcgccacaccctcaaacttct

SEQ ID NO: 290066 - DNA, 33 bp, Homo sapien
tggattcatagctcgctacaccctcaaacttct

SEQ ID NO: 290067 - DNA, 33 bp, Homo sapien
gattagaatgccacaactgatagaaaatatatt

SEQ ID NO: 290068 - DNA, 33 bp, Homo sapien
gattagaatgccacaattgatagaaaatatatt

SEQ ID NO: 290069 - DNA, 33 bp, Homo sapien
ctggttgagttggtacaggcagccatgtcagca

SEQ ID NO: 290070 - DNA, 33 bp, Homo sapien
ctggttgagttggtacgggcagccatgtcagca

SEQ ID NO: 290071 - DNA, 33 bp, Homo sapien
ggcctgagttttctaaagctacaccatctatgc

SEQ ID NO: 290072 - DNA, 33 bp, Homo sapien
ggcctgagttttctaatgctacaccatctatgc

SEQ ID NO: 290073 - DNA, 33 bp, Homo sapien
tgaatagctatcttacagagacaccttagaagc

SEQ ID NO: 290074 - DNA, 33 bp, Homo sapien
tgaatagctatcttacggagacaccttagaagc

SEQ ID NO: 290075 - DNA, 33 bp, Homo sapien
cttttctacagcataactcaaatattttgggaa

SEQ ID NO: 290076 - DNA, 33 bp, Homo sapien
cttttctacagcataattcaaatattttgggaa

SEQ ID NO: 290077 - DNA, 33 bp, Homo sapien
tattaattagtcatgacacattttcaactatta

SEQ ID NO: 290078 - DNA, 33 bp, Homo sapien
tattaattagtcatgagacattttcaactatta

SEQ ID NO: 290079 - DNA, 33 bp, Homo sapien
ctgtcgtgtgctgagacgcacttccaacagctt

SEQ ID NO: 290080 - DNA, 33 bp, Homo sapien
ctgtcgtgtgctgagatgcacttccaacagctt

SEQ ID NO: 290081 - DNA, 33 bp, Homo sapien
atttataaggtgtttacgggtgaccttactggc

SEQ ID NO: 290082 - DNA, 33 bp, Homo sapien
atttataaggtgtttatgggtgaccttactggc

SEQ ID NO: 290083 - DNA, 33 bp, Homo sapien
ctcactggcttctagaatcagcatgaaaatggg

SEQ ID NO: 290084 - DNA, 33 bp, Homo sapien
ctcactggcttctagagtcagcatgaaaatggg

SEQ ID NO: 290085 - DNA, 33 bp, Homo sapien
tgtaaatgcttatctgaaaactataacctgcag

SEQ ID NO: 290086 - DNA, 33 bp, Homo sapien
tgtaaatgcttatctggaaactataacctgcag

SEQ ID NO: 290087 - DNA, 33 bp, Homo sapien
gatattctttccctatgaaattgcttcctcatc

SEQ ID NO: 290088 - DNA, 33 bp, Homo sapien
gatattctttccctattaaattgcttcctcatc

SEQ ID NO: 290089 - DNA, 33 bp, Homo sapien
atttttaaatgaaaaacatgatactctctgacc

SEQ ID NO: 290090 - DNA, 33 bp, Homo sapien
atttttaaatgaaaaagatgatactctctgacc

SEQ ID NO: 290091 - DNA, 33 bp, Homo sapien
tagaatgtcatgtccacgttcggcctgaaattg

SEQ ID NO: 290092 - DNA, 33 bp, Homo sapien
tagaatgtcatgtccatgttcggcctgaaattg

SEQ ID NO: 290093 - DNA, 33 bp, Homo sapien
accatttttcactatcacacaaagatcaaaagg

SEQ ID NO: 290094 - DNA, 33 bp, Homo sapien
accatttttcactatcgcacaaagatcaaaagg

SEQ ID NO: 290095 - DNA, 33 bp, Homo sapien
aagggcatggactaaaaggcagggttaatgtat

SEQ ID NO: 290096 - DNA, 33 bp, Homo sapien
aagggcatggactaaacggcagggttaatgtat

SEQ ID NO: 290097 - DNA, 33 bp, Homo sapien
gagtgtatagccttcacagaatttcaacaattg

SEQ ID NO: 290098 - DNA, 33 bp, Homo sapien
gagtgtatagccttcatagaatttcaacaattg

SEQ ID NO: 290099 - DNA, 33 bp, Homo sapien
atgtacttatatgggcactggtcatagaaagag

SEQ ID NO: 290100 - DNA, 33 bp, Homo sapien
atgtacttatatgggcgctggtcatagaaagag

SEQ ID NO: 290101 - DNA, 33 bp, Homo sapien
tcagaaacctctagcacaattaaaatttctgtc

SEQ ID NO: 290102 - DNA, 33 bp, Homo sapien
tcagaaacctctagcataattaaaatttctgtc

SEQ ID NO: 290103 - DNA, 33 bp, Homo sapien
tgagcatttctgttccggactcaagagatgcta

SEQ ID NO: 290104 - DNA, 33 bp, Homo sapien
tgagcatttctgttcctgactcaagagatgcta

SEQ ID NO: 290105 - DNA, 33 bp, Homo sapien
catgtcaggaaacccacagtaagacgagaagaa

SEQ ID NO: 290106 - DNA, 33 bp, Homo sapien
catgtcaggaaacccatagtaagacgagaagaa

SEQ ID NO: 290107 - DNA, 33 bp, Homo sapien
ccttcctcctcacaacgaactcttaccttctta

SEQ ID NO: 290108 - DNA, 33 bp, Homo sapien
ccttcctcctcacaactaactcttaccttctta

SEQ ID NO: 290109 - DNA, 33 bp, Homo sapien
cgttcacaacattcaaacttagagcctctactg

SEQ ID NO: 290110 - DNA, 33 bp, Homo sapien
cgttcacaacattcaagcttagagcctctactg

SEQ ID NO: 290111 - DNA, 33 bp, Homo sapien
catctagacctgtaacaagtacaagtgacttgc

SEQ ID NO: 290112 - DNA, 33 bp, Homo sapien
catctagacctgtaacgagtacaagtgacttgc

SEQ ID NO: 290113 - DNA, 33 bp, Homo sapien
tattttgatcctactagaagagctgagggaaag

SEQ ID NO: 290114 - DNA, 33 bp, Homo sapien
tattttgatcctactataagagctgagggaaag

SEQ ID NO: 290115 - DNA, 33 bp, Homo sapien
ccattcaccattgccactggagaattgatttct

SEQ ID NO: 290116 - DNA, 33 bp, Homo sapien
ccattcaccattgccattggagaattgatttct

SEQ ID NO: 290117 - DNA, 33 bp, Homo sapien
cgtgttatgggagggacgcagtaagaggtgact

SEQ ID NO: 290118 - DNA, 33 bp, Homo sapien
cgtgttatgggagggatgcagtaagaggtgact

SEQ ID NO: 290119 - DNA, 33 bp, Homo sapien
gggggacaaggatgaaagctgtgtcagtgaagg

SEQ ID NO: 290120 - DNA, 33 bp, Homo sapien
gggggacaaggatgaaggctgtgtcagtgaagg

SEQ ID NO: 290121 - DNA, 33 bp, Homo sapien
ttcttctttctcctccgcagttctctctttgca

SEQ ID NO: 290122 - DNA, 33 bp, Homo sapien
ttcttctttctcctcctcagttctctctttgca

SEQ ID NO: 290123 - DNA, 33 bp, Homo sapien
gacaaaccatgatagcaaacaaatgaaaagaaa

SEQ ID NO: 290124 - DNA, 33 bp, Homo sapien
gacaaaccatgatagcgaacaaatgaaaagaaa

SEQ ID NO: 290125 - DNA, 33 bp, Homo sapien
cttatagtccacttagacaatagatgtattctg

SEQ ID NO: 290126 - DNA, 33 bp, Homo sapien
cttatagtccacttaggcaatagatgtattctg

SEQ ID NO: 290127 - DNA, 33 bp, Homo sapien
cctcggctgttttaggcccacagtatcacctat

SEQ ID NO: 290128 - DNA, 33 bp, Homo sapien
cctcggctgttttagggccacagtatcacctat

SEQ ID NO: 290129 - DNA, 33 bp, Homo sapien
tgaactcatatctgcacagcttgtatgtaatgt

SEQ ID NO: 290130 - DNA, 33 bp, Homo sapien
tgaactcatatctgcagagcttgtatgtaatgt

SEQ ID NO: 290131 - DNA, 33 bp, Homo sapien
gtggtcctgttacaacaaatacagattgattcc

SEQ ID NO: 290132 - DNA, 33 bp, Homo sapien
gtggtcctgttacaaccaatacagattgattcc
